United States Patent Application Publication US 2004/0214272 A1 - sequence listing, part 20

SEQ ID NO: 82193 - DNA, 1168 bp, Zea mays
  Clone ID: MRT4577_174976C.1
ctctctctcgctcatcacatccaccgccgtagacgatggagatggacccttcgtcgacctctcagttcgtgtagaagttcgtttcgttatgcttgtttcgatttgtttttgtttttttcccttctgtcgcctcttctttcggcttcaagagaacaatccactcttggcggccttgttctgggggcgtagaacgaacttcgcgccgcgggtgctcagctcaaggatctgggtgccgtgtcatcggcgataggttcctcagccctgcggcgcacacagatttgcaccgagcaatcttccggcgctctccctgtcggtttgattcttgcttcccgtctgccaccgcacatcgtgccgatgcacgccgccacccgtttcgttgcgtttgaagctgtcgatagaagcggcttcgctctgtagccctgcaaagtggattggcgagcatggccgccgaagtttgcctgcggaattagtgatcgtgctgtcgattttttttgtgacaagggtcgtgccgatcgtgcaggcgattttgcagtcatctgctgatttgcagtaccacaaacaatgctgccttcaaacaaaataaatgattgaacgggcgaacagccacaaatgattcaacgggcgaacatcattgtggatttctgaacacacaaattattaactttcaaagtatgattttatatataaaaaggtagctgacgtcgtttggtttaggtttagaaactatcaaacgataagacgaacatattaaacccaattagttccatgatttgcttaaggcctgtttggttacttttagtttagggattaaagtttagttatgagactaaaatttagtcacttctatgtttggttttagagagaaagtatttgaaatacattaaataaattataagagaaccaaaatatccttaatcatttttatgtcattagtgcaattaaaataaagaagagaacatggaatttatatggtttagtcttttttagtcacctcttgaatgattacagactaaaacattttagctcttgttttagtcctaccgtttagtaatttagggactaaatgaggctaaaatgaagagactaatctttagtccctcaaaccaaacgagatcttagttgtatgatttgcttatgtgatgttacagtaaatatttgttaaaacaac

SEQ ID NO: 82194 - DNA, 360 bp, Zea mays
  Clone ID: MRT4577_174977C.1
ccttggggtttttttttttttttttttttttttttttggggtttttttttttttttttttttttttttggggttccaaggacggatttattcaaaaaagggaggagcttttggaaaaaacaaatgggtggggccacgggttgggattatttacgggacccgagggggaaaaaagcccatacgggcaagggggcggcccaaattaaaaaaagaaagggccggggcacctagtataaaatggaaaacgggtttggggaaaagaaaaagcatacgtttttaccattggaaacccatcccaaaaaaacacaaggccaaagtggaacccaaaaagaagtgggcggaaacacccctttaaacaaat

SEQ ID NO: 82195 - DNA, 1746 bp, Zea mays
  Clone ID: MRT4577_174978C.1
cccacgcgtccgctcgtctggatctctctcactcctttcgcgcacaaggttttcaatggcattgaccggtagaacacgtgcccggacgccaattatctcgccctttcagatttgagaacaacaaggaggaaaagtaaacgcaagttcaggaaaggggagcctcaaaaggagagggagagtgagagggaggggaagtgcgctgcagtgctgcgcagctgcgctggggagaagagaagaaggtgccaaccacttcccaaggagaccgccagctctgctgctgcacgaccgaccagcccgtccactcgcctcgccttcctccgagccccggcgaggaagaggaacccggcgccgccggacgcacttccgatggcgacgccacggaagccgatcaagctcacgctgccgtcccacgagaccaccatcggcaagttcctgacgcacagcgggacgttcacggacggggatctgcgcgtcaacaaggacggcctccgcatcgtctcgcggagggagggaggcgaggctcctcctatagagccgttggatagtcaactgagcttagatgatctagacgttataaaagtgatcgggaaaggtagcagcggaaatgtgcaattggtccgccacaaatttactggccagttttttgctctgaaggttattcaactaaatattgatgagagtatacgcaaacagattgccaaggagttgaagataaacttatcaacacagtgccaatatgttgttgtgttctatcagtgtttctatttcaatggtgccatttctattgttttggaatacatggatggtggctcccttgcagatttcctgaagactgttaaaaccattccagaggcctacctcgctgctatctgtacgcagatgctaaaaggactgatctatttgcataacgagaagcgcgttatacaccgagatctgaaaccatcaaatatattgataaatcataggggtgaagtaaaaatatcagattttggtgtgagtgccattatatctagttcctcttcgcaacgagatacatttattggcacacgcaactacatggcgccagaaagaatcgatggaaagaaacatggttctatgagtgatatctggagtttgggactagtgatactggaatgtgcaaccggcatctttccatttcctccttgtgaaagcttctacgaacttctcgtggctgttgttgatcaaccgccaccttctgcgccgccggatcagttttcaccagaattctgtgggttcatttctgcatgtctccagaaggatgctaatgacaggtcatcagcccaagccttattggaccatccgttcctgagcatgtatgatgacctgcatgtagatcttgcttcgtacttcacgacagcaggatctcctctcgccaccttcaattccaggcaactctaatttttttgtcctccttattacgcgaacggtgtggcgacaaatttctctttttggacaaggcttggattgtgtactgagctgtaatgatcttgtgtgtgtcaggtcggtgattggctccatcactttacatatatgacatacatgtacagccttttaggataaaaatgagcactgaagttttgcctatctgtatatcggcagcaaacgtttggtcatgtttgtttcaccttgtaatgtattgactcagatatgggattggtcattgtctcatttggtgtatgagtcaagtccagattttcttgtaaaaaaaaaaaaaaaaaagcggcc

SEQ ID NO: 82196 - DNA, 608 bp, Zea mays
  Clone ID: MRT4577_174979C.1
ttccctttcccccttggaaagtttttccgaattttttgggggggttgttgatcaaccccccccttttgcgccccgggatcagttttcaccagaattctgtgggttcatttctgcatgtctccagaaggatgctaatgacaggtcatcagcccaacccttattggaccatccgttcctgagcatgtatgatgacctgcatgtagatcttgcttcgtacttcacgacagcaggatctcctctcgcccccttcaagtaatgacagcgcccttgttctttttctgtatccatttttgcgcacaggagtgatacattttttttttcagttccaggcaactctaatttttttgtcctccttattacgcgaacggtgtggcgacaaatttttctttttggacaaggcttggattgtgtactgagctgtaatgatcttgtgtgtgtcaggtcggtgattggctccatccctttacatatatgacatacatgtacagccttttaggataaaaatgagcactgaagttttgcctatctgtatatcggcagcaaacgtttggtcatgtttgtttccccttgtaatgtattgactcaaatatgggattggtcattgtctc

SEQ ID NO: 82197 - DNA, 451 bp, Zea mays
  unsure (1)..(451): unsure at all n locations
  Clone ID: MRT4577_17497C.1
ccgggaccttccttcccagtcccccaccacttgtctcactgccgccatggcgtcctgaggggggccggccgcgaacaaccccacctcgggagcgggggggcccgccctcgcctcccgtgcctctccatctccctccgccgccgcgcgggctctgcctctaagcccacctccctttcccactccctcccctccaagcactcgctgggcccgcggggggcggcatcctcatcctcccgtcncgggctcacccccntacccacctccggctccgccggcgcgggtccagcgccggatccagtgccggttccaggaccgggtccagggcgggctccagcaccgggcgccccgccgaataaacccgggggggggggcgcgggcatcaaggcggtcctggcctccatcgcgactggcgggctcatctgggctatcccggcccccgggcgggggcccc

SEQ ID NO: 82198 - DNA, 277 bp, Zea mays
  Clone ID: MRT4577_174980C.1
cccacacttcagcggacgcctgggtgcacccaggcggcgcgcctccttgcgctgcagtgagtctgagagcccccgtcctgcatctgtcggcgatgaacagctctcggcgacaggaccaccgatagctgcaattccgtctctgctgccgctggtggtggccacggcgatgacgttctccgccgccgctgctcgcatccccgtcgtgtacggcagcggtagctggcatatcgcgcatgccatctactacggcggcagctacacctcttgcaccatgggc

SEQ ID NO: 82199 - DNA, 1100 bp, Zea mays
  Clone ID: MRT4577_174981C.1
gctctatctgaatcattgaagtagccacaataattacagagtctgtatctcatataggcccgattctgaattgaagtaaagcaatccacatttgtacataatgcaaactaattaaacattggggaacggaggcacgctgcacccactataaataaaagccgccgaccaccgccagccagccagccagagcctccagcagtcagtcggccggcgatacatatatatactagagtcatggagacgatggcggcgaggtacggcggcggggagatcagggacctgcagagcaagcaggaggcggggggcgggtgcgggagctacttccagatgccgctgcactacccgaggcacagccgggaggactacgaggccatgcccgagtggcagctcgaccgcctcctctccgagtacggcctgcccgtcgccggcacagtccaccagaagcgcaccttcgccatgggcaccttcctctggggcgccggcggcaatatccactgagctccaggtcttgtttgctgtgacatgcttgacataacgagcttgtatgattgtatcccaattcccaccgaatcgccgtccgtgtgctctttctattttctctccgtctctcgctcttgctcgctgtcacttctcacctgtgcccgctgtcgccgccatgccccttctccgtgccaccacccgcgctttccgcgtgccgccgtccataggcggatccaggattgatctaaaaggggctactaagctaaggctgtcacatttcatcattttcatctccattccgcatgtacgattgctagggcaaattaaaccacagcttaacgatacggtcgcggagctcgtaggtgagcatgatgacaccactgcgggcgagcgcgctgcggcctgcggctccgggcgagcgctgcggcggcctgcggctccgggcctccggcgctacgcgactggcacctggtggtggcgagcgacggggcgagcgcgctgtggccgctgtgggcggctgtgcctggcggcggcctggcgggcgagcgcactggtctggagcctggacgaaagttgaaggaaggaggtggccaggcgggtagagagaggcagggagcggc

SEQ ID NO: 82200 - DNA, 374 bp, Zea mays
  Clone ID: MRT4577_174982C.1
caagacaaagtgactgacatttatagattaatatagaagaggtacaggctcaagaaaattattcagattacgaacttgggggaatataaagcaaaccagcctggatgaactggttacactacgcatgccgatatgcggccatttccgacctaataagaaacacggaccacactatacggacaatgcacaacgaaagccggcgcatccatgtttattttgttgggcagacctagtaacaactagataatacacacgacagcagctgaatagtgtatgctgaatacccatatattgattcgttcagcactgactgccgtacgttagaaaactcgcggtgccatttttttagctgtacgaggctgcagctgccgcgt

SEQ ID NO: 82201 - DNA, 844 bp, Zea mays
  unsure (1)..(844): unsure at all n locations
  Clone ID: MRT4577_174983C.1
agctgtcgcgcgtcccctgcgtctccaagccatggagctccttccccaacctctgtcttcctccctacgcgtgccgcgcccatggcttggacccagctcggcgccctcccaactcctagcttctctcctctgctcaccgtgccctttgctcctctcatccggcctcagctcggccttatctcctggttgttgtataccgctccgctggtggccgccgttaagctggagcaccgcctcgagcacccgttgcctcgtgctcttttcgcccagcgagtcacgcccaggctccacagagcccttcccctggtcgcctgcttccctactgtcgtgtccctggctaggctctgctcgccgtgtgccctgctcgctccgcgtgcctggcagccgctcgtctctgctcgccatggctgccgtgcacgctgctccccgagctcgcccagcgctcggcttcttatccctggactctcgagctgcacccctgtttccctgcgctcaacgcgtcctgctcatccatggcgtccatctctctagccacgatctccctgctcggctccttcctccactgctccctccaatggcgtgcccttcttctctggtctccaatgcccagcgccgcgcctactccctctgcgcgccgagcctctttccagtcgtgtgcccagtccccaactccttccctgtggcgccctgctccctttgctcgtctccatggctacgccgcagaccgtgatgccccagctcggatctccctgctcgccctaangnntcgccggngttgctcccccctccagctcgntcgacgcgctgctccctgcgggccgggcctcaagttcctgtgcgcgcg

SEQ ID NO: 82202 - DNA, 231 bp, Zea mays
  Clone ID: MRT4577_174984C.1
ctacctcatataatctatccattgggcgggacggggtcgtaatcctgcactgaaccagggcacgagacaagcggcatgtcgtgggctgccagctgcagagatacggatgcttacctggcgtcgtcgagcccacaaaacctcgccgaagagacggaggccggtgcacggcagacctagccacttcactgcctagtggacatgacgtctcgtgccgagccaggcttgtgcgta

SEQ ID NO: 82203 - DNA, 497 bp, Zea mays
  unsure (1)..(497): unsure at all n locations
  Clone ID: MRT4577_174985C.1
gtagctagagtaggcacatctcgcagttgctagggaaggcatgaccagtcgtcccatgattgttaggggtatgacctaaggnaataaggaatnagagtaattatcacatgtagcacttgtgtgtaactgtcactattaggtctgcaagtaattatcgttccacatatagacaagcgtttaagcggctctgttaatttgccccatatccctatttctaaaagaacgtgtgcatgcttggcagatgcccaccatgatgaggaggcacgagaagatggaacttgactacatgaatgctgatgctctcaagaaaatgaacaagaacaagtagcttgctaagaggttagccaatatgtaccatgctttcttggcgtgagaagacatgatcatacacatatcctcgaactacttagacctggtctcaacaaggcagacaagctaccgaccctggatactcaccagataattcgtagagtgcaaggtgaacaagactaaggcaa

SEQ ID NO: 82204 - DNA, 314 bp, Zea mays
  Clone ID: MRT4577_174986C.1
ctctctagacatatctggcgacgtggacttcttgaatcgacttactgacaacgcaggcgcgcaccttttcacgaggcgtgaacccccgcctggtcggtctatggataggagttaagctacttaactaactaccgtgttgcgatgaacgcgtggcatataatacgacctatgtcttgtgacactgagcgccatctaccgtcacatgtagtttcgccagacgtggactacgtggatacccattccggacagccgtcagaagtgatgcaccggacgagagccgtgagctttcttgaacgatgcacgctcatcttgta

SEQ ID NO: 82205 - DNA, 122 bp, Zea mays
  Clone ID: MRT4577_174987C.1
ccagtattgtgcgagatgaaggtactcagaaccacccaacacgtagtagtccccaagggggtcactgttaccgccaactccagaactgtcactgttaccggcaaacgcggtaacctgacacg

SEQ ID NO: 82206 - DNA, 748 bp, Zea mays
  Clone ID: MRT4577_174988C.1
ccggccggggccggttgccgagatgacccctgtgattggtccctcagcaccctatcctcccattcacagtccctccctgacctccctcacgccaaagcagcaacagcactcggctccagtgccctcagcacccagccatagtctacctctacgctcgatacgaagccgcttgccctacagttccatcgtgtcaccgtcctgcaagcgctaagttccgtccacctcgttgaacgccatcgtccgcttcttcaccgtgccctcggcatcagccccctggtgcacaccgacgcaacactctggtcctcgccctccatcgcgcccggacatcagtacatgtttcctttgcgtcgccgttctccctgttgtgcacgaacgtctgtggtaagcggtgaacacctagagaagaagtggtgtatgaagaaggagttcactccagtgcctattgatccagtggtggaatcccatctaactaattatcgtgatagaaaggttttggatcttctctgcaacaaggtgaggaagcagcaaatttttgttgcttttgtaccaaggtggttccaaatgaagaaaaacaggagtgaagctgtgggaggacatggtcctccataagaaacttttatgtaaagaacttatctggaggagtttttgcctcccttggtattgtaataatactactcagcactcgttttataactctggtctgtaataagtaacttgatcttacttttttaataatgtaagtttatat

SEQ ID NO: 82207 - DNA, 224 bp, Zea mays
  Clone ID: MRT4577_174989C.1
cctccataacggcggccgcccccccttttttttttttgtgggaggaaagcatacccttggggagaggtttagaagagattacgtgcgaccccccccacaaaccactggccgaaaagggcaccgaagctgaacctggctattaaacactgaagcgcccacaccggttgcttcgtatcatgccatggaccctaaaattaacagtttaaccaccaggaaggctccat

SEQ ID NO: 82208 - DNA, 538 bp, Zea mays
  Clone ID: MRT4577_17498C.1
cccacgcgtccgcggacgcgtgggcgcgaacaagaacaaccaagatgacgcgctctcctctggctctggccctactgctcctctgcgccgccggcgccgcggcggccgtgccgcggtaccgcgaggcgccgcacttcaccaactcggcggcggcgcagtgcccgccgccgctgcagccgtcggacgcggacgtggcgtgctcgccgcacgcggcggtgcacgtcgccatgacgctggacgcgtcgtacctgcgcggcaccatggcggccgtgctctccgtgctgcgccacgcgtcgtgcccggagtccatccacttccacttcatcgcctccgcctcctccgggtccacggcgacggcggaggcgctcagggccacggtgcgcgcgtcgttcccgtcgctggcgttccgggtgtacccgttcgccgacgaggcccgcgtggcggggctcatctccacctccatccggggcgcgctggacccgcccgctcaactacgcgcgctcctacctctcgttcacgctagccgcctgcgtgcgcc

SEQ ID NO: 82209 - DNA, 1981 bp, Zea mays
  Clone ID: MRT4577_174990C.1
aagctggaacccataggagttcggtactaagtattttaagctagaacactatacaagtactgattgccttgtacgtttgacataagactctcatttgttcctctcatactttcccatctaatggagaaactacttgagatagttctagttgtttcgaccatacttcttggcttagctctagtttatttatatgaaatcctatggctgaggcttgagaagataaggaagaagttaaggaggcaaggcataaacggtcctaaacctacgtttctctacggcaacacccaggagatgaagagaatccgacaagaactcaagtttgtgcagaggcaagacaaagacatgaatggctacatatccaccatcttccctcatttccttttctggaggaagacatatgggcccgtgttcctttactcaacaggagtgttggagatattgcatgttgctcagccagaaatggtgaaagacatgggccactggactccatcagagctcgggaagccacaacatataatgaaatcacgaaaacctctcttcggattaggtatactagcagcaaatggcgacctttgggcctatgagaagaagatcctggcaccacagttctttgtagaaaaaattaagggtatgatagggctaattgtggatgcaaccattccactgttacaatcatgggagaatatgctcgatggcacaggaggtagtaaggagatctatgttgatggatacctgaggaacttttcagcggatgtgattgctagagcatgtttcgggagcaatttcgtagaaggaaaagacatattttgcaagctcagacagctccaaaagttgatttctgaacaggatacacttgttgggctgtctgcagtgtggaaatacttgcctaccaagagaaaccgggagatacaaaagctagatcaagaagtccggtcactaatcctggatctctcaagggaagacaggagccgaagccgcagcaataatgccggcacgcatgtgtccacatacgacaaccttctgcatgccattgtcgccacgcgtccgcagagccccagctactgcagtgcccctgaagatttcatcgtcgacaactgcaagaacatctactttgctgggcatgaaactacagcggtcactgccacctggtgcctgatgctccttgctgcacacccagactggcaggaccgtgctcgggctgagattcgagaagtgtgctgtggacagacagcgatggacatcgacgtccttcgtcagctgaaaatacttacaatggtgatacaagagactctccggctgtaccctccagcatcactgatcatgcgtgaggccctgacaggcatcaggctcggtggagtcgacgtccctcgcggcaccatcatccaagtagccatttcattgctgcaccttgacatggaagcctggggtccagacgctaacgagtttcgtccagaccggttcgcgaacggagctgccgcggcgtgcaagccagcccacatgtatatgccgttcgggtacgggccgaggctgtgcaccgggcagaacctggcaatggcggagctgaaggttgttcttgcgcgcctgctgagcaagttctcgttctcggtgtcgcctgggtaccagcactccccggtgtttcggttgaccattgagccggagtccggcatgccccttgtggtgacaaggctagcatgatcttctgtttgtttccaaacgagctgcaacgccccaccatcaccaccaggcatcggattcggtatgtgtgactgtgcctggtgctaccacttccatttataagtttgttattgtgacggtcgagaactcaatcacatattttccttctataattttctgtgctccgtagagttgagtacatttgttactttgtatttcttaactatgcgccacttatacaagacccagcttgccttgctttaagataagtagcatccagtggtggcatctgaggtaattatattcc

SEQ ID NO: 82210 - DNA, 415 bp, Zea mays
  Clone ID: MRT4577_174991C.1
ttgtgccggggtgcgtacgctgagctgccggttggtggcgatcctaacggctccatcacggcgtgggtgtggcacctggccaaggcctacgccaacgtgaacgactactgttgccaccaccatatcagctactgatgtcctacctcatctactaggactgcgactccacaaagcactttctgcttgacgacaccatcaacatatgcttggggcttgcctacctcctctgccagcactagggactgttggtcaaatacagactacccgaactcacttagactgtcttttaaatctgacacgccatttatcacctgggaacacataactctcaccgcatactaccaccaacacctctgcctaccaagcacaacgtggatcctgcaggcctattctgaacgatgcgctgcgaggaacc

SEQ ID NO: 82211 - DNA, 320 bp, Zea mays
  Clone ID: MRT4577_174992C.1
ttctttttaatatttttcttttactattttctagactcggggccattttaaacccatgaggtgtagacaaaaaaacatcagtaccgctgtcttttaagataaaagtatactgaaaaaaactggcacccctcaacaattaacccataccaagatgtcttataatagactcagctccgaacaacatttcttgtcacagactagaagggcataaactggcacccctatacaaccttgaccagcttagccgctcgcgctgcccaaacccataaactgaacttcttgatcttgtccatagccacaatgcccccaccctcaggacc

SEQ ID NO: 82212 - DNA, 355 bp, Zea mays
  Clone ID: MRT4577_174993C.1
ggggcgggtttttttttttgggggacattacctttggggttccctccacggtttatttggaaaaaaacaactttctttaaaaaatgccccattaataggaacccaacttataggtccccccataataaaagggtatcgcttgcggggcccccccgtgaccacctacctataaaccccctcagcgcctggggtgaaccccaccttaccccggggcatgcatacatgcatgcatgcatgggtcattcattccaaggggctttcttttaaaaaggggggggggggcaagaccccttggcgttctcggtgaggggcgggttttttttcttggcccaagggaccccgcaggccttgggga

SEQ ID NO: 82213 - DNA, 522 bp, Zea mays
  Clone ID: MRT4577_174994C.1
ccggccgggagcctcctcctcttctctccaaccagcaaaccgggaccactccattcctctccgtcgacatggcggcttcctgccgccaccgccgccgccgtcacacgccgccgcagagctagctagctaccgacgaagacaaggcgtcaatggccaaggcgcctctgctgcctctgtcgctgctcgtgcacgtcgtcctcgccgcctcctttccggccccgtgcacggcgcagggtcgcaccgaaaacatctcggccgtcgaggccgcggtctgtaatggcccgtggccgccgacgggagaaccgccgcgacgtgagctcgctgcagccgccagttttcagcgaaaaatcgtctgcggcgcaagagaagcgtacaactcaatttgcatgatccggattacagatgcagtcgaaatagatatttattcttttgggtcaactttataggattgttattgtacaaaatgcatttttcatagtacatcggaatacttcgttcacttcgaaaaaaaaaaaaaaaaaa

SEQ ID NO: 82214 - DNA, 314 bp, Zea mays
  Clone ID: MRT4577_174995C.1
ggaacaacttttgttggggattgtgaggactagttttttacatacactagacatgatgaacattaacagtgcgcggaggttgactatgtacaccgtacacgtaccaaaaaggtgggcgaggacgatgaggctacaagaacacaggcagcagaagaatttcttaccaccacaccatacacgcaccagttactgcgttacaaaagggtaagtcctttatttatataacatgttttgatgcctttcgtcttgccttgatccggggatagacaacgattgtgttaacggtagcaagtataacggaccacatgcacaca

SEQ ID NO: 82215 - DNA, 1772 bp, Zea mays
  unsure (1)..(1772): unsure at all n locations
  Clone ID: MRT4577_174996C.1
gaagtgtgcctcctcgcgcccgcagccatgggagctcagcagagcgtcaacgcaggngaaagccaaggtggatatgaaagtcgatctcacccacatgctgtgcgaggcgctgctgctgccgcccctcagaagctctggcgtcacgttatcacaaatcgttggaaggatctctctcaaacatccaaacctctttgggagaagtgagaagttggatgtgatattggataaaggaatcaacgactccaattttgtcattgcctatagacgccctagggctgagtggttatcacagcaatcatttgtatttcaggttgtcattgcactgtgtatcctggttattcttctacatttcttataagtaaagctgaagcactggaaacctatcattgttgataatcttttgattgaatttacatttttttcctcacgttcttatggtttgagcaatcagcactcaatgacaccagaagttgccgtccatggattcccagctgataacttcacacgatcagggagcagagggataaaccttagtcgattgtcatttggtttggagcttaatgaaccagctacatcaaactggacatcgggaaccagtgttaaatttgaggctatccgcaaacttaataaccagtgccactctattgccagaggttatactggttcctcactgacatgcagtggcaacctccatgacaacatgatcatcttgaagcaagaatctggttatgcagatgtcaatgacaatagcttcttaaaagttaacttccaaatggaacagggattgccacttgtacctaagtcattgaccttcaatagagttaaatgtgcagtttcaaaaggcattaagttgggtccgacatttttggttactagtttgacaggcggatccattgttggggacatggcaccttatcaagcttttgccataggtggacttggtagtgtccgaggctatggtgagggcgctgttggttcaggaagactatgtctaattgctaactgcgaatatacgattcccttggtgaagcatctggagggttctattttcatggactgtgggagtgacttagggtctgctcgtcatgtccctggtaatccagctctgcggcaggggaaaccaggatttggtattggatttggatacggacttcacttcaacactgacctaggtcagatccgtgtcgactacgctatgaatgcatttaaccgcaaaaccatctattttggaatcaacagtagcggtggctcttaggttatgaaagacatagctctcacttaacatagactggcaattcaattcgattcttttccgtggacatagaaggggagttctttttcttgacagtgtgttccggacatgccagcagaatcttattgtttgtactacgtgctggcattcaaaaggtgtatagttgggatccacgagatgcattctctttattatttattgttatgatctttttttgggggtgtgggtagatgctgaacaaatgtttttgctgagaagatggtatgtgtaggagtaggactgctccaaatatacttccactgctttatagcttaatttcattaggtttgcaaaatatataccaatggatgttcatggtcaatgtaacttcgttagatgctaaatattttttaagttagacgctgagcaaacattttgcctgtatgataatgtgagaactgctcactgacgcttccattacatcacaacttcattactatggtcgatgtcaaaaaaaaaaaaaaaaaaaaaaaaaaagacg

SEQ ID NO: 82216 - DNA, 114 bp, Zea mays
  Clone ID: MRT4577_174997C.1
tgatcggttactgtacattatatctagatagtagcttggcaacgactactccacatcagtgggtgtggctctactgacaatattccaccagtctagcctgaaattttgtggagt

SEQ ID NO: 82217 - DNA, 431 bp, Zea mays
  Clone ID: MRT4577_174998C.1
gtcaccttggagctcacaaggtccatatgggtggatcttccgagcgagcgccagtgctacactgttccgattactcccttgctaggttatggatatggaggctagcctgatacagttcaacagtcggaatccactaccaatgacctgccgtgcatacccattgcatataaagatcaagagttccatcgagcgcactgtcaacgtgatcatacagcccaagcgagcaccaaacttgttttagaacagactgtactcacaccgatccaaatctcccagggccgcgtggtcacctccggctaatatgactaccttgtaatctgatcactaacagcatgccgctaacgcgtgcacatgcatgggtgctaaactctcttctgtcgctgctgagcaccaccgtaaccttctctacatggaagaatgctgaccaaagt

SEQ ID NO: 82218 - DNA, 307 bp, Zea mays
  Clone ID: MRT4577_174999C.1
aggagaaagcaagtatacattagggtacccgatattacacaaaaaaacaaagcggggccaaagtacatacaagccaacgccaacactagagggggatatattattttacagcttcttccaaatataaaaaatccacgggggccttaaaaaagcatccaacgtcatgggctcaaatccagggccatccatgaataccggaggcacacccaccctttttatttatgacattatcaccccaagccacgcaggggacccacacacatacatatatgtatggaaatatatatgtataggccaggggcaatct

SEQ ID NO: 82219 - DNA, 154 bp, Zea mays
  unsure (1)..(154): unsure at all n locations
  Clone ID: MRT4577_17499C.1
tattgatggagacggccaaccgannttctggacatatagacccaaggttcaacacgtcgtttggcaccaaaaacgtgaccatctncaggaagagaaggannagaagccacctttccggcacccttcataaaggccatgcctcaaatttcaggcg

SEQ ID NO: 82220 - DNA, 399 bp, Zea mays
  Clone ID: MRT4577_1749C.1
cagtgcgtaggtacaacaagaattcaatggaaagcacataaaatgtatggtgcagagaactcatgcacctgctggacgagactcgaccgatatgagagaaggtcacctcgctgacactatgtatcttggaacaaacgcggatattataaggaccatgacgccgttgccaactcgaatagggagacacatcttataattgctagatttatgcactgatacgtgagcatagtacattgatacaccacgcatctggtagatcaccatgaaatgttacttacgtacgctatgattccactgtaaaagggtgctgatgatgatgctaccattgagaacatgatccaaacctttgctcacagccatggtgataaggctcagaacacttgataagagctatatccg

SEQ ID NO: 82221 - DNA, 555 bp, Zea mays
  Clone ID: MRT4577_174C.1
cctcgaggccggccggggcagaactgcagagacaggcgtcgtcgaactcccctatctccgccatctcacatctttcccctacttcccctactgctcccatttctgcacccccggcgccgctacccgccgctgatatacacgatgaaggatgtatatactgccacaccacatgcaatgcatctggtatccacatcacaagacgcgggctgtgagctggactgcctcaagcatgctatgcaagatgaagcccaaatgccccgtgacaagaccattgggggaggtgatgatgctttcaacaccttcttcagtgagactggagctgggaagcacgtcccccgtgctgtttttgctgaccttgagcccactgccatcgatgacgcgacgactggcacctaccgccaactcttccatccggagcagctcatcatcggaaaggaggatgcagccaacaacttcgctcgtgaccactacaccattgtcaacgagattgatgacctgtgccttgaccgcatcatgaaccttggagataattgcactggtctccagggcttcctc

SEQ ID NO: 82222 - DNA, 536 bp, Zea mays
  Clone ID: MRT4577_175000C.1
gccaggacatgtccgcttactcctcctcgcgcgccctcatgcgcggcggcacggtggggcgctcctccgccgctccttctgctactaatacgacgtctacgtgaggggaccacgtcgggggcgggcccagatacatgcgcggcgccgtattaggggagcccggacgtccgctcacgctcgaggagttccgtatgccgtgggccaaggccggtgagctccttatcaagacctgcggcagactgtgactctggagaaaaatgtgctgaaacgcaaactaactttctctacgcacagtgcctttggccatgagatcactagaaaggggggggaccatgggaccgacactcctaatgagagcataaacaggatcccaaacggaagtcacgctgtaggcgccttaataatgccatgtgggaacgggttatactgcgctaagggccaaacaatagctgagcgcacgtattctctgcttataatcgtgccaaggggacacttttagatggcgaggcacggatgcctctaaagggcaaagggaa

SEQ ID NO: 82223 - DNA, 715 bp, Zea mays
  Clone ID: MRT4577_175001C.1
gtaacattataaagcattttgaagttctattgtgggttcatgtgtcaagagaatttgctgttgaaaagcttgtggagaagttgtttgaagccattgctggtgacatgtctgaccacctcccattgcagcatgtgagcagaactatctcagacaagttgcagaagcagtggattctagttatgcatacgacctaccattcttgtctaaggaagatagctggaaagtgttccaacaatgttttggaattgccatgaaagctctagaccctgaatttccaacaatgttttggaatgaaaggaattgaagaatggcagtccatatgcaatagtaatttattagatgtccaggatgacgaacatagagtatttgcatgcttgtggttgagttttgttcatttaccggaccatctaaagccttgttttctacactgctctatatttccaagaggctatgtaatcaacaggtgtcatttgatttctcaatggatagctcatggcttcgtcccgacaaaccaagctcgacaagcagaagatgttggaattggctactttgattcccttcttaaagtggggttccttcaagaccatgatcgagaccaaatttggtccacaagcctggttcatgatctcgctagacaaattctacgggatgaatttgagtatgagatagaaacaaacaagcaaataaagagatgcagatacctatctttgacttc

SEQ ID NO: 82224 - DNA, 351 bp, Zea mays
  Clone ID: MRT4577_175002C.1
ggggggacttaatatacacttgggattttgccgcaatatacaactgcggttgtttctggtaatttagcaaacagagggttttttggacccccacaccatccaaaacaaaagcttgcaagatactcccactactagcacgggagcaccaaaaaatgttgacacaggtcaaaggatttacaaaagaaatggtgccagcagctgttgtatccttgtggttccaggaacgatcatgcctgtcagttttgatgtgggggatcctgtctgccccttgctcttctaatattttgttttaaacctcagctttagtaccaccagtgttgggaaaatagccgattgtcacaaccaccatta

SEQ ID NO: 82225 - DNA, 413 bp, Zea mays
  Clone ID: MRT4577_175003C.1
gtacaagctttttttttttttttttttttttttttttttttttttttttttttttttttttttttttttttttttttttttttttccttcccggggggccattcctatgggctgtgtgccaatctttggcggccccaattccggaccccgaccggggccccaacctaaagggaatgttctgtgttgcctattccttggggaaattgtattccgttgacaagcgcccacagcccactatccagaagccaaaggtgtcaagccaggggccccaatgaattgacctaccccccgttaaaggcggtttgctcattggccaatttttccgtggcaaacctattgactcagtggccttaataaatcggccagcccccagcgaaagggggtactcaaagggggcactattcctctccccc

SEQ ID NO: 82226 - DNA, 1098 bp, Zea mays
  Clone ID: MRT4577_175004C.1
aattcggcacgaggatgtgtcaagagaatttgctgttgaaaagcttgtggagaagttgtttgaagccattgctggtgacatgtctgaccacctcccattgcagcatgtgagcagaactatctcagacaagttagttggaaagaggttcctagctgtcttggatgacgtttggacagaggatcgtgttgagtgggagcgattcatggtacatttaaagagcggtgcacctggtagtagtattttactcactactcgtagtagaaaagttgcagaagcagtggattctagttatgcatacgacctaccattcttgtctaaagaagatagctggaaagtgttccagcaatgttttggaattgccttgaaagctctggaccctgaattcctacagactgggaaagagattgtggagaaatgcggtggtgtgccccttgcaattaaagttattgcaggcgtcctccatggaattaaaggaattgaagaatggcggtacatatgcaataagtatttattagatgttcaggatgacgaacatagagtatttgcatgcttgttgttgagttttgttcatttaccggaccatctaaagccttgttttctacactgctctattttccaagaggctatgtaatcaacaggcgtcatttgatttctcaatggatagctcatggcttcgtcccgacaaaccaagctcgacaagcagaagatgttggaattggctactttgattcccttcttaaagtggggttccttcaaatttggtccacaaggggtgaagtaaaatgcaaaatgcatgacctggttcatgatctcgctagacaaattctacgggatgaatttgtgtctgagatagaaacaaacaagcaaataaagagatgcagatacctatctttgacttcatgtactgggaagcttgacaacaaattatgtggcaaggtccgtgcactctatgtttgtggccgtgaactcgaatttggcaagacaatgaacaagcagtgttgtgtccgtactattatattgaagtatataactgctgactcattgcctctgtttgtgtcaaaatttgaatacatggggtatcttgaaatatccgatgag

SEQ ID NO: 82227 - DNA, 817 bp, Zea mays
  Clone ID: MRT4577_175005C.1
ctctctgcactctgctcgctctaaaaccttgtgaggaccagaacgctgcaggttacaccatggccggcagcggcagcggcagcccgccctgcgcatcgtgcaagctgctgcggcggcggtgcacgcaggagtgcgtgttcgcaccctacttccctcccgatgacccccacaagttcgccatcgtccataaggtcttcggagccagcaatgtcagcaagatgctgcaggagctgcctgctcagcagagagcggacgccgtgagcagcctggtgtacgaggccaacgcgcgcatgagggaccccgtgtacggctgcgtgggcgccatctcctacctccagcagcaggtctcccagctccaggtgcagctcgccctcgccaaggccgagatcctctgcgtccagatgcagcacgacgagtcagctgcagcttctgccgcgccagcaccggcaaagcaacaacaactctatcaccaccaccagcagcagcagacgatggagtgcgaggcttacggcagcctgctcgtgcagaatggcctgatgatgaacacgttgggcagcgctggtgcagctcatcagcagcagcagatgctgggtggcttcggctctgcggggaacactgcaatggcgctgcaggaggcgtgcctcaagaaagagaccctttgggcatgagtgggtacctccatttgtcgtcgacaagcaagacagaacaaaactagctgtccgccgctgtaattctatgaaaaaagatcatccgaaacaataatctctcagcatttctacttgaaaactaagaacaagaccattcaaaagcagacagc

SEQ ID NO: 82228 - DNA, 292 bp, Zea mays
  unsure (1)..(292): unsure at all n locations
  Clone ID: MRT4577_175006C.1
gatgaattggcctggagtttaccttcggagggctcaggatgatatgaacctgagtggtgcacactgaagtatgctgctgggactgacatcaccttttgtgaaagaagacccatgcacaacatgtgccgcagcggtagtcctcactgtcgatactttanacacagtccatgaagagtctactcgttgccgactgcaactgccatatattactggttgtcttgcattaagagaggctccacttcttcttggactcttggaaaaggcgaagatcaatgcacctcatttctgccct

SEQ ID NO: 82229 - DNA, 200 bp, Zea mays
  Clone ID: MRT4577_175007C.1
ggctccgtcgtgattgacggctgtggtaaggaaacttcggggttggagtgggtgcactgcattggaaacctccttttttttttcctccgtccggtgaaaggcgacttgaatgatgaactgctggattaactagtttggcgttgagaattgaaaaaaaaaaaaaaggggccgcccccaattagagacttcttaaccccggg

SEQ ID NO: 82230 - DNA, 482 bp, Zea mays
  Clone ID: MRT4577_175008C.1
gggaatataaaactgtttttaaatgaaaacatttttaaaacaaattctttgtcgggcttaggtcaattcctttgaattacggggcagttttaccacaactttttaccccgttttcgggcaagggggggggtaaaaaaactgtttcatacaaatttttgttttttgggctgccgccccaaaccctggttttacaaaagggaaagggcttcgggtgggatgcccccgtccaaaagccccaatttgcttggcctggaacatacaagtaaaaaagctgttgttggcccacaagtttacgggtttccagtttttaggccccatcaggggttttttttttgcctttgcaagggtaactggtttttttttcaggcgaactccaaaacagtttcagggttcccagcccctaaaaaaaacttttaatagtcttgagggtgctgggcccaaaccttcataaaacctgaaaccctaaagaaaaactttaaaaa

SEQ ID NO: 82231 - DNA, 1132 bp, Zea mays
  Clone ID: MRT4577_175009C.1
gcacagacagacaccgttacgcgagcacgcaacgcgacgaggagaggagacgcttaccgagcgaagagcactaggctccgccatcgacgcacgcacgcaagcgtgaagcgtcctcgactcgcctttcggttcggttcggttcctcgccgtcgcgggcggcctcgtcgggcgaccgctctctcggcatttctttctatctggttgctgtgtgtggattggaggccttgtgagctcgcggaggcggcgcggttcatggccgtggcggagcggttcggaactcggtggccgccgtctcgcttcttcgttgcagtgctcctcgtcctgctcacaggtgacccttgcaacctgttgttgtgtgtttctttacttacgattcctccaccacccccatcgccggtgtgtgttgtcccctacgaaatctaaggtcttaaccgagggatcgaagtatcttacaattggttcgagaagtttgaatatgcttctatagaatttgaagaggattaaagggggggggggcattgccccctttcttcctcgagtgtttgttatcttacttactccattagtccattgcattgtcaacctagtgctagtgtatattattatgtcaataatcttgaggtcttgtttggataatatcgtgttcaccaaaattcagagtccggtgagcgtggagccagttttgactgctacagatctaatccatagagacaaaatcactgtaaaaacaataaaaccaagcaaacatgctataatcagtttaagttacacttcaatccacctagtaaacaaacaaggcctgaaatgtttagtttaatgatgatattttctctgatttatttttttattctatttaaatgtatatgtaagtaagtattttggtatttcacaagtatcggtctgttcctatacttggcctcaaccgggccggggaatagttaatgacgcaggaagcaaatatacttctttttgttagtgttgcagtactacggcattgcgaaaatggtggttaattaataggcgtacttgctgagattatcttatctgagctcaactgacatctggtgagatcacatggtccccaagtgcttctaatcggagttcctttggattcctcaaaacaaaaacaaaa

SEQ ID NO: 82232 - DNA, 413 bp, Zea mays
  Clone ID: MRT4577_17500C.1
cggaaaccgggtccacccagctccgggccgggaattttcatgtttggggccagcgcaacaaaggaaagatctgggatggggtccccatttgcagggtgaagaaaaacctgatatcgcagagccattatcgtggagcaacacgaccgggaccccctcaacatcctggggaccaccgaaaccccccaaacaaatgccggatcatatggcccctaaatcccccttgtaggaactgaacccggaaaaggttgctaacttaaaaacggaagctttaacatgactagccaggacacatgattacggcactcgcctccatacgattttgacattggcacggtggcctgcgtcgcagaagcccctggcgtagagcaccgctgagcaagcctaagaagtagagggacaatctgcggacgacc

SEQ ID NO: 82233 - DNA, 285 bp, Zea mays
  Clone ID: MRT4577_175010C.1
aaaggattcagcaccccgcccgctgggaagggagcttcgaggcggcccgccaagccacattgggcgggcggcctgacccaatggcacggccccttggagcgcgaacaccctaacgtggctcgaggcggacgcgaagcataagctccgtttgctagcttgcatcatgacttagaggcgctcaatcataattcgacacaccgtatcttcgcaccactggctttacaaccaagcgcgatgaccaattgtgtgaatcaacggttgctctcggactatgttgaattacta

SEQ ID NO: 82234 - DNA, 1383 bp, Zea mays
  unsure (1)..(1383): unsure at all n locations
  Clone ID: MRT4577_175011C.1
cggtcgcgtgggctactatgaaggtgtctaagctagcagtcgaagaactagatattggccacgcctttaaagaaagacaagcaagaaagcaaaggtcctggtcacggctaaatgtttcggagttgtctggtcccattctaaatgaaaataaccctgatgctagatgcctctgctggatgttgcttgtacttgttccaccgggtatggaatcccagaccacctccctcgccccgttgtggccccttccgatccgcaggcgtgcccgcccccccggccctgctccgcccgccccgcccccccgcccgccgcggcggcagcatcccccaccgccgcctcctcaagcgaggacgaggaggagggactcgatagcggaaggccgaatgggcagacagccgcgccttcgcttccacagctacaggaggaggaggaggcgccggagaagctggctcatgtgaagtacaacctccgtgacactcaaggaatgtttcctctcgtggtatatggattccaacattatattggcttggttgtttcaatgatcctgtttcctctcttgttagtccctgctatggatggctcgactgatatcatggcggcagtggtatccacaatgttgctcgtcaccggggtgactactttgctgcacatgtttgttggaacgagactatccacttgtgcagggtccatcctttgtatacctggctcctgcccttgcgatcatcaactcacaagaattctttgggatcaatgataataattctaaacacataatgaagcacctgcagggagctataataattggaggtgcattccaagtgtttttgggatatagaggcctcatgtcactatttcttaggttgataaatccagtggcgatgagctccacctgctgctgcttataagttatggtgcttgtgagacctgtcatggttgcttgctttgctttgctttgtttagagatgctctcgccatggctgccagttgcactggtattcaggcaacctacatttggtccctgcaatatagttgcttcttgaaagcaggtaggtggagatggtcgagaaattgagacacatggttctgctgtcctgggtaacttctgcgacaagcgcattcgatggtacaaaagacataatggaagctcttagaaacaaacatactaatctagccaatgagcttgagaaaaacataacagattgctaacagtacaagctgtatagtatttgtagtgtctgaaagcatttcatgggaaatgcagaaggaacggtttaacagtcttttagcctgcataccagatgaatccaatcttcctcttctgattntcagtggcgatacatataacgnaagatatgagtatgcgtcaaagtacatcatcaacaggct

SEQ ID NO: 82235 - DNA, 214 bp, Zea mays
  Clone ID: MRT4577_175012C.1
atggtcatcctgtttaattgcattcaaagcaaccaaacaagagctctcattgcactaggacaagcctacacaggctatgcgcagcttgcttgtggactaaaaacgagtctctcagcatccaacacacaaacacattgtataactgctgagatgaggcatcggtgggtcaagaagcatgttagcgtcttcaggcaactcgttgacgctgccctta

SEQ ID NO: 82236 - DNA, 288 bp, Zea mays
  Clone ID: MRT4577_175013C.1
gagaaagacaaggaggtggagcttgttcgaagaagaaaccttaagaaagggtgttgaagagtatgttaccttgtcttgatgttcagttgttatcgtttgacatgtcagttattattattattgctgttgctgtatgttcctgttctgtttgtttcacgtgtaggtatggtgttggcaattggagggatattctagataacaatgctgaggctttggccggcaggacaccggtggacttgaaggacaagttgaggaacatgcttttcctttgaggtaacctgtgaaaca

SEQ ID NO: 82237 - DNA, 220 bp, Zea mays
  Clone ID: MRT4577_175014C.1
aacgagagggggacgcgggagtacctaggacgagaacagcacaaaggccccaccagcgaacagcaagcgcacaaggaggaccgcacaccgagggggaacgacgcgcacacgcagtacccaggggaacggcacggcacaaaggccaccagaaaacagaaggaagacggacaggcacacaagaaacagcaacaggcggcagccgaaccacaggaaggaaggg

SEQ ID NO: 82238 - DNA, 437 bp, Zea mays
  unsure (1)..(437): unsure at all n locations
  Clone ID: MRT4577_175015C.1
cctcgccatcccggccgtcgtcgtgagtgcgagtgcctccatctggcgttgcgcgcgcatggtcgcgactgctcagtccgcagggcacttgtgcgcgcaagcgcgtcatgtccgcgccaccggcttccgctgttcaggctccacggtcgagccccctactgtaactcacgctcctagtctcgccgtcgtctcgccgcggcagcgcctcatcgacctcgcccctgtgaccgtgtcgtcgtcctgagattgcgatccgtttccgagcttcgaggaatcaaagatcgagcgttggcaaccaagagatcaagctttttgaggtctacaacattgaacaccctgagcatctgtttggtgaaggttgcctttggtgtaatctatgctcangtcaagaagaagtcgtcgaggcggatctncaagaattctaagacttcgacgag

SEQ ID NO: 82239 - DNA, 914 bp, Zea mays
  Clone ID: MRT4577_175016C.1
ccccccacgcgtccgcccacgcgtccgcccacgcgtccgcacaaacaagattagcagtctttcagagtatgctgaaccacttacgtcttaccttaaaggcttaggcgatgctgaaaaggtaattttggtcgctcatgatcttggcggtgcctgtatatcctacgcaatggagatgttcccatccagagttgccaaggcggttttcctttgtgcagcgatgctggcaaacgggaacagtgccctcgacatgttccaaaagcagatggacacgaacggtactctccaaaaggcgcaggaatttgtctactccaacggcaaggaccggcctcccaccgccatcaacatcgacaggacatcgcttagggacctgttgttcaaccagagcccttccaaggacgtgtcgctggcctcggtgtccatgaggcccatccccttcgcccctgtgctggagaagcttgtgctcaccgccgagaactacggctcggtgcggcggttctacgtggagaccacggaggacaacacgattcctctgcccctccagcagagcatgtgtggtgccaacccaccggagaaggtgctgcggctgaagggggcagaccacgcgcccttcttctccaagccgcaggcgctgcacaaggcgctggtcgagatcgccaccatgccgcatgtccgggcttcgtgagaacgtgtttgttcagcttcaggtttttgccggccggtgagcttacatggctgttgtacatgctgaggatgatggtatggcttgtggcggtgtggcagcgacagcgagtaggggctctagaatttcggcgtcgccttgacgaaggcatatccatccattatacactcacatctgagcatcacttttttagaaaaaaaaaacaaaatcttattccaaaaaaaaaaaaaaaaaa

SEQ ID NO: 82240 - DNA, 191 bp, Zea mays
  Clone ID: MRT4577_175017C.1
attgaatgtttaaaaaacttgggggggaagcctaattggcatttttaaaccccttttccggccggcgggggcacacacaccagcccttcttctggaacgccttgggttttggttggtttccgaagatattaaggggggttggcattgtgttacaacattcacacaagcgcatatttgtctctcaatactac

SEQ ID NO: 82241 - DNA, 392 bp, Zea mays
  Clone ID: MRT4577_175018C.1
catggttctgcgtaggcgagattgttggcagaggtttaaccttaaccgcctataagggctggttgatttacagctgattatggagctccaataataatcgacagtatctgtctggctttgcatgacatcgatgatcgcctgcattatgtgacacagtgcaaataaactcgaatgaataatatggtgttaggcagagaatacttctacgtatccgattctgaaggtggaaccaaaacataagggtgtaaggatatgtacgcaaaaatgagtctgatgcgagctcgcgctcaccaacagagtccacatgcggatatacatatagaactgtgaagaagaagaatgtgctttggaagaaactttacatgaacatgatcttgttattatcacttaaa

SEQ ID NO: 82242 - DNA, 373 bp, Zea mays
  Clone ID: MRT4577_175019C.1
agggcggttaacatgccatacacatcttttactgcacgggccagccaaatctgcggccgcatgggctaggtgtgcacgcatcggcaagggcaacaagccgcgggtgagcctgcccaagggcaatggtatcaagctcagcatcgataaggagcagatgaggcacgactttgctgcccacgctgctgacaaagcataagtcttgtgaatgacgctgctagcagctatgtgctataacatagtatatgaggatctgcacggatataaaactacctgctcaagacggtttatcataatgttgaatgcgctttggataaaaataccaagacgtaggacatacgccccttcctttcttctatgctgaattatgggtgaa

SEQ ID NO: 82243 - DNA, 1538 bp, Zea mays
  Clone ID: MRT4577_17501C.1
gcgaatcacagggttttagcttctgccgccgtaaactcacctcccggcccttgtcgccgcaagtccgccacctcaccatccttcgaatcccatgcgaatcctggccacgacacccgccgagcaacatgcgggcgagcccgcagccattatggaccccttgcacggcgtggaggcggccggggtcgtggccaccaacgaggaaaaggaggccgccgctatcacggtggccgggctggtggacaataaggaagcagggtcggcggcggctctggaaggggcaggtgtggtggtggtcctggtggaaggggatatggtggccgagaaaggggtagaatgggtggcggcggacgagcgaactaagtgcatgcagacttctggcgtttccttcaatgcatgccttatcaatatatcagggaaaatacgagcattttatgttggaagcagttcagttacgtgtgaggtctgttgtttttttccctgggcgcgaggtttggttgtgagcataatgcatatgcaagttttatcatgtaagtcatctttcaattttcctgctgcagaggttgttttccactttttcccatgatcgttgatgctgagcatgctgccctatgttcatgcctgcagtattaactgatggcaactcttgccctgagttaaaatgttaattctatttgtgcaaaaaaagacaccagaaggagtatgaagattcctatgcacggggtcgaggaagagggaggggccgtgggcgtggaaggggttgggctagaggtggctatggtggatatggaaacaatcaaggtggctataaccaaggtggtgggtattacgacaatcaaggtggatatggtggctatgatgatcaaggtgggtatggtggtggatatggctacaaccaaggcagatatggaaactatcaagaaaatggtggatataaccgaggtagaggaggtggtatgcgaggaagaggcaattggggttaccgtggaggctatgaaggtggcaggggtggtggctatgaaggaggcagggtcggcggcggctatgaaggtggcaggggtggtggtggtcctggtggaaggggatatggtggccgaggaaggggtagaatgggtggcggcggacgagcgaactaagtgcatgcagacttctggcgtttccttcaatgcatgccttatcaatatatcagggaaaatacgagcattttatgttggaagcagttcagttacgtgtgaggtctgttgtttttttccctgggcgcgaggtttggttgtgagcataatgcatatgcaagttttatcatgtaagtcatctttcaattttcctgctgcagaggtggttttccactttttcccatgatcgttgatgctgagcatgctgccctatgttcatgcctgcagtattaactgatggcaactcttgccctgagttaaaatgttaattctatttgtgcagtttcctttcgtcagttatgcgaaaaaaaaaaaaaaaaaaaaaaaaaaaaaaaaaaaaaaaaaaactcgagaggaggggcgtgtacc

SEQ ID NO: 82244 - DNA, 909 bp, Zea mays
  Clone ID: MRT4577_175020C.1
ggccggagctccctcctctccctcttccatggccggcgtccccttcagctccaactcgggctccatcccatggcgcccggccgcctcttctcccccatggcgctcctcccctgctcctccgacgcggcggcttccggctcgctcgaccggccatggtggccgcgcaagcctcctggccgcgggcggctctagcccaggccaccttcgcgcccggggttatggcgcgcgtccctacgcctagctaggcgcctagcctttgtctccgtcgcgccgatccgcgctcgccaaggtcacccgccatcgcccagctcagcggcttcccctgctacaaagttcgtcgtctgtccgtacgtcgcctgctgcttatatcctagccaggtcaaccttgtcatggttcgatcaaatgtcgaaccaggaatacgcgagggatacgcgaggtcgctcatcactcgctttggttcagcttgctggttcgttgttgttcatctccgtgtcgggtgtaccacaatattgtagatctatccttgatgcttgtcgtcgatccgtcgcctcgcctcgatgctggctcctacatgacgtctcgaacttgtgtttacactaaaaatccgagaagattaggcgtagaaggaaaaaaatcagtacgcagccggaaaattcttgatgtggatcgagaaggcagtgaagtccgtgtggtgctcaccacgtgctcgacgtaatggcgaaattggaaatcgtagttgtgctcgtggctgtcaagacggattaaattattagtgagctgtcgtcgctctcgctcttcgttttaatatttctcatcagtttagtatacttgcggtgttaatgtggaccgatgatgtgcgcgtaaatcgcactagtgacactacaagaaactgataaatgttcgtggat

SEQ ID NO: 82245 - DNA, 283 bp, Zea mays
  Clone ID: MRT4577_175021C.1
gcgttacgggatcaggcctcgtctcatctcgaggggggggtccgtgacctgctgcgcttcagctcccctgcatgctcggccaaaattctgaggagagctccgatccggtgcgactactaacccacgcgggaacagccgagcgtactgaccgcgcgggagtcgaagatagggaagcgcggggccgaggatgactaccaccgcaccgccgcaggagaaggaagaggaggccgagtccttgactgccctctgccccccggaccaagggactcaggagccctggatc

SEQ ID NO: 82246 - DNA, 414 bp, Zea mays
  Clone ID: MRT4577_175022C.1
ttgagctggtgcccaggtggatgttgcagctgggcactgcatcttcgagctggtgcccaggcggatgtaccagatgtacactcccctgaaggacctgatgtacacgcctacacaagtgccagacaatcttgttacacaaaacacacacacacaactatagcaaaaaaaaacaagactctgctgcagagcaagttccattctatgtaccacacgcagatgcggacgtactactacctgttcatgccgatgtacaactacgtttacaagaccatggacacgtcgtttaaccaggtggacgagacctctgtcagggtagcgctggagaccattggcctcgtgcacctgacgcacatgaccgagctggagtcggtctaccagctgcggatcgggtttgcctccgtggcgatgagaccg

SEQ ID NO: 82247 - DNA, 1008 bp, Zea mays
  unsure (1)..(1008): unsure at all n locations
  Clone ID: MRT4577_175023C.1
accacttcacagagcttcagcgcactcgcaccttngggcaccaccacacacacacacaccctagcttgtcgatcggctgaggaggcgacgatggccaaggacatcgaggcggcgccacccggcggggggtacgcggtcaaggactactccgacccgccgccggcgccgctcttcgacgccgaggagctcgaccaaccccaaactaagagccatatttcccatctcataattttgagtcatacccaactttgtcgaatttgtggacaccatagtgcagcacagtaacaggcaatggagaccgccagaaagcctcactttgtgctcgtcccatggataggaagcatcagccacatcgtcccgatgacagacatcggctgccttctcgcctcccatggagcgtcggtcgccatcatcacgacgcccgccaacgcgtcgcttgtccagagccgcgtcgaccgtgtcagcccgcgcggcgcggtgatcgcggtcaccgcgatccccttcccggccgcggaagccggcctgccggaggggtgcgagaggttggacctgatcacgtcccccgccatggtgcctggcttcttcgaggccaacaagaagttcggcgaggcggtggagcagtactgccttcaggacgcgccacgccggccgagctgcatcgtcgccgggatgtgccacacgtggacgctgcccatggcgcgagaccttggcgtgccctgctacatcttccacggctttggtgcgttcgccttgctgtgcatcgagcacctctacaggcaaggtcggcacgaggcgattgcgtccgcggacgagctcgtcgacatctccgtcctgcagccgtttgagtgcaagatcctcggcgggcagctgccgccgcatttcttgccatccacgtccatggggagcgggctgatgcaggaggtccgagagttcgacatggccggggacggcgtcgtggtgaacagcttcgacgagctggagcacggctccacggcgcttctcgcggag

SEQ ID NO: 82248 - DNA, 1591 bp, Zea mays
  Clone ID: MRT4577_175024C.1
gcgcccgcgctcccccccccctcctgcctccctccctccctccccccgccccccagcctacttacccgagcgagcccccccccagggaaggaaggggccgggcccgggccgcggggcgtgcgtgcgtgccaaggcaagaaaaaaaaaaaacaaaacgagcgcaggccgggctggctctggcagtccggctggcaggagagaattggcgagggattgggatcgggagcgaattcccagccagcccctgtctagagagggacaggccgcgcgcgcacgcacgccaccgcgttccattggccgcgtcgttgccatcacgccgacgactaaactagtcgatcacaccaagctcacaggctctcgatcgcctgtgatcgggctgccctgccgcctcttgctcccttcctcctctcgcccagcagcctagctacttgagcgagacgagctccagctgaggaagtgagaggtcgtggtccgagaggcgtgcgtgcgtggccatggacggcgccgaggacgacgggacggagtggatgatgcatggtgccggagggaagggaaaaggcggcggcgcgctcgacaagaacaagaagcgcttcagcgacgagcagaccaagtcgctggagtccatgttcgcgacgcaggccaagctggagccgcgccagaagctgcagctggcgcgggagctcggcctgcagccgcgccaggtcgccatctggttccagaacaagcgcgcgcgctggaagtccaagcagctggagcgcgagtactcggcgctgcgcgacgactaccacgcgctcctctgcagctacgagtccctcaaggacgagaagcgcgcgctcctcaagcagctggagaagctggccgagatgctgcacgagccgccgcagggcaagtactacggcggcaatgcggacgacgtgcgctcgggcggcgtcggcggcacgaaggaggaggaggagtccacagacgcctgcgccggggccgcgctctactcgtccgagtgcgctggcggtggcaggttcatcgcgcacttcttggcggacgacgacgtgggagcagccctcttccggccgccgtcgtctccgcagccgaccgctggcttactcacgtcgtcggggccgccggagcaccagccgttccagttccactccggctgctgctggccgtcgtcgtcggcggagcagacctgcagcggctcgcaatggtgggagttggagtccctcagcgagtgacgtacgatgatcacaagcggccgggggtcactcggttccaagcacacgtaactggccgggccaatacgagttcgttcgtagcggtctcgtcactcgtcagctagccctgcagagcaacggtgtacatagcttcagtagatcgaagtccaggtccaggtctgcccatcaagcagtttcttcttctcgccatcgatcatcgatcatgcatgcaaaagattttttttctctctcccttgctaccagatcatgtaatccagcaggaacatgtagagaaagatcaaacgaggttatagatcgagaaggtcgcctgcatatgcgagctagtctattcttttccgaatgcatggcggctttcttcgttc

SEQ ID NO: 82249 - DNA, 865 bp, Zea mays
  unsure (1)..(865): unsure at all n locations
  Clone ID: MRT4577_175025C.1
ccggccgggagcaaagtgacattcatgttgcgtcgcgcacagccccagcgacaactattgcagacctccttcataaagcttcgaccctctgccaatcctctccaccacctccacgcccccttcttcgcctcctatagccccgcccgcctagtcacgcgggcatatataacacatcatcgccggcactgcacgacacatacaccacacaagaacagcgggctcaacctctgggctgtagcagtagtcgcaggtctcgccattggcggcgctcttcttgtgccttttgtaccaagctcttcaggggcagagaccgcaaaagcccctcgctcgaccaagtccgccgccgcctacgactttgcagactcgtatctagtcatggcgccaaacaccccagccggccgaccgggcaccctcacacccgaccaggagaagaagctgcgcgagctttggggcatcgtgttaaagatttttggcgtcgaggtggggtcggaccaaacaaacgggacagccgcaccggccgacgaggaagtgctgtcgcctacagcagacgggaaaaaggacaagaagaagagccgtttgcatgtcttcaagagaagcaagggggacaagagtgcagacgacaaatcgtcgactgcgtcggaagcgtcgactcctactgcagacctaagcaaattatccatatctgccgaagatgacaaatttggccagactgcagagttcaaggccgcaatagcaaacattcccccagaggagctccggnaaaccttttggagcatggtcaagcacgaccatccggatgcgcntctccttcgcttcctgcgcgccaggaaatggggacgtgagaaggcgctggtcatgatgatct

SEQ ID NO: 82250 - DNA, 782 bp, Zea mays
  unsure (1)..(782): unsure at all n locations
  Clone ID: MRT4577_175026C.1
actaggcctctctccctctccttgagctatactacattacacgagctggtcagctgtaggtgagctagtgagcatggcgcggtttgctgcgctcgccgcgcttctgctcgccgtggcggtgggcggcgccgcggcgcagggcgtgggctccgtcatcacgcagtccatgtacgcgagcatgctgcccaaccgcgacaactcgctgtgcccggccagggggttctacacgtacgacgccttcatcgccgccgccaacaccttcccgggcttcggcaccaccggcagcgccgacgatgtcaagcgcgagctcgccgccttcttcggccagacctcacacgagaccaccggcgggacgagaggcgccgccgaccagttccagtggggctactgcttcaaggaggagataaacaaggccacgtccccaccctactatggacggggacccatccaattgacagggcagtccaactacgatctcgccgggagagccatcgggaaggacctggtgagcaacccggacctggtctctacggacgcggtggtgtcgttcaggacggcgatgtggttctggatgacggcgcagggcaacaagccgcaaagccacgacgtcgccctaggccgctgggacgccgacggccgccgacaccgcttgnncggtcgngtggccggaatacgggcgtgatcactaatatcatcaacggcggggctcgagtgtggcattggccagaacgatgcccacgtcgatcgcatcggctactacatgcgctactgcagcatactcg

SEQ ID NO: 82251 - DNA, 273 bp, Zea mays
  Clone ID: MRT4577_175027C.1
gaccccgggacagcaggagcacaggcgatgggttgaagagggcgacccggtcattcacaacaacgtgatcccacaacgggccctgcaagaggcactggcagaacgttgccaagacatgcatcaaccagcaccgcccccaagcggacgcgccgcaatcgcccggcacaagacggctgtgaagatatcaaccccgcccgacagccggacctgtacgcccattggacaaggacagaccttaaagcacagcaacgaaagtcaagggacagagggagg

SEQ ID NO: 82252 - DNA, 229 bp, Zea mays
  unsure (1)..(229): unsure at all n locations
  Clone ID: MRT4577_175028C.1
aagctgcagcgtagtagctcgtaatcgagtcgagcactgatacagcatgcacacgacacagcgaacacttcacgctttcacacttcacctccggcgttccgcatctggggtncaatacgnacgtcgcgtccataccgatccgtgtttgctcantccctctcctcncactcgctatttgctccaagcgagcgagctaggcgttacgccggagctggattgggcggtggtg

SEQ ID NO: 82253 - DNA, 336 bp, Zea mays
  Clone ID: MRT4577_175029C.1
ggatcgaatgtcacatttttactatataataggagttctatacaaaataaataattacattattaggagacaacgttccatcaacccaaaattaattgggagaaaactgtctttaccactcacgaacttatcgcagcatcctccacgcgcctaatcctgtggtacctgttcttgacctgggacttgagatttcaggtaccaggatgatcttcaggggacactttacctcgccctgcgattgaattgttggcacgctctaccacgggatggagcggtttcacgggggaaactacacggcggagagcaattcccccggtttccccggttacagtatac

SEQ ID NO: 82254 - DNA, 1474 bp, Zea mays
  Clone ID: MRT4577_17502C.1
ttccataaaccagagcagcagagcgctctgtatcgttggttccgcctagggttttagcttctgccgccgtaacctcacctcccggcccttgtcgccgcaagtccgcaacctcaccatccttcgaatcccatacgaatccctagcccgcaacccgccgggcgacgagcggcggagcccgcagccaacatggaccggtaccatagggtggagcgggcgcggaaccagtcgaccatcgaagagaacgagatccgcatcaccgcgcagggcctcatccgcaactatgtctcatatgctaccttcctcctccaggaaaggagaattaaagagattgttttgaaggccatgggacaggcaatcagtaagtctgttgctgttgcagagattatcaagaaaagggcccctgagttacaccaggataccaacatcagctctgtcagcatcactgatgtctgggaacccatagaagaaggacttgtcccattggagatgactcggcatgtttctatgatatcaattactttgtcccccagagagctggacaagcacactcctgggtaccaagctccagcatatgttgaacatcccaggcaacagcaggtgccaccactgcagcgccaacctcgcagaccatcaggacaacaattccagcagctggagtatgaagattcctatgcacggggtcgaggaagagggaggggccgtgggcgtggaaggggttgggctagaggtggctatggtggatatggaaacaatcaaggtggctataaccaaggtggtgggtattacgacaatcaaggtggatatggtggctatgatgatcaaggtgggtatggtggtggatatggctacaaccaaggcagatatggaaactatcaagaaaatggtggatataaccgaggtagaggaggtggtatgcgaggaagaggcaattggggttaccgtggaggctatgaaggaggcaggggtggtggctatgaaggaggcagggtcggcggcggctatgaaggtggcaggggtggtggctatgaaggaggcagggtcggcggcggctatgaaggtggcaggggtggtggtggtcctggtggaaggggatatggtggccgaggaaggggtagaatgggtggcggcggacgagcgaactaagtgcatgcagacttctggcgtttccttcaatgcatgccttatcaatatatcagggaaaatacgagcattttatgttggaagcagttcagttacgtgtgaggtctgttgtttttttccctgggcgcgaggtttggttgtgagcataatgcatatgcaagttttatcatgtaagtcatctttcaattttcctgctgcagaggttgttttccactttttcccatgatcgttgatgctgagcatgctgccctatgttcatgcctgcagtattaactgatggcaactcttgccctgagttaaaatgttaattctatttgtgcagtttcctttcgtc

SEQ ID NO: 82255 - DNA, 707 bp, Zea mays
  unsure (1)..(707): unsure at all n locations
  Clone ID: MRT4577_175030C.1
gtctcgctccnnnangtagcgggctggaattcccggtccgtgcagcttttgcagtgagctaccatgtccacgatgggcttcttccaggacacccgcgtcgtcggtggtggcagcagccggacggccaggtttctccagtaccagaggctggagtgctgggaggacgccggagtcgctcccagtcccaggtcccggtggcggtggccgtggctgccgacggagaatggtaagatggctcccccctgtttgttcaatgtcaagaggctgaagtggagcaagatcacctcggctctgatactaccaaggaaggttgctgagctctccgcaaagatccgtcacgccagcgccaggaccgaggccgccgccaccatctgcccggccgtcgtcttcgtgtcaccgtgggggcttcctgtgctctcccggccactcttggtcggccacaagagcaggtaccagtatcaccatggaaaggacacctgatgatgagctgagcaggtagtacccaatctgtattcctggcgatgattatatatgcggcgagctagttgatcttgtagtatgtgtagtaatcctcattttgattcccctgcgatgcttgtgtcatgcttgattgggccccttgctacggcatgcatgtcatgttgtgccctctatcaacatccgtaccaagcaaagcaattgctatattccatcactaccattcgccc

SEQ ID NO: 82256 - DNA, 457 bp, Zea mays
  Clone ID: MRT4577_175031C.1
ccgggagaaccaagagctcgaacttgcatctggaccgccgatcaccgggaagctacgctacgacgaaggagggacgcgcgctaccgaccgcgcccgggccgcggtcctgcgcccggcggcgcttcttaagcgccgggcggcggcggaccggggcttccttggccactctagccgcctcgatcgcgctgctaccgggcagccgacgaggcacagtctaaaggcgggggccaagggcgagggggttccggaccttccctgccgcggctaccttgacggcagcctgccaggtgacaatggtttcgaccggctgggcgcgggggaggacccggagatactgaggtggtgcgggcaggcggagctgggcaacgggcggggggcgatgctgggcgtggacgagatgctgatcagggaggtgctgaacaaggccgaggtgatcaacggggcgcagaggtacgac

SEQ ID NO: 82257 - DNA, 538 bp, Zea mays
  unsure (1)..(538): unsure at all n locations
  Clone ID: MRT4577_175032C.1
ctcgagccggccgggtccgatccngctttcccgcaaaaccgttcagngagcagatttagaagagcgaggagagagagagagagaggaggngcgngttttgcagaaagcagacggccnggnggnggncgcaaancgggggggcaagacgagcgcgcgggncgccgcgagcggcgaccccggcaccggaaagnccagccacagcggcgcccgcgccaccgagcagcgccccgagaacgnaccacgcgngaggccccccacccggcaccacgacgacgacggccccgagcgcggccccaccacgatgancgagacggagcccagccaggaggagaagccgaagnnngacgccaagcgccaggcagccgaggcggacgcgancaccaacgccggcgacaggaccgccacaacggagcggcgcagagcgaaccggcggcacgagcaccggcgacnccagaagaaggcnccagagaacggggcggggcgcaagcgggacccgagggacgaacagcaggaaagcccggagcagggaacggcgccc

SEQ ID NO: 82258 - DNA, 332 bp, Zea mays
  Clone ID: MRT4577_175033C.1
agcttttgttccaaccatcagacgaggggtatgggggatcctactacgtgttgcaagaaggtactcacagacggcgtgatagccatattccgcttgcatgtggacccagcacttccagtcggtgtcggcccatcaaggccagcaccattcactgcgacagcgggtcagttctctgcaactatccggcggaaaggtggtacatgcctcattaccccattaatctctccaccctgttgtggttgcagccactgcaatcactatgctctaacaaatcaattgctcgtgaagtgaataccctccatactgcagtgatatctatcacttctatgaaa

SEQ ID NO: 82259 - DNA, 1149 bp, Zea mays
  Clone ID: MRT4577_175034C.1
ctcgaggccgggcgggccggggagccccagaggaacgactcctgccggacgccgccacaccatctgaaactgacggcggcgggcggccgctgcttcctctcccttctccgttcagatccggctactggcgtccctcctccgccatcttccctacccccgacgtggcgacgagctgtgagccgtgagctgttccaacattcctgtcctagttcaagctgaaaggagaacataaaagaggagaggctagggttttggcgtccgagaccaaaccaagctctctccggcgacggtgagggctcgatatcggagtccagtaggcggctcctgctgcttcggcggtccctaatccctctctcggcagtgtacagatggcgtccggcggtccggcgctcgagccgctcgtcgaccaggtcatctccgtcatcaccaacgatggccgcaacatcgtgggtacgctcaggggattcgatcaggccaccaacattatactcgacgagtcccatgagagggtctattctagaaaggagggagtccaacaacttgttcttggtctgtacattatcaggggtgacaacataagcgttgtgggcgaggttgatgaagagctggattcaagattggatatgtcgaagctaagggcgcacccactgaagcctgttattcactgaggtccgagtatgtctttgggtaatatgtggactggatggatgggtcactgttgaatgcaggatgtagcatcatcatggtgaggggactgagtaatatggacatgtatcttgcgtattgtgcaaaaaaaaaaaaaaaaaaaaaaaaaaaaaaaaaaaaaaaaaaaaaaaaaaaaaaaaaaaaaaaaaaaaaaaaaaaaaaaaaaaacccaaaaaaaaaaaaaaaaaaaaaaaaaaaaaatttccttggcccggaccccccttaggggcaattttggaaaatttccttaacccggggggcccttaaaccttgctttaaagggccccatttcccctttttgggggcggtttaaaattcaacggcccggggtttacaacgtggggcggggaaaaccctgggggttcccaacttaatggcctttgaaaaaaatccccttttcccaagggggggaaaaacaaaaaagccccccccggaccccctttc

SEQ ID NO: 82260 - DNA, 575 bp, Zea mays
  unsure (1)..(575): unsure at all n locations
  Clone ID: MRT4577_175035C.1
cgagnaaaaaaaaaaaaaaaaaaaaaaaaaaaaaaaaaaaaaaaaaaaaaaaaaaaaaaaaaaaaaaaaaaaaaaaaaaaaaaaaaaaaaaaaaacgaggaaaaaaaaaaaaaaaaaaaaaaaaaaaagcttccctggccgggggggccctttcaaaaggggcggtattccaaaaccttgggggcccgtttttaggggacccaggcctgggaccaaacttgggggaaaaaagggccaaacctgttccctggggaaaattgtattccgtgcaaattccccaccaaaaaactaatccggaaagcaaaaagggaaaacccgggggggccaaggggggggccaaccccacattaatgggggggggctaatggcccgttttccagcgggaaaactggttggcccactggattaaaaaaatcgcccacccccggggaaaaggggtttgggaaatggggcccttttccctttcctggttcattgactcgtggccctagggactttgggtgggggagggcggtttaagctcactaaaggggggaattccggtttcccacaaaattagggtataccccggaaaa

SEQ ID NO: 82261 - DNA, 428 bp, Zea mays
  Clone ID: MRT4577_175036C.1
aagaataatacacaaaggcagcacaatgatagagtcattcaccagtagactactttccggaggctagctggaacattcacaaaagctttagagatgatcagtcccgaaggcgccacagggactttacttcagcttgaagctgtttaaaagcccacaactagatcactaatattttataccctccaggtattggtgaaaagacctctactaccgactattcttttgaatgaacgttgaaacgacatataggagctgagcaagctatgctgaatatgtccttgaagcgtagattgtggataaacagaagtagggctggaataatgacctattacatggaagcatgaacatggctacatcagttcttctcgtcttgtattttggctgactagacttccttcgtcttttgcaacaggaaatccctgcggaac

SEQ ID NO: 82262 - DNA, 179 bp, Zea mays
  Clone ID: MRT4577_175037C.1
tagtcctgcatcactctttttataacttcgcttaaagctcatcagcaacctccatttgacgatatatgaacacattgaaggggccccatgcgcgcccgggtccccggatgagatgagggaccacatgatagagggccccactgtgtgtcgccgtacagagacgctggtcgacgaaactc

SEQ ID NO: 82263 - DNA, 434 bp, Zea mays
  Clone ID: MRT4577_175038C.1
cttctttctttttttattcttatgtaaaccaaagatttgcaggagaggagagattggcattaccgagaaggaacaatgcgatgatgatcacaactatgagtccaatccacatccattgccgcagttttctcttgcttcctcggtttcttaaaggcagaggaaccgattttgacttgttttgtttcagaaactgtgatgaaggtttgtgagatttcttcatttgttgactctcctctacggtttgtttctttggagtttcgatctcccttggggtttcgactacagtttctgctgtcggaattgggttttctgttgctgtctcttctgatgtaaaaatcccctttcttctctccttcttccttagcttcttctctcgttcctacaaaatagacagagttgttcaacaaaaaaaaaaaaaaaaaaaaaaaaaagaa

SEQ ID NO: 82264 - DNA, 349 bp, Zea mays
  unsure (1)..(349): unsure at all n locations
  Clone ID: MRT4577_175039C.1
gaaacaaacaacccccccaaacaaaaggaccccccgaataaaacccaccccacacagagggggggaaggcgacacaaacaacgagcccacagggcccgccgaagccaacaagccaaggccagcaggacccacaacncccgaccccanacacaagaccccacgacaaccaccgaccacagcgccaacagcgaccgcaacaaccacaacacccaccggggggggaagcacncccacaaaaaccacaaaccaaccaccaaaaccaacaacacccccaaccacccaaaaaaagaccacccccccaaccacacccaaaacaaaacaaaccaacaccaaccaaacacaccacaca

SEQ ID NO: 82265 - DNA, 159 bp, Zea mays
  unsure (1)..(159): unsure at all n locations
  Clone ID: MRT4577_17503C.1
tcccgttcgccatggccgcgggattagctttttcncttcctaggtctatctttagttattgagttacatacagattaacaaaaagcttagtgggagtattatggaaggagcttgtaacatccttttccattttcaaactaatattcttattttggtttc

SEQ ID NO: 82266 - DNA, 2313 bp, Zea mays
  Clone ID: MRT4577_175040C.1
ccttccgggctcggaactttgtccacctctgcgctgctggcctcctgctgctcctctccctcctgcagcgttgccgtccacaggaacaggacgggacgggttgagaaaatttcagcgaaaccatcggcggatacataagccgacagccaccggtcgttgcgtcttgctcatcagaacgctagctaggactaggagaagcttaacctttgcaaccaccgataagagttactactatttacataggagcggcagctgccaccgcgtgcgccggcgatggggtggtgggagaacgccaagagcgtgttcggcgacgccgggaacgtcggctgcttcccgaggatcgggaggaagcagtccaagaactcgtacgctttcccggcggatcctgggagcggtgcgttttctgctccttttttcttctttgctctgatagtctggccccttaggtttcgatcggattattatcctcgtgttttgcagtaaaaaaaagcaccgttattttgcttttatgcgagtgtgtgcatgcatgtcccttgctctgctatgaaaattctgaaacctggctattgctgcttgctggataactatcgctgctttgcttcagaaaaacggagagggtcaggcggccccgcccccgccccggagggaggtgatcacggtggaggtgccggaggtgcgcctgcgcgagctgaacgagatcacggcgtccttctcaggcgagaagctgatcgggcaagggtcctacgccaaggtctaccaggccacgacgcggagcggcaggctggccgtcgtcaagcggcttggagaagccctccaagcacgcgtccaacgacgtcttcctcaagcagctcggggtggcgtcccaggctcaagcacgacaacttcgtccgcctgctcgggtacaccatcagcggcgacctccgcgtgctggtctacgagttcgccaccatgggcaccctccacgacgtgcttcacggggacagggatgtgctgaggctgccgccgccggagcagctgggcagcgccgccaggccggtgctgcagctggattcaccgcgtgcacatcgcgctggacgcggcgagggggctggagtacctgcacgagatggtgcagccgccggtgacgcacaaggacgtgcgctccaccaacgtcctgctgttcgagggcttcagggccaagatcgccgactacaacatgttcagccaggccgcggacatggccaggctcaaccgctccacgcacacgctcggttccttcggctaccaggcgcccgagtacgccatgacgggccagatgacggacaagagcgacgtgtacagcttcggcatcgttctcctggagctcctgacgggtaggaagccattggaccggacgttgccgccgggccagcgaagcctggtgaactgggtaagaattatcgaatacttgtaggtcacccaccccctgactctgattccattattagttacgtaatctgaaggcaaccaaaatgatagtccgcatcaatcaaacagtgaaaaataaacgcgaaaccaaactggaataattgcaaccagttagtgtatcctactactaatcaccgcattcttacctaacccagctgagaatcgatcgaaagaggtactttcctagacacaagtggaagatttgggtggcattctgtcaaactgatcaaaatgtgttttctttgttcaacttcaagaaagttctagaccccagattaaaaatcgatggagcttgccctccgagtgctataaccaataatgttgatgcaccctggatggaataaccccaaccccaacgagcaccaaaaaatgggagagaaaaaaaaaacgtctggcgatttcctgatcatgttgatgcatcaggcaactccgatgctgacggaagacagggttcaggaatgcatcgatccgcaacttggtgatcagtatcctcctgctggagctgtcaagctcgggcgaatcgcggtgcagtgcctgcagtacgaccccaccttccggccgtccatgggcaccgtcgcccgcgtcatcaactacgccgtcttgcgagaccagcagggcgtcgtctgatttgatggcgtgccgaattttggtactatagctgtgaatatcatgcatgtcttgctgtgctatgttaagtaagctggccatgtttgagcagcggttattatctgagaatggatactatccttggaagcagcacggaatgggttgcggttacgaccacataaaacaatgggctagtttgtaatatctactatctatttttctctgagaatgttttgtgaaggtcaacaatgtagaccaaac

SEQ ID NO: 82267 - DNA, 234 bp, Zea mays
  Clone ID: MRT4577_175041C.1
acggccgattcattttcccattgctttcgagagcatattctaaacagagtgcatctgttttgtgattatattaatacataatttactacacagctgttgctgggtttatctatttgcaatggaattgaggcgtctcactcatgcgggttcggtttatgcctacagtcgcacggctccttgttaataactggcaacaatcgcactggaacctcgaattgcgatggatcaactact

SEQ ID NO: 82268 - DNA, 329 bp, Zea mays
  Clone ID: MRT4577_175042C.1
cttataacattgttttaagaatcgcgtataattactttccatcttctagttgttacaataggggtgtgggtaatctgtactactaggttacacgtttatataatcctctatcattttgcttaaaactactttgagtggtgtagttttgcacctcgaaacttataggtgtgctaagtactcgctctgtttctttttaccatgcacctgtattgtttaatcttgcacatatacagctactactaaaatgaaatgaatggattattcttgacacatcgttacatttttacctgttggcgaaattcttgtgcaaggtaagacatctgtagtct

SEQ ID NO: 82269 - DNA, 314 bp, Zea mays
  unsure (1)..(314): unsure at all n locations
  Clone ID: MRT4577_175043C.1
ggagnacaacaaggccttcgacctaatggctaaaggagagggcatccgctgcatcatccgcatggagaactagattttgctttttttctctggttgtctggtctgggttgggttaaataaaaggggcagtgtcctctgtggatgtggagccacgcttgtgtgtatcacgtccagtttggccttgtccatcaggagaagtagcttgcactttttttttcgtaaatacgcaacagcgttgcgtatcattgtattataagaggatagaagttttaacattaataaaatacaagagtggccgttctcggcctgaccga

SEQ ID NO: 82270 - DNA, 266 bp, Zea mays
  Clone ID: MRT4577_175044C.1
caatctttttctttttttattaatatttattataaactgatttggtttcatataaaaattagttttgattattttttaaacttgtgtcacagctgataaaagtttgcattcagaaactaaattaaaatgagtgatcattctgacaaaaatgtgtatcaaactccgctttcattgcgatatgctagcaaagaaatgggatacaacttttcggaccgcaaaaagttcactacatggcgtcttttgtgggttaatttagctgctgctca

SEQ ID NO: 82271 - DNA, 464 bp, Zea mays
  Clone ID: MRT4577_175045C.1
atcaaaggtttttttaaaccattaattttttacaggtgccaggtacaagcaaaaaagccaacaaagaaggaaaaaaagtttgacaaaacatggggggagacagggggggggaaagaaaggggggccccaaaaggcaaaaaaggggggggagggggggggggaaaaaaccggaaaaagaaaaggggccggcaaaatatccaaaaatgaagggggaaaagaaggggacaaagcttgggacaaggaaacgccaaagaaaaaaggaggggggggaaaaaattgtgggaacaaaagcagggccaaactcattagaaatcccctttaaaaaaaaaagggggcagaaaagggaggaaggaggctaggaaggacacaccaaaccaaaaaccatactgtgcaaaaaacgggggagccaccctgatcggcacacgggaaggggaaagggaagtgatacgaagggccaaaccagg

SEQ ID NO: 82272 - DNA, 163 bp, Zea mays
  Clone ID: MRT4577_175046C.1
cccacgcgtctgctcacgcgtccggtaaaggcaaggggaagggctggtgcgcgtcgctggagaagggcagctctgcgggcgccctcaggtggaggatgactccaagagcagtgacagcggcacaatggagtcgtcagtgacgagagatgttgccactgaccat

SEQ ID NO: 82273 - DNA, 550 bp, Zea mays
  Clone ID: MRT4577_175047C.1
atccctaatccaagaccagaacaggaacgggcaccgactgaagtgaagccgcgggaggcgattgcctcgaaacgaagttggctcaacgaacggaacagggaaatgacactgcactcacaggcacccctggagtggagcccgggacggcttcgatggcagcggccggctactctacttgttgcgggccgggccgggccggggccatgacaaaaggaacgggcctggatccggtgctgtgctcccgtgcggcgcggcttgcgtagaaagaaatgagctgtactctatggtctaccgcacccgttgcgttgcggggcgccgcttcggtttagctgagcttgccatgcaggaacgtgccatgctggaacgaaacgagcggcggaccgtacatgttaggtggtgagcagaccaagaggatatcattactttccttgcggtggagtcgagactctactgtcgagattatatgatatgaacctaacctagcgatgctgaccagatcagtgagaagaataacggttctctgttaagaaataaagcaagttaaggtaca

SEQ ID NO: 82274 - DNA, 270 bp, Zea mays
  Clone ID: MRT4577_175048C.1
aaaaaaaaaaaaaaaaaaaaaaaaaaaaaaaataaaaatataaaaaaaaaaaaaaaaaaaaaaggaaaaagaaaaaaaaaaaaataataaaaatacaaaaaaaaaaggcccgccttttttacgtttccatgccttgggtttgccttcttttggcttccaggtttttttttgcggtcacctaactccctttttctgttctcgggtccccaactttacttcctgtgaccctccttgtgctaccctcctttttggaatctcctgtttttcccc

SEQ ID NO: 82275 - DNA, 313 bp, Zea mays
  Clone ID: MRT4577_175049C.1
gcttgcagccgtcttaaatgtttcttgttttgttcataaacaatctctcttaagcctaacccacaaacaaattaagggattccggtcacacccatttccacccagaaagaacccacgaaccgagttcggaggcccatttttaacacctgggttgggaaacttatttttgtaacggatttccattggactaataaaaaaaaggggattgccccctacaaaaataaaaagggtttggtaaaatacaaaaaacaaattaccccttatttaaaaaaactaaaattttcctggggaaattgggctaccaaaaaccccc

SEQ ID NO: 82276 - DNA, 1623 bp, Zea mays
  Clone ID: MRT4577_17504C.1
cattgggtacctcgaggcggcggggtcatcgggcccggggcttcttccagcagcacacgctgacgcctagtacttctcccgtcctcccctctcctcccatcaacctctgctgacctccccgacccccgaggccgttcgttcggtgcctgcatggcagcagcgccggctgctggagctggtcggcgcgcgcaacaatggccaaggccgtgccctcgccgctcgcgctcgcgctcgcggccgtggccgtggcggcgctgctcctcctgtgccgcggcgccgaggcccgcgtcctcctcacgctcgacgacttcggcgccgtcggcgacggcattgccaacgacacccaggctctcctggacgcgtgggccgccgcgtgcagctccacccaggaggccgtcctcgccgtgccggccgggaaggtctaccagatctggccggtgcagctctccgggccctgcaagaagaggctcaagctgctgatttccggcgcgatcgtggcgccgtcgagccccgacgagtgggccgggcgggaccccatgaagtggctctacgtctacggcgtcgacggcctgtccgtcagcggcggcggcaccatcgacggcatggggcagcagtggtgggccagcacctgcaagcgcaagaagacccagccgtgctactcggggcctcgtccaaaggcggtgcacttcgaggagtgccgggaggtgagcgtgcagggcgtgacgctgcagaacgcgcagcagttccagctgacgttcacgcgctgctcctgcgtgaaggccagcttcctccgggtggtggcgccggcggacagccccaacaccgacggcatccacctcaacgacacctcccacgtccgcatcacggacaacctcatctccacaggggacgactgcgtctccatggtcggcaattgctctgacgtccgtgtgaaagacatctcatgtgggcctggccatggcatcagcatcggaagccttggaaagaaccggaccaccgacatggtggaggacgtgaaggtcgacacctgcttgctcaccaacacgaccaacggcgtccgtatcaagagctggcagggaggcacgggcttcgcgcgggacctgcggttcgagaacatcgtgatgaagaacgtctccaaccccatcatcatcgaccagtactactgcgaccagcccacgccctgcgccaaccagacgcaggcggtggaggtgcgcagggtggagttcgcgggcatccggggcacgtcggcgacgccgcaggcgatcagcatcgcgtgcagcgacgccgtgccgtgccgggacctggagctggcgaacgtcaacctgacgctggagggcggtggtgccggccgagccaccgccctctgctaccgggcgtcggggaagagcgccggcaccgtggtcccgccgtcctgcctcgccaggtcctgactgagactcacctagcgaagcagtggccgaagcgcgtatacacccacatgctgcatggctgtcgattggagctgttgccatacccaaacaaaaccaacctgttgattgtacacgccgttgttgacgacaaggaaacacagagaagaaatatcggagcttcttacctgcaaaaaaaaaaaaaaaaaaagcggcc

SEQ ID NO: 82277 - DNA, 524 bp, Zea mays
  Clone ID: MRT4577_175050C.1
aattcgttgctgtgcatcaaaggacaatataggatgactattgttcgtgagaggaagacgaggaacttcaaccaagtttaggcattaaggatgaaacgttgcacctcttggtggaggaagagatcagatatagatggcgagagtattttgactaattgttcaacggggacaaaggggacacaacctttcagttggatgagtcttttgatgacatcaatagacgctttatgcataggatccaagaatatgatgttagagtggtactgaaaaggatgaaatagggtaaggcgatgagccctgatggtggcatggagatgcctcagggacataactatagtatggctaaccaagttgttcaaccatatcttttggtcgaacaaaatacctaacaagtggagaagtatattagtagatgaacaagaataagggagatatttaaagtggtaccatttatcgaagaattaagttgatggggcatgctatgaggctattggagttatcgagcatcgtctgagaggaataac

SEQ ID NO: 82278 - DNA, 244 bp, Zea mays
  Clone ID: MRT4577_175051C.1
cccgccggcacgtacccggactgaccggcttcgacccacccgtgttttttttcgccgcgacctatagcgcacatacgggggattcatgggaagcaacggcgatgtgcaacccgagaacactctcgtggacggcaacactggcctgcatacaacatggcgtcgcagcatgctcgcgagaagcacggagacagcctgcctactaaccgttaacgccgagagacccaacgggagctccgtggaacaa

SEQ ID NO: 82279 - DNA, 552 bp, Zea mays
  Clone ID: MRT4577_175052C.1
tttatatttattttcagctgtgccgatttaaatggatatcggtatcctaaatatttaaaaatacgaatacaaataaatattagtacggatcagcattcaagtccggatattgagtagactcgaataccattattcgtaccatttaaccttgctcaagggtcaggatgaatgccgaccagcgaacaactttgatctttaacttttttaaactaaagtattctccgaatcagttaaccgcgtgatgggaatttgaagtttgcaactaatagcagactgctcaccaacccaaataaaggtggccgcccaaatacctaccgtttggcgtttgcaaccaccggaataatgcagcgccgcgtcgtctctcatcagtgctcaaatcaaatgcatacccaaacaactactactagctagtacgccgacgatctggcaggatattttccctttggaatcaatcattggttgcaaggacggaactgattttttttctgatcatagtttgcacaagtggtctaccgttacaaactgggttattttttttcacaaatatcaaaa

SEQ ID NO: 82280 - DNA, 2157 bp, Zea mays
  Clone ID: MRT4577_175053C.1
atgagcacaacctggaagataaaggtgccgtttggttcagcttctggccggattctagccgccagaagccgaagcgtctcccaaacgcctaaattctcgacccgcttttgcgcgccgcgcttggacgagaagccagccgcctacgcgacgccagaagcggccctcacgccgcgtccgcaaaaagccgccctcatttcgctagggttcgcaacccgcgtccctcacgacactctcgtccccgtcgcaactcgccgccgcagctctcctccccatcgcatctcccgcccccgcgctcgtcgttggccgaaagccggcctcattcgcgacggccacgacgctcgtctcgtcccccatcgcatctcccgccgccgcgctcgtcgtctgcgcagattttcccatcaactcgggttcttcctgttcggttccaagatccactgcaggcaagcagactccatagtcgacaaggcaattggaaggatgcaagagattgcggacaagatattttccgtagcccgggaaacaatccgtccgggacgcgggttgacctcatttgacgcaaccaaacttcgtgtagcattggaggacatagcttgcatgcttgagcaagactctcgggtgttgcaagagaatttgaacaacgtgaacaacgttatcaacccgggtgacagcagctacgaaccgtcagccttctcctcaccacccccagctgacgactaccttactccagattgggactttgcggagcactttgaaaacttctggggtctagaatatgactcggaccagatgccttcgtttagtgacaatgagatggacaagtctggcaaagtgattgcaaagtgggatagtagagcaacaaaaatttacacagaaatttgtgtagaagaggtcaatgcacgaaacaggccacaacaatttctaaatgccgaaggtgctccagatgagtggtgggctaagcaaaatgaagcaatgccagggtgtactatgttcaaaatagcccccctagagaatgaggacgagctaaaggttatgtttggacccattgtctgcacaaatcaaacaacccttgttcctggcgtcgaggatgcaatttcatcatctgatgatcatgtcgaagccactttaggtgggggtgaaaatagcacacctgacccatgctcaaatgcgactgggaagcataaggtgcgtcatgattctccaaaaccaaagaagaaaaaagatacgagggaagagtacatgaaacgcctagtcgaggcttttgagtcgcgttcaatgaccactaacaagtccatcacctctgctgagaccgaccctgtccgtgttgaggttaatgtgcagttgcaacaagtgatcgatgatggtgcacctgaaggcagcgacctacatttgtttgccactcatctgttgattgagaaaaagtttagagatgtatttgcaacactgaagaccaaagaaggaaggaacgcttggctacgcaatgctttcgagatacatatgggtgaccctgctgcacacacatatgatcatgacacggatgacggagatgcagaatttcttgttgccctatatgttgtagacatttggggcaggccttccagtgaggtttgtagaagaacaatggttgaaacaggttggccaggttcagtacatgacactagagtattacaagatactttgataacttatgcggacaggttcccccatccaccggaaggtaaatattatcttgtggattcaagttatccaaatagaaaggggtaccttgcaccttataagggtcagaagtatcacattgcagaatggcaaaatacgaggcaacctattgggagcaaagaagtattcaactatgcacactcgtcgctacgcaatgttatagagcgatcttttggtgtgcttaaaatgaagtcgagaattctgttaagtctccgttcattttcgcttaagaaacaatccaagataattattgcatgtatgacattgcataacttcattaaagacagtgctctacacgatagagactttgatgaactaggacctaatagccttggtcatgatgtatctgtaggtgagagtagtaatagcagtagtagtagcacatctgatgagttagacatgagtgcatttcgagatgcaattgctaatgcattagtgtcatag

SEQ ID NO: 82281 - DNA, 1704 bp, Zea mays
  Clone ID: MRT4577_175054C.1
atggtgttcaacaattgttgctcacgaagccgaaccaaacaggggtacccttcagagttccgcatcaactcgggttattcgtctgaggttccaagatccacttcagccaagatggattcagcagactccatagccgacaaggcaattggaaggatgcaagagattgcagacaagatttttttggtagcgagggaaacaattcgtcctggtcgcgggttgacctcatttgacgctacaaaacttcatgtagcattggaggacatagcttgcatgctggagcaagactctctggtgttgcaagagaatttggacatcgtgaacaacatggacaagtctggcaaagtcattgcaaagtgggatagtagagcaacaaaaatttacactgaaatttgtgtagaagaggtcaatgcacggaacaggccacaacaatttcttaatgccgaaggggctataggtcttggtcgagaccctcatactggttcaatcagtgcgccagatgagtggtgggccaagcaaaatgaagcaatgccaggttgtattatgttcaaaacagcccccctagagaatgaggacgagctaaagattatgtttggacccattgtctgcacaaatgaaagaacccttgttccaggcatcgaggatgctaattcatcatctgatgatcatttggaagccactttaggtgggggtgaaaacaacacacctgacccttgctcaaatgcgactgggaagcgtaaggtgcgtcatgattctcctaaaccaaagaggaaaaaagattcgagggaagagtacatgaaacgccttgtggaggcctttgagtcccgttcaaggaccactaacaagtccgtcacctctactgagaccgaccctgtgcgtgttgagatgtgtgatccttatgcacacacatctgatgatgatgaaatggatgacacagatggtgaattgcttgttgctctatatgctgtagacatttggggcaggcatttcagtcacggtcctagaagaacattggtggaaactggtattcaatgggttcagagaacgttggagaatagtaacgactgcttcgacatgtttcgcatgcgacgaactgtttttagacgattgcatgacacgttggtagaaaattatggtctgcttcctagtcggggtgtcagtactatggaagctcttggcatattcttgtgggcatgtgggggtccacaatcttttaggcagataaggaataagtttggtcactccttggaaataattagtcgcaagtatagtgaagtccttaatgcactgtataagatgtcatctgacataatcaagccaaaagacccaaattacatcgagattcatcctcgtttgcgagaggcgaggttttggccacacttcaaggattgcataggcgcaattgatggtagtcactttccagcgacagtcccggcctcggagcaagcaaaatatattggccgacacggttacgcatcgcagaatgtaatggccgtttgtgacttcgatatgaggttcacatttgttgtcacaggatggccagaatccgtacatgacacaagagtattacaagatactttgataacttatgcggacaggttcccccatccacctgaaggtaaatactatcttgtcgattcaggttatccaaatagaaaggggtaccttgcaccttataagggtcagaagtaccacatttcggaatga

SEQ ID NO: 82282 - DNA, 429 bp, Zea mays
  Clone ID: MRT4577_175055C.1
gggttcgggttctttttttaaaacaacaaaggctggtgcaacaaatttttggcggcggaccatttttggttttcttccgcgcccatgtttcaatatatcacggctaagggtacgggtccgggcagtaaataagctacactaaggggggcttgcccctttctcccctgccttataaaacaaaagggggggaaaactttgccgtattttggcccaaatgcattcattcggaggggttttcaaacccccaaaaaatcttttctttgtttcggaacgggtttcggccccctgggtatccccggaaattccgggccgggccctgcaggggtaccactttttccttatgggagccttattaaaaacttggggaaatcaggggtacagctggtagcggtgtaaaaattgttatccctgtacaatttccccacaaaa

SEQ ID NO: 82283 - DNA, 965 bp, Zea mays
  unsure (1)..(965): unsure at all n locations
  Clone ID: MRT4577_175056C.1
cggctcgagctcgagccgattcggctcgaggcaaacgaatgtgactccttaaggtagtactttatgttattattacctgttcattttgttgtcgtagtaactgcacttcaatacatattttcaatcgtctacacttgttttgcactagatggacaagtctggcaaggtcattgctaagtgggatagtagagcaacaaaaatttacacagaaatatgtgtagaagaggtcaatgcacggaacagaccacaacaattcctaaacgccgaagggtatgctaacctgataagaaagtttaaggaacgcactggtcgcacgtacacaagggatcaaatgaagaataggtgggattcgttgaagagaatgtttacccagtggaaaactcttaatgaaagggctacaggtcttggtcgagaccctcatactggttcaatcagtgcgccagatgagtggtgggccaagcaaaatgaagtaagttcatcttttttttcgtagactaacattagtattggccatctaaagtaggaactaccaattggtgcaggcaatgccaggttgtattatgttcaaaacagcccccctagagaatgaggacgagctaaaggttatgtttggacccattgtctgcacaaatgaaagaaccctggttcctggcgtggaggatgctaattcatcttctgatgatcatttggaatacactttaggtgggggtgaaaacagcacacctgacccctgcacaaatgctactgggaagcgtaagatgcgccatgattccccaaaaccaaagaagaaaaaagattcgagggaagagtacatgaaaagacttgtggaggcttttgagtcccgctcattgaccacaaacaagtccattacctctntctgacatgacccggttcgattagagattaaaaagcagttgctacaagtcaaggaagatggatcacctgaagggagcgaactacatttg

SEQ ID NO: 82284 - DNA, 181 bp, Zea mays
  Clone ID: MRT4577_175057C.1
ggcatctccaagccctctgttaaaccattctcgtgggcgcgcccgcggggccgggcgggaccaggggcggggctcagtcccaaaccggaaccgggaaaaaccctcgccaactaaccccctctggtcaaacacctccgcgggatgaggcaatgcctgggatgtcaaagaagccaaggcgtcc

SEQ ID NO: 82285 - DNA, 1005 bp, Zea mays
  unsure (1)..(1005): unsure at all n locations
  Clone ID: MRT4577_175058C.1
cgggaacgggatgaattccctgtgcttttgtgtagtaaggtcttagggaaacagggaatcagtttgttcttttaggttaatgggctgctgtaaatgtgttccctgtccttttgtgtgcactaccagtttatttaaggttgtcgttgtgtaattaagcaaattggaatattagtacttatggtattacctcaagttaatatggctagtatattgttcatcttttatgctgttttttatccgagagcactacttcgtatgtcgaaaactatatacttgttatgcactagatggacaagtccggcaaagtgattgcaaagtgggatagtagagcaacaaaaatttatacagaaatttgtgtagaagaggtcgatgctcggaacaggccacaacaatttctaaatgcagaagggtatgctaacctcataaggaagtttaaggaacgcactggtcgcacttacaccagggatcaaatgaagaataggtgggattcgttgaagagaatgttcacccagtggaaaactcttaatgaaagggctacaggtcttggtcgagaccctcatactggttcaatcagtgcgccagatgagttggtgggccaagcaaaatgaagtaagtacatctttttttcctagactaacattagtattggccatctaaaactaggaactaccatttggtgcaggcaatgccaggttgtattatgttcaaaacagccccccacagtcatttaggcagttaaggaataagtttggtcactcgttggaaacaattagtcgcaagtatactgaagtccttgatgcactgtttaagatgtcatctgacatcattaagcccaaagacccatatttcacggagattcatccgcgtttgcgagaggcgagattttggccacacttcaaggactgcataggagcaattgatggtagtcactttccagcggcagtcccggcctcagagcaagccanatatattggacggcacggntacacttcgcagaatgtaatg

SEQ ID NO: 82286 - DNA, 401 bp, Zea mays
  Clone ID: MRT4577_175059C.1
acatccacatgtcttatgagatttagtacgatcaccaactatcgcttccgagatacaactctctgtcctgttttagacagccatgctacatggatttaatccttcaggccacctattcgcaatgttagacctgtgcatcgctacacagtacttgtgttttacgcagatggcaagcaatgacatgtgcccagactcaataagagcgcatgactcaactatatctgttagcgacagccattgttatgagccctttagttctcagagcatacagagagacagtgtatcagtatcgcaaactagctacgattgacctcagcttttggctcgattagctggaccaagactttttgggtgacttcttatctctggctcccttgggacgatggaccgcggcttttttg

SEQ ID NO: 82287 - DNA, 326 bp, Zea mays
  Clone ID: MRT4577_17505C.1
acgctctctaccgtccgcgaccccaagcaccatctcgggggtgagtgcggcggatgaccatggctgtcgtaaagaacaagaggatctccaagggaaagaagggtggcaagtaaaagaccgtcgaccctttctctaataaggattgatctaacataaatgcaccctccgtgttcaacgtgcacaacatcgcgaagactgtactctccaggacacatggaaccaggattgattctgatggtcttaaccacagacgatttgaagtttgactagctgatcttcatggccacgaggatcaaccttacaggaaaataaagcttcttgctgaa

SEQ ID NO: 82288 - DNA, 1893 bp, Zea mays
  Clone ID: MRT4577_175060C.1
atggacaagtccggcaaagttattgcaaagtgggatagtagagcaacaaaaatttacacagaaatttgtgtagaagaggtaaatgctcggaacaggccacaacaattcctaaatgccgaagggtatgctaacctcataaggaagtttaaggaacgcactgggcgcacttacagcagggatcaaatgaagaataggtgggattcgttgaagagaatgttcacccagtggaaaactctgaatgatagggctacaggtcttggtcgagaccctcatactggttcaatcagtgccccagatgagtggtgggccaagcaaaatgaagagtacgaattggtgcaggcaatgccaggctgtattatgttcaaaactgcccccctagagaatgaggacgagctaaaggttatgtttggaccaattgtgtgcacaaatgaaagaaccctggtgcccggcgtcgaggatgctaattcttcgtctgatgatcatttggaatacactttaggtgggggtgaaaacagcacacctgacccctgcactaatgctactggcaagcgtaagttgcgacatgattcccctaaaccaaagaagaaaaaagattcgagggaagagtacatgaaaagacttgtggcggcttttgagtcccgctcagtgaccacaaacaagtctattacctcttctgacaatgacccgatgtgtgaccgttttgaacacacatctgatgatgacaaagatgcacagacatctgatgatgaaatggatgcagacacatgtaatgaagaaacagatgcagaattccttgttgctctttatgctgttgatatttgggggggtcatttcagtcgggctcctagaagaacattggtcgaatctggtattcagtgggtacaaagaacgttggagattagtaacgactgttatgacatgtttcggatgcgaagaactgtttttcgacgattgcatgacactttggtacaaaattatggactgctgccaagtaggggtgtcagtactatggaagctcttggcatattcttgtgggcatgtgggggaccacaatcgtttaggcagatcagaaataaatttggtcactctttggaaacaattagccgcaagtatagtgatgtccttaatgcactttataagatgtcatctgacacaatgaagccaaaagacccaaattttgtggagattcatgaacgtttgcgagaggcgaggttttggccacacttcaaggattgcattggcgcaatagatggtagtcacttcccagcggcagtgccggcttcggaacaagcgaaatatattggccgacacggttacacgtcgcagaatgtaatggcggtatgtgacttcgatatgaggttcacatttgtggtgacaggatggccaggttccgtacatgacacaagagtactacatgatactttaattacttatgcggacaggttcccccatccaccggaaggtaaatactatcttgtcgattcgggttatccaaatagaaaggggtaccttgcaccttataagggtcagaagtaccacgtaacggaatggcaaaatgcgaggcaacctattgggagtaaagaagttttcaactatgcgcactcatcgctgcgaaatgttattgagcgatcatttggggtgctaaaaatgaagtggagaattctattaagtctcccttcattttcgcttgacaaacaatcgaagataattattgcatgtatgacactgcataacttcattagagatagtgctctacacgatagagattttgatgacttaggacctaatagccttagtcatgttgtacctgcaggtgagagtagtactagcacatctgatgagttagacatgagtgattttcgagatgcaattgcaaatgcattagtgtcgtag

SEQ ID NO: 82289 - DNA, 109 bp, Zea mays
  unsure (1)..(109): unsure at all n locations
  Clone ID: MRT4577_175061C.1
ttctttctaccgcgtcacgctgacatcacggatcactttttcacccttctagcggaggcgggcaatcaggggatcngggcggcatgttacatcctccacaaactaaaca

SEQ ID NO: 82290 - DNA, 347 bp, Zea mays
  Clone ID: MRT4577_175062C.1
ccaccgacaaatactgataacttattgaaccaaatcacacccatgctacatggaaattaaatgatcggagattggatcatatgacaactcctactagcagacccaacacatgctttatttggctacccggtgagatctacggtacaaaagctacacctaccaccaagggagattagttattaccagccaaactttgttggcgcacatttgcagataacaggattaccgaccagcccagctgtgtcgacttgtgcactcaaggggactgcatcttgaactaatgctgctatggggggagcaaataaagacaggccaggcttaaaggcgtaacccaagaaaagccttgt

SEQ ID NO: 82291 - DNA, 695 bp, Zea mays
  Clone ID: MRT4577_175063C.1
gccgttcgggaaccccccacacccaccgccgttactcgccggcatctatcgatcgtcggaaaactaacccctaaccatcgtctccgagccgccgaggaggacaagaagcccgcggagggcggtgcccacatcaaccttaatgtcaagggacaggatggcaatgaggtgctctttcgcatatggaggtccacccacttgtggaagctgatgaacgcttattgtgaccgccagcctgtggacatgaatgacattgcgtgcctgattgatggtcgcagggttcatcgatagcacacccctgtatgactgcagatgcacgacggatactatatcaatgccatgcttcaccagaccgtaggtagcgttgctagcacctcctaagagcatcattcgcggagcttcattttgctctccgccctgcctaatagtaaacataacggaaaaatcctttttaacgaacttgtgatgctactggctccttgtgccattgctgaggtcacatcgcttaacctttgtttagtataatgactagggactttgcctctgtcatcactcagatatctatcccgtaatacatgccgccatgattgcactcccaatgacgagcagagcattggcttcgatgtgactgctcacacctccaaatggtctatggttctcagagcatccctctgtgcatgtctgggtgcctcctgatc

SEQ ID NO: 82292 - DNA, 797 bp, Zea mays
  unsure (1)..(797): unsure at all n locations
  Clone ID: MRT4577_175064C.1
cactactgcgcttgggggatctaaccaanacctgtcttcaggcaaagaaaacctgacgtattacaggccatgtgcaagctcaacttctggttgctcttcctggcaatggcttgcggaatgggatcaggtctggccacggtgaacaatatcagccagatcggcggctcccttggctacacgaccaaggagaccagcacactcgtgtctctatggagcatatggaacttttcagggaggtttggtgcaggcttcatatccgaccatttccttcgcctgcgagggttggcaggccattctttataagcatcacgctgctggtcatgagcgtcggccatgccatcatctcctccggtctccctgcgtcgctctacattgggtcggtgctcatcggcatgtgctatgggtgtcagtgggccctgatgccaagcataacatctgagatctttgggctgagccatttcggcaccatattcaacatggtggctgttgcaagccctgttgggtcctacatcctctcggtgcgcatcgtgggctacatatacgatattgaatcgccaccggacgagcactcttgtgtaggtaagcaatgctttgcactctctttcatgatcatggccggtgtctgtatgtttgggtccgctgtggcatttgtgttgtttatcagaacaaggacgttctataggcgtgtcgtatatgcaaggttacaatcttttctagacaagtaacaagtctttatgtaagatggctatataacttggaataatgtttgtacatgtatattatgtcagtgtttctat

SEQ ID NO: 82293 - DNA, 262 bp, Zea mays
  Clone ID: MRT4577_175065C.1
actaacgagagtccaatcccaggcggggtactaatgaggttcgggcgtataaaaccttttccattacggcaaccaacacccccctgcttaaataaccaaaccccccttgcttgacccctaaccttattatataatcccccttattcaacccttttcaacactcccatttttttttttcttacctcaggtttttcctaaaaaattttttttaccccccactttttctgtccacaaaaaacaaaattttttcctataaataaaa

SEQ ID NO: 82294 - DNA, 795 bp, Zea mays
  Clone ID: MRT4577_175066C.1
gatccttgcagatgacgcagccggccgggacacagcagcgccaccccctctcatggccctccccgacgacgccattcacctcccccgtgtcgccttcgtcaagtacgcccctccgccttccaccccatggcggagtgctcgattccttcatccgatggcgccacccacctcccctgctctcctccgccgccgcggctgtcgaggctcacttccaggcgcactggtccgcgctcgacgctgccgcacgccaggacccggtgcgggtcatcgccgcggggggctggcggtccccgctcgagctccccttcctgtggcttggggatgtcccctggtgtcgtctctgtcagatggtttaagatgaaagcttcatatatgagtctggtccgccggcctcgcgctcaactccgacaacgccgtcttcgatctcgtcacgaatcaaggtactggagtgtgaaaacctgtgtcgtgcgaatatctaggcttcaccggctacgccctctgctccgacagcaaaactttctcgttccatcaaggaccaaggctaaagcaactgccaagaaagccaaagctatgaagaaatcttaaaggctaccaggaagcgaagcaccttcagctccgtgaacaaaaacttatgctaatatcgtaacagaaccttttaattgcagttgtaacatgagtctgtaattaaacatttgatgaaacaatgaccaaatgttgttgaatgtgtaaatattaatataacttgtgtgagcaatactttttccacaaaaaaaaaaaaaaaaaggcgcccaggct

SEQ ID NO: 82295 - DNA, 819 bp, Zea mays
  unsure (1)..(819): unsure at all n locations
  Clone ID: MRT4577_175067C.1
ccggccggcaaactgaaattacaactcaaactttccaacaaacacacgtgaacagacaagaaaaaaaagatgtctttacaggacgaagaactcggacagcagctttatttgcaaatgcgacaacgacaacaaattgcactgagagcgcagcaaatggccgcatcgcaacgacaacaggcagtaaaccagatgggaggtcaaatggggaacacaatgaaccagatgaacgcaacgacgattcaccaaatgggcagtcctttcgacgatattccagtgcaggcgcccgaggataacaacatcctttaccagagaaatgtgtcaccggaagtcgcctctttcttctctgcctgcaaagccggcgacatgtccaccatccagtcaatcgttacctctcaacctcgctcgccagtcttccttcatcgaggtctaatcaacgccttggaaagcggaaatgtcgacgtcgcacgatacctacttcaatccggagcacccatctcacgacaaacaccaggaattgttctcaaagctccagctgaccggcaaatcgccctcttcgaagctctcgccgaacacggttggactgtcaatacaccatcctactacggcgaggttcttctcacacgactcatcaggtccaacaacgaacatctcatcgactggttcctcgcgcaaggcgcaaaccccaacctgggccgccagcacgatcaacgcgaccgtctaggcggaccagacacaaactcttgccaggcgctagaactggcagcctcgcatggcagtgtcaacttggtgcagaagcttctanatgccggcgctgaaatc

SEQ ID NO: 82296 - DNA, 594 bp, Zea mays
  Clone ID: MRT4577_175068C.1
ttttttttttttttttggtgcgatccgaggacatgttcattaaacaatcaattctatgctctaagaaaccctttgggtgccaatgcctggaagattttggtcttgacaagcggctaatcttggccgtcaagttcaacgacaaaagcgccaccaaggagaagggccggctcttcgattctatgatgctcgtagctgagtgttccaacaccacctgcctccaacaagaaagttggtccttctcgtaaagcgtagccagcccatctcatagcaaaggcacgcaagatgtgtccatgggcaacgagtaacacgtcgccgcattggtcgcttcctttgtccatggctggcttgtgatatttctcacgaatctcctctatcaattggtcaagtcttctggtcacatcatggggagcctccccgccaggacatccatccttccagatgtcccaagaccctttgatcccttgttcagctctgagcttacgaatctcaggtgttgcgatcccttcgtagtcaccgtagtcccattcccggatgtagtccgtgacctccaccttggcttcacattgaaggccagtaccatcaggagcaccgtga

SEQ ID NO: 82297 - DNA, 695 bp, Zea mays
  Clone ID: MRT4577_175069C.1
attgggaccctcgaggccgccgggggggccacaattcacaggccctctccgatactcttccttcctcggtccacctttctctctctctctctctctctcccggccctctatctccttagctaccaagaacacgctgttcgatcgtctcgtgctatgctagcgtggtagtctggaagcgtctccttttttttccttcttcctgttcgatccagttctacccgttcaatccaatccaagctcctcccttcaccccaaagcgacgagagagagaaaaggtcctccatggccaggcctgcagtccaccctcgtcacggcagccggccggcgctctgaactctcgagccgactctccatcagccacgtcgcgcgccgcccaggagaaggagctctttaatctgtgctagcagcggtcccagagaatgcggcagatctcgtcgctgctgcagggcctggcccggtcactctcggtggggagggacagggacagggacaggaaagggaacggcgcaggcgacggcaagaccgccgtgccggcggtgctgcggacgtcgggcaccctgtggggcgacggctcggacacgttcgccgccgtctgctcgcggcgcggcgagaagggcatcaaccaggactgctccatcgtctgggaagggaattcgggtgccaggagggcaccatcttctgcggcatcttcgacg

SEQ ID NO: 82298 - DNA, 615 bp, Zea mays
  Clone ID: MRT4577_17506C.1
cggccttcccgggtcgcccagcgtcggccgggctgaaggacaagggcctcgacgccatgctggcgctggttgaggacgagacgctatcgtcgttctcctccgcgtcctcgtcgtccgacgaagaggcaggccggacgcagctgaggcgcccgtcgtcggggagctacgggcggcggtcagccgaggagccggtggtgtgcagccccgcgagctcgctggtggccgtcatggtgcaggccctcgcgcacagggtgagctacgtgtgggtcctcgacgaggacagcgactgccgccttgctggcatcgtcacgttcgcggacgtactgagggtgttccgggagcagctgctgtgagatctggaagagtgtttgctgtttcctcctcgatcgcatcttgtgctgtaatgagagaagaacatgagctcttgtcacggaccgagcgccttcgtttctcaaaaaacattttggtttggatcagagtatgtatgtgtttgcttgcttgcttggtgcccagtgccaatgaacaacaaccttgaccgtgcgtggtttgcttaaattaaattgcttattaataaatgaggcggcactgtgattgatgctgtcggttattgtgctt

SEQ ID NO: 82299 - DNA, 238 bp, Zea mays
  Clone ID: MRT4577_175070C.1
gcaggctccggacgcgttacgtctcgtaaccacaatccgtttttttttataccctaaaatggttctactccggggggattttttttacaccgtgcgggcactgctatatgagctaacttatgtttctatgagtcatcattattcaagcttgttacccgctccctattataccttatttggtaaatgctcttacatactaattatttcacacatgtgatttaactccgcttgcttcaca

SEQ ID NO: 82300 - DNA, 3633 bp, Zea mays
  Clone ID: MRT4577_175071C.1
cattgggtacctcgaggccggccgggaaaacacaattcacaggccctctccgatactcttccttcctcggtccaccttttttttcccggccctctatctccttagctgccaagaacacgctgttcgatcgtctcgtgctagcgtggtagtctggaagcgtctctttttttttcttcttcctgttcgatccagttctacccgtccaatccaatccaagctcctcccttcaccccaaagggacgagagagagagagagaggtcctctatggccgggcctgctgtccaccctcgtcacggcagccggccggcgctctgaactcccgagccggctctccatcagccacgtcgcgcgccgcccaggagaaggagctctttaatctgtgctagcagcggtcccagagaatgcggcagatctcgtcgctgctgcagggcctggcccggtcactctcggtggggagggacagggacagggacagggaccggaaagggaacggcgcaggcgaccgcaagaccgccgtgccggcggtgctgcggacgtcgggcaccctgtggggcgacggctcggacacgttcgccgccgtctgctcgcggcgcggcgagaaaggcatcaaccaggactgctccatcgtctgggagggattcgggtgccaggagggcaccatcttctgcggcatcttcgacggccacggccagtggggccactacgtggccaaggcggtgcgcgactcgctgccgccgtcgctgctgtgccactggcaggaggcgctcgctctcgcgtcactcatcgacgacggcgagaagaagctcggcgactgccagttcgatctctggaaacggtcctacgtggccgcatgcgccgccgtggacgatgagctgcggcgcagccgccgcttggacgcggtccaaagtggctgcaccgcgctatccatcgtcaagcagggggacctcatgatcgtcgccaacgtcggcgactcccgggccgtgctgggcaccacgtccgacgatggcgccattgcggctgtccagctcaccgtcgacctaaagcctaacctgccacaggagaaggagcgcatccggcggtgcaatggtcaagtgtactgcctcgccgatgagcccggggtgcaccgcgtgtggcagcctagccgagagtcgccggggctcgctatgtcgcgcgcgttcggcgactactgcgtcaaggactgcggtgtcatctctacgccggaggtgacgcagaagaggatcagcagcagtgaccaatttatcatcctcgctaccgacggggtatgggacgtgctctccaacgacgaggcggtacatatcgtggcggggacgccggaccgggcgaaggcggccaagcggctggtggagtgcgccgttcgcgcgtggaggcgcaagcggcgcgacatcgccgtcgatgactgctcggcgatctgcctcttcttccacccgccgccgccgtcgtagacacgaaaacctgtaacgtgccgaagtccacgccaaggaggagggggcaacgaaatgcacatctcaagacagactacgattattgtgcccgtggcgttcgtagagtgcactgccgccgtccaccgttcagaacgtgcagtttgtcgcgtgagagcgacactccacgattaggaactgcagccggtgcacggccaaacaaaaagatctccggctttcacacgttgccagtcaagatgtacgagaacatcagagaaaaagggtaggaaagacgcattttgtcctcatttttgggtgtctggctctgaatttctcagtcgcaattatagatgcacgtcaatcacaatttggtcacgagcgacactccacgattaggaactgcagccggtgcacggccaaacaaaatgcgtctttcctaccctttttctctgatgttctcgtacatcttgactggtaacgtgtgaaagccggagatctttttgtttggccgtgcaccggctgcagttcctaatcgtggagtgtcgctctcacgtgacaaactgcacgtttctgaacggtggacggcggcagtgcactctacgaacgccacgggcacaataatcgtagtctgtcttgagatgtgcatttcgttgccccctcctccttggcgtggacttcggcacgttacaggttttcgtgtctacgacggcggcggcgggtggaagaagaggcagatcgccgagcagtcatcgacggcgatgtcgcgccgcttgcgcctccacgcgcgaacggcgcactccaccagccgcttggccgccttcgcccggtccggcgtccccgccacgatatgtaccgcctcgtcgttggagagcacgtcccataccccgtcggtagcgaggatgataaattggtcactgctgctgatcctcttctgcgtcacctccggcgtagagatgacaccgcagtccttgacgcagtagtcgccgaacgcgcgcgacatagcgagccccggcgactctcggctaggctgccacacgcggtgcaccccgggctcatcggcgaggcagtacacttgaccattgcaccgccggatgcgctccttctcctgtggcaggttaggctttaggtcgacggtgagctggacagccgcaatggcgccatcgccggacgtggtgcccagcacggcccgggagtcgccgacgttggcgacgatcatgaggtccccctgcttgatgatggatagcgcggtgcagccactttggaccgcgtccaagcggcggctgcgccgcagctcatcgtccacggcggcgcatgcggccacgtaggaccgtttccagagatcgaactggcagtcgccgagcttcttctcgccgtcgtcgatgagtgacgcgagagcgagcgcctcctgccagtggcacagcagcgacggcggcagcgagtcgcgcaccgccttggccacgtagtggccccacgggccgtggccgtcgaagatgccgcagaagatggtgccctcctggcacccgaatccctcccagacgatggagcagtcctggttgatgcccttctcgccgcgccgcgagcagacggcggcgaacgtgtccgagccgtcgccccacagggtgcccgacgtccgcagcaccgccggcacgggcacggcggtcttgccgtcgcctgcgccgttccctttcctatccctccccaccgagagtgaccgggccaggccctgcagcagcgacgagatctgccgcattctctggggccgctgctagcacagattaaagagctccttctcctgggcgcgcgacgtggctgatggagagtcggctactcggctcgagagttcagagcgccggccggctgccgtgacgagggtggacagcaggcctggccatggaggacccctctctctctctctctctctctctctctctctctctctcgtccctttggggtgaagggaggagcttggattggattggacggacaggactggatcgaacaggaagaaaaaaaaaaggagacgcttccagactaccacgctagcacgagacgatcgaacagcgtgttctttgcagctaaggagatagagggccgggagagagagagggaaagagagagaggtggaccgaggaaggaagagtatcggagagggcatgtgaattgtggtttcccggccggctcgagggggcaatg

SEQ ID NO: 82301 - DNA, 206 bp, Zea mays
  unsure (1)..(206): unsure at all n locations
  Clone ID: MRT4577_175072C.1
atatcatccanattaatctaacaacgaacgacaactccacgcagagcaacaatggcgccgcacagcatcatcggcagtacgtcggccgtgaggcgacacagcgtcatcgacgagaactcacagctaggaggtctgccacgtacgagcagcttcgtctcatactgcgggaaatcagcgcgactagcatgtcaccatcatgcagatac

SEQ ID NO: 82302 - DNA, 220 bp, Zea mays
  unsure (1)..(220): unsure at all n locations
  Clone ID: MRT4577_175073C.1
cgatggtacttcgagccgccgggactcgcacgccaccgcccaccgcacttggcctcgcncaactttcccctcggcctccgcccagtcccgcacttccaccatcgcacctcgcagatgccccagcaggctccaaaaatccaaagccgtcccttcccaaccctcccttcgatccctggggcggcggccgggaccatgacgaccggatccaacggcgacggag

SEQ ID NO: 82303 - DNA, 611 bp, Zea mays
  Clone ID: MRT4577_175074C.1
tcgatggccgccgccgactcctccccgtctccacatcgacattttcccttgagctcgcgatcggccacttgatccccgggctcgagcatcgacgagtgcctcgtggagcttgctcctccactgccgtcggcgctgctctcgcggagagcggcttcctcggcaagaagctcgtcaccagcatcatcatcaggaataagaagaacgggtacgactccctgcatggcgccaccaccaccaccatcatcagagccatggaggcgaacaaggagacggagcaggacaggcgcaggggcctgaccttggacacctcgcacgaccagcaggacatctttttttttaatccccccgcgcccccgctgttccaggggcccatgggggacggcacccacctcgccgtgctcagctcctaccactacctcagccagggcgctcaagcactacagcttgcaccacctgatggatggctactacatcgctcccgcggtcatgcacgatctcgctgtccgcctcggccagaacttcatgcccctgccaaaatcatggtggccctcatcccgcgtatttagggaggcaacgtccaacccaactcctcccaacccaagccttgtctt

SEQ ID NO: 82304 - DNA, 360 bp, Zea mays
  Clone ID: MRT4577_175075C.1
agaacggataagggctggtgctgatgactttttatcgagaatggtcaaaactggggggcgtgtacttgagaagctgcggggcacggcaataatcggtcaccttatcaaaggtttctatagatgcttgacctcagacaataattgcaacatacattgaactcaaaactccatacccttgtaaccgctataatatctacaccatctgagcctataggtcaaactaactgggttgaggctgcaacgaacaataaatattgatttagtaagttacatgacgctcactttaatcttgagcttgctgttattttcacgaaaattggcagaaagctaacatttaccattggcctctatgaactgata

SEQ ID NO: 82305 - DNA, 228 bp, Zea mays
  Clone ID: MRT4577_175076C.1
aaccgtgcgaccggcaacgcccatcaactactcgttcatggaacagagggccatagacacagcacgctacagcgatggaggatcgagggagtccccaagcgtgcaagagcgacgcccgcagcgagggcaaggggcaagctcaggggggagagattccggggcgtggtgacgtcctgcgagccgcggcagcacacgaagagaggagaaaacacgctcatgcgagggcag

SEQ ID NO: 82306 - DNA, 605 bp, Zea mays
  unsure (1)..(605): unsure at all n locations
  Clone ID: MRT4577_175077C.1
ggnacaattacacttacttggntgtggacgatgatgtgcctttttctgtgagggatagattggcaagtggtgcaagttctcaacatgtaatcatcaatgttgacaagattgtttttaccatcactcatgaagtctctgatactgatatttttttcccacttgtccaaacctgcataagtgatatccgtgttgttacgcaaatatttccatctaaaatcaggattctaagttcattcaaagtctcagcgcagtacttcattgcacgaagaaatctgtgggaagaactcatctctcctatcacctcctatacattctttcgatttaggttttttaccccagatccagttactaagtatggaaagacggccatgcgtttcttctttcaattaaagcagaaggttcatcttcgttcttgcaggtggatgtatttattaatgagctttcatttgacatccttctatatttggttggaaagttaaacttgatgggtccatatgctgtcaaaagctcggctatctttcctaactcctgcaagatagagaacggctcaaggctggcacttgtgtgtcattttaaagataatggggatgcagtaattcctgggc

SEQ ID NO: 82307 - DNA, 276 bp, Zea mays
  Clone ID: MRT4577_175078C.1
gagcacaacaaagtgtgttgaacaaaacaggcacctgtcgacaattaacaagcgccaacaggtggataaaacactgatccatccacaacatgtgtggcatgcactagcaagggaaacactggccttcacacacagacttgaatagccgatccacacacgttggctgaactcaaaacctgaactgtacaaatggatgactgccacagagtgtcaacttacgacatactgaatgacgggcattagcgttaggcggagcttacttctagtgggcgtgga

SEQ ID NO: 82308 - DNA, 373 bp, Zea mays
  Clone ID: MRT4577_175079C.1
ggagaagactttccgcggaggcggaggcggaggctacggcgggttggaggccggtggcggaggcggcggcggcggctacttcacccccggggagggaaggccattcaagcctggcggttgggagaccaccaccccttcgtcaaggggggggttcctcaacccttgggagggaaggccattcaagcctggcggttaggagaccaccaccacttccttggtaaggcgggggggttaccggcgggccacccgcaagggtttcttaagccggggggggcttgacccccaccgcgacccaaaggttgggctgaacggggaaggcaatcgaggggatcgtgaccagccccacctggttcggggcaaggagcacgtgcct

SEQ ID NO: 82309 - DNA, 355 bp, Zea mays
  unsure (1)..(355): unsure at all n locations
  Clone ID: MRT4577_17507C.1
gcggctaacaaacccgtttattttggttcccgccaggactccagggggggccgtttcttaataacataggctttacattagggggggggggggtccgggcgggaagtccccgtcgtcgctggtgggccggggggggccttgccgtccccgggaaacagcacccagcggctgggctgggctcagggggggattgatcggggggtgatgatgcccccgttgttgttggcccccgggtcggcggggggggggggggggttctccagggggccggggccgggggcccccgactggtggccccnnaacccccctaaggccccccgggggggggggccgttcttgttctcctggggctggg

SEQ ID NO: 82310 - DNA, 148 bp, Zea mays
  Clone ID: MRT4577_175080C.1
tgccacgcgtacattgttaagggacctaatttccttatcaagtacctacctggacaattgggagcatttgaaatgggaccgggacaatcacgcattactccaatggcccaagtcacaaaggcaattctcgagaacccaaatgacaaca

SEQ ID NO: 82311 - DNA, 379 bp, Zea mays
  Clone ID: MRT4577_175081C.1
cacaacgaaaagctggctttccttcaaaaaggggttatatgtatttaaaacaatttttacctgtctaagctacaaaggtctcagaaaaagcgggtccaaacccataattggaaaaaaaaactacagaaaggccccctttaccacaaatttacaacagtccccaaaccccggcagctgggggaagaaaaaggtttttttggcaaactaaccgtccaaaaaggtaacatcgaagtatccaagaggaccatttggctcgggggtatctttgccggaagcaagttggcaggccccccaaaagttatttggggagcattggtttgggacctccccccctgggccccgagtccggggaaaccccaccccgcctttgtggaccttg

SEQ ID NO: 82312 - DNA, 329 bp, Zea mays
  Clone ID: MRT4577_175082C.1
ctcctaatgaacggcataaacacccaccgaggagaccagttatggatggggcggatcaggatataatgattctacagaggggctgccacatataactacgcataactatgcgagaaggccaagccaaaggagctttacacacctgataaaaacatgctattactcatataggacaaacaaaggctacaaacaccacaaactgaatctaaaaaagctgactagtctaccagaacactttgtggataaatgatgaaacttcttattcaacatacgcaataacaacagatcatattttgcctgatcgtacaaagaatactcaaggctattac

SEQ ID NO: 82313 - DNA, 257 bp, Zea mays
  Clone ID: MRT4577_175083C.1
gggggaacccttttaaaattaattcccgggaaaaaaaaaaaattttttcattgttggattattaaaaggattttttgtgcaatttgttgggattttaatttcacttggaatgccccccattgatttttaaaaaaaatttttttgtttaataattcccaaccccaaaggtcccaaaataacagtgacacccccagggcaaagggttttcaaaaaaatgggtttttttgttttaccctttttttttctttaaaccaaaa

SEQ ID NO: 82314 - DNA, 218 bp, Zea mays
  Clone ID: MRT4577_175084C.1
aatttttggaatatattctagaagaaattagtggtcaaaggttaacattgaaaccgtggaaaggcaaatgtggcaaactatttttcaccagagggagtaaatccttagttttgatcactctaaccatgcagtacatatactatctcttcttctgctgatgattccaaatgatttacacaatgttctaattcccaaacatacatgccatgttctaattc

SEQ ID NO: 82315 - DNA, 171 bp, Zea mays
  Clone ID: MRT4577_175085C.1
aacttggaacattaactaggtcgattcactagttattattcacaagaacttaacatgttttaacaagtctgagtggtcattactatcattcggaataaacacaggcctgtttacacagtattggaagaagctggtgcagtttcatgtcatctttattgaacactgtttttt

SEQ ID NO: 82316 - DNA, 582 bp, Zea mays
  Clone ID: MRT4577_175086C.1
cctcgaggccggccgggatcgataaccatctcaacagctaaccaacagccaagatggtcaacctccgcacccagaagcgcctggcgagtgccgtcgcaggctgcggcaaacgcaagatctggctcgaccccaacgaggtcaacgagatctccaacgccaacagccgcgccactgttcgcaagctcatctccgatggcctcatcatccgcaagccggtcaccatgcactcgcgctcccgcgcgcgtgagctgaccgccgctcgccgcatcggcagacaccgtggtaccggtaagagaaagggtaccgccgacgcccgcatgcctagccaggttatgtggatgcgccgcctccgtgtcctccgtcgtctgttggtcaagtaccgcgccgccggcaagatcgacaagcacctttaccacgagctctaccacctgagcaagggtaacaccttcaagcacaagcgtgccctcgttgagcacattcacaagggcaaggccgaggctgcccgcgagagcaagctcaaggaggagatggacggcaagcgcgccaagaccaaagctgcccgcgagaggagacaggagcgcg

SEQ ID NO: 82317 - DNA, 324 bp, Zea mays
  Clone ID: MRT4577_175087C.1
cgggacaaatcggcctacacgaactaccatacaaaataaacttgtaaagccgtttaaacactactatattcccgcgccgtctaaaagcgaacaaacagtataaagttacaaattgcactcttacattccttcgccgacactggggccggacgcgaaatacgcctacacgcgctcgccacggatgcggagggcgagctgtatatctttggccatgaaggtgacccgctttgcgtggatggcccaaaagtaggtttcctctaacacgccgacaaaataagccattacagctttctggaaggccaaaactgcattggttttgaaacc

SEQ ID NO: 82318 - DNA, 327 bp, Zea mays
  Clone ID: MRT4577_175088C.1
catcacatgcaccgaacacatgctgactgctgcagaagccctggcctcgagcagcaaccaagaacagcaccgcccaacccaaaggcttacctacagaagctgacaggaaccaagaatcccggatgtctggcaccggaccctaaacgacccaaagattacctacacactagagtcactggtgagtacgaccggaagcctaacagcatgactcagtgcataaaaaaggcatgacaccaaaccgactgatcacagtgcgagtagagcccaaccataggaggcggcccccggcacagtcacactccagaatgcttcagatcacgcgagccc

SEQ ID NO: 82319 - DNA, 734 bp, Zea mays
  unsure (1)..(734): unsure at all n locations
  Clone ID: MRT4577_175089C.1
ggattgaaagaagaaatattttcgcttgagaatggggatacaaaagtagtagaaggacatgctaatctcaaaagtttcatcactgatttttacaagagggttcatttggtgacctagaagaaaattccttcactttagatgaattcaataacttagatattttctaggtctctagctgggagaataattttctcacatgtaattttacagaaggtggaattaaagaggccatattttcaatggagcacgataaagcctacgaccatatgaattcgctactggagtagattgagggggattgaagaagattaaatccctttctagtcaaaattgaatataaagggattcaatccctctcattcccctccggtttgagtggaaccgaacatgccctaaagggaacctggtataaatgattcacgatctataccacagaaagacttagtaacttgaaaggaaaacatctatcatccagagatcacctagttttgtttaatttggttcttactatcgaggggagtgctcaagaacccattaatttatacagattccttatatagagatgtgaaacctcttaagggcaaagcagntatttacctacataaccctaactagagttacttaacagtttttgtgtttaaaagatagaccccgacacccaagggtgacggcagggggcatagaggggcaatgtccccctaatgcttaccctaattctaaggggactggttagg

SEQ ID NO: 82320 - DNA, 747 bp, Zea mays
  Clone ID: MRT4577_17508C.1
atggcggcggcgctggagtgctggtcggggcggccgagcaccgatgaggagacggtggagcacgttctcatgaagccccacgggcgttcagatgactccctcccgacctgcgccgattctgcccgcgctgccggcgagccgacgccgacgccgacgccggcgccccccaagaagtggcagcggctgggccgcaactttgccggcgccatcgccgcgttcaagaacacgctgaacctggatggcggcggcggcggcagcggcctcccccgcgacccatcaccgcgagccgagaagccgccaccgctcctcctccgtggcctcgcgcagctctactcccgcggcgccgccaaccagcagctgccagaaaagctcgtcgctgacctccgccgccacttcgacgctctccccaacagctacgcacaggcaggatatgacatgaaagatgtcctcctgcatgcccgccttgcagagcaggcgacaggatcactagacagcccttcgttctgttgcaagaagatccagatctttgagaagagagggctgacacttggcgtcgtcatgatacttgtgcagactgggaacgaggcgctcttcaagaaccaggttgagtccgcgctgaaatcggtagtaaagaagcaaagaaagaacagtggtggtgtgaagctaccatttgggctctgcggttgtcaagaagaaggatcaagaaacttcgatgaggagtcgatgtttgatccagatgatggtcgg

SEQ ID NO: 82321 - DNA, 115 bp, Zea mays
  Clone ID: MRT4577_175090C.1
gagcactgggtttgtatatcaggagtttattggagatagatgatattggaaacactgatagcaccacgcgcacgtcatgttgagcacaaaaagagcgatgattactgcatttgaa

SEQ ID NO: 82322 - DNA, 1238 bp, Zea mays
  Clone ID: MRT4577_175091C.1
tcgatcgaatcaagtcagattcagggaggggaaggcaaaaccctaacctctctcactccgccgccaccgggggagcgcgaggaggacccttcatcgacccgccgcacgaacaaagctcccatggccaacctcggcggtggcgccgaggcgcacgcgcgattcaagcagtacgagtatcgcgccaactccagcctcgtcctcaccacagactcccgcccgcgcgatacccacgagcccaccggagagcccgagacgctctggggcaggatcgaccccaggtccttcggcgaccgcgccgtccagaacaggccgcccgagctcgaggagaagctctccaagtcgcgcaccaaaaagtctaagcgcgacgctgctgccgcgctcgactccgccgacctcccccgtcgcgacgccaagcgcaggcgccgcgctgcttccgcccaggaggtctccgtcctctccctcaccgacgacgccgtgtacaagccccagaccaaggagacgcgcgccgcctatgaggccctgctcagcctcatccaacagcagcttggcggccagcccctcgatgtccttgctggggcagctgatgaggtgctcgctacactcaagaatgacaaggtcaagaaccctgataagaagaaggacattgagcagctgctcaaccctatctccagccagctctttgatcagcttgtctccattggcaagctcatcaccgacttccatgatgcggcagccggtgatgcttccggtgcgccttccgccgacgctgtggacaccactctggatgatgatgttggtgttgctgttgagtttgaagaagacgaagacgaggagagtgattttgatcaggtgcaagacgagctggatgaggatgaggaagatgacatggctgagttgaatggtcctggaggtatgcagatgggtggtgagttagacgatgacgacatgcagaacgccaatcaggggctgaccgtcaatgttcaggacatcgatgcttactggctccagaggaagatatcccaggcatacggggatggtgacattgatgctcaacagagccagaagcttgctgaggatatcttgaagatcattgccgagggtgacgacagagacgtcgagaatcgccttgtcatgctcttggactatgagaagtttgatctcattaagttgttgctgcgcaaccgtctcaagattgtttggtgcacccgcttagccagggccgaagatcaggaacagag

SEQ ID NO: 82323 - DNA, 1338 bp, Zea mays
  unsure (1)..(1338): unsure at all n locations
  Clone ID: MRT4577_175092C.1
ccacgcgtccgcggacgtgtggggtattagttcccaaactcagaaggaccacacatcgattgccgaaccaattgcccccaagcttagtgtggactacccatttcctccacaccttgagtatgcatatccaccaccagatggaaacatattatcaaatattgtcaatgccctgatcgccgtccctcgattctacaaccaggtcctgcatttaatgaacaagatgaaccttcctgctccatttcggatggcattgcctactccaccactaccatcgcaagttcctgttatccctcatcctcagccaccaccgggatctactacaactggggagcttcattcagcagatttgtctagtgatgagtctgagttagaatcatctgatgaagatattgataaacggaaaatcaagcgtgcaaagcatgaagcaattgttggtcctgcagttgacaaaaacgttgctcatgaagcagtgggggtgaaatctgttgcattggtttctaatgagcttcaagtgataaaaaagaaaaacccagtacttcagataaaaattacccctaagcctatacagaaggaaccacctgtcccaagtatgactgaaaatgaaccggattcaactcatgaacaacttcaagagaaacattttgtcacacctcaggaaatgtcgagagagaaattaccaccagaggagattttatcccttcctatgttcaagaattacactccaggaaatccagccagtgttctgtacattaagaacttggcaaaggatgtcactcatgacgacttctactatgtctttggctctgttttcgaaagcatggacagtgcaaggttgggtttaagtgtaaagttaatgcaggaaggacggatgcgtggtcaagcctttgtcacatttcccacggttgaacttgctcagcgtgccctgaatctagcgcatggctatgtgttcaaaggaaaaccaatgatcatacaattcggaagaaatcctgctgctaacaaagcttcctaaagcaggatacaattttctttccagattttgatagatttcagaagttggtaggaactggaaagtgacaaaccagaggttgtgggtatctgttggctgttgttactgcaacctgtttggcatacacactaggctgattggttcctcccatggtgtaatgtttgtcgaaaaataacattgtacattccagtttgtggattattaaaagaattactcgataaaagcggacattggaggttataagctgcaaatcgagcaatgactgctagcagcctgccgtcactgagaatcaggtcgttcctatgtatcaaaacttatatanattagagagc

SEQ ID NO: 82324 - DNA, 843 bp, Zea mays
  Clone ID: MRT4577_175093C.1
catcgaggccggccgggaaggccgcggcccccattaaagtaccgccgcccactccctactgcttttcgcccagcagcccgacttgagcctcttccttcttcctcacccgtcgctttcaactctcattcatcaccatggccgacaacgacgcgcagcatgagcacaccttcgacagcgccgatgccggtgcttccaagacctaccccatgcagtgttctgctttgaggaagaacggtttcgtctgcatcaagaaccgcccctgcaagatcgtcgacatgagcacctccaagacgggaaagcacggtcacgcaaaggttcacttggtcgccattgacctcttcaccggcaagaagctcgaagaactttgcccttccacccacaacatggacgttcccaacgttacgcgccgcgagtaccagctcctcgacgttactgatgacggcttcctttctctcatgaccgacgatggtgctaccaaggacgacgtcaagattcccgatggtgaggttggcgacaagatcaccaagctgttcactgaggagggcaaggacactaacgtcattgtccttactgccatgggtgaggaggctgccattgacgctaaggaggctcctaaataaatgatcggttggttttgtagactgtttggcaggatgcgaggcgcagaatgtgaacagcttacggatggggctgcaacactctttgcatgcattttgcaaagttgcacccttgtggcaaacgaagcattctcctcggcgatttgcgccgggcgaccggtgctggacgttcttcggacggatttggtttctttgaattgccatgtaggggaaacatatcatgaat

SEQ ID NO: 82325 - DNA, 179 bp, Zea mays
  Clone ID: MRT4577_175094C.1
cgatccgtgcctttaggaagaatggtcggcatgaaggaattggggcttttttccagggtcttgggcccaacccaagccagggggggcccctaattggccttggctttgggaattaacaaggtgggcagggttggcctaggagagaaaatcaggttttcaccctgaggttggccgtttcc

SEQ ID NO: 82326 - DNA, 239 bp, Zea mays
  Clone ID: MRT4577_175095C.1
aatgaactcgttttgcacaagcttacgcttccttgaaaaggaaaggatcaaaacggccccttagttaaatgcacgccttttcacgaagtgtgagaacaggggcgacaagttcctggcaaacaaagcatttacatgcactctagatacattgcttggggccctaggtggagttatggaggctatgcgctgcaacatactctaacagcgggtctgatggaaccagccacaaagacgcaggt

SEQ ID NO: 82327 - DNA, 209 bp, Zea mays
  Clone ID: MRT4577_175096C.1
agaatcaaattggcccaaattaagataaccataggttcagataaccataatttcaggtatccataggttcacattaaaaatttagggacaggtattagttgtaatggttccaccattttaagtgaaatctttgccaatttttgcttaaaacattttatagtcataattggctctattttcattttttcgttcttcccataagtgtttta

SEQ ID NO: 82328 - DNA, 265 bp, Zea mays
  Clone ID: MRT4577_175097C.1
caattctaaaaataaacgttccaacaacaaagaaagaaactttccttcaactaaaattctaaataaagaacttcattcttattcaatgttaacactcaacataattcaatctttaaataaatttttttctccatcaaaatcttaatttaccaatttctcaatttcctctccacacttatttatcaaccattctttttaatcatttaaccccctttccttttaacatccatctttcttatttttttctttctcattcctaatttta

SEQ ID NO: 82329 - DNA, 278 bp, Zea mays
  unsure (1)..(278): unsure at all n locations
  Clone ID: MRT4577_175098C.1
tgatattcttggttaagtacgctggagagttgggatatccccaggaaaggtgcatggctttcctttattctgtctcacattaatgctgntcttttgaggcagcagacaggtggagaagctgatgtggattcacacagaatacaggaggttcatggcgaggagctatttactcatgggaagagtttgnctatatacataactgagaacagtggacactgtctggatatcttatcttctcttttggagacctaccttcatacttttaagaaagcttatct

SEQ ID NO: 82330 - DNA, 611 bp, Zea mays
  unsure (1)..(611): unsure at all n locations
  Clone ID: MRT4577_175099C.1
gtacttcattcctgcatctccggtgatttttagggaggagtctcgtaatgatggtggggngtggtattggacaagnngtttctgaacaagagggtaaaagtccagaacatgctttcaaaaagcataaattagatgggaaggggggtggtgctggttctatggcagggggttttggtgatggagaagattctccaatgcttggggctgctgccattttacccttggagaaggctaatgaacctgtgcctgctgtgatgaagggttttcctttgctcaacttgtctgccctgcattctgtacgtccctctttgaatggccgaactggggcagatctgaagctgcataagaatggaatgtcatctgctgctgggtttctttctggtggcaaaaggagctctgttgttgggtcatatgatactaatggctgcaacttaatgctacagagtattcttgatgagcagatagtgagtaacatgaaaggggctgacccgactggtgtgattaactctgtacacacgaccaggattgtgcctgacgcaagcagctggtccaagaatattcctgatgagcagttagtaagtaacaagaaaggggttggtccgtctgttgtg

SEQ ID NO: 82331 - DNA, 1839 bp, Zea mays
  Clone ID: MRT4577_17509C.1
cgacctgcgccgattctgcccgcgctgccggcgagccgacgccggcgccggcgcccgcgcccgcgccccccaagaagtggcagcggctgggccgcaactttgccggcgccatcgccgcgttcaagaacacgctgagcctggatggcggtggcggcggcggcggcctcccccgcgacccatcaccgcgagccgagaagccgccaccgctcctcctccgtggcctcgcgcagctctactcccgcggcgccgccaaccagcagctgccagaaaagctcgtcgctgacctccgccgccacttcgacgctctccccaacagctacgcacaggcaggatatgacatgaaagatgtcctcctgcatgcccgccttgcagagcaggcgacaggtgaggatcagcctgcagtgaacattgaggaagttcatggcagaggaagttgtgaagaaggcactgttttccagctaacatttgcttgcacagccccgctctcatggcagtcaatgtcaggatcactagacagcccttcgttctgttgcaagaagatccagatctttgagaagagagggctgacacttggcgtcgtcatgatacttgtgcagactgggaacgaggcgctcttcaagaaccaggttgagtccgcgctgaaatcggtagtaaagaagcaaagaaagaacagtggtggtgtgaagctaccatttgggctctgcggttgtcaagaagaaggatcgagaaacttcgatgaggagtcgatgtttgatccagatgatgaccgggtactcgacaatgagccggcgcacagaccacagcttcccactcccctaccacaggcatcagtcttcgtctcagtagatgaatggcaaaccattcgctccggtggcgaggagcttggtcgctggatgctgcgttctgaggagatcgagttcgttgattggtttggtgcgaattcattcaggggtgtctataagggaaagaaggtttgggtcaacaaactgagaggctgtgacatggggagtgcttacgatgtcgagattcgtcaggacttgctgcagctgatgagctgtggccaaaggaacatcctacaactccatggcgtttgtttcagtgagaaccatgggctatgcatagtaacgaggatgatggaaggaggatcggttcatgatattcttgtgcagagaaacaagaggctgtccctccgagacacggttaggatcgctctcgatgtcgctgacgcaatggccttcatgaacggctatggcatcgcgtaccgtgatctcaatgctcggaagatcctgctggacaggcaagggaatgcttgccttggggatatgggcattgttaccccttgtagtaatgttggtgaggtcaccgagtacgagacatctgggtaccgatggctggctccagagatcattgctggagatcctgaaaccgtctccgagacctggatgagcaacgtctacagctacggaatggtgctctgggagatgatcacgggagaggaggcctactccacctactcgccagtgcaagcagctgtcgggatcgctgcctgcgggctgaggccggagatccccagagactgtcctcctttcctgaggtcactgatgaacaggtgctgggacagttcccctttgaagcgccctcagttctctgagatcacatccatcctacagaggcagaatgttagatagttcttttttgcccccctccctctcttccttttccttctatatcatatgctatataccagtttggcttgggtgtctgcctaatcatgcaggaaactgcatctgagaaagtataatatatatgcgcagaggcttgttatttatattattgctc

SEQ ID NO: 82332 - DNA, 345 bp, Zea mays
  unsure (1)..(345): unsure at all n locations
  Clone ID: MRT4577_1750C.1
atcatttgtctcttacataagagggatcatcaagaatctcactgctgtgttggagccagagaaagccggtgaattcaaaaagggcgtctaaggtgcaaccaagtttctccttatcaagccgaaagaccttcaattttttggtggtgagagcattaaagaccaagcgttcctggtattcgactattacaaggattgtgccactaattcgacattcctgtatttctctcatggtcttaatgagatcaagtgctagattagttacccatgttgggtactatatatgttctattgttattgccacaactatagctgccctgcctgaactgaactcangatttttttaag

SEQ ID NO: 82333 - DNA, 459 bp, Zea mays
  Clone ID: MRT4577_175100C.1
gtccgaattcccgggctggctgcaacgatggttctgtacatggttggtgccgcgtctgatcgccgaggctgtcggcgccggtatcgctacaaggcctgtgtgagcataatcgacccgggaaccatgttataggatcactgctgagccacctatgggaacgagctgatgtcctggactccttttacacctactacgccttcatcgaggacaccggactgtctcatgtgttgagaaccgccgcagacgaacataaagctctgcagaacctgaacgacttgttggggcaaacagtcatagataatcacctgccattgttccagtggttcaaactatccaggactgctgttgctgctgacgattgaaggaacagactcgatggacccaccctactgaagctaagaactaatactgctaacttaataaatacaactacatgcttggcggaatggaacagtatct

SEQ ID NO: 82334 - DNA, 269 bp, Zea mays
  Clone ID: MRT4577_175101C.1
gttgaactggcatcctgctttagcttgagacttgccataagacactgctgagtacttggcaaaccctttcatagttttgttctccatctgtttggtgtaggtgttgagcgaggcaaatggatctcgatatttcagatgggcttttgatgcactgttgccaaggaaggctttttctgattttttgacaaatgaatttttgcacactttcattggtgtctttcggcaacttacacacattgaaactgacctattgtacatatttttatatt

SEQ ID NO: 82335 - DNA, 277 bp, Zea mays
  Clone ID: MRT4577_175102C.1
attcggctcgagaccagtacctaggagtcgatatcaatgcgcgcaagcaggagctgggcgggatcagtaagtgcgacctgccagctcacgacaacctgctgtgtcggatcatgcacgggggctgctatgcggacgagtaggggtagcacgtggcgctcaactatatgctagccagtcgcgacagctgctacgaggagctctcttgaatatattggctcgtgtgcaggcacccggacctggagccacagaaggtactcaagctgggcgccacgctcgc

SEQ ID NO: 82336 - DNA, 1209 bp, Zea mays
  Clone ID: MRT4577_175103C.1
ccggccgggaatgatgtcttgtatccggtccgtgccattgttttcaaccctagccaaagacctgtgattctgtgcatttgagccggcttttaggctgctctgtcctctctcttttcgcggcctcttgcgctgctttcctttccttcctcgcgagaacgagaggctagaccgcatccagtggtggggctcggtatgggcggaagcgaatgcgccctgggcgacgccgctataggcgaggaaaccctaaattacgacggcgatgacgttgagatggccgacgccgactcggatacggaggaagcccgagcagctgaggtctccgctgcaactggaggatccgccggaggtgttaggcaggcggagaaggacggaccggatggaaagaagaagaggaagaagaggaggaacaaagggaagaagaacaaagggaggcaagatggggcgcccaccaacatcgcggacattaatcgatttgttcttaacacttgcaagcgcttgaaggagaagaagtcgtaccttgtctggaatgctgttggctgccttggtgtcactgctgtcaatgatcttgttagagaggtggaggctattcagaagtgtggtgggcagactattgctgatggaagccgctttcgcactggtggtggaattctctggaacatcttaaagtcgcgggaacccaaggcttacaaggaaataatggcaaagggaaaggaacttgagaagcagtttaggtgtacgaaacgaccacagattagcagaaacgaagatgcaagttcacagggcagtgctttaattgatgatgaaattgaagcgcgagaccaaaaggaaacattggatgaccctaagcaattggatgatgtggagatacacgtatcagacaataaagctcaacgcaaaccactggcggacagaattcgcgctcctgttgcatatgatgatctgtttgaagagggggagatacacgacggagaaccacgtagttagcatttcaaagattatgcctcgtcatgagtgcccaaaggaatgtcacataattgcaagagcatgattatgatttaagaactaccactgcaatgtagcagtttttcctctaaacatcatccccgtgaacttgcagcgatggagattttgttgcgttcggtgaaaccattgttgggcctgaattcagtggtcaatggaaatcatggttaaacgagttttgggtgaccc

SEQ ID NO: 82337 - DNA, 356 bp, Zea mays
  Clone ID: MRT4577_175104C.1
gcattcaaagctcatcaagtggtagcatgaatgaagtatacgaaaacaaccatctgttgataatataagttacaatcaggtagcgttagccatgaatccatcctcctggcagtaagttactgaattagcgctgtgatagcggaaacccgatgccgtggcgggtggtcgggaaggtgacgaacagcatgctcccgacgacgccgatggcgacgggcagcacggtgagcacctgcttcgcgtcctccgacggcacggggtagaagcacgccacgaggttctggtcgagcagcgcgacggcggcgaagatcaagacggacaccacggcgtgcaccaggtcgaggaaccggacccggtac

SEQ ID NO: 82338 - DNA, 705 bp, Zea mays
  Clone ID: MRT4577_175105C.1
gttatccccatcgccaccccggtccatgttatctcttccctgccccagcaccaaagcacgaagaatttttctgcctcatcctcgccggcaacatgtctaggtaaggacacaatggccggcggcgcgcggcgaccaagtcataatggccgagttcgctcgagatgcaaatgactggccgactgggcatctcgtatttggtcgtctgagcaagggccaaggcgtgatgcatgaagatcgagggtgaccgatggagggtgactgggtgtgggtgagccgacgagtgacggctgtggcgttgagcatgtgtggtggccgtgtgatggtctgaaggaagaggaacacatcaacggatgaattagggttagcactcataactcattgttggacgctggttgtagccttacaggggcagggaggcaatgggctaaatcttccaaggtcgcatgagccacgatcctcaagaggagtgtctgatttcgggtccccacatcccactggatctctacggatgaatattagtccctgtctcgttaaattttgggtccctgccccgttatctctggggaattcaacctcgtccccaccctattcgggcttgttcggttagctctcaatccatgtggattgagtgagattgggtgggtttaaatcccaagcaagtcaaatttcttcacaattttttccaatcccatccaatccataggt

SEQ ID NO: 82339 - DNA, 153 bp, Zea mays
  Clone ID: MRT4577_175106C.1
gtcatatagtgggaaacagcggctaagagaagagaccggcggcggaccataatggcagaaagccaagaaaaggccgaaggtgcccaggccaaaaaggaatacgggcggcccaacgtcacaaagggaaacaggtgtatgccaacccagcctaac

SEQ ID NO: 82340 - DNA, 2060 bp, Zea mays
  Clone ID: MRT4577_175107C.1
tcgcagacgtccggcgcgactccgactccgtgggcgagccctgcgagctcccgccgcgcggcgccaaggccggcgccgtgcaccccgcgtgcgacgcggtgcactcgcggcggcggcgggatgtggccccggccgatggggagctggcgacaagatctaccggacggtggagatgcgatttctgactgtgggcgacgggactgatcgagcggattcgtatcgtaagagtagcactattactagtagctaggaagaaggcgggggggaattcagcaagcaaacaatttgttcatagtactactagaaaccaaatctctctccaaatactaacgaactccatctcctcctcctaccagtcatcagtgccttgtattctgtacagatcggtgaggaagcgcctcggcgacaatgttgagctcatcaattgtggtctcgagggccggggtatcctccggcgccttccctttcgtccttcggccgcgtgcctcccggctccagtccgcccactcctcacggtgcccttcctctatctcctccctgttcctctgccccagttcgagctgctcccatggcgccgttggcatctccctggccgtgtgcctctgcgcacggtcgcctctccctgcagctcgctctctcctccctccatctctctcaagcgctagccgttccctccctgttaacaatagagggattgagatgaaggaagaagaggattgaggaacgaggagatgaatccctacttagaaaacaattttcttgtgcgcttgatggaagaaatggaagaggaagaagaagagttgcagttggcgaggcacatggtcaataggaggcgacgtgcacacaatgagcgtcgtcatggtggttcgatcccagggcgtgttaggattcatcgtgatcacatgagcggcgatgcaagaatccgagcggactactttggagcgaacccggtgtacacggatgctcaatttcgtaggaggttccgcatgcgtcgccatgtctttgagcgccttgttgatgttgtgcaacaagtggatccatattttattcagcgtccaaattgtgcgggtgagattggtctttctgctctacagaaagttgttgctgctgttcgaatccttgcttacggtattccggctgatgccgttgacgaatacgtacgaattggggaatctactgctcatgaagcattgaaacacttttgcacggccgtccaaaccgcgtttgctccctattatctccgtgcaccaaatgcagaagatatcgcacgccttctccaagttggcgagtcacgtgggtttcctggtagttgcaacgacataaatgttcttcaccgttcaaaccttttcgaaaggcatctgagcggtgacacacctccggtttcattcactgtgaatggtcacacgtacaatatgggatattacctagcagacgggatttaccctgactggcccgcatttgttaagacaatccgtaacccctatgacgttagaacgcaacactttgcaacgattcaagagtctgctcgaaaagatatagaacgagctttcggtgtactccagaagagatggggtgtggtccgtggacctgcatacggatggagtcctgaacacattggggacatcatgaaaacatgcataatattgcacaacatgatagtagaagacgaaggtccattgtctttgaacacaacctttgaaaacatcggagtggtggcagacacaactcaaggttcactggaagagcgcaacgacttcgtcaatcaaaggtacaaccaactgaaagaccgcaacaaatatactcagcttcaggtagatctgatacaccatcactgggcgcgacatggatccggagttgcataggacgcaatgaaacatgttctgtcatggatgttcttatctactgtcgaactgtctttgtttactttacattgttctactgtttgttttagtgtcatgtctgttgttatcaaatgtgtgtactgtgtgtattagtgtcgaagtgacgtagtgtctcatgctgttgtttcaattcaataacaaggactactactgtcatgc

SEQ ID NO: 82341 - DNA, 415 bp, Zea mays
  unsure (1)..(415): unsure at all n locations
  Clone ID: MRT4577_175108C.1
ccatgncaaatttttttttatttttgtttgcaatcgaaggttatttaacatttggaataattttcggatccatttctaaccggaccagcccaacaaagggggggcgggtggagtttaccacctggctctatttttctttggccttggcaaccttgtcgatttttggatccacaattggatcaaccttttttttgatctggttaacctttttgattggggcctcggctttttgggggttttccttgattttatccgggaccggtttaatttttggggccgttttcctgagacccgtgttgccgggaaacgcgccggggaacttgcgggggaactttttcgccggctcccgcaccgtgtttgacaccttgatgggcaccttctgccgtctttttttttttctaaaattttgaacctc

SEQ ID NO: 82342 - DNA, 396 bp, Zea mays
  Clone ID: MRT4577_175109C.1
acctagcgaagcgcactaccaacgacgtatcatcaatggcttccaagacattatccatccttgcgcttattgccctttttgtgagtgcaacaaatgcgttcattattccacaatgctcacttgctccgagcgccattatttcacagttcctccctacatatacttcaatgggcttcgaacacccatctgtgcaagcctatatgctacaacaagcccttgcggccagcgttttataacaaccaattttccaattacaacatcaattctttggatcatctaaccattcaaaccattgtaacgcatttatcatcaagcacctgagccacctagccgtggtgaacccttttcgactacttgcaacaacagcctgcttgcatccacaccccacctttcttt

SEQ ID NO: 82343 - DNA, 2517 bp, Zea mays
  Clone ID: MRT4577_17510C.1
ttgggtacctcgaggccggccgggatggaccagaggccctcacgctcacgccttcctagcacgctgccattggtagtactacaaaaacaggcgtcgtttttctttgcctccctccccaccttgtctggctcccttcttcgctctccatgagctgaccaaggctgggcagcaacacggcctcttccctggctcagagattccccccacaagaccacggcatttccccttgctactgagcaaacatcgcagccttttctttttgcgatttttcttcacatttttgtagacaccaacacccatcccttcagtgttctgaatataaatacagtagattcatccaacagaaaacacaaaactctcgatttgttctgatcactcggttccatctcccaaagcgaccccgccgccagtagattcatccggcggcggcaagaacttggttctgctccttccttctgccgtgcagaaacgatcccgccgccttcagtagcggtagaagaagccctatcaagcgagtgaagattcagcagcaggcgaagaggtcgagtctccagcgatggcggcggcgctggagtgctggtcggggcggccgagcaccgacgaggagatggtggagcaggtcctcatgaagccccacggccgttcagacgactccctcccgacctgcgctgactctgcctccgccggcgagccgacgtcggcgcccgcgccgcccaaccccaagaagtggcagcggctgggccgcaactttgccggcgccatcgccgcgttcaagaacacgctgagcctggatggcggcggcctcccccgcgacccctcgcctcgggccgagaagccgccgccgctcctcctccgtggcctcgcgcagctctactcccgcggcgccgccgccaatcagcagctgccggaaaagctcgtagctgacctccgccgccacttcgatgctctccccaacagctacgcacaggcaggatttgacatgaaagatgtcctcttgcatgcccgccttgtagagcaggcgaccggcgaggatcagcctgcggtgaacattgaggaagtccatggcagaggagctggtgatgaaggcactgttttccagctaacatttgcttgcactgccccgctctcgtggcagtcaatgtcaggatcactagacagcccttcgttctgctgcaagaagatccagatctttgagaagagaggtctgacacttggtgtcgtcatgatacttgtgcagactgggaacgagacgctcttcaagaaccgggttgagtctgcgctgaaatcggtagcaaagaagcaaaggaagaacagtggtggtggtgtgaagctgccattcggggctctgcggttgccaggaagaaggatcgagaaacttcgatgaggagtcggatgtttgatccggacgatggccaggtactcgacaatgagcctgcgcgcaggccacagctccccactcggcctaccgcagtcatcagtcttcgtctcagtagatgaatggcagaccatccgctctggtggcgaggagctcggtcgctggatgctgcgttccgaggagatcgagttcatcgattgggttggtgcgaattcgttcaggggtgtctatagaggaaagaaggtttgggtcaacaaattgaggggctgtgacatgggaagtgcttacgaagttgagattcgtcaggacttgctgcagttgatgagctgtggccagaggaacatcctgcaattccatggcatctgtttcaatggaaaccatgggctctgcatagtaaccaggatgatggaagggggatcagttcatgatattcttacgcagagaaacaagaggctgtccctccgggacacggtcaggatcgctcttgatgtcgccgacgctctggctttcatgaacagctacggcattgcgtaccgtgatctcaatgctcggaagatcctgctggataggcaagggaatgcttgcctcggggatatgggcattgttaccccttgtagtaatgttggtgaggtcactgagtatgagacgtctgggtaccgatggctggctccagagatcatcgctggagatcctgaaaccgtctccgagacctggatgagcaacgtctacagctacggaatggtgctctgggagatgatcaccggagaggaggcctactccgcctactctccggtgcaagcggccgtcggaatcgcagcctgcgggctgaggccggagatccccagagagtgtcctccttttctgaggtcactgatgaacaggtgctgggacaattcccctctgaagcgccctcagttctctgagatcatatccatcctacaaaggcagcagaacgttagatagtgttcttttcttttctttttttctcttccccccttccttctatattattatatatgctatatatcagtttggcttggctgtttgcatgcctaatcatgcaggaaactgcatctgagaaaaaatataatataattatatatgtgcagtgcggaggcttttttagtataatatttttttag

SEQ ID NO: 82344 - DNA, 440 bp, Zea mays
  Clone ID: MRT4577_175110C.1
cccacgcgtccgcccacgcgtccgtgttgatgttgtgcaacaagtggatccttattttgggcagcgcccaaattgtgcgggtgagattggtctttctgctctacagaaagttgttgttgctgttcgaatccttgcttacggtattccggctgatgccgttgacgaatacgtacgtattggggaatctactgctcatgaggcattgaaacacttttgcacggtcgtccaaaccgcgtttgctccgtattatctctgtgcaccaaatgcagaagatatcgcacgccttctccaagttggcgagtcacgtgggtttcctgctatgcttggtagtgttggtaactgcccaagttcatggaacgggatgtttacagggcgtggtaaacatcctaccatgatcttggaagcttgtgcgtcgtatgacctgtggatatggcatgcat

SEQ ID NO: 82345 - DNA, 2971 bp, Zea mays
  Clone ID: MRT4577_175111C.1
ggtcccgccccccttcatcttccagccgctcaccgcttgtgaagatcacagccgtcgttcttatcttcttgcgccgctcctctgttgatatttctgatacggaaaaattgtatttattaattttgaaagtaatcaatcggatcctccggcgccttccctccatttcgtccttccaaccatggccgcgtgcctcccggctccagtccgcccactcctcacggtgcccttcctctatctcctccctgctcctctgccccagttcgagctgctcccatggcgccgttggccggatctccctggccgtgtgcccctgcgctcggtcgcctctcctgcagctcgctctctcctccctccatctctctcaagcgctagccgccgtggttccctcccctgggctctgctcgccggagcttcctgctcggccacgcccatgcccaacgcctagccgagcggcctcactgcacgttcctcctttctccaagttgagctccatctccctgcgcgcggtactctctccggcgtccagttttctccgcgccgaagttccctccatgtgttgcccagcaccagttcctctgtggccacgcgcatgaatccctgctagccagcatgctctggattcagccatggagcatctcctgcgtctctctctattcgctggccgagatccctgcctgcgcgctctgtttcttcttgccgagcgccactcgcccagccaaagccacccagccgaagtcccatggcgcttcttcggctgaatttcctgctcgcagccgcgaagtcccctgctcggccttcttcctcggtgtcgcgcgcccggttccagctcgcccctgacgcgcgcgcttctcagctcgtctctctctctgcacgccgagcggctcgcacaggtccttctctctgccccggctcgcggatctcccatgtgccacgcgcgccctcggccatgaaggacgccgcgcgccgctcagccttgtcatttccttgtcatgctcgcccagctctgttgccgcgccctgccttcgtggccgctgcgcacttgcctctgctcggcaccgagtctgtttgccgcggacgcgggtcgccgcgctgcgcaggctgctctctctagtcagactgtctccagcagcgtcccctaaatttcgtcccctaaaggaatattctttgttctttacagaacactctaaaagattttgtcctctatatattctccgtctccagcagcgtcctctaaattccgtcccctaaagctacagtgttaacagattcacattttccatttctttttcatttttctttgttttcttctcatttgacactatataaatgatacgaaaaaattgtatttattaattttgaaagtaataaattcgaaatatcaataataattacattgcttgttcggggggtgtgtaattgttgtcggtaacgcgccacatagtataatatcgttgccaaaatatgttttgaaatggacaagcttgcaccgtaagccagtactcttcttcgagaagccatagcctagcttcccttgcagaaaacatcggtgggctggaagagacaagtcaaggctcaatggaagagcgcaatggattcgtcagtcaaagagacaacctactgaaagcacatgacaaatataatccgacgtggacgcaatgagcgtcgtcatggtggttcgattccatggctccggagttgcataggacgcaatgaaacaggttctgtcatggctgttcttagatctactttggagctgtcttggtgtacttggatgctctaatttcgttgtatgagtgtcatgcgtgttcttgtctttgagcgccttgttgagtattgtggtcgaagtggcatccttatttcagcgtccaaattgtgcgggtgagattggtctttctgctctacagaaagttgttgctgctgttcgaatccttgcttacggtattccggctgatgccgttgacgaatacgtacgtattggggaatctactgctcatgaggcattgaaacacttttgcacggctgtccaaaccgcgtttgctccgtattatctccgtgcagcaaatgcagaagatatcgcacgccttctccaagttggcgagtcacgtgggtttcctggtatgcttggtagtgttgattgcatgcattgggagtggcgtaactgcccaagttcatggaaggggatgtttacagggcgtggtaaacatcctaccatgatcttggaagctgttgcgtcgtatgacctgtggatatggcatgcatattttggtctgccaggtagttgcaacgacataaatgttcttcaccgttcaaaccttttcgaaaggcatctgagcggtgacacacctccagtttcattcactgtgaatggtcacacgtacaatatgggatattacctagcagacgggatttaccctgactggcccgcatttgtcaagacaatccgtaacccctacgacgttagaacgcaacactttgcaacgattcaagagtctgctcgaaaagatatagaacgagctttcggtgtactccaaaaaagatggggtgtggtccgtggacctgcatacggttggagtcctgaacccattggggacatcatgaaaacatgcataatatccagcaaaagtggaacgcctgtgttttgatagtatcccatctactcatcaaagattttgtggacctttctggcctgacacaagtcaaggttcaatggaagagggtaacaatttcgtcaatcaaaggtacaaccaactcaaagaccgcaacaaatatacccagcttcagattgatcttaaaccccatcactgggcgcgacatggatccggagttgcatagtctgttcttgtgtcatgtctgttcttgtctcatgtttgttagtttcccttgttcaagtgtcgaactgtctgtactgtctgccgtagtgtcgcatgtaagtgctctttcaattcaataacatgaagttctactgtcatgc

SEQ ID NO: 82346 - DNA, 660 bp, Zea mays
  Clone ID: MRT4577_175112C.1
gccggccgggggtagcggcgagacgagccgtttaataggtgtcaagtggaagtgcagtgatgtatgcagctgaggcatcctaacgaacgaacgatttgaaccatgaatccctacttagaaacaattttcttgtgcgcttgatggaagaaatggaagaggaagaagaagagttgcagttggcgaggcacatggtcaataggaggcgacgtgcacgcaatgagcgtcgtcatggtggttcgatttcagggcgtgttaggattcatcgtgatcacatgagcggcgatgcaagaatccgagcggactactttggagcgaacccggtgtacacggatgctcaatttcgtaggaggtatttacaattaacacattctttttaccatgtacaaaacttcatgacccctattatgacacatgaattctatggtaggttcgccatgcgtcgccatgtctttgagcgccttgtgttcgaatccttgcttacggtattccggctgatgccgttgacgaatacgtacgtattgggggaatctactgctcatgaggcattgaaacacttttgcaacggtcgtccaaaccgcgtttgctccgtattatctctgtgcaccaaatgcagaagatatcgcacgccttctagttggcgagtacggtggggtttcctgc

SEQ ID NO: 82347 - DNA, 509 bp, Zea mays
  unsure (1)..(509): unsure at all n locations
  Clone ID: MRT4577_175113C.1
ggaccctcaacaagctgattgtacactaccgtaccgtaacaactagccattcttaccgagctgcgctgataacaggtctacaaaacccggggcaattggtggacaggtttagcggaactaattcaccaatgtccgcccacataaacatcctaggaaatggtgggaaagcgaccaccatgtcgttagtatttggagagagatttggtttctagtagtactatgaacaaattgtttgcttgctgaattcccccccgccttctttctatctactaataatagtgctactcttacgatacgaatccgctcgatcagtcccgtcggccacagtcagaaaacgcatctcctccgccctgaaaatattgccgtgaagttctgatatccacacancacattccgccgccgccgagagtgcaccgcgtcgcacgcggggtgcacggcgccggccttggcgccgcgcggcgggagctcgcaaggctcgcccacggagtcggagtcgcgccggacgtctg

SEQ ID NO: 82348 - DNA, 224 bp, Zea mays
  unsure (1)..(224): unsure at all n locations
  Clone ID: MRT4577_175114C.1
taattaacgtagattccaatgctaaaacattttcactcatatattacgaaccctcaaacccattttttcgcctcgactatttcaagtcctggtctcggaatcctccacnatttccgcaacaatcaccagttttcatattctatttacttggcatgcctttgttacattttacacttttctatcttcttttctcaacgttttctctctttttcaatttttttttt

SEQ ID NO: 82349 - DNA, 476 bp, Zea mays
  unsure (1)..(476): unsure at all n locations
  Clone ID: MRT4577_175115C.1
ttagcatgacagtagtactcgttcttattgaattgaaacaccagcatgaagtagaacagacatgacactactacactaggacactcagacacacattagacacacttgacacatgaagtagaacagacaaataacactgaaacagatagtagaccattgacaagtagactaagacagttggacagtagatttgagaacagccatgactgaacttgtttcattgcgtcctatgcaactccggatccatgccgcgcctagtgatggtgtatgagatcaacctgaagctgagtatatttgttgcggtctttcagttggttgtacctttgattgacgaagtcgttgcgctcttccattgaaccttgagttgtgtctgccagcactccgatgttttcaaaggttgtgttcaaagacaatggaccttcgtcttctactatcatgttgngcaatattatgcaagttttcatgatggccccaat

SEQ ID NO: 82350 - DNA, 862 bp, Zea mays
  Clone ID: MRT4577_175116C.1
cattgggtacctcgaggccggccgggaaccttgtctttacaactccacaccatgaacccctacttagaaaacaattttcttgtacggttgatggaagaaatggaagaggaagaagaagagttgcagttggcgaggcacatggtcaataggaggcggcgtgcacgcaacgagcgtcgtcatggtggttcgattccagggcgtgttaggattcatcgtgatcacatgagcgacgatgcaagaatccgagcggactactttggagcgcacccggtgtacacggatgctcaatttcgtaggaggttccgcatgcgtcgccatgtgtttgagcgccttgttgatgttgtgcaacaagtggatccatactttattcagcgtccaaactgtgcgggtgagattggtctttctgctctacagaaagttgttgctgctgttcgaatccttgcttacggtattccggctgatgccgttgacgaatacgtacgcattggtgaatctactgctcatgaggcattgaaacacttttgcacggccgtccaaaccgcgtttgctccgtattatctccgtgcaccaaatgcagaagatatcgcacgccttctccaagttggcgagtcacgtgggtttcctggtatgcttggtagtgttgattgcatgcactgggagaggcgtaactgcccaagttcatggaagggcatgtttacagggcgtggtaaacatcctaccatgatcttggaagttgttgcgtcgtatgacctgtggatatggcatgcatattttggtctgccaggtagttgcaacgacataaacgttcttcacctttcaaacctttttgaaagacatctgatccatgcttaagaacattatc

SEQ ID NO: 82351 - DNA, 165 bp, Zea mays
  Clone ID: MRT4577_175117C.1
ccgtccgcactgatagcggagcccagtcttcacccgaccgtggtcctgcactcttgcctcagcgtggagcaactgactaccattgttgagctggcagcttgtcttcattgaccctcagtttgggtgatatgaactgtcaacagtccacagtcagcctatcttgac

SEQ ID NO: 82352 - DNA, 578 bp, Zea mays
  unsure (1)..(578): unsure at all n locations
  Clone ID: MRT4577_175118C.1
tcagcgatggtcaggtatgagctaagccgaatatcagccgctgtgttcattgcacttggtaaaggaaaagttcagtgtcgtggcgatgtacgaagcctcgtctttcgtggatggttcagcacgatgttgttggattttggctggcttcagcgctgccccaaaggtctagacctaagatcactggaggagaatctagggcgaggcattttaaccctccctctgaggcagcagcaatgtttgtttgaagaatggttccagttctattcgaccaaaggtgctgagtgtccgaaccttattagggctttccaggtatggtggagaaggtctttcgttagatcgtcggtagaacctcaaaggtaagctttttttcttgatgtactagtatgtgttgtgtgtatgatttgtaagattggagctaaatgttttgtttactttagctcttcccattgtatgtgtatagttgggtgaatttgtttgaggatagcagctgtgatgtacagtttatcgcagatggtatggttcttaaatcaataaaactctatccggtcttaaaaaaaaaaaaaagaaanaccataaaa

SEQ ID NO: 82353 - DNA, 177 bp, Zea mays
  Clone ID: MRT4577_175119C.1
cggacgctgggcgcgagctcgtcctcccgcgccaaccctatgcttccctctctcttcccctccccagcgatggacccgccgccaaccagggacagatgggaggagctggagcctgaaaaccgcggcttctccgaagccgacgacacggagacctcccgatctgaacgcgacgagggt

SEQ ID NO: 82354 - DNA, 515 bp, Zea mays
  Clone ID: MRT4577_17511C.1
aggatgtgatgaacaaaagattggtccgtgtttctgattttcagtgactgacaaccatctatatttttcttctgatcccaagctgaagtacttgtcttcagttgattggttttcttctcttcgattgccatgtgaggttttctcttagactgccttcaggctgaatttgaatatttactcgctgagcaatgcagatttaactcgcaaaaaaacgataacggatatttacatggtttagactgaaatttgaatatttctagctagaggtaaacaaccgaataggtgtgcagtcagttaaacgagcaatgctttatctgattgagctagatgagctaattgctggatcttcacacacgcttgcaggccgcagcaagttggcagattcgggttctcatgtgggcggctatcactgtccccgtgatgattggtgcggacaccgttgaacgataggctgtctgaagcccattttgtaaaaatcgtgcccgttctcaaatcaaagcagtctgatgtttggg

SEQ ID NO: 82355 - DNA, 286 bp, Zea mays
  Clone ID: MRT4577_175120C.1
ttaaaacacttatctatattgtctggtttaaaaaaattttttttctatgacaaaaattttctcttaaaaaatatttttttcttcattaatttacattatcttccccgggaacacaatttctatctaccatttttcttcaaaaaacacactccacacaaagagagatatataaatcttacctcccctcctactatatatttaatactacgacaccatatatcttaatatttcaaccaaaaaaaaattcacccacatatatcatcttaccgccattatttccaacata

SEQ ID NO: 82356 - DNA, 818 bp, Zea mays
  unsure (1)..(818): unsure at all n locations
  Clone ID: MRT4577_175121C.1
aatacaaactagccgcccctcatccccattctccccctctcgcgccgctcatccccacctcccacgcgccttctcgctcgccgccgccgccgccatggcctcttcctgctctgtcctcatccctggcgtgtcccgtgcgtgagaggccgccacctctcctcaccttctcctcgcttcccggtctgaagcgaagggattgacgcggccgccggggatgactccagttcatcgtcgatgggagcaggggagcagcagccgcctccctctcggcctccccgtctcgtcggagccgccgctctcggggtccttcccagccatccgaggatctcccatcccatcccgagccggatttcagtgataggggaggagagaatcgacgatgcatcaaggcgcccgccacctcttttgcagcacagcacaacggcctctgcagaagctaagcggcagttgcctcgtctccttttcaatcgcaacccctgcgacctttaatctcaatagcagagccctcagttgttagggaaggtgtgctcttgcttgtgatggttggccacatcccagcagtgtgtgggagccgctgttttcagccagagttgggtctccttgccattcatcaccagcctgtctgcagaaagacgaaggcgatgaagaggatacatgagcggtcaagtcagcgtgaggtggagaagatgtggcgtttctgttggcggcgctgggccagcaacatcaggcagtggactacgnggnagctgccgtgggtggtggctaagtttcacgagagtggggggtgggggtggcacacgtgggggcgacggcagcaa

SEQ ID NO: 82357 - DNA, 784 bp, Zea mays
  unsure (1)..(784): unsure at all n locations
  Clone ID: MRT4577_175122C.1
ctcactcgaacactccgccatccccgctccaaaaccccccaccccgcctcgnccggaaccctaaacccgtaggcccggccgagcgcacccctccccctcccgacagacattgagcggacgaatcctcactcctgccacgagctgctgcacgtgccctcaccctagatcggccccccagatcctgggagagcgcatcctgctaccagaacggcatcgaccacatagggaagaaccccgggcgacgtcctacctccagctcgagcggatcaacggctactacgacgagggcagcggcgccctctacgtgccccgcgacgcgttcttggacgtcggatacttcaacgatggactgactctcttctctcgggatcttcccaccaatcctccgtcccgacggcttacttctcagacgggccgtccccacgaatatctggatggaggggcgctacatcctctattcttcgtcctcctggagtccatcctcaaggtcaccagcttggaagtgaacaacggacaccggcgcacacgattgagagtgtacctctcactgttattacgatgttctctaggccagacgacgctgctcctctccataatgaagcgggtaaagactgaacagatgataatgacgatctcaagaataacgtgaggagacttgttcgcatatctcaggaaatgctctgatgcatgacgatcatatgcggcgagtcgctagcgctgcaattctcttgctttcacctgatgagcgacctgatgacagcacttgcacttctccgctgtttat

SEQ ID NO: 82358 - DNA, 375 bp, Zea mays
  Clone ID: MRT4577_175123C.1
gccggccgggttgggactcgccatcctgtgcccccctgcgactactctcggcgccacgactccatggtcattgacaggaaaagcccgttgcattgctggcgagggctcctcggctgggaccgagaacatacgcccctctcctctgatgttccggcgagcggcatagatcttgcgactacgcaactattgtctcaggggccggatcgatattagtacaaacatagtaaggagaggcacactgaactgctccacacacgtgtaacgtggaaatcgccgaccctgagtgctacctctctgatgctctacaaagacaggtctaaatgaatgtcatgaacaccgctgttgatgttcagtggctcattggcaggaggatta

SEQ ID NO: 82359 - DNA, 456 bp, Zea mays
  Clone ID: MRT4577_175124C.1
tgatttcattatttttagtttaattttactttctcttcttagaaaaataattctgtttcatcccttttgcataaggatttttagaaaatctatatttatttaatttttctaatctttgagatctagtatttttataaaatagttgaatttaataatactaaagttagaagcttaggatcaaagcaatatatagatctaaatatttcttttcttaaggaaaataagtttttgaattattaatttaataatatttttagaagtgatttttaagtttaattactttaaataaaatataaaaagctttttaaatgatcttatttataaataattataattaaagaattagtagatataaatttcttctttaatttttcttagtttttgatcaacgaaaatcttttttactaaaaactttttagtctgtttatcaaaagcttaaggttataatttaatctt

SEQ ID NO: 82360 - DNA, 338 bp, Zea mays
  Clone ID: MRT4577_175125C.1
agggcctaaaaaaacacatatccttgcaatgctaatgttgcctgttggcataaaaaccaaaacatgtttgggctgggtacccatttagatttttaataataataacaacaacaacccacgagagcttcttggagtcggataaatcgccggtgcccaactgccggacccttcttttggtggggggggaaaccttttttaaaccttgcgcggaccctttgccgtccaaaaaaacaaactgggaccttgccaagcgctttttcaagtccttggggctaaaatcgtccttgccgccgaactcgttaaaaccgaccacgtaatcctcgaccttggggttctta

SEQ ID NO: 82361 - DNA, 483 bp, Zea mays
  Clone ID: MRT4577_175126C.1
cgtccggcgaccgtcacccgctctttgtttataccttcggcggagcgagcccacgccagaccttctacccagctgaccctaccataggcgcctgaactctgggcatcacaggaggcctgtccatgccagaggcccctgcctggcctatactcaaccaccataccacagagctacgcggccatgacagcgaccggtaccagcgaaggcgctgcgcaggctgcacccttctccttctggaagctctacatctgacgctacgtcgacttggactgcgaccccttatgaaatatgcgcgtccggggctgtcacgcgtgctactggagctttagcaatgtaaagtgcaccgacaccttgctcgtgatgtgcaggcccaagtgctggagcagagaggagggacgcgcgctgctgctagctgctagagattcaaagcttcctgccgccgggcgcatcatggctgacgcgctgatgtggtgggctactacg

SEQ ID NO: 82362 - DNA, 472 bp, Zea mays
  Clone ID: MRT4577_175127C.1
ttatttttataatttgtttgtagggggcggcggaaatgttattaccaaattttacaaggtgcaaaaattttactttgtacatgatcggagggatgacaaaagtttaagtttgaaatatatgcttgctcaagtgaccatcctgaataagaaggatagaagagtttcttagacttataagaaggccgagcccactggcacttaacaccatgaacaatagcataaaaggtaaaacctggaagaacactaggtttgtggtgttagacgacgtacgtttgacagagcatccttgttctaatacttgtttcgtctatccatcttcagattagttatcagcttcatcctgcggattagcccgcgcttggggttgacttggctcgtcttccgcatcacgtggttaattcacgtacttcggtgatgccttggcgtggaggtaaacaagacgtcgtggcacacggaataagctcagggcgac

SEQ ID NO: 82363 - DNA, 326 bp, Zea mays
  Clone ID: MRT4577_175128C.1
ctcgaggccggccgtggtcgtgacagcctgctggcgccgtcgtcccggtccgggcgactggcgtcgatctgtgccaacgccaccacctctggccgcgctaccatgcccgtggagagaatgaccggacaggcacggcctggccgccgcgacggctcctctcatggatattccgactacgaactgttgggtctcgggatggcggcgcaaaagtgccaagatcatcaggaacgacaagggtaccagtgccactgcctcatgcgtggccttcaccgaatcctagcgcctcatagtataggcctgcaagaactgagggaacatgaacccca

SEQ ID NO: 82364 - DNA, 314 bp, Zea mays
  Clone ID: MRT4577_175129C.1
tttccaacgaaccgctcccagagagagagatagcgcataatcctgtctgaagggtggcaacaacgaagtgggcggtgcggcggtggccatactgctaggtctgcaggtcatggcagatccaccgactgccatggccggctcctcgtctcaccgagccgtgccggatggctccctcacctctatccccaatgtgacgatgctgtcgtgcacactttggtacacggtggagacatgaaatatattggatgcctgcctcctgcttgatcctgtgactatagtgatcgactatggtacatcagatgtactcctcgtgc

SEQ ID NO: 82365 - DNA, 496 bp, Zea mays
  Clone ID: MRT4577_17512C.1
ggccggcccatacacttgaccgacaaaattcaatatcaataattaatggatataccatgaatatatggggggatatgctatatacaggatcttccatttcactacagacaggcgatccacacatgcattttccacagccacacacaatatattagcgccactgacctggacaagggcacagtctgcaccagccgggagccaccgcccaggcgcccaccggccaccactccacgtttccactttccagcagctcaccattcagcttcagccaccaccgaaggaatcagggaaacgggccaccggtccagctcacaacagcattaataaaaaaaagtatcagcgggttgccaattttacaggtggacccctgcatccttgagtgcggcagtcacggtagcaaaggcctcctcgagggttcttgccttattcacgggattgaatgcctctatgatgtcaccttcctcccattcatcgaagtcatttaccccaataccac

SEQ ID NO: 82366 - DNA, 231 bp, Zea mays
  Clone ID: MRT4577_175130C.1
cgagtgctacaacaacgggcgtgacctgcaacctgggggacagacgcagcccgagcctggactgcgggttcaagggcaccgagatcgacagggcggactactggtccgaggtgcaggacctggccaagcccattaccaaccacgagcagagcgcggagcaggacaaccaggacgggaactctattggagctcgtctgcgccaggaagaccgtcgagggggtggacatcctc

SEQ ID NO: 82367 - DNA, 677 bp, Zea mays
  Clone ID: MRT4577_175131C.1
attggacaaaactaacgaccccctcccgcaccctcccggcgcccgtcctctgtcgctgaaggacagggagcggcggctagggtttcgtggtgcaaatattcgcggtgctgtggcggtcggcgcccgtcttcttctatccgcggcgactgtcgtctgctatccacgtgctgtggcggccggcctgtgctcctatccgcggttgccgagcaatatggattttaatgccattgggaggacattgggtgcaagatcaattgagcaaacttgtgacagcaagtgagaagagcacaacatccgttgagtctttggcaagaaaggaggacaatgggtgctccattagagatgtcatggcattggtgaaggagtgtggtgcagttctaggaacaaaagaacacttcatagcatctcaagtttttgtcaagagggcagagagggaaatgtttatgactttggacacactggaagaacgcttcaactggcttacaatgaaacatgattgggtcactaggatgattcactaggatctgtaattttttgtagcactactgtgttgtaccatgcgcttgaagctgacgaagatttatttccacacccccctctaggtaaacaaatgtcaaaaaattgttctactttttgtccacatatttttcaaggttctaataattgtatgttacatg

SEQ ID NO: 82368 - DNA, 169 bp, Zea mays
  Clone ID: MRT4577_175132C.1
tgaggtaattgtagcgtaaaatgccagcctaacatctaccggagaaccgtctcagattttgcactaagatataagagataattatctcctgtacccaactatgataatcgtcccgtttacattttagcctgctggcacatacacacaaaactctgcttcaccacaacac

SEQ ID NO: 82369 - DNA, 818 bp, Zea mays
  unsure (1)..(818): unsure at all n locations
  Clone ID: MRT4577_175133C.1
atcttcttcagaccacggcttcctctcccagcctgccctccacctccctctctactcggcagaccgcacagctccggcgcgcgcacagccgagcggcttcccgcgcacgctgctccctgcgctcgcctggctcgccgcgcgcccaagccctcttcttcctccctcctcccagcgcgcgctactcctcttccccagccgcgaagttccatggcgcgccggctccctgctcggctccttcctctctgctccctgttcaccgtccacgctctatcggtctccagctcgtcgccatggcacgtctctctcccagcgtaagctcttggacgccgcatcctcccggtcatggagttcaccggtagtcgccgtcgtcgaagctccctgcgcgcgcgcatctccctactccagtccagccgctgctccttgctcgcccgaattcgatctccgccctgcccatcacccctacgcgcgctctgcttcctcgtgcggctttctgctcgcctggccacgccctgcttccatggtcgcgtgcccatcttcctccctctctgcttgccgcgtgcgcagctccctggcgcgtcttcttccctattggtgcccgcccagccgctccctcctctctccccttggctcacctccctcaatttcccgcgccgtccatcgcgcccggctttagctcgtcggacctccgcgcagcgagctcgccccatggcgcccgaccgagctcctccctcgccaaaccgcgcccctgctgtctgtccggncttggccgncgtgccgaggcctccttcccttcgcgtcgtggtatttcttccctgccc

SEQ ID NO: 82370 - DNA, 178 bp, Zea mays
  Clone ID: MRT4577_175134C.1
tttgtttggaggggtaaaaataaatttcagtttatttcaaacaaagtgaattgaaaaaaacaaaaatagggcctatttgatcacgctaataaaaacttacaggagaacagtagtttggaagaaaaagaggccccatggattcaggaaattcatatgtaagttatttaccaagataaat

SEQ ID NO: 82371 - DNA, 214 bp, Zea mays
  Clone ID: MRT4577_175135C.1
gaacaggcctgtgcccaacggtattgtctatggcaagcccaagggccagggtatcacccagctcaaggaccacaggaacaagaggtctgtcgctgaagagagagcttgacaataagctggacggactgagggctccaaactcctactgggagaatgaggatagaacctacaagtactcggagaccatgctagaagacaggggccaacaaaagcc

SEQ ID NO: 82372 - DNA, 455 bp, Zea mays
  Clone ID: MRT4577_175136C.1
ctgattttctgtctaaaaaaaaaaacaaacaaaaaaaaaaaaaaaaaaaaaaaaaaaaaaaaaaaaaaaaaaaaaagggggcaaaattaaaaaaacgtgcaaaacacaaaaatcacttttttataacatccatataaaatctattaactcaaccaaaattaaccaccttaactaactataaaagccgctggccctatcaaaattccccttctttcccccccctcctcctccaactatttcttttttttttgggaccctaatcttcttttctccccccccctttttccccccccctgcatgaaaaatcccccgccttccccattttttccttctcgcccgctttccctttttcctcccccttaattgctcgatttacttcccccctccccccctcccccacatttcgctccccttcttttttttttccccccccccttttttttcccccttttttc

SEQ ID NO: 82373 - DNA, 233 bp, Zea mays
  Clone ID: MRT4577_175137C.1
attcggctcgagatacattctgaacgtaatgagaacactctcacccttggtacacaacgggagtttatgcaggactatacgaacaaggttattgaccggcatatgtttagtcaaagcatgaaaaacgtgctcccactcaacattcttatggaggacatgcaaatactcaatcgacctaccctcaagctggtgctcaaccaaaataccctgcaccgtatcaatatgtttagcca

SEQ ID NO: 82374 - DNA, 275 bp, Zea mays
  Clone ID: MRT4577_175138C.1
agggggaaacaactggatccccaaactttaattatttcccctatttgacaaagggacaggcgtaattttgccaacacttgtgccgaggtctaaacttccccaacttttgggcatgtgttttttggtttcagggtaaaactaaatttacaaaactgggggggtaaattttttttttttttattccaaaccgggtgggtaatgggccaggtccaactttccaggtccacttgggaagcccaagcaggccacttgggaggaacccgaagcacgagggg

SEQ ID NO: 82375 - DNA, 325 bp, Zea mays
  Clone ID: MRT4577_175139C.1
tgtccaagcgctccctgacaacaagccccttggagagtttgactcggatggtgtagcagaacgaccgctcaccagtatccaggaagaatgtgcctgttcacgctggactttacaggatacagcacaagggccagtataggggctgctgggccgctgcaactgcaaaatggggccgtacccaacaggcatcccataagcgaaacttacagttcgggaatatcagacgccagtatatgttgaccaccgccaccgaaagacgacgacgacgatagttaatccaggaagtatcgatcacacgacaatgataatgcagtcaaatgactca

SEQ ID NO: 82376 - DNA, 460 bp, Zea mays
  Clone ID: MRT4577_17513C.1
tttttttttttttttttttttttttttttgtttttttttttttttttttttttttttttttttttttttgggcccattttgggaggggaaataatattattcaaagggcactaggaacccctttggccctatttgggaggggagaataaggtttaaaaatgggaaagaggaagcccctgggggtttaattttaaacccaccgggataaggttacccaaggcctttacgggaataaaatcccacaccaccagggatttgaaaccctttgggaaacttaattttcccaaaaaaaaaggaactaattttccttaggaaaccttggaagaaaaagttcccaaactggccctaaaaaaatggaaaatagaaaaggggactttgcaaaaaaaaaagcaacatgaaattggtcttcaggggaactaagggtctcgggcccctagctaaagggatgaattgaactgcc

SEQ ID NO: 82377 - DNA, 274 bp, Zea mays
  Clone ID: MRT4577_175140C.1
accacacgtccagtggagttgcaccaaccttttgcatgtttttactagactacttacttgtctggtgagggccctatcacgatgaaagcggtatgtcctgtgggccatataaagattgcgagtatcaatgtataatcatcgtcctgaacacgataaagcgctagtttggtcaaactggaggtgctctacaacaactttctagccctataaggggcgctggttctaaagggcctaaattgacacttacttgcatactacaacgcatatttattat

SEQ ID NO: 82378 - DNA, 396 bp, Zea mays
  Clone ID: MRT4577_175141C.1
tcggtttccctttttcacacgacacgaaccaccaccaaccagcagccgtaccacgcacccagcgcagagttacggcttcgctcaccatgatggccggctttgccgcctttgaagcgggcgcgccctatcgccgcggcatcttcgtggcggtgaggttcgtcaaggacgaccgctggcaggagcctgtcacactggggggggcccaggtcaggcccaccttcgacggacgccgggccgccatgctggccgctgctgttgcggtcgtggcaggcatccgcggtttcggtgccggcatggcggggccgaagaacggcaccgctgaggcgaagaagaagtccgcggccatctgtgataccatgcccaccgtcaaggtctggcacaactgagcacgcccgc

SEQ ID NO: 82379 - DNA, 388 bp, Zea mays
  unsure (1)..(388): unsure at all n locations
  Clone ID: MRT4577_175142C.1
acgagaggacgaggccggcaagccgcagaagcaggcagggcggncgcagngcgcgccagcnacgagcgcggccaggcggcgacccagcggcaccaccggaaagggaaagggacgaggagagnggcagactggaggggggtgaggcgccgcagaggggngccacggcgggggccncnnccgccggcggcaccccgccaaagagaggccgcaaggggcaccgccgaggcnagggcnacnnaccgcgccaccggagaagaggaagaagaacaagacancgcggcggaggaggcggggngccggaacggcaggggagcccggncggaggaggcggngcncaagcgggagggcggcggcgagggcgagcnggccgcggggcacagggcgggcg

SEQ ID NO: 82380 - DNA, 1595 bp, Zea mays
  Clone ID: MRT4577_175143C.1
tctccagagtctagagacctccaccgtccactccaaagacgagcagcgggcaaacccaagcacccgcccaatccggttcgccttccttctcaccccgcccggactctgcggagagatctggcagcggtggctatgccattgggcgacgacgcggcggcggacttcgcgctgccggacgagctcctggcggcgctgccgcgggacccctacgagcagctggatctggcgcgccgcatcaccgcgctggcggtggcggggcgggtgtccgggctggagcgggaggcggggcgcctgcgcgcggaggccgcggggaaggaccgcgagagcgccgagctccgggagcgggtggcgctgctcgacgccgcgcttcaggagaccaacgccaggctccgcgccgcgctcgaggacaatattaagctcagcaaggagcgggactcgctggcgcagacgtccaagaagctggcacgcgacctgcacaagctggagtcattcaagaggcatctgatgcagtcattgcgtgatgatagttcatcaacacaggaaacagttgacattacaacgtgtgatcagccagtagcatcgaaagcatcatccagtgcagatggtggatctgtcagcaaccctgcaacgaatatatttactgagtcattggatgtgggaagcacaaaccgagatggtgctgcagcaaggcctccgatccagaaatactctctcacaacacacatcactccccgccttaccccagaggccactcctaaaataatgtccacttctgcttctccaaggcgaatgtctaccacaggaacacccaagttgatgtctggttctacatcaccgtcaaaaactcgaatcgaagctcacatgtcaatgacaccatggtatccatcaagcaagcaatcctcggcggcaaactcgcctccacgaggacgttcaaacccaggtcgcactcctcgaatcgatggaaaggagttctttcgtcaggccaggagtcgtctatcctacgagcaatttggagcattcttagccaacatcaaagagctcaatgcccataagcagtcacgtgaggaaactctcaagaaagctgaagagatctttggtccagacaataaagatctgtacctgtctttccaaggcctgctgaaccgtagcatggtggcataaggcttcacaggtcgcttcgcaagtccaatggagttccctcttccgcaacgctaataggatacgcaagttgttgctggctttgcagagataatgaggttgctgcattggcaacttatctagctgtggatctgaaggcccagctgcaagttttggccccgtaataatccatatcggtggaacgagcggatctctctgaacgactgagtgtgcaaaccagcagtgtcgcttctgtaaaagtggtgtgtgtacttgccgaaagcggatgacaaattcattgcctaaatcagggtgcagtctgtcatgaagcgcgtccttgtaaaaccgtgaaaaaggtaaccatgagagtaacaaacttcatttcgtcgccaacaaagaaggtaacctcaggttaacctcaaaaaaaaaaaaaaaaaaaaaaaaaaaaaaaaaaaaaa

SEQ ID NO: 82381 - DNA, 347 bp, Zea mays
  Clone ID: MRT4577_175144C.1
cccaccccccccaagcaagaggggggcttctataagaaggtgggcgggctaaacaacctactgaaggaatttaataaaaaaataaatagcccaatcccatgaatcattagcaacaacagtttgttttattacaacatcaactcctatatataatgatcacaatcaaattcatctattctttggtagcatgagaatcatcctacaatattaaaaagggtgaataaaacaccccttttaattaatttttttttgtacatacaacgtatatattttactccttttgtagtacgtacaataaagggaaacatatttttcttgactataatttcattgattaaatttttaat

SEQ ID NO: 82382 - DNA, 417 bp, Zea mays
  Clone ID: MRT4577_175145C.1
tttttctctttctcttttttctctttttttttttttttggttttgggttttttttttttttttaaaagaaccaaaaacctccatgtccccacattttgaaacactggacatgttccaatattttaaactggggattatgcgggatatatacagactgaaaacttcctatggggcaaaccggaaacttcctttaaaaaaaaaaaagttccaaaaccttccaaaaacaaggttttttatttttcaacaaaattttacctaatggaagtaaaaggattgtaaaacatttgcctttttaaaagctactgaagcatttgggcttttgccagccaatgagtttgatttttccaggaagccccacaaaaaaggggccccctttcttttactaatttgtttgccaagaaaaaaaattggtttgga

SEQ ID NO: 82383 - DNA, 790 bp, Zea mays
  Clone ID: MRT4577_175146C.1
ccggccgggctggaggcccgccgggagtttgccccgctcctccggtttggacaaccgcttgcagcggcttcgcttcgtcctcccaccctcccctcgtccctctccgctccggcgtgcttcggttgcccaccaagatctctaatttcccatcaaaccctagccctgtcgccgcctcctcactgccctgaccctctcctcctcacgcttcccgttccccatctcgccgccgtttctttggcctgggagacacgctctgctagctgtgtccgcgtatggcctccgacggtgcccccagaggccgccgtcccaagcgccccgcttcgggaggcctggtccaacccgacgtcctcacctacaagagacgacgccgcggcaccggcgccaacgccggccacagcgccgccacgtcgggccccgaccccgatcccgtcatgaatcagatgagcgcggtggtgcacgccaccaattcccagcaaggtgggcgccaaacgctggacaggcactggagaagctggagggacacgctggagggcgtccttcgatccactgctgtgaaccagagcgccggagggattcagaactgcatccgagatgcgctcagatataatggttggcatcccacagaacatggaaacttagttgatgaccgaggaacagacgaagaggacgctactggagctctacattctgaagagagtagtggtgccttggttaagttagaagatggaacagctgcatctttggaagccaacaggcgatgtgccacgatgctctctttgacattctaatc

SEQ ID NO: 82384 - DNA, 690 bp, Zea mays
  Clone ID: MRT4577_175147C.1
agcttggccgcgcgagagatggagaagcaggcggcggcacaggcgcaggcgcaggagcaggagcaggagcagtggcagggcgcggtggaggcgactctgccgtcgacgccagcgtccgcggcgtggccgcacatcgccagcttctgcgcgctgcaccggtacctcgcgagcatcgacgtgtgcgagctcgcggaaggggaggacggccggcccgggtgcgtccgctacgtggcctccctggcgccgggcaccaccacgggggagatcggcatctgggcgacggagaagctgctggagatcgaccacgacgcccggctgctcgcgtacgccgtcgtcggcagcagcttggggttcggcagatacgtcgctactatgagcatcgtcgctgctgacgacgaggacgacgcggggtgcaggctggtgtgggcgttcgagtgcgaccccgtgcaggggtgggggtggagccgggatgggatgctcgcctacctcgacgccggcgtcaagggcatcgccgcgcggatcgaggaagcccatgccgccgccgccagcgccagtgccggaggagacggcggcgtcgctgcttgacaactccatctgcgggcgggtggaatctcaacagtcgccagatgcatttctatattgaattgttattacgtcgtcaaactaattaatgcattgttaattgctact

SEQ ID NO: 82385 - DNA, 196 bp, Zea mays
  Clone ID: MRT4577_175148C.1
ccctccttgcaacaatcatgaatcattgatcagggattttttcataatcgccagcatcaagagaccgggaaaatttgccagacctgcaggacaacatgttttttctacttgctgcttctgggtgttagagtctggctatcagttactcctttaggttgaggggcctatttcttttttactttccattgattatcta

SEQ ID NO: 82386 - DNA, 478 bp, Zea mays
  Clone ID: MRT4577_175149C.1
aaacaaaggggcttgggacctttaacaaaattaataaatttcttagggcccagctttatgtttaaataaggggggctaaaagcaaaaaggttttaacccgggggggccgggttttattcaaaattcataaaatttggggggggggagccccccaaaattttggaggggccgccaaattttctttacaataccctttcccctagcagttaaggttccttttcaggcataactcataactactactatcgcccttcaagggggggaatgggggcccggaaaaaaatgctgcagtcgggctggggtgacaacgggtttgtttccataaaaaccttcctaggggagaaccccggttttttaggagtggggaggggggggggtttggtcctacccgagataaaaagcccctggaaaataggcgggggggcggtgggggttcctcggcccccacagagagccaacttgggggcctttgggccct

SEQ ID NO: 82387 - DNA, 288 bp, Zea mays
  Clone ID: MRT4577_17514C.1
caacattgcatcctactttactaaaataactgaccaaaaatggaaggcataagtaaaaatttttttttgattttccatgaaccaaattaaaacccaattttcctggattttttatctaaccctaatcaaaatttttgcatccaaaatcctaacttttgacaacccccctaaattaagggggtaacatatcgccaaaatatcttcccatttttacaacatttaaccatcccaaaatttgccccattctccactcaggttactggttaacagccctaaaaggactttttg

SEQ ID NO: 82388 - DNA, 840 bp, Zea mays
  unsure (1)..(840): unsure at all n locations
  Clone ID: MRT4577_175150C.1
ttgggtacctcgaggccggccgcgatccagcgcacaattaactagcaaatgcaatgcaaacccgctaggacaagcaacggaacaatcgagcttgtagaagtggtaacgacgcgcgcttgcatcgcaatcgcatgcatgcaacgatgaggcacatcatgacgtgcccagacaccattaacagctacgtgggcaacctcacagaatcctacaccgacaagagcaatgagcccaacatggtggcagcctccgtcatgatgttcgccctcgccgggctcttcttcaacctcaacctcttcagcggcatctccgacatcagcgccatcctcgaccctaaagtccggctcctcctctcgtcgacgctctccctcttgctccccgtcatgtcctacctcttctcggaagccaagaataacgccggcaacaccacccgcgtgggcactgtccacgtcgctgacctctcgctgagggccggcatcatccttgcatggatgctcctggtggagctcctgcgcaagaaggtggacgagatccgcatgcgcggctactccggcaccgtccagcgcgccggccgcgtcgtctggctgggaaccctcgtcttcttcaacatcaaagcaccggncgggaaagcggtgttcgccatcctctggatcctctgcgccacccgggtgctgcagaggatcgccttcacctgagtcgggaagcgctcctacgcccatggcaagaacgcccgcctcatcagctcgtacatggcgcagatcctgggacaggaggagccctcgagcttctgtcngtcatggcgatgctgctgccttgggacgaagtgctcaagagctgcaacta

SEQ ID NO: 82389 - DNA, 221 bp, Zea mays
  Clone ID: MRT4577_175151C.1
ttttttttttttttttttttaaacgataactaatagtacaccggagtgagtacgctatgtctgcccagcccacgttggcctttgaggctttgacgctgtccacgatacagtcagcagcacgccagctagtactggcagcaggcaatatgctcagcgcctcagtcgctctttcaacgaaacgccacaaagcaaacaaatccgatcaacccagaattcttgaa

SEQ ID NO: 82390 - DNA, 316 bp, Zea mays
  unsure (1)..(316): unsure at all n locations
  Clone ID: MRT4577_175152C.1
caggaggagccgctccttctgagacgacatgataaccatggtgtactgctgtttccagcttttgtaccactttgcactgcttttcgtctctctccgattccgtcgaagcacaagggtggctgctggtttaggtcgcaaaggcagaaactcggcagtcgtagggaccattaccagcatagagcaagcacccagctgagggagtnctatggaggaaagatacccagaggagcgacgcgagcggaggccatcaagcggggacgccgagcaggctgattacacgcggctacagcacgtgccatgcatgctgcttcgcgac

SEQ ID NO: 82391 - DNA, 1300 bp, Zea mays
  Clone ID: MRT4577_175153C.1
acgcccggggccaggcgtctctcgtacggccacaaggacgtcgccttcgcgccctacaccgactactggcgccagatgcgcaagctcttcgtcgtcgagctcctcagcgcgcgccgcgtccgggccgccgaccacgccagggaggccgaggtggacaagctcatcgccaggctgagcagcgccggcggaaagccggtgcagctggaggaccacatgttcgcgctcatggacggcgtcatcggcacggtggcgttcgggaacatctacggcgcggagcagttcgcgcacaggaaccacttccacgacgtcctggacgaggccttgagcgccaaggccggattctccgcggaggattactaccccaacgccgccggccgcctcgtcgaccgcctcaccggcgccgccgcccgccgcgagagggtgttcagggacctcgacgccttcttcgacaccatcatcgaccagcacctggtcgtggtcgacccgtcgtcatcgccgccgtccagcgccacgacgacgcccgacctcatcgacgtcttcgtcgacctcatggaggagagccggcaccagccacaggtccacggctccctccgattcactagggaccacatcaaagggctgctctcgaacgttttcaccgctggcgtggacacgagctcggtgaccatggtgtgggcgatggcggagctgacccggaggccggcgatgctgaggaaggcgcaggaggaggtccggtccgtggtgggcggcgacagagagagggtgcacccggacgacatgcccaagctcaggtacctgaaggcggtggtgaaggagacgctgcggctgcacccggcggcgccgctgctgctgccgagggagacgatgcggcacgtgagcgtctgcgggtacgacgtgccggccaagacgcgggtgctggtgaacgcctgggccatcggcagggacccgcgcagctgggggcccagggccgaggagttcgaccccggcaggttcgaagacggcggcgacgtggggttcaacggcacgcacttcgagctcatccccttcggcgccggccgccggatgtgcccgggcatagccatgggcgtggccaccatggagttcacgctggctaacttgctctactgcttcgactgggagctcccggagggagtgggggtcgaggacgtgagcatggaagaggccggaagcctcaccgtccacaagaaaacgccgctcctccttgtccccacaagatacaaagccaactgtcagagtcgtcactctttccaattttgaaaacaacggtacaaggctggtc

SEQ ID NO: 82392 - DNA, 370 bp, Zea mays
  Clone ID: MRT4577_175154C.1
aaaaaaaaaaaaaaaaaaaaaaaaaaaaaaaaaaaaaaaaaaaaaaaaaaaaaaaaaaaaaaaaaaaaaaaaaaaaaaaaaaaaaaaaaaaaaaaaaaaaaaaaaaaaaaaaagttttattttcccggggggccgttttaaagggttatttttggagatttccataaaactggggggggtttgagcttgcttttaaagggccaaattggccttttaggaagtggttttaaaatttattggccgtgtttttaaaacgttttgcttggaaaaaccttggttttcccaaatttaatccttttgaaaaaaatcccctttttttaagttggggtttttgccaaaaggcccgcaccaatccccttttcaaaaattt

SEQ ID NO: 82393 - DNA, 167 bp, Zea mays
  Clone ID: MRT4577_175155C.1
ccgggtcgacccactcgtccggacacactagcaatccaactagcaccatatagtgcacactatggctccaacaatggcaggcctaataatacgccttcttattatcgttagtgcttctgcaagtgctattacggcgaccatcttgcaggattgcacgcatgctccta

SEQ ID NO: 82394 - DNA, 665 bp, Zea mays
  Clone ID: MRT4577_175156C.1
ccggccggggcatcgccggcctccggatagctccgcctcgcccacaccatggtcaccgagctcgtgtccacgccagcggtgaaaacgttctgcaattcgtacagcacatggcatgcatcaattgatgctatattatacatatatatacagtacggtcgatgatgatctgtcgacgagtagtgtgagtgtgaatgttgcgtaccgagagcagccctttgatgtggtccctagtgaatcggagggagccgtggacctgtggctggtgccggctctcctccatgaggtcgacgaagacgtcgatgaggtcgggcgtcgtcgtggcgctggacggcggcgatgacgacgggtcgaccaggtgctggtcgatgatggtgtcgaagaaggcgtcgaggtccctgaacaccctctcgcggcgggcggcggcgccggtgaggcggtcgacgaggcggccggcggcgttggggtagtagtcctccgcggagaagccggccttggcgctcaaggcctcgtccagcacgtcgtggaagtggttcctgtgcgcgaactgctccgcgccgtagatgttcccgaacgccacggtgccgatgacgccgtccatgagcgcgaacacgtggtcctccagctgcaccggcttgccgcgggcgctgctcaacctggcgatgagc

SEQ ID NO: 82395 - DNA, 184 bp, Zea mays
  Clone ID: MRT4577_175157C.1
gtcttgatcgccatggcagagctttttagctatacgtgtggatgaacctgctgggaggcgttaccgcttatgtggacgatcttattggcgtgatcatgagtttatggatattgatactggtgggttaattactttgtcatagtgtcactcgtttgtatttgtagagcttgccgttaccactact

SEQ ID NO: 82396 - DNA, 355 bp, Zea mays
  Clone ID: MRT4577_175158C.1
aaataatataaaataaaaaaaaaaccaattaaaaaatatccaaacttactatacaaacctggcgagcgaaaaattagggggtggttaaacctaattttattccattccccaattttttccaccttcttacttggaaaaccctttaattacccaaccccccttcttttactaaaaatccccctttcccaaccttcctatttttcacttttttcttacccacctaaatttcctaacatttccccttttttatctattatttcacactaaacctctatgtgtccccccaactaatctccttttttaaactcccccctttttcccctttccttttttaaaaaccttcccccccaatcct

SEQ ID NO: 82397 - DNA, 626 bp, Zea mays
  Clone ID: MRT4577_175159C.1
gggggggggtttttttttttttagatagtcagacagcgattctcaatttagctccctcgcaaatgatctgatcaacatcaagttcaatcattctcaaaatgaagctacagctgcaacggaacaaggggaaaaaatccttcgttgcagtgccgatatcacagaacgttgcgagaatcatatagttttgccaaaatggagtcataagcacgtgccttacttcctaacctatcatgccatcatgtaccttgccgaagtgcatccacccgacccctccgactgatggttctcgaatactgcaagaagaaaacccaagtccgccatctagctgtagcatcccgcaaaagctgatccattctacttccatctagacgggcaaatcttctggtggtcatccgaacatcatgtcgaggtcgctttaccctgcttgagcttctgttggaagagtgtttgaacttctctccggagggcatcaacctccacagcgaactccttttgatcctctggtgtcaagtcctccaactgtacccctagtctgagcagtacactatcgagatcatagaactcaaaatcctccacatcagttgaggaaagtttcagcagactcttgatggccaataatacttttt

SEQ ID NO: 82398 - DNA, 659 bp, Zea mays
  Clone ID: MRT4577_17515C.1
ccggccggaacagttgcagcagcctgtggccaacaattttctggcaacgaatctggagggcgctggtcgaagttcctgaagaataacaagaatgttgttgtacaaactcgacatatgaagatcaattctacaccaccagtgtctgagctcgaccatctcacgcctgccagagctgcatctgctgctgaaagttgatggagtcttttgctattataatattcatttaaacaagcttctctcttctagtatctataaatttaacttctctaaaatggtacctataacttaatctcttctctaaaatagtattaagtatctttttactctcctttcttattttcccagaagtgaaatatcgaaatgttcctaaaaaataaaaaaaaaaatcataatgctcccacattgctatatgtgaccgaacatcccggtggttttattttacgttcggaaatatcgctgccaagatgctgagtataaactttattcttaagaagttcagattgcagtactgaagtaagttgaagcagctggttcatgcagaaagcaagtttagatcaataaaagatatcagtaagcatattgggtcccgtccctttcagatttgaacagtgagctttatggaactcatattgaacagtgagctgtttggttccaggttc

SEQ ID NO: 82399 - DNA, 636 bp, Zea mays
  Clone ID: MRT4577_175160C.1
aacgaaaacacagccgtcgtcgccgtcccgcccgccccggccgccgccgccgccagctgccgtttcccaaaagcgagcgaacggcaaaccaaataaaaactcctcgaactaccggcttctactaaaaccctcgacgtcggcagcgcggcgtcggcgagatgaagaacctgcgccttgtgacgaggctcccgcagcagctccagctccagatagacggcgaaaccctcgtcgcctccgccatcgacgcagagagccgccgcgctttcttcgcttcctccgccaacttcatctacaccgtctcactgccctcgtcctccacccaggaacagcaactactgcaatggagcaaaactgctactcaacactctgacatggaggaggttgttcttgatcctggagatcgcattgttgccatggattatcttatggagagggagtctctactccttgggtcgtcagatggttgtcttctcttatataacgtggaggagaaaacaactgaagttgtcggaagactggaaggtggtgtcaacaccattgcctctagccccgatggggcccttctctctgtcaccactggactcggccaactgcttgtcatcacacaggactgggaagtgctgtttgagacttact

SEQ ID NO: 82400 - DNA, 279 bp, Zea mays
  Clone ID: MRT4577_175161C.1
gaaattgtgtgggtttttatgggggcaaaaaacaaccatagtttcacgaaatacaggccgggcagctccgaacctgtggtacaatccatacacggccggaccttggatacaaaacttggcacagaaagggtacaaacaaaagttttacaggttggtgattttgagaaaggggacttcggtgaaccgcaataccttacgccttgggcttgccaaaaaacccttggttctcaagggaaggctggaagccaccccgcccaaatttggaccatgggtctaaga

SEQ ID NO: 82401 - DNA, 821 bp, Zea mays
  unsure (1)..(821): unsure at all n locations
  Clone ID: MRT4577_175162C.1
gggtacctcgaggccggccgggaacaaaatggacccaacacacacaagcgcccaacctcgaaaacaagggcgggcatcgcttcgaccctaacttcaccgatgctgtcatcaacgccatgggacccgcggtaccagaccggacacgatttgttatgggcaagctgatcagacatctccacgactttattcgtgaggtcgagttgaccaacgacgagtggtttgagggtgtacgatttgtcaactccattggcaaaaccaccaccagcaccaggaacgaggcgcaccgtatctctgatgtccttggagtagaatcactggtcgatgagatcgctcacatgcacattaacgagtctggcgagacacctacttcctcaacgattctcggccctttctggtcgccacactcgccattccgcccacttggcgataccattgtccgaaacccccaccccgatggccagaccactctcatgcacggcaaggtcattgacctagacaccaagaagggcatccccaacgccgtcatcgatatctggcaagcgagtgccaacggaaagtacgatttccaggaccctgacaaccaggagccaaacaacctgaggggaaagttcaccacaaacgagaacggcgagtactggtactactgctacaagcccacagcgtactcgctgcctaccgatggcgctgctggccagctgttcaagaccctcgaccgccaccctttccgccccgctcacatccnatctcatggtttcagcagacaactacaagcctttgatcactcaactataacccccgtgatgacccatacgtcaccaacg

SEQ ID NO: 82402 - DNA, 152 bp, Zea mays
  Clone ID: MRT4577_175163C.1
gaaaaaaaaaagacttatcattggaccaagataacacaaatgtgatacaacaagaaccaaatgagaacgaaattaccgacatggttaaatccctaggtgagaaaacaaactgttttgttcattgacacaaggattggcgtgagacacatcca

SEQ ID NO: 82403 - DNA, 463 bp, Zea mays
  Clone ID: MRT4577_175164C.1
ctcgaggccggccgggaactacgggcaagactgtacgaagggaaacatagtactcccacgaagaagaagtgctgcaactgcaggaactccaaatgtttgaagttgtttcgagtggcttcgcatcgcaggctgccaagcccaccgagaagcaggtcaagcactataccatggtttggtgaaaggagagaagatgaaggtgctggtacatcacaatcaatactagaagcaagacagacgcacccactattgttactgaaggtcaagatgcacaagatgatctgacaacaccacatgcacctaagatgtccaaaaagattactccaaggaagaaaagcaattgaactaccttatgtatattcaaaattagtgtattatccactatgttgtgtcaagaactatgacttcaaaattagtgtgtcatgaactatgctgtttcaggaaaaaaaaaaaaaaaaaagcggcc

SEQ ID NO: 82404 - DNA, 2326 bp, Zea mays
  Clone ID: MRT4577_175165C.1
gggggcactccacttcccagttcatgacacagttggcagagttcatgacataattcatgtcagtccatgacacaattagcagagtaggggcacatggacatgttcaaaattatacaagaaactgcactccacttcccaaaatttgaagacatagttcatgaaacagcatagttcatgacacactaattttgaagtcatagttcttgacacaacataggggataatacactaattttgaatatacataagggagttcaattgcttttcttccttggagaaatctttttggacatcttaggggcatggggggttgtcagatcatcttgggcatcttgaccttcagtaacaatagggggtgcgtctgtcttgcttttagaattgattgtgatgtaccaaaaccttgattttgtttcctttcaccaaaccatggtatagtgcttgaccagcttctcgatgggcttggcagcatgcgatgcgaagcccctcgaagggctcatctctgcagtattgcccttttcttccttttgacttctttattttcaaataagcacccaccaagctacatcttggctcgaaccaggtgggtggaaaatgggaaaagaaaagagagaaaataaatgaagaaaatattacaaggttggcatttattactaaactaactatccagattccagcattacacttattctgaccaatgagaaaaaattggaattctctaacatctaaattatctatcaagactgatacatgtatctgatcaacatgttaatagggtgaaaatactattcccttgatccttgcaacaccccaagtaaaaatctggaacgccaaggcttcagtttttgtccaaaaggccagtaacaggttttccagcaacaagatgactgctggaactctgtggatatgtttttacagcaggcacatctacttttgaatatggtacttgagaaacaccatttacctgtccaggatgaccagatgtttcagatttgattgccatggagtacctttcctctttcattcttccgtatctcacaaacttgcggaggcaatcccggaattctgtcagcacaaccttttcttgttctgcatacagtgcagattggttatggttgacaattactgtctgctgaggagcagcattttgagaagtcgtaaacattgtatcttgttcgtcacacattttctcaaatgcttcttcatcacacatcagtgctagtgttccaggagacataggtctatgggtcttatgatcatcaacgcagttaggtctggattcttctataatagctttgcccgtatgagttcctctgcttgaatggtcatcaattggtgctttttgatcttgatcttgattatttccttctctatcatggtttgtcaatgctagggaacctaccctgtcatcttccttctgccctccgattgcatcttccttctcgccgaccctctcttccttcgttttctgacctacaacttcaaacatttggagttcctgcagttgcagcacttcttcttcgtgggagtactatctttcccttcgtacagtcttgcccgtagttttggtgactctggtttcaagggaacggcgaccggggggcgctggactggctgcggcggcaccggacgaagctgcggtacagagaccgccagcggcacatgccccaccacctgatgcaggcgcatcaccggcagcacacgctggtgcagctgcccgcctccggcaccccgtggcatcctgcgcgtgccagtcaccgaatggtgcgggggcttggcagcgtccgatggcgaagagcttgcagcacccccatacgtccggagttcctgcagtgccagcgatgctgggcccgcagggacctctccctcggccgaggggcggaggatgtggcggccggcgccgccgtcatcgcggggttcctcaagaacgccgccgagttgaagtcagcaggcctcaccagcttcttgattggcggctgcatggtctctgcgggcatgggaggccaccgcggcgggcctccaccgccctgctccttgcccgccatctactggacccaaggcggcagctacaggatcaaagcgcctccgcccaccagtaacgacagcacaaacccaattcggagcggccgcggggttccgcggcggcatcgcgggggccggctcggcgtcgaagggggcggaggggcgctccccagcccgagtgtggggtggcggcgctcgccacgagctcgagcgcgtgtttgcggcggaggggaacggcgggtttcgagagagccggggtggggggattagtggaatttccctctccctgctggcctcgtgccgaatc

SEQ ID NO: 82405 - DNA, 270 bp, Zea mays
  Clone ID: MRT4577_175166C.1
ctctaatcagcttcttttcggattttctacagagaaaaaactgctatttcaaacatgtccattcaaaagatcttcgctcgtactatttttgacagccgaggtaatccaactgttgaagttgatttgaccaccagcaaaggattatttcgtgctgcagttccttctggagcttctaccggtatttatgaagcattagaacttcgtgatggagataaagctaattatcatggaaaatcagtaaacaaagctgtttcaaacgttaatgatatc

SEQ ID NO: 82406 - DNA, 2992 bp, Zea mays
  Clone ID: MRT4577_175167C.1
atggaattagcttcaatccccctgaaccgggccctgaccgttcgcctcctcggttgcttgttttttctcccccttcccacctccgcgagatctgacggctcggcctccaatggcgcccttctccctgtaaacctagctgctctacctacccgcacccccaccccgtggagagcaagtgcagccatggcggcggatcgggagaaggagcgcgaggcggagctggagggcgccatgtacactaactgcctactcctcggcctcgatcccgcggtcctcggctctccctcttcccccgccggccgcgtgggcctatttcgtcactccaacccccgccttggcgagcaactcctctacttccttctctcctcgctccgcggccccgcgcagtccgcgaaggattttgacaaggtctggccaatcttcgactccgctcagtccagggagttcaggaagatcgtgcaagggatcatcagcgagctggaacagcatggggcactgcctcggagcaattctagggtctcgtcacttgccacatgctgcggaccgagatttgttgagcttttgtggcaactatctgtacatgccctgagagaagtccacaagagaacatttgcagctgatgttgtatcaaatccactacctgcagcactaacagatgtttcttatcttcatgctgcttctttactcccagtaaccaaggcaagaatagctctggagaggcgtaaatttcttaaaaatgcaaacatagctgttcagaggcaaatgacatggtcaaatttggcccatgagatgacagctgagttccgaagtctatgtgctgaagaggcttatttgcaacaagagttagagaaactacaagatatgagaaacaaagcaaaactggaaggcgaactctgggacgaacggctctcaggctcatctgggcagaactctcatttggtttctaaggcaactcgtctttgggaatcaatattggctcgcaaaggccagcacgaggttttagcttctggaccaattgaagatcttatagcacatcgggagcacagataccggatatcaggatcacagttactagcagcaatggatatgagttcaagtgttccacattctgagttactatcatctaaagctggtgaaacttctataattttggagaagcaggaagaattttctcagctattccaagaaaaggaagaagcccttacaaggtcagatgataggaatggacgtactcagcaaactgttgatgtagctgaaattcttcgccgctggacccatgctttacaacgtattcataaacaatctcttcatttggccaaagcgaatgatggagaggggcctgaattactgaggagtgcatccagcggagaggccagtactcattctgattcgttaactgcaacattagctgaacatcgccagcatttagtcagtatacagggtctaattaatcaactcaaggaggctattccagcaatgcagcagtctatagacgaactctcagaagaagtgaatagtgtatctattaactcaatggaccaattgaactcgaggctgccactgccagtacaaattgcagggtttggaacatcagaagaaagcagcagtgaagtttcggagatcaattctaagctctcttctacacacttggataagcctgggggcagtcctgctctaaagctaccaccattatttagtctgactccaagttcttctggaaaaggaatacagacacaaaaacggagtgcattggctcgtcaacgtagccaggacatcacatcagaacagaaaacgcttaccatcccctcaactaaggatcaaatgaatggttcaatgcacgaaaatgatgactattctgctcatgacattagacgttctgttcgtgaagctgctttatctaagccattgaagaatacagagagaccacaagataaaaatagtgatgatggttcggaacacttctttattccgctgtcaattagtgctgcgaagaaggaaatggattcggtggcaaatcgatgtaaccaaagattaggtttgtcacctcagatgaagttcccaaagagcacaagctacaatgcagataccccaatcaacaaaagtccaattctgttaagtgaactcaatggacatgattcgatcagtgccatgagtttccttgacccggctggtggtctggcacatcagtcctttatcactgatgatgctctggatcaagtattctctcctctattgatggaatcttcgttgttccatgatgcagatgaggatctacttgcacccttgtcagagactgatgcagcattaatggaatattaagcttcacatgtgcactatgtaatattttgaccactgcagacgcagcctggaggttattgtggcttatgtttgtcttattgactattcggctagttgcttgcgagttgcaaccatgttgagatacagatgcttcatcagaatttgtggggtatatgttgactattgatgcggggagaggtgatattgatgctgttttttccccttctggacaaggctctataggtgccggcgttgtaccaactgtagtggacgcaataggaaagcccaatcttgtatatttagttactatacatcagcagtatttgtgctgtaatactttttcgaattgctgaaatatgtgtttttctgctagttgcgtcctcctgagttttctcagtttcagtgtacgaaattgcaaatcacgaatctaatgaggttaagccaacggggactgtgttcagagttagatcgtatatggttacccaaaacactgtactgttgtacattgtatattgtaccgtttgtaaagtgaagtttgaatataaagatggatgtaggtaaactgctagggatagttttagcaatggtcactagaatagggtttctagggatttttaagggctgctcctatttttgagccttttttgctaagctccagcaacagattcgaaatcgaggtctttatttcttattc

SEQ ID NO: 82407 - DNA, 284 bp, Zea mays
  Clone ID: MRT4577_175168C.1
cgatgtggtaaatgaaaattattagttcacttccctgctgccatgaaactttgccttaagaaggtgctggattccaaggtttgtaaaggcatctcggtaaagactgctttttgaatgcatatgattttgcatcagctagactgagttgattctgaccagacttgatggttttaagtcggaaccgataaattttaaaaaggagaaaaaataatttgacctagtagtataaaacatgaggctttaatggtactttgctatgaaaagaaaacactgtattccttatg

SEQ ID NO: 82408 - DNA, 266 bp, Zea mays
  Clone ID: MRT4577_175169C.1
ggcaattgctagcactcgtacaagaagcaaaccccgcagagatcttaattactagctagtcgcttaattcgatccttcacatggagcatgtggcaaggctggcatcgcagcgtgcagtggtgatcttcagcacgagctcctgctgcatgtgtcacactgtgacgcagctgttccgcgagctaggggtgaacacgatggtggtggagttggacaaggacccgcgggggaacgagatggagaaagggctggccaggctactgggccgc

SEQ ID NO: 82409 - DNA, 2500 bp, Zea mays
  Clone ID: MRT4577_17516C.1
gggacgcgtccgtgatcatgggaagacaactctgttggattatataggcgggggcatgttagaggcagctgaacccgaggcggccacaacagggagtgggaggatatcagtttcttttactatcagatggaagccttcaggcgtgtgtctgtagagatggccaaacacatgaggcgaatagaacaaggagagcaggaggagcaggcggaggcgataaatttactggcaacgaatctggagggcgctggtcgaagttccagaagagtaacaagaatgttgttgtacaaactcgacatgtgacaatcaattctaccataaacaagattcacagggagggagctaatgcagaacgagttatgcaagaactttcccaaattgggataatgccagaaatgtggggtggtgataccccaatgatcgagataagtgctcttactggggataatgttgatgaacttctggaaactgtcatgcttgttgcagagttgcaagaattaaaggcaaatccacataggaatgcgaagggcactgttattgaagcatgccttgacaaggccaaagggcctcttgctaccttagttgttcagaatggaaccctaaacaaagctgatattattgtgtgtggtgaagcttatggaaagatccgtgcattgtatgatgactgtgggaagctcgttgacaaagcaggaccatccaatgcagtgcaggttattggcctcaataacgttccccttgccggtgatgaatttgaggttgttgacaaccttgatgttgcacgtgaaagggcgaatgggcgtgctgaagcactgcgcatagaaaggatatctgcaaaagctggggaaggaaaagtcacactctcagctattgcagcatcggtttcatctgcgaagcaagttggaattgatacacatgagctaaatgttatccttaaagttgattttcagggttcaatcgaggctattagggcaagccatccaaactcttccacaagaaaatgtctctctgagattcctccttcaaggtccaggagatgtgagtgttagtgatgttgatctggctgttgcttcggaaggaattatatttggctttaatgtcagagcaccaggatcagttaaaaactatgctaagaagaaaggtgttgaaattcggatgtacaaagtgatctatgatttgattgatgatttacggaaggccatggaaggtcttctcgaacccgctgaggaggaagtaccaattggttcggcaaaagttcgagctgtctttagtagtggcagtggaaaggtggccggatgcatgattacaacaggaaaagttgttcaagattgtaatgtgcgggttcttcgtaaagggaaagaagtatatgtgggttcgcttgattccttgagaagggtgaaagaaactgtgaaggaggttggtgctgggctagagtgtggtattggggtagatgacttcgatgaatgggaggaaggtgacatcatagaggcattcaataccgtgaataaggcaagaaccctcgaggaggcctctgctaccgtgactgccgcactcaaggatgcaggggtccagctgtagaattggcaacacgctgatactcttttttattaatggtatgaaatgttaatttatatatactttgaagctgaatggtgagctgaagctattgtgctgaagctgttgtgagctggaccggtggaccgtttccctgattccttcggtggtggctgaagctgaatggtgagctgctggagagtggagacgtggagtggtggccggtgggcgcctgggcggtggctgccggctggtgcagactgtgcacttgtgcagtgcagtggcgctaatatattgtgtgtggctgtggaagatgcatgtgtggatcggctgtctgtagtgagatggaagatactgtatatagcatatcacaccatatattcatcgtatatacattaattattgatattgaattttgtcggtcaagtgtatgggccggccaagccaaactgtaaaaaaaaaaaaaagttctagatcgcgatggagtcttttgctattataatattcatttaaacaagcttctctcttctagtatctataaatttaacttctctaaaatggtacctataacttaatctcttctctaaaatagtattaagtatctttttactctcctttcttattttcccagaagtgaaatatcgaaatgttcctagagattttgtttatagatcataatgctcccacattgctatatgtgaccgaacatcccggtggttttattttacgttcggaaatatcgctgccaagatgctgagtataaactttattcttaagaagttcagattgcagtactgaagtaagttgaagcagctggttcatgcagaaagcaagtttagatcaataaaagatatcagtaagcatattggttcccgtccctttcagatttgaacagtgagctgtatgaaacttcccatctcaacagtgagctgtatggttccaagatcaaaaa

SEQ ID NO: 82410 - DNA, 423 bp, Zea mays
  Clone ID: MRT4577_175170C.1
aatacggagcgctactccaggccagcagtttccatttgcaatccgaccccatcttcatcccgttgtcgcagcagcagccatccaagcagcgatggacggcggcaagaagagccggaacccgcacaaggcctccgcggactaccgcagcgaccgcaagtcagcctccgggatgagcggcgaccccaagaagggcggccgcggcggcaagttcacctgggagggcgccgacgactacggctacggctacgccgacgactacggctacggctacgccgacgaggacctcggcctcatctccaagaaaggcaacagcaacagcggacgcgctagccaggcccagggaggcggcgccgctaagaaggacgacgacgagtaggcctcgccgcctcggctcgcccgcccgtccgcccagtcccgtcgatc

SEQ ID NO: 82411 - DNA, 887 bp, Zea mays
  Clone ID: MRT4577_175171C.1
ctcctatagggcgattgggttcctcgaggccggccgggccgggaaacaaggagcgctacatccaggccagcagtttccatttgcaatccgaccccatcttcatcccgttgtcgcagcagcagccagcagccatccaagcagcgatggacggcggcaagaagagccggaacccgcacaaggcctccgcggactaccgcagcgaccgcaagtcagcctccgggatgagcggcgaccccaagaagggcggccgcggcggcaagttcacctgggagggcgccgacgactacggctacggctacgccgacgaggacctcggcctcatctccaagaaaggcaacatcaacagcggacgcgctagccaggtccagggaggcgccgccgctaagaaggacgacgacgagtaggcctcgccgcctcggctcgcccgcccggtcccgtcgatcgccagcaagaaccaacaagcccttctgtctgtttaattccagtatcagttcgattctcatgttgaataatcatgatcatgtgggtttaggtgtcgtgctcacgagtatgtagtgtagctcctgctagcacagagcacagcacagagccactgggcgatcgacgggccgtgcatggcctgtagataccatctcatatgttcaccactgctactttgctcatgttgggggcctctcctgaactgggttcctggatgaactgattttctattagtttccggaaaagatgcaaaaaaagcgaccaaaaaaaaaaaaaaaaaaaaatccagggctagaccggaatcgatgctccagttgcgatccttgctcttactcgcttcagacccagctctggactgtgaaaccgacgacagacgtctctccagtttcagatgagatgcaattatg

SEQ ID NO: 82412 - DNA, 231 bp, Zea mays
  Clone ID: MRT4577_175172C.1
gaggcaaacgacatgtggaacagtactatactagggggattacagataacacgaacaaactgacaaggagagtaccatatagctacaggaaactgattgcctgaccgacagaaaaaccggtaacgggcgaaaaacctaaaacgaaataaagattaaggttattatatgaaattagggataaacaagggtgacccggggctaaaagaacctcctcaatcttgtttagagggg

SEQ ID NO: 82413 - DNA, 306 bp, Zea mays
  unsure (1)..(306): unsure at all n locations
  Clone ID: MRT4577_175173C.1
aaaaccctgggcggttaccccaactttaatccgcgcttggcaggcacatacccccctgnttcgccagcttgggcgtaaaatagcgaagaaggggcccgccaccgatatcgccctttccacaacagtttgcggcaagcctgaaagtggcgaaatggggaccgcgccccttgtaagcggcggcattataagccgcggcggagtggtggtgggttaccgccgcagcggtgacccgcttacactttgcgcagcggcccttagccgcncccgcctcctttcagctttcttaccctttcnnctttctcgcca

SEQ ID NO: 82414 - DNA, 531 bp, Zea mays
  Clone ID: MRT4577_175174C.1
ggaaaaatggccccccgggggaggggggggggggcctttcgattttacaggtccccttttaaaacagggggggaagggttaaaatccacacactccaaaaaaacccccgggtacagggtttaggaaggggggttttattattattattattaaaaggggggggggggatcatttacctccagggggaagctaaaatcctaattacaaagggccccatggggggtggggggccccaaaaccattttgaacaggaatgcccccccccccagggggggcgggagggcttccttgggggtaacactgaaaaaacccctttttcctgggggggagggggggattttttttttgggcccttccattaaaggaaaaaaaggccttcgccgaaaatacgggggccattggcctccggggggtttttgggggcctccaggggggtttttgtttaaaggagcgggggctggagtttgcccattggggggctggggcgctaagggtccaaaaaaccacccgaaaaattggtggacgggaacc

SEQ ID NO: 82415 - DNA, 464 bp, Zea mays
  Clone ID: MRT4577_175175C.1
ccagagtatgcgcgttgacacgaccggagcgcgggccgccgatcaccctccgagcgccttcctgctcctcctgttacttctcgggtgcgcgtccctcgcgatcggaggagcagacatggcccggcacgtcctcctcggcgtgaaggagaacctacccgcggccaacagcggcgaggggggcgggctatgccgcttctccgggggtgagcacaacaggcacgagaacgctctgatggaggtcctgcgcctgggggaggccaaggagcaagtggagggctgcacgctgcaccacctgacgctcgaggccgtcgaggccggcaggaaaaagctctacaaggccaaggggtgggtcaagccatggctcgacttcaaggagctccaggagttcagacacaagggggggcgccacagtcttcaccaacgaccgcctcggcgccaagcaaggcgggcatgaccctgcctgg

SEQ ID NO: 82416 - DNA, 569 bp, Zea mays
  Clone ID: MRT4577_175176C.1
gatactctcggccccggacgacctgcttggctgcgcgcgtctcgataccacctaccccgtcgccgtcagagcctcttcccacgcgccgctcccctgtcctcgcacccgccgccgccgccgccgcctgccgggccgagatggaggtcgctgccgccgccgccgccgtcgccgtcccgaggcacagggtgaagaagcagattaacctcttctactgcgccgagtgcgaggagctcgccctcaaggtcgccgccgcctccgacgccatccagctccagtccatcaactggaggaacttccccgacgggttcccgaacctgttcatcaacaacgcgcacgacatccgggggcagcacgtggccttcctcgcctccttcagctcgccggcgatcatcttcgagcagatctccgtcatcttcgctctgcccaagctcttcatcgcctccttcacgctcgtgctgcccttcttccccacgggcaccttcgagcgcgtcgaggaggagggcgacgtcgccaccgccttcacgctcgcgcgcatcctctccatgattcccaagtcgcagcgccgggcc

SEQ ID NO: 82417 - DNA, 320 bp, Zea mays
  unsure (1)..(320): unsure at all n locations
  Clone ID: MRT4577_175177C.1
ttgttgtgttgttaatcantcaattagtgcagtgcatgcgtctttagcatgctagtatcgtgtgggatctgcaggttactccttgggactaagtaccgtaggcttccagtggaggatagctcatgctagctgtgctgtatcgtttacagatggagcttcggtctacctgccctcgacgtcaagataaagggttatgggacactcttagatgcctacctcgaggtatcctttttgctgccacatgcacggcttaggacttggacacatctctagttgcaacttgtcaatcaaagcgactgtcagagtgagcgatgaaagtc

SEQ ID NO: 82418 - DNA, 524 bp, Zea mays
  Clone ID: MRT4577_175178C.1
aagattacatttttcacgccaacgcgggagcataccgacagctccagggatacgattgaaggagtcggacaaagagaaagaacatgtgtgggatacagacaacgtgaagaccgatgagcccgtgatactgtcactgtcacccggttccaaagtcctagcttgtgctacaaaggaataaaccaaggtcggcccatgtcttcatctagctgctgtcaccgcaggcgagcagtcctaccagtcactgcctccatcgttccctatctgctcctactcgttgacttttcgtgccaggccgacattgtggtcttcgcgacgcacacgcactgttacggtggtaaaaagcatgccggtgccgcgcggacggactttcgtgccggtgactagcaggaggcgtactctatgatcatggctcgcatggccagtatggacaaggtcttcaacatgacgatacatagcccctacggagacgtcattcactgagtgccggcgcacttgtaccctgtgtttgatcaccccaagctgat

SEQ ID NO: 82419 - DNA, 373 bp, Zea mays
  Clone ID: MRT4577_175179C.1
aggcggctacggccttatcatccctaggatcgactgcgatgtggctaccgttggggatgcgccaacaccctccgaccctgctgtgtcggaggccgactacatagcgcacgcccatggcagcaatgcgctgcatgaaactgagcacatccgggatcgttcgactaaccaaaaccagaacgagagagagtgctccgcttggcactgtgaaaatcaaacaaaggcactccacgtcaacctctcatctgtatgaggttcatgcatcggtgcgatgaatgattgagagataccgtcacggcacacagacagctgagctgtagatgtgcacgggatactctccctcatgctattaccacccgttggcacactggctttt

SEQ ID NO: 82420 - DNA, 197 bp, Zea mays
  Clone ID: MRT4577_17517C.1
aaaacacataacaccaaaaacaaaacatttacatttaaaaaaacacggtcccccacccagggccagggttatttctaacgggggcatgcgcctacaattactctactatactaccatctacaattcaatcacttcaccgttatcacaacatatcttaccaccttaaaaataatgtatccatataacttaatcccata

SEQ ID NO: 82421 - DNA, 229 bp, Zea mays
  Clone ID: MRT4577_175180C.1
gcatacactccgttcactctgctatttctctagattccgtctacgcctacaacttttgggtcctctcttctttccacgatatcgtttctagtggcttcggacacaatcgaaggtccggctattgggattgaactctgaaccaactaatcttgcgtcggactgtgacatcactgccggattgagatcatcgccacctatcatgggaatggcatcagtctgtcatatgtcc

SEQ ID NO: 82422 - DNA, 1978 bp, Zea mays
  Clone ID: MRT4577_175181C.1
tcttctttagatttatagttgagcacaaccacgccgcgtcgggacgagcacccacagcagttggcgcgcaccaaaaccctaccctccctctgctctcagccgccaacgccatgggctccaccgccgctgcctccgtgctcccggtgtccgccggctccggcgagaacctcgtcctcatcctcgactacggctcgcagtacacgcacctcatcacccgccgcgtgcgccagctcggcgtcctctccctctgcgtgtccggcacggcgccgctcgcctccctggagggcctccgcccacgcgccgtcatcctctccggcgggccccactcagtccacgcccccggggcgcccgccttccccgagggattcctgggcttcgcggctgccgcgggcgcgcacgtgctcggcgtctgctatgggatgcagctcctcgtgcagtcccttggaggcgccgttgtgtccggggagcgccaggagtacgggaaaatggacgttgaggtgacggcggcctcctccgcgctctacgggcaggcggagaccgggaagcgccagacggtgtggatgagccatggcgacgaggtggttaggctgccggaagggttcgaggtggttgctcgcagcgtgcagggagccgtcgcggccattgagaaccgggagaatcgcttttatgggctccaataccaccccgaggttacacattcagcccaaggaatggaaacactgcgccgctttctctttgatgtttgtgggatcaaagctgattggaagatgcaagatgtgctcgatgaagaaatcaagaccatccaaagcacggttggccctgacgagcatgttatctgtgcattgtcaggtggtgttgattcaacggtcgccgccactctcgttcacaaggcgataggagataggcttcactgtgtttttgttgataatggtctattaaggtacaaggagggagagcgagtaatgacaacctttgaaagtgatttgcacctgccagtgacatgtgttgatgcctcagagcaatttctcagcaagttaaagggtgtcgaagacccagagaagaaaagaaagatcattggcagggaattcatagctgtctttgatgactttgctcacaagctggaacagaagataggaaaaaggcccgaatatttagttcaagggactttgtaccctgatgtaattgaatcatgcccacctcctgggagtggaaggacacattcccacaccatcaaaagccatcacaacgtaggtggccttccaaaagatatgaaattaaaacttattgaaccactcaagctcctattcaaggacgaggtgcggaagttggggggtattttgaatgtcccagattcatttttgaagcgacacccatttcctgggcctggtcttgcagtacgtgtcctaggtgatgttacacaaggcaatgctttggaggttcttcgtcaggtggacgagatatttgttcagtctattaaagacgcaggcctgtatgataaaatttggcaagcttttgctgtgttcttgccagtacagacagttggagttcagggtgaccagcgaacccactccaatgccgttgttttaagggcaatcaccagtgaggatggcatgactgcagattggtactattttgagcatgcattcctggtagatgtggtaaacaagatttgcaacaatgtgcgtggcatcaaccgcgtttgccaggacatcacatctaagccgcctgcaacggtggagtgggagtaggaggatgggagggaccctatggtctggtctgtctgtctgtcttgggttaaaacccgctatgtcatgtcactgctctcaacacgttgcatggatgtcacaaatagcaagcagttaagagtgaccattcgtcagtcaatacattaggtttatcatgaattgtttgttacttaatacaaggactgcattgcatggaaaaaaaaaaaaaaaaaaaagcacaaaaaaaaaaaaaa

SEQ ID NO: 82423 - DNA, 1463 bp, Zea mays
  Clone ID: MRT4577_175182C.1
acctcgaggccggccgggccggcttcgtcccgcatcgtttcctcctccttttccccgttcgtcccctggattggcgtctacccggcgcgacccggaccgaatcctaagtccgcctgccgccgccgccgtctcccgttggaaacgagtttggagtaaagaaaccgaccttgcatctgtgttctgtctgtctatgctgctttgctttggattcacaaaaaataagccttgcatctcactgacttgagataactatgcctaaggacaggagctcccgcgtttcctctcacgagagccgccgggctcgtgcctccccatacttgtcagcgtctcatggacagagcagttcttcacgccggtcacaagagtctcctgcggccgcggcagcgaagcaagctgcagagtgggaggatgttcggtgctcggtctgcatggaccacccgcacaacgctgtcctgctggtctgctcgtcgcacgagaagggctgccgccccttcatgtgcgacaccagctcgcggcactccaattgctatgaccagtaccggaaggcgtccaaggactcctccaaggattcagggacagagtgcagcgagtgccagcagcaggtccagctctcgtgcccgctgtgccgtgggccagtcagcgactgcatcaaggactacgacgcacggaggtacatgaacaccaaggtccggtcctgcaccatggagtcgtgcgagttcaggggcgcctaccaggagctgaggaagcatgctagggtggagcacccagcggcgaggccgatggaggtagaccctgaacggcagcgggattggcgccggatggagcagcagcgggaccttggagacttgatgagcatgctgcgttcagggttcaacgccaacgttgaggacaacagcggcgaacttggagccaccgaagaaggggaagaggaagccgcaaggactccggcctccataacaatggtcttcatcatgccgtctagaggctcaatcatgcagtacttaacagaacgtagcagggcgatcattctggtcagccggaggcgagcaagcagtggcagtggtgatgctgaggccacagcaccagacagcgaggaaggtgatgaccctatgttgccatcggcagaggcgtctgctggttcgcagcgttcttccgaagaagaggctgacggtgaccacgcccaatgacagaagtcagctagcaggaggtgtgccatggcccatggcatcttcttggcctgaagatcccgacctgcttggtatgtgatgctgtatgctggggaagaaaacatggatgcaggtgccatcaagcaatggaaagggaaaaaaaacaattgagtggttgcatctatcttgtctgaatggatttctttttccatgcgttgtaattctctctcatatattatcatatgaaatagattcgaacgtatttgcactgcataatataatctttatatggcggct

SEQ ID NO: 82424 - DNA, 815 bp, Zea mays
  Clone ID: MRT4577_175183C.1
ggccggccgggccgggcttcgtcccgcatcgtttcctcctccttttccccgttcgtcccctggattggcgtctacccggcgcgacccggaccgaatcctaagtccgcctgccgccgccgccgtctcccgttggaaacggtaaaacctccctcctcctggtccgtttcgccggcgtcgggtccaagcggccgcgcggtttcgccgccggcgccgatctgagcgccgccggcgttgaccccacccgattcgctccgggctgctgctggggcccttcttctcagatgtggagttcctccacctgcagattataccgcaactgtttgaggagtcctgatccggactagctaagggctcatgctgtgcacgacctgatactacggattttgcgccttctagaggcatgattcttaaatcggagtcttactgtttaaaccatagtttgctttcgttttgaactgtgggtgaatttccattcctgcagaacgtgaagtcggtttaggccaggcctgtttgatccgtgttcatatatgtatatgttatatgtatggaggatacagaacgctgttgcttgcgatctgattaaggcttttttttttgttttgcttgctattctgatttccttttcagagtttggagtaaagaaaccgaccttgcatctgtgttctgtctgtctatgctgctttgctttggattcacaaaaaataagccttgcatctcactgacttgagataactatgcctaaggacaggagctcccgcgtttcctctcacgagagccgccgggctcgtgcctccccatacttgtcagcgtctcat

SEQ ID NO: 82425 - DNA, 400 bp, Zea mays
  Clone ID: MRT4577_175184C.1
ggggaaaaaatggtttttttttttttttttttaacatttttccttttttacaaacggaaatggggcgcaaaattccaaaacagagcaaactacccccaatccccatgggttgggggaccttttatttaaggcgtttcgccccgtttttttaagttttggaaacctgaaaaacctttgtttttttttttttggggaagccggggggggcttttggggggggggactgcctagggcctacgggggcaaaaaaaaaaaaaagctcacaaaattggggggacgtttttaccatgggtttggggccgtttttattcccggggggggaacaacgtttttgggccggccggatccgtcacgtccaaaaggccctgtttttttttgggctggcggccccttttttttg

SEQ ID NO: 82426 - DNA, 541 bp, Zea mays
  Clone ID: MRT4577_175185C.1
gtcttaactcttttttgttttttttttttttttaaacatcattttctttttaagaggaaacagaccacccctattgttcggcagcttcaaggaaaaaaatcaacattgtgtttcacccttgaaggagggggcggagaaaaaacccaagggaaccccttgggcggcctataagaacaagcctcccccaacaggagactgtggcctgaaggggtttcaagctgggtaaaccccaaacccctgtggagggaagcgggagtcaaagactaaaaaaatagaaccctccagattccgaggggggagcagaagaagcagaggatgcacaccctttgttgatagcccctgctgttggggccccattagatggcacagaccaggctaatgccctacaccccaggtgggggaaaacccaatgtgccagaagacaagtcctcatcgttgatagcaacccaggaggcaccattctgagctcctggtgaagcccacccacgattttgatcaagatgtgtccaaactccggaaagaacactgttccgtgagggtt

SEQ ID NO: 82427 - DNA, 860 bp, Zea mays
  unsure (1)..(860): unsure at all n locations
  Clone ID: MRT4577_175186C.1
gtacgcctgcaggtaccggtccggaattcccgggtcgacccacgcgtccggaaaatggcggcaggggtcgaagcggcagccgaagtggcggcgacagaacccaaaatggaggaagagagcggcgcgccctgcgtgccgagcggcaacggagctccgggcccgaagggtgaagaacgacctactcagaatgagaagaggaaggagaaaaacataaaaagaggaggcaatcgctttgagccatattccaacccaactaaaagatacagagccttcattacaaatataccttttgatgtgaaatggcagtcacttaaagacctggttaaagaaaaagttggtgaggtaacatacgtggagctcttaatggacgctgaaggaaagtcaaggggatgtgctgttgttgaattcaagatggaggagagcatgaaaaaagctgctgaagttctaaacaagcatagtctgagtggaaggccactgaaagtcaaggaagatcctgatggtgaacatgcaaggagagcaatgcaaaaggctggaagacttggaagcacagtatttgtagcaaatctggattataaagttggctggaagaaactgaaggaagtatttagtatggctggtgtggtggtccgagcagacattctggaagataaagatgggaaaagtcgtggaataggcattgtgactnttgaacagtccattgaagctgtgcaagcaatatctatgtttaatggccagttgctgtttgatagaccgatgcacgtcaagatggatgagagggctntaccanagggagacttttttcctnnctgacgccacagcaactccccatggacttgntggtattggcatgggataggacc

SEQ ID NO: 82428 - DNA, 877 bp, Zea mays
  Clone ID: MRT4577_175187C.1
ctactataggggattgggttcctcgaggccggccgggaccctcgttgtcatatcaaatctgtcactcgttagaccagactaccattcccactctcgctttttaactacattactcaactaattctaatacccacacctccaaaaaccatcaacatgcgtttcacatccatcctcgctgccggtgctttcgccaccatggcctctgcccagagcaagaccgtctctatggaccctgctcaggcttcccagatggactgcctcaaggactgtgaggctggcgatgtcaagtgccagtcttactgtatcactgttccttctcccaacgagcaggacattgagaagaccaccaagtgtgttgccgcctgccccaagggtaagggctccgaggccgatacccagaagtacaccacctgcatgaacgagtgtatcgccgacaactactggaagtccgttgacggtaccccccgtggcaccgacgtccccgatgtcaagagccaggcctccgaggctgcctcctccgccgctgacaaggccaccgctaccggtaccgcttccgagtctgatgctaccgccactgctgccgctaccaactccgagtctggttctgaatccagctccgaggagaccagcactgccaccggctccggcactgccactggcaccgctgcagaggtatccgagactggcaacgccgcctcttctctcattggtggtgtctccttcctcggtctcgttgccgctatcttcgctctgtaaattggtttcctactttaggataatctggttcgacaggacggaaggatttaatgggttttactagagcggtaatgattggagtttgaattcaagatgtgacacatgttggacagcatgatga

SEQ ID NO: 82429 - DNA, 540 bp, Zea mays
  Clone ID: MRT4577_175188C.1
gcggccgcccgggcaggtacaagctttttttttttttttttttttttttttttttttcttttttttttttttattaaaaccaaacttttttttgaccatgcttattttattggcaatacaacacaaaataatgagggccatccacataggacgggccaacccaaaggggaaaaggcgggacactgaccgcggccgcaaccgccccaagggggaatcccaacccagggggggccatggcaaggggagccccctggggaaaaaagttggccgtaaacaaggccaaacaacatacccagcgggaaaaataaagtgcaaacacaaggggccccaaaaaagggaccgaacccaaaaaaagtaaagccgggggaccccaaggagtgaactaacaaaacttaatgggccagcgccaacaaccaattttccaacgggaaaacagagggggccagcgtaataaaagaatttcccaaccctcgggaaaagacggtttgcgtttggggggccctttccgttcagcggtaacagactacttaagaggcggaa

SEQ ID NO: 82430 - DNA, 430 bp, Zea mays
  Clone ID: MRT4577_175189C.1
agtacaacctacgacccctggtaactatgatttacgcaactcgctcacggaatcctggagccaccgacctcctgagggagatcctagtgatgatgggcaatggcacacagcgatctgcaccagccttgtacgcagataactaggatcagagggactgaccagatgcctagcccaggcggccagacccccaaactggcagcggatggtcttgcagctgcacacgttccactgaagacaagcatgcaccttgatgaccacagatctccatctgtcacgttcacgctcgtgatgcatctctccttttgcgtcctcgcatgtccactctatacttacgccgatgccggacataccagagcgacctgcgagaatgctctcttccatgttgtgccgaatgatcgccttcacaactgcggcagaatgcgggcaccac

SEQ ID NO: 82431 - DNA, 195 bp, Zea mays
  unsure (1)..(195): unsure at all n locations
  Clone ID: MRT4577_17518C.1
aaggngnatggaaacggtgccgttnatacnttgnggangagaggttccancgtgatgaanccannancccaatttngtcaaatcccattgatcaccaagagtgttggancccacatgcttgangtttggggcgtgtggaatgaaagggattngacctgttngtnangnagtcggacagaaggnnanantggaaat

SEQ ID NO: 82432 - DNA, 275 bp, Zea mays
  Clone ID: MRT4577_175190C.1
gccgcaggtgtcgttgctggctccagagcaaacaccagttgtggttcatgtctgcgggctggagatgccacctgatgcagtagaagctggtggaggcatggaaaagaccttgccagagcctgtgggcacccaagtcagcatggcgagattcagaatgagtcggcctgtggcctagatgtgggagcctgtgagaacagagcgagagagatgccagggggctcggggcgccgggggctccctgaaggtcaccattctgcaaagcagtgacagccggg

SEQ ID NO: 82433 - DNA, 336 bp, Zea mays
  Clone ID: MRT4577_175191C.1
acagagctttctttttcgtatgttcatgctttgttagtgtattgtgttgtgtgaacatatttgtttgctcatacatgtttttctctttttttcctcgggaggaacaaagggttgttttttgcccaccggtttcccaaatgataggccttccacgggcaaccgaatgtatggagggctaaacaccaagtgattaacccccactttttatatatagccctggcaggggcctggtctatgaaaccaccgggaacaacacaaccctctgagattccccggtttgcatgaacaagaacttgttggcgcgccactttgttgcaccccctttcaccaaccaat

SEQ ID NO: 82434 - DNA, 255 bp, Zea mays
  Clone ID: MRT4577_175192C.1
ctgcagtttggagggtttgtcttcattataacccctagagttaggtggggattgttggatcttttatgggcttgtcccatttattgaatataagggacaggttctttgttaccgacccttgctttaattccctgcatcacaatgtacgctctggttctatcgcttgttcggtgtttttagtgtcatatatattttacagttttcttgtaggtaaagaattttcacacactttagaacaggtactgattaaagact

SEQ ID NO: 82435 - DNA, 858 bp, Zea mays
  unsure (1)..(858): unsure at all n locations
  Clone ID: MRT4577_175193C.1
aaaaaaaaaaaaaaaaaacccccacccccacccccaccggacggacggacggaaatcacggcgcgcctccgtgtctcgtcgcagcccgtccaccacctgtcctctgcccgctgtccgcctccacgccccagatctccagctccccccacctcccaagcaggggccgctgctccgtggccacagagtgtcggctgggggacgaaatggcggcgcttgctggctccgccctgctgctgctcgcggcggcgctgctcctctccgcgccggccgccacagaggcgtacgattcgctagatccgaacgggaacatcaccataaaatgggatcttaaagagtggactcctgatggttatgttgtgagtagcacttcaacatctgtgtctctcatcccaaactatgaattaggccagcattgatttttactgaggttttgatcacctcaacaagtaagtagcatggccagtgatcgcctacatacaaactcagctacaagcagcatatatatagtggactactggactcaagtgcagtgatcagcagagcagattgtggataataatctggtcaccctgaccctgtacctgtatcatgatttccttcttccaaacttgtcatgtgcaggcaatggtcacaatatacaactaccagcagttccggcacatatcggcgcccgggtggcagctggggtggacgtgngccaagaaggaggtcatctggtccatggtgggggctcagaccaccgagcagggcgactgctccaagttcaagaccaaccctccccattgctgcaagagagatccgaccgtcatcgatcttctcccaggaacaccgtacaaagaccaagttggcaactgctgc

SEQ ID NO: 82436 - DNA, 740 bp, Zea mays
  Clone ID: MRT4577_175194C.1
tcacgtgcttccatgagttcgccgagttcacgacggaggacgtgggcacggccgagagcgggctcaactcgatggtgctcgccaacaactcggagggcgtgctgctgccgctcaacgagccggtgcacggcaccaagcgccggagccagatacagacgttcctggaacaccacggcggcccgggtgtgcagcacatcgcggtggccagcagcgacgtgctcaggacgctcagggagatgcgtgcgcgctccgccatgggcggcttcgacttcctgccacccccgctgccgaagtactacgaaggcgtgcggcgcatcgccggggatgtgctctcggaggcgcagatcaaggaatgccaggagctgggggtgctcgtcgacagggacgaccaaggggtgttgctacaaatcttcacaaagccagtgggggacaggccaacgctgttcctggagatgatccaaaggatcgggtgcatggagaaggacgagagaggggaagagtaccagaagggtggctgcggcgggttcggcaaaggcaacttctccgagctgttcaagtccattgaagattacgagaagtcccttgaagccaagcaatctgctgcagttcagggatcataggatagaagctggagctggaggacctgatccggtactttgtatcatggtctcctggagcaaaagaaaactatgttgtttgtaagatgcggcgcgcaattgtatcagatgttatattgatga

SEQ ID NO: 82437 - DNA, 147 bp, Zea mays
  Clone ID: MRT4577_175195C.1
acgcacaccaccctgcccttctccagcatggtaggttcgactgagcgagtgatggtgtgcgacaaccgcatcgtctacatcgtgcgcaggacctacggccacccacgtgcccgtgactgtcccactaccaagaggtacataaactcc

SEQ ID NO: 82438 - DNA, 524 bp, Zea mays
  Clone ID: MRT4577_175196C.1
gatgaagagatgagagacattgcattacaatacgtcgatcaattgcaccgagctggaatagacacctcagagttcccttggcggttaccagaaagccactgattttgatttcggcaagatagtcgagtttatcaactgaagagcaacaccagactcccaatttaaagaacgtgtgcttttttaggatttgaggatatgatatccaagtcctgcaagaaaattactccttacgtgctgagttttctaacccaagtgctaatggctaacaaattgctagcttatcagctattcagttacactgccatactagttagtagataaccagatggcccagtaaatgttgtattagttcatgcacgtaaatgaggtgtagctgtgaaagtagatcgatgaaggttcctgatgtgaaaaagtcaaaagacaatgtaggagcttctgggtcacagtttcaaaagattttgtcccttggcagtgattgtaagatcttttggaagttatgccttttgttgttctgccatctaaaa

SEQ ID NO: 82439 - DNA, 563 bp, Zea mays
  unsure (1)..(563): unsure at all n locations
  Clone ID: MRT4577_175197C.1
agcgccagactgccagtggactgcgagggatcgcctcagcctgacatcgcaccacgccggtgctacctgcccatatgctatgttgggcacgtggtgcggctggtcgcgctactctgagcttcaccgagcgcggcggtgatgtacccggcgccaagaccaacggctctgatgtgagagatcctgttcgggggggacgccataaaggtgactctctcaaggacacgcacgtacgcctacttatatgactctgctccctttctccgaccagacccgatattatacacctaaccgagtccggatattagttctcattggtgaccacactcccaacattggttgttaatatataatgtagccgctctttactttccttgccctatagcttgcaataattatttgatacnactgagaataacggcgctcacatgacacaaatatatgggatggagtgatatgctcactcatgaagcttggcataattacactaattgaaactcttgccctgcttgcacagggaacttctggtgaccacggtgaatatatgtaagaaggcgggcccaaaa

SEQ ID NO: 82440 - DNA, 173 bp, Zea mays
  Clone ID: MRT4577_175198C.1
tgcgtgacactccgaaacaaatataccgtagccaaaccacagaaataaatcaggcggcgtttggtaggcaagacaacgaacattacaacactgaaaagttctattatacacgccatgagcacaggcatattacacaacatgcaggccgttacgcgatctatcggacgcgtggg

SEQ ID NO: 82441 - DNA, 1023 bp, Zea mays
  Clone ID: MRT4577_175199C.1
cctcgaggccggccgggaaaaaaaaaaaaagccacagcggcgaggcgaccttgcgacctccgttcctctgcgctccgactggatacgacgatagaattttgtatggtacaatattctatatattaaccgcgggagcatatcttgcactgcgttgttccacgtcaccccgtctcgcctcagccacatgatacacatccaacggtcaagcagacgtcttgccttctcagcgcctggattgttccagagtgcgctgcacatgtttgcgttctctccaatctaagtttctactgtcatggaggtcgaggacacactaatctagctcttaaggctccggcgggcggggccctccaatccctgtacggccatctccagctgtgatgccacccctatcgcttccaccgccggtgagctgttccgggcagcgagtgcgacagtgctgctttgcctctatcagggagctccatgtcctcatcatcaagagctcgtcctcccttttggattactcagagttgctgatttgggataatcatgttctctctaagtgaatgaacatgtctgggaatgatgataagccacatgctgctgcagacagaataaaggcagccacgttatcagtgactaagggattgagcagggctcaagctgaatgggctacgactgttgctgcccgcaatgtgaatgcctatgggcagaaggaagagggaccaagccgctggcaggagaggaaggaagccaagagtcagatgtatctgatgagtacagagaaggttgcgaagctgggcactgtgaagccaaaagcttcagaaacttcttctattggcgcatatacccaatgccagaagtgtttccagcatggtcactggacatatgagtgcaaaaagagcgggtgtacatatcacgaccctcaagaacgtagcagcttaagaaccccaagctgaagaaatgcgtacctgtttcttatcgatttgagaatcctgatggtgatcagcgatcgtgagcttccatgttatgtgttgtgatact

SEQ ID NO: 82442 - DNA, 276 bp, Zea mays
  Clone ID: MRT4577_17519C.1
gcccaaggtaacatatattggagttttgatcaatgacaggctttgttgcatgttgcaaagaaaaaaagggaaaaaaaaatgttgaggggaaaaacggcgttcccgttcaatacaaaaattcaacaaatatacccctgggggtggttccgaacaaaaacgagatttttgtcccatatataaggggggctccagagaaaagtaaattaccatttttttaaggcgggccacccatcattggtattgtgaacatgcctattgagggggtgacaacggaac

SEQ ID NO: 82443 - DNA, 678 bp, Zea mays
  Clone ID: MRT4577_1751C.1
cgccattcccgggtcgacccacgcgtccgcccacgcgtccgtgatgatagtattaaaacatctactatagatgcttgtaaagaacaactatcagaaaggaaagtggctgaaagttctgggggcagccccccagacaactctaatataggcggcagcattaagagcagaagttcgccaccgcagcagcatccaatccctgagtgttctgatttagtgaattttccattcacagaggcacagcatttgcagctacgcgcacaaatatttgtttatggagctcttattcaaggaacgccaccaggagaggcttacatggtggcagcttttggagaacctgtaagtggtggcaaacctacatgggaggctgcttggcgagctgcatttgaaagatttcagtatcaaaaatcactttgtatcagtttagagacccccacaagttcgcgtataggtagtactgtgcctgagaaagctagcaagggtacatcaattacatctgtgccagctagcaaaagaggtggcaaaattgtggcgccagcacatcctgctgtaaccctacactccccaacttctaacataccttttggtagttctacatttaacctgcagcgaggcactcatctggattttagccaggcagtgtcaccatttgcatataattcacacatgagacatctgtct

SEQ ID NO: 82444 - DNA, 1318 bp, Zea mays
  Clone ID: MRT4577_175200C.1
acgaattaactaggtcgtggccactctcaaatcaaatcggcaccgggcggcctcctccctccctcccgaccccgaccccgaccccgaccccgactgccaaaccctaatacacggcggtgaccttgcggcctccgttccgctgcgctccgtctgagttgctgatctgggataatcttgttctctttgagtgaaccaagatgtccgggaatgatgataagccacatgctgctgcggacagaataaaggcagccacattatcagtggccaagggtttgagcagggctcaagctgaacgagctgcggctgctgctgcccgcaatgtcaatgcctatgggcaaaaggaagagggaccaagccgctggcaggagaggaaggaagccaagagacagatgtatttgatgagtacagagaaggctgcgaagctgggcactgtgaagctaaaagcttcagaaactaattccgttggcgcgtatacccaatgccagaagtgtttccagcatggtcactggacgtatgagtgcaaaaatgagcgggtgtacatatcacggccctcaagaacgcagcagcttaagaaccctaagctgaagaaaagcgtaccggtttcttatcaattcgagaatcctgatattataagggagagggaagaggagctgaagttgatgaaagaaaaacagaagaaggagaaggccgaaagaaaaaagggaaagagtaagaggaagcatcgatcgccgagtgattcagatagcaacagtagtggtgcttcggtgttcgactctgaatcatcagtgacaggctctgaatactcttctggaagcagttcaagttatagttcatcagactcggaggacaagaagcggcaacacagaaggaagcagaagaagagaaggcacaggagggacagcacatcatcatcatcatcttcttctgaatctgagtctgcgtcagaccagtgattctgatgacaagggcagacggaggaagagtaaaagacgggctggtaggcgctgaatttaatgatctggacaaagcagtgtggaagttgaatatcattatatacttccgttctattcatgaatgacctttcatcatcatctgaacatgtgccggccttctcggatccaagaaacagatttagcatttgctttcctgaacggtagcactgataattttcactgtatgttcctatgatctttgtgtgaaccattgaatcctgtaacaatattcacctatggatttttcttaagtttggtgtggttcattgtcctgttccctgtagtattgctgtaatcatttatccctggatcctcctatttgcttc

SEQ ID NO: 82445 - DNA, 1354 bp, Zea mays
  Clone ID: MRT4577_175201C.1
gagctatgacgtcgcatgcacgcgtacgtaagctcggaattcggctcgaggatatatacactttccctataatgtactcggttgctagtgattggttgtcagttaaacttatttgttcgtttttcaggatacgacgatagaattttgtatggtacaatattctatatattaaccgcgggagcatatcttgcactgcgttgttccacgtcaccccgtctcgcctcagccacatgatacacatgcaacggtcaagcagacgtcttgccttctcagcgcctggattgttccagagtgcgctgcacatgtttgcgttctctccaatctaagtttctactgtcatggaggtcgaggacacactaatctagctcttaaagctccggcgggcggggccctccaatccctgtacggacatcttcagctgtgatgcccacccctatcgcttccaccgccggtgagctgttccgggcagcgagtgcgacagtgctgctttgcctctatcagggagctccatgtcctcatcatcaagagctcgtgctcccttttggattactcactcgggatcgcatagactcgtcctccagagtccagaccgatctcccgagtgccgaaccaaaccgggaccgggcggcatcctccgtctcgtaccgacccccgcaccgccaaaccctagtccacggcggcgaggcgaccttgcgacctccgttcctctgcgctccggctgagttgctgatttgggataatcctgttctctctgagtgaatcaacatgtctgggaatgatgataagccacatgctgctgcagacagaataaaggcagccacgttatcagtggctaagggattgagcagggctcaagctgaacgggctgcgactgctgctgcccgcaatgtgaatgcctatgggcagaaggaagagggaccaagccgctggcaggagaggaaggaagccaagagacagatgtatctgatgagtacagagaaggctgcgaagctgggcactgtgaagccaaaagcttcagaaacttcttctgttggcgcatatacccaatgccagaagtgtttccagcatggtcactggacatatgagtgcaaaaatgagcgggtgtacatatcacggccctcaagaacgcagcagcttaagaaccccaagctgaagaaaagcgtaccggtttcttatcaatttgagaatcctgatattataaaggagagggaagaggagcagaagatgatgaaagaaaagcagaagaaggagaaagccgaaagaaaaggggaaagagtaagaggaagcatcgatcgccgagtgattcagatagcagcaatagtgctgcttcggtgttcgactctgactctgaatc

SEQ ID NO: 82446 - DNA, 2160 bp, Zea mays
  Clone ID: MRT4577_175202C.1
gccggccgggttactgatcatacgcatcgcactgcacgtgacgcttcccgccggctttttgatttcgcattttggtgctccccggcagctgcgagcgccgccgccatttactccctgcctcggggcggactcatttctctgagggctccttccttccttgttggcgatgaggaggcacgggtggcagctaccctaccatcctctccaggtggtggcgatagcggtcttcctggcgctcggattcgctttctacgtcttctttgttccctttgttggtggagataggctgcagtatttgctcatgggcctctataccccactgatcacctgcgttatcctattatatatatggtgtgctggaacagatcctggtgatccaggcattttcttaaattcaaaaaggccacctgaaaagcaaggaagttcaactcacgaatatccagaaggagtgtcattcagcaattgttgcagggttgttcataacagtgagaatataagcaataattttgaagtaaaggattcatcttcatacctgacatttaccagggttctttgcttgatatacttcccgttttcttgcttatgcaaaagatggttccactcagatgatcaatcttcagaacagaacacaagtgaagaaggcatgtttttctgcagcttgtgtaaagcagaggtcttgcagcacagtaagcattgtagggtttgtaacaagtgtgtcgatggctttgaccaccactgtaggtggctcaacaattgcataggaaaaagaaactacaaaggattcttcatcctattggcttcagcagttctcttgcttataatgaagtggttagtgggtgctcttgtgttgattcttttctttatgaagcggggagaattctctgggcagataacctcaaaacttggaagcagcttctcagttgtggcttttgtaattgtcgtggtgacatgtacattgctagcgatggttgcaacaataccactctcacaacttctatgcttccacattcttcttatcaagaaaggaattagtacatacgattatattgtagctttgagagagcaagagcaacaagaacattcggagcaccagagcccacagatgtccatcattagctctatcacaggacttagtaccagtagctcttttggtccacttcatcgtggatcatggtgtactccaccaagactattagttgaagatcaggatgtttttcatccggatatgccacagaattccactggcaagaaggccaggaaagacgaaggaagcaaaaggaaaccaccaggagctgtaaaaatcagcacatggtcactggctcgccttaacgcagaggacgtcacgaaggcagctgttgaggccaagaagagatctaaagtcctccagccgatcacaaggcgggggaatattcttaaacctgacaagagaacagacaaaagcagggtgttcctacctgtacctgaacaatctccggatcccatggcaaggacatccgcaagtggaaccgacggtaatttgagcgacatgatgatggaaacacccgctagcttagccccattgcagcacgaggccaggagtgactaccaacccagtgctgtgacgtctatcatgaacctcaaccttacttcatcaccggagagtagcttggagtcacctgatctccaccccttccgtatctccatgtcaggagcagatgaactccgaagcttcatgtcacttgcagcctcagagtcaactgctcagaagactattgcactttcgaggtcgacaagcggtgggtatgaagcctcgggaggcgacgacagcgaccaaataccctctagaattgtgcacaggtcgtccaattggacaaatgtcattctcaattcaggtaggcaggcaactatgtccgatctgaacttgcctaggctacacctgtagggttcataactaacaccaggctgacatagctcaaaattgtgagttgctgacttcttaattagctatgtgttgttagcctgtgagcatgcattggtcagaaccagtgttgggaacctggtttttgggtttaagagtcgggttatgttttgcgatcaataaatacatgtgcctttccaagcagtctaaaccgccccttttagggcggccgccgattagaaggcaggtcggcccgggaaaat

SEQ ID NO: 82447 - DNA, 300 bp, Zea mays
  unsure (1)..(300): unsure at all n locations
  Clone ID: MRT4577_175203C.1
ccggccggggaggaagngcaccgagacgcagagcgggggggaggggacgcggacggccccacgnngcgggctgcaaccgnaagcgcggganggccacgagagncggagccacgcaccaccgncgggcgaaggagggcgacagcagggcaacaacgcgcgccagcgcaggagggccgaagggcacagnaggaggagggggggggcggagccccaacagggaaggggcaggcgccaggaaccggcagaccggggacaagaaacaggcacgccgaggagggaggacacccggaccaaagggaa

SEQ ID NO: 82448 - DNA, 784 bp, Zea mays
  Clone ID: MRT4577_175204C.1
ccggggatctccacgtgggcgggaccgggcggcatcctccgtctcgtactgacccccgcaccgccaaaccctagtccacagcggcgaggcgaccttgcgacctccgttcctctgcgctccggctgagttgctgatttgggataatcatgttctctctgagtgaatgaacatgtctgggaatgatgataagccacatgctgctgcaaacagaataaaggcagccacgttatcagtgactaagggattgagcagggctcaagctgaatgggctgcgactgctgctacccgcaatgtgaatgcctatgggcagaaggaagagggacgaagccgctggcaggagaggaagaaagccaagagtcagatgtatctgatgagtacagagaaggttgcgaagctgggcactgtgaagcaaaaagcttcagaaacttcttctgttggcgcatatacccaatgccagaagtgtttccagcatggtcactggacatatgagtgcaaaaagagcgggtgtacatatcacggccctcaagaacgtagcagcttaagaaccccaagctgaagaaatgcgtacctgtttcttatcgatttgagaatcctgatggtgatcggcgatcgtgagcttccatgttatgtgttgtgatacttgagacttttattatgactatatatgagatattgtctattattatgactggatgaaatgtgtcttattatgactatggatgagacttttgtgatgtaattgatgagaccttgaatttcatattggtatggggattgggggggg

SEQ ID NO: 82449 - DNA, 364 bp, Zea mays
  Clone ID: MRT4577_175205C.1
attcaaatgacaattttatcactgaagtgcggtttatccagaagccaccaaacaacaacttattgcatggccggatacactcacccaccattatacatatacaaagtcataaccaagcgcacacaggacttctggtgcagatgcctcaccagcacgtcttgggttgtcggaatttggttttatccgccataccatgtagagccaaaaggggggggcccatacccattaattaccgacggggaaagatgccctactgtttggcaaaaatgaaattgaacgtgacacacaggcccgggctatttacagcgtgcatgtacctccttattcaaagggcagggtagcaaagccttttttattaacccca

SEQ ID NO: 82450 - DNA, 233 bp, Zea mays
  Clone ID: MRT4577_175206C.1
cccacgcgtccgggaccgggcagaggagttgttggtcctcaagatcaatgtctccattcatcttgaggaccgggcagaggagttgttggtgtcacttgatccatccaagtcaaaccataagaagctcccaaccccacctccaaagaggcgtctgggaattaacatgcttactgggaggaacaagctagtagagtataggcttccaccaaagattgaaaagaaggtggtcaatg

SEQ ID NO: 82451 - DNA, 485 bp, Zea mays
  Clone ID: MRT4577_175207C.1
aatctcaaattttggaaaagtaaaccaacccttttggggggaattggcgggggtccacccattttaacggtttttttccaaacaaagggctaacaacccccaaaaggggggggggggggggcaaacaaacggaaaaacttcctatcaaaaaaccaaaaggggggggccggaaaaaaccctggccccttaaaaaaaaccccatatgggggggcccccccatccgggtaaaaaaaaaaaattttttccgggggggaaagggcttataaaaccccctttttcggcccccaaaatggcaaaggttcccccaaatccggcaaacaaaaagcccatttttttaaaaacccgtaaaagcctcaaggggggatttaaaaggggcggggggggaaaatccagccccccgttttgggaaaccccccaaaggggttaaaaaccccaaggtttttttcccccctttgggggggggccccccacttcctttccccccc

SEQ ID NO: 82452 - DNA, 244 bp, Zea mays
  Clone ID: MRT4577_175208C.1
ctttcttattccaaattttatccattatcatctacttactacttatcagtgaatatgtgcaatattcatatggtcattgtatttcacatttctttcaatatccaatatcagatgataagtcttccttttacactaaaatcaaccatctttatacactagtgacctttcttgtttccttctccttaattgctactacctaacttaattatataataatattactaataaaacatataataataac

SEQ ID NO: 82453 - DNA, 454 bp, Zea mays
  unsure (1)..(454): unsure at all n locations
  Clone ID: MRT4577_175209C.1
cccggccgggtgccaatcctagccagctatggaccatcccggcgccgcctcctcgcctcatccgacgccatagcacctcttcccgtttgcacccccttctccctccatctcccaagccaagcgctcaacctggtcacagcttctccacgctcgctcggggctgctttgtccccgccttcctgtctgcaacccgtgtgcacaaccgcggcctgctgggtcatgggcttctccttcccattctggcgcgcccgcgcggatggctgacaaagcagccggcgctggaggctgaccgtcccgtccgccgccggtgcatccacattttccttatcgctctctcgctccctcaggacgatgcgtctctcgaagctcccaccccaagngcacggctccacgcgggcggcgacggatgtcgtcacattccgcgtcacgcacatcctcgactgcgccgtgctag

SEQ ID NO: 82454 - DNA, 652 bp, Zea mays
  unsure (1)..(652): unsure at all n locations
  Clone ID: MRT4577_17520C.1
ccacgcgtccgcttaaattacatccaaaaacttcatgaggaatttgagacctcaatgtcagatgatcttcacacttcagtggcattggctgctatttctgagccattgaaagttatgaatgatctgttgcacactcgtaaggtaatttattgatgaacaaatggagatacagttcattcacattcagactgaaactgtaccatactaccattctctgttttcatgcaaacagcaaaaactatctaacttgttttgacctacctctggcgtttaagtagggaaagaagcaggacaaaaggctggaatctctttctgccttagaagagaaaataagagtagttctctctgttctaggattgctaccttcaagttatcatgaggtaagtgcaatgtctgttactctgttaacactgccaaatcagttccaatatatactgccagtaagtttacagtagacctattcatgggaactccagcccagccccaaagcctgctcaagctcagctcgacagtcccgttttgataggaagcgaagcttgngtccctgttttgacatgtgggcgctgaagcatgaaacccagcctggaaaaaatggccatttacgggtgggctgagctttcgaagtttggctctgagaagtcaggctcaggcc

SEQ ID NO: 82455 - DNA, 453 bp, Zea mays
  Clone ID: MRT4577_175210C.1
ggggaaaaggggacaaagggattttccagggggttttcaatttttgcatgttctttttaaggggggggaatcatgccccccgaaatccccacaaaagccttttcaggggaaaccaatgggaaggggggccccggggccgcggaaggttacatcggttattactgggccaaaatgaaacgggcaaaccgaagcaaacgggggaccaaaatttattattccttaagtgggctttgccccaaaaccgatttgttttcgtaccttttcccggggggggtcatttcccaaattttgggaaccccgtaatccacccccccctcccccccaaaagggccggggaccacaaagggaacctaaacggggttggggggcatcaccaccccggaaaacccctcgaggaaacccatgggaaaccggggcggttgcgggtcggcgtgcgggaacccaccccttccc

SEQ ID NO: 82456 - DNA, 429 bp, Zea mays
  Clone ID: MRT4577_175211C.1
cggttcggaattctcgaggcaagcctcccgttcgatctctaccatccagggttgttttctgcatgctttccatggatggctcacagggggctaatgccctacatacagacaatctttcatgtccatacggtctacatcactcatctacttagtcatctggcgttcgctctctagcactaatattcttatgcgtgtatagctacttgatgaatctgatatagcgtcatccaaatccacttcagtggccgcattttcacatcttcatggatgtgaaatctctggcgaacctcaacttaatcgacttctacaagatcgcacttactccatctgtggtactacagctcatacttgtactgatcggcgttacttacagtacggcaccttgaatgtcatatagcgagcgcagtatactagctctttagtcactgc

SEQ ID NO: 82457 - DNA, 341 bp, Zea mays
  Clone ID: MRT4577_175213C.1
gagcttacaatacggcggccgccctccctaacaattggtgggttttaattaaaaattttttgggccaaaccaagcctaaacacaatgttataatgagtacgaaggataccccggtatgtccacaccaggggcaaacctgaccacccacgccacaaaaacagggtagatacaacagcccaacctactcaccggacaccccggggaccccaccagggaacaacccacccgcctaagcattgaagcaaaccttgaggcaccctggcagccccccccaccaaatacccaacttgggggggggtccaagattcccactgaatcccatcgggaaaaaggtcgaaaaa

SEQ ID NO: 82458 - DNA, 769 bp, Zea mays
  Clone ID: MRT4577_175214C.1
attcggctcgagtggacatgcaattcccaaacgggcaactgaggtacgtcgccggcgacggcttcacggcgcgtgctttcctgcccctccgtggcggggtcttgcaagcccacggaaagttcccgggggagaagaggctcagcttctctttcaagaacaggaatggcggcagcgtcgtcccgatggttcagtggccggataagtcactctcggtgggggtcgtccaggcgttgtcttggaggagatccggcctgatgctgcagccagcaacacagatcagcatatgtcctacgatcggcgggcgccatcctggggtgtgcgtggagctgatccactcggcggacgacaacgtcggcgtagtctgcggctactcccacaccgcttcttcccctgcttccgcatacgcctccatatcgatcggaaggtcgaagctgaacggcggagcggcaaggtcagggttagcgttcagagtagacgctccactactccacggttttggccggccatggttctcggtccagatgaacagcggcatcgagttctgattccccactgtcttgccgtgacagaactgaacgaacgaacttactgtacagtcgttgatgttgtgtataaagcttgacgacgactcactctacacgtacgtacgtgacttgcaccaaaaaaaaaaaaaaaaaaaaaaactggctaacttatcataatatgtctattttttattgagaaattagacattttctcaattaaatttcgaatataaattatccaaaaa

SEQ ID NO: 82459 - DNA, 145 bp, Zea mays
  Clone ID: MRT4577_175215C.1
acttacttccttgtttgtagctaaatagaaaaccctataccttttgatttgttaatgaggaacagaatacattgtactaatatataatactctgagaccatagtagtgagggatcaatatcacatgcatgcagttattgaaacac

SEQ ID NO: 82460 - DNA, 686 bp, Zea mays
  Clone ID: MRT4577_175216C.1
acttctggccccttctaggtttctcgtctttacaacgtgagtccctgacgtcgccggcggcgcggacgcattcccaccgcgacacaacggcggaggagagcccgggcagccgttggatagcgaccagaccaaatcctaacctaccccgagcatctataggcatggatttgactcactaacttacagagtgccatgaccacgttcaaggcgagagcccagtaccgcgacgttcacccaaatggctcaggcacaggatgtttcaaattgagggcacatggagcacgagtagggtgcgggaaacacgacgctcacaagaattgcccctgggccaactgaactttgagtgggtcatcaccaggacagttcacgcggtgtcaagcccgtgttccgaccaaaccaagaccgtaaggaccaaatggacttctcggtgagcttcaccaaggtacggggatgctagaacatcagcttgtgggggttaagacataccacagtcgtctggccacgtgaagccgaggtgttgccggggtggtcatcaaataagtttggtgccttgatcgatggaacttgggtgtgtctagggtatgatttgggggtgtagtactactaatcatggctgctcaacatggttgatggtgaactaaggatcactggttgggttcctcccggccggcctcgaggtacccaat

SEQ ID NO: 82461 - DNA, 143 bp, Zea mays
  Clone ID: MRT4577_175217C.1
gggagcccttttttttttttttttatatacgaagagggcatagagcctagtttgataccaggacagaagagcatacagagaggagtgatagagcctccaggccaatgacgctccagagagcatcatgcagagagaaagaaaac

SEQ ID NO: 82462 - DNA, 579 bp, Zea mays
  Clone ID: MRT4577_175218C.1
atggaggaaggagttgaaatagactccaagccaaggcgacatccagatcctgttcccgggcatagggaactttcagcaccgccagtacacaacgtgacgcctccccatgaagtagccgatggacgtccggagctagccgttaccatatggtccggggcagatatgatatgtcgcatcaatgggtgccagcgcccatgctaccagggatggaaaggcaaattattgaatcgagttggccgtctcgtgttggtgaagtcgatgctctcatcgattccagtataccatatgacaacgactacattgtccaaatggacagtaaagaaaatcgaccggctaagaaggaactttctattcataggagttgatgatgcaagaaaagggcatttccctgtgaactgtacacgtggcctgcacatcagtgtcgttgggcaatggtcatcatctacgcaatggaacatttggaagaaacgttgcaagagagtgttccaacaacaagcaaaaacttatcaccatttagctttaagaattagagaggatgtactaaattatgaactggcgcttcaggaagtaggagagtag

SEQ ID NO: 82463 - DNA, 402 bp, Zea mays
  Clone ID: MRT4577_175219C.1
gaggagcagccatagctacattggagtacatcgaggttagcacattcctgggcaccggccttgtgtacccagtgccacacaacgtgcgcatggtggtcaggctgcaattccggttggaaggacaggggaatgctggtgacaagaacgtgctcacaacatagagctgctctgaccgggcgctgtgagaacacggcgccgcggcacctgactacctgcacggctcactgctccgagactaccgactggagccgctcgggctgcaaatgcccgtgcgatacctgcaactggagatcacactcgatggaccacaaccttctcatgattgacgacgtaggtatcatcggcacccggaccgtgatctgcgaagtcaagttcacccccatgcatacctactgcgaggtg

SEQ ID NO: 82464 - DNA, 429 bp, Zea mays
  Clone ID: MRT4577_17521C.1
cacaagttgtgcaagggatcctcggacctcacaagtccatgtgtgaatgatgcacatatttagggggagaagtgctacaacttgaccctttgagactaaactttgtgtttgagtatacttgatgtagtctcaaaggtgcattgaaagggaaaggtgaacttggaccatgcaaagacttccactgcactccgatattagtgtactcacctccaagttcatacttatgctctcattgcctttttgctcttaattgacattttggtaacgcaatggggttaaagggccaaaaatgatcctgttttggtgcttaatgccaaagggggagaaattaaggccaaagcaaatggatcaactaccacttgtgaattttgaaaacaaaagagttagaacttttgatttgtccaaaatactcttattgcaaaatttggt

SEQ ID NO: 82465 - DNA, 322 bp, Zea mays
  Clone ID: MRT4577_175220C.1
gatacgatatatgatcacgctacttttttgcgcagctcaagtctcaaaagagggatggtcgacgttttcttagctctacaccccccaccacaacggtcctgaataagtgtgtcctatacatctacacccatatcgtatcaaaacagtgacctacacgaacatcctaattaagagcacgcgctgaaacgaaatcacacggacaacgaataaagctgctttcgttaccacccagactacctccccgcaaaatgcaaaaacattcccttaataatcacacagcacctttaacgccgtaccttctctatcattcaaacctacatac

SEQ ID NO: 82466 - DNA, 322 bp, Zea mays
  unsure (1)..(322): unsure at all n locations
  Clone ID: MRT4577_175221C.1
agtcgtagttggtgtggccgagtgccttggtgccgaggagagccaggatggccatgcaggcgagcttcgtggccatcgacttggctcgcagcagctcccccatgacgaaggcctccaacgacagcctcgccaccctcagcctcctctccctgacgtactcccggatcgccgtcgccgcaccgagaagaaacggctcgtcgtcgccgtcatcacggcccccggcggcggcggcccgcgctcgcgccagcgaccgggcgagcacgagggcgtnctccagcgccgccgagccgccctggccgatgtacgaccccatggcgtgcat

SEQ ID NO: 82467 - DNA, 1082 bp, Zea mays
  Clone ID: MRT4577_175222C.1
gggagggtagaatatagtgcaaggaggagcctcgccaacctcgaagctagtccaaactagtgggaggttgtgtgcagtgatcgatcgaggaagacgagaagcttttcgctgctagctaccgcccgcccggtgtctgtcgatctgtgacgaccgccaagccgaagccgaaggcagcagcagtcgtcaagttcatcgatctcggcatcgacgaccgcccggccgtccatggcgcgaggcaaggtgcagctgcggcgcatcgagaacccggtgcaccggcaggtgaccttctgcaagcgccgcgccgggctgctcaagaaggcccgggagctctccgtcctctgcgacgcccacgtcggcatcatcgtcttctccgcgcacggcaagctctacgacctcgccaccaccgggaccatggaagagctgatcgagaggtacaggactgccagcagcggagaagcagccgacggctgcggcgacaataacagaatggacgcaaagcaagaaaccatggtgctgcaacaggaaatcaacctgcttcagaaaggcctgaggtacatctatgggaacagaacaaatgaacacatgaatgttgaagaactgaatgctctagagaggtacttggagatatggatgtacaacatccgctctgcaaagatgcagataatgattcaagagatacaagcactgaaaagcaaggaaggcatgctgcaagctgctaacgaagttcttcaggagaagatagtagaacagagtagtttgcttgacgtaggcatggttgtagcggatcaacagaacgggcattttagtacagtcccactggtagaagagatgatcagtaacccgctgactatactgagtggctattctaactgtaggggctattccttctgacactgtcataacaccctggggggctaactctctgttgattactactactagtgtgtaatactaccagttaataaagcttgtgtaacttgccatatagccagccctccaggagtgccctggtattgtatctgtgtgctttttttttttacttcccataataaagaactgttgaggagctctcatgttgtgct

SEQ ID NO: 82468 - DNA, 425 bp, Zea mays
  Clone ID: MRT4577_175223C.1
gacatggggcttaacaacaacgaacataaatttgagttttgaatacaagttacaccctggggtccagtttccaaagtaaggcttatactgcaggcagacaatgttattattcacaacttttttttatccacaaaaaacagattttcttctcttacggaaattctacattcctttacaagtttaaattccactttggttatttcaacagatgagtttatatttgatatcagtcaaagatgtgacagaaggctcacaaaataaaaacgccaccaggaagcataatttaacggtatacctaattatgataccattagttggttgaatggggcgcctacatgtacacgatactggagctgcaatacacataaaatgtcagaaaagactattctccgcttgcattatatatcacaaagtaggtggtacaa

SEQ ID NO: 82469 - DNA, 1195 bp, Zea mays
  Clone ID: MRT4577_175224C.1
tccgaaaccccggggcgtatggtagaggagattatagctcaaggaggagcctcgcggagctggaggctagtccaaactagtgggaggttgtgtgcagtgatcgatcgaggaagacgagaagcttttcgctgctagctaccgcccgcccggtgtctgtcgatctgtgacgaccgccaagccgaagccaaaaaggcagcagtagtcgtgagggggatggatctcggcatcgacgaccgcccgtccatggcgcggggcaaggtgcagctgcggcgcatcgagaacccggtgcaccggcaggtgaccttctgcaagcgccgcgccgggctgctcaaaaaggcccgggagctctccgtcctctgcgacgcccacgtcggcatcatcgtcttctccgcgcacggcaagctctacgacctcgccacctccgggaccatggaagagctgatcgagaggtacaggactgccagcagcatagaagcagccgacggctgcggcgacaataacagaatggacgcaaagcaagaaaccatggtgctgcaacaggaaatcaacctgctgcacgaaggcctgaggtacatctatatgaacagaacaaatgaacacatgaatgttgaagcactgaatgctctctgcaaagatgcagataatggctgtagaacaccaaagcactgaaaaagcaaggcatgtcaaaacccctgtacatattaactctacgaagacccgaggctttcagcacccatttacctcactaaaagtgtctgcgtgtacgcaggaaggcatgttgaaagctgccaacgagattctccaggaaaagatagtagagcagagtagtttgcttgacgtaggcatggtggtagcggaccagcagaatgggcgttttagcacagtcccactggtagaagaggtgatcagtagtaacccactgactgtactgagtggctattctagctgtaggggttcagagatgggctactccttctgaccgtaataacaaacagcctgggggctccttctgttgattactactagtgtgtaatacatacagtcaataaagtctgtaatgggttggttgttctgctgctttggtgtatcatattcgattattcgtatcatgtaggccttagataagcccttcaggagtgcccctggtattgtgtcgtcgtgccttttacttctccagaatgaagaaatattgtct

SEQ ID NO: 82470 - DNA, 725 bp, Zea mays
  unsure (1)..(725): unsure at all n locations
  Clone ID: MRT4577_175225C.1
ccgggnacctggnagagctgatcgaaagtaccaaactgccagcgccgggaaaacgacgaccgacggctgcggcaggcacaacaggatggaccccaaacatgaaaccacggtgctgcaacaggaaatcaacctgcttcagaagggactgaggtacatctacgggaacagggcgaacgagcacatgaatgttgacgaactgaacgccctagagaggtacttggagatatggatgtacaacacccgctctgcaaagatgcagataatggctcaagagatccaagcactgaaaagcaaggcatgtcaaaaccctgtacatattaactctacgaagacccgaggctttcagcacccatttacctcactaaaagtgtctgcgtgtacgcaggaaggcatgttgaaagctgccaacgagattctccaggaaaagatagtagagcagagtagtttgcttgacgtaggcatggtggtagcggaccagcagaatgggcgttttagcacagtcccactggtagaagaggtgatcagtagtaacccactgactgtactgagtggctattctagctgtaggggttcagagatgggctactccttctgaccgtaataacaaacagcctggggggctccttctgttgattactactagtgtgtaatacatacagtcaataaagtctgtaatgggttggttgttctgctgctttggtgtatcatattcgattattcgtatc

SEQ ID NO: 82471 - DNA, 1223 bp, Zea mays
  Clone ID: MRT4577_175226C.1
caccaaatggcgctagaccacggcgccgagcatatcttcctctttccctaccgaccgagagggagatgagcggtggcgtgcggagggtcctggaggcgtggaggctcggcgtggtgaagtacggcgaagcgctccagttgcaggagcgtctcgtcgcggaccgcaaggccggccgcgtcggcgacctcgttctgtcgctgcagcacccgccgacctacaccctgggcaagcggcgcgagaaggcggagcggaacctgctcgcgccggaggccgacctgcgcgccctgggcgccgagatccaccgcacggagcgcggcggcgacgtcacgttccacggcccccggcaagccgtgctgtacccgctcctctcgctccgcaccttggggcttggcgcgcggaggtacgtcgaggggctcgagtccgcgatgatccaggtcgcggcgctgcacggcgtctccgcgaggcccggggaccccggcgagaccggggtgtgggtcggggaccgcaaaatcggcgccatcggggtcaggatctcctccgggttcacgtggcacggtctggcatttaacattgaccccgacctggagtacttcgagcacataatgccatgcggcatcgccggcaagggggtgacgtcgctgcggcgggaggtgggggacggagcggagctcccggccgacggggtcatccacgaccagctcgtggggtgcttggcgacaactttgggttttactgatgtggaattcaaggacgattctgagcgtggagacctgatcggagttacagcttcacagtattgacgcctgattcagttttgcgttagaacgtcctgtaatcaaatttcggaatgttttttttatcttcatcagatacgtcctgtgatccatttttgaagcacagcttgtccaggaaaggcacaacttacattgtttttagaattcgaatcgtcagtgaaaactgaatgcagcaagcaactgtcgatgctgtgatcctcttcagttctctgattttttttgaagtactgaacgtttgtaaaaatggggcaacgatgttcaaaaaaaaacctcgacgctgtcagatgatctgctgctataggtccacaagaaatcaactatcactctctagaacacaaacatgttactagaaagcacaaatattttgctttctaactgcttttgtgtttcgttgatgggttatttttctcttccctccgttgtggttgt

SEQ ID NO: 82472 - DNA, 684 bp, Zea mays
  Clone ID: MRT4577_175227C.1
ccctcctcgagttttttttttttttttttttttttttttttttttttttttttttttttttttttttttttttttttttgggggacccgcggaaacaaataaattgcatcttttccaggggggaaaaggttttccttgatacacgccatttcaacagccgggctttcattattcatttttttgggcctcatataggggaaagaataaaccctccaaactaaaagttttgaaacacactattagcctttaaacccccataaaaaaataatctaaaaattgacgtttgggttttgactccgcagccgggactgggatttgtttaccatccaaggcgaggccctcgaggtttgatatggcattggtgaccttttggggggggccataggggacaaaaccaaacccccttgacctggcgttttccctgggggaaaggaccttaacataaagcacttgcccttgctcactgaacaggttttccaaaggcgagttgtcaaccccccacccaggggtccccacgtaaaccttgttagctgaatcgaaaaaggcgggggggggggcggcaccaccaccctttggggcttttgggggggattcatctttagggggggggggcccccagttccccctcagttgtcttccttgaaaggcaaaaccggtgaactggtcaaagcacctttggttttt

SEQ ID NO: 82473 - DNA, 330 bp, Zea mays
  Clone ID: MRT4577_175228C.1
gcccgcttcccccaaaccccgcccgaacaccgacaccgccaagccccacccggccaccgccatctctgccgagagcgagaagagacggccggcaagggagatgggccgacaagcggaagcgagcccggcacgacctactccggcgccggcgcgcggcagcacgaccgcggcgagacaccgccaacgaccagagcaaccgcaccacacccgcgaacggcgacgtcaccgacaccgagcgccgcaccggagacgcggcccagaaccaggccgacacgaaccccaacaacaccgaacccagaggccaagtgtttttttgcccccccccccccc

SEQ ID NO: 82474 - DNA, 401 bp, Zea mays
  Clone ID: MRT4577_175229C.1
tcgcgggacgacgcaagcctctaaagtgacgtcgtactaacgcgtgagtgaagtcgcatagttcactcttgcagcgggacgatagagacttcatacaccttaaggttcatacaacgagcaggtgtatgaagtctcatagtacactcttgccgcggtccgatagagagtccacttcacttaggttgatttaatttacgccggatgcagacctaagtcaaggtacgtcctccattgagagactttgggattgttcctacatagatcatgggatgagagggcaatcagaggacatggagccatctgaagatctttccctaacgagacagtatggcgagttagctgatcgttacattaggtgatgatagagccgaatgcagaaaaatgcatgttgggtctttgaa

SEQ ID NO: 82475 - DNA, 568 bp, Zea mays
  Clone ID: MRT4577_17522C.1
ttgcggaaaccaatttccattaaagccaaaggcccaaagaaaatggaaaaaagatgtaaaaaaaaaaaaaaaaaaaaaaaaaaaaaaaaaaaaaaaaaaaaaaaaaaaaaaaaaaaaggggggggccttttaaaaggacccaattttacttcccctgcctggcaacgcaatattttttttttgggggccccaaatttaatttcccggcccgttttttaccaccgtgggaccgggaaaaccccggggttcccccaattaaatccctttgaaaaaaacccccttttcccaagttggcttaatagcaaaaaggcccgacccattcccctttccaaaaatttgccccccctaatgggaaatgggaccccccctttaaccgccccattaaccggggggggtgggggggttccccccagggggccctttacttttgccagccccttagccccccttcctttcgtttttttcccttcttttttcccccctttccccggtttcccccgtaaagttttaaatgggggccccctttaagggtcccaaaatagggttttacggcccctcgcccccaaaa

SEQ ID NO: 82476 - DNA, 216 bp, Zea mays
  Clone ID: MRT4577_175230C.1
tgggaaatcgccatgcatacccatacttaatggccacgaaaaacaaatccattgccccagctttcacaacatcgaaaatggaaaaaccctgcggtctcccaaataaatgcgctggctgaatatcccattttacccaccttgcataatatcataaagccccgcacctgtcgcccttccaaacatttgcacagcttgaatggccaatggcacaccccc

SEQ ID NO: 82477 - DNA, 250 bp, Zea mays
  unsure (1)..(250): unsure at all n locations
  Clone ID: MRT4577_175231C.1
aaaaaaaataaaaaataaaaaaanaaccatgtgcgaacgctcgaggacgaacgggcttcanaaatcggacggtcggtcgctctgttcagctagctgcatgctcggacaccatatcatcctcaagtacgttacggcgttggccacgccgaatatcctggactcgcggtaagtagcagtctagagggacgtatgtacggctacacagaaagatcgaacttgcgaggtatgactgctgcaaacaagaacaaca

SEQ ID NO: 82478 - DNA, 1168 bp, Zea mays
  unsure (1)..(1168): unsure at all n locations
  Clone ID: MRT4577_175232C.1
aggcctgattgcaaactgccaactcnagcgcaggggcctcgcaaacacaacaacagtatatgaccttagaaaacgctgccctgactcgaaacgagcacgagcttcttgttctgcgcttccagggccttgcgcatcgactgctcatctctttccatcaccctaagatccctgtccatgcctttgttcgccatcagaccctgtctttgctctgacctgtgcctctcccagaggttcagaacgttggatgcaaaggcctgcatcgcctcaactacttctttctcagatatcctgtccacactggcagcccagttattacatatgacgaagatcggtggccctcctaatcttccaggagaaaatggaggcgccccgtcctcggtttcctcgggaacatagataacaccatttgtcagccaccggtttaaggttttaacataattcttttgagcgctaacccatgcaacaaaacaagcaatccaatccaatagctgaagctctaaccgcttgatcaagtccatatgatcatcaccgaactttgcagtgtctatcatggagtctatgtatctagcttgggatatggcatgcaattgtatctgatggcattctagcataacgctccacatcctcatcaacccttgaatgagctcacatgtttgtggccacaactcttcatccctcaacttactaatcttttctgaaatagtgtttacaacctggatggctatgctaatcttagttgatagtttcctgatgtaaagctcagtggcctcaagcttatgagcttctgcacctttctcatctaacattttcagctcctcacgttttctgtcatacagtacccgcatcctctcctctgtcttaacttcctcaagaagcttcttctcccacatgtacaacttctgtagcgtagaggagaggttgccggatcccatcgccttgtcctcttcaaaacgcagaaactcctcctccattgtcggtataccacagaccatcattgcagagactttgaaacctgaactcttctggtagtaaggcatctttccgacctcaagcatcttggatacctcactagctgattgtgaggcacgctcgaattgagtcctgatctccaccaccacctcagtgtcatcaatgtatagcttttccgatcctgtgggtggtagaaaaa

SEQ ID NO: 82479 - DNA, 1604 bp, Zea mays
  Clone ID: MRT4577_175233C.1
tttttttttttttttttttttttttctctttttttttttttttttggcaaaccagggtgtgaatagaatgaataaaatatggcacagcaggtttaagttagccagcagctgctgtacacggggggtgctacaaatgaattaatatgtatattaaataaacaaaacaaaataaaacaaaaaaacaaatccggagcggtggttagatgatctgcaacagaacggggtcagggcgtctaccctacaagctcatcgaactctgctaaaccctacgagtgtacttccagcgcggtggcacggcgaagccgcagtccgaacaccttagaggaagctcaaagcgacatcgtctcgggcttctcggcagcggacacaaggctccagctcgattcgtcccgcatcacctctgtacagtgtgcattggcatgggaaaaaaaattctgcggttattgaaacagcttctgataaacctggtagcctggcctcttccctgtgtgttgggcgctgacatgcatgggattgggagcgttccatgaatcttgggttcatgataacagcatctgaactaagagatcatctgcggcttctcagatgcacaagggcatctgctcttcactcggtcccttcaggcggggtctcccaactaccaggatgtgtctggcgattacctaatttcacaactgcgcttcccaattacggtctgaggagaatgcctgttcatcccgatcaaagaaatgcagcacccccatgtcacaacctgttaactccaccaagtaccacaggcctctacatcagagagagcctggaacccaaaaaactgaggcacctggcgagcaaggtgcatcagctgccactaggggttggttgtgccactgtgccgtagaaacgctgccactggcgttagtcccccttctttccaccgacaaatgctcatgtcctcatgtggaactaggaaacgctgccgctctcctgcgcaacccgggctttctcttcttcggcgcgaagatggagctccctgtacgtatttgcagatgcagaggtgaagttctccatcgcttcgaaaatattcctcagacctgtctgcagactaccaccggcttcagcgccagggcctcgctcatgtaacgcttgtgcagacaaggacacgctgccctggttcgaaatgagcacaagcttcttgttctgtgcctccagagccttgcgcatcgattgctcgtctctttccatcaccctaagatctctgtccatgcctttgttcgccatcagaccctgcctttgctccgacctgtgcctctcccagaggttcaggacgttggacgcaaaggcctgcattgcctcgaccacttctttctcagataccctgtccacactggcagcccagttattgcatatgacgaatatcggtggccctcctaaccttccaggagaaaatggaggcgccccgtcctcggtttcctcgggtacatagatgacaccatttgtcagccacttatttaaagttttgacataatcttttgagcgctaacccatgcagcaaaacaagcaatccaatccaatagctgaagctctaaccgcttgatcaagtccatatgatcatcaccgaacttgca

SEQ ID NO: 82480 - DNA, 334 bp, Zea mays
  Clone ID: MRT4577_175234C.1
cacaagtagggttaggaaggctgcggccagcggcgagaggaggaggggtgggtcagcgatgactgggaaggcgaagccgaataagcacactgcgaatgagatcgccgtgatgatcgacgcggcgactactaaccggggcggcggcaaggccgggctggctgaccggctgtggcaggacaagggcggtcatgcgaagctggcgtgcccgctctgtcggactccggctcccgacatcgagtgcatgcagatccaccacgaggcgctccaccgcaagctccccttcgagccgtagtagctcctctacctgcactctttctgccgctctgctgctgtt

SEQ ID NO: 82481 - DNA, 220 bp, Zea mays
  unsure (1)..(220): unsure at all n locations
  Clone ID: MRT4577_175235C.1
aggggggggggggaaaaaaaaaaaaaattangtangagcagaatgcctcccaaaggataccccatcactctttgagtaccctaaacttcngattgatgaggatagataggtaggataccccttctacttcaactatacctctctaattttaatcctaatacccccaaactataattaaggattcaggtgagaagctaattgataaaaactatagaaaaaa

SEQ ID NO: 82482 - DNA, 392 bp, Zea mays
  Clone ID: MRT4577_175236C.1
atgagaccccacgtcgacccttcacgaactcaaatttaaattagtcgatccccacaaacttaacttattaagtttattgaaatacattatcggttatgttcgctagtgaaccgacgaggttagcttaagtttaccagcttatatggttaagttcgacgattttttttatccacgttctttcacccgtttcttgtgtgggcggcaaccaaattgtctgggtttcaaaattcgcgtcgcgttctccgtcattcctaactccggcgacccgctccggtgttggtccgaactccagttgcccaactcgatcgaggtcccggcaagcagattgaaataatccctggcccatctctcgtttccatgggttggttcaagctccgtagcctcccttgtcc

SEQ ID NO: 82483 - DNA, 387 bp, Zea mays
  Clone ID: MRT4577_175237C.1
atgggcagaggcaaaagaggtcgaggctcgccccgttgcactggtgacaaacggaagcgcaacccaagtcttccctcggaggactttggcgatttagagtatttggaggaggagcgtgtcgggcttgaggggtcggatgagtcgaaggtctcctcggatgaggagaactcctccggctcgtccgaggagcggagcggcaacgacgatgagggcggcggcagcggcgacgatagcggtgacggtgacggcggcgaaggcgacggtagtagcggcggtggaggtgacaatggcggcgacagcgacggtggtgacggtggcggcaagggcagcagtggcgacgtcggcagtggcagaggcaaggccagtgacaaagcgccactggtctaa

SEQ ID NO: 82484 - DNA, 340 bp, Zea mays
  Clone ID: MRT4577_175239C.1
ccatagacgaaacagctcatctagcgtagcgcgcctcgttcgactaacctcggctttttggcacgtatctccaagcagcatcggagcccttgaccgtgcttcatatgccatcacctgctctcgcctttgcgtcccgtgtgcatctcgccgccgcccatcggacggacaggctgatcagaacaggcggcgtgcaccttgctatggcacccaggcaagggctgctgtgatcacgacggccggctgcgtcgtggtgtacgcaggggcgtgcggcgacgcaacctccgactctcagtcaatgcatcaccgaccgtacagctcaatctgatcgttccaggaacgt

SEQ ID NO: 82485 - DNA, 274 bp, Zea mays
  unsure (1)..(274): unsure at all n locations
  Clone ID: MRT4577_17523C.1
acccacacgtccggnacactactacttaccccttttcaccttggaagaccccaaaggggccggtcacaaatttgtgggttcgcaccaacaccccacaaannccnacaaaactaaccaacccaccctncacaatacttctggcgggcgccaccaacatatttaacagattcttaacaaacacaaagaccccaacatccatcatgaactaatccaccaacccaccaaaacatgcaaaaagacccacaactatcaccaccacaacaaccaactaaac

SEQ ID NO: 82486 - DNA, 612 bp, Zea mays
  unsure (1)..(612): unsure at all n locations
  Clone ID: MRT4577_175241C.1
tttggaanatttgctggagggacattcaatgagcaaggggaactcagcaagtatgtgaatgttaaatttccatcaagactatgctccttgggacttacttacatgggaacaaatgaaatgcccattatgttccctttttctgcaatactaaagaagctggatttgcaatacactttcctcaccactgaggaccattgccagctcattgcaaaatgcccgaacttactagttctcgcggtatcatctcctgctcatgtaaattatgaagatactgaattggcaatcttttcatggtaattgacagtatattttttccgataggtgaggaatgtgattggagatagaggattaggagttgttgcggatacgtgcaagaagctccaaaggctcagaatagagcgaggagatgatgaaggaggtgtgcaagaagagcagggaggggtctctcaagtgggcttgacggctatagccgtaggttgccgtgagctggaatatatagctgcctatgtgtctgatataaccaatggggccttggaatctatcgggacattctgcaaaaaactatacgacttccggcttgttctacttgatagagaagagaggataacagac

SEQ ID NO: 82487 - DNA, 207 bp, Zea mays
  Clone ID: MRT4577_175242C.1
gacacgcgtgcgttctggtgggatcgacacatgttctgaggtcggacctgtgtttagagcagaaaattaaaacacacacaagaatctctgtaaagtgcggtgcacttgatgctcaaatagacatttaggagccttattctttaagagtgtgacattatacataggatattcggttcaatttttaaacactcacttgaaaactgtaag

SEQ ID NO: 82488 - DNA, 617 bp, Zea mays
  Clone ID: MRT4577_175244C.1
tcaggccggccgggctgggattttctatctactgcgactctacatttcttctctctctgctcctccgtctccatctgttgctcgcagacagggatcgccttgacaaaatctaaggatgacatcttctaatcatatgcctatcttgcacccatcattatctaccagaagctggttgccaccgcccgtaaaaacggcttcatcgtacttactgaaacgtccctgcaaggatgtgtaggtgtctacctccaatatgaccaaaatgtgcactgctaatgacactttgtggccatacacatgttctgtgttatgaagattggatatattgttccttcctcacacaactgagacattacgattttgtaccgaactgataatctactgattgatattactgatgatgtatgtgtgagccttcttacttcagatgagatcactatcgatgatcttagactgccaactgatgtcactcttgcggcccaaagtatacgtaggtgtcaaaagagtgaaagatcgtgttgtgactgtatcagcctgagatggtggtacgaccagatctgcgcctggaaggatgctgggccctggtaacttcctgtgatctggatatggaaccctactgt

SEQ ID NO: 82489 - DNA, 269 bp, Zea mays
  unsure (1)..(269): unsure at all n locations
  Clone ID: MRT4577_175245C.1
cacccggaagggaacaaccaccccaaataaccctttttttaaaaaaaatttccacaaaaaatgcccaaaaaaagctaaagccgttaaaccccacccttccccccacccttccgggaacccttggttcaaccccaaaattccgaacccgtccctgaaggcgtaccaattttccctataagaaggcgaataaaaacttggcgaaaaaatggaaaaaactgnncccnnattaaaaatttatcccctcaaaattccaaaaaaaaaacaacccg

SEQ ID NO: 82490 - DNA, 321 bp, Zea mays
  Clone ID: MRT4577_175246C.1
ctccgcgagcaccccgacggcctggtccccgagcgagaccgcctgctgctcaacctcgggcgctcctcggggttggtgggcatcaagacgtgcgcctacatctagcgcccgtacatgggctacctctccgagctcctgggcggcaaggagatggtccccatcggcccgctgctcgtggacggctccgacaccggcggcggtacgacgtcgcccgaccccgaccgcgtaacgcgggggctcgacctccaaccccacgccttcgtagtgcttgtctcgttccggaacgagtactttatggtctaacaacaactggcgcggatg

SEQ ID NO: 82491 - DNA, 479 bp, Zea mays
  unsure (1)..(479): unsure at all n locations
  Clone ID: MRT4577_175248C.1
tttctgtggggccaccgtgaatcaaatgggtgcagcgaaagctgcgaaacgtgaacgggagcatcaccgtcacggcgtcgcctagatccccgtcgtttcccgcaacggnacgnncacgctccgtgcacggtgatccatcttttggtgccggctggttcgtcgaaaggagataacggtcagttggcagagtccgaaggagttgcaggcgaagaccctgagcagcagctggttggtgaaggttgtccacattgcaaccactgctcaagagaagatgaagtcgtggagaatgacttccaggagttccaagagtacgatgagttctaggcgtgggttagtggcaaacccctagtcggctgtctgtgaaggccgtgtgtttatctacgtttcattttcgcactttgataattggtaatgactatgtgatgtctcggacatcatgatgtaatcaactattaccctcttttatgctattatttgag

SEQ ID NO: 82492 - DNA, 259 bp, Zea mays
  Clone ID: MRT4577_175249C.1
ggcgccgatggtgtagatcacaggaccagtgggcaatgagatgctcatggcctatgaccccaatgcaacagtgatcatgcgcgctacggggattcggtattgctccgtatccgtctcttcttgtggttgatgttcctgtatgagcaagaggactacaagttcaccggtcttgcgtggctgttcttgggagttccgacgagcgacagcctggtgtacaaggaggagtttgagaacactatggacatggcgccgggcaact

SEQ ID NO: 82493 - DNA, 1341 bp, Zea mays
  Clone ID: MRT4577_17524C.1
atggcaaacacatcggctttcatccctcttcatcaggcagtcaccatccgtctcaacaagacgaactacaccttatggcgcacccaacttctaccattcctatggagcacaaagctgctgggccatctcgatggcaccacaccggcgccttcccagacgatcttgacgtccacagctgcaggtgccgccgtggtccccaatccggagtacgagcgttggtatgatcgtgaccaacagcttctgagtggcctcctgtcctctatgatagaagaggtcctgtgtgacgttgttgaagctacaacagctagagaagcctgggattctctccagagaaagtttgcatcctcatcacgagcccgcacgatacagattcgtgtggatcttgctatgtgcaagaagcgggatctgacggcggctgatttcttcagcaaggttcgtggcctggccaatgaactcgctgcggctgacgctgccctccacgacgaggaaattcttgcctatctttttgcaggattgcctgtcgaatatgatccctttgtcaccacaatgacaactatgatgttcactccgaccctagatgatgtcttcgcgcatctagtggcctttgaagcccgacaacttcgtcaccatgcagagcttcaactgaatctcggtgcatcggccaatgtcgctggccgtcaaggctcccaccgtggccggggtcgctctggccgtggtcgcggcccgatcaccaggggtcgtggtgcaccatccaggggcggtggccgtgggtccacatcccgcccaacctgtcaaatttatgaaaaggaagggcacactgctcgttgttgctggtaccggatggatgagacctatcaagatgacgatccatctgcaaatttggccgctacatcaaactacaaggtggacacgaactggtttctggatacaggcgctactgatcacatcaccagtgatctagatcgcttggctatacgagaacgctacagtggaggtgatcaagtccaagttggcaatggagcagggtttcctgtcctcacacccatcaacagaatgggtcagctgagaggaaacaccgtcatattgttgaaaccgggaaatctggcgacacctgctactgattatcctgcaatagcacctgccgaatcagctccaggatcagtgcctgctcctgcgtcccaggatggtgcgtcgtcagttttgcctgcatcgggggactcaggcgcatcacttgctcctccaacagactgtgccacgccaccatcggagcagcctatctgcactctggtgcccgcgacacgtactgctcctgcacttgcgcctgaaagggaattaggctaa

SEQ ID NO: 82494 - DNA, 345 bp, Zea mays
  Clone ID: MRT4577_175250C.1
tctacccatattccttcttcactgcacagctaatggagctgtgcaatgacattcaggtaagttggagtagatttgtttttttgggatccaaaatcatcccagttattaacaggccgtagaagatatccatttacttctgttcttacattgtggactttatactgttactgttcttctaccagaatcagtgcctgggctgcgtacatccatcgtggatgaagaggctggattccaatccattttctaaaaagaaaagaatcagtgcctgtattatctgaaaccaatccgaacttcaaggctgtttggtcgtaagaatataaaattgtcgtgaccttgactttagat

SEQ ID NO: 82495 - DNA, 849 bp, Zea mays
  unsure (1)..(849): unsure at all n locations
  Clone ID: MRT4577_175251C.1
cggacctcgtcattcaaacggagctcactcagattcagaagccatcaccgtcaccgtcgccgccgccgccgccgccgccttcctcgcctgcacgcctctcctcgagatccgcctccgcctgtccccgtgcgcggccacgatctcacgaccccgagccctaccctgcgcctcccgcctccggtctccgatcctcctcctaggtatgtcagcacgcacgcgcccttgcatcccgacggtcaatggctgattaggactgatgtgcgcgtctgcgcttctgctagatccatttcaatgcccgctatgattgtttgtgccatgcgaagatcttggtcagttgatgaccagagaaaggcagtttcagcttcccatttagcgctatatgctgctcagttgatgttcatgtgttataactgagacttagaatcgtcagcatctgaggcagtggcatagcaatatatccatatgcagcagatcttagatgtatacctggtgaaagtagaggcagcggcatagcagtatatgcatgttcagatcttagatgtatacctggtgaaactagaggcggtggccagaattgttttcctagtgcacccctgaaactctaagctgaatgtcgcttcccagcggcgtgtcgtgctttctaatctacctgcgtgtcatgtcgtctgagatcataccttgctttgaatttacatgagatatactacccatgtctgaatcttcactggttataaatattatgaccctgcattattacatcaccgattcctaatgcagnttggtactccgtgtgatcctggtgtaagcattggnggctcatcgcagcctgaccgactgtctaaactgaat

SEQ ID NO: 82496 - DNA, 498 bp, Zea mays
  Clone ID: MRT4577_175252C.1
ttttttttttttttttttttttttttttttttttttttttgttttttttcggggccggacacatcattagcattattattagaagatatatatagttcctctataaataaattataaccaataaaaaacacctcagtctgaacctcctaatgacgtagtcctagtcctatgtagaatcaaagcgtagaggagctcgttccacgcgtccggcacgcctggcaggcaccagtggctgcagtcggccgccctcggcgtcacctgctcctgcgccgccgccggcgacgggaggcggacgttgtcccccgacgggtggccgtcccgccgttgggccgtcattagggtcacgttcaggacgtgcatcgtcgccagctgccgctttttcgccgtttaaattaaagccgggcttgggttgagcaggcccgggcaccggggcagcgcgaccctcgacgggttcagctccggcgccggctccctgacacacccacctccacctcgtgc

SEQ ID NO: 82497 - DNA, 376 bp, Zea mays
  Clone ID: MRT4577_175253C.1
ttttggtggtttttaaaaattttgttaggggacatcctttcactcataaagagtaggtcaagaccttgcatcttgctcccccacaaaacggcttaattaggatcacacagggcaaccggtcgcaccctcaccaattgcctcaagagccgaaggtatacaacccattaccaacacccgactaaacacggcctcacacatcaaacctaccacaggcaacagggccccccaaccatacagagcaaccaagacacccgtgatcggagaaattcgcttcctagcaggcaacctagttgcgcactgcttaacagcagctatggctctatctaacactgaaacgtgaatagtgaaccaacaccatttagaatcagcttgctag

SEQ ID NO: 82498 - DNA, 298 bp, Zea mays
  Clone ID: MRT4577_175254C.1
cgtgatcgagatctccatgctcgactccctgagaacagggttttttgtcgacagcacgcgcatgatcgtcgtggggaaggccgtcggttttcggaccgtcatcgtggggagttgggagctggtgtctggggcggacgtggcgttgtagagcatgcacaacatgcacgaggcgctgtcggagctctgggaggttgccctctgcgctggcgattgcgaccgcgtcgactgccgtactctggtgcaccaccgtcgtggatatcacaatgattgcctgagcgatactaccctgtgacattaa

SEQ ID NO: 82499 - DNA, 342 bp, Zea mays
  unsure (1)..(342): unsure at all n locations
  Clone ID: MRT4577_175255C.1
gcgtggtngtattagtggtcgacggcgagctagaagaccggcaggttggcgcgcactctggcgcggaagactcggatgaggacgacctgggccaggaagccgagctgctcggacaggagcaggacgagcgggcccagcgtggacatgatggcgcgcatggtctccccggggaccaccatgagctactaggtcagggagacgccgactcacccacagtcttactgctgatgcgtgacacaggccacgctctggtcgtgcgcgccggggtgggtgcgcaccgcgtggaccatctgggacccgactcggaagccgtcggcgccgcagctggacagtaggagggcc

SEQ ID NO: 82500 - DNA, 337 bp, Zea mays
  unsure (1)..(337): unsure at all n locations
  Clone ID: MRT4577_175256C.1
gcccacgcgccggcgaacnngaccagaggagaaggggcacgggacaggaggggaccgagagagaagcgaacgcgagaaaggganncaaggaggcngnngccganggccanggcggcgcggcngcngcgagcaaccgaggnggcancncgannncnancngcnncccaaggnnncgnccagcgagcagagacacagcnggnggganagncgangaaagccaaccaacaccccagncncaaccagagggannagcnganggagagancacaccaggcancacaaacgaggaanacancnccagaagaaaaaaacnnnnagaggngcnaccagagaagag

SEQ ID NO: 82501 - DNA, 575 bp, Zea mays
  unsure (1)..(575): unsure at all n locations
  Clone ID: MRT4577_175257C.1
atttaactgtatgcacaaagctgttattgtatctgtgtctccagtcaagagcatcactagctgcattcttcggtctttcccagttacatgggcttgccatatttgttcccctgtcagaatcatcaccctttattaaatcacacataatataaatggaaatattcgtccttttttcatggcaggaccatataattccaagaccctgatgatggccacaactgcttatattgatgattcctactcggagattattgatcctctaaagactgaggtgctgtatgttgttgaactccctggtgaccatacttagcacccaccaaaaccgaatgtggtggtgtctagcagtgtgtgcaaacttctagaatatccagtctgcttgaatgccatgtatcctattcatcagctgcacattcatactgatccatttggcatgtttatatctaaaaccctgttcaaatgtagtcgattggctgaaaaaaaaaaaaaaaaaaaaaaaaaaaaaaaaaaaaaaaaaaaaaaaaaaaaaaaaaaaaaaaaaaagaaaaaaaaaaaaaaangggggcggccgttttaaa

SEQ ID NO: 82502 - DNA, 486 bp, Zea mays
  Clone ID: MRT4577_175258C.1
aaaaacaaatcgggggggggaaaactgttttaaaaattttgtttttgaaaaaaaacccccttttatatacaggggccccctaccaaccacccacaaaaaaaaggcccccgcgactgttttttttttgccccatatttatcgatggcatatttgcattggagggcggaaaatttttattttaaaagcggctttgttggacgggatcatgggaaaactacaaactaaaaactgaccctgtttggggggactttgtccaaaacccccccaaacaaaaatgttcccaaacataaacgcacaaaaggggggttaataaaggcccccaaaaactttacggaagcttttaacaatttttttttacttttgggggggggagccttttgacggaaacgtttcaccggaaaaaacagggttgggggtttgggggaacccggggagccccccgaacccgggggagctgaaccccaggcaccccaagaggccctgccg

SEQ ID NO: 82503 - DNA, 1332 bp, Zea mays
  Clone ID: MRT4577_175259C.1
ccgggagttaaggggtaaagggtcgtattcgctagcgtttgagaaggagcatcatccccagccgaacgcacagcaatctggtccaacatccctgcctattcctcaaagcgtgcaggccatggtggccgctggtcgtcatgcaccagtgccaccaaggtatctccgtccagatctggccgcggatgtcgtcgttgccgacgacgcgacgaccatccccatcatcgacttccagcgactgctgctggtcgacccagaggaatctgcgcgcctccatgcggcctgccaggactggggcttcttccagctgataaaccacggtgttccggacgatgtgatggaggcgatgaaggccagcatccagtcattcttcgcgcttcctgcggaggccaagcagcagtaccgtcagcaggcaggccagctggaggggtacggccagctgttcgtcgtctccgaggaccagaagctggactgggccgacgtcctctacctcaacacgcagccgcccgagcaccggaacctcagcttctggcctgctggtgagagcttcaggcagacgctggacacctactccgccgccgtcaagcacgtcgccgaccgcctgctgggagccatgtacatgaacctgggcctccagctgagcatcatggacatggacccggagcggggtgccgggatacagtcggtgaggatgaactactaccctccctgcgctgaagcggcggacaaggtcctgggcttctctccgcactccgactcggaccttctcaccctcgtcctccaggtcaaccagctccagggcctgcagatcaagaggccgcccgacggcggcggtgcctgggcctggctacccgtcacgccgctgcagggcgccttcgtcgtcaacgtcggggacgtcctcgagatcttcaccaacgggaggtacaggagcgtcgagcaccgggctctagtcaacgcccacacggagcgcttgtccatcgcggcgttccactctcccagcatccatgccaccatagggccgctgccggagctcctcggggaccaggaggtgcccaagtataagacgctggaccaccaaagcttcattacgctcttcttctccgccaagctccagggcaagagcttcttggaacggatgaagaagctttcgtagagccaatcggacggaccggaaagttaagcaggccgacgtaaagtcggattacatgttatcggttcggccatagcaatatagcacgcatgtatgtccggattaatttggtgaccgacgagactagttttgtctaccaattcacttttacatcgatttttaaatataaaaaacttacaaaaaag

SEQ ID NO: 82504 - DNA, 522 bp, Zea mays
  Clone ID: MRT4577_17525C.1
ctttctaatttatatttgttatttttttcaatatagtcaagttcttgaactgaaaaaaaaaaaaaaaaaaaaaaaaaggaaaaaaaaaaaaaaaaaaaaaaaaaaaaaaaaaaaaaaaaaaaaaaaaaaaaaaaaaaaaaaaaacacaaaaaaaaaaaaaactacgtcccctcacactagacgcaaccatagaaaaaatgtaaccaaaaaaaaaaaaaaagggggggggcgtttaaaaagacttactctatcccgcgcgccttgtgcgaaataatcttctttttttagggggcgagaaaacaaaaacgccgggcccgtattatcacccgactgtatggaaaaccccggggtccactcaatataatcctctgaaaaaaacatccatctttgcccggtggggggaataaaaaaaagggtacatcacttctccccccccacacagggtgaccacctttatggctaaggggccccctccttttggggccgcataacaccggggttgagggggggtccccccggggg

SEQ ID NO: 82505 - DNA, 364 bp, Zea mays
  Clone ID: MRT4577_175260C.1
cacacgcgtaagcgtacaggatccaacaggggatcgcaacaggcatgttagcatgatcacccttgttcctacatcaaccgccaagcctattacagtagttacctttggtccatttggtggaaaaaaacatgagggctcaacaactacaacaacttgtgctagcaaaccttgctgcatactctcagcaacatcagtttcttgcattgaaccaactggctggattgaactgtgctgcttattagcaacaacaattaccattgcatcagctagttgatgtctacccgcagaatgtgtttcattcaaccaaatagcataatttgtactctgcttgttattttacagcagcgacaaacttctaccattt

SEQ ID NO: 82506 - DNA, 1384 bp, Zea mays
  unsure (1)..(1384): unsure at all n locations
  Clone ID: MRT4577_175261C.1
cctcgaggctttcncgggaaaaaaaaaaaaaaaaaaaaaaaaaatttttgtnttggtttgtggaatagattagagaagagaaatagacaaccagcggtattcttcatatttatctctttgttttcagttttattttagttaaggggtaaagggtcgtattcgctagcgtttgagaaggagcatcatccccagccgaacgcacagcaatctggtccaacatccctgcctattcctcaaaggtaggccctgattaaataatccttaactgtctgatcatccatgttgcaacgattctcctgtactgtacgattctcccggggagctcgacgatctagatggagatgacggggtctctccctgtgcccagcgtgcaggccatggtggccgctggtcgtcatgcaccagtgccaccaaggtatctccgtccagatctggccgcggatgtcgtcgttgccgacgacgcgacgaccatccccatcatcgacttccagcgactgctgctggtcgacccagaggaatctgcgcgcctccatgcggcctgccaggactggggcttcttccagctgataaaccacggtgttccggacgatgtgatggaggcgatgaaggccagcatccagtcattcttcgcgcttcctgcggaggccaagcagcagtaccgtcagcaggcaggccagctggaggggtacggccagctgttcgtcgtctccgaggaccagaagctggactggcccgacgtcctctacctcaacacgcagccgccagagctacgcaaccgcacgtcaagcgctgcgccgaccgccttctggcagacatgtacatgatactgggcctcctgagcagcatggacatggacccggagcggggtgccgggatacagtcggtcaaccagctccagggcctgcagatcaagaggccgcccgacggcggcggtgcctgggcctggcttcccgtcacgccgctgcagggcgccttcgtcgtcaacgtcggggacgtcctcgagatcttcaccaacgggaggtacaggagcgtcgagcaccgggctctagtcaacgcccacacggagcgcttgtccatcgcggcgttccactctcccagcatccatgccaccatagggccgctgccggagctcctcggggaccaggaggtgcccaagtataagacgctggaccaccaaagcttcattacgctcttcttctccgccaagctccagggcaagagcttcttggaacggatgaagaagctttcgtagagccaatcggacggaccggaaagttaagcaggccgacgtaaagtcggattacatgttatcggttcggccatagcaatatagcacgcatgtatgtccggattaatttggtgaccgacgagactagttttgtct

SEQ ID NO: 82507 - DNA, 2322 bp, Zea mays
  Clone ID: MRT4577_175262C.1
tggtataacaagtagtagtgtacgatccggccggggagctcgacgatctagatggagaaggcggggtctctccctgtgcccagcgtgcaggccatggtggccgccggtcgtcatgcaccagtgccaccaaggtatctccgtccagatctggccgcggatgtcgtcgttgccgacgacgcgacgaccatccccatcatcgacttccagcgactgctgctggtcgacccagaggaatctgcgcgcctccatgcggcctgccaggactggggcttcttccagctgataaaccacggtgttccggacgatgtgatggaggcgatgaaggccagcacccagtcattcttcgcgcttcctgcggaggccaagcagcagtaccgtcagcaggcaggacagctggaggggtacggccagctgttcgtcgtctccgaggaccagaagctggactgggccgacgtcctctacctcaacacgcacccgcccgagcaccggaacctcagcttctggcctgctggtgagagcttcaggcagacgctggacacctactccgccgccgtcaagcacgtcgccgaccgcctgctgggagccatgtacatgaacctgggcctccagctgagcatcatggacattcgaggccggccgggtctccggcagacgacgtcttctccaacgatgtcgcagatgacgacgctcctaccccaactctcgacgctgctcaacctccatgctcaagctgttgttgtgcccatcatccgagctcttgtatcgctcttcctcgacgtcaactccaccttctacgctcgatgttttattttagttaaggggtaaagggtcgtattcgctagcgtttgagaaggagcatcatccccagccgaacgcacagcaatctggtccaacatccctgcctattcctcaaaggtaggccctgagtaaataatccttaactgtctgagcctccatgttgcaacgattctcctgtactgtgatacggtataacaagtagtactgtacgattctcccggggagctcgacgatctagatggagatgacggggtctctccctgtgcccagcgtgcaggccatggtggccgctggtcgtcatgcaccagtgccaccaaggtatctccgtccagatctggccgcggatgtcgtcgttgccgacgacgcgacgaccatccccatcatcgacttccagcgactgctgctggtcgacccagaggaatctgcgcgcctccatgcggcctgccaggactggggcttcttccagctgataaaccacggtgttccggacgatgtgatggaggcgatgaaggccagcacccagtcattcttcgcgcttcctgcggaggccaagcagcagtaccgtcagcaggcaggacagctggaggggtacggccagctgttcgtcgtctccgaggaccagaagctggactgggccgacgtcctctacctcaacacgcagccgcccgagcaccggaacctcagcttctggcctgctggtgagagcttcaggcagacgctggacacctactccgccgccgtcaagcacgtcgccgaccgcctgctgggagccatgtacatgaacctgggcctcctgagcagcatggacatggaccccggagcggggtgccgggatacagtcggtgaggatgaactactaccctccctgcgctgaagcggcggacaaggtcctgggcttctctccgcactccgactcggaccttctcaccctcgtcctccaggtcaaccagctccagggcctgcagatcaagaggccgcccgacggcggcggtgcctgggcctggcttcccgtcacgccgctgcagggcgccttcgtcgtcaacgtcggggacgtcctcgagatcttcaccaacgggaggtacaggagcgtcgagcaccgggctctagtcaacgcccacacggagcgcttgtccatcgcggcgttccactctcccagcatccatgccaccatagggccgctgccggagctcctcggggaccaggaggtgcccaagtataagacgctggaccaccaaagcttcattacgctcttcttctccgccaagctccagggcaagagcttcttggaacggatgaagaagctttcgtagagccaatcggacggaccggaaagttaagcaggccgacgtaaagtcggattacatgttatcggttcggccatagcaatatagcacgcatgtatgtccggattaatttggtgaccgacgagactagttttgtctaccaattcacttttacatcgatttttaaatataaaaaacttacaaaacaaaaaaaggaagggcggccgcagggaaggagctc

SEQ ID NO: 82508 - DNA, 869 bp, Zea mays
  Clone ID: MRT4577_175263C.1
gttgttggtgatgttgtcatatacacggctgatactcgtaatgttcattgtgtaaatgaggtaactgaaggggaaagggtgaccctgactctttggttcactagagaccgtgcttatgatgaggatccaaaacttcttaactttctatctcagacatcattgagttgtgaaccaactgagcaaaattcttatattcctgtaccagcttctgataacatgtatcgcttttcttgtgatcagtctggttttgacatacgatgtgctagagtgcgtattcttgggtttagttttcactcaagtagtggtgagtgcaatatatctgtgtcaccagctgaagatgaccaaatagagttgcttggaaagcaactgcggctcgggagcggagatgatgtctttgagaaaatattttctaacagcttacatgctcttcaggtatgttcattctttgagtggccttaatgtttgctgtcgactgaaagacgtcaacatcatatatcagtcgtcctttcatcatttgttaccaacacgttgcaggttcaggatgcacttatcttaatgttattctctaaaatgaggtgtaaactactattttcaccttttgtcctttgtttttcagcgaagcactaaccataggtgcacaatatgtcatgttaagttcacatgtctttggttgttacatctatctatctcttaaataggtggtgcaattctactactggaaaaaacatgagctggcagcaaggagggaacacagtgttgttagttcaggaacagtctgctgtacagttatgcatcattcaaaagggacagaattaccattaccatgcaatcacacacttgcacaaactatatttggatcatataatact

SEQ ID NO: 82509 - DNA, 268 bp, Zea mays
  Clone ID: MRT4577_175264C.1
accgaaacccctgttataaaaagtgattgaaaagcaaggccgattgacgatcaaacaagggggccccgggcacaaaacaaaaatacacccccggccctacggttattcacgccgcggggtgcccacccccgaaaccgggttgccaaaaacgcgaggggaaggtctaactcctgaaaaaccaatcacacccacccacgcagtgtcaaagcaggtaaaaacgggtaagaaaatgaaagccccccacgtccccaacggaggcgggctctgt

SEQ ID NO: 82510 - DNA, 323 bp, Zea mays
  Clone ID: MRT4577_175265C.1
agccatatccataccagaggctctcagattttacctctgcgagtaaaatcggaggagggagcgagcgaggcacacggtagctagcaagacggagcacacggatagtagaccaagaggtggtccgccagggccaactgtatcgacatcatcctcgacatcatcctgccgactctcagcgactgcttcaagcgtcgagtgggggatcgagttctggatctgcctgatcatcacctttctcggccacgtcccagagatcatcaaaaccgccgcgggcatcgccaaataggcgcccgagcgacgatgaacgacggacgcctgccaga

SEQ ID NO: 82511 - DNA, 257 bp, Zea mays
  Clone ID: MRT4577_175266C.1
gaccaccacccctttctttctcgccacctactctacttctccctgtcctttctctctctactagttgggggtctagggtcgccttgacggcagccataccacgcgcgcacacgctccgttcggccgtacccgttcttcatttcccactgcacacaaatactactgtgactccgttagggagcaacaggaggaagaagcaggggggagaggggaggggtggtttggccttcttactcctgtttttcttcccttctgta

SEQ ID NO: 82512 - DNA, 111 bp, Zea mays
  Clone ID: MRT4577_175267C.1
ccggcccggaattccgggcggccccacccttccttatagggttttgttattaccccatgaagcttttattggcttcgattgatattgggagcggggttgctggttcccttg

SEQ ID NO: 82513 - DNA, 306 bp, Zea mays
  Clone ID: MRT4577_175268C.1
tttgtcaaaatcaaaaaggtaggggggtgtataaagactgattcggtaattttagagccaggtggaaagaggtacaccggtctgggtctaatgcaagtacagtgctgtgatgggtcacctctgttacgcatttactcacaggctaactttggatcaaagcatcttactcaaaaggaatgggcttggaaagctgggagagggactcgatttgatattgcgaccatatgccttgcaactctgccaaactggataatgacgttgtctgtaaatgacagtggacgcttggagggggttggctgaccttac

SEQ ID NO: 82514 - DNA, 626 bp, Zea mays
  Clone ID: MRT4577_175269C.1
ccggccgggtcgacttgacagcgtgtacttgtatgctcctcgcgccggcgcggggaggactcatgtgcaggcaatgagagaaaaagggcgaaatggtgatactcaacaacgttctcctcctcgagtacttcaataaaaagtgagagaactatgtcaagagatggttccaccagcctgcccgcaagcataggtgccgtactctctggacaaaagaaggctgggaagatattcccccgtccgactggtaggtcctctacgacctagttgctacaatgctggaatttgaagcacaacatgacatgaagggctgctagagggtttacccttgagaagactgaaagctgctgcgatcacaaagaagcttgctccaaccattgacatttctggagatcaccgccccacgaacaaatcccttgaaggactgcaggcctatgtccagaggattaagacatacaagggcaagctgcttatcttccacaagcctgcacacaacgttaaggttgatgactctactccagataagattgccaccgatacccagttccacgggtgactacatgccatttactcgtgctgagaaacgatcagttcacgctgttaaggtcacagatgagatgaagtcattt

SEQ ID NO: 82515 - DNA, 609 bp, Zea mays
  unsure (1)..(609): unsure at all n locations
  Clone ID: MRT4577_17526C.1
tcctactcgancgtcgagggccgcttttttctttttttttttcttttttttttttttttttttttttcttttttttttttttttttttttttttttttttttttttttttttttttttttttggggggaaaagaaaacaacttaaaaccccccaatatccccaggatttacctacctacaggaggccacatccccccacgctcaggaaaaacccagatcgaggatatggacatttttcccatcaaattcctatcctgaaaaaaggccaaaggggtcaacggggaaacattgaaatccctcaaaaatccccccccaatggaatggcaagggaacaaaattttttcaaggcttccgcggaaatccacaatgggcacagctaaataaaagggactctggagggggggcgcgactgggggtcctccaaagcggccaaaatttcgagcttatcagggttcaagaacgggggtatgtacccgggggaaaagggccccatgttcggagtctccttcagggcggggcgcaccaccccctccaggggagatttggggaaaccccggtaaaaacccatgggggaaacctaggcgaaaattattctgggtggaaacaagg

SEQ ID NO: 82516 - DNA, 530 bp, Zea mays
  Clone ID: MRT4577_175270C.1
aggcgtgacaccgtcgaaacccgtgctagtggtcgacgccgcgcttcgcgccttgctcgttcgatggaatgccgagccatgtgggtagcccatgcgcctagtcacgactcgttcaggaccgagagatgatgatcgagcaactgatgtggtgccaaccacaagatgcagttggtggacgacctgaagagtgatggacatgaccagtagatgctcgccaagcgagtacctcccccagcaaacactatctaagtgttaaattaaaggtaccccttagggtgattggttgctggtgtgacttggcctccatccctgccaccgggatagacggtcgagtgggttactgcttccgcaggagaggacccggaggagtagcgtggccaggcttcaccatgttactcggttttctccgttagttatttccgctgcattaaaatttatggttattatttctgaaactccgataatgtaatcactaatggtacttattaatttgtggtattatgttttattgtaaaaaaaaaaaaaaaaaa

SEQ ID NO: 82517 - DNA, 203 bp, Zea mays
  Clone ID: MRT4577_175271C.1
tgaacaagaaaatttttttttgatcattggggaccactcttattgagcattgcatatctacactacaacttgatttaagggcagggatgcccagccaggcatattatcaacacagaatcagaggcaccaacatgcctaccaaaaactaataatgaagaataaacgatccctctatgaccaccacgacgatgaacaaaaaagag

SEQ ID NO: 82518 - DNA, 632 bp, Zea mays
  Clone ID: MRT4577_175272C.1
tcgagttttttttattcttttttttttttttttttttttttttttttttttttttttttttggattaacaggggataaaaaccctctcaatccatatgaatggggttaaaagttccaaagctgttggaggtctaggcagcgcattggcatttttccaatgacaagttttgaaagccatgaacaagttccaaagctgtgggaggccttcgcgcgcgctccacaaatcatgcaaaagccagagctttactccctttttccattaaaggggctgcagcaaacaaacccgggtttgcaaaattgggcatttgtacttgaaactcggacgatgcaaagcaaatggaatctaatggggcacatcattctccagcaagactaacattctgcccttcatataacactttggaaatcggggtgaccccagaaaaagatcaggtttcaaaacatcggatctcactgacctttagtttattgagctagctgttccatgcatccaatctgtagcttctctttttgtcctcgattaatcatcgctaaaacttcttaaaacgcctcatgacttccgatccagtgcatcctcctcacggcgtaaacgcatgcattatactatagcgcctagatgaaaagtctctcct

SEQ ID NO: 82519 - DNA, 817 bp, Zea mays
  Clone ID: MRT4577_175273C.1
cacccttttagctaaaatgcttagttagcacttaacatacatagacttgtaatgtgtaaacttaggttaacatgcgttccataattaatgtgattgcttgagtagttggttgtggataggaatccctcctctgttgaacttgtgcttggtatgcttttgtgtgataaatagaagaactaatgaaaagtcgtagcaaattaaataaatgatcgtacttatgaggttgtatttgtgttgcgtaaatatacaaaatgtttgtcgtcttttagtggtgttaatgttgtgcgctcaatgatatgtagtagctaacgctagtgtgtgtggttgcttatgatgtctcgctacttagtgtttaattcgctaacatgtacttaaagtatcttgtgctatttcattatattcatacatatgcatcttgcatctcatttaggaccgagagaggatgagcgtgcaagtgatgtggtgccaccaacaagatgcagttggtggacgacctgaaaaatggacctaaccagtggatgctcgccaagcgagtaccctcaccaaacactatctaagtgttaaattaaaggtactccttaggatgattggttgatggtgtgacttggcctccatccctgccaccgggatagacagccgagtgggttattgctaccgcaggagaggaccaggaggagtagcgtggccaggcttcgccatgttactcggttttctcccgttagttatttctgctgcattaaattttatggttattatttctgaaactccgataatgtaatcactaatgatacttattaaatttgtggtattatgtttt

SEQ ID NO: 82520 - DNA, 814 bp, Zea mays
  Clone ID: MRT4577_175274C.1
acctcttctatccgcttccagacacttctcccgtcccgtcccgtccccagccaacctcccatccccgtctcgcgtcgcagcggcagttccactccctcgccatgggcaagattaagatcggaatcaacggtttcggaaggatcgggaggctcgtcgccagggtcgccctccagagcgacgatgtcgagctcgtcgccgtcaacgacccctttatcaccaccgagtacatgacctacatgttcaagtacgacaccgttcacggccactggaagcacagtgacatcaagctcaaggacgacaagacgctgctctttggcgagaagccagttaccgtcttcggcgtcaggaaccctgaggagatcccgtggggtgaggctggtgccgattacgttgtggagtccaccggtgtcttcactgacaaggacaaggccgctgctcacttgaagggtggtgccaagaaggtggtcatctctgccccaagcaaagatgcccctatgtttgtggttggtgtcaatgaggacaagtacacctcagacgttaacattgtctcaaatgctagctgcaccactaactgccttgctcccctagcaaagatcattaatgacaacttcggtattattgagggtttgatgaccactgttcatgccatcactgccacacagaagaccgttgatggtccctcgagcaaggactggagaggtggcagggccgcaagctttaacatcattcccagcagcactggtgctgccaaggctgttggcaaggttcttcctgagctgaatggcaagcttaccggtatgtctttccgggttcc

SEQ ID NO: 82521 - DNA, 704 bp, Zea mays
  Clone ID: MRT4577_175275C.1
ccggccgggacacgccacccccttctcctctgttcgtacgcagcagcagggcaggctgcgcgcccttcccctccctacagccatggcccatggccatctactacctccagcccctgccctcccccttctagccagccccggcctcccctgcagcaagcaagcgcagcccgtcggcaagccctagtggtctgcagcctggccaggcgaaaacccatgcgtcgcggccagcccagcatccccagcaagcaccatggccgagcctctgctgttcacgtgagagaggaagaagatgactccctgagccaatgacaagtgggcccagggcggatgaccgagagatgacgctcatgcaagtggtgtggtgccaaccacaagatgccgttggtgaacgacctgaagaatggacataaccagtggatgctcgccaagcgagtacctcccccagcaaaaaactaaaggtacctccttgctttagttgatggtgtgacttggcctttgtccctgccaccgggacagacgatcgagtgggttactgcttccgcaggagaggaccaggaggagtagcgtggccaggcttcgccatgttactcgggttttctccgttagttatttccgctgcattaaaatatgtttattatttttgaaactcccgatatgtaatcactaatgatactccttaaatttggagtattatgccttattac

SEQ ID NO: 82522 - DNA, 745 bp, Zea mays
  Clone ID: MRT4577_175276C.1
aataccactgcttcaatccccaatcccccggtgtagcccagtctcctccctccccttggcgcagcgcatcagccagccagccagcaacggcgccggagcgatgcggccccccacccgcagcgagttcggcttctccgtcgccggcaagcgcaagcgctcgccggagttcccctgcgtgtcgcgcttccggcagcggcggctcatctccttcctcgggcaccacaacttcaaccgcaccgtggatgtgttggtgacccagacggacgtgttcctgtgcctgaagcacctggccgagctggtggacgcgggctcctgggacaaggccatcgactacctctcccgcttcctgccgtccgaccgcccgctcggcgtccacggccgcgccctcttccactacctccgcgtgcacaaggccatcgacgacgtgctcgccggagccccggaggcccgctccgtcaccaccgccctcgaccagtgcatcatccgccaccccaccaagagccacgccctcaccaggctccgcgccatcttctcctccctcctctgctccaagagatacagggctgtcctggacatagggcgcgtgaggcacaaggctaaactgactatcgtcgacttggtttgtaagactccagagttgaaagacatatgcgacccgcccgcggctcaatggaaccccagaacgtgcttcccattgacttcggctacgcttgttttccgcccgaggcgccaccgtgaagaaaaa

SEQ ID NO: 82523 - DNA, 556 bp, Zea mays
  Clone ID: MRT4577_175277C.1
cccgccatttccctgctgacgctcccacccatcgctctccctcctggcgtcttccccttcctctgccagcgcaggagctccaagctcgcatgccgccgagtttctcccatggcggcctccctggcgcacctcgccagcagcagggagtctccaagtgcaggaccgagagatgatgatcgagcaagtaatgtggtgccaaccacaagatgcagttggtgggcgacctgaagaatggtggacttatccagtggatgctcgccaagcgagtaccccccagcaaacactatctaagtgttaaattaaaggtacctccttgatttggttgatggtgtgacttggccttcattcctgccaccgggatagacggtcgagtgggttactgcttccgcaggagaggaccaggaggagtagtgtggccaggcttcgccatgttactcggttcttctccgttagttatttccgctgcattaaaatttatggttattatttctgaaactccgataatgtaatcactattgatacttattaaatttgaggtattatgctttattgtaag

SEQ ID NO: 82524 - DNA, 566 bp, Zea mays
  Clone ID: MRT4577_175278C.1
gccggccgggtcgggctctccctctccccacgccactctccctactcccttcctctctctctctctctatctctctctctctagctccccatgcagctggtgaccaagccctcccatgctcctccctcaccttggagctctcccatggcgtctccccctcctctacggcagcaaggtgtaggaccgagagatgatgatcgagccagtgatgtggtgccaaccacaagatgccgtggtggacgacctgaagaatgatggacataactagtagatgctcgccaagcgagtacaccccccaacaaacactatctaagtgttaaattaaaggtactccttaggatgtttggttgatggtgtgacttggcctccatccctgccaccgggatagacggttgagtgggttactgcttccgcaggagaggaccaggaggagtagtgtggccaggcttcgccatgttactcggttttctccgttagttatttccgctgcattaaaattatgattagtatttctgaaactccgacaatgtaatcactaatgatacttattaaatttgtggtattac

SEQ ID NO: 82525 - DNA, 474 bp, Zea mays
  Clone ID: MRT4577_175279C.1
cggacgcgtggggccgccgagtcgggccagcaagtggcgcagcggcgcggtgcgcggggtgtacgggcggcgcctgctggacgcgctccgcgccacgggcggtggccagccgcgcgccgtgaaggcggcggccgactcggcgctggcgctgaccgcgcgcggccagacgcggtggagccgcgccatcctgctcgccggcgcggtctgcagccgccgccgcgtcctcgtcaaggcgggcggcaaggtccggcggcggcgccgcccgcctccgccggtgcaggccagagacaaggcggcggcggcggcggcgctaaagggtaaggagggtaaggtgcaggagcggctccgcgtgctgggccgcctcgtcccgggctgccggaagctacccacgcccgcgctgctggaggaggccgccgactacgtggccgcgctgcagatgcaggtcagcgccatgcgcgcgctcgccgacgcgtt

SEQ ID NO: 82526 - DNA, 345 bp, Zea mays
  Clone ID: MRT4577_17527C.1
ccaagctaactttaacatcgtgacccctctactgaaggcactgctcgtcctgagacaacgcgttgacgacgctaaccccatgccaacccagcttaactaccacgcgacagatgcccacttgcccagctgacagaacaaggaccagtgccgccccgatcgaactccaaaaaatacacgcagcctggctagccaatgggacgctccctgtacccgcgcttttaacgcagcatatgcatatagcacacgcattgcttactatagcatgcaccgcgatatagcgcccgattgctttgctgttgtaagtgccatcacaagcatatataccgggtttatctatactactat

SEQ ID NO: 82527 - DNA, 388 bp, Zea mays
  Clone ID: MRT4577_175280C.1
attcggctcgaggcctagagggcatactaatgttgcttggtgctgtggacgcatccctgagccggccggtacgcagaaatctgactacggcccaaggaagctcttcttccaacacgccagtcttacatattactgcgcaccctgacggttcatgtaatgatatcctacactatgcgtcactgggtaagattacgttgagagccctggctgaggacgaacactgtggatataagcctggagagattcacaccgccatagctagcacggtgatggtacttatcaggatagctgcacagaatagatccgtcagtagaacctgaggcaactcgcgctcgcatgatcgctgaccaggttgacagaaattcggtgcagcagactgtgccgacat

SEQ ID NO: 82528 - DNA, 888 bp, Zea mays
  Clone ID: MRT4577_175281C.1
agctcatcgtcgcccaggctgcccccccccccgctgcacagcgaccgccaccccctgcagcttccccttgccgttgcccaacagcagcacatccccatcccctttctctgttcttgccacggccgagctcccagccggtcttcttccccaacgccggcatccatggatgcacggctcccactcccatggcgccatgattctctgcgcagcgatgtcggtccaaaaaacagcagccccgatcccccgcatcgcgtgctcgctcgatctgcgcagtcccgacctgcgccgtcgcggtggtgtttgagacagccccatgcggcgtcgtcgatctgcgccgcgcttgtgagttggcgtcaaaaaaaatccttgctagatgttgtcgcggcgtctcgcgcgatgcatgattcggtgaagcacctaaaccatggacgcatgcgcgactcgaatccgagatgacaggaccgagagatgatgatcgagacagtgatgtggtgacaaccacaagatgcagttggtggactacctgaagaatggtggacatgaccagtagatgctcgccaagcgagtacctccccagcaaacactccctaagtgttaaattaaaggtactacttgatttggttgatggtgtgacttggccttcatccctgccaccgggatagatggtcgagtgggttactgcttccgcaggagaggaccaggaggagtagtgtggccaggcttcgccatgttactcggttcttctccgttagtattttccgctgcattaaaagttgtggttattatttctgaaactccgataatgtaatcactaatgatacttattaaatttgtggtattatgttttattgtatttctctgtgcctcaccttcgtgtgagctagtggt

SEQ ID NO: 82529 - DNA, 128 bp, Zea mays
  Clone ID: MRT4577_175282C.1
cggacttgtttgtcgcccacgcgtccagatctagatggcggggtttcattaagataagcacgcccatcaacaccaaccaccaaaatgaaggcacgtaggcgagcaccaacagatacatcggccatggc

SEQ ID NO: 82530 - DNA, 702 bp, Zea mays
  Clone ID: MRT4577_175283C.1
gtcgtattcaagcttacgttgtcttggttagacttgtgtggtcggtgatgcttttgcgcgatcaataggagaactaatgaaaagccgtatccaaataaataaaatgtgcgtgcttgtgatgttgtaatcgtgttgcgtaaataaataacatgttgttgtctttttaatggtgttaatgttgaacgtcgataatgtgtagataactaaagcgaacatgtggttgttacggtgtcttccattttattgttagttcgccactgtgtccttgtatgtcttgtgctactttcattatattcatacatatgcaccttgcatctcatttaggaccgagagatgacgatcgtgcaagtgatgtggtgccaaccacaagacgcagttggtggacgacctgaaggatggacttaaccagtggatgttcgccaagcgagtacctccccagcaaacactacctaagtgttaaaaaggtacccttagggtgattggttgatggtgtgacttggccttcatccctgccaccgggatagacggtcgagagggttattgcttccgcaggagaggaccaggaggagtagcgtggccaggcttcgccatgttactcggttttctccgttagttatttccgctgcattaaaaatttatggttactatttctggaactccgataatgtaatcactaatggtacttcttaaatttgtggtatt

SEQ ID NO: 82531 - DNA, 488 bp, Zea mays
  Clone ID: MRT4577_175284C.1
gcacgagcgtctatctggatcgattcgaaacatcgggagagagtagcaaataaacaacaaagagattgttgattatccaatcggatcgttcaagcaggatgagcaaccgaacgtcgcacctgaccgtcctgcaagtgccccgccgcggggccgtcgttgttgccggagacgcggcggcggcggcggcggacccctacgacggaccgcagccgcagacggccacctgctgcacggcgctgcagcgtggcgtggccctcgacggcctggcgcagccgcggtacgcgccgctgcggacgctagcgatcgtcgacgatgacgacggcgacgtcgaagaggacgaggatgggaatcccaagaacagcggcaaggacaagaaggacgaccacgacgccgccaccgctataaaaagcgacgacagcagcaggagtggtggtaagaagaagatggtgcgcacgtgcatgtcgacggtggatgaactgaaagtgtcg

SEQ ID NO: 82532 - DNA, 643 bp, Zea mays
  Clone ID: MRT4577_175285C.1
gacaaattgtgcagcaagccgcatgcttccggctcgctgtttggtggagccggtggagagcacgccgtgatgccgctgtgtgttcgctgtttttgcacagccccgaacatcgacgtcgttcacccctgagagaaccccgtgttttgcgagaagaagggaagccgctcgacgctcgtcgatgttcgtagcgatgcacaaatcggaatctccatcgtcctcacaaacatcgattgggtttgtttatggaccgagaggtgacgatcgtgcaagtgatgtggtgccaaccacaagatgcagttggtggacgtactgaaggatggtggacttaaccagtggatgctcgccgagcgagtatctccccccagcaaacactacctaagtgttaaattaaaggtacttcttaggttgattggttgatggtgtgacttggccttcatccctgccaccgggatagacggtcgagtgggttactgcttccgtaggagaggaccaggaggagtagcgtggccaggcttcgccatgttactcggttttctccgttagttatttccgctgcattaaaatttatggttattatttctgaaactccgataatgtaatcactaatgatactcattaaatttgtggtattatgttttattgt

SEQ ID NO: 82533 - DNA, 187 bp, Zea mays
  Clone ID: MRT4577_175286C.1
gacgctgtggttgctgtaaggggtcgtccctgcgccacacggccgtcgccatggtgaagctgagcaaagaggccaagcagagactacagcagctcttcaaggggagccagtttgccattcgctggggctttatccctacttgtgatttacctgggatttaagaggggtgcagatcccggaatgcctg

SEQ ID NO: 82534 - DNA, 519 bp, Zea mays
  Clone ID: MRT4577_175287C.1
gtgtatgtgtgctgttttatttttgtggaggagagaaccccgtgttttgcgagaagaagggaagccgcttgacgctcgtcgatgttcgtagcgatgcacaaatcagaatctccatcgtcctcacaaacatcgattgggtttgtttatggaccgagagatggtgatcgtgcacgtgatatggtgccaaccacaggatgccgtcggtggacgacccaaggaaggatggacataaccagtggatgctcgccaagcgagtacctcccccagcaaacactaagtgttaaattaaaggtactccttaggatgattgattgttggtgtgacttggccttcgtccctgccaccgggacagacggtcgagtgggttactacttccgcaggagaggaccaggaggagtagcgtggccaggcttcgccatgttactcggttttctccggtagctatttccgctgcattaaaatttatgattattatttctgaaactccgataatgccatcactaatgatacttattaaaa

SEQ ID NO: 82535 - DNA, 723 bp, Zea mays
  unsure (1)..(723): unsure at all n locations
  Clone ID: MRT4577_175288C.1
tggctttatttctttctcccccatctgagctccctctatccctccatttcctcgatctgagctccctctatccctccatttcctcggcgcccgttcccagctctccatggacgccagcagcaagcgcacaggtctgcacaggggcgtcatccttgtgcaggcctccctgccggatctctccctttggctgcggcgagttctacacatcccagccatggctggtcttctctccatggctgacccactcatctcctcaaagctcatccatggcgcctgttcatgctcaaaccaccgtgcgtgcgtgcagaaagtaaagaggaagaagaagcaatgtgaccgagagagaatgatcgtgcaagtgatgtggtgccacccacaaggtgcagttggtggacgacccaacgaaggatggacttaaccagtggatgctcgccaagcgagcacctcccccagcaaacactatctaagtgttaaattaaaggtacccccttgatttggttgatggtgtaacttggccttcatccctgccaccgggatagatggtcgagagggttactgcttccgcaggagaggaccaggaggagtagcgtggccaggcgttgccatgttactcggttttctccgttagttatttcgctgcattaaaatttatggttattatttctgaaactccgataatgtanatactactgatacnntatanatttgtgggattatgctttt

SEQ ID NO: 82536 - DNA, 509 bp, Zea mays
  unsure (1)..(509): unsure at all n locations
  Clone ID: MRT4577_175289C.1
cggtccggcacttcccggggtgacttttgcttctctcgggttttttttttctctactattttttttttctgtcatatatttttctcctatttttctatttttattttcaaaataggaagttcgagatagaatttgggtactataggtggggccattagtttttttaactctctttctctgactgcctcgatttgccgtatagaattacatttctaagcgcaactagccaacctgtagcattttctgtcgccagcatttgaagttttgaactgagccctggtcgtgtccctgaggtctgatgtgctcttggtgtactactcgtatttgctaattggaaaggaccttttgtgggtttactagcgtttggcactaacgcccacgctagaatgtttaaaaaaaaaaaaaaaaaaggcggncgccgcaaaacccggggcgcgagcccgggccggagcggccgtcggtgcagatcttggatcacgtagcttagaatgttcaagtttttttttttt

SEQ ID NO: 82537 - DNA, 300 bp, Zea mays
  Clone ID: MRT4577_17528C.1
atggcgagctcgccggtgctcgccgtctcccccatccccctccctccgccgagcgcctataaaaggacccgcctgagccccgtcttcgccacacaactccagccacccccactgccctcctccccgagccgttcaagcaagcgccgccgtgctcccttcactgctccgtcgtgccaagagctccgccacactcccacgttcacgacacaccacttcccccactcaattatggccggaaaactcaccggcggcttcgccgccgcgggcacccgccaccgtgccgcggatcggccgccatag

SEQ ID NO: 82538 - DNA, 430 bp, Zea mays
  Clone ID: MRT4577_175290C.1
actggcggttccaccgcggcgtgtgcgccactttagctacactctcttcgctccttgcccggcattacgacagcaggggcccacgtcaggcctaaccaatttctcaccctttcaatatcttcttgagcttcctgctgcgaattggcgcgggctttccttttgttctgtctttaaatcagtgtgatctcccattgctggtcaattggtcctttatctaatcagagccgagcagtttgagctcgccgacttccgacgcgctagtatagcggagcctttgtcctggtcaaccacgactattgccattgcgcctgttgctcccaccaatttctgaactcttgaacgagcatacatgaactgctgacagggggtctcttagtgaaggcaacactgaaccgattcaaaagctggctgggttgatcgcggagattga

SEQ ID NO: 82539 - DNA, 756 bp, Zea mays
  Clone ID: MRT4577_175291C.1
tctccgactactccgattctcgtcataactgattgccctcctctacgttgggatctcagaatacccatctgcaatccgatcgcacgccatactgaaactactccgtcttcccatgactatatatcccctattcccctctccaatccctatcttatcgccccctccctcgaagtcgctgctggctccgattcaacatggcggttcacatcgctcccctcactatgagtgactcgtcgagatgttaatccggatcctgggatcaccatactcgaacatatctaggcgggcacaaggagtagagcgcatggacatcattaccgcagcatacatctgctgcctgcagcactgcatgcctgactatggttccggatactatcggaagtatcgtgaatactattgatgtccatgcccttatcatgcaaatatgagttgtactccctgatgccaatcttatgatcaaactaagacggacacaggattgacaagctgaagatgtcactacatccgctattgttctagctggatagatgctacttgtggcgcagggattcatcgacaacaactaccgtccgactgttatttgccgagaatataccagaacacttgaagatgttattgctgcagttgtcagaatagcgatatatgtagatgtgaatgatcgaagggcaacgtgaagtctcgtaaacatgtctattgtcaccacactcactggccagtgtgtcgactataatgctgatctcgcgattgatgctacta

SEQ ID NO: 82540 - DNA, 639 bp, Zea mays
  Clone ID: MRT4577_175292C.1
gggtacctcgaggccggccggggtcgttttttcgctattctctccgtctttctctcactgcgcaacagcttctgggtgatctgcgcccgcacgatggtgatctgcgccgccgcaggctcctacttgaatgagctcatctgcctccaacaacaccctcctcccgcctccactatggcaacacctacctcaaagacaacgtatatgacggagatgtcacctaagcgctcctcaaccgcttctaggggatccgctcctactttgactccagagcatcttggaggcacaggcgctctgagccagcccgatctgaacgagatcaggatcagatggccctgcacatgatttaacaacaggcgcgacactacacgaccacgtgtgacatctttgcttcgatagaaacaggcgcaatgggtcctcgccccatcggcttcgcctgatgctgctggacgagcacaatcgtcgcttggggcaccacagtgcctgctaggaggaacatcacaacagtgatggagactacgacactgtgctgaaggcccactctaaatctgaagctcgcgactacaagaccgagctgaaggaccacgctagatccaacgtcatcgactctggggatgctgcatgactgtcatctcatgcatg

SEQ ID NO: 82541 - DNA, 312 bp, Zea mays
  Clone ID: MRT4577_175293C.1
tgtgttgtggaatccgggaatccaaagcaggcgggcagacaccgtgctgtgcggagcggtccaactaccgggcagaggcagaggcagaggcggagggcggggcgagagagccgtgcggctgtccaactccccttccctatccggtagcagctgctcctatatgacccccgcaccccagcaaaaaccttcccctttttccccttcacagccccgtactactatccccgctaccgatagccgtcgcgctgctcatttggtggcggttcgcctcccttatcccatccgacgccgtctgcttctactttagctttc

SEQ ID NO: 82542 - DNA, 1040 bp, Zea mays
  Clone ID: MRT4577_175294C.1
tgcggtgcgcccttgaactgcaaagtaatcggagcactgcctggcactggggcgctaggccaaccgctaatataccaagtagtaccttgaagggattgggacttggaagtttccatggcttgaacagaattgctaggaaaaaagggctgggccttacccatagccaacgcaaatccacccataatggcggcaaaaaacaaagtccgggaaaagttcaggcgcatggttggagtattgcaattagctaaaaaacaagatatctatacccccatgattttaccattgggaatttcttgcctagaattgggacggaacagtttcccaattgtttttgcctttgccattagaggctattgctgaaaccttatttttccctgcaatggtgagcactccgagctaatctcccaaaacttctgccagggaggctttccatggctaaccttaaagtctggttagcggccatcattcaagcattttgccatttccaactatgccccgtccctttgaccgatcgataaaggtttagctttcacccatttgaaaggcaccattcaggcttttatcaaacaaatgtttggggaagcattgccgattcgctttcgggctagttattttccctttaccgaaccctcagcggaagtggatgtgcaatggcagggtaaatggctagaggtgatgggctgtggcatggtggaccccaacgtaatggaagcagtgggttatgacccggaagtttacactggctttgccgcaggctttggggtagagcgatttgccatggtgttgcaccaaattgacgatattcgtcggctctataacagtgatctgcggtttctgcggcagttttaatgttttaaaattgatcaactaattaactctcagagcgtgtttgaaaagcccccctggcccccaagtttggggggaagttaaaaataaaagtgccccagcattgtcgaagatttaatgaggagatttaggggacaaaataaaacttttcaaacagattctcagcgctggggaacattcagggatggtgatgc

SEQ ID NO: 82543 - DNA, 204 bp, Zea mays
  Clone ID: MRT4577_175295C.1
tgcttctcctccccctccggttcgggttcgtgttcgtgaggatctccgacgttggggtacgtgggtgagcagatctacatggcgtactcgaatgtcgagtaccgctgcttcatctgacgcttcttctgggtcaattacgatcacttccttcacaacgccttataacacttaactgaaggtccctttagtcccaaatcatacctt

SEQ ID NO: 82544 - DNA, 313 bp, Zea mays
  unsure (1)..(313): unsure at all n locations
  Clone ID: MRT4577_175296C.1
actagttctagatcgcgagcggctgtacttggtntggtctatgtttttgctgagtatggtttttttttgttttgggatgaaagcattttaaggaacggcgatcatttgtctgattttattaaaataacgaatccattctcttgacatggtcgttaagagtcacaggttactctgaacgaaaatgggaaattaacccagggttgtcaaaggtggttttggtgaggtttcagaatgacacttcgtttcttgagactgtgggccaccgtcgtcgtccaacttggggcccttggaacccttctggacagggcccttc

SEQ ID NO: 82545 - DNA, 613 bp, Zea mays
  Clone ID: MRT4577_175297C.1
ttttttttttttttttttttttttttttttttttttttttttttttttttttttttttttttttttttttttttttttttttttttttttttttttttttttaggcccaaatggtttaaaactttttcaaaatgttcaattgccactttggttggttttaaattaaggggcgtccaaaaaacggaagtaaatagtttggaaaattccctgggagcaggtttagcttgtttcccaaatggggacaccataaaaagggcaaagttttttggagttttttcctaccccggggctttttgaaataacgggtggggaaatgccagggtttgatctgtcctcggttgcataaaaaaaaataaaggggccgataaaataaaccactttaaatttttcctttgggcctaaaaaaagggcttccccgttttttccaatttttattgttcccaaggaaccaaaggggttataaaaaaaaaaatctgggggattataaaaattgccagggttttttggaccttttgtgaaatccccaaactggtttattgaccatccatgtttaccaggtgataaaccactaaatggggcttaaaatttaacaaaccccatttttacttgggcc

SEQ ID NO: 82546 - DNA, 311 bp, Zea mays
  Clone ID: MRT4577_175298C.1
gattccgtcgacattcgttatcatgtcatagctgtgaatacatttttgacagcgcgcgccatgcatccgggagcatactaagagggggcgggaccagaaggccgaaggagataaccttgcagcaatggaagaggatgatgacgaatatcaaataccgaaatcaaggcggctgagatgaggaatcaagaaagatgcttcaaagaacgtaagcgacgcccacatacagcagtaccacgcattcgccctaacattacagcagtcatctagtgattctacttgagctcagggcaacagattaaacatacactgat

SEQ ID NO: 82547 - DNA, 172 bp, Zea mays
  Clone ID: MRT4577_175299C.1
cttgtatataaaaacctctcacacgcataaggctaacgctacgattactggggcttatacactctaagcattgtggactatatgcaaacactgaaaccttgtactgaacgtgatcttccaaaaagtggcaatgatcccatttatggtggtggtaggggctgaatacctgtgc

SEQ ID NO: 82548 - DNA, 305 bp, Zea mays
  Clone ID: MRT4577_17529C.1
aaaaaagggaaacaggtcttacttaaatatggggtgggggtggaactttgggtttaagaacaatacaagcaaagcccccaagtgtttgggcctcttcagaccccaggaattttttatcccccccttggggcaagattctggggtggggccaggggatcacaccctttcgccggcccccccaaatttctcacattcgggtttttttaacagggcccgcctctttggccccggcccccaaatcgggcttttgggtcttccccggggccctctgggacagggcccccaaaatgtcccctctgggcccc

SEQ ID NO: 82549 - DNA, 332 bp, Zea mays
  Clone ID: MRT4577_1752C.1
acccaaactgccatgcgtgagaattgattgacaggaagaacaggagccaaccaacacacgacacaacaagctgcagccgcggtaggcatgggggaccgggccactgacacccgaccccaccaccatttccacccgacgcacactttatttagcccacgtcactcgcagaccgtaccggacaagtgcaccccacagtcactgctagcttccttccgggcttcgtgcgacacacacactcctatatagacgccagtaaccgtagcggactgtacaacaaaatcccgcgtcatactgccatgtacgcgcgcgagcgaatacctcttcacgcgcgc

SEQ ID NO: 82550 - DNA, 1991 bp, Zea mays
  Clone ID: MRT4577_175300C.1
cattgggtacctattccggccttgggacggccccaccagccattgtccctccggccctcgcgagtcgcgacctccactgcaaccgcaccgccatgatgaaaccgccggcaccggcggttccgtcgcctgagccgccgcgcctcgccggcggtgggcgtgggccgcgcggcctccgatccctgcccgcgctctcctataacacccaccgcgccctcgtcctggggctcaccttcctggcctacgcgctctaccacgcctcccgtaaaccgcccagcatcgtcaagcgcgagctcgcccggtcgtggccgcccttcgccgacccggcgctcctcggcgccacggacgtcgccttcctcacctcctattccctcggcatgttcgtcgccggccacctcggcgactgcctcgacctccgccgcttccttgccttcggcatggtcaccagcggcgccgcggtggcgctcttcggcgccgggtacttcctaggtcagcattcgctcgcgttctacgtcgtcgcccaggtgattgcgggcctgctccagtccacgggctggccctccgtcgtcgccattgtgggcaactggttcagcggccggaggcgtggcctcatcatgggcatatggaacgcgcacacctcggtggggaacatcaccggatcgcttgtcgccgcagccatgcttggggtacgggtggggatggtcgttcgtggttcccggtggtctcattgcgctcggtggcgtcctcgtgctgttcttcctcgcgccatacccccagtacgtcggcttcggcccgtcgccgattgaagaacctgtcactgacgagagcaccgacggggaggacattagtgccgcagatggcgctgggaaggacagacgggatgccgtcggaatttttaaggcactggccattcccggtgtcgtcatcttcgcgctctgtctcttcttcgccaaactagttgcatacacttttctgtactggctcccattctacttgagccagactgctattggagacgagcatatgtcagctgcatctgcaggatatctatcagttttgtttgatgtaggtggaatagttgggggagttctggccggcttcatatctgaccagcttaatgctagggcaaccactgctgcagttttcatgtacttggcgattccatctcttttcctctttcatgcatatggtagtacctcaaaagcgacaaacattggcttgatgatgatcagtggcctgtttgttaatggaccctatgctctcataacaaccgctgtttctgctgatttgggaactcacaaatctcttaaaggagattctcgcgcattggccacggtaaccgcaattatagatgggacaggatctcttggtgctgcattaggaccattcataacaggcttcatttcaagaaaaggatgggatttagtattcacaatgcttgcactctgcgcactggttgctgctgtgcttttatcaagtcatgtgaaaacagaaattcctcagatcatccagaagtggagagatcgctcgactaacacgcagaatggaaatgcagatcctggtgttcagccacttcttgtggacgaaagttgacggggagatctttcggtgcggctcctagcgcgagacagttttgtagtgttgttgtgaggcagtgtgatggttctggagaaaagacaaatcagacgatgacgaggaaacggtttctgtccctaatgcttattgatctgagcaaacaaacatgagcgggatacgatctattttctcaaaaatgatggtatagtccatcgcagattcgcagtagaatctttagatacaccaatctgttgtgtaagaatatattgtgtatctttacgtatattagttgtacttggggggtttagatgaacttaggaagatggaacaatgacttgacagtgaaatactgatgaagactctgtgcacaatgtcaatgatatttatgttttttttacccttgagggtgactgtcaacc

SEQ ID NO: 82551 - DNA, 883 bp, Zea mays
  unsure (1)..(883): unsure at all n locations
  Clone ID: MRT4577_175301C.1
ggcgggccggccgggcacgaggtttcgttctcatctccgtttctctggattgtcccccgctccccgctcccctctccggtcttccccatgtcggacgcgtataggaaagccaagcccggccgcctcgtcttcaagggcggcgaagccgcctccatccacaagccaaagaagcacaagaagaataagaagcccgcgtcggacgccctcgccgacggcgacatcgaggccgcggccgcgaccgcggagggtgctgaaggcggcggaggtgccggcagcggcactggcgacgactacaccatcgacgcggcgaagaagatgaagtacgaggaactcttccctgtggagtcgaagaagttcgggtatgaccccgacaacgccgcccgcgctgccgcccggaaccgcaccgtcgaggaagccctcgacgaccgcgtccgcaagaaggccgaccgctactgcaaatgaggttcactcattggtcattgctgttgtttgcagctgtattgctcagtgtattgaagatggcctctttggagaattatgatccttcacggcatgttgtttagtagtcaaagtgctagtcaagcattttccttatgcatatttgtactagtaattagcaaacataaggattcttgcacatgttattccgataaacttgttctgccctctttgggttgattaagagaatactaccgcctggagattgtttattttgtagtgctgtgttttatgctaatggttagcaacttaatagagaccagaaggtgaaattgagtagtaaaaaaaaaaaaaaaaaaaaaaaaaaaaaaaaaaaaaaaaaaaaaaaaaaaaaaaaaaaaaaaaaaaaaanaagggccaaaaaaaaaaaaaaaattttgcggcc

SEQ ID NO: 82552 - DNA, 212 bp, Zea mays
  Clone ID: MRT4577_175302C.1
atggtataactgtctgactatggatgccttgcacttttgctcctgaagtccgaatatttacctgagttgcacgtactctcgcatttaaaggttaaactctaaccgctatatagtccggatccctggtgagctgaagaaaaattattatcacgataaaaattacatacaacatagaaacatacgaggtgataactttattataagtcgccccc

SEQ ID NO: 82553 - DNA, 2815 bp, Zea mays
  unsure (1)..(2815): unsure at all n locations
  Clone ID: MRT4577_175303C.1
gccggccgggcctggatttgaaccggattaattaacgaagaatccggcttccctctcgtcgcgtcttccgctcgccgccgacctcgacctcgcctcgcctccacgtctccttcctacctcgcgccaagcaaaggccaccgccaccgcgcgtccggcggagccctttatcaggccgcgcccgctgctgggcgggacctctccctccctccctttccactccacctccaatcctcctccccgtccacagtccacagcagaacccgttgccgttgcaggcgtaagggggcgatcgcgcttgatttttagcgctctcctgtgagcctccggctgcggcgtcgcagagatgggctgtgccccggtggtgtgggccgcggtgtggttgcttgctgccgcggtggcagggttcgccgatcccggcggcctcgagcgcgcgtttccaatagtgaagccagactacgggcacacgaaactccaactcgcaaaagaaggtctggaagcaattcagaggatcagaactccaatagctgctgtttctgttattggcccctatcggtcgggcaaatcttttcttctcaaccaacttctctccctatcatgtgacaatggttttggagttggacacatgcgggatacaaaaacaaaaggtatatgggtatggggttcccccgttgaggtggatatcggtggctccaaggtgtctgttctatacctggacaccgaaggatttgagagtgttggaaaatcaaatgtatatgatgataggatatttgctctggcaactgttttaagttctgttctgatctacaatcttcctgaaacaattcgtgaagccgatatatcgagactttcatttgccgtcgaaattgctgaagaattctatggaagagtcaaggggcaagatgttgcttttgagccagccaaacttctgtggttgatccagagggattttctccaaggaaaatcggttcagcagatggttgatgaagctctccaacgggtacctaacaacaatggagacacaaatattgacgagctcaaccaaatcagagactctttggcggttatgggagataacagtacagcttttagcttaccacagcctcatctgcaaaggacaaagttatgtgatatggaggaccaggaacttgatccgttgtatgtaaagaagagggatcagttgaaagaagtcgttgcatccatgataaaaccaaaaattgtgcagggtagaactctgaatggaacagagtttgtatccttcctagggcagatagttgatgctttgaataaaggtgaaattccatcagccgggtcgctggttgaaattttcaataaggccattcttgaacgttgcttgaaggtgtacagtgaaataatgggcagagcaggtctaccagtgtcagtggatgaacttcgggagttccacgacctggcaaaagatgaagctagaaggcttttcaacaagcagcatttcggtaaacatcatgctgctcggtccatcctcaagcttgatgaagagattaaaaaggtgtacagaaacttgggccaagctaacgagtatcagtcatcaaagctgtgcgaagcacggttctcagagtgcgaagataaaatggaacgactccaagtcttgaagcttccgtccatggcgaaatttgatgccggattccttctctgcaatcgaagttttgaaacggactgtgtggggccagccaaggaaagctatcgacaccggatgtcaaagatgctggcaaggtcccgtgctcttttcatcaaggagtacaacaacaagctcttcaactggctcgccatattctccctggccatggttgtcgttgggcgcttcttggtcaagttcttcctgctcgaagttgctgcgtgggtgatgtttgccttcctagagacatacacgaggctgttctggtcgtcggagtccctgtactacaaccccgcctggcacgcgatcgtctcttcttgggaaaccgtcgtctacagccccgttcttgatcttgacagatgggcgttcccgatctgcgctgtcctgttgtttttggcgttttattggcgttgcctcggtggaaggaggggaattgcccggtcactgctacctctgtacaacggggcttattacagaagctccagtcgcacaagaacagactgatccctcgaaccatgcgcacaatcacaccattagcgtgcacatatagttgtatcatgcttattccaacactgcattcttcgattatgagtcaaaactcgggtgttgctgtaaatatgaaacccagaaggtttgtcaattgtataaatatatggctgcttgctaaacttcttggatttatttgtttgtttatttattaagctctgatcctctggggtttgtctccgtagtgtcaagcccattgaatggcgtagctgctgtagttggtctgcttgtcggcgtagcggtcccagatcatgatcccggcgtagttgggcgccttctgcaccaccgggaggacgccgccgtagtacaggttcttggggtgcacgtacccgaccgtccgctccgacgccggcaggccgacgtagagcccggagcccgggtacgacgcggcccacttgtcccactcctgctgcccgtccgcggcgcagcgcgcgtcgccgtagagcctggcgttgtcgcgggtgtcgagccccgtgggttgcngccgtcaagcctgcccgtccggcgggaacgcgcaccgcggcgtcgccgacagctgcacgggcgtgcgggcgcggaactgccggttgtagctccacaggcgcgcggccagcgcgttgaggtggtccggcggcgggc

SEQ ID NO: 82554 - DNA, 235 bp, Zea mays
  Clone ID: MRT4577_175304C.1
cttaccgcccgagtggtcagagcgagggcatgacgttgcggccatattccaggagcctggggctattggtggacaggagattggtccagagaaagccagcgtcaacttgtcaggctggagcacatgtttgatgggaggcatctaccatacggtctcaccaacacaggacaacagataccttagaacttgtcgaggcaagaagtcttggacaggttgaataggatcgctggactgg

SEQ ID NO: 82555 - DNA, 1233 bp, Zea mays
  unsure (1)..(1233): unsure at all n locations
  Clone ID: MRT4577_175305C.1
cccccccttgggcccccccgggttttccctttttttttcccgttttttatttttgtggaattttgacgggaaaaccattttcccccgggaaccctttttccccttttttcccccacctttgttccgaatcggggtccccaaaaaacgccccccccggttttggaatttccccgaaagggggaaaacccccccttaccgggttttttttttttttttttttttttttttttttttttttttttttttttttttttttttttttttttttttttttttttttttttttttttttttttttttttttttttttttttttttttttttttttttttttttcatagaactggggccattcattcattcttttatttatttcattcattcatttcacccatgacaaatattatctcttcttatttcccacaacatttactggacattgtcatgatgttcagattagaagaatggcgcacgttggggaattcccttgcgtctgtgacgagcaaccctttttggtggtggttcttcgtagttcttgtcattgcagctgttttggtcatttgtagtacttgaaccaacattgtcaatcctagccacatgatccataccattggaccgagggttgttgccaaccatagcttgcataccagcttccatatttaagcctctaagattgcatccaagagagcagaagcgaaatgcatcaagtagcacacggctacatgtctcacagctatgtgttgatgatgtgggtgccttacaaatggggacactagaagcacgcagttgtggccgctcattcaggaatacaatccttgcactattgattacataagtttgcacatcgctgacatcaaggatatcctcaatctcggacaccctcacaacgtcatggtacgatgaacgccttatctggattacacggtgggtggaatgatcacttgaacgacaatagttacagaaagcagctggtttggtctcacactgggtgcaaaataggttacattcattgcgactagcaagaagatggttagcacaagtcgtaaagaattgtgttgcaagcaacagttttaagccatgaaggcacttgtctccctttttcattgtgaaatcaagtggtcataatgtgttctcttggggccaaagtttttttttttttttttttttttttttttttttttttttttttttttttttttaaaaatgtatagtncccggccgagctcgagggta

SEQ ID NO: 82556 - DNA, 1001 bp, Zea mays
  unsure (1)..(1001): unsure at all n locations
  Clone ID: MRT4577_175306C.1
tccctgcgtgctctctcctcgctccttggcgcagcagcaattcaccatggcgcccagaatttcagcagagagcttcttctccctggccgccctgctctctgatccacggcgcccagaaaattccagccggctcccccttcttcttcctccagccagcagctcgtccacctctctctcccatggcatttccccctgcgagcagcgctttctccgttgtcttcaacctccagtcgctcccatctccctgcagctccctgtccatggcgcccctgcaaatcttccccttcctccccctgctcctctccttgntacagcgccgggaacgcagcaacagccctgcgcagcacccctgcgcgagcccccttcctcgctgntcgtcgtggtgcccgccggctgttcgtcaaaatgcgcagcaagccgcgcgctgcagcagccctcccgttcgatctccacntccccttgtcgtgtgtcgtcgctctcgtgctcgctgcgcagccccctccgcgacgccgtcgaaacccgtgctagtggtcgacgccgcgcttcgcgccttggccgttcgacgaaatgccgagccatgtggacagcccatgcgtctagtcacgacttgttcaggaccgagagatgacgctcatgcaagtggtgtggtgccaaccacaagatatcgttggtggacgacctgaagaatggacttaaccagtggatgctcgccaagcgagtacctccctcagcaaacactatctaagtgttaaattaaaggtacctccttgatttggttgatggtgtgacttggccttcatccctgccaccgggacagatggtcgagtgggttattgcttccgcaggagaggcccagcagcagtagcgtggccaggcttcgccatgttactcggttttctctgttagttatttctactgcattaaaatttatggttattatttctgaaactccgataatgtaatcactaatgatacttattaactttgtggtattatgcttt

SEQ ID NO: 82557 - DNA, 591 bp, Zea mays
  Clone ID: MRT4577_175307C.1
attttgctctccccgtggagatacctgaaggtagaagacggatggaccgcgggcactaatttgaccaagtgcagggggctaactgcgcatcccgtgacccacttcaatagtaccaaaaggacctgtttgctggaataaagtcgtggcctgttccagggactgaagcgcaaaggaccgagagatgacgattgtgcaagtgatgtggtgccagccacaagatgcagtggatggacgacctaaagaatgatggacttatccagtggatgctcgccaagcgagtacctccgccagcaaacactgtctaagtgttaaattaaaggtatctacttgatttggttgatggtgtgacttggccttcgtccctgccaccgggacagacggtcgagtgggttactgcttccgcaggagaggaccaggaggagtagcctcgccaggcttcgccatgttactcggttcttctccgttagttatttccgctgcattaaaatttatggttattatttctgaaactccgataatgtaatcactaatggtacttcctaaattgtggtattatgctttattaccaaaaaagagaaaaaatgctccatt

SEQ ID NO: 82558 - DNA, 2217 bp, Zea mays
  Clone ID: MRT4577_175308C.1
tgggtacccctcgaggccggccgggaatccccaaacatttcgtcgaatccgccgtgagatccgcccgactctcgctccgttccggcgctctcggtcgggcgaaggctccaccttcctccgacaagatggcggggaagggagccaaggccacggccgccaagtcggcggacaaggacaaggggaagaagaccggcggccccgtctcgcgctcctcccgcgccgcaccccatgagaagtcagctccgaagaaagatgtttatcaattgtttgctgagaaggtcagggataacaaacaactggaatcaagatgggcgatcatgcaagaaacccgcgtggagtatttccgtggaaaagatttcaataccttcgtcaaaaatcatccagaagtcagggaaattttggggccagataaggatttagaggtggaagacattgttaacactttgctgaccaagaaccttgtgataaggtgtgatcgagtcatgaaaactgtgaggcctggcaagaaaaagctatcgtcatggcctgctcatttggagatacataatgaacaagtgtttactgaaaatgatgggttttttgcttggatgtttctgaaaagaaggaccttgtggcagacaattctttcatttgtttggcctctttttgcactggcagtctgcttatttccagtttacccataccagtgcaagattgttgtactgtactcatgtgctggagctctacttttcattgtctccattcttttgcgtaaaatctcccccctctcctaaatgtattttcattcacgacatacattatacttaagtagacactttcaaattacattttagtcattaggcatatttgagtaacaagctacaatttattgcctgtgtagtgttgtgcgcactttcaaagtcatacggtgatatcctgcttatgcatatgcgattagtgccaagtacctaacgaaggtttataagataacagctaacagaagttggttttcacttgcgataagttttttagtatatattgaaaaccagacagtcacgtacattactgaaaaacgaatagatcctaacatggcacaaaacagactattcactagacctgcagatggaagcggttacgctgctacgtccaaagctaaggatccagatgcaggctgagatactaatcttgatgcttaattagatgaagctcaagatagtgactaaggtgatgataaaagttatcatcaaacgatcaatacttttatttaaaactgcacagcatgctaggtgaataggtatcattcacctccagcctccaccaaactttctgagttcggttgtttttgaagtgatgtttcgacaatagtgtggaactcacacttcagtgcatcaatatgaatgtttagagaaaaggaaaaactggggggatgggttcagactcaagagttttggtgtgtgtaggaaccatgagctcaacattagagtatcattcacttgtttcattacaataagttatctgtttttaaacctttccatttcaagcacatcctaacttctcttttttgccctctatagtaatccctgcttgtctaatatttccaatgtaatttcagtaagagctgctatctttggtatcctatgggttctccttgggaaacgcgtgtggttcttccccaatataaatgcggaggagacaacttttagagaactcgttcgtttttggcctgaaaaggatgaaggagagcggccaaagtggacatcaagacttttctatgcccttgttgctctattggtgatattactgcttaggcatcatgctcctgacgaagcagctagagccaggtaccaaaagaaggtttctaacataatcgatgacgttcttgaatggtctccgaagttagctatttctggaatgattgaaaagcacactggggctaacattacagaagaaagcaattacatgcctccatccaccgaaggcaaagcttcagaagatatggacgttgatggggataccgaggctagcttagatgaaacccaagataatgaatatgctgatgatacaagatcaagcggagcttaaaatcagagtttttttttttggtttgagcaatctttgttgttgtgaatctgcagaattatatagatagcttactgctggcaacaaaagaaatcagggtgtcatgttttgatgttacatccatatattccctgcaattggttgtgttctaaggtcccc

SEQ ID NO: 82559 - DNA, 1249 bp, Zea mays
  Clone ID: MRT4577_175309C.1
ttgggaccctcgaggccggccgggggacttttctcacattccgctcgcctcgctcccttattcctctactgcagcacactaacgccatggatggacgacggaagctccccgctacctccaaatccctgtcctcagtagccgattgcttaaattgagtttgccatcacctccccctcgccaggtcgatccgtccgaacccttccccgagcgcagccatgaccggcgatgcccgctccatcgccgcagcaggctaccaccgcgggctcgcgtggccaggccacctggggctgccgccggcccagccaactccttggctgtgcgcgccctccaccagggacggctcggctggccccgccgcgctcggccgacgccggcgagccccggccaggaaaggtcgatcccctttcccctgtacgttccaaggaagaagtcgatggaccaatatgcaaattccagaacagcagggggaccgagagatgatgatcgagcaagtgatgtggtgccaaccaccagatgcagttggtggacgacctgaagaatggacttaactagtggatgctcgccaaacgagtactccccagcaaacactatctaagtgttaaattaaaggcaagccccggttttatgcataactgtttatatatgctattttactacacttattgtttgtaggcttgtaccgtgcacttaagtgtacgagttggttgaaaccctagttgcatgaactcaagattccttttgagatggatactagtatgctaggtcgagtagctgttttaataattagggatctcggtagaagtcgagtgatttttctagcactcgcgcgaggacaggaattgattgtatccactttgataacagaataatgatggtctgtggacactgatccatggggatgcgtggtctacgagatgaaattggaataaggatttacgtgcggatacctgtgtcaagcgtttgaacgtactaaacatatgccgagaaatatggtaaatcggttagcctagtacctgattgaacctggcagcagattgccctcctcacgcgacctgagacgaggtctcccattccggttatggtgggtacaagtgcggtcactgcacgacggccagtcggtgtcagtgaggcattgtacgccaaggcggtgagcccctctctgctgacggtgaatctatggggacagttgatttttgtggagacggagtgcccctgcatgtcgtggtgttaggtttacctcgcaaggata

SEQ ID NO: 82560 - DNA, 294 bp, Zea mays
  Clone ID: MRT4577_17530C.1
ggggttgggctaacgcgactgtatatcgtggcctacatagctccctgccttgagtcgattattcattatacttgtttacacaaagagcgagagcgggatggccaacagcttgactagaatgagagcgcttgtcgccgccgccacttactccatggctaccttttgtcacatgcgacaccgtcaggcactcgcacgtctcgacgacaaccgagatggctacagcaggtaggccagccgcaacagtttcgtccgccgagacacactaagtgtcaactacgtgagcatggcgcacac

SEQ ID NO: 82561 - DNA, 1679 bp, Zea mays
  Clone ID: MRT4577_175310C.1
ccccaacatttttttgtcgaatctgtcgtgagatcctccccgacgagatggcggggaagggagccaaggccacggccgccaagtcggcggacaaggacaaggggaagaaggccggcggccccgtctcgcgctcctcccgcgccgcacctcaggagaattcaactccgaagaaagatgtttatcaattgttcgctgagaaggttagggataacaaacagctggaatcaagatgggcaatcatgcaagaaacccgtgtggagtattttcgtggaaaagatttcaatgccttcatcaagaattatccagaagtcagggaaattttggggccagataaggatttagaagtggaagacattgttaacactttgttgaccaagaaccttgtgataaggtgtgaccgagttatgaaaactgtgaggcctggcaagaaaaagttatcatcatggcctgctcacttggagatacataattaagagctgccatctttggcatcttatgggttctccttgggaaacgcgtgtggttcttccccaatataaatgcagaggagacaacatttagagaactggttcgtttttggcctgaaaaagatgaaggagagcggccaaagtggacatcaagacttttctatgctcttgttgctctattggtgatattactgcttaggcaccatgctcctgacgaagcagctagagccaggtaccaaaagaaggtttctaacataattgatgatgttcttgaatggtccccgaagttagctatttctggaatgattgaaaaacacactggggctaacattacagaagaaagcaattacactagcagggctgcgagtagtcatgtgcctccttccaccaaagccaaagcttcagaagtcggttcagatacggatattgaggctaacttagatgaagcccaagatagtgaatatgctgatgatacaagatcaaacgaagcttaaaatcagctttatcttgtagttttttgagcaatctttgttattattaatctgcagaatcatgtagatagcttactactgacaacaaaaatttagggtgtcatgttttgatgttacaaccatatattgcctgcaatggttgtattctaaggttcccaaacaacattctcatagagcgcggcaaatcttcaccttttctctacacgagcatgaatctttttaattgacctttctatgcccttgttgctctattggtgatattactgcttaggcatcatgctcctgacgaagcagctagagccaggtaccaaaagaaggtttctaacataatcgatgacgttcttgaatggtctccgaagttagctatttctggaatgattgaaaagcacactggggctaacattacagaagaaagcaattacaccaccagggcggcgagtagtcacatgcctccatccaccgaaggcaaagcttcagaagatatggacgttgatggggataccgaggctagcttagatgaaacccaagataatgaatatgctgatgatacaagatcaagcggagcttaaaatcagagttttttttgtttgagcaatctttgttgttgtgaatctgcagaattatatagatagcttactgctggcaacaaaagaaatcagggtgtcatgttttgatgttgcatccatatattccctacaaaaaaaaaaaaaaaaaagcggcc

SEQ ID NO: 82562 - DNA, 610 bp, Zea mays
  Clone ID: MRT4577_175311C.1
aaaaatccctgtgcggcgctcgagccggcctttcagagatggcctccccctccctctccttcgccactctccctactccctctctctagctccccatgcagcagcagcccccctcccatggagctggcgaccgagccctcccaagctccactctcacctaggcaagctctcccatggcgtctccccctcctctacggcagtaaggaccgagagatgacgatcgtgcaagtgatgtggtgccaaccacaagatgcagttggtggacgatctgaagagatgatggacttatctagtggatgctcgccaagcgagtacaccaccccagcaaacactatctaagtgtcaaaataaaggtactccttaggatgattggttgatggtgtgacttggccttcatccctgccaccgggatagacggtcgagtgggttattgcttccgcaggagaggaccaggaggagtagcgtggccaggcttcgccatgttactcggttcttctccgttagttatttccgctgcattaaaatttatggttattatttctgaaactccgataatgtaatcactaatgatacttaaaaaaaaaaaacgacagcaacggcgacagcaacg

SEQ ID NO: 82563 - DNA, 608 bp, Zea mays
  Clone ID: MRT4577_175312C.1
accatactcctactatcagacatgttccagcctcctgccgaagctagccgccaacgcttggtcgcttgcgggtatggccgcagctccccctgtcctggtcggcacacgctggctatggcttgctggatcgagccctctttccccatggtgttctctgctgttacgtgatgaggaagaaggctccatgagactatgacaggtggaccctcgggaccgagagatgatgatcgagccagtgatgtggtgccaaccacaagatgcagttggtggacgacctgaagaatggtggacttatccagtggatgctcgccaagcgagtacctccccagcaaacactctctaagtgttaaattaaaggtactccttaggatgatttgttgctggtgtgacttggcctccatccctgccaccgggatagatggtcgagtgggttactgcttccgcaggagaggaccaggaggagtagtgtggccaggcttcgccatgttactcggttctctccgttagttatttccgctgcattaaaaatttatggttattatttctgaaactccgataatgtaatcactaatgatacttattaaatttgtggtattatgttttattgt

SEQ ID NO: 82564 - DNA, 616 bp, Zea mays
  Clone ID: MRT4577_175313C.1
agaacacaaccaattgcagggaatatatggatgtaacatcaaaacatgacaccctgatttcttttgttgccagcagtaagctatctatataattctgcagattcacaacaacaaagattgctcaaacaaaaaaaaactctgattttaagctccgcttgatcttgtatcatcagcatattcattatcttgggtttcatctaagctagcctcggtatccccatcaacgtccatatcttctgaagctttgccttcggtggatggaggcatgtgactactcgccgccctgctggtgtaattgctttcttctgtaatattagccccagtgtgcttttcaatcattccagaaatagagcaacaagggcatagaaaagtcttgatgtccactttggccgctctccttcatccttttcaggccaaaaacgaacgagttctctaaagttgtctcctccgcatttatattggggaagaccacacgcgtttcccagggagacccataggataccaaagatagcagctcttacttgaattacattggaaatattagacaagcaggattactatagagggcaaaaagagaagtaggatgtgcttgaaatgaaaggttaaaacagatact

SEQ ID NO: 82565 - DNA, 255 bp, Zea mays
  Clone ID: MRT4577_175314C.1
aggctgaagcagcttttaggggcaaacaccccaaacgagggccgggcgggccccaatggaacatgaaacatagcctgggaattaatgaatgccgggggggttgaccgggcccggtccctttaataataaccctttgttgtgcctgcaaaaatcccatagtggttgggtttctgcaaatacaaatttaagtacggggccctggctggaccctggtggagatgcccacacaaacaccttcaatttggaatgccgggg

SEQ ID NO: 82566 - DNA, 627 bp, Zea mays
  Clone ID: MRT4577_175315C.1
gcccctttgtcgtcgtcgttcacccccggtgagaccgcgacgatttatgttcgattccgcatcgggttattttcctatgattaattgcgtatgtgctgtttggtttttgttttgtggaggagaggaaccctgcgttttgcgagaagaaggccaatcattcaacgctcgtcggatgtttggagcgatgcacaaatcagaatcaccgtcattcttgcaaacaccgtttgggtttgtttatggaccgagagatggtgatcgtgcacgtgatatggtgccaaccacaagatgcagttggtggacgacctgaagaatggtggacttacccagtagatgctcgccaaacgagtacctcccccaacaaacactacctaagtgttaaattaaaggtattcattgatttggttgatggtgtgacttggcctccatccctgccaccgggatagatggtcgagtgggttactgcttccgcaggagaggaccaggaggagtagtgtggccaggcttcgccatgttactcggttttctccgttagttatttccgctgcattaaaatttatggttattatttctgaaactccgataatgtaatcactaatgatacttattaaatttgtggtattatgcttt

SEQ ID NO: 82567 - DNA, 984 bp, Zea mays
  unsure (1)..(984): unsure at all n locations
  Clone ID: MRT4577_175316C.1
cccacgcgtccgcccacgcgtccgcccacgcgtgcgcagttccagtgtgcgaaccgaggtcccccaatcccccaaacatttttttgtcgaatgggtcgtgagatcctccccgacgagatggcggggaagggagccaaggccacggccgccaagtcggcggacaaggacaaggggaagaaggccggcggccccgtctcgcgctcctcccgcgccgcacctcaggagaattcaactccgaagaaagatgtttatcaattgttcgctgagaaggttagggataacaaacagctggaatcaagatgggcaatcatgcaagaaacccgtgtggagtattttcgtggaaaagatttcaatgccttcatcaagaattatccagaagtcagggaaattttggggccagataaggatttagaagtggaagacattgttaacactttgttgaccaagaaccttgtgataaggtgtgaccgagttatgaaaactgtgaggcctggcaagaaaaagttatcatcatggcctgctcacttggagatacataatgaacaagtgtttactgaaaatgatgggttttatgcttggatgtttctgaaaaggcggaccttgtggcagacagttctttcatttgtttggcctctttttgcactggcagtctgcttatttccagtttacccataccaatgcaagattgttgtactgtactcatgtgctggagctctacttttcattgtctccattcttttgctaagagctgccatctttggcatcttatgggttctccttgggaaacgcgtgtggttcttccccaatataaatgcagaggagacacatttagagaactggttcgtttttggcctgaaaaagatgaaggagagcggccaaagtggacatcaagacttttctatgctcttgntgctctattggggatattactgcttanngcacatgctccggacgagcagctagagcaggtaccaaagaaggttc

SEQ ID NO: 82568 - DNA, 693 bp, Zea mays
  Clone ID: MRT4577_175317C.1
gctgcgagctccctccctgctccatggccgctggcccctcgcccctgctctcccccttggccgcgcgcagggagctcttctcccatggctgtgagccagcgtccctcccgcagctcccctaacctaggccatcgggctctcttctccatggacgactcctccatgtcccctgcgccggccatctagctccagcagacgcacctcagctcctccatgggtgcaatcctttttctccccaaatccaagcagccggccaatggccatgcatttcctgggcgtcgtaaggtagaagaacctgtttgtgaggctgacgtgtgggcccagggcggatgaccgagagaggatgatcgtgcaagtgatgtggtgccaaccacaagatgcagttggtggacgacctgaagaaggatggacttaaccagtagatgctcgccaagcgagtacccccaacaaacactatctaagtgttaaaataaaggtacctccttgatttggttgatggtgtgacttggccttcatccccgccaccgggatagatggtcgagtgggttactgcttccgcaggagaggaccaggaggagtagcgtggccaggcttcgccatgttactcggttttctccgtatagttatttccgctgcattaaaacttatgttattatttctgaaactccgataaggtaatcactattgatactt

SEQ ID NO: 82569 - DNA, 1964 bp, Zea mays
  unsure (1)..(1964): unsure at all n locations
  Clone ID: MRT4577_175318C.1
cattgggtcctcgagtcgacgcggccggaatcccccaacatttcgtcgaatccgccgtgagatccgcccgactctcgctccgttccggcgctctcggtcgggcgaaggctccaccttcctccgacaagatggcggggaagggagccaaggccacggccgccaagtcggcggacaaggacaaggggaagaagaccggcggccccgtctcgcgctcctcccgcgccgcaccccaggagaagtcagctccgaagaaagatgtttatcaattgttcgctgagaaggtcagggataacaaacaactggaatcaagatgggcgatcatgcaagaaacccgcgtggagtatttccgtggaaaagatttcaataccttcgtcaaaaatcatccagaagtcagggaaattttggggccagataaggatttagaggtggaagacattgttaacactttgctgaccaagaaccttgtgataaggtgtgatcgagtcatgaaaactgtgaggcctggcaagaaaaagctatcgtcatggcctgctcatttggagatacataatgaacaagtgtttactgaaaatgatgggttttttgcttggatgtttctgaaaagaaggaccttgtggcagacaattctttcatttgtttggcctctttttgcactggcagtctgcttatttccagtttacccataccagtgcaagattgttgtactgtactcatgtgctggagctctacttttcattgtctccattcttttgctaagagctgctatctttggtatcctatgggttctccttgggaaacgcgtgtggttcttccccaatataaatgcggaggagacaacttttagagaactcgttcgtttttggcctgaaaaggatgaaggagagcggccaaagtggacatcaagacttttctatgcccttgttgctctattggtgatattactgcttaggcatcatgctcctgacgaagcagctagagccaggtaccaaaagaaggtttctaacataatcgatgacgttcttgaatggtctccgaagttagctatttctggaatgattgaaaagcacactggggctaacattacagaagaaagcaattacaccaccagggcggcgagtagtcacatgcctccatccaccgaaggcaaagcttcagaagatatggacgttgatggggataccgaggctagcttagatgaaacccaagataatgaatatgctgatgatacaagatcaagcggagcttaaaatcagagttttttttgtgtttgagcaatctttgttattgtgaatctgcagaattatatagatagcttactgctggcaacaaaagatttagggtgtcatgttttgatgttacaaccatatattgcctgcaatggttgtattctaaggttcccaaacaacattctcatagagcgcggcaaatcttcaccttttctctacacgagcatgaatctttttaatttgattttaagtgtgttgacaagttctgtacatgattgttgttaagtaacaatatcgtgtgtgtgtgtgtcttctnnggaatgattgaaaagcacactggggctaacattacagaagaaagcaattacaccaccagggcggcgagtagtcacatgcctccatccaccgaaggcaaagcttcagaagatatggacgttgatggggataccgaggctagcttagatgaaacccaagataatgaatatgctgatgatacaagatcaagcggagcttaaaatcagagttttttttgtttgagcaatctttgttgttgtgaatctgcagaattatatagatagcttactgctggcaacaaaagaaatcagggtgtcatgttttgatgttgcatcaaaaaaaaaaaaaaaaagggcggccgcccttttttttttttttttcaaaggaaaatgcagaatagatagatcaagtggtcagcaaccaatccataccatcacggggggc

SEQ ID NO: 82570 - DNA, 668 bp, Zea mays
  Clone ID: MRT4577_175319C.1
tgcgtgcttcgtcgatcgcgcagtcccgacccacgccgtgcattggtattggggacagcccatgtcgtgtcgttgatctgtgcagttcgaccgtctacgcgtctcacttcgccggatctgcgcagccccaacatcgacgacgttcaccccggcgaggaaccccgtgttttgcgtggagaaggcaagtcgttcaacgctcgtcggatgctcggagcgatgcacaaatcggaatcgccatcgtccttacaaacatcgattgggtttatttatggtgagccgatgaccgagagatgacgctcatgcaagtggtgtggtgccaaccacaagatgccgcggtggacgacctgaaggatggacataaccagtggatgctcgccaagcgagtgccaccccagcaaacactatctaagtgttaaaataaaggtactcattaggttgatttgttgatggtgtgacttggccttcatccctgccaccgggatagacggtcgagtgggttactgcttccgcaggagaggaccaggaggagtagtgtggccaggcttcgccatgttactcggttttctccgttagttaattccgctgcattaaaacttattgttattatttctgaaactccgataatgtaatcactaatgatactttcttaatttatggtattatgcttt

SEQ ID NO: 82571 - DNA, 673 bp, Zea mays
  Clone ID: MRT4577_17531C.1
gcgtcaagaagacaacatatataataacagagtgtatagagataaatgtcacaataacatcagagtatttattacatagcggaagccttacaaaataaaagataaatataaaacaaagtaaggatcatccttggcgcaaaagtcaactgggtgggggaaacgccacctagatcgaatcgaactcttcaatgtgtggctcctcctgaaccacctgttcttctcctctacggcaaagtcatcagtccaaaggaacatccactagctagagatgcaaagatattgtagttccaatctcccgacggcagcattgcgtttgctttgcagcttcagattgtgcgccagaaaggcgctttataggctctctattcattaccacttgcaggatcatcagcgcttgccttttgtcttctctagcatcttcacacgaggctgcagattttgacatgaaaatctgagtcgccacccaattaaaagcaaagcacgaaacgaagccggacacatcggttcgtccctatggcttggaccattcaacgcatgcacgacaaaaccttctataaaactttgtcgtacgtggctatagatcattcaacgcatgcagaagacaaaaccttctaaacacgccggttttgtcttgctgcagaagacttgtagaaagttattcagacatcctggc

SEQ ID NO: 82572 - DNA, 496 bp, Zea mays
  Clone ID: MRT4577_175320C.1
cccacgcacactcttctgccccacgagtccggaccccggaggagccaagccatggctgccacctcctgctgcctagtacaccagacaaccgcccgcctcggagcgtcgacgcgcctggacgtcgtcccgccgcgcagagaccagatgctcgtctgcaaggccaggaagcaggaagccgccgcggaccatagagacgtctcgcgccgcgccgcgctcgagctcctcgtcagcgtcacggacgccgccggcgcaaaggtgggtcctgccgacgcgagtatacggagaagcagccaacgtgttcggcgagcccaaggcgagcacggagcacatcgtgcacagcggagacagtgttaagctgctgatcccgtgcaagtggaaccacagaaaggagcgggagctccccggacaggtgctcctatacgaggacaactagaacgcccacagcagtgtgtcctgtatcatgcagcccacgtccaataagaccataggcgactac

SEQ ID NO: 82573 - DNA, 557 bp, Zea mays
  Clone ID: MRT4577_175321C.1
ctgctttgttttatttttgtggaggagagaaccccgtgttttgcgtggagaaggcaagccactcgacgctcgtcggatgtttggagcaatgcacaaatcagaatcaccgtcattcttgcaaacaccgtttgggtttgtttatggaccgagagatgatgatcgagccagtgatgtggtgcaaccacaagacgcagttggtggatgacctgaaggatggacttaaccagtggatgctcgccaagcgagtacctccccagcaaacactatctaagtgttaaattaaaggtacctccttgatttggttgatggtgtgacttggccttcatccctgccaccgggatagatggtcgagtgggttactgcttccgcaggagaggaccaggaggagtagtgtggccaggcttcgccatgttacttggttcttctccgttagttatttccgctgcattaaaatttatggttattatttctgaaaactccgataatgtaatcactattgatacttattaaatttgtggtattatgctttaaaaaaaaaaaaaaaaaaaaaaaaaaaa

SEQ ID NO: 82574 - DNA, 693 bp, Zea mays
  unsure (1)..(693): unsure at all n locations
  Clone ID: MRT4577_175322C.1
gtggcttccatttctttctcccccatccgagctccctctatccctccatttcctcggcgcccgttcccagctctccatggacgccagcagcaagcgcacagatctgcacagcggcgtcatccttgtgcaggcctccctgccggatctctccctttggctgcggcgagttctacacatcccagccatggctggtcttctctccatggctgacccactcatctcctcaaagttcatccatggcgcctgttcatgctcaaaccaccgtgcgtgcgtgcagaaagtaaagaggaagaagaagcaatgtgaccgagagatgacgatcgtgcaagtgatgtggtgacaaccacaaggtgcagttggtggacgacccaaggaaggatggacttaaccagtggatgcttgccaagcgagcacctcccccagcaaacactacctaagtgttgaattaaaggtacctccttgatttggttgatggtgtgacttggcctccatccctgccaccgggatagacggtcgagtgggttactgcttccgcaggagaggaccaggaggagtagcgtggccaggcttcgccatgttactcggttttctccgttagttatttccgctgcattaaaatgtatgattattatttctgaaactccgataatgtaatcactaatgatacttattnannattgtggtattatgtct

SEQ ID NO: 82575 - DNA, 327 bp, Zea mays
  Clone ID: MRT4577_175323C.1
ggtggggtgtgttttttttttttttttttttttgttttttttttttttagatctctaatcttttattacctgggaagttgcccatttcagtttgagaactttattattacagtttaaagcataaaaaaatctaaaagatgggcccaccaatgggggggggggggaataagggggtaggattcgtcaaagcaagttggttaaatgggagcaattggtgttgttgtaagaaggcgacattgtttgccccatcctgggggtagaacgggggcaactgttgctgttgcaagaaggcgttaatgtttcccacaacctgtgggtaaaatggca

SEQ ID NO: 82576 - DNA, 397 bp, Zea mays
  Clone ID: MRT4577_175324C.1
atccgtttcaagaagcatggacctgcccatttttagcagggtgtgctgtatggctttcacgctggagctgctgaagtccattgccatgacaaactctggcctttttcctacacccatgcacatagactgatgagtgccaccgtgaactctaccgatggcccaatggcatctctacatggcatgacgcatctgatggcgctggaactgacggcggtgcgtgtgaatacgagaatgctgagaccaaccgcctttctcatccatgattgccgccggcagatatttcatttacaacttcggctagggcttttggctttacctacaagctaagttcacaagcaatgacgcctgcttcagtaaccttgggaaatgccaaaatccccgcctaaagccccaattg

SEQ ID NO: 82577 - DNA, 143 bp, Zea mays
  Clone ID: MRT4577_175325C.1
cccacgcgtccgcggacgcgtgggcggacgcatcgttcgcccaggctttcggaggaagtgtctcattgtggtccatgatcactagcacattcgcacaaatttcataacgatctaccacatgctaagaaacttttatgcaacta

SEQ ID NO: 82578 - DNA, 644 bp, Zea mays
  unsure (1)..(644): unsure at all n locations
  Clone ID: MRT4577_175326C.1
ctcgngcggccgccgtgtngatggaatctgcagnaatcgcccctttcggcggccgcccgggcaggtgcttttttttttttttttttcttttcttttttttttttttttttttttttttttttttttttttttttttttgttttaaagcaaggctccccccacccaaggaaagggaagttcgaaccccccgccccccaaacccacattacattcgggaaagggaacttaccatttctggtggggcccgccccccacccaaaacacaatacttttggattgcaacccaacaacaatccaaaagagggccccccccccccagtgttgtggggaggaggcgacggggttggtcaaaccaaggcgggcaaagcgcaacacaacatgtggtggaaaaaggggaggggggcgggcccccacccgctcggctaaaggcaaggcctgtaccggggccaagaaagaaacgcaactcgccgcggctcgcccgcttaacggaaggggaatttgctgcggcaaataaacaacgcggttcagtccggcccatccgttaaatgaaaaaaaaaaatgttgctgtgcgtaggcagtgcctaacccgccaaacggaaagagaagaggcggcaaataaacaaaacggttcagtgcaaacaaaa

SEQ ID NO: 82579 - DNA, 172 bp, Zea mays
  Clone ID: MRT4577_175327C.1
aattcggcacgaggctcggggggagccgcctcctctttcactatatttgcactctacctatgtgtctattcggaggaaagacactccgatagatagatcctctgccctttgctagctaagcgtgcacatccaatcggcatctgcttagtgagcacgacttctgcggtacacc

SEQ ID NO: 82580 - DNA, 1435 bp, Zea mays
  Clone ID: MRT4577_175328C.1
cctgtgctgatgctcccggccgggccgggacccacttcacccctccgaccacttcacctccgatcccgccaccactacccaccctttcctttgacgtcccgatggcacctgtagatctaacccccaagcagcccaggaaggcctacggcggcgacggcggcgcctactacgagtggagccccgccgacctgcccatgctcggcgtcgcctccatcggcgcagccaagctctcgctcgccgccggcggtctcgcgctccccagctactccgactcagccaaggtcgcctacgtcctccaaggcacgggcacctgcggcatcgtcctcccagaggcgacgaaggagaaggtggtggccgtgaaggagggcgacgcgctggcgctgcccttcggcgtggtgacgtggtggcacaacggacccgccgcgccgaccccgctcacggtgctcttcctcggcgacacctccaagggccacaggccggggcagttcaccaacttccagctgacgggcgcgaccggcatcttcacgggcttctccaccgagttcgtgtcgcgcgcgtgggacctgccggaggcggacgcggcggcgctggtgtcgagccagccggcgtcgggcatcgtccgggcgtcctcgtccccgctgccggcgccgtcgccgcgggaccgcgagggggtggcgctcaactgcctggaggcgccgctggacgtggacatcccgggcgggggccgcgtcgtggtgctcaacacggccaacctgccgctggtcagggaggtcgggctgggcgccgacctggtccgcatcgacgcccactccatgtgctccccgggcttctcgtgcgactcggcgtaccaggtcacctacatcgtccgcggcagcggccgggtgcaggtggtcgggcccgacgggaggcgcgtgctggagacccgcatcgagggcgggtccctcttcatcgtgccccgcttccatgtcgtgtccaagatcgccgacgcgtccgggatggagtggttctccatcatcaccaccccgaacccggtgttcagccacctggcggggaagacgtcggtgtggaaggccatctcgccggaggtgctgcaggcgtccttcaacaccactccggagatggagaagctgttccgctccaagaggctcgactcggagatctttttcgcgcctcccagctccaactgaagcaccagctctccaagacgggggagaggagatcgttctcgattgtcgtcaaggtcatggttattaataattaagttagtgtcgtcgtcttaagttagcgtcgcgtcgtcgtcttaagttagcgtcgtcgaagtcagggtagagcgagaggtagaggtcgtctgtcatccgccattgaactggaactgctttttcaagatgaatactacccctctttcttaaaaaaaaaaaaaaaaaaaaaaaaaaaa

SEQ ID NO: 82581 - DNA, 542 bp, Zea mays
  unsure (1)..(542): unsure at all n locations
  Clone ID: MRT4577_175329C.1
ttcctgcggcaggacctgaccggcgcgggcggcctgccggccctgagggcggagcgcgccgtgacagcaacgacggggcattgcgggccttgaggcggcgcctaacgcgcgagaggatctgcaagggctcttacgagcgctacgctcaaagagatcaaggccgtcccccaacacgagggttaccgaacggtcgttgaatccttcaccggacaccgcctacagatctgccacgacgagcaggactggaagcgcatcgaggaccgaatccgatgcgggcaggtcgaggagctcatcgaggtactcgaggacgacctcaagctcatcgctacaaagattgaatgggatccaggctgtgctcccgatgcctacgaatgtgaggcgattgaagacgacaccccaattnctaaacacgttgctcaccaccggcctgtcactccttctgaggagttcttaaggacacctagcatgcttgtcaaatctcgatcctgctctccaaggcgatgctcctgcttaagtgaaaggcgtaaggatgggttgttcct

SEQ ID NO: 82582 - DNA, 699 bp, Zea mays
  unsure (1)..(699): unsure at all n locations
  Clone ID: MRT4577_17532C.1
gccggcnncgggccgggtatcaaaaaaaaaaaaaaaaaaaaaaaaaaaaaaaaaaaaaaaaaaaaaaaaaaaaaaaaaaaaaaaaaaaaaaataagaagaaatacaaaaaaacattgaaatgaaaaaggaataaaaggaaaaaagattaaaaaaggaaactaaaaaaagatctaaaaaaaagaaaaaaaaagcccgaaaagggggggtccactcgggtcccttttaaggggatagttgtaaggagggggggcttttttcttttcccacaggaaccggccccctccaaaagaaagggggcccctggcatcccatcaagaatgtcccccggcggagggattacttgggaggggggggggggggtcgctcccgcccggtggggcccccgcagggaacccccctacccggggctcccctcctgggacctcattgggggggggaaccggggcccccccccactttggttctctttctttttttttggaaattttagctcacccttcatgcgggggggggatggggccccccccccccctcgggaaagggggtctgcaagccttttccgtttttccacccttggttttaattttttgcaaaaacattttgggggggggccccaagggccccccccccccccccccctgtaccattaagggggggtttttgggctttagaagaggcccggttttttttgtttccag

SEQ ID NO: 82583 - DNA, 633 bp, Zea mays
  Clone ID: MRT4577_175330C.1
ccggccgggatcacgaatcaccaacaccctctccaccttccatcccgatcaccgccgccaccgctttcgttccacgtcccgatggcaccggtagatctaacccccaggcagccccggaaggcgtatggcggcgacgccggcgcctactacgagtggagcccagccgacctgcccatgctcggcgtcgcctccatcggcgcagccaagctctccctcgccgccggtgggctctcgctccccagctactccgactcttccaaggtcgcgtacgttcttgaaggcactggcacctgcggcatcgtcctgccggaggcgaccaaggagaaggtgctggccgtgaaggagggcgacgccctcgcgctccccttcggcgtggtcacgtggtggcacaacggccccgccgcgccgacccagctcacggtcctcttcctcggcgacacctccaagggccacaggccggggcagttcaccaacttccagctgacgggcgcgagcggcatcttcacgggcttctccaccgagttcgtgtcgcgcgcgtgggacctgccggaggcgaacgccgcggcgctggtgtcgagccagccggcgtcgggcatccgcagggcctcgtccccgctgccggtgcccctcggc

SEQ ID NO: 82584 - DNA, 230 bp, Zea mays
  Clone ID: MRT4577_175331C.1
atcggatcgaatgtgacatgggtactatattataggatttctgtacaaaataaataaataattacattataaggacacaatggtccattaacccaaagttgactgggagacgacagcctataccttttacgaactcgttacaacatttttcatgcgccccattctgtggtacctgttcttgacctgagacttgagatttaaggtaccaggattgatcttcatgagacacg

SEQ ID NO: 82585 - DNA, 932 bp, Zea mays
  Clone ID: MRT4577_175332C.1
cgtaatcatattgtcttcaaccttcgccatagttcataatcttaagggaataatgctttgttggacgaaggacattaacatttaacattttatgttgccttgttcttaattcatagcatttgagaacaagtccccaacacctccctcttcttgttgtcggactcccctgatggagctttcccatggcttgtggcgggcttctcgccggtcaccatctccttcttggcgtgatctcccgacatcacttcgagcggttaggctctaatgaagtaccgggctttgataccaattgaaagtcgcctagagggcggaggtgaataggcaattctgaaatctataaactttaagcacaactataagccggggttagcgttagtgagagggttggatcggaagatatgtactgttcctcttccccgggctgtgaaagtggatatgaaagtcgctctaaagggggggtgaatagggcgaaactgaaatttacaattataatcacaactacaagccgggttagcgttagaaatatagtcgagtccgagagagagggtgcaaaacaaatcgcaagcgaataaagagtgtgacacgcggatttgttttaccgaggttcggttctcgcaaacctactccccgttgaggtggtcacaaagaccgggtctttttcaaccctttccctctctcaaacggtccctcggaccgagtgagcttttcttctcaatcaattagaacacaaagttcccacaaggaccaccacacgattggtgtctcttgcctcaattacaagtgagtttgatcgcaagaaagaatgagaaagaaagcaatccaagcgcaagagctcaaaagaacacaacaaatctctctcactaatcactaaagctttgtgtggaattgggagaggatttgatcacttgggtgtgtcttgcattgacctgcag

SEQ ID NO: 82586 - DNA, 1161 bp, Zea mays
  Clone ID: MRT4577_175333C.1
ccgcatcgacgcccactccatgtgggggccgggcccggcgtgcgactcgccgattcaggtcacgtacatcgtgcgggaatccggccgggtgcaggtggtggggcccgacgggaggcgcgtgctggagacccgcatcgagggcgggtccctcttcatcgtgccccgcttccacgtcgtgtccaagatcgccgacgcgtccgggatggagtggttctccatcatcaccaccccgaaccctgtgttcagccacctggcggggaagacgtcggtgtggaaggccatctcgccggaggtgctgcaggcgtccttcaacaccactccggagatggagaagctcttccgctccaagaggctcgactcggagatcttcttcgcgcctcccagctccaactgaagcaccagctctccaagacgggggagaggatcgttctcgatcgtcgtcaaggtcatggttattaataagggtctattaataattaagttagcgtcgtcgtcttaagttagcgtcgtcgtcttaagttagcgtcgtcgtcttttagcgtcgtcgaagtcagggtagagcgagatgtagagaggtcgtctgtcatccgccattgaactggaactgctttttcaagatgaatactacccctctttctttgtttaattaaaacaaagcattgcgacggtcctcgaggatgctgacccaatgtgatttttgccccgtgctctgaatgtcaaagtgaagaaattccccccagcgcgggtaaacggcgggagtaactatgactctcttaaggtagcccaatgcctcgtcctttaattagtgccgcgcatgaatggattaacgagattccccctgtccctgttttctatccagcgaaaccccagccaagggaacgggcttggcggaatcaccggggaaaaaagaccctgttgagcttgactttagtcccactgagaaaataggccggaagccccccggtggagtcctctcgttaggtcgtcgggcttagattaggttagctagcttgcctttaataaaaaaaaaatggtggttgtcggcgtcggcttcggcggtttgcttttttttccttcagtgcgtcggtcggtttaaagtttgtcccgtgtcccgtccttgaactgcagtttttgttaataaagtattgtttttttttggtt

SEQ ID NO: 82587 - DNA, 1727 bp, Zea mays
  Clone ID: MRT4577_175334C.1
cgggtggtacctcgagccctccgccgcatcacaaacacctccgatccgtccccgatcatcgcaccacctgtagcccacctcgctctcgagtctcgacccagcgacgagatggccgcggtggatctgaccccaaggacgcccaagaaggcctacggcggcgacggcggcgcctactacgagtggagccccgccgacctgcccatgctcgccgtcgcctccatcggcgccgccaagctctcgctcgccgccggcggcctctccctccccagctactccgactccgccaaggtcgcctacgtcctacaaggcgtgggcacctgcggcctcgtcctccccgaggcgacgaaggagaaggtggtggcggtgaaggagggcgacgcgctggcgctgcccttcggcgcggtgacgtggtggcacaacggccccgccgcgcaggccgacctcacggtgctcttcctcggcgacacctccaagggccacaagcgggggcagttcaccaacttccagctcacggggtccgccggcatcttcacgggcctgtccaccgagttcgtgtcgcgcgcgtgggatctgccggagcccgacgccgcggcgctggtgtcgagccagccggcctcgggcatcgtccgggcgtcctcgtccccgctgccggcgccgtcgccgcgggaccgcgagggggtggcgctcaactgcctggaggcgccgctggacgtggacatcccgggcgggggccgcgtcgtggtgctcaacacggccaacctgccgctggtcaaggaggtcgggctgggcgccgacctggtccgcatcgacgcccactccatgtgctccccgggcttctcgtgcgactcggcgtaccaggtcacctacatcgtccgcggcagcggccgggtgcaggtggtcgggcccgacgggaggcgcgtgctggagacccgcgtcgagggcgggtccctcttcatcgtgccccgcttccatgttgtttccaagattcccgacgcggtccaagatcgccgactcgtccgggatggagtggttatccatcatcaccgccccgaacccggtgttcagccacctggcggggaaaacgtcggtgtggaaggccatctcgccggaggtgctgcaggcgtgcttcaacaccactccggctccaaaaggctcgactcggagatctttttcgcgcctcccagctccaactgaagcaccagctctccaagacgggggagaggagatcgttctcgattgtcgtcaaggtcatggttattaataattaagttagtgtcgtcgtcttaagttagcgtcgcgtcgtcgtcttaagttagcgtcgtcgaagtcagggtagagcgagaggtagaggtcgtctgtcatccgccattgaactggaactgctttttcaagatgaatactacccctctttcttaatcatcgttattactgctgcgaagttgtgtctgggatgttcgattgtttggccctttaggcgcatgatgatttaatcttgatcttggtgaaaataggccggaagccccccggtggagtcctctcgttaggtcgtcgtgcttagattaggttagctagcttgcctttaataaaaaaaaaatggtggttgtcggcgtcggcttcggcggtttgcttttttttccttcagtgcgtcggtcggtttaaagtttgtcccgtgtcccgtccttgaactgccgtttttgttaaataaagtattgttattattagggttt

SEQ ID NO: 82588 - DNA, 526 bp, Zea mays
  Clone ID: MRT4577_175335C.1
aaaaaaaaaaaaaaaaaaaaaaaaaaaaaaaaaaaaaaaaaaaaaaaaaaaaaaaaaaaaaaaaaaaaacaaaaaaaaaaaaaaaaaaaaaaaaaaaggtttgtccttgggccgggccccccctaggggggatttttggggttttccttcccattggggggcgctcgggcttccttttggggggcccttttggccttttggggggcctttttacatttcattggccgggtttttacacggttgtgccggggaaacccttggggttccccactttattccctttggggaacttccccttttccccccttggtttattggctaaagggccccccccgatgccctttccaaacagttgcccaccctgattgggaattggaccccccttgtggcggccctttaagcgcggggggggggggggtttcgccaagggtgaccgttcccttggccggggccttagccccccctttttgcccttttttccttttttttttcgccaggtttgcggggttttccccgccatgttttt

SEQ ID NO: 82589 - DNA, 565 bp, Zea mays
  Clone ID: MRT4577_175336C.1
aaaaaaaaaaaagcgagcgggccgcttttttttttttttttttcctaataataacaatactttattaacaaaaactgcagttcaatgacgggacacgtgacagactctaaaccgaccgacgcactgaatgaagaagaagcagaccgccgaagccgacgccgacgaccaccactctctttttattaaaggcaagctagctaacctaatctaagcacgacgacctaacgagaggactccaccgtggggcttccggcctattttctcagttggatgggggagcgaagaagatctccgagtcgagcctcttggaccggaacagcttctccatctccggcgtggtgttgaacgacgcctgcagcacctccgccgagatggccttccacaccgacgtcttcccggccaggtggctgaagatcgggttgggggtggtgatgatggagaaccactccatgccggacgcgtcggcgatcttggagacgacgtggaagcggggcacgatgaagaggaagccgccctcgacgcgcgtctccaggacgcgcaccccgtcgggcccgaccacctggac

SEQ ID NO: 82590 - DNA, 220 bp, Zea mays
  unsure (1)..(220): unsure at all n locations
  Clone ID: MRT4577_175337C.1
tcgtctcgtccggtctctcctctgcatcaatccgtcgtctcgtcgcttgtcatccatccatccgttcaaatcgaggangtgatggggggaccggtagacccacgtgatcatggatgaggattctcaatcggcatgcagcatgtccgtcttcctctcgccacccagtcgccgttcctccttcctcgtccctccgttcttccgcggacaccctgtcctcgtc

SEQ ID NO: 82591 - DNA, 136 bp, Zea mays
  Clone ID: MRT4577_175338C.1
ccccgcgtccgcatccgtccctatcccacacccgcggtcccagcatgcgatgtcccacagatggattacggtcctataactatttcatcctatattttaaacttcattctacaaataatattctctatattttttt

SEQ ID NO: 82592 - DNA, 238 bp, Zea mays
  Clone ID: MRT4577_175339C.1
gtgcactctagggcgaggggcctgtcaggcgctggtgcactcaccagggggacccgggtcagcgctaaggctattcaatccgagaaggcaacactaccatgtggtgcaaaccatcaacggggaccgagctcattggcagcctggagacgccgggcacctgcagcctgcttgtggggtggtacctctccaacctgcggggctaccgcaccaccttgagcccgctagctgcgtgtgtcta

SEQ ID NO: 82593 - DNA, 327 bp, Zea mays
  Clone ID: MRT4577_17533C.1
tcgaaaaaaaaaaaaaaaaaaaaaaaaaaaaataaaaattaaaaaaaaaaaaaaaaaaaaaaagaaaaggaaaaaaaaaaaaaaaaaaaaaaaaaaaaaaaaaaaaaaaaaaaaaataaaaaaataaaaaaggggcggcccttttaagggacccaagtttccaaacccttccttgcaaattattattttttttttggtgtcccctaaattaaattaattggccgtctttttacaacttattacctggaaaaaccctgtctttcccaattttaatatccttggagaaaattccctttttgcaagttggcttaattccaaaaaggccct

SEQ ID NO: 82594 - DNA, 560 bp, Zea mays
  Clone ID: MRT4577_175340C.1
cccacgcgtccgcccacgcgtccgcccacgcgtccggaaaatgttgtggaagcagtcaaagatgtgtctcgaaatgccagtaaagcaaaagacataatcgatcaatgcgataattccgaggggcagccggctgcagaggaggggcggccggcggcgtgctgcagaggaggggcggccggctgtagaggaggggcggccagcggcgtgctacagaggaggggcggccggctgtagaggaggggcggccagctctgtgctgcagaggaggggcggcttcaggtaagttagggtttaggttttgtaatgggcctttggactggttggaccgaactggggacaagtcggccgacttgctagccctagtcgacttagatatttcagtcgtgggcaagtcgagcgacttgctagaaaagtcgagtcggtcccccaagtcggcctctcaagaccgactggacgactagtcgacgacttgaaaacagggatattagtatcagtgtgcctcatgcaaaaatatatcatatgagtatagaatgagattgaaacttctttttttgcggttg

SEQ ID NO: 82595 - DNA, 302 bp, Zea mays
  Clone ID: MRT4577_175341C.1
cactgcagctccgtcccggctgccccaatagttgcggcgaggatgaacgtgaagggctgcatcctgattccggtacccccgccggggggccagcgcgctggtcaaggtggccgtgttcggcggcgccgccgtgttcgccgtcatgaacagtctctacaacgtcttgggtgggcaccgcgccatcgtttataaccgtatccaggggatcaaggacatggtttaccctgttgggacttactttatgatatcatggtttgaacgaccaatcatttattacttctcgtgctcacaatttaattttg

SEQ ID NO: 82596 - DNA, 317 bp, Zea mays
  Clone ID: MRT4577_175342C.1
tcgcggacaatcgcgcccaggctgcattagctcgccttgaaactcttgagagcgataatggttgggtccaggaactaaatattaatctaaaatttacagacttactgatgaagaagaccctgctctaaacccgtaatttttgccgagcagtctttaactttaaccttttcttgtcaaagggtatcggatacgccacatgctgtcctatggtgctgtggatcattagctacagttcccttatttggaacccttgtttctactttgaaaacaaaattttttggtttattaagggcttaatatctaccttttattttttt

SEQ ID NO: 82597 - DNA, 774 bp, Zea mays
  Clone ID: MRT4577_175343C.1
ccgggtgagtatgtcttacctcgctatcactttgttcactataatcaagatgcgagtaaaaggaaacaggcgaatcagactgcgactcctcgagcatctcatggaggcacctgctgtcagagctccccttggtatcttcctggaaatcttgatctgcgatgctgaggaaatccttcagctcggtgaaaccgtcatgggcaccaaattctgatgcagagaccgtggtaattccttcaggatcaaccgaatggttcgttctatcctgcaacgatgccagattcaccttcagttctcaaatggaggccagatcaactcttgtatgcacatacaacaacgtgtgaagacaatgtatacatcatatggcacttacctccgaagaactcaaccatctcgaaatgacagagcttccagatcttcctgcctgaagatacctgctcatggaagtatatatcttcagagttcttagagtcacacaactgtgtgcctttcttttctatatgcctacagatagtagcagcaactagcaagcactactatagacagggtgtattgagtactgacaatgtagcaactacactgacagcatgatttcacctattggctatttaaactatatacatagcagtaggcaatgcagcaggactgaagatgatctctctagatggtgctatcattctgcaggcaggcaggcatctgcagtggaccaggatggtttagtgtacatgcttgtctcagcccggagtggagaatctttgctcccccggctttgctttg

SEQ ID NO: 82598 - DNA, 407 bp, Zea mays
  Clone ID: MRT4577_175344C.1
caggcataaaaattggttgttagtaattttattagtggtttttggatggacgtgtgatatttatctagctgtacagaataaatactatagtgatgaaaatgaactgaatgcatgcatactgatgaacaatcttgtaacggggcacagtcctactgcctattactcactatcagtatggctgtacatacgaatttaacacatttgtctctcattttgtggtcgaaaactgctccattagtaactttgcatacctaaagcaagatgttctcatctgttattttatatagcattattttgtaatgttatgatggaatcaggagtgtaactgttaattacaagtatgttctgatgccttttgaaatccattgaagattttaatagaaagtgaccatctacaaagagtgtcg

SEQ ID NO: 82599 - DNA, 1560 bp, Zea mays
  Clone ID: MRT4577_175345C.1
ggctttcctcaccatcctcctcctcgcgcgcatttccagctccattgccatctcgtccaactacatctcaaggagcgccgagcagcaggtcatcgccaccgtcgcgccggccattgttcctgacatcgacggccagggcgcgcagccgttcctcacctcgccctccggatcgtacgccgcgtacctccgccgcgccgtggacggcgccggcggcctcggcggggacgcgtgctatgtccaagtccagcaagatggcgccagcggcagcgtatgggagtcggactgcaccccggtgggtggcgctgacgcgtgcgacctggcgttctcgccggtgggcctcgagctcttcgccggagggcagtcgctgtgggacaccggggtcgacgccgatccgggaacgctgagccttgacgacggcggcgacatgaagattgttagcaaggaaggtgtgacggtgtggacggcaagcagcgagccatggacggggcagcagtgcggggctcccttgccggtgtcaacgaccgcgccttcaatggaggcgctcccaccgccgccgtcgactgccactgccactgccagcacaaaactcgtgacgccaccagcagcgactcttgctggtgcgggaagcgcggtctctccttacggagaccaaccagtagtgccgccacctgtcgacacgttgccggactttccgggccagccgccagttgacacggcacccgaacagccactgccaccgccgccagcagacgcgtctcccgccttgccggacctgtcgctgccaccgccgccagcttacacgcctcccgactcgccggaccagccgctgctggcacccccgccagctgacatgttgccagacgagccgctgtactcatcgccgcctccagctccagccacctttggccctcaaacgccattgccgccattcggcgtgccactcgccgccccgccgaccggcgacacagtcccggacacggccacgccatctggcgagccaggatcgcctggccgcgtgcccttctcggggccatctcctgccggcatgccgcgccagcacgggcatccacactagcagccccttgtaggatcgccgccgctgccggacgcgctggcgccgggcgtccacggtgcgggagccggcagccggtacccccttcggccatgggcagcagcaggcggggcagggcgtgttcggccagcagccgcagctgctcaacggcgaggggcagccgttggaggacagcgccgccggtgggtggtcaagaacaagaagcgagagcggcagggtggccgcgtgcgtggccttgttcggtctcatgacgttgggctttgccttttagtttgtttcccttttgtgttgtgttttggtttttgggattgcatggtcatttctgtagtactgtttattctccgttggtctgataggaggggtctttttgtggattgtagtaaaaaaatttgtgtgtaaaacctgtcatacggtgcgctgtctgattcattctgtaggatagcatgatctaccgtatgtacatctgtgtattatcgtgtgtaaatgtc

SEQ ID NO: 82600 - DNA, 123 bp, Zea mays
  Clone ID: MRT4577_175346C.1
gtgaagaacgcgtccaaactggctaccgttttcacgtagaagaacaaggactccatgggcgcgggcattaactggctagacggcgaccagatacgcacggccgtcaacatctattacacgatg

SEQ ID NO: 82601 - DNA, 766 bp, Zea mays
  Clone ID: MRT4577_175347C.1
ctggccgggcttttgccctctcctccttctgccgccacaagaaaaaggaaagcgccgccaccagaaatagccattgacagcaagtccggagagagtagctgggtggagatatcgccacgtctcaagtctcgggggcgaattcaggagctttggtcgcgttgaagggtctcgcgcgaggtgttgccgtgtatggtgggtgctcggctggtcgggaactcgccgccgtcgtgggatctccgtgtccggccactgcgggtcgtgccggctcacccaccatctcctcggtcgtcgacgagccagtgaccaaggatctaggtgtttagcaggtttgctgagcaggagctcattgaaggaccgagagatgatgattgagccagtgatgtggtgccaaccacaagatgcagatggtggaaccaaggaaggatgaacttaactagtggatgctcgccgagcgagtatctcccccagcaaacactatctaagtgtcaaattaaaggtactcattaggttgattggttattggtgtgacttggcctccatccttgccaccgggatagacggtcgagtgggttactgcttccgcaggagaggaccaggaggagtagcgtggccaggcttcgccatgttactcggttcttctccgttagttatttccgctgcattaaaatttatggttattatttctgaaactccgataatgtaatcactaatgatacttattaaatttgtggtattatgtttcaaaaaaaaaaaaaaaaaagcggcc

SEQ ID NO: 82602 - DNA, 322 bp, Zea mays
  Clone ID: MRT4577_175348C.1
gatatccggtagccgacattcattgcgcccccatgatgggcccgacgtttggcgccatgatgatctccggccacaatgctgcgcacctggcgctcaacgccctgtcgcatgcccaaaggtctcgtccggactatgtcgccgccattgcgcaaagagttgatgattgcgtacaatgacgacgacgtcttggacgcctgattgcagcatgcagagacgacgatcaaccccatcaccatcttaacgtaaatgccttgttcttcaatgatgaatcaatcgaattcccttgcgttaacattaacattgttattgttactactaattt

SEQ ID NO: 82603 - DNA, 516 bp, Zea mays
  Clone ID: MRT4577_175349C.1
agaaccccgtgttttgcgtggagaagaaggcaagccgctcgacgctcgtcgatgtgcggagctatgcacaaatcggaatcgccatcgtcctcacaaacaccgattgggtttgtttatggaccgagaggtgacgaccgtgcaagtgatgtggcgacaaccacaagatgcagttggtggacgtactgaaggatggtggacttaaccagtggatgctcgccgagcgagtaccctcccccagcaaacactgtctaagtgttaaattaaaggtactccttaggatgattggatgttgttgtgaattggccttcatccctgccgccaggatatatggtcaagagggttattgcttccgcaggagaggaccaggaggagtagcgtggccaggcttcgccatgttactcggttttctccgttagttatttccgctgcattaaaatttatggttattatttctgaaactccaataatgtaattactaatgagacttattaaatttgtggtattatgttttattgt

SEQ ID NO: 82604 - DNA, 303 bp, Zea mays
  Clone ID: MRT4577_17534C.1
acttcccagaatctactgctggagaacatactgaaataggaaataggcggctagatacaatatctgagggcattcattttgaagattttggaagtgattaatgaaacctttgatgacactgcacatggttgagcagtgatccatttgtacagactattttgggcagctaaatatctacaattgtggtcgtggaactagctgatttggtggccactgtttcttcttccgggtggggttttgtgctcttagagtagaagcatggatggcttattattatgatcaaataatccgtattgaagggtg

SEQ ID NO: 82605 - DNA, 335 bp, Zea mays
  unsure (1)..(335): unsure at all n locations
  Clone ID: MRT4577_175350C.1
gactcctatagggcgattggngtcctcgaggccggccggggagtcagcgtatcccatgttgtaggctcattccattagctttttatccactcccacagtccaatccacacgaccgccaccaactcacgcagcgtgcttcccttcagaaactcgatggcctgccacctcgccatcgccggcgccaccgccgccgccgcccgcgctcctcgtatctccgtgctcgccgccgcctctgcttcctccgcaggggaacccgcgcgccgcatcatccgccgccgcgcgccgccgggncngcagggctctgccncngcggnccccgcgcctcccgcccngcc

SEQ ID NO: 82606 - DNA, 561 bp, Zea mays
  Clone ID: MRT4577_175351C.1
gccactctctctactccctccctctgtgtgtatctccctctctctagctccccatgcagcagcagccccccctcccatggagctggcgaccgagccctcccaagatccactctcaccttggcaagctctcccatggtgtctccccctcctctacggcagtaaggtgtaggaccgagagatgacgatcgtgcaagtgatgtggtgccaaccacaagatgtagttggtggacgatctgaagagatgatggacttaaccagtggatgctcgccaagcgagtatcccccagcaaacactgtcaaagtgttaaattaaaggtactctttaggatgatttgttgctggtgtgagttggccttcatccctgccaccgggatagacggtcgagagggttattgcttctgcaggagaggaccaggaggagtagcgtggccaggcttcgccatgttactcgggttttctccgttagttatttccgctgcattaaaatttatggttattatttctgaaactccgataatgtaatcactaatggtacttattaaatttgtggtattatgtttt

SEQ ID NO: 82607 - DNA, 1437 bp, Zea mays
  Clone ID: MRT4577_175352C.1
cattgggtacctcgaggccggccgggatttttgcactcccacccctcaattttcctagccgccacagccattcttcctccctgtcttctcttcacggcagcaagcctcccccatggcgccctcctccctggcgctcgctccctgcagggagcagtttcccttggccgacgccccagccatggcgcctttcttcctcgcgcagcgcctcggctctccctcccccaagctccagcgttcatggaacagcaggtcactggcgcccctgttttccctgcgacttccatggtcgcgagtttcccctggtcgccatctctccagcgcgtcccctgcaagcgagcagcgatttccatctccctgcaacctccaaggctgagcccctcctccctctgttcggcgcccttgctgctggacgcgcagagccccatggcgccctgatttctagctccctcccatggacgcccagaaaaatcccccagccgagcccccaagcaggcgcccagaaattccagcagcctctccatggccgagctccctgttccctctgctctagccggccatctcccgcagcacacgccgagctccccttcgatctggttcagcgcaggcagcagcagcttctatggatggcgtccagaatttttttttccagcacctccctgttcatcttcctcccagccggctttccttccctgctgttgctcgccccttcctcctttccctggtgctgcagcaaggagcccctgctcgggctgtagccgtggcgtccaagtctctgcgcagcaatgccggtccaaaaactgcagccccgtcacttccctggcttcatcgctgctttgtgctgagcagtgaacagcacgccgtcgacgctcgccgggtgtttgctgtttttgcgcagccccatccgcgacgtctttcacccccggagaggcaccccgtgttttgcgaggagaaggcaagccgctcgacgctcgtcgatgttcgtaacgatgcacaaatcggaatcaccatcgtcctcacaaacaccgattgggtttgtttatggaccgagagatgatgaccgtgcaagtgatgtggtgccaaccacaagatgcagttggtggacgtattgaaggatggtggacttaaccagtgggtgctcgccaagcgagtacctcccccagcaaacactatctaagtgttaaactaaaggtactccttaggatgattggttgatggtgtgacttggcctttatccctgccaccgggatagatggtcgagtgggttactgcttccgcaggagaggaccaggaggagtagtgtggccaggcttcgccatgtactcggttttctccgttagttatttccgctgcattaaaacttattgttattatttctgaaactccgataatgtaatcactaatgatactttcttaatttatggtattatgctttattgt

SEQ ID NO: 82608 - DNA, 628 bp, Zea mays
  Clone ID: MRT4577_175353C.1
gccctccctcgagttttttttttttttttttttttttttttttttttttttttttttttttttttttttttttttttttttttttttttttttacgggggggggctcaataatttttccctcccacctttgcaggggtggaacaacagggaccggggaacaaacaacccccccccgttgggaaaattgcacaaggaatcctttgctgggcatttaaggggctcaaccatttccccccactagtttgttttgtacctagggctggggggcctgcctccttgtgggcgtcgccccggaccctgaaaaggggagcctcccccagttcaagatcacccaacccgaaaatggttgacacacagcacaccaaaacacgaggggctttactgcccgagcagccttttgaccccggatttttggtcccccgaaagcctccccgggaacttgatggcaaactttatccggggggtgccctttctggacgggtccttggggacgggaatgcccttgccacgcaccacctttttgtaccccggggggatcacggagctgatgggccccgtaaggatgcccccgtccaacgttgtaaggggcgcggggggccccgtaaaagcctccgccagggggacctt

SEQ ID NO: 82609 - DNA, 278 bp, Zea mays
  Clone ID: MRT4577_175354C.1
ggcacgttgccctgcttgtatcaactgacgacgattgcatgcgagaatgactgcctatgaggcttggcttgcctatggacggtgaaactaggtgcactgttcgagaatgaaacgtacattagcatactcaacttataccacaaactgttttcaaaaaccggtgactttatccgcgctgcaaacattgaaaccatatacgacgtatgacatcaaagatcatggtggccatgacttcaactttacactctaagagggccatgcacatctcctgtacactc

SEQ ID NO: 82610 - DNA, 528 bp, Zea mays
  Clone ID: MRT4577_175355C.1
gctgttttgttttattttgtggaggcgaggaacctcgtgttttgcgtggagaaggcaagccgctcaacgctcgtcgacgtgcggagctatgcacaaatcgaatcgccaacgttcttacaaacaccgattgggtttgtttatggaccgagaggtgacgaccgtgcaagtgatgtggtgccaaccacaagatgcagtcggtggacgacccaaggaaggatggactcaaccagtatttgctcgccaagcgagtacctcccccagcaaacactatctaagtgtcaaactaaaggtactccttaggatgattggttgatggtgtgacttggcctccatccctgccaccgggatagatggtcgagtgggttactgcttccgccagagaggaccaggaggagtagcgtggccaggcttccccatgttactgggttttccccgttagttatttccgctgcattaaaatttatggttattatttctgaaactccgataatgtaatccctattgatacttattaaatttgtggtaccc

SEQ ID NO: 82611 - DNA, 1050 bp, Zea mays
  unsure (1)..(1050): unsure at all n locations
  Clone ID: MRT4577_175356C.1
aattcggcacgaggcttccacctctggccggtcttttctgcgcagcaagccgcgcgcagcagcagcattgttcttcgccttgcgtcgtcgtcgagcttcgccactctcctccccatgacccgcagccctcgcaccctctaccctccccaaaaacagcaagcccccagcagccccggattccctccgtgtcgcttgcatgccacccgctcgatgtattgcgcagccacattgtcgctgctcgctgcccgtcaacgtgcagcccttctgttttctccattggcacagcagccccgtcgtctccgcgcgctgccggctcgctgttttgtggagccaatggacagcacgccgtgatgcctgccgtgtgttcgctgtttttgcgcagccccaaacatcgacgtcgttcaccccggtgagaccgcgacgctccttgttcgattccgcatcgacattattttcctatgattaattatgtatgtgtgctgttttgttttatttttgaggaggagagaaccccgtgttttgcgtggagaaggcaagccgctcgacgctcgtcgatgtcgtagcgatgcacaaatcggaatcaccgtcgttcttgcaaacaccgattgggtttgtttatggaccgagaggtgacgatcgtgcaagtgatgtggtgccaaccacaagctgcagttggtggacgtacggaaggatggtggacttaatcagtggatgctcgccaagcgagtacctcccccagcaaacactatctaagtgtcaaactaaaggtacctccttgctttggttgttggtgtgacttgaccttcatccctgccaccgggatagacggtcgagtgggttactgcttccgcaggagaggaccaggaagaagtagcgtggccaggcttcgccatgttactcggttttctccgttagttatctccgctgcattaaaatttatgattattatntctgaaactccgatnatgttatcactaatgatacttattanatttgtggtattatgcttttaaaaaaaaaaaaaaaaaaaaaaaaaaactccaaaagggg

SEQ ID NO: 82612 - DNA, 739 bp, Zea mays
  Clone ID: MRT4577_175357C.1
aactcccgcttttgcctgctccgccggtgcttccccagcgatacctcgtcgggtccggccttgagcaggtgctctccagccatggcgcaggcgccatttcccatggccgagctcccccaactagccgtcgttctccctgctcctctgtccctagtgcacggcagcggccagggcaccatctccgagttgccctccatggctactccctctccgtggcaagcgcggcttccccaagcctcggtgctcggcgctctggccatggacgcccaggtcctcgcccctgctgctgctctacgtgaggtggaagaagaaccgtgtgtgccaatgacgtgtgggcccaaggccatgggaccgagagatgctgaccgtgcaagtgatgtggtgccacccaaaagatacagtcggtggacgacccaaggaaggatggacataaccagtggatgctcgccaggcgagtgccacccagcaaacactatttaagtgttaaattaaaggtactccttaggatgatttgtggctggtgtgacttggccttcatccctgccaccgggatagatggttgagagggttattgcttctgcaggaggagaccaggaggagtagcgtggccaggcttcgccatgttactcggttcttctcttttagttattccgctgcaataaaatttatggttattatttctgaaactccgataatgtaatcactatggatacttattaaatttgtggtattatgcttg

SEQ ID NO: 82613 - DNA, 109 bp, Zea mays
  Clone ID: MRT4577_175358C.1
cccggtcgcccacgcgttcgtttagtagttctcataattcatgttccctccacttgggtggtagaatagcgccatggtcctgtccgtcacctgctctcttggtcggcct

SEQ ID NO: 82614 - DNA, 392 bp, Zea mays
  Clone ID: MRT4577_175359C.1
ggggggaaaaaaaggccaaaaaaaaaaacagggccaaaaaaaaaaaggaacaccacccaaaaaaaaaagggaagggaccgaccccccaaccccttaactaaactaaacccaagcccaaaaaattcgtacccataaaaaaaaaggaaaacccagggcaacccccaaaaaaaaaaggaccccaacagaaaaatggctggcacgccacctcctaaaaaaaacaacaacatattaaatcccatggggggcaaaacttgacaaagggtctaaaacaaactaggcaaaaactttggcacaaacaagaagagggaacccggaaacaacacccgaagggcaaaacccgggggcccccccaaaaagaacaccccccgtccggggggcccctgcaaggcccg

SEQ ID NO: 82615 - DNA, 470 bp, Zea mays
  Clone ID: MRT4577_17535C.1
aaaaaaaaaaaaaagaaaaaaaaaaaaaaaaaaaaaaaaaaaaaaaaaaaaaaaaaaaaaaaaaaataaaaaagaaaaaaaaaaaaaaaaaaaaaaaattttttggacctaaaaacaaaaccacaataaagggggttttttcctggtctccaccccccttggggggggttttttgcttttttttttaggcccgggggggccttttatttttttttttggggcccctttgcccttttttggggaggtttttaattgggagggccctggttttccccagtttaatcggggaaaaccctgtcccccttcccctttttggctttttagcaaatcgcccttttccgattggggtttttaacaaaggggccccctcattggcccttttccaccctttgtaccgcctttttgggaatggggcccccccttgtttccgcccatttagcccggggggttggggggttccctaccggggg

SEQ ID NO: 82616 - DNA, 1029 bp, Zea mays
  Clone ID: MRT4577_175360C.1
cggacgcgtgggcggacgcgtgggcgcagcgccgctgctccatcccctccccagcgcccccttttcttctacctctggccggtcttttctgcgcagcaagatgcgcgctgcagcaacaccgttcttcgccttgcgtcgtcgtcgagtttcactattcccctcccccaaaacagcaagaccacaacagcccggattccctccgtgtcgcttgcatgccacccgcttgatgtattgcgcatccacattgtcactgctcgttgtccgtcaacgcgcagcccctctgttttccccgttggcgcagcagccccgacgcctccgcgctctgcgggctcgctgttttataaagcgcggtgaacagcacgccgtcgatactcgccggttgtttgctgtttttgcgcagccccatcgtcgtcgtcgttcaccccggtgagaccgcgacgctccgtgttcgattccgcatcgacattattttcctatgattaattatgtatgtgtgctgctttgttttatttttgtggaggagagaaccccgtgttttgcgtggagaagaaggcaagccgctcgacgctcgtcgatgtgcggagcgatgcacaaaaccgaatcgccatcgtcctcacaaacaccgtttggttttgtttatggaccgagagatgatgatcgtgcaagtgatgtggtgccaaccacaagatgcagttggtggacgtactgaaggatggtggacttacccagtggatgctcgccaagcgagtacctcccccagcaaacactacctaagtgttaaattaaaggtacctccttgctttagttgatggtgtgacttggcctccatccctgccaccgggatagatggtcgagtgggttattgcttccgcaggagaggaccaggaggagtagcgtggcccggcttcgccatgttactcggttttctccgttagttatttccgctgcattaaaattatggttattatttctgaaactccgataatgtaatcactaatgatacttattaaatttgtggtattatgtttt

SEQ ID NO: 82617 - DNA, 681 bp, Zea mays
  Clone ID: MRT4577_175361C.1
gatttgatttatttttgtggaggagagaaccccgtgttttgcgtggagaagaaggcaagccgctcgacgctcgtcgatgtgcggagcgatgcacaaagccgaatcgccatcatcctcacaaacaccgtttggttttgtttatggaccgagagatgctgaccgtgcaagtgatgtggtgccacccacaagatgcagtcggtggacgacccaaggaaggatggacataaccagtggatgctcgccaagcgagtacccccccagcaaacactatctaagtgttaaaataaaggaccgagagatgctgaccgtgcaagtgatgtggtgccacccacaagatgcagtcggtggacgacccaaggaaggatggacttaaccagtggatgctcgccaagcgagtacctccccagcaaacactacctaagtgttaaattaaaggtactccttaggttgaattggttgatggtgtgacttggcctccatccctgccaccgggatagacggtcgattgggttactgcttccgcaggagaggaccaggaggagtagcgtggccaggcttcgccatgttactcggttttctccgttagttatttccgctgcattaccatttatgattattatttttgaaacttcgataatgtaatcactattgatacttaataaatttgtggtattatgtttt

SEQ ID NO: 82618 - DNA, 2001 bp, Zea mays
  unsure (1)..(2001): unsure at all n locations
  Clone ID: MRT4577_175362C.1
aattcggcacgagggacgaggtcagctgcctccgcggctccctccttcggtcctttgacgcttcaaggagacatcgctccagcgcccctgagctgtccttggtcaatgggagtggctgaggctggcgtgcggacctaaaatccccactgatatcaaggcaactgcgcaagcaatctccctgcccctgctcattggtcagcactcagcaccagcagcaacagcagctgctggagtgctgttgcgttctcctcaagcgcaactgtgcaaggactgctggagtgcaagcacagttctgcttccactacttgaagtcgactccctcccactccagtctccaggccaggggagagccgcattggcagcttgcctctgcccatgcccaggcattggagctcgtccccaatggcaatgcgtcaccagttcggggcttcggtgctgctgcatctactggtgttagcgggggcgggggccatggtcactgctgaccaggagagcgaccggatccgcgagctcccgggccagccgccgaacgtggggttctcgcagtactccggctacgtcaccgtcaacccggcgcgggggcgcgcgctcttctactggctcgtggaggcggtgccggcggccgggcccatcgcgccgctcgtcctctggctcaacggcggccctggatgctcgtcagtcggctacggcgcgtccgaggaggtcggcccgttccgcatcaggccggacggccagactctctacctcaaccccaattcttggaacaaggcggccaatttgctcttcctggagtcgccggccggcgtggggttctcgtactcgaactcgtcgctggatctgtacaccgcaggagatgcaaagacagcactggatgcctacgcttttcttgtgaactggttggagagattcccacagtacaagtacagggagttctatattgctggggaaagttacgcgggtcactacgttccacagatagcccgggctgttttgaattcggcacgaggcattcagaatccaacaattaatttcaaaggattcatggtgggcaatgcagtcactgatgactaccatgattaccttggtacctttgagttttggtggactcatggtctgatctctgacaagacttatcacaacttgaaggcgacatgtttgcttgaatcctcacagcacccttcacctgactgtgtcaagaacttgaatctagccagtgctgaagaaggcaatattgatccttatagtctgaatacaaagccatgcaatgacaccgcctctctcaagcttggcttgggtggacgctacccttggttgtccagagcctatgatccttgtactgaaagatatgcaagtatttactacaacaggccagaagtgcagatggcattgcatgcaaatacaactggaattcattacccttggcaaacatgcagcgatattgttggatcctactgggctgattccccaagatctatgcttccaatctaccaagaactgatagcagctggtatcaagatctgggttttcagtggggacacggatgctgtagttcctgtaactgcgacaaggtactcaatagatgctctcaagcttccaacactggtaaattggtacccttggtatgaccatgggaaggttggaggttggagccaagtttacaaaggactaacccttataaccatagcaggtgcaggacatgaagtgccactgcaccggcctcgacaagctttgatcatgttcagacacttcttgcagaacaaaccgatgccagcacaatagccagtcgaagcagaaatatagtgtaaactaccacagtcatgtttaatattttttaaattcttttttacttgatttgattgttattgttacaacatattgttcaattatctcgattgaatgtatgtacgcccagtagcaaatagggatacctgaaatttgtactgctggagctaaagagctccgctgtatatgtaatgatgatctttagcattanggnngggg

SEQ ID NO: 82619 - DNA, 1257 bp, Zea mays
  Clone ID: MRT4577_175363C.1
gcgtagtccgtcgcctaccggctatcatcagcacgcaccgccgccgcctctcatctcatcgccgcgctgcttccccgcccgcccccggattggcgctgccgcacccagatcttccccacccaaatcgactccgccatcgtccggatccacgcagagccgtcgcggatcgacgtgctgccgccacagattgcgcgctgtcgtacggatcgagagacacccaccgcaagccttccgcgctggcgccgttcgggaagtaaggaggctacggagagggcacaagctggggggtgtcgaactccgtggagaacgcgcgggcggtggatgcctagctctggtagtctggtgggagggtgaggaaaatctagattctgagaagtatgaagagctgattgagttcatggagaaggtggctaagacagttgattctgaggagcactacgttctgtcaattgcttacaagattgtcatggaacccaatgtgcttcatggtgcatcatatcctccattgagtagggggaagaaggccgtgtcaacgtggactgtgtcactctcattgaggactaccataacaagattgaagttgaactcagcaagatctgtgatggaatcctcaagctccttgattcccaccgtttccgcctcattaacagctgcagagtccaaggtcttctacctcaagatgaagggtgattactacgggtaccttgcggagtttgaaactggatctaggagaaaagatgcagctagaataccatggatattgctctggaggaattggcccccacccatcctattaggctttggctggtgctgaacttctcaactcgcctgaccatgcgtccatgcttgcagtctcgccaaataggaccgtgagatgatgatcgagccagggatgtggtgccaaccacaagatgccgtggtggacgaccggaaaaatgatggacttacccagtggatgctcgccaagcgagtacctcccccagcaaacactatttaagtgttaaaataaaggtactccttaggatgattggttgctggtgtgacttggcctccatccctgccaccgggatagacggtcgagtgggttattgcttccgcaggagaggaccaggaggagtggcgtggccaggcttcaccatgttgctcggttcttctccgttagttatttccgctgcattaaaaattttggttattatttctaaaactccgataatgtaatcactaatgatacttattaaatttatggtattgtgtttt

SEQ ID NO: 82620 - DNA, 407 bp, Zea mays
  Clone ID: MRT4577_175364C.1
aattcccgggtcgacccacgagtccgactttctataaaaaaaaaaataaaaaaaaaaaaaaaaaaaataaaaaaaaaaaaaaaaaaaaaaaaaaaaaaaaaaaaaaaaaaaaaagggggcggcccctctaggatctaagcttatatttccttgtaaatgctttctcacatctcttatattgtctcccaaatttaattctcaggggctcttttttaaaagtttcgactgggaaaaacctgtgtttttccaaatttaactccttttgcaacatacccctttttcaatatggggttttatccaaaagggccccacagctttcccttttcaaaatttttgcacccttaaatgggaatgtgacaccccctatttcgcggcattaaacccgccgtgtgtgaggggttttccca

SEQ ID NO: 82621 - DNA, 474 bp, Zea mays
  Clone ID: MRT4577_175365C.1
gggttcactgacatccatccacccaaaagcgagtagctgcaaaaattggcacggacagtactaatacaataaagcttgagcccccatggaaaagaaaaaaaaaatccatcctacagggagtacagttgttattctacactaacatgaattaatgcacataatacttgaaacctgcccccgaccgaccaaaccaccgccaaacaccaggcaaaaacagcagcaagcaaccaaaaaacccaaacagggataaaatgccaacccccaagggcccgggccgaacaaatttggttggtcggtccccactgacggtcagtcaggatcaggatacaaacagatcaaaaggggcctttcatttttcccacgggccccttgataacctgcaaaatttggaccaccttccccatggaacggccggttcaacgggattttgaacgtgcacaccatgcccagtttaaaaaccggaagaaccttttt

SEQ ID NO: 82622 - DNA, 872 bp, Zea mays
  Clone ID: MRT4577_175366C.1
agtggccggtgtcctcagcgtcttttccatggtgtctagccgaagttggtgatgtctgtctctcgaccctgtccaagcactggtgttgccgcatcggcaccctgctcctacatctctatcgcccgcacgccctggtctcaagcatccggacgctgccgtccctgctgcggacgggcttggtcacgccgctagacgtgcgtgcgcctcaacctcgccgacgctcaccgtggaaccttgctcgttgtactcgtcgtcgttccccgtccatgccgtgagctacagcgtgctcgtcgttgccgcctcctcgtcggacacgttcaacccggcagctccttcgtgtcatcgatttccacgacgcacaacctctccaccaacctcatcatgcttgcggtgtcatcgggaagccgttagccgcctgccttgccgaacacctagaagaagtggtgtctgaagaaggagttcacttcagtgcctgctgatccagtggtggagtttcatctaactgcttaccacaatagaaggattttagatcttctcctgcaataaggaaagaatttgatgacttgggctttattagttgcttcttgtggaggtcttgaagcttaggttacttatgtgtatattttatggaaaggtttcacctttccaaatattgtagttaagttatgcactctaaagactatcaggacttgtaataatttcaaccccttttatgttgtaaaacttgagttctggtattttgtaaaagtcttccgctctatcttcaaaaaaaaataaaaactatgaaatagaaaagaaaactatgaaacagactaaggagggagcaaactaacatgaattacaattagttgggggggccgcttactagggag

SEQ ID NO: 82623 - DNA, 856 bp, Zea mays
  unsure (1)..(856): unsure at all n locations
  Clone ID: MRT4577_175367C.1
cgcgtccggaagaataactcatcgtcgtttctgcatttcttctctgtagcgtgagatgtggaaataagtaaagtcaccctcgagtgaacaacccattggacggatcgagctggtactggcacactcgatccaatattttagctagctagcaagcaaagcaagccttgaacttttgagcggcggctagcgcaatgggaggcgtggcgtcggagctggtgggagccagcagggagaggcagagcaggaagaggaagcagttccacacggtggagctcaaggtcaggatggactgcgacggctgcgagctcaaggtcaggaacacccttgcccgcatgagaggggtggagtcggtggagatcaaccggaagcagcagaaggtgacggtgaaggggttcgtggaggcgcagcgggtgctgaggcgcgcccagtccacggggaagcgcgtcgagctgtggccctacgtgccctacaccaacctctacgtcgcgccgccggtgtacgacaagagggcgccgccgggccacgtccgcagggtcgacgcactcatcgcgcccgccgccggccaggaagaagagcacctcgccacgctcttcagcgacgataaccccaacgcctgctcccttatgtgattcctcatgctagctagagccgcctgctccccggccttattatgcgacgctagctgcttgcttcatccacgctgtacctctactagcgatgtcatgctccgtagttacgcagtaatataataatatgtatcttttaattaattaaacgacagtacgtaaaatgactttcaaataaaaacgagccagtcttttctatanaatacgcagggtatatatctttgggcagc

SEQ ID NO: 82624 - DNA, 333 bp, Zea mays
  Clone ID: MRT4577_175368C.1
tgtcgtctagacatacactcctccccatttacaagcatgacacatatcgtggctctagtaacatgtggcgaatccctcctggactatcaagataccacgcgctgaaccgtgcaagcttcatggtaccctataacgtttagatcatgccgcttaccaggattcatgtaccgctttatccgttttccatgcgactctctctatgatatgtcaatctgcacctataacaatgcagagccagaccttaggtcgaaagtgacgcccgtccacatagtcctccatccacatgccatcgcgtcacatgatccgcaactacatgtactgagatcataatgc

SEQ ID NO: 82625 - DNA, 621 bp, Zea mays
  Clone ID: MRT4577_175369C.1
cgttggttacataataacccccaccgcccggtgttgtatcgtgtcgtggtcgtagtcgtcgggtgtctcgtcgtcgccggagttgtttggcgccacctttttattccgaacgcgtcagtgtccactgttcgcctttcctttttaaaaaaaaaaaaaaaaaaaaaaaaaaaaaaaaaaaaaaaaaaaaaaaaaaaaaaaaaaaaaaaaaaaaaaaaaaaaaaaaaaaaaaaaaaaaaacctcgtcccaccccggaataaccggaaattgaaggccttccgcaaccaaccgcgccgggggaaggctcccggaatacggcctaacaaaaaaaataataaaggggggttaaaagggggggaagaaccgttcaaccgacgggccaaaagccgcaaaggaccgggtgggttacaaaaaaaggaactggggtatgctcgaaggggggaacgggaacaaaatggaatgcggaacccaaaacccttacggaggatgataacactagtagctgatcaatggttgctgaaatgaaagccttaacgggtgtttgcctctcaaccaaaagattaaataaagctagcagaaaacctaccttggggggggggcaactggctaataaaagggggggc

SEQ ID NO: 82626 - DNA, 1109 bp, Zea mays
  Clone ID: MRT4577_17536C.1
atcgcggccgcgtcgacttttttttttttttttctttttttctctttttgtatttcaaaaaatgtattgatgtactttgttatttactctcccgatatatcaaattttataggttctaatttgcgtcctgcacagttccgttcgagatacggcgtacaagataagtgctcatgtttgattcagaaactatacatcatctcgtattacagatagtggtacattgatccagattcatgatatactgctggtggtagctcacacatcccaaatgctgggataggtgtataaactccaatctccaaacaatcctgtggtgctgttgtgcatgatatctctgattcagcaggctatctgcaccctcgaggaaactgatgtccaccactggagtggaaatggaatcactcctgctgctcttcctcaggttctggttctggctctggctcgaccgaggtgtacttccggatgacggcaatgatcctctccttgtccctcgttgggaacgactccaccagcaccccgtccacgtagaaatggaagagcggcacgatcttgatgcgcagccggtccgccacctccgactgctcgtcgtactcgtcgatcacgttgtgcttgaggaatacgacgggagcgccgtcgtcgccggagcccttgccagaggcgcgtgaaggccttctcgatgtacttgcagctgccgcaggagggccggtagaagtccaccaccaccagagcgcccgtggccctggaccggttcaggtggcgctggaactcctcgtccgtcttgaactccgtcacgcagtccacggggcacagctcctcctcctcctccacagggggcaggcccgggagggacccgttcgtactcccgcccgccgcttctccttctccttcttcgctgctgctgctgctgctctcagtcgcggcggcggccaagcggcggcgccggctgagggtgatccttggaaagggaaggagggtggcggtggcgggacgggagcgggaggcggcgctggaggggaggacgaagacggaggagcggagcgggaggaaggaggagacgatcatggctgcattctagtggtacgtgtcccggccggccggcccggccgatg

SEQ ID NO: 82627 - DNA, 182 bp, Zea mays
  Clone ID: MRT4577_175370C.1
ggaaatatcacccaaaactttattggtgggagacccaaacttggaaccacaggattgattaccttgcccgagatcactccctgatcccaaccacagataggactacaattttgccctgattgaaaacctcataggcgccattcgcctcctcaaaattgcatttccttgatatggggttttgg

SEQ ID NO: 82628 - DNA, 655 bp, Zea mays
  Clone ID: MRT4577_175371C.1
cctcgatgccggccgggcttccgtctcctagcggcagcaacgacactccagtgagacaagggaaaacacggtcacggtgggcagagtgacacgacacacgcctctccgccccgctccgatctagattgcggtcaccgtcccgtgtcatcgcgacgattgccaccgcggtctgatgcccctcatccccgctgtcatgcaaccccgctccggaaacacctgcgctacctcgtacagccccgtcaacgcctgtggatcctgctgatcttgctgtgagtaccacagttgcgtcaaccaacctcccatctcgtcaatgatcaccgccgtaagccaatccatcttccatgaccacaaggcatagggcacctgataccaggaggaagttcaccggacactagtcatgtccgccctccggtgacagtggtcatcaccgagctgtgccccgacgctacttgccaggtggaccccgtccacttctgactgagctggacggtgttcggctccatggtcgaagcccgggcagtccgacaagctccgaaacaccgcccggttacaagttcagtaacctccagctggcgtgcaactggaacggcttggacatccccttcagggtggacgcctgatcaaacgccaactacctggccatggccatccagta

SEQ ID NO: 82629 - DNA, 384 bp, Zea mays
  Clone ID: MRT4577_175372C.1
atattgctggttcgacgtgttcactagtcggtggccggcctaggtgagaggacttggcaagcacgcaaccaactgaagagaaatggatagggccagcactgctgcaacaaacacttgccatcattatgagctagacgagtcttactgcgaacaagactgacagcaccgaggattaactaacagtgcgattacatggtattacatactgaagcaggacacgagtttagacataatggtcatgctggacgaggctcgctccttgtatatgtttctttccggctgtctggagctcggtaatagctcttctcgctaggagggtggtcgaacttgcagtgcgcaccggacctgcacatgctcagacctcatggagaaggcacaagcctc

SEQ ID NO: 82630 - DNA, 849 bp, Zea mays
  Clone ID: MRT4577_175373C.1
aacctactcactagtcgttttccttgggaccgtcatcaccttccccttgccatcctaatctattcccacccctagttcgagccccatcatggccggaggcgccgcgccgccattgctgcaggctgccgccgcgcgcttgcatggctgggccatctagggccactgccggccttgctgcgagcagctgcgagcaagccgaggctgcgaccagccctagctgctctctgcaggtctcggtcgaagccggctggccctccccatcgcgctcgtgcttttctgttgggctgaaccaaggaggaagatgatggacttgcgcgagatttcgaccagcagcagggggttaagcgcacatctcgtgacccacgtaaatagtagcataaggaccagcttgctggagtaaaagacgtggacttgttccaggggcttatgcgcaaaggaccgagagatgacgattgtgcaagtgatgtggtgccaaccacaagatgcagttggtggacgacctgaagaatgatgggccaaaccagtggatgctcgccaagcgagtaccccccagcaaacactatctagtgttaaattaaaggtacctccttgatttggttgatggtgtgacttggccttcatccctgccaccgggatagacggtcgagtgggttactgcttccgcaggagaggaccaggaggagtagcgtggccaggcttcgccatgttactcggttttctccgttagttatttccgctgcattaaaatttatggttattatttctgaaactccgataatgtaattactaatgatatttattaaatgtgtggtattatgttttattgcaaaaaaaaagtcgacgcggccg

SEQ ID NO: 82631 - DNA, 580 bp, Zea mays
  unsure (1)..(580): unsure at all n locations
  Clone ID: MRT4577_175374C.1
cgtgggcgngagcgtgggcggtcgcgtgggcggacgcgtgggcggacgcgtggngaaaaaaaaaaaaaaaaaaaaaaaaaaaaaaaaaaaaaaaaaaaaaaaataaaaaaaaaaaaaaaaaaaaaaaaaaaaaaaaataaaaattttttataataaaaaagaaagggtgttgtatgagttgggggtgctgtgtgcacctatgtctcttgggagaaggaataatgtatatagtgaggcttttgaggctgcccgtattgcctgcatcatgttcatgaccaattctgcttgaaaggatgccttccacctttgggtccgggttcaccccttccatgtgcttcgtgtcaacaagatgctttcgtgtgctggggctgcttggctccagactggaatgatgggtgcctttggtnagcctcagggcacctgtgctagggtggacattggtcaggtactcctttttgttcggtgcatggacaactttgctgtncatgccagtgaatctctgtgactcgccatgttcaagttccctggccttcaaaagatattgagagcttaaagtggggctttacctgtttcagtcgtt

SEQ ID NO: 82632 - DNA, 254 bp, Zea mays
  Clone ID: MRT4577_175375C.1
acgcccacgcgtgcgtgcttacacattctatttatttctgtcagtagtatattgagactgagtcaggtgtgtgctagacattgggaaatgtcaaatggagcgcataggagccatgcgtcggattatgctgctaggtgtacgagaacatggcggcatggctgattaccaagaacacccttaagatcatgcccttcaagctcccgacctttgtgattctattatttcctacgtgcacatgatagcaatggggattt

SEQ ID NO: 82633 - DNA, 184 bp, Zea mays
  Clone ID: MRT4577_175376C.1
ccccgcgtccggacgaatggtgggtctgtttctcactgcccacgtctttttatgcggggtgtgaatcctttttggttcgggctatagatacctgggtccatcatgacctgatcgagtacaaaacctgaggtgctcgaaccttactgaggaggacctagattgaaaaggggggccctggttgtat

SEQ ID NO: 82634 - DNA, 941 bp, Zea mays
  Clone ID: MRT4577_175377C.1
ctccccatgccgtcctccctctccctcacgacaacagcaaggcacccagcgcctagcctagagctcgccgcgccctggtcccttcagctcgagcagcaggctcgcccatcgtcggttgcgtcccttcttcaaccaccagccgtgccagcctcgtgtctcctcctcgtgcacggatccatggcgtgctgccgtctaggcgtagctactgcctctttggtgctgctcggcgtcatgttctagctccgaagtccgagcttgccacttcactactccatggccgaggccccctcctagcactctcctcgcgtccgctgattgcagggactcggcacctcccgctgcaaacttcgccaagtttagccacccctccacgccatgtactagggagtcacattcagtgtcgcccctttccggctagcccccactgcaacctcgcctcgaccttgctcttctccatccataagctccctgttctgtacgtactggtctactggaggtagaagaagaagccatctcgagtctatgacatgtgggccctagttgctaatgaccgagagatgatgatcgtgcaagtgatgtggtgccacccacaagatgtagttggtggacgacccaaagaaggatggacataatcagtggatgctcgccaagcgagtaccctcccccagcaaacactgtctaagtgtcaaattaaaggtacttcttaggtcgattggttgatggtgtgacttggccttcatccctgccaccgggatagacggtcgagtgggttattgcttccgcaggagaggaccaggaggagtagcgtggccaggcttcgccatgttactcggttttctccgttagttatttccgctgcattaaaatttatggttattatttttgaaactccgataatgtaatcactaatgatacttattaaaattgtggtattctgcttt

SEQ ID NO: 82635 - DNA, 1409 bp, Zea mays
  Clone ID: MRT4577_175378C.1
aaaaaaaaaaacccctagccgccacagccaccagcccttctccttctcccccacgccaactcccctttctctgttttggccggcagcaagcctctcccatggcgcttgcagcaggacacagagcccccccccatggcgcccttcctctcctcggctccaagggtgtaggcgagctgcagctcctcctcttccccatgggcgcgttccccctgcagccgagctcctgcacatggcgtccatccctggtctcccttgcgcaggggtagaggcagccatggccggacctctgctcggccagcagcttgggcgcctgaagttccctatgctcggcgccccttcctgcgcagcgccgctgctccacccctaccccagcgccccctctctcccatggccgagcagcagctctgctcgcccccccctccttcttttccccttgtgcagcaacaccaacctcctcttttcctccacaaaacagcagccccgatcccctccgcatcgcgtgcttcgttcgacctgcgcagtcccaacccgcgccgtcgcgatggtgtttgagacagcccatgtcgtgtcgttgatctgcgcagttcgaccgtctacgcgtctcacttcgccggatctgcgcagccccaacatcgacgccgttcaccccggtgagacgacgatgatctttgtttgattccacatcggcattgttctccggtgattaaattgtgtatatgtgctgttttgttttattttattttgtggaggcgaggaaccccatgttttgcgtggagaagaaggcaagtcgtcaacgctcgtcggatgttcggagtgatgcacaaatcggaatcgccatcgtccttacaaacaccgattgggtttgtttatggaccgagagaggatgatcgagccagtgatgtggtggtaacaacaaggtgcagttggtggacgtactgaaggatgatggacttaaccagtggatgctcgccgagcgagtacctcccccaacaaacactatctaagtgttaaattaaaggaccgagagaggatgatcgagccagtgatgtggtggtaacaacaaggtgcagttggtggacgtactgaaggatgatggacttaaccagtggatgctcgccgagcgagtacctcccccaacaaacactatctaagtgttaaattaaaggttctctggaggagatggttgctgggataacttggccgaccaccctgccaccgggatagatggtcgagtgggttactgcttccgcaggagaggaccggcagcagtagcgtggccaggcttcgccatgtcactcggttcttctccgctagttatttccgctgcattaaaatttatggttattatttctgaaactccgataatgtaatcactaatgatacttattaaatttgtggtattatgtttt

SEQ ID NO: 82636 - DNA, 927 bp, Zea mays
  Clone ID: MRT4577_175379C.1
tcaatcgtccgttcgtcgaaactctaattcgctctgttctctttctctccctccccacgttgtcttcttcctccccctgccgatgctccctgtccatggcgcctccacctccctgcttgggcgctggccgagccccttggagcaggcgcctccagctattatgcatggcacccttcttccccacggcggccagcagggagaccggccagcagccatggtgtcctccccttcttcccaagcaccgtctctgcttcagccgacctcctctgtgcagcgacccctcccctggctccatagcgcgcaggacatttctctgggtcgagctcgagcagaagaggaaccccgtgttttgcgtggagaagaaggcaagccgctcgacgcttgtcgatgttcgtagcgatgcacaaatcggaatcgccatcgtcctcacaaacaccgattgggtttgtttatggaccgagaaatgacgatcgtgcaagtgatgtggtgccgcccccaagatgcagtcggcggccgaaccaaggaaggatggacttaagtagtggatgctcgccgagcgagtatctcccccagcaaacactatctaagtgtcaaattaaaggtactccttaggatgatttggttgatggtgtgacttggcctccatccctgccaccgggatagacggtcgagtgggttactgcttccgcaggagaggaccaggaggagtagcgtggccaggcttcgccatgatactcggttttctccgttagttatttccgctgcattaaaatttatggttattatttttgaaactccgataatgtaaccactattaatacttcttaaatttgtggtacaaaaaaaaaaaaaaaaaaaaaaaaagggcggccgccgactagtgagctcgtcgacccgggaattaattccggaccggtacctgcaggc

SEQ ID NO: 82637 - DNA, 651 bp, Zea mays
  Clone ID: MRT4577_17537C.1
aaattccagtgtgtctaactccggcggctccacgactaggaactcgtgatgggaggccacctcgactactgccatgtggaggcgcggggattgactgtaccagaacaatggggagacctgcgcgtccatcgtcggcgtcgattactgtggcgccgcattgttacaaccgcctctctgtccgatacagcatcctcacgcgcgagcactactatcatctgaaaactggatgactattgtgtactactatcttctggctttgggatgatattagaatctgcacaatgacctagctgctacagaattgctatacaaacagctgcataacacaacgatgacatgccctgccatggcacagctcctctccaatacactgtactatggagcttcttcccatattagatcatctatgagctctcgagggcttgagagcaaagtgataggcagagctgtcacctatgatgaatgacgatcctatgacagaactgggtatagcgttcatgcaacgagatactactttgactatgccagactctgtgcaactctatatcatcacctagacctctattgctccctgaagatgatgctgtcacaacattgtgatactgcgaggccatcgactacaatgatgatgtgtttgcatcgtgaactgat

SEQ ID NO: 82638 - DNA, 214 bp, Zea mays
  Clone ID: MRT4577_175380C.1
acgaaaaaataaacacgttcgatagcgctttctcattcgatgaccgaagctcaagatagaggaagcgccaattcctgatcactggaggactatactatcttattcaagcacggcaactgatgtaacaccaattgacaataagacgggtgtacctcttctgagatgaaagcttccctttctcgtcaggtccagatataccctttcaacctagcac

SEQ ID NO: 82639 - DNA, 1748 bp, Zea mays
  Clone ID: MRT4577_175381C.1
tttccctagccgccatttcttctctccctggcttctcccccacgcgcagcaggcaaagcgcagggagcaaggccagccatggcgcggcaccctccctgcttctcctggcgagcggctgggacagggggccttcttccccaacgccacccctgctccatccaacgcgcggcatctcctctggtccgagctcgagcagcgagctcgccggcatccatggcgtggcacctctgcaccttcacctccagcagccatggcgctcttccctgttctccagcgcccttcctccctccctttttctgtccatggcgagcaggagcttttccctcccatggcgagcagctttcctgcccatggcgcgacgccgctgctctctttttttttccatctcactgtgctctcttggctgccagcagccatggcgtggactcctttttttttcctggcgcagcagcaagctcccccatggcaggcgcccaggcaagcttccccaatggcgccagcagcagggatctcttccccctccccatggcgcccagaaaattccagccggctcccccttcttcttcctccagccagcagctcgtccacctctctcccatggcatttccccctgcgagcagcgctttctccattgtcttcaacctccggtcgctcccatctcgctgcagcaccctgtccatttttttttcacccagccgattccctctactgtccaaggcgcgggcgctatttttcccatggccgagcaggccccttgcagcgagcttctccttttcccagcgctgcgcagctcctccatggtgaaacgccgttgttcctgcagccccgacacctccccttgcttcctcgctgccagcgctgcgcgcgtgccacgtgctcggcaaactgtccaagtggggtgttgcgcagcgaacagcacgtcgggatgcccgccgggtgtttgctgttttgcgcagccccgtcgtcatcgtcgttcgccccggtgagaccgcgacgcctcttgctcgatttccgcatcgacgttattttcctataattaatcatgaatgtgtgctgctttgttttgttttgtggaggagaggaaccccgtgttggcgtggagaagaaggcaagccgctcgacgctcgtcgatgtttgtagcgatgcacaaattggaatcaccgtcgttcttgcaaacgtcgattgggtttgtttatggaccgagagatgatgatcgggctagtgatgtggtgccaaccacaagatgcagtcggtggacgacccaaggaaggattgacttaaccagtggatgctcgccaagcgagtgccacccagcaaacactgcctaagtgttaaattaaggaccgagagatgatgatcgggctagtgatgtggtgccaaccacaagatgcagtcggtggacgacccaaggaaggatggacttaaccagtggatgctcgccaagcgagtgccacccagcaaacactgcctaagtgttaaattaaggtactctttaggatgattggttgctggtgtgacttggccttcatccctgccaccgggatagatggtcgagagggttattgcttccgcaggagaggaccaggaggagtagcgtggccaggcttcgccatgttactcggttttctccgttagttatttccgctgcattaaaatttatggttattatttctgaaactccgataatgtaatcactaatgatacttattaaattgtggtattatgttttaaaaaaaaaaaaaaaaaaa

SEQ ID NO: 82640 - DNA, 152 bp, Zea mays
  Clone ID: MRT4577_175382C.1
tcgcgacccgtcaattttcggttggccttttaaaacctgaaaggggcccactgtttaacggcctttggaacctggggtttttaccttcggtttcgggatttcggggttaaatgggccccttttatttttatttaccttaattccttttaagg

SEQ ID NO: 82641 - DNA, 1043 bp, Zea mays
  Clone ID: MRT4577_175383C.1
gaggctgccctctgctcccggcgctcggcatccctgcagcggcgtcatccattttttcccaccgtttcttctctctgttcttgtacgtgcgcagggatcttccatggcttaagcccgagctccctgcgtctccctccattgggttctatcgcgcgcacggcagcaaccacaagcagattttcctccctacctcccatggccgacctccactttccctgtccgtagttgctgttccctgcgccctattttttctctcccatggaaagcagcagcagcaatgtcgcccagctctaggcccctgctcctcctctcttccccacaaaacagcagccgcagcgagctcgccgtcatccatggcgccccctgcaatctcccccttggctgttcgatggaatgcccatgggaaatttgtgttgtgcgcagcagccccgacatctccacgctctgtcggctcgctgttttgtgaagccagtggacagcacgccgtcgacgcccgccgtgtgctcgctgttttgcgcggcccatccgcgacgccgtcgaaaaccgtgctagtggtcgacatcgtgccttgcccgttcgacgaaataccgagccatgtcgacagccatgcgtctagtcacgacccgttcaggaccgagagatgacgatcgagccagtgatgtggtgccacccacaagatgcagtcggtggacgacccaaggaaggatggacataaccagtggatgctcgccaagcgagtacctcccccagcaaacactacctaagtgttaaattaaaggtactccttaggatgattggttgctggtgtgacttggccttcatccctgccaccgggatatatggtcgagtgggttattgcttccgcaggagaggaccaggaggagtagcgtggccaggcttcgccatgttactcggttttctccgttagttatttccgctgcattaaaatttatggttatcatttctgaaactccgataatgtaatcactaattatacgtattaaatttgtggtattatgttttggtgtttaaaaaaaaaaaaa

SEQ ID NO: 82642 - DNA, 1542 bp, Zea mays
  unsure (1)..(1542): unsure at all n locations
  Clone ID: MRT4577_175384C.1
ggtgtttgtcgtctttttagtggtgtaatgttgtgcgcttgacgatatgtagttagctaacgctagtgggtgtggttgcttgtgatgtctcgctacttagtgtttaattcgctagcgtgtacttaaagtatcttgtgctattccattatattcatacatatgcatcttgcacctcatataggaccgagagatgatgatcgagcaagtgatgtggtgccaaccaccagatgcagttggtggacgacctgaagaatggacttaaccagtggatgctcgccaagcgagtacctcccccagcaaacactatataagtgtcaaattaaaggaaagccccggttttatgcataaccgtttatatatgctattttactacacttaatgtttgtaggcttgtattgtgcacttaagtgtaggtgttgactgaaaccttagttgcatgaactcaagattccttttgagatgaatactagtatgctaggtcgagtagctgctttactaattagggatctcggtagatgtcgagtgatttttctagcactcgcgcgaggtcaggaattggttgtatccatcttataatgggatatatgttagtctatggatttggatccatggggatgcgttgtccatgagacgggaaaatgaattaaggattaacgtgcggatacctgagtcaagcgtttgaatgtactaaacacatgtcgggaaaaatggtaaccggtaaacctagtacctgattgaagccgggcgcggactttatctctcatgcgacctgagactgggtctcccattctagctatggtgggtacaagtgtggccactgcacggcggcggccggggtcagtggagcattgtatgccaaggcggtgaggcctggacgcgaacggggaatcgatggggacggttgtcatgtgtggggtcggagtaccctgacatgtcgtgtgtttaggtttaccttgcaaggtttaaaaactcgattcgaatcgtctgcttctcgcagctaatgagactgcttgatccattgtactgcattgagtaataagtggaaatgggatactggcaaaagatgttgattgatataatgtttgataccatgtatgaatagataggttctcatctagtctaaattattattctagaacttgaaaagctaaaacttgtttttagactcagctagtgcttttggcaaaccaaacccctcagccaaacaactgcatggtctagaggtagaggagtagactcctcacaccgtgtaagtctagctgagtattagtatactcagccttgcttgtggcataatttttgcaggtacctccttgatttggttgatggtgtgacttggccttcatccctgccaccgggatagacggtcgagtgggttactgcttccgcaggagaggaccaggaggagtagcatggctaggcttcgccatgttactcggttttctccgttnagttatttccgctgcatnttaaaattttggttactgtttctgaaactccaataacgtaattactactgatacttattaaatttgtggtatt

SEQ ID NO: 82643 - DNA, 871 bp, Zea mays
  Clone ID: MRT4577_175385C.1
attgggtccctcgaggccggccggatcttccacacaataacttccgccgaagaaacaagcagcactatgaacgcagcaccagtttcatcgatggcgcaacctacccctttgtatgacctcgtttgcattggcttcggggcagcgcagctggctacggctattgcgaatagcgagtctcgagcaccgttgaaagtgcttttcatcgaaaagaagccgtcattctcatggggctcgacttcaaatttatcaaggacacgaatggaaagcccattcatgtacgacctggcaacacttcggaatccgagaacagcctttagctacgtcaactaccttctaaatcgcaagcggcttatcgagtttgcaaactccgaccgtctcaatcctttgagagaggaatttgccgactacatgaagtggagtgctgagcatttcaagaacgacgtacgatatggtagcgaagttgtcggggtagccccagaagtcgaaagagatgttgtacaaggctggaaggtagccgtcaaagataatactggaaaaacatgggtggtgcgagcgaggagcgttgttgcaccgtctccgtcccggaccagtggaccaaccgcacaatcactaccgacaacaaacttcttagcgggccagcgtatcatctccatggacgattatccttcacgaagaaacgagctgcgaggtgccaatgagccacgactcaacgtatccgtagtcggctctggcgagaatatggtagaaatcgtagatgatctactatcttgtcctcgcctgggcaacattacagtagttacggaaagcgattcgcttgctccgttgaggattctggacgatgcaagcctccacaacccagctgtgctcgatc

SEQ ID NO: 82644 - DNA, 1444 bp, Zea mays
  Clone ID: MRT4577_175386C.1
caaaaattttcagccgccattctctcttctccctgtcttcttctccctcgcgcagcagccctctcacacggcagcagcacgccagcgcaggggcagcggctccatggccgagcgcccttcccagtgctccagccggcctcctctgcctgtgctcctcatcccacacagcagcgcgcagggagctttccccttctccgcggcgtccggcagcagggaacctttctcccctacgtgcaggagcttccaggccgcccagcgccccttcttcttcatggcaggagctcctcccatggccgccgacgccctactctcctccatggctggcagcagcagggagctcgacgcccctgtacagcccccacaccttcttcctcccacggctggcttcccttctcccctcggctccttcctgcaggggcgagctccatctctgcagcagccgagcacccccacaaccaaggcgcccttccccagcgacgcccctctgcagctcgcccctctctgtccatggccgccagcaggctctccatggccggcgcccccttccggcgagcagccaagctcccatgagcgccaccccccctgcagcttccccttgccggcgcccagaaaatgcagcagcaacaacctcctcttttccccccacaaaacagcaagccccggatcccctccacatcgcgtgcttcgttcgatctgcgcagtcccgacccacatcgtcgagttggtgtttgggacagctccatgccgcgtcatcgctctgcgcagttcgaccgtttatgcgcctcacttcgccggatctgcgcagccccaacatcgacgccgttcaccctcggtgagacgacgacgatccttattgattccacatcggctttgttctccggtgattaattgtgtatatgtgctgtttttgttttgtttgtggaggagagaaaccccgtgtttaggagaaggcaagtcgttcaacgctcgtcggatgttcggagcgatgcacaaatcggaatcgccatcgtccttacaaacaccgattgggtttgtttatggtgagccgatgaccgagagaggatgatcgtgcaagtgatgtggtgccacccacaagatgcagttggtggacgacctaaggaaggatggatataaccagtggatgctcgccaagcgagtaccctcccccagcaaacactgtctaagtgttaaattaaaggtacttcttgatttggttgatggtgtgacttggcctccatccctgccaccgggatagacggtcgagtgggttactgcttccgcaggagaggaccaggaggagtagcgtggctaggcttcgccatgatactcggttttctccgttagttatttccgctgcattaaaatttatgattattatttctgaaactccgataatgtaatcactattgatacttattaaatttgtagtattatgctttattgt

SEQ ID NO: 82645 - DNA, 279 bp, Zea mays
  Clone ID: MRT4577_175387C.1
ggataactcatgcaacacactcagctatccagcaaaagagatcgagaggcaggagtcatggccaccgtcagcgccgccgtggtgaccaccatccttgcccgcgccccgattgccaggcccaatgctctagggctgcctgccctgagggccaggaaccagagggtgctgtgcaactacgccaaggacgccggcccagtcagcaccaagggcgcaggcccgtcgctgctcggcgcaacgggcgcggtgaccgcgtccggggggcccgcgcttgggctcctt

SEQ ID NO: 82646 - DNA, 744 bp, Zea mays
  Clone ID: MRT4577_175388C.1
ggccgcttttttttttttttttttgagtataattagtgattacattatcagagtttcagaaataataaccataagttttaatgcagcggaaataactaacggagaaaaccgagtaacatggcgaagcctggccacgctactcctcctggtcctctcctgcggaagcagtaacccactcgaccatctatcccggtggcagggatggaggccaagtcacaccatcaaccaatcatcctaaggagtacctttaatttttaacacttagatagtgtttgctgggggaggtactcgcttggcgagcatccactggttatgtccatccttccttgggtcgtccaccgactgcatcttgtgggtggcaccacctcactggctcgatcatcatctctcggtccatatcaaatctccgtcgtggttgctgcacatgtggcgtgaagacgaactcgtcgtcgcgcatggacgaccaaagcgaagccggagggcgtggctcgctgcggcgattcgtcgagcactcaacgcgcgaggcgaaggagcatgctgctgcggcgtgcagcttgctgcacagatcggcggtggagctcgctgctggaattttctgagcgccctggacagtgagctgggtggccagggaggaagggggctcggccatgggcgacggcgactcgctgcgggtgctgtttggggggggaagatgggggaggaaatgggagcagcgacgctgcgcatggatgctgctgggcgccg

SEQ ID NO: 82647 - DNA, 353 bp, Zea mays
  Clone ID: MRT4577_175389C.1
gatgaatgatatttggtcgttacaaacaggaattaaactaaatgccaggcatatgcgaacaggtataaccgacaacacattagagcagcttgtggaacgcaaattccggtcgccagactaattcaagcggtcataagcaaaatgcgcggagggggcaaaccaagctggggaggaaccatgccaaccgtttttggcatacaaccacacagacccgttgaacagaactatggaagccaccgaatggctgcagggacaaatgaacaggggctcggagaaagggtgatcacgaggacgcaccaacagacaatttgggaggcttttcttggcccccgcccttgaccaacaacccaggg

SEQ ID NO: 82648 - DNA, 489 bp, Zea mays
  unsure (1)..(489): unsure at all n locations
  Clone ID: MRT4577_17538C.1
cccacgcgtccggggccgcgtgggcgggcgcgcgggcccgcacgctggcgtacgcccggagcctccgtctggacccgacggaggaccagctggggctgttcatgttcgtgctggtgccgcaggtcgtgctgatgggcctcgccgacgcgttccttgtggtgggcatgctcgagtgggggggggagcgggcgccgggaggcatgaagagcctgggcaccgccgtgtccgtcacggggtacggcatcggcaacttgctcaggagcttggtgctgtccacggtgacgcgcatcacangtgagtgcggcaatgcctgggtcanaaacaacatcctcgacttctacctcggctactactacgccttcctcaccgtgctcgggggcgtctgcttcggcggcttcctcgtgctcagggccatgggcgggtgcgggggcgngtcccccgtcgccatcggcatggggatccggtctggcgaccgtgaaggccaagctt

SEQ ID NO: 82649 - DNA, 656 bp, Zea mays
  Clone ID: MRT4577_175390C.1
gccgcacctcactgttgcatgttccgctgcgcgcgtgccaggcgttcggcgaaatgtctaggtggggtgctgcgcagcgaaccgcacgccgtggtgcccaccgggtgcttgctgcttttgcgcagccctgtcgtcgtcgtcattcattccggaaccccgtgttttgtgtggagaagaaggcaagtcgttcaacgctcgtcgatgttcggagcgatgcacaaatcggaatcaccgtcgttcttgcaaacgccgtttgggtttgatatggaccgagagatgatgatcgagccagtgatgtggtgccaaccacaagacgcagttggtggacgacctgaagaatggacttaaccagtgggtgctcgccaagcgagtacctcccccagcaaacactatctaagtgttaaattaaaggtacttcttaggttgattggttgatggtgtgacttggcctttatccctgccaccgggatagatggtcgagagggttactgcttccgcaggagaggaccaggaggagtagcgtggccaggcttcgccatgttactcggttttctccgttagttatttccgctgcattaaaatttatggttattatttctgaaactccgataatgtaatcactgattatacttattaaatttgtggtattatgtttt

SEQ ID NO: 82650 - DNA, 318 bp, Zea mays
  Clone ID: MRT4577_175391C.1
cataacttcactcaacaacacgggagtttcaaataattttctgtcttacctaatcccccttaacatcaatcacttcatatacattaataccacaacttttcaacacattctttcatacattaacaacctacttctatttaacatctacaaaattattactaaatttaaaacccatcataatttcatttctcaattcaatctattatttaaaacactctcattatcttttacaatccttacttcatttcaactcttatccttaccacaaaaactcattctattttcaacataccattttctcatataatataaattatc

SEQ ID NO: 82651 - DNA, 381 bp, Zea mays
  Clone ID: MRT4577_175392C.1
cagcaagcaacacaaaaagaggtatccaaccgcatcaatacagcaacacaggagatcgagagcactttcctccgtatgcttcttgctgtgtgtacatgtgttgctaacgcgacaatcgctgcttcaatgctcacaagctggctactgcttgcgtttttccacgataccttgcatcaattatagcttcagtatgtgaaaacccagctcttcaacgcatataggctgcaacaggcaattgcagcaagcaacatacactcatcgaccttggccgtcgacaatctccagccctatctttggtgcaggcattgctacaagccataatggcgcaacagctgcagcaactcgtgctacctgtgatcaatcaagtgggtctggcaaacc

SEQ ID NO: 82652 - DNA, 392 bp, Zea mays
  Clone ID: MRT4577_175393C.1
cacatgttgttgacatttagggtttagagctgatgacgtagtcgtccggcctgaatgacgtcgtttttaagtcaggagtggaggatcggttttaacgtttattacctcacgtacgttttctggtaaggttgtagatgctgccgcagtcttcactaacagctatagaagatgagagaactcgagccattggaggcccgatcggagccgtcacaggatcgacactagtggcgcggaagtgattagggatcaggtccaactacctcaatgatgatcgtcgtatcttcgactcagaccacttctttcttactcttttttgttggaggaggggaatttagcttctcgctgggaggtggaccctagggccgcttcgagaaataggttccttatcatta

SEQ ID NO: 82653 - DNA, 582 bp, Zea mays
  Clone ID: MRT4577_175394C.1
ggggggatgaacttaaatgcgccatagggcaacctaacttacttatataaatgtctcactgcggccccgataagcgttaaaggtggcccggaggattacaaatgacgcccacaccctactcatcaaaaaatttccaaatatccaaacttgagggatgtggctttagtggtggttcttaccatcagagtcaacgctgcgaccctgtaggccccaggggaggtcaccggccgtgttatatatatggtgttagtggggtttgcttacttgggttaatccgggtttgcacagttgggccaatgcaccatggctgtgagtggttgtatctatgtagtcgacaagcgtttcccccaaataaaaactggcggggatttgtgggcattggcccgagaagtgcaccgagttggttactatcactactcatcatgcccatgttacaacttagccgatgttactgtgatggctttctcccgtggccgaggtgcatcctaggctaaagatagttctatgcctagttgtggctcacactgttgaattggccactaggtcctaaaaatgctacctagctttacaatggggggttaa

SEQ ID NO: 82654 - DNA, 272 bp, Zea mays
  unsure (1)..(272): unsure at all n locations
  Clone ID: MRT4577_175395C.1
ttgtacccaataatattctttattatcattattcagtgcataagtttaattttgatgggacccaaaaggtcaccctagtctgattatcttttaccttgttacccctgaatcacttgagtagttttttattgctttatatggttttgggttaatacttcattatatccatgttccaattagtatgttattttatttatgttcatgtncaagatcattaatgttaattggaacatctaggttaacttgagaaacatgtgtcaccaaaagggatt

SEQ ID NO: 82655 - DNA, 273 bp, Zea mays
  unsure (1)..(273): unsure at all n locations
  Clone ID: MRT4577_175396C.1
cgcaancacagccgcgcgctatgtcagcttgctgcactgcactaccctgacctgccatcatactgaacgtgcagccccgaccgagcgagagcgaggcagaggcttgggtggtccgtaacctcgcgacgctggcgctggccgtgctcctggcggcgaccgacgtggctatcccggccgaggcgcgcgccgtgacgtcttgtggcacacgagacagcacgctggtgccgagcctgccggggtccatacggcgcagacatgcgcccccatgcgggc

SEQ ID NO: 82656 - DNA, 350 bp, Zea mays
  Clone ID: MRT4577_175397C.1
tttcttttttttttttttttatctttttttttgggtaaaggggctgttggtttttctcacaaaataatcccgggcgcgatgtttaggggcaattggggggggcaccccccaccccaaccaactggagaaaaaccccttcaaaacccccctcccccgcgggggtttcccaaccccctagatttggggggggcccccttccccccccatggtttcttcccgacattataagccctacgagcttttccccgccccaactggccccttggatgccttgtgggggcccccctctttaggagggcaaaaccggccttcaactaaaaaaccccaaccaacttccagtcccccgcccc

SEQ ID NO: 82657 - DNA, 325 bp, Zea mays
  Clone ID: MRT4577_175398C.1
cattgggcaaaaaagaaaatgggactaaaccttttagggcacccaacaaagggctttcatgggaaaacggtaataccccaccattgaccacatatgtcttacgggagaaattcttaagccaagtgactcccaaaaaacttacaccctttggggccacccaaagggcaccttggttgtcgacccccccaaacttaggcctcaatggtcccggacctttttacttgaaggcccaatgggtctccctgggggtcttcattttctccaaggggggaaaagcattgttccaagcaaagggcttgcaaaccttttatggggtcgtggcctt

SEQ ID NO: 82658 - DNA, 320 bp, Zea mays
  unsure (1)..(320): unsure at all n locations
  Clone ID: MRT4577_175399C.1
aattctnatcacacacagcaatccacacaagcacttcgacgtcacacgggcgctgcacacagacacaccaagcgtcggcaccaatggcttactaccaggaggtggactactgctcggaggaggtgaggtcggtggccccggccgccttcaccggagattgaggaaggagctgaagaagagcctgagaacaatgaagatgcccctgatgacgtcataggcggtgagggagaagaaaaggaacaggaaaagaccaaccgtgaactcaattctttttttacttgacgaaataccaacaagagaggaaacacgggaacaccccc

SEQ ID NO: 82659 - DNA, 368 bp, Zea mays
  Clone ID: MRT4577_17539C.1
cccacgcgtccggccaattactaactaaactttgttatcccttccaaaggtttagaatattaggtcagatcatacgcttatatgtataataagtcaatagcacgtgcaaggagcagctgtaaggtatgcgcttgtggacactacttgtttgcgtcactccaaagtaaattatgtgagatagtaatctagggaagtttgttatcatctgtgatatgctagagcttggacatcttcatgtcagctggccagcgagcttataattccattctgttgaattgagtgaatagctagctggttgcaccatctatttattggcaccaatttaatggccaccttatagtccacttgcatagacaggttgggctttc

SEQ ID NO: 82660 - DNA, 276 bp, Zea mays
  Clone ID: MRT4577_1753C.1
accacgcgtccgactgtcgacgacggagggaacagggaggaggagtctggctcacatttctccttactgtcacgtcttcagtatcctttctttgccattttcgctctgggtaggttgatgactaatgttaatggtcttgcattgtaactcatcgataccttccgcagtgggaggatgatgacatctggtaaggctgttaattatgcgagggccttggatccattccagctgattcttactatggattggcccacgtacctgttcaatgctgctagt

SEQ ID NO: 82661 - DNA, 621 bp, Zea mays
  Clone ID: MRT4577_175400C.1
ttttttttttttttttttgcgtgctgatataagtacttacattactaatttatgggtacaaactagagacaatgaaattaggaactggacatcgattggatgtgtacaaaactcacgcactaaactaaactaaggatgataatgatgatagaagcggtgacctactagtgccagagctctctcacatgtgtggagtttatgaaagagataaacctcgtcttcctccgtaaattccgtaaatacagagatgctgctttgaacgcgtggtagtactaccaccagacctacgacagctgctttgtccgttggtggatcaatcctcctcgttctccttgtccaagctccggcctttcaggttcagggacatgctgttcagtctcttcgaggtgactgaaatctccgagcccgcgttgctctgggtgtcgatcgaagacagtgtcaccctcgacatgtccccggaccgtggtcgctggaacgacctgtgatgactgctgccgctgcatccactcagcctcgccttggcagacttggtcaagctcatgtagttcgggcctccggtgtcgccactgtctgatcttgcttctgacgctaagacagtgttggtggtagcagacgtcagcg

SEQ ID NO: 82662 - DNA, 311 bp, Zea mays
  Clone ID: MRT4577_175401C.1
ctaaggttttttttttttttttttttttttttttttttttttttttttttttttttttaaaaaaacatgaaacgggaatttcagttcttatagcattatcttgaatttcaaaacataacaggggaaacacgaatcaatcataggccccatggggttcacaaatccacacctaaaccgctaaattaaactgggagcgatacatgataaactaaaaccccccctcaaatcaccaccatttttttcaaatccaaaggaacggacccagggggagtccacgatgacggagggagggcggcccaaccaaccaaatc

SEQ ID NO: 82663 - DNA, 417 bp, Zea mays
  Clone ID: MRT4577_175402C.1
attcggctcgagcctaaggcgaggagccagccgtccctctcccgctgcttgcactcccgacccgttctttctcgctctaacgccgccctctagtgcggaggcctacgtcggttactatccccgtgcctgatgctcgtccctttatcggctgatggaaacaccgtggccactaggggcccccgatgaggccattccagacgaaagtccaggaccggctgatggggttcatgcgcatcaaccgggccggtgaccccctttgatggtgggctaaggaccagccccccactgagtgtgacgctaacagccgtgatcgccgctatacgtacggacagcacatcgggaccgattggccctgatacgacgcccagcagttactgggtctgattaccggatccatcaactagaccgacagtctat

SEQ ID NO: 82664 - DNA, 683 bp, Zea mays
  Clone ID: MRT4577_175403C.1
gccgcgctgtacttacagctgttcgagttcgccgacaagtaccggggcaagtacgacagcagcatcgcggaggtgaagagctactacgcctccgtcagcggctaccacgacgagctcctctgggccgcgctctggctccaccgcgccaccggacgcgccgagtacctggactacgtcgtcgacaacgccgacgacttcggcggcaccggctgggccatcaccgagttcagctgggacgtcaagtacgccggcgtccagatcctcgccgcaagggtacgcgtgctagctgcgtatatgctactgttttttttcctttctttctttctttctaccctgaatatataatatatattaaaaggacgtacatacaatacaagtgcttacgtgtcgtcgcgcgcgtggtttcatttcagctgctgctcagcggggagcactcgccgcggcacagggagacgctggagcagtacagggcgaaggcggagcactacgtgtgcgcgtgcctgggcaggaacgccgcggacggcaacgtggagcgcagccccggcgggatgctgtacgtgcggcagtggaacaacatgcagtacgtgacgagcgccgcgttcctgctgtccgcctactcgggctacctctcctcgtcgtcgtcgtcgtcgtccgtgacgtgcgcggcgggcggcggctcatcg

SEQ ID NO: 82665 - DNA, 329 bp, Zea mays
  Clone ID: MRT4577_175404C.1
tattgcggggacggcgcgctcactgggcggtggccgccctcaacaggttgttatgcacaggccggaagaagggacataccacattgacggcgccaggagacatgctgtgttgagcaggctccacattacaagaactgcttagcgcgtagatacaaaactaccggagacagaacaggtatagcgaggcctatttacggacccagtaatatagggcctcaaatgagtaggacccttcttcaggccgggcaaaaaaaacatgaagatggtggttagctatctagtagcgttccttatcctgtaaagcacgaatggcccgcttactgacagcc

SEQ ID NO: 82666 - DNA, 749 bp, Zea mays
  Clone ID: MRT4577_175405C.1
attttgagcatgcattatgtgaagattctgtgctgaaccacttcagaagcgtgatagcaaagtgtaagaagtttgcgaagccagatctcaaagcttgcattgaggaatttgaggagaaagttagcaaagttcatgaggaaaagaaagaacaagaagccacggcaagaaatgcggaggcacataagcagaaaattgattctcttgataaaatcctactcgctaaggaagctggacagaatgacagaaactctgctgaggaggaaaccagtgaggttatcgatccttcagtggatggcaatgttgaagacaaggagacagaggaaactagtgaggttaccgatccgtcagtggatagcaatgttgaaaataagggggcagaggaaggtactggggacattgacccttcagtggatagcaatgctgaaaataaggagacagaggaagctactgaggttactgatccttcattgggaagcaatgctgaaaatgagacagaggaaggcactgaggttactggtccttcagtggatagcagtgctgaaaatgaggagacagatgaagctactgaggatattgatccttcagcggatagggctgctgaaaataaggagaacaggacaaaaggcagcggcaacatttgttccggaaaaagtcagacatcatccactgttacggagtcagaagatgatagcacagaggttcaatcatccaaaactgtccgcagtcgcaagggttcgacgcgatcgact

SEQ ID NO: 82667 - DNA, 709 bp, Zea mays
  unsure (1)..(709): unsure at all n locations
  Clone ID: MRT4577_175406C.1
cccctttgtgacttcaacacgcaaccccgaatagagtcgagcgagagagagatagccatggcgattggagctccgtctcgccgctcgatctagtgttttggtggtggctcgtccgcgctctccgtcgtgttgccccgcttcctccgcctcccttctgttccgccgtcgggatctgcggcatctctcggccccgcaccgacccgtccccatttccgccgctggcaattttggaatttctacactgtaattctcggtgggttatgtagtgaaataaaagagatgtagactgttatagattaaagtatggggaaactcatgaaggcttttggtaagggaacttctgctgcttgtgttgaagattgtgatgattcagatggggatccttttgtccccaatgattttgccgaggatgatccttttcaagctttggaggaaggtcaaatggatgatccttatttggagaaagctttgtatgagttctacgtgtctcataaagtgaattgcttaaaacggaagattacaaatgctggagctcgcaatgtgatttcttcaggcaggagggagacgataggaggtgatgaacgcataggagggggcngagaaggggtgtttacctatgtttttcctgcttctctagccatattgttgaagtttgtgtaccagatcttggaggaatcaccctctctggtggtgcttctccatgttcgtc

SEQ ID NO: 82668 - DNA, 354 bp, Zea mays
  Clone ID: MRT4577_175407C.1
cggatccaggtcccacactggagccaggcgggcaagggtcgtcgttgtacgcaaagccgccttcgttgctagtgctgccgccgaagctgccaatgatgctagtgcgacggctttggagatgattgttcaaattgagaaggcgaacgccgaggctaccaagaaagctcctagacctctgcgtcgtgattgcaaatgctaaagagggaaaagggagggaacaccgggagtacctcgggctctagtggtgaatccaaccaggagttgtccacatctgcaatggtgagggaaaagttcgagttggcacaccttgtgctgggggctggggcagtgaggcaagagtctgccgcgagcaca

SEQ ID NO: 82669 - DNA, 516 bp, Zea mays
  Clone ID: MRT4577_175408C.1
acaccatatatccagctcgatcgatcgacgataaacaacaacacatggcgcagcagcagcaggcggtggcgctgctgatgatgctggtgctggctgcggagacggcgtcggcggcttcgtgcaacgcggggcagctgacggtgtgcgcgtcggcgatgttgtccggggcggcgccctcggcggcgtgctgctccaacctcaaggcgcagcaggggtgcttgtgccagttcgccaagaaccccgcctacgcgcgctacgtcaacagccccaacgcgcgcaagaccgtcgcctcctgcggcgtcgccctgccgcgctgctaattactcttacggtatatgggcgtatctgcgaggaataaaggatgggttattcgtccatgcactttgccgtctgcctggctgctcccatccctgcttatattatatatgctctcgtatatgcacgtttgtgtaatgtgtgcccatcgatataaatatatttatatatatatatatatataccggtccagtttgtcac

SEQ ID NO: 82670 - DNA, 850 bp, Zea mays
  Clone ID: MRT4577_175409C.1
ttcctaccgctacccgcgtccgcgcgagcaaacaccggctcaacaggcctctccaatcagtgggcgctgctacgtgggctcgtcaaagtttttgttgccgcgaggggcaggaaggcgctgctttggaacccatcttacacctggtggaagtggtggtggtggccggtggacgccatgagctttgtgttccggggcagcagggccgacatcgaggccggtggcttcccagggtttgccgcggagcgccgttccatgcggattcatgccggggggcggccggtgaacagcaattccttagcttttcttgtaactgttcttgttttgttcatggtactgagctcgcaccagatgtctccgaactttttgctttggatggtcttaggtgtgttcctattggccaccagccttaggatgtacgctacatgccagcagctccaagcgcagtctcaagctcatgctgcagacggcaacggcttccttggacgcacagagttgcgggtgcatgtcccgccaaccatagcccttgcttcgagaggccggttgcaaagccttagactccaacttgctctgcttgaccgcgagtttgatgatttagattatgatgctctcagagcgctagatactgacaatagcccacatgctccttctatgactgaagaagaaataaatactctgcctgttttcagatacaaatttcaggcgcagcagaggagcaccccttctcgaaaaagtagtgatgggccatctgaaccattggtttcttctcctgaatccggcaaggagaaaaagcaagatgcagatgcaacaagcaaaatgacagatgatgagttgacgtgcagtgtttgcttac

SEQ ID NO: 82671 - DNA, 658 bp, Zea mays
  unsure (1)..(658): unsure at all n locations
  Clone ID: MRT4577_175410C.1
cggtctcgaaatccgggtcggaccagcgttttttccgcgtccggcggacaccacaaataaacaccatatatccagctcgatcgatcgacgataaacaacaacacatggcgaagcagcagcaggcggtggcgctgctgatgatgctggtgctggctgcggagacggcgtcggcggcttcgtgcaacgcggggcagctgacggtgtgcgcgtcggcgatgttgtccggggcggcgccctcggcggcgtgctgctccaacctcaaggcgcagcaggggtgcttgtgccagttcgccaagaaccccgcctacgcgcgctacgtcaacagccccaacgcgcgcaagaccgtcgcctcctgcggcgtcgccctgccgcgctgctaattactcttacggtatatatatttaagccgccatgcatcacgtacggctgctgccagcgccgctctctcgggcgtatctgcgaggaataaaggatgggttattcgtccatgcactttgccgtctgcctggctgctcccatccctgcttatattatatatgctctcgtatatgcacgtttgtgtaatgtgtgcccatcgatataaatatatttatatatatatatatatataccggtccagtttgtcggtggttttttnntgttatttggtgaataaaaa

SEQ ID NO: 82672 - DNA, 730 bp, Zea mays
  unsure (1)..(730): unsure at all n locations
  Clone ID: MRT4577_175411C.1
atggccttgcccctgctctagccgcgcgcctcctctagcctttcctcgttgcgcccccttcttcatcctcgccatggacgccatccatgttccttgccgtcgacccgtcggcgtcctgcagcacagcgcctggacgttgtgtccaaggctcctcctctccatgcacgcatagagtgcaggcgcctaggactcccatggccgccagcctctccattgcagctgagctcccttacttccccagccatggagccgaactccatctccccatctccctgcgtacgtgctctattggaggaagaagatgactccctgagccaatgacaagtgggcccagggcgtatgaccgagagaggatgatcgtgcaaatgatgtggtgccacccacaagatgcagtcggtggacgacctgaagaatggacataaccagtggatgctcgccaagcgagtacctccccgagcaaacactacctaagtgttaaattaaaggtactccttaggatgattggttgatggtgtgacttggcctccatccctgccaccgggatagatggtcgagtgggttactgcttccgcaggagaggaccaggaggagtagcgtggccaggcttcgccatgttactcggttttctccgttagttatttcctctgcattaaaatttatggttattatttctgaaactccgataatgtaattactaatgatacttattanatttgtggtattatgtttg

SEQ ID NO: 82673 - DNA, 1144 bp, Zea mays
  Clone ID: MRT4577_175412C.1
atccttgcctccctgctcccacacttcagccatggcgttcttcacttcccagctccacgggcacgagtctccactcccctgcaatggatgctgaccaagactccgcctggcgcttgctcccccagccttccatggcgtccctgctcctcctctccatggccaacgccctgctcaggtgatgaatcccgcgctccctgtgccacatctccagccggcttttgtttcccttgctctacggccagcagcaaacctccatggacgcccccctatttttcttcctagcacagctgttgggagcccctgctcagacagcagccatggcgccatgattctctgcgcatcgatgccggtccaaaaacagcagccccggatcccctccgcatcgtgtgcttcgctcgatctacgcagccccgacccacgccgttgcgttggtgtttgggggacagcccatgcctcgtcgttgatctgcacggttcgaccgtctacgcgtctcacgtcgccggatctgcgcagccctaacatcgacgccgttcaccccggtgagaccgcgtaaatccttgttcgattccgcatcgacgttattttcacgcgattattgtgtatgtgtgctgttttatttttttgttttgtggaggagaggaaccccgtgttttgcgtggagaaggcaagccgctcgatgctcgtcgatgttcgtagcgatgcacaaatcggaatcaccgtcgttcttgcaaacgccgtttgggtttgtttatggaccgagaggtgacgaccgtgcaagtaatgtggtgacaaccacaagatgcagttggtggacatactgaaggatggtggacttaaccagtggatgctcgccaagcgagtgccaccccgcaaacactgtctaagtgttaaattaaaggtactcattgatttggttgatggtgtgacttggccttcatctctgccaccgggatagatggtcgagtgggttactgcttccgcgggagaggaccaggaggagtagcgtggccaggcttcgccatgttactcggttttctccgttagttatttccgctgcattaaaaattatggttattatttctgaaactccgataatgtaatcactaatgatacttattaaatttgtggtattatgttttattgt

SEQ ID NO: 82674 - DNA, 771 bp, Zea mays
  Clone ID: MRT4577_175413C.1
ctcgaggccggccgggccgggatcttctctccaagccgagagcgtgaccagctcacccagatcagaatccagacctcgtcagagagcattcccttgtgcatctcggcctctccttcctcccttcctcgcccgcccagtcctctaaccatcttctccaaacgcccggagatggtctcgctgcgatgcaccaccgcgcaccactccctcctcggctcgccgacctgcctcgcgcgcccgcggcggcggccgtgccctgtcgtgcgcgctgccgtcgccgtggaggccggcgctcaggccaaggtctcactcatccggattgggacgcgtgggaggtgatcgaatttgaccctttctgcggtttctttgtttgggatgacgatgaattcgtggttatgctggtcaaaatcgtgtctttaggttctgttaattgctgaatttggggacggtaatgcgttgtgacttgtgagtgcctgatagatcctgcgtttagctcttcggccgggaatgtgagttttgagatgtggctctgaacctactgcgtctttattaggtgttgaacattgtggattgtctggtaaagttcaaaggagcattgagaattgttagcaggaaggatgcgcttctttgctttgtaggatgcaattccgaatcagtagtaactgggcgttgaccttgatagagctaaagaatggcggcaaaattctacgttttagatctcacctctgctatttttgggccaacacaggaggctggaatgttcttgtgctatct

SEQ ID NO: 82675 - DNA, 734 bp, Zea mays
  unsure (1)..(734): unsure at all n locations
  Clone ID: MRT4577_175414C.1
ctcacgccgacctccctctccctcacgacagtagcaagctcctcccatggccgtcatttcccagctcggctccctgctcccatagatggccagcggcctctccagcttgcccatggcgttcagctggccatggctcctccactgcacccctactcccaaatgctgattccctctgtaactccctagcgtttcccttctccccctcggttccttcccttcaggccgagctctctctgtccatggcgcccacctccatttcagccatagcagcctccctgtagttcacgtcaaggaagaagaagacccctgatgccaatgacaagtgggcccaagacgagttgaccgagagatgataatcgtgcaagtgatgtggtgccaaccacaagatgcagtggatggacgacccaaggaaggatggacttaaccagtagatgctcgccaagcgagcacctcccccagcaaacactacctaagtgttaaattaaaggtacctccttgatttggttgatggtgtgtcttagccttcatccctgccaccgggatagatggtcaagagggttattgcttctgcaggagaggaccaggaggagtagcgtggccaggcatcgccatgttactcggttttctccgttagtcatttccgctgcattanaacttatggttattatttctaaaactccgataatgtaatcactaatgatactttcttaatttatgggattatgctttattgg

SEQ ID NO: 82676 - DNA, 1064 bp, Zea mays
  Clone ID: MRT4577_175415C.1
tcctcccatccagggcgtccgaactcctctcctttttcctccccgctcggagctctgctatggcttctcccatggcgccttcccccagcgggattcctcctctcccatggaaatcagcagccctacagggagcctctccccacgccctcggatgcttccctgtcggcgcaactccctcccaaggccggggcccccttccccagcactcttcttcatctgcgcagaaatggtggcgagcccttttccctcctcctctgcgctctggccgagccactgctcccaggccgagttttctccagcgccgcgcttcaccttcatgtggtgagctgactagcaggagcgagctccctcctccacacgctggtcaggactgggagtttgctactgcttggaagctgctcgatgaaatggttgacgggcggttgcgtgtctatgctcgtgctgcacgccctgctgctccccatggctgtcacaagatccaacagcctcgacatcccctcagcgtcgtgtgcgttgcccgatttgtagcgcctgcgcgtcgtcgtcgaaacccatgcccttgtcgatgtcacgcctcgcacgatgcatgattcggtgaagtgcctaaaccgtgaacgacgtgcgcgactcgaatccgagtttgacaggaccgagagaggatgatcgtgcaagtgatgtggtgccaaccacaaggtgcagttggtggacgacataaagaatgatggacttaaccagtggatgctcgccaagcgagcacctcccccagcaaacactatctaagtgtcaaattaaaggtactccataggatgattggttgatggtgtgacttggcctccatccctgccaccgggatagatggtcgagtgggttattgcttccgcaggagaggaccaggaggagtagcgtggccaggcttcgccatgttactcggttcttctccattagttatttccgctgcattaaaaatgttggttattatttctaaaactccgataatgtaatcactaatgatacttattaaatttatggtattatgttcgaaaaaaaaaaaaaaaaaagcggcc

SEQ ID NO: 82677 - DNA, 629 bp, Zea mays
  Clone ID: MRT4577_175416C.1
ttttttttttttttttgcataaaacataataccacaaatttaataagtatcattagtgattacattatcggagtttcagaaataataatcataaattttaatgcagtggaaataactaacggagaaaaccgagtaacatggcgaagcctggccacgctactcctcctggtcctctcctgcggaagcaataaccctctcgaccgtctatctcggtggcagggatgaaggccaagtcacaccatcaaccaatcatcctaaggagtacctttaatttaacacttagacagtgtttgctgggtggaggtactcgcttggcgagcatccactggtcatgtccatcattcttcaggttgtccaccaactgcatcttgtggttggcaccacatcacttacacgatcatctctcggtccaagggaacaatctggacgaatcgagactagttgcatgggctgtccacagggctcggtgtttcgccaaatgggcaaagcgcgaagcgcggcgtcgaccactagcgagggtcgacggtgtcgcggatggggctgcacaacgagcacaagagcaatgtcacgcgacgaggggagaggctgctcgccatggacgacggtggctcgttgcggctgctgttttg

SEQ ID NO: 82678 - DNA, 712 bp, Zea mays
  Clone ID: MRT4577_175417C.1
agtaccctccttcctccggcggtccgacgcgtcgcttgctgctagctttctccgccctgcgcgccatggtcgtgccatagctgctccctggccgacctccgtttcttcgctggccggccctcacctccactcagctcccatggcgctcggcgccctctacttttcctccccacgccattccccctcctagctcggcccttcctttccctcctcgactcccccatggaacaacgtcgtgctccttctgcatatggctgtgcgtgggtgcagcttgaagaagaactcgctgtgctaatgacgtgtggatccagggctaaggaccgagagatgatgatcgagccattgatgtggtgccaaccacaagatgcagttggtggacgacctggagaatggtggacttacccagtagatactcgccaagcgagtacctcccccagcaaacactacctaagtgttaaaaaggtactccttaggatgatttgttgctggtgtgacttggcctccattcctgccaccgagatagatggtcgagtgggttactgcttccgtaggagaggaccaggaggagtagcatggccaggcttcgccatgttactcggtttcctccgttagttatttccgctgcattaaaatttatggttattatttctgaaactctgataatgtaatcactaatgatacttattaaatttgtggtattatgttttgttgt

SEQ ID NO: 82679 - DNA, 835 bp, Zea mays
  Clone ID: MRT4577_175418C.1
aaagcataaaaccatacattaaggagtattaaattattacatcatcatcagagtttttgcaaaagtagtcatcattgttcaaaatgcagcggaataaaactaacagtaattaaacagagagatggggaagcctgtcccatcactcctcatgctcctcctcagccgaggtagggtcccactcgacagtccaacctggtggcaagatggacggccaagtcactccagcaaccatgtcctccagggttcctttaatttgacacttagatagtgtttgtcgggtggcactcgcttggcgagcattcactggttatgtccatccttccttgggttgtccaccagctgcatcttgtggttggccccacatcacgtgcacgatcagcatctctcggtcccccctgctgttctggaatttgcagattggtccatcgtcttcttccttggaacgtacagggaaaggggatcggcctttcctggccggggctcgccggtgtcggccgagcgcggcggggccagccgagccgtccctggtggagggcgcgcacagccaaggagttggctgggccgacggcagccccaggtggcctggccacgcgagcccgcggtggcagcctgctgcggcaatggcgcgggcatcgccggtcatggctgcactcgaggaagggttcgaacggatcgacgtagcgagggggaggtgatggcaaactcaatttaagcaatcggctactgagggcagggatttggaggtagcagggagcttccgtcgtccatccatgacgttagtgtgctgcagtagagaaatgagggagcgaggcgagcggaatgcggaggcgagtac

SEQ ID NO: 82680 - DNA, 721 bp, Zea mays
  Clone ID: MRT4577_17541C.1
ctcgaggccggcctgaacaggacaggtcctcatggataggtggtactatctcatggacgcgttgctggacggtgtgcatcccgttacaacaaggcgtagggcatgacgccggtcgagtaccatgtcatgtagccgcgcttcatccgcgtgttctacgaggggatgaagaaccactgcgttgatcatcaacatacgaagctgctggacttactacacgcggcttcgtagggcgtgtcgacgctgatggacatggacaacggcatgggcgcctcgatgctcggcatcttgttccgccactggttcatctccgggtgcaacttctacctgctgctggacatctccgacgggtcgccgttccacaagatgcgccacccgaacgacgacttgttcagcgtgagtgcacgtcgtcgacgccatcctcatgaacggcatactcctgtactgcagcgacgtgtactgcgccaagatgctcaacatctgctacaacgagatggcggaaaatgtgaagggcatcacctgcgactggaaggtggcgggcaacaactacgccacccccgaggttcagcggcgtgatccacaacatcatgacgatgatcgcggaccatccaaacctcaaggagctcttcgacgcgcaggtactttatctcaacgagatggtcgcgttctctggtgttcaggccatctacatctaccgctacgcctgcttcatagagctcatcta

SEQ ID NO: 82681 - DNA, 672 bp, Zea mays
  Clone ID: MRT4577_175420C.1
tgcaacccgaatccgagtttgacaggaccgagagacgatgatcgagcaagtgatgtgatgccaaccacaagatgcagttggtggacgatctgaagagatgatagacttatccagtggatgctcgccaagcgagtacctcccccagcaaacactgtctaagtgttaaattaaaggtactccttaggttgaattgattgatggtgtgacttggcctccatccctgccaccaggacagacggtcgagtgggttactgcttccgcaggagaggactaggaggagtagcgtggccaggcttcgccatgttactcggttttctccgttagttatttccgctgcattaaaatttatggttattatttctgaaactccgataatgtaatcactaataatacttattaaatttgtggtattatgttttattgtatttctctgtgcctcaccttcgtgtgagctagtggtattcgatcctggtaagtggctttatcggactagatccgagggactgatgggttattcctgtttaagtgtgttgctgcccttaagggtgcgacttggacacttaagctgggataattcggggcggttccggcacagctggtatcggagcgaatacccatcacagagaatcaataagtcatgattaccaaccttttctaaaagtaaaacttgct

SEQ ID NO: 82682 - DNA, 1114 bp, Zea mays
  Clone ID: MRT4577_175421C.1
tacctgtgtcaagcttttgaacgtactaagcactgtcgggaaaaaggtaaccggtaaacctagtacctgagtgaagccgggcgcggactttatccctcacgcgacctgagactgggtctcccattctagatatagtgggtacaagtgcggccactgcacgacggcggtcggggtcagtggagcattgtatgccaaggcggtgaggcctggacgcgaacggggaatcgatggggacggttgacatgtgtggggtcggagtaccctgacatgtcgtgtgtttaggtttaccttgcaaggttaaaactcgattcgaatcgtctgcttctcgcagctaatgagattgcttgatccattgtactgcattgagtaataagtggaaatgaggttacttacaaaagatgttggttgactaaattgtttgataccatgtatgtatagataggttctcatctagtctaaaattattcttctagaacttgaaaagctaaaacttgattttagactcagctagtgcttttggcaaaccaaacccctcagccaaacagctgcatggtctagaggtagaggagtagattcctcacaccgggtaagtctagctgagtattagtatactcagccttgctagtggcataattttttgcaggtacgcttcatgatatggttgatggtgtgaattggcctaccaccctgccaccgggttggacggtcgaatgggatgctgctctgaccggagaggagcaggaggagtagtgggaaaggccttgccctaatccttgctttcaacgatatcaattatctgctgcagtttattttgtgaacttatatcagttgctgaaaaactctgatttatgtaataattccagtattttaaattgaggttttcctgttttattgtatttcttctgtgactcaccttcgagtgagtttgtggtatttgatcctggttaagtggctttatcagactagatctgagggactgacgggttattccgatttaagtgtgttacggcccctgaggcgtgacttaggcacttaagctggaataattcgggcgttctgccacacccggcctccgtggcctcctcaacggggagtaagttcttcggaaccgaac

SEQ ID NO: 82683 - DNA, 971 bp, Zea mays
  Clone ID: MRT4577_175422C.1
ggaccctcgcggcctgccggggaccgcactcgccccctctcagccctcctctcctcccctaccaccggtccctcccgaacaccattgttgtgctcgcaactccgtggtcgcgtctgctcgagctgtttctggccgggctggagccgacaccgagcatggcggatgttggagatgccgtgatccacgtcccctcgctttcccttgccgccggcgagcctctggccggctattttgctctccccgtggagatacctggaggtagaagacagatggaccgcgggcacaaatttgaccaagcgcagggggctaactgcgcatcccgtgacccacttcaatagtaccaaaaggacctgtttgctggaataaagtcgtggcctgttccagggactgaagcgcaaaggaccgagaaaggatgatcgtgcaagtgatgtggtgccaaccataaggtgcagtcggtggacaacccaaggaaggatggacttaaccagtggatgctcgccaagcgagtacctcccccagcaaacactatctaagtgttaaattaaaggaccgagaaaggatgatcgtgcaagtgatgtggtgccaaccacaaggtgcagtcggtggacaacccaaggaaggatggacttaaccagtggatgctcgccaagcgagtacctcccccagcaaacactatctaagtgttaaattaaaggtacctccttgacttggttgatggtgtgacttggcctaccaccctgccaccgggttggacggtcgagtgggatgttgctccggcaggagaggagcatgaggagtagcgtggccaggcttcgccatgttactcggttttctccgttagttatttccgctgcaataaatttatgtttatcatttttgaaactccgataatgtaatcactaatggatactattaaattgtggtattatttttttaaaaaaaaaaaaaaaaacaaaaaaaaaaaagggggg

SEQ ID NO: 82684 - DNA, 2463 bp, Zea mays
  Clone ID: MRT4577_175423C.1
atggcggatcgagtgaccataattcccccgcgcgatccgtggcccttctccacggtgacggcgagtgatctggaggagctggtcggcgaaggtttgctccgccccctcaccgacaagcagcggccagagtggattcctcccgtgggcggagccgctccgtccccgccgccggggtatgtcgtgagcttcgtctccttccatgagcggggatttggcgcgccgacgggccgctttatgcgggccattctattccactatggggtggagttgcacaacctctcccccaactccatctcgcaggccgctattttcgtagcgttatgcgaaggtacattcctgccattctcgcgtcttcgaacaaggggtggcagcgccggtggttctacctccggaacgacggatgtggggtgtcacaaaccttccctgccacgggtcccggaggacgcggtggaccgtgcagcgcggcgggtcgccgcggaggagaagaagaaaaagaaggacgcggagaaggcccgggcccgcgagcggaggcgggctcgggacgccttggagaagcgccgccgccagcaggagagggacggactcccgagggagccgtcgccggagacgcccgacgacgatgacgacgacgatgatgatgatgatgatgacatggccgcccgtctaggcctcagcctcggcctggggcgtggccaggagccgtcgagccagcccccgagcgaaccgactccgtcagcccccgaagtcggggtgtcgggctcccgacccgaggcgcgggggcgaaccgagaggccacctgacccctccgccggaggagctgaagtagttccggaggtccagaccaaggcgtttgttcccaagaggccgccgcttgtgctggtggcggatgggagtgaccctcaggtcgtcgcggccatgcccggggaacctgcctcccgggcaccccaagcgccggcgaagcggacctcggcggccgtttcgagagccgggatccaagaaggctctccccaggcgcggtggatcatggcccagagtggcaagcgaagtcacggccagaccgacctggcaccccggaaggccctcaagacggcgccgggccgtgtggccagcgccattcagccgaccctttcgcggggtactccgacatcgggggctcgggagtcgccaatctcggaggagcgggctcccgaggccggctcttcagccgaggcggcgatcgtggttgaggaggcggctgacgcccacgcggctctgagttcgcctgtcgtgccggtcatgccggcgcctgccaccgccgaggttgccgccgtccttgtcgaagggtgtccagccgccgccagcgccgggatggctgatgcgtcggtgcccaagaccccaggagaggtgggcgcggtcgcgcaatccgtccagccgggcgacagcctcatcgctgtgcggcggagccccgaggcccggcgcccgttgctccgattccggacccgcgaggcctcggaccccgtcttcgttctcgatgatgagcaggaggaccagtcctggggtgagctccgcgagtgcgcagaggcgacggtggggtcgctccggtcgtcgctggaggttttctgcagagacgtccccaaaatcttccaggatctgatggaccggagcgccgctaagtcgtcgttcatccgccgtgaggttgatgtctggggctcgctgcgatccctgaggtcttcgctcgccggggctaccacgcgcctttctcagcaagatgccaaggtggcggacctccagctgctatgcgccgacctgagagccgaggcggcagcggcgcgtgcggaggcgcaacggcagcgatcggagctcgcccaggtcgtcgaggaacggaaccgacttcaaggccgggctgccgaggccgaaagccgagccgagaccctcgcggctgacttagctgcgacccaagtcgcggcctcggagcaccgtgcccgagccggaaagcttgagtccgcccttgacgagtccgccaaggcgcttgctgaggcgcttgccggagccgccgagcagagagaggcggacctcgcggccatgtccgaggccgtctcggacttttatcgtgccctcggctccgatgacgtcccttcaggaagctcccctcagagccgccttcgaaccttgggtggtcacgcccgcggcagagtccgcgaagcgctacaccacggcgtcaggcgggccttcgccgtgctcgcttctcactacgttgtggatctggagcgggttagtgaggggtactgtcttcctgacgaagatgatgctgctctggcggaggtgcagcggcttgacgcggttgccgccggccctagcgcggtgctggcgaccacctttgaggcggaggtccttccccctgcgacgtcaccggaggccgagatggaccccaccgatggcgggggtggagctgaaggcgcggctccttcccaaggcggcgcctga

SEQ ID NO: 82685 - DNA, 2565 bp, Zea mays
  Clone ID: MRT4577_175424C.1
atggcggatcgagtgaccataatccccccgcgcgatccgtggcccttctccacggtgacggcgagtgatctggaggagctggtcggcgagggtttgctccgccccctcaccgacaagcagcggccagagtggattcctcccgtgggcggagccgctccgtccccaccgccggggtatgtcgtgagcttcgtctccttccatgagcggggatttggtgtgccgacgggccgctttatgcgggccatcctattccactacggggtggagttgcacaacctctcccccaactccatctcacaggccgctatcttcgtagcggggtggcagcgccggtggttctacctccggaatgacggtgagttgctcccaccgttctcccagcgagtagttactgctgccaccgacgcctggcgccacgggaccccgcacgagaggcagaagaatctcgaaccccttctccaggccctgaaggagttgcgggaggggggacttaccgctgcgggagtgatcgccgctatccaccgtcggagggtgcttccattggcggagcggcagctgccgctctgggagatgaccccggaagctgactgggagggcttgcgaatgtcccctgatcctctccccttcaacgccctccaatggcgggtgtcggctgcgatggggaagccggacccccacgcatactcccagcttcggatgcgccccgaccaggggtgtgtgactttggatgtggggtggcataaaccctcccagccacgggtcccggaggacgcggtggaccgtgcagcgcggcgggtcgccgcggaggagaagaagaaaaagaaggacgcggagaaggcccgggcccgcgagcggaggcgggctcaggacaccttggagaagcgtcgtcgccagcaggagagggacggactcccgagggagccgtcgccggagacgcccgacgacgatgatgacgatgatgaggatgaagaggatgacatggccgcccgtctcggcctcagccccggcttggggtgtggccaggagccgtcgagccagcccccgagcgggccgactccgtcagcccccgaagtcagggcgtcgggctcccaacccgaggcacgggggcgaaccgagaggtcacctgacccctcagccggaggagctgaggcagctccggaggtccaggccaaggcgtctgttccccaggggccgccgctcgtgtcggtggcgcatgggggtgaccctcaagtcatcgcggccgtgcccggggaatctgcttcccgggcgccccaagcaagggcggtgccgaaggtgccggcgaagcggacctcggcggctgtttcgggagccgggatccaagaaggctccccccaggcgcggtggatcatggcccgaagtggcaagcgaagtcatggccagaccgacctggcaccccggaaggccctcaagacggcgccggactgtgtggccagcgccattcagccgaccctttcgcggggtacttcaccgcagggggctcgggcgtcgccaatctctgaggagcgggctcccgaggccggctcttcagccgaggcggctatcgtggttgaggaggcggctgacgcccacgcggccctgaggtcgcccgtcgtgccggtcatgccggcgcctgccaccgtcgaggttgccgccgtccctgtcgaagggcgtccagttgtcgccagcgtcgggatggctgatgcgtcggcgcccaagacctcggaagaggatctgacggaccggagcgccgccaagtcgtcgttcatccgccgcgaggttgatgtctggggcttgctgcgatccctgaggtcctcgctcgtcggggctaccgcgcgcctttctcagcaggatgccaaggtggcggacctccagctgctctgcgccgacctgagagccgaggcggcagcaacgcgtgcggaggcgcaacggcagcgatcggagctcgtccaggtcgtcgaggaacgggaccgatctcagggccgggctgccgaggccgaaagccgagccgagacccttgcggctgacttagccgcggcccaggtcgcggcctcggagcatcgtgcccgagccggagagcttgagtccgcccttgacgagtccgccaaggcgcttgccgaggcgcttgccggagctgccgagcagagggaggcggacctcgcggccatgtccgaggccgtctcggacttttatcgtgtcctcggctccggcgacgtcccttcaggaagctcccctcagagccgccttcgagccttgggtgatcacgcgcgcggtagagtccgcgaagcgctacaccacggcgtcaggcgggccttcgccgtgcttgcttcccactacgttgtggacctggagcgggttagtgaggggtactgtcttcctgacgaagatgatgctgccctagcggaggtccagcagcttgacgcggtcgccgcgggtccgagcgcggtgctggcgaccacctttgaggcggagatccttccccctgcgacgtcaccggaggccgagatggaccccaccgacggtggggatggagctgagggcgcggctccttcccaaggcggcgcctaa

SEQ ID NO: 82686 - DNA, 2670 bp, Zea mays
  Clone ID: MRT4577_175425C.1
atggcggaccgagtgactataatccccccgcgcgacccgtggcccttctccacggtgacggcgagtgatctggaggagctggttggcgaaggtttactccgccccctcaccgacaagcagcggccggagtggattcctcccgtgggtggagccgctccgtccccaccgccggggtatgtcgtgagcttcgtctccttccatgagcggggatttggtgcgccggcgggccgctttatgcgggccatcttattccactacggggtggagttgcacaacctttcccccaactctatctcgcaggccactattttcgtagcgctatgcgaagggtacttggggattgctccccattgggatttatggacttacttcttcctcgccgagcctttcgccttgtcgacgggggagaggaggatccgtgcagcggtgcgggccggcggctgcattctcttgttgaggcagtcgcgggcgtcgcagtacattcctgccattctcgcgtcttcgaacaaggggtggcagcgccggtggttctacctccggaacgacggtgagttgctcccaccattttcccagcgagtagttacagctgccaccgacgcctggcgccacgggaccccgcacgagaggcagaaaaatctcgagccccttctccaggccctgaaggagttgcgggaggggggacttactgctgcgggagtgatcgccgccattcaccgtcggagggtgctcccattggcggagcggcggctgtcgctctgggagatgaccccggaagccgactgggagggctcacgaatgtcccctgatcctctccctttcgacgccctccaatggcgggtgtcggccgcgatggggaagccggacccccacgcatactcccagcttcggatgcgccccgatcaggggtgcgtgactttggatgtggggtgtcacaaaccctccctgccacgggtcccggaggacgcggtggaccgtgcagcgcggcgggttgccgcggaggagaagaagaaaaagaaggacgcggagaaggcccgggctcgtgagcggaggcgggctcgggacgccttggagaagcgccgccgccagcaggagagggacggactcccgagggagccgtcgccggagacgcctgacgacgatgatgacgacgatgatgatgatgatgacggcatggccgcccgtctcggcctcagcctcggcctggggtatggccaagagccgtcgagccagcccccgatcgaaccgactccgtcagcccccgaagtcggggcgtcgggctcccgacccgaggcgcgggggcgaaccgagaggccacctgacccctccgctgaagtagttccggaggtccagaccaaggcgtctgtttcccagaggccgccgcttgtgccggtggcggacgggagtgaccctcaggtcgtcgctgccgtgctcggggaacctgtctcccaggcgccccaagcgccggcgaagcggacctcggcggccgtttcgagagccgagatccaagaaggctctccccaggcgcggtggatcatggcccggagtggcaagcgaagtcacggccagaccgacctggcaccccggaaggccctcaagacggcgccgaactgtgcggccagcgccattcaaccgaccctctcgcggggtaccccgacatcgggggttcgggcgtcgccaatctcggaggagcgggctcccgaggccggctcttcagccgaggcggcgatcgtggttgaggaggcggctgacgcccacgtggctctgagttcgcctatcgtgccggtcatgccggcgtctgccaccgtcgaggctgccgccgtccttgtcgaagggtgtccagccgccgccagcgctgggatggctgatgcgtcggtgcccaagaccccagaagaggtgggcgcggtcgcgcaatctgtccagccgggcgacagcctcctcgctgtgcggcggagccccgaggcccggcgcccgttgctccgattccggacccgcgaggcctcggaccccgtcttcgttctcgatgatgagcaggaggaccagtcctggggtgagctccgcgagcgcgcagaggcgacggtggggtcgctccgggcgtcgctggaggttttctgcagagacgtccccaaaatcctccaggatctgacggaccggagcgccactaagtcgtcgttcatccgccagcttgagtccgcccttgatgagtctgccaaggcgcttgctgaggcgcttgccggggccgccgagcagagggaggcggaccttgcggccatgtccgaggccgtctcggacttttaccgtgccctcggctctgatgacgtcccttcaggaagctcccctcagagccgccttcgaggcttgggtggtcacgcccgcggcagagtccgcgaagcgctacaccatggcgtcaggcgggccttcgccgtgctcgcttctcactatgttgtggatctggagcgggttagtgaggggtactgtcttcctgacgaagacgatgctgctctggcggaggtgcagcggcttgacgcggttgccgccggcccgagcgcggtgctggcgactacctttgaggcggaggtccttcttcctgtggcgtcaccggaggtcgagatggaccccaccgatggcgggggtggagttgaaggcgcggctccttcccaaggcggcacctga

SEQ ID NO: 82687 - DNA, 2031 bp, Zea mays
  Clone ID: MRT4577_175426C.1
atggggaagccggacccccacgcatactcccagcttcggatgcgccccgatcaggggtgcgtgactttggatgtggggtgtcacaaaccctccctgccacgggttccggaggacgcggtggaccgtgcagcgcggcgggttgccgcggaggagaagaagaaaaagaaggacgcggagaaggcccgggcccgcgagcggaggcgggctcgggacgccttagagaagcgccgccgccagcaggagagggacggactcccgagggagccgtcgccggagacgcccgacgacgatgacgacgacgacgatgatgatgatgatgatgtggccgcccgtcttggcctcagcctcggcctggggtgtggcctagagccgtcggtccagcccccgagcgaaccgactccgtcagcccccgaagtcggggcgtcgggctcccgacccgaggcgcgggggcgaaccgagaggccacctgacccctccgccggaggagctgaagtagttccgggggtccagaccaaggcgtctgttccccagaggccgccgcttgtgctgggggtggccaggagtgaccctcaggtcatcgctgccgtgcccgaggaacctgtttcccaggcgccccaagcgccggcgaagcggacctcggtggccgtttcgagagctgggatccaagaaggctctccccaggcgcggtggatcaaggcccggagtggcaagcgaagtcacggccagaccgacctggcaccccggaaggccctcaagacggcgccaagctgtgcagccagcgccactcagccgaccctctcgcggggcaccccgacatcgggggttcgggcgtcgctaatctcggaggagcgggctcccgaggccggctcttcagccagagcggcgatcgtggttgaggaggcggctgacgcccacacggctctgagctcgcctgtcgggccggtcatgccggcgcccgccaccgtcgaggctgccgccgtccttgtcgaagggtgcccagccgccgccagtgccgggatgactgatgcgtcggtgcccaagacctcagaagaggtgggcgcggtcgcgcaacctgtcccgccaggcgacagcctcatcgccgtgcggcggagccccgaggcccggcgcccgttgctccgattccggacccgcgaggcctcggaccccgtcttcgttcttgatgatgagcaggaggaccagtcctggggtgagctccgcgagtgcgcagagacgacgatggggtcgctccgggcgtcgctggaggatctgacggaccggagcgccgctaagtcgtcattcatccgccgtgaggttgatgtctggggctcactgcgatccctgaggtcttcgcttgccggggctaccacgcgcctttctcagcaagatgccaaggtggcggatctccagctgttatgcgccgacctgagagccgaggcggcagcggcgcgtgcggaggcgcaacagcagcgatcggagctcgtccgggtcgtcgaggaatggaaccggcttcaagaccgggctgccgaggccgaaagccgagccgagacccttgcggccgacttagctgcaacccaagtcgcggcctcggagcatcgtgcccgagccgggaagcttgagtccgcccttgatgagtccgccaaggcgcttgctgaggcgcttgccggagccgctgagcagagggaggcggacctcgcggtcatgtccgaggccgtctcggacttttaccgtgccctcggctctgatgacgtcccttcaggaagctcccctcagagtcgccttcgggccttgagtggtcacgcccgcggcagagtccgcgaagcgctacaccacggcgtcaggcgggccttcgccgtgctcgcctctcactacgttgtggatctggagcgggttagtgaggggtactgccttcctgacgaagacgatgctgctttggcggaggtgcagcggcttgacgcggttgccgctggcccaagcgcggtgctggcgaccacctttgaggcggaggtccttcctcctgcgacgtcaccgtag

SEQ ID NO: 82688 - DNA, 1240 bp, Zea mays
  Clone ID: MRT4577_175427C.1
gagaatgagggccgtggtgatcacgtgcgccggcgggccggaggtgcgcgcggcgcgggaggtggaggaccatcccgcgctaggcgaaggagaggtgctcctcgaggtcgccgccgcgggcgtcaatcgcgcggacaccgtgcagcggatgggccggtacccgccgcctgccggcgcgtccccttacccggggctcgagtgctccggcaccatcctcgcgctcggccccaacgtcccctcccgctgggccgtgggcgataaggtttgcgcgctcctcagcggcggcgggtacgcggataaggtggtggcgccggcggggcagctgctgccgatacccgagggggtgtcgctgacgcacgcagccggcttgcccgaggtggcctgcaccgtctggtcaaccgtattcatgaccagtcacctctcccccggtgaatcattccttatccatggaggatccagtggaattggtacattcgctatacagattgctaagcacctcggaattaaggtttttgtcactgcaggaagtgaagaaaaactagcagcctgcaaagctttgggtgccgatgtatgcattaactacagaactgaagacttcgttgaacgtatcaaacaggaaaccaacggaaagggtgttgatgtgattctggataacattggaggatcatatctccagcgcaacctgaatagcttaggtgttgatggtagacttttcatcattggcttccaagggggcatagcagctgaagtgaacctgcaagctgtgcttgcacgccgtttgaccatacaagctgctggactgcgcaacagaagccttgctaataaggcagagattgttagtgaggtggaaaagaacgtgtggcctgctgtcgctgctggcaaagtgaagccggtgatttacaagacgtttccgttatgtgaagctgctgaggctcataggttgatggaagctagcacccacatcggcaagatactgctgctcccatgactgcacctgtggcgtttgcgctcttgctctcggaggagtcagttcaaaaacatatgcaattcctgagactgtgacaacctgcacggatgttgtactggtgtcgcatgtcttttttatatatatcttgtagtactagattggatcttttaccccgagaaattatcttgtcaattggatccttaaagtgctgatgacatttttctgtgagctatgatataataaatctggcagatagagccactacagcacgtc

SEQ ID NO: 82689 - DNA, 188 bp, Zea mays
  Clone ID: MRT4577_175428C.1
ccactgcgcatcaaggaccacattgggcgactgcatagcgtaacacatagtattcggatctagttacaacatgtccggaccctaagatgactgggcttccgccctcagcaagttagagagcgttttgccctgggtgcgtgccttctacagctactttggtacggagactattctggaggccaaaccca

SEQ ID NO: 82690 - DNA, 108 bp, Zea mays
  Clone ID: MRT4577_175429C.1
cgagttagcatcggcagacacactctttcatcctataagccagtacaatgcgcaggagatcagtgactgcatcaggaattgatatccaccaagatttctcttgtagct

SEQ ID NO: 82691 - DNA, 195 bp, Zea mays
  Clone ID: MRT4577_17542C.1
tcttttgtattgtactggcaactgcaagtaggcacacaactctttctgctcatgaaatattcgcgccatctggagtttaggtttccagaaacatatggtatctaatgctgctcggtttctctttctggttgtccgatttaacgtcctatctattgtatatatatcttgtagtgatgcaaagtttctaatgatctc

SEQ ID NO: 82692 - DNA, 2745 bp, Zea mays
  Clone ID: MRT4577_175430C.1
atggcggatcgagtgaccataatccccccgcgcgatccgtggcccttctccacggtgacggcgagtgatctggaggagctggtcggcgaaggtttgctccgccccctcaccgacaagcagcggccagagtggattcctctcgtgggcggagccgctccgtccccaccgccggggtatgtcgtgagcttcgtctccttccatgagcggggatttggtgtgccgacgggccgctttatgcgggccatcctattccactatggggtggagttgcacaacctctcccccaactccatctcgcaggccgctatcttcgtaacgcgagtggttacggctgccaccgacgcctggcgccacgggaccccgcacgagaggcagaagaatctcgaaccccttctccaagccctgaaggagttgcgggaggggggacttaccgctgcgggagtgatcgccgctatccaccgtcggagggtgcttccattggcggagcggcggctgccgctctgggagatgaccccggaggctgactgggagggctcacgaatgtcccctgatcctctccccttcaacgccctccaatggcgggtgtcggctgcgatggggaagccggacccccacgcatactcccagcttcggatgcgccccgaccaggggtgtgtgactttggatgtggggtggcacaaaccctcccagccacgggtcccggaggacgcggtggaccgtgcagcgcggcgggtcgccgcggaggagaagaagaaaaagaaggacgcggagaaggcccgggcccgcgagcggaggcgggctcgggacgccttggagaagcgtcgtcgccagcaggagagggacggactcccgagggagccgtcgccggagacgcccgacgacgatgatgacgatgatgatgatgaagaggatgacatggccgcccgtctcggcctcagccccagcttggggtgtggccaggagccgtcgagccagcccccgagcgggccgactccgtcagcccccgaagtcggcgcgtcgggctcccgacccgaggcacgggggcgaaccgagaggtcatctgacccctcaaccggaggagctgaggcagctccggtggtccaggccaaggcgtctgttccccaggggccgccgctcgtggtggtggcgcatgggggtgaccctcaagtcgtcgcggccgtgcccggggaatccgcttcccgggcgccccaagcaagggtggtgccgaaggtgccggcggagcggacctcggcggctgtttcgggagccgggatccaagaaggctccccccaggcgcggtggatcatggcccgaagtggcaagcgaagtcatggccagaccgacctggcaccccggaaggccctcaagacggcgccgaactgtgtggccagcgccattccaccgaccctttcgcggggtacttcaccactgggggctcgggtgtcgccaatctctaaggagcgggctcccgaggccggctcttcagccgaggcggctatcgtggttgaggaggcggctgacgcccacgcggccctgagttcgcctgtcgtgccggtcatgccggcgcctgccaccgccgaggttgccgccgtccctgtcgaagggcgtccagttgccgccagcgtcgggatggctgatgcgtcggcgctcaagacttcagaagaggtgggcgtggacgcgcaatccgtccagccgggcggcagcctcatcgctgtgcggcggagccccggggcccggcgcccgttgctccgattccagacccgcggggcctcggaccccgtcttcgttctcgatgatgagcaggaggaccagtcctggggtgagctccgcgagtgcgcagaggctacggtggggtcgctccggtcgtcgctggaggttttctgcagagacgtccccaaaatcctccaggatctgtcagaccggagcgccgccaagtcgtcgttcatccgccgcgaggttgatgtctggggctcgctgcgatccctgaggtcctcgctcgccggggctaccgcgcgcctttcccagcaggatgccaaggtggcggacctccagctgctctgcgccgacctgagagccgaggcggctgcagcgcgtgcggaggcgcaacggcagcgatcggagctcgcccaggtcgtcgaggaacgggaccgatctcagggccgagctgccgaggccgaaagccgtgccgagacccttgcggctgacttagccgcggcccaggtcgcggcctcggagcatcgtgctagagccggagagcttgagtccgcccttgacgagtccgccaaggcgcttgctgaggcgctcgccggagctgccgagcagaggggtgcggatcttgcggctatgtccgaggccgtctcggacttttatcgcgtcctcggctccggcgacgtcccttcaggaagctcccctcagagccgccttcgagccttgggtgatcacgcgcgcggcagagtccgcgaagcgttacaccacggcgtcaggcgggccttcgccgtgcttgcttcccactacgttgtggacctggagcgggttagtgaggggtactgtcttcctgacgaagacgatgctgccctagcggaggtccagcggctcgacgcggtcgccgcgggtccgagcgcggtgctggcgaccacctttgaggcggagatccttccccctgcgacgttaccggaggccgagatggaccccaccgacggcggggatggagctgagggtgcggctccttcccaaggcggcgcctaa

SEQ ID NO: 82693 - DNA, 1768 bp, Zea mays
  Clone ID: MRT4577_175431C.1
gggagccagggcaaccaagcgaggcaggcggagcgggggccgggagcgcaagtgcaagcgagggatgagaatgagggccgtggtgatcacgtgcgccggcgggccggaggtgctggaggcgcgggaggtggaggaccatcccgcgctaggcgaaggagaggtgctcctcgaggtcgccgccgcgggcgtcaatcgcgcggacaccgtgcagcggatgggccggtacccgccgcctgccggcgcgtccccttacccggggctcgagtgctccggcaccatcctcgcgctcggccccaacgtcccctcccgctgggccgtgggcgataaggtttgcgcgctcctcagcggcggcgggtacgcggataaggtggtggcgccggcggggcagctgctgccgatacccgagggggtgtcgctgacgcacgcagccggcttgcccgaggtggcctgcaccgtctggtcaaccgtattcatgaccagtcacctctcccccggtgaatcattccttatccatggaggatccagtggaattggtacattcgctatacagattgctaagcacctcggaattaaggtttttgtcactgcaggaagtgaagaaaaactagcagcctgcaaagctttgggtgccgatgtatgcattaactacagaactgaagacttcgttgaacgtatcaaacaggaaaccaacggaaagggaactacttcgatgctctcttttttggcagctagtatgtatcgagcattatcatcaaatagcgcaacatccctgactgtaatctgaaactcactaccaggtgttgatgtgattctggataacattggaggatcatatctccagcgcaacctgaatagcttaggtgttgatggtagacttttcatcattggcttccaagggggcatagcagctgaagtgaacctgcaagctgtgcttgcacgccgtttgaccatacaagctgctggactgcgcaacagaagccttgctaataaggcagagattgttagtgaggtggaaaagaacgtgtggcctgctgtcgctgctggcaaagtgaagccggtgatttacaagacgtttccgttatgtgaagctgctgaggctcataggttgatggaagctagcacccacatcggcaagatactgctgctcccatgactgcacctgtggcgtttgcgctcttgctctcggaggagtcagttcaaaaacatatgcaattcctgagactgtgacaacctgcacggatgttgtactggtgtcgcatgtcttttttatatatatcttgtagtactagattggatcttttaccccgagaaattatcttgtcaattggatccttaaagtgctgatgacatttttctgtgagctatgatataataaatctggcagatagagccactacagcacgttagtacctcatgccagtgtactgttgatgcagtctacggatactcggggaggatatgctggccctgtgatcgatgacgcgcggctaacgatcgagttgctgattgctgaacatgagttagcacaggaattattaagttttcttcccttcttaataagttaatatgctggtaaatgaaatatttgtacccaataggaagtgctcatgctaccaatggaaggaattgcatgtatcgataatccaatatggattattaagtttcctgcccaaaaaaaaaaaaaaaaaaaaaaaaaaaaaagaaaaagggcgctacgactcatagaggatcccgcacgcgggcgcgtgcgtcatagctcatctatagt

SEQ ID NO: 82694 - DNA, 2982 bp, Zea mays
  Clone ID: MRT4577_175432C.1
atggcggaccgagtgaccataatccccccgcgcgatccgtggcccttctccacggtgacggcgagcgatctggaggagctggtcggcgaaggtctgctccgccccctcaccgacaagcagcggccagagtggattcctcccgtgggcggagccgctccgtccccaccgccggggtatgtcgtgagcttcgtctccttccatgagcggggatttggtgcgccggcgggccgctttatgcgggccatcctgttccactacggggtggagttgcacaacctctcccccaactccatctcgcaggccgcgattttcgtagcgttatgcgaagggtacttggggatcgctccccattgggatttgtggacttacttcttcctcgccgagcctttcgccttgtcgacgggggagaggaggatccgcgcagcggtgcgggccggcggctgcactctcttgttgaggcagtcgcgggcgttgcagtacattcctgccattctcgcgtcttcgaacaaggggtggcagcgccggtggttctacctccggaacgacggtgagtcgctcccaccgttttcccagcgagtagttacggctgccaccgacgcctggcgccacgggaccccgcacgagaggcagaaaaatctcgagccccttctccaggccctgaaggagttgcgggaggggggacttaccgctgcgggagtgatcgccgctattcaccgtcggagggtgctcccattggcggagcggcggctgccgctctgggagatgaccccgggagccgactgggagggctcacggatgtccccggatcctctcccctccgacgccctccaatggcgggtgtcggccgcgatggggaagccggacccccacgcatactcccagcttcggatgcgccccgatcaggggtgcgtgactttggatgtggggtgtcacaaaccctccctgccacgggtcccggaggacgcggtggaccgtgcagcgcggcgggtcgccgcggaggagaagaagaaaaagaaggacgcggagaaggcccgggcccgcgagcggaggcgggctcgggacgccttggagaagcgccgccgccagcaggagagggacggactcccgagggagccgtcgccggagacgcccgacgacggtgacgacgatgatgatgatgttgatgacggcatggccgcccgtcttggcctcagcctcggcctggggtgtggcccggagccgtcgagccagcccccgagcgagccgactccgtcagcccccgaagtcggggcgtcgggcgcccgacccgaggcgcgggggcgaaccgagaggccacctgacccctccgccggaggagctgaagtagttccggaggtccgggccaaggcgtctgttccccaggggccgccgcttgtgccgggggcgcacgggggtgaccctcaggtcgtcgcggccgtgcccggggaacctgtctcccaggcgccccaagcgccggcgaagcggacctcggcggccgtttcgagagccgggatccaagaaggctctccccaggcgcggtggatcatggcccggagtggcaagcgaagtcacggccagaccgacctggcaccccggaaggccctcaagacggcgccgagctgtgcggccagcgccattcagccgaccctctcgcggggtaccccgacatcgggggctcgggcgtcgccaatctcggaggagcgggctcccgaggccggctcttcagccgaggcggcgatcgtggttgaggaggcggctgacgcccacgcggctctgagttcgcctgtcgggccggtcatgccggcgcctgccaccgccgaggctgccgccgtccctgtcgaagggtgcccagctgccgccagcgccggggcggctgatgcgtcggcgcccaagaccccagaagaggtgggcgcggtcgcgcaatccgtcccgccgggcgacagcctcatcgctgtgcggcggagccccgaggcccggcgcccgttgctccgattccggacccgcgaggcctcggaccccgtcttcgttctcgatgatgagcaggaggaccagtcctggggtgagctccgcgagtgcgcagaggcgacggtggggtcgctccgggcgtcgctggaggttttctgcagagacgtccccagaatcctccaggatctgacggaccggagcgccgccaagtcgtcgttcatccgccgtgaggttgatgtctggggctcgctgcgatccctgaggtcttcgctcgccggggctaccacgcgcctttctcagcaggatgccaaggtggcggacctccagctgctctgcgccgacctgagagccgaggcggcagcggcgcgcgcggaggcgcaacagcagcgatcggagctcgcccgggtcgtcgaggaacggaaccgacttcagggccgggctgccgaggccgaaagccgagccgagaccctcgcggccgacttagctgcgacccaggtcgcggcctcggagcaccgtgcccgagccgggaagcttgagtccgcccttgacgagtccgccaaggcgcttgctgaggcgcttgccggagccgccgagcagagggaggcggacctcgcggccatgtccgaggccgtctcggacttttaccgtgccctcggctccggcgacgtcccttcaggaagctcccctcagagccgccttcgagccctgggtggtcacgcccgcggcagagtccgcgaagcgctgcaccacggcgtcaggcgggccttcgccgtgctcgcttctcactacgttgtggacctggagcgggttagtgaggggtactgtcttcctgacgaagacgatgctgctctggcggaggtgcagcggcttgacgcggtcgccgcgggcccgagcgcggtgctggcgaccacctttgaggcggaggtccttcctcctgcgacgtcaccggaggccgagatggaccccaccgatggcgggggtggagctgaaggcgcggctccttcccaaggcggcgcctga

SEQ ID NO: 82695 - DNA, 2748 bp, Zea mays
  Clone ID: MRT4577_175433C.1
atgcgggccatcctattccactacggggtggagttgcacaacctctcccccaactccatatcgcaggccgctatcttcgtagcggtatgcgaaggatacttggggatcgctcctcattgggatttgtggactcatctcttcctcgctgagcctttcgccttgtcgacgggggagaggaggatccgtgccgcggtgcgggccggcggctgcattctcttgttgaggcagtcgcgggcgctgcagtacattccggccactcttgcgtcttcgaacaaggggtggcagcgccggtggttctacctccggaatgacggtgagttgctcccaccgttttcccagcgagtggttacggctgccaccgacgcctggcgccacgggaccccgcacgagaggcagaaaaatctcgaaccccttctccaagccctgaaggagttgcgggaggggggacttaccgctgcgggagtgatcgccgctatccaccgtcggagggtgcttccattggcggagcggcggctgccgctctgggagatgaccccggaggctgactgggagggctcacgaatgtcccctgatcctctccccttcaacgccctccaatggcgggtgtcggctgcgatggggaagccggacccccacgcatactcccagcttcggatgcgccccgaccaggggtgcgtgactttggatgtgggctgtcacaaaccctccctgccacgggttccggaggacgaggtggaccgtgcagcgcggcgggttgccgcggaggagaagaagaaaaagaaggacgcggagaaggcccgggcccgcgagcggaggcgggctcgggacgccttagagaagcgccgccgccagcaggagagggacggactcccgagggagccgtcgccggagacgcccgacgacgatgacgacgacgatgatgatgatgatgatgatgtggccgcccgtcttggcctcagcctcggcctggggtgtggcccagagccgtcggtccagcccccgagcgaaccgactccgtcagcccccgaagtcggggcgtcgggctcccgacccgaggcgcgggggcgaaccgagaggccacctgacccctccgccggaggagctgaagtagttccgggggtccagaccaaggcgtctgttccccagaggccgccgcttgtgctgggggtggccgggagtgaccctcaggtcgtcgctgccgtgcccgaggaacctgtttcccaggcgccccaagcgccggcgaagcggacctcggtggccgtttcgagagctgggatccaagaaggctctccccaggcgcggtggatcatggcccggagtggcaagcgaagtcacggccagaccgacctggcaccccggaaggccctcaagacggcgccgagctgtgcggccagcgccactcagccgaccctctcgcggggcaccccgacatcgggggttcgggcgtcgctaatctcggaggagcgggctcccgaggccggctcttcagccggagcggcgatcgtggttgaggaggcggctgacgcccacacggctctgagctcgcctgtcgggccggtcatgccggcgcccgccaccgtcgaggctgccgccgtccttgtcgaagggtgcccagccgccgccagtgccgggatgactgatgcgtcggtgcccaagacctcagaagaggtgggcgcggtcgcgcaacctgtcccgccgggcgacagcctcatcgccgtgcggcggagccccgaggcccggcgcccgttgctccgattccggacccgcgaggcctcggaccccgtcttcgttcttgatgatgagcaggaggaccagtcctggggtgagctccgcgagtgcgcagagacgacgatggggtcgctccgggcgtcgctggaggtcttctgcagagacgtccccaaaatcctccaggatctgacggaccggagcgccgctaagtcgtcattcatccgccgtgaggttgatgtctggggctcactgcgatccctgaggtcttcgcttgccggggctaccatgcgcctttctcagcaagatgccaaggtggcggatctccagctgttatgcgccgacctgagagccgaggcggcagcggcgcgtgcggaggcgcaacagcagcgatcggagctcgtccgggtcgtcgaggaatggaaccggcttcaagaccgggctgccgaggccgaaagccgagccgggacccttgcggccgacttagctgcaacccaagtcgcggcctcggagcatcgtgcccgagccgggaagcttgagtccgcccttgatgagtccgccaaggcgcttgctgaggcgcttgccggagccgctgagcagagggaggcggacctcgcggtcatgtccgaggccgtctcggacttttaccgtgccctcggctctgatgacgtcccttcaggaagctcccctcagagtcgccttcgggccttgagtggtcacgcccgcggcagagtccgcgaagcgctacaccacggcgtcaggcgggccttcgccgtgctcgcctctcactacgttgtggatctggagcgggttagtgaggggtactgccttcctgacgaagacgatgctgctttggcggaggtgcagcggcttgatgcggttgccgctggcccaagcgcggtgctggcgaccacctttgaggcggaggtccttcctcctgcgacgtcaccggaggccgagatggatctcaccgatggcgggggtgtagttgaaggcgtggctccttcccaaggcggcacctga

SEQ ID NO: 82696 - DNA, 3655 bp, Zea mays
  Clone ID: MRT4577_175434C.1
atggcggatcgagtgaccataatccccccgcgcgatccgtggcccttctccacggtgacagcgagtgatctggaggagctggtcggcgaaggtttgctccgccccctcaccgacaagcagcggccagagtggattcctcccgtgggcggagccgctccgtccccaccgccggggtatgtcgtgagcttcgtctccttccatgagcggggatttggtgtgccgacgggccgctttatgcgggccatcctattccactacggggtggagttgcacaacctctcccccaactccatctcgcaggccgctatcttcgtagcggtatgcgaaggatacttggggatcgctcctcattgggatttgtggactcatctcttcctcgccgagcctttcgccttgtcgacgggggagaggaggatccgtgcagcggtgcgggccggcggctgcattctcttgttgaggcagtcgcgggcgctgcagtacattcctgccattcttgcatcttcgaacaaggggtggcagcgtcggtggttctacctccggaatgacggtgagttgctcccaccgttttcccagcgagtagttacggctgccacagacgcctggcgccacgggaccccgcacgagaggcagaagaatctcgaaccccttctccaggccctgaaggagttgcgggaggggggacttactgctgcgggagtgatcgccgctatccaccgtcggagggtgcttccattggcggagcggcggctgccgctctgggagatgaccccggaagctgactgggagggctcacgaatgtcccctgatcctctccccttcaacgccctccaatggcgggtgtcggctgcgatggggaagccggacccccacgcatactcccagcttcggatgcgccccgaccaggggtgtgtgactttggatgtggggtggcacaaaccctcccagccacgggtcccggaggacgcggtggaccgtgcagcgcggcgggtcgccgcggaggagaagaagaaaaagaaggacgcggagaaggcccgggcccgcgagcgaaggcgggctcgggacgccttggagaagcgccgtcgccagcaggagagggacggactcccgagggagccgtcgccggagacgcccgacgacgatgatgacgatgatgatgatgatgaagaggatgacatggccgcccgtctcggcctcagccccagcttggggtgtggccaggagccgtcgagccagcccccgagcgggccgactccgtcagcccccgaagtcggggcgtcgggctcccgacccgaggcacgggggcgaaccgagaggtcacctgacccctcaaccggaggagctgaggcagctccggtggtccaggccaaggcgtctgttccccaggggccgccgctcgtgtcggtggcgcatgggggtgaccctcaagtcgtcgcggccgtgcccggggaatccgcttcccgggcgccccaagcaagggtggtgccgaaggtgccggcgaagcggacctcggcggctgtttcgggagccgggatccaagaaggctcccccaggcgcggtggatcatggcccgaagtgggtgagtatctcggaatcaagcgaagtcatggccagaccgacctggcaccccggaaggccctcaagatggcgccgaactgtgtggccagcgccattccaccgaccctttcgcggggtacttcaccaccgggggctcgggcgtcgccaatctctgaggagcgggctcccgaggccggctcttcagccgaggcggctatcgtggttgaggaggcggctgacgcccacgcagccctgagttcgcctgtcgtgccggtcatgccggcgcctgccaccgccgaggttgccgtcgtccctgtcgaagggcgtctagttgccgccagcgtcgggatggctgatgcgtcggcgcccaagacttcagaagaggtgggcgtggacgcgcaatccgtccagccgggcggcagcctcatcgctgtgcggcggagccccgaggcccggcgcccgttgctccgattccagacccgcggggccttggaccccgtcttcgttctcgatgatgagcaggaggaccagtcctggggtgagctccgcgagtgcgcagaggctacggtggggtcgctccggtcgtcgctggaggttttctgcagagacgtccccaaaatcctccaggatctgtcggaccggagcgccgccaagtcgtcgttcatccgccgcgaggttgatgtctggggctcgctgcgatccctgaggtcctcgctcgccggggctaccgcgcgcctttcccagcaggatgccaaggtggcggacctccagctgctctgcgccgacctgagagccgaggcggctgcagcgcgtgcggaggcgcaacggcagcgatcggagctcgcccaggtcgtcgaggaacaggaccgatctcagggccgggctgccgaggccaaaagccgtgccgagacccttgcggctgacttagccgcggcccaggtcgcggcctcggagcatcggtgcccgagccggaggtatttctcctggttgcttgcagagcttgagtccgcccttgacgagtccgccaaggcgcttgctgaggcgcttgccggagctgccgagcagagggatgcggacctcgcggccatgtccgaggccgtctcggacttttatcgtgtcctgggctccggcgatgtcccttcaggaagctcccctcagagccgccttcgagccttgggtgatcacgcgcgcggcagagtccgcgaagcgctacaccacggcgtcaggcgggccttcgccgtgcttgcttcccactatgttgtggacctggagcgggttagtgaggggtactgtcttcctgacgaagacgatgctgccctagcggaggtccagcggctcgacgcggtcgccgcgggtccgagcgcggtgctggcgaccacctttgaggcggagatccttccccctgcgacgtcaccggaggccgagatggaccccaccgacggcagggatggagctgagggcgcggctccttcccaaggcggcgcctaattcttgtttgaacagtttcttgttggatgtgcgtctcaccgcggctgctgaggcctgaacactttgtctttcttgcatggagtcgtactctcctttctttccatctgcatgttcgtcctggcttgtcaataatagggtggcttctcgagttgggccattcttcgtggcaggtgatgagtgaggtgtccctaacccggaggcacaggagcccctcggctcagtcggccttgccatttacatgtacccgcgttcgctcctcgagaccccgcttctgacatagccgggagaacgcaagaggccccttttttgattgaaaatttttgacacgaagaagtatgcccgatcttgacgcagagatgttcccccttcttagcccccgagggagggtcgggctctgccaaggcgaggccgacccttccttgatgaccgaggcgcagaggctgcctgacggatcgggctccggcccggatatccagcgagtgtttggcgacatccctcggtatgccgggcatgtccgaaggactccgcgcaaagacgtcggcgtctgcgcgaagaaagtcgacgagcactgcttcctatttggggtcgagcccggaaccgatccggatctgct

SEQ ID NO: 82697 - DNA, 813 bp, Zea mays
  Clone ID: MRT4577_175435C.1
tgttcaccttaacggttactccagatctaaatcttgtgaaggacggggttctgttgcatgttgacctggctaaaggaaagcggcgacttggttgttctgctctcgcacaagcgtttgatcaaattggaaatgactgcccagacatagaagatgtcccttgcttgaaaaaggcctttgagattgttcaagaattgctcagcgaacgtctgatttctgctggtcatgacattagcgatggtgggcttattgtcaccattcttgagatggcatttgctggcaactgtggtgttaacctcaacatagacttaaaagataatgaccttcttcaaacactttttgcggaggagcttggtcttgtaattgaagtgcatttggatgaccttgatgtagtgaagcaaaaatttcatgcggcaggggtttctgctaatgtgataggagaagtaacagcagcaccagaaatagagttgcttgttgatggtgaggtttgtttgaaagaaagaacttcagacctcagagatttgtgggaggaaacaagctttcagcttgaggagctacagcggctgaaatcttgtgtcaagcttgagaaagaaggcctaaaaagccgaacatcgccctcatggcatttgtcttttacgcccaaattcacagacaagaaactactgtctgcatcctcgaaaccgaaagttgccatcatttcgggaagaagggagcaacagtgatagggaaatgcctgctgcgttccatgctgctggttttgaaccgtgggacatcacaatgtcggatctcttggaccaaaagacttctctaacggaa

SEQ ID NO: 82698 - DNA, 280 bp, Zea mays
  unsure (1)..(280): unsure at all n locations
  Clone ID: MRT4577_175437C.1
ttttataaaacaaaacatggcacttcaggctatttttaggcatacctacccncctcacttcactaattgtttatgtgaataaaccaagcataagaacccccacagatacataaatcaacaccccactaaatacggctgctaactgtgatctcgaatataggtctctagctagataatccttgaactaaaacacaacatctcacaaacaatttgtcataaaccatggaaagatatgagcaacctatcgttggccatcaaaaggaaccacaacctgcgcact

SEQ ID NO: 82699 - DNA, 774 bp, Zea mays
  unsure (1)..(774): unsure at all n locations
  Clone ID: MRT4577_175438C.1
accacacacactacctccgctcctgggacgcactcccctcgcttctcctttccgtctcctcagacgaaaatcactcaccattcggttcgagcaatgccctcatgctgacgactccaccaacataagaacaagagcacccatcccactcacaagtccctctcatctccttccctatcctagttccatacttccattgctgcaagaaagcgcctaggtaggcggtgcggtcagcaagatggcgaggggtggcagcgccgtggctgtcctctccttcctcctcggcctcccgctcctctccgtcctcgtcgccggcgaggacccgtaccggttcttcacgtggaacgtcagctacggcgacatctacccgctcggcgtcaagcagcagggaatactgatcaatgggcagttcccggggccgcagatagaggccgtcaccaacgacaacctcgtcgtcaatgtcttcaacaagctcaacgagccattcctcctctcctggagcgggttacagcagcggcggaactcgttcgaggacggcgtggccgggacgacgtgcccgatcccgccgggcgccaacttcacatacatcctgcaggccaaggaccagatcggcacctacttctacttcccctccctcgctcacnnaggggccgccggcggnttcngcggcatccgcgtcctcagccgccccaggatcccagtccccttccctcccccgggccgccgactacaccgtcctcatcggcgactgggacaagaacaaccataccgatttga

SEQ ID NO: 82700 - DNA, 133 bp, Zea mays
  Clone ID: MRT4577_175439C.1
attttttgaatttggaaccaaaatccataaaaaacctgaccgaaattcgcatcttggtcaacagcgaacagcgaaaattggaaatttcaccaaaattcggtgatttccgagaaacgaatccgtggttgggcat

SEQ ID NO: 82701 - DNA, 168 bp, Zea mays
  Clone ID: MRT4577_17543C.1
attgactaagaggggcccgctaacaaggcctaggtggggatgaaaaaggatggtgcactgggcttacctatcggaacctgatgctcgtaggcaagaacaggtaatcgtagcaagtgaggacctaactcgtcaactggagctactaacacttagcgcttataagagggg

SEQ ID NO: 82702 - DNA, 180 bp, Zea mays
  Clone ID: MRT4577_175440C.1
agaaggaatgaaccttgcttcttcaggacattcttctcctgggatagcacacgggcactggttcatggaaactcttttgagaagagactttcagttcttgtcggaatccgttcagagggtggcaataagagctcaggtgatggtggaccaactcagatggcatcagccttggcagctctt

SEQ ID NO: 82703 - DNA, 384 bp, Zea mays
  unsure (1)..(384): unsure at all n locations
  Clone ID: MRT4577_175441C.1
acaccaacacaagnncgacgaaggcagcgagcgncgcnccncacccacgcggggcgccgaggaagagagagagaccgccgcaccgcggggcggcgncggcggngcgggagcccncccgccncgagcgagancnggcgggccacagaccgaccngacaaaagggngaagagccgccgcancggagcaggcnangaaggnggcccaaccgggggcgggggagcccgnaagngcccagacaaagagggcgnggnggnngacaaccccaagccccgcnaggaggcccggaacagngacacccggccaagcgacgagcccgggcgnganganggngngaagcagngcaggggcaggaaccggngcnngaggacggggggggagaagcac

SEQ ID NO: 82704 - DNA, 361 bp, Zea mays
  unsure (1)..(361): unsure at all n locations
  Clone ID: MRT4577_175442C.1
cggacgcgtgggnnnaggattgcctcgctcgcctcctccaccaccggtccaaccaacctcgccacctccctctgcctcccctccctcctcccccaccgcatcacgcagctccaccggttttcacgacttggagcagatctgctacgccaccgccacgtagaccaacttggaggagggatcccatctgaatccgattcccatcccgtccgaatctcccttcccactcgcggacgggatgaccttgtgttgcctctcccgcgcaggcgtcagatctccaggacaagtttgaggccaaccgccatgtggatgttgaccttgaggagaagtttgatgtaataatatcataatggatgggctatat

SEQ ID NO: 82705 - DNA, 334 bp, Zea mays
  Clone ID: MRT4577_175443C.1
tggaactttgggctgatttagtgcttgaaatataagcagggccaggaaggtggtggttagtggtgagagtgtgagaggaagagtaggaggaggggctggttacgatggggaaggtgaagttgaagaagtatatggtgaaggagactgttgtgaagactgatgtggtgatgatgaattggggtggtggtaaggttgggtaggtggattggtcggggtaggataagggtgggtacgtgaagtcggtgcgtttgtctcgttgtattttggtgtttgatactaagcttacgtagacttattatgaggtgtgttattttaagtcttttcctgagttgga

SEQ ID NO: 82706 - DNA, 330 bp, Zea mays
  Clone ID: MRT4577_175444C.1
aactccagggcgacccacgcgctcggagcccaggaattctataaagtcgaccttcgcgcctacgcgcttgactataatctagcggggcgtacatccattaacggtgtcactgccatcattggttgctgtgactatttgatttctgttcacaatgccacactgcatcccaacatgagccatatttcgaccagcctcggggccctcttgagtctcctggctcacattactctacttgcgctccctgccctctatcacgcctagaaaccttgctggtgatgttactcaaggaatctcacatctccctgtgagattctctttgaccattgtgca

SEQ ID NO: 82707 - DNA, 385 bp, Zea mays
  Clone ID: MRT4577_175445C.1
gtcgctcggcctcgccggctgggtccgtaaccgccgcgacggcagtggggaggccctcctctccggagaccctgagaagatagaagaatgataacccgccgcctgccggtcggccaccacaagcgccaccgtaaacggcgaagaacgctacaactgctaccccgtggatccaggcaaacgaacagagagcaagtgtaccggttgattccatggacaacctgtacgagaaacaggacgagcttcagaaggcgtatgtggacgcacgatacatgcactactacgtggaatctgcgtacaaagagcacaggcgacatgtaatgtaccgaggtgtgacaacatgaaaagcattcctatctgttgtgtgagagaattcatgacacattgt

SEQ ID NO: 82708 - DNA, 322 bp, Zea mays
  Clone ID: MRT4577_175446C.1
atttgttacttctttgtttttttaccacaagaaaggcgagagcctcctgcttacattcgctttttctcgaaaaaagctatatatccacgggccttttgaagaaaaaagagagaactgcccattagtggggccccggtcccgcaggcacgggggagtacctaagatcccgtgaccatggccttgggtccaccacaaccattcggcccggaacccaaaggaaaccgcccgcatcctgtgccaatcgcccgccggggccgaacatgtcacgcacacgtacaaggcgcggggggtacaacggaaacgggtcgggacggcacacggg

SEQ ID NO: 82709 - DNA, 1509 bp, Zea mays
  Clone ID: MRT4577_175447C.1
accctcccagctcaagcccacctccctgctcaagcggccagccgtccactgcctggctccctcgtccggtcgttcccgtctccctcctcgcgtcgcgtccaccattgttcctgtcgacgctgcgccgcacggctcgcaccgccgacagtgcctcagtcctatcgagcctccctcttcccagatcaggccctagctgggctacagccgccgccgccgctgccgcatccgtcaccttcacaccgcgtgcgcgcgcgctctctctctctctctctctttgcgacgactggacgggctaccgcagtcgccaccataggcaccacgcccttcgctgatctattcgctggcgaagaacgctctcaattaaagatcgatggagtgcgtggtgcagggaatcatcgagaaccagcatgtcgatgctcttgaggttctactccagggactctctggtgtcccgaaagagcgttttagggtgcatgagctctgccttaaaagtgggcccaatctaggtgttgtcccatcggaggttcgtttgttgtgtgacttagctcagcccacaccatcctggaccataagacatgttggtggtgccatgagaggtgctggtgcggagcaaatctcagttctggttcgtacagttgtggagagcaaagctagcaagaacgtcttgcactacttctacaccctagggtacaagctagaccatgaactcttgaagagcggttttgcatttcgtttccaccgaggtgcccaaatcactgtcactgttacatctgctaacaagatgtcaaggctccatgcaaccgatgaagctacgtcagtcactcctgccatacagctagtggaaatcacagctcctgctgctgctgataattacaatgatgttgtttcagctgtcactgcgttctgtgaatatcttgccccgctgctgcatctgtcaaaaccaggacactcgacaggaatcgttccaacagcagccgctgctgctgcctcactcatgtcaagtggcggtggcaaaaccttgtaatgctgctaggacagccaaagtccgttcttgctgctaggacagccaaagtccgttctttgagatgagtgggcgtggctaatgaggtggccttcttcgtgccgagcatttgagcagtcagttttgcctgctagtgttgtccatgtctgacacatcgttgtgccaaccttgctcttggtttgactggttgcatgattgctgatgggtaatgccctgccttgtagttgcagggtgtaacaatctagtattaccaatattaaaatttctcaaaaatccaaaacaaaaaaaaaaaaaaaaaaaaaaaaaaaaaaaaaaaaaaaaaaaaaaaaaaaaaaaaaaaaaaaaaaactcgggagggggaaaaaaaaaaaaacacacaccccacaaaaaacaccaaaatacccaacccataaacaaaaccggggggggccgtttttagggatccattttttcgtccccgggggtggaaagtataggctttttttttg

SEQ ID NO: 82710 - DNA, 502 bp, Zea mays
  Clone ID: MRT4577_175448C.1
ccccattcagtgttgcttgctgggtagacgaacaacgctttgtgcagtcctgggaggtaaggcataagcacaatgtgattgttttatttattttgttgtactttgcagtctatagggacatacttaaattgtttttctatatttcacttagatgttggattatttatcgtgggttcattaattaggtagaccatgtgagcattttcttggagttgttcatgtagataatactacttctttgtcacttaagaaagcaattgaggatttacttgtaatgaatggtttgactatgactcaaattcgtgggcaaggttacgatggtgctagcaacatgaagggagaggttaaagggctcaaaacattgatcatgcaagagtcaccatctgcttattatattcattgttttgctcatcaacttcaattagttcttgttgctgttgccaaagggaatagtgactgtgttttggttttttgaccaagtgtcttcttttgctgaatattg

SEQ ID NO: 82711 - DNA, 544 bp, Zea mays
  Clone ID: MRT4577_175449C.1
cggacgcgtgggcttccgctgcattttcaggagtagagagaaccaagggaggcactgcaacaagaatatgcttgatagctacacttcgtagaggaagaagtatccgggaagaatggatgagacaggggatgctcctctgaggtcctgcatgttccttgtcggtgacgagaaagagcggcttataattgaagcaactaataagatctcttttgaagatgcaaagcttgatgagatggccatcgcagaaaactacaacctttgcaaaattgttgcctcaaaggagaagatgatcaaagagctgaaagaatccaaagcgcattcagaccaggagttgaccgatgcaacggcaaggcttgaattttcacagaaacaatgcgcctccctcaggtatgaggtgcgcatgcttcaggaggagcttgagattcggagcaaagagcgagagtacgacctcaaatcaatggatgctggtcgaaaaaagcagcaggagagcatgaagaagataactgcactagaagcagaaatgccagagctacgggccatggtc

SEQ ID NO: 82712 - DNA, 344 bp, Zea mays
  Clone ID: MRT4577_17544C.1
cattgtttgcccaattccataaagccggatccggttgcaccaaattttattaccctggtggggaatggccctttacaaccattggtccttgccttcaacctgggattgattagaaaaaagcttttttcctccgtcaacccttttccatatttaagggctctatgtgtcttttgctctgagagaaagtgcatatgagactctgctatctcgtgaaaaaactcttgcatgaggacccctatacacatgtagaaatatagagaatttcacgagaaagcctcacatctgtctttcacagctctcatacgacattgtatgttataaaagcggcgaagcactactagcta

SEQ ID NO: 82713 - DNA, 400 bp, Zea mays
  Clone ID: MRT4577_175450C.1
cggctcgaggctctaataccttattctggacagataagtggcttaatggatgctccatcagagaccttgctccagaagtggcgtccaaggtgtctaaacgagctctcacctcattgacagtgagtcaggctcttgtgaacaggcaatggatagctcatatcaaaacccccctttccttgattggaattcaacaatttcttttcttatgggatactttaggggaagtgcagctttctcaggaggaagaccgccatgtttggaggcacgaggcatcagggctattctcttctaaatcctgctacaaagtccttctctttggttctactgtttttgagccttggaagagattatggaagacctgggctcctcctaaatgcaaattctttctttggttggcaat

SEQ ID NO: 82714 - DNA, 717 bp, Zea mays
  Clone ID: MRT4577_175451C.1
ccggccgggctccccccacaatgtcgtcgcccctcccctgcctctccctcctccgcgcccggcaccgccatgaccaagcagcagctaggtctgcgtgcgtgtgcaaatggagagaagggatgcgttggagaagaagatggaaagagcatggtcgtgccgcccagtgcttgccggggcgcgctagcgacttgtgcccatggcctggccggcggccggtgtcctctgttgccaagcgttctctgttgccggagaagaaatgtgcgtgcgttctgaaggaagaagaagacccctttgggtctatgacgtgtgggcccaaggcagggaccgagagatgatgatcgagccagtgatgtggtgccaaccacaagatgcagttggtggacgacctgaagactgatggacttacccagttgatgctcgccaagcgagtacccccccagcaaacactacctaagtgttaaattaaaggttcccttagggtgattggttgctggtgtgacttggcctccatccctgccaccgggatagacggtcgagtgggttattgcttccgcaggagaggaccaggaggagtagtgtggccagacttcgccatgttactcggttcttctccgttagttatttccgctgcattaaaatttatggttattatttttgaaactctgataatgtaatcactaatgatacttattaaatttttggtattatgttttatcg

SEQ ID NO: 82715 - DNA, 1317 bp, Zea mays
  Clone ID: MRT4577_175452C.1
gccggccggtccggggtcttcttctcccacacggcagcagcccacaccttcttcctccctgcgcccagccctccccaagctccagcgcgcaggggcagcggctccatggtcgagcgcccttcccggtgctccagccagcctcctctgccgtgctcctcatcccccacagcagcgcgcagggagctttccctcttctccgcggcgtctggcagcagggaacctttctcccctgcgcgcagaaacttctccatggcgctggtgaagctcgagcagccaagctcccatgggcgccacccctgcagttcccttggccgacgccctctgtggcagccatggcacctccctccctctctgctcgtgcgcaggaagcccctcaagcgcagggaacctcggctccttcctgcaggggcgagctccatctctgcagcagcctacaccatctctggcgctgccttggtccattttttttccctgcgttctctctgctctcttggctgctggcagtcagggcgctgaaccctgctccctgctccaaaaatccagcgaggtcccgtctccaaacccgctaccggggtcggcgagtttctccatctccggcaccggccacttccttcgccgcacggcgtcctccctgcttgcgtgctgctgcgcggtgccgcatggtgattgtcaggtgctcgacgaaataccgcagcaagcagcggtcctgagatcccctctgtgttgcttgcatcgacccgatctgcgcagtcccgacgcatgttgtcaaactccgccaccgtcaatgcttcacctcgcgcttgcgtgctcgacggatcgcagtagcgagccacgcccttcactttgtttcggtctcccgtgcgcgacaacgcgttcgtcttcacaccacatgtccagcaaccacgactgaggtttgatatggaccaagagatgatgatcgtgcacgtgatgtggtgccaaccacaagatgcagttggtggacgacctgaagaatgatggacttaacaagtggatgctcgccaagcgagtgccagccagcaaacactatctaagtgttaaattcaaggaactccttggatgatttagttgctggtgtgacttggccttcatccctgccaccgggatagatggtcgagagggttactgcttccgcaggagaagaccaggaggagtagcgtggccaggcttcgcccatgttgctcggttttctccgttagttattccactgcattaaaatttatggttattatttctgaaaactccgataatgtaatcactaatgatactttcttaatgtatggtattatgctttattgt

SEQ ID NO: 82716 - DNA, 1464 bp, Zea mays
  Clone ID: MRT4577_175453C.1
ccccacgcgcacaggcagagcgcagcgagctcgccggcgtccatggcgtggcacctctgctctccctctcgcagcgccccctgctccttctccctcgcacagcagcagccgagcgccctccctgctcctcctcctggcgagcggctgcagcagggagtcgtcttctccgtggtcggccagcaatcgagctccccagcgtttccctctgctgtccatggcgtgggcgagctctgatccatggcgccctcctccccttcttcttcctcaagccagcaggcgcctccccctactccctgggcacagcgcccccttctctccccttggtcacggcttcctctgcttcttgctccatggcgccctgaattttcagcagagagctttttttccccattgccgacccccactattgcagactgagccccagcgtcgcccagcagccatggcgcccaagctctctgctcccatctcctccttggcgcagtgggagaagctcccatgggcgccacccccctgcagcttcgccttgccggcgcccagaaattgcagcagcagctcctcccctctctccatggccgacgctcagagctccagcagccgctcctccaactccccatggcgtactgcagcagacgccttggagcaaccccgccatggcttgcgactcggtgtcctccctgcttgcgtgctgctgcgcagtgcccatggtgcttgctaggtgctcgacgaaatgtgcggcaaccccgtcgtcttcgtgcgctgtcgactcgctgtttggttgagccaatggacaacacgccgtgatgccgccgtgtgttcgctgtttttgcgcagccccgaacatcgacgtcgttcaccccggtgagatcgcgacgctccttgtttggttccgcatcggcgttattttcatacgattaattgtgtatgtgtgctgttttatttttgtggaggagagaaccccgtgttttgcgagaagaagggaagccgctcgacgctcgtcgatgttcgtagcgatgcacaaatcggaatctccatcgtcctcacaaacatcgattgggtttgtttatggaccgagagatgctgatcgtgcaagtgatgtggtgccaacaacaagatgcagttggtggacgacctaaagagtgatggacttaaccagtggatgctcgccaagcgagtacctcccccagcaaacactatctaagtgttaaaaattaaaggtactccttaggatgattggttgatggtgtgacttggccttcatccctgccaccgggatagacggtcgagtgggttattgcttccgcaggagaggacccggaggagtagcgtggccaggcttcgccatgttactcggttttctccgttagttatttccgctgcattaagatttatggttattatttctgaaactccgataatgtaatcactaattatacttattaaatttgtggtattatgttttattgt

SEQ ID NO: 82717 - DNA, 199 bp, Zea mays
  Clone ID: MRT4577_175454C.1
ggccaacaaacgagcggcggataaaaacagaaagtgctaaatttacagtagtggatttgagacttaacatgttcctggaacacaaactaaatttctagctggtttgcagagagcactaccaaatggtgattatagtttcataggcattagcgttagatataaattgtttgcttagtacaggtcaaaatggaccgaagtc

SEQ ID NO: 82718 - DNA, 921 bp, Zea mays
  Clone ID: MRT4577_175455C.1
tgggaccctcgaggccggccgggacacctcgcctcctgcttgctccctgctcggagcagcaacctcccatggcgcgccctgcatcgcccatcgttcggcctcctcatagcatggcgctcagggcccgctcggccctctcgttcgcgcgcagggtgctcctgcttccccatgcccgagctcgacggccagcagaaaccaaggcgccatctccaagttgccctccatggctactccctctccgtggcaagcgcgggcttcccctaagcctcgacgctcggcgctctggccatggacgccctgctcctcgtctctctgcccgacgcccagcccttctacaagtgcaggcgcccctacatctccctggcgcaggaaattcccaagtgcaggcgcctaggactcccatagccgccagcctctccattgcagccgagctcccttacttccccagccatggagccgaactccagctccccacctccctgcgtacgtgctcaaacagaggtagaagaagccactttgtgcctatgacaggaccgagagaagatgatcgtgcaagtgatgtggtgccaaccacaaggtgcggtcggtggacgacccaagcaaggatggacttaaccagtggatgcgcgccaagcgagtacctcccccagcaaacactacctaagtgttaaattaaaggtacctccttgatttggttgatggtatgacttggccttcatccctgccaccgggatagacggtcgagtgggttactgcttccgcaggagaggaccaagaggagtagagtggccaggcttcgccatgttactcggttcttctccgttagttatttccgctgcattaaaatttatggttattatttctgaaactccgataatgtaatcactattgatacttattaaatttgtggtattatgcttt

SEQ ID NO: 82719 - DNA, 528 bp, Zea mays
  unsure (1)..(528): unsure at all n locations
  Clone ID: MRT4577_175456C.1
gnattttactatgtacttccattggccacacaaatgaagtttggatattttttgtatgcaccactggnanacttcacacctttgtggacttggctaatcatataactcagtgtccaaaatatatcataataaacaattatagacatgtcaaattctgacaaggtaccatacagattcgccccattgcagtgttggtctggttcacagtttctttgttgtggtgcttgttgagttgctgtgaggttgtggccttcatcatgtgagttggtgttgtntnctgttgtaactgtagttttccctctgttcttctncttntcaattaatacataggcctactgttaacctgctggcttttttaaaacaaacaaacaaacccagttnnaccacttcgctttagaataaactaattgaatgttnntggattnttttnacatgatcngactgaacccatttgtctcagttatgaggtcttgtttgactttggacaaaaagaagcacaatnnngatggttctatatacctattatgt

SEQ ID NO: 82720 - DNA, 1720 bp, Zea mays
  unsure (1)..(1720): unsure at all n locations
  Clone ID: MRT4577_175457C.1
cattgggtacctcgaggccggccgggacaactttcttctttctctgttcctggtgcagcagacttcctcccagcccatggcggcctcccttcctctcctcggctccattggtgtaggtgagcagcagttcctcctctcctccagggcgtcgcatctccagtcggccttattcctcccccccatccgagcgcccaagcctgcgcccttccctgctccatgggcgtgagcctccacccccctgcaatagacgctgcgcgagatcctcccatggcacccctgttttcctagccatgcagctccctactcgtcttccaccccgccggcagcttggggtccgagcaggcacaacaggagcatagccccatggcgcccaggtgttctagatgctctgctttggcctcgcgagctcgctgcgggacgccctagccgctgctcgccccgaccacatctccctggccgagcgctcccctgttgaagccccttgccgatgccttgccctcctccctccccacggtcttcttccccatggcgtcgggatccctccttccgacggctgtgctcctcaagcgtgctctactcgagctctgccggatctgcaacttccctgcgcgcgaccgcggcacatggtcctgtgctgcccatggcctcaactctccagctccctccatggccgagcaggcgctcccagcagcagcgatgcttgtttcctctccctagccactacgccatcatgctcccgctgcccctgcctttttttcctaagagccgagctccattcctggccgtgcccaggaagtcctgtccgtgggttggggccaaggctttccctggttggcctcgccgtgagcagcacccccgatatctgcgcgcgctgccggctcgctgttttgggaagcccagtggacaacacgacgtcgacgctcaccgggtgtttgctgtttttgcgcagccccatccgcgacgtcgttcacccccggtgagaccgcgatgatccttatttgattccgcatcgatgttattttcctatgattaattgtgtatgtgtgttgtttatgatatgttttgtggaggagaaggcaagccgctcaacgctcgtcgacgttcggagctatgcacaaatcagaatcgccatcgttcttgcaaacgccgtttgggtttgtttatggtgagccgatgcactgtcgctctcgatcgactcgattaattacttttgaatggatgtgtgtaaaactatttcggttactgcgcattggtaggatcgcgtttgcgattggagaacaagaggttgttgatgtgtatgatttgtagtttgtataattatattttggtcgatgtggtgtacgttggtgttggaatgtgtgtgggtataaaaatgttttggttatatgccgtagcaaggttgccttaacgtttaggtaagcaaacatgttgtgttgtttaatatgatgagtaaattggaaatacatgggatgcgaggatttaattagtacacatatatgtgtgtgtgccgtggtgtattataaggatggtggcgtaagatatttgattgaggtgtgcgggtatatgccgngatatggttatactcgcaacggagaaagatgtatgtattgtgacacgacgcttaagtcgctattatataatccgggtgaaggatgctcgtgatggttgggtgattaangagtgatgtacnggcaagccggaagttagttaatttttcaaa

SEQ ID NO: 82721 - DNA, 265 bp, Zea mays
  Clone ID: MRT4577_175458C.1
ggggggggcacgcgtccaggggggatctccttcggggacaccagattggggcataaataataaacggggggtaaggtgctgggctcatggggcttccaactaaaatcttgtagttactaccctgatctctcttgggggcatacactgggcaagggaggtccaccggagaagcaaggtactacgggtgaatcaattaggtgcggtggaccctcaccactaatggctcccgggatgaacaatggcgacgggtttgggctgagcaccc

SEQ ID NO: 82722 - DNA, 621 bp, Zea mays
  Clone ID: MRT4577_175459C.1
ccggccgggatttcctctccctccctctccccacgccactctccctactccctccctctctctctatctccctctctctagcaccccatgcagcagcaacccccctccaatggagctggcgaccgagccctcccaagctcctctctcaccttggcaagctctcccatggcgtctccccctcctctacggcagtaaggtgtaggaccgagagatgatgatcgagccagtgatgtggtggtaacaacaaggtgcagttggtggacgtactgaaggatgatggacttaaccagtggatgctcgccgagcaagtacctcccccaacaaacactatctaagtgttaaattaaaggtactctttaggatgtttggttgatggtgtgacttggcctccatccctgccaccgggatagacggtcgagtgggttactgcttccgcaggagaggaccaggaggagtagtgtggccaggcttcgccatgttactcggttttctccgttagttatttcccgctgcattaaaatttatggttattatttctgaaactccgataatgtaatcactaatgatacttattaaatttgtggtattatgttttagaaaaaaaaaaaaaaaaaagcggcc

SEQ ID NO: 82723 - DNA, 408 bp, Zea mays
  Clone ID: MRT4577_17545C.1
agaccgatgatggtcacctagagatgcaatcatatgtttgctcataaactcaaatcattggcagacgacatggactgcttgatcgactgtggattcattgttgagggggacaacattgtaggcgatggcgtatgacggaattccatgcggataccattaaagtcaagacgttcggcaagcgtacggcgcagaatcgcactgcggacaatggaatgacgacgaatagggactaacgaatggaatggtctaagcacgtgtgctgaaaaggatactgctggacggatctgtaagcatcgattgattgatgatatgcataacttgaaatggatgaccaaggcataggcgaactaagtttgtggcaaagcacatgctgctgcatgaatctacagtaaccgaagcagacgaatc

SEQ ID NO: 82724 - DNA, 207 bp, Zea mays
  Clone ID: MRT4577_175460C.1
cgagccggccgggaccagtcaccttcgttaggctgtttgcccatccatccacccatcgtcttgcacggcaagaaatcgagaactccgcaggggtggcccacttgcccgtttgtcttctcccgtcgggggggcggaggtcttctccggctcgtccagtctgcgattctccgcttctgggtctgcgggcccctcctcgccgccggcctt

SEQ ID NO: 82725 - DNA, 586 bp, Zea mays
  Clone ID: MRT4577_175461C.1
gtcagactctcatgttcggcccaagccaagtccaagctgcctgttgaggcaggggggcataggtcggctctaaaccgggaatgacatctgctgcttcactctcataggacttccaataaccctgagctctctctcagactgactttcctgtggaccagtgacactaaatccttgagctgcattagaagatctctgggtacgcgccctcatcgatcatataatcctaacaaagataaaccgaccaccagcgaccctcgttaacgctcacaaatctggaacctaccggaggacgcttgatatcactacggttagcatctatcaccacctccgtacggaaccggggcgcctatttggccttgaaggccacttgaatagacccattgaaatcaagatctcagcttgaatccaacctacctgggagaggacgtgcttgtcgtgggcgacgaccattgacaggaattcaccagcaccgtgagctgcataaagatcctcttccccaatgaagcgccacaccagaacgaagcagggcctggcatctcatgagctccgaccccggacagaggctcagaagcagctgagactacta

SEQ ID NO: 82726 - DNA, 358 bp, Zea mays
  unsure (1)..(358): unsure at all n locations
  Clone ID: MRT4577_175462C.1
ggggtcaaaaaccttggaatccataatggcaaatttttttcatggaattacccaggggcgggaatcttaagattcaggggaaggggttggtcgattgggggggggtggaagaggttgggggggggttaaagcccctttatttggttggaagggaatttaatcaccttcaattcccttagatacagacacaaccggacaaggcctaagagggggggnggtttatgaaattncacaggggagcaggggctaacatggtgggggggggtttcttattttngaactttggtttggncttcaggctcgcacttggggaagggaagattnttaggggctagcacacttttaaacggggtggaat

SEQ ID NO: 82727 - DNA, 460 bp, Zea mays
  Clone ID: MRT4577_175463C.1
ccggccggggcgttgtccgttgtatccccaccgggcccaaaccgaaccgttctttgcactttcgcattcgcagatcgaaccctcttcgaccaaatatttgacacaagttacctttgcctgtattgctttcttgcgcgtagccccctgaagctatctccgacgcgcgcccgtgtccttcgccggagcttgccatatgaatggtcaaaccccgatggggctcgccgcagcagcagccgcagcagtgaggccgtgccgccgccgcctcctctcgtccgcctccgctgccgcggcgtcaaagacggcggcgcgcaccgcgaccccgctatttcccagattgccccacccgcaccaccccccgtacggccggcgcctccccttcctcgtctccgcggcgtcgcagtcgcaggcctcgcagaccggcccggacacccatgcactggtccccgtcccctttgaccct

SEQ ID NO: 82728 - DNA, 549 bp, Zea mays
  Clone ID: MRT4577_175465C.1
gttgataaagctcagccacaaggacctggtagagaccgtaatggtgaccgtgattatgaccgcgagcgtggatctcgttatgaacgtggtcgtgactatggtggtgggcgtgcaccgcgaggtggtggtggtggtggtggtggtggtgactgcttcaagtgtgggaaacctggtcattttgctagagagtgcccatctggggatggtgggagaggggacagatatggtgggagagatgacaggtatggtggcggtggcggtggcggtggcggtcgttatggttctgaccgtggtggtgaccgatactctggccgtagccgagatggcggcagctatgggggtggcgatcgctacagccgtgaccgatcaggtccttactgatggccttagttcttgattgagaagtatgtgccatccaggcttctttttggttatttgttcttgttgtggcttggttgatactgtggttctggatttgggtacttgcgtcctatgatcattttattctgaccaattgatccccgaatgccccgagattcttctttgttt

SEQ ID NO: 82729 - DNA, 1826 bp, Zea mays
  unsure (1)..(1826): unsure at all n locations
  Clone ID: MRT4577_175466C.1
ctcgaggcggcgggaaaattacaaaactcgcccgcccaaagccccaattcaccacccaaatcctctctgccgcccgccgatggccaccgccgccgccatggccgatgacgacgacttcgcctcgccgccgctcgccccgcgtgcgcgggaggaaggaggaggcagaggcgtgtaccaggtgggcggcgtgccggtggagttcccctacaagccctacgggacgcagctggcgttcatgggacgggtcatcgcgacgctcgaccgtgcccggcggcaggggcgctcccacgcgctcctcgagtcgcccacaggcaccggaaagtcgctctccctcctctgctccgcgctcgcctggcagcggcactacccgctccgttcccctcccgcctctcgttatgaacgtggtcgtgactatggtggtgggcgtgcaccgcgaggtggtggtggtggtggtggtggtgaccgcttcaagtgtgggaaacctggtcattttgctagagagtgcccatctggggatggtgggagaggggacagatatggtgggagagatgacaggtatggtggcggtggcggtggcggtggcggtcgttatggttctgaccgtggtggtgaccgatactctggccgtagccgagatggcggcagctatgggggtggcgatcgctacagccgtgaccgatcaggtccttactgatggccttagttcttgattgagaagtatgtgccatccaggtatgaaagtctatctactattataaggcttgttattgtgtctggaactttgttatcctgtagttggagtcgacatgtaccgtgagaaatcagctgctttgttatagaccgtattactgaccggtttattatcgtttcctgcttgccaggcatatgacttggtcatagtgcttggcgcttggatcctgcatgtttgcttgatgtgctatttggctattaaaagatggattttgtcactgtgtttgatgaccctgatcctaattaagcttatgcctgtgatacgggggattggatggcaagttagtgtccgcatttgtgttctttttggggaagcaaggggttgactactataatctgcttgaacacacctacagctacaagaaaaaactatgttcttgttacctcttctgaaagcaagtgatgaatcgtccattagagaaaattaactggtaatgttttcaatcttacatcttcaatactgtgttacaacgtcattctcaaatgacttttgttttggcaggcttctttttggttatttgttcttgttgtggattggttgatactgtggttctggatttggttacttgcgtcctaagatcattttagtctggccagttgatccacgaatgcaaagagattatcctttggttccattctatgtgcctttagcattggagggcctctatttatggttgcttgatgaactggttatgtttgcttcgccatgttggtggggtgttccttgagctgtcccgtgttccttgtgacttgtgagaacaccagaggttatgcttgcctgagtggatgtgatgctacctggttgctgttcctttgacaatgcaccaatgtcctatcgcagcttatatcctctggttccagattaattactggtgcccctttgagaggagttatgatgatgttattattcatcagcagcattctaattgcccttgatttagtgtagcctttttttcttagttcaccgaatctcaggatgcaaacgttaggttacttttactgttcgtactaaccaattgagcttttgtactaaaaaagtatgttacattaagctgctncaggttnccgttntctcc

SEQ ID NO: 82730 - DNA, 567 bp, Zea mays
  Clone ID: MRT4577_175467C.1
ccggccgggacacgagaaaactgcacaccggaggtgagtccatctagaactataagtctgcatcgacgcagtagaggtctcgcgcaagtacacctgccgcggtgcgatctccattccaaaggaacaacctaaactgcaggcgcgtcccagatatatatatgtgacccttggactccttgactagactatctacaagtcccactacgtcagccaggtcagcatctgcgccgagtctggagagatgagagtgctcgccaaccacgttccttccattgagaagctgaagactgctctgactgaggatgtctatggaacatctggctgatatgagctcttcctctctgctggattcgctatcgtccagtccaactgcgtccttagcatcaaatccgaataggattacccccttgaggacttcagcgctgaggtcatccgagctcatatcgccgaggtccagaaggttgccaacggcagcggaagcgagcaggatattgctgaggccaagatcgagttggaggttctcgagaccctgtctgctcatgtgaaataagcgtgcatttagtttgt

SEQ ID NO: 82731 - DNA, 308 bp, Zea mays
  Clone ID: MRT4577_175468C.1
tctcggcgacctaaaatggttaaaggtgctcaagatcacgtggtccttctgccactccaccgacggagagtgccgtgcggcgcttctgtcgtccatcggcaggtggtcccacctccagtccctaaccattcactgcggactcggctgctccatggagttcctgggcaccctctcctatccgcccgagcacctcaggaagctcaaggtgacggggggcgtgtttgcaggcgttctccggtggctcagtgtgccttcacaccacttgtctttcctgcagatcaccatttgcagcatcacggcagatgatc

SEQ ID NO: 82732 - DNA, 143 bp, Zea mays
  Clone ID: MRT4577_175469C.1
gccacgcgtgctctaacatgtctatctaccactactactacccatcatcaacgggccggcacacactacacacactctaatctatccacacagccaacacagataccgacaatacaggaggatgaagatctcagcaaaatgtc

SEQ ID NO: 82733 - DNA, 517 bp, Zea mays
  unsure (1)..(517): unsure at all n locations
  Clone ID: MRT4577_17546C.1
ggtcgcccagcgtccgccggtcgctcgcagaccccacacacacacttgccgccgccgccatggtaaggttcaggatcgtgcccggctggaagtgcgcggcagaccccaagttgcaaacagacagaaaaaagccgcggccggctcacagcctgcaatacaaccgcgttcgtcaccgcgtgtggattcgcagagcgcggccccactctcgggaagagattagcttggctttgtgttttattcccactgtttcctcctgtgcnctgctgngcttcgcttttctgntcgttttccgcttctgttcgcggtttcgcccgcgttttgtccttttttttggttttttttttgttttttttttttttttttttttttttttttttctttttttttttctttttttgtgttttttttttttttttttttttttttcttttttttttgtcgtgctcttggtcttttttttcttgtttttttttttttgttttttttttttctttctttttttttttttttttttttt

SEQ ID NO: 82734 - DNA, 552 bp, Zea mays
  Clone ID: MRT4577_175470C.1
gtgaacggaggtatagtataccatgactgagattgacggcaggtgtttaaagtacaagtcatttatagtgacctataagtataccacgactgatgggtgttaaaagtacaattgcgtatatgaggccaatgcttatgtaagaggccaattggctgaataaaagcagctataaacacatctagactacttgctacctgtagatgaacagctgaacagtgcgactgtcatgagtatctacagcatggaccactcgtagttggtaagatgaatgcccatggcttttctttttatggaagcctgtgaaacttttaagacttcctgaattggcatcaactgaggacgccacaggagcatacccaaccttgcacccaatcactaaggtattcattgtagcttgtccctttacagtaaaaagctttagattcacacatgaagctggccaaatttgttgccttgggtcccgcctggcccgcgagagcaaactggatatacttagaagtgttgaatgcttcaagatggtggcatagattgttgatactagccataactgac

SEQ ID NO: 82735 - DNA, 1374 bp, Zea mays
  Clone ID: MRT4577_175471C.1
ctggggaggggaacggggccgggctaaaaccatcgccctggccctgcctccgcctccgcctccgcctccgctgcatcccatggcggccgtgcagcgcctcctccgggcagtcgcccccggtggctcggcagcggcggcggtcaggaggcgcatgacgtcgcttgcgccggagcaggcgccgtctgcggccgccgggttcccattcgcggcggagcagagggcaaggcggccggtggcggcggagaggaacgtgcagtgggtgttcctgggctgccccggcgtgggcaagggcacctacgcgagccgcctgtcgcgcctcctcggcgtgccgcacatcgcgacgggggatcttgttcgcgacgagctcgcctccaccgggccacttgctacgcagcttgctgaaattgttaatcaggggaaattagtttctgatgaaattatcatcaatcttttgtccaaaaggcttaagaaaggagaagaccagggagaatcaggatttattcttgatggttttccccgtacagtaaaacaagcggaatattaacttaatttgcgggaaattcttgatggcgttacagacattgatatggtggttaatctgaaactaagagaagatgttatagtagagaagtgccttggcagaaggatttgcggccaatgtggaaagaacttcaatttggcctgcattgatgttaagggtgaaaatggactcccaccaatctacatggcaccactgttgcccccaaacaactgcatgtcgaagcttattacccgagctgatgataccgaagaggtggtcagaaatcggcttcagatatataatgacatgagtcaacctgtggaaggtttctaccgagagcaggggaagctcttggaatttgacttgcctggtgggatccctgaatcttggccaaagctgctccaggttctaaacctcgaggaccaagaggagttgaggttggctgcagcgtaggtctctgggagaccgacctacatactgggaaaaaagaccataccacatttttttgaataatggagaagaggaaacttactccatagtttagtgcgttatgcagaagtaatggttttcttgtcaaaaagcgatttgttggtttccaccggcgttttgatgatgagccggtactatgtaacttacgatagctgtaagcactaagcagcccattcttgcttgggacacagtttggagcgcatgaagacatgatgtagtgtttttttttaattcataacaaacttgtagtacacatttgtgttcatgataaaacactgaagtagtatgatactacagaacaacacagacctgatgaatgcctaaaaaaaaaaaaaaaaaaaaaaaactcgaggcaatactcgtgc

SEQ ID NO: 82736 - DNA, 354 bp, Zea mays
  unsure (1)..(354): unsure at all n locations
  Clone ID: MRT4577_175472C.1
cgcgtgcggaaacactanaaatttttcctccanttttattttcacggacgcacctacttcnnagagcagccggcgattcttatacacatgccatctcccaaaaaaantattccaaaatccagaatgactaccattcttttagccacttaactgaatctttcccacattcaaccctccaatctttaaatcttattatactcattgaatgtacaaaaagcaatgaattgacatgtaaaatattcttcaatacccactttctgtcttatattaaaaacaacccaaacccatattagcaacctatatctattattttaaagacactttcagccattgatgaaaaaaatcttattcccc

SEQ ID NO: 82737 - DNA, 205 bp, Zea mays
  Clone ID: MRT4577_175473C.1
cacgcgtactttttttggacctctaaaagaacgccctggggggtgtgggtaggataaaacactcggtcataaacgaagtgaataccccaccagcggcgtgccttattgtggagtgaaagacatgacactgacaaacacccaaccaaaaatattttttttttttttcagcccccggaacaacatgggggggggggaattttttttt

SEQ ID NO: 82738 - DNA, 545 bp, Zea mays
  Clone ID: MRT4577_175474C.1
aatccctacgtccactcgtatatttgctgttcgcttccacgacatatcgagtcccgacgccgatgcttcctctgcgtcaatcctctcgctgctagccaccacctctgcatgtgcccctagaggatcatgctcctccggcagtcccgcaagcactgacttactacggtctgttgtcaaagagtatatcacaagaatggcgagcgaagaggtaagccataaagagagagcagttcctcacacgtatgtgactcttcgaacaaacctactatgaccaggtgttctccgagcggcccaacgacaagattatcatcccatccgtcctcttcgacggactcaggattaatggatcattgacacatgagcgaatcgaggatctgatggcgaggcgtatcctaaggattatctctggtcattccagaccgcgctgatacatcgcactcccaccaacacatggcccttgtattgctttctgtcagcactgatatagacagctctaggtgggtattatctcttgcgaaattccatcctgaatcaatcagccttac

SEQ ID NO: 82739 - DNA, 1214 bp, Zea mays
  Clone ID: MRT4577_175475C.1
gaaagtaagaatgcttgattatgaagtgatatcaaatttacatatgcatgcttccttaatagctgaagtagattatagaagaaacttgttaaccgactgtcctagtactgttaaccggcaggcgggtcggcacggattcgaagaacatgagcagcgtttccgtcccttgggtttcctctgtatatggtcatggtcgcctcgtccaggtcaaccaaaacagtgcacagagtgtacaacctcggacctgtcatgtagatcgggtacttctcgtcagctgtgtctcccagcagcgagagcgccgcctctttggagtccacatccactgctgacgaacactgcgcagctctcctctccctgctcatcgagttctcgtccggcacctgcttcacttggagatgccggtacatgttggcgtggaagaagggcacggcgccggcctcgcggacggcgaaccggttcccggaggcggtctcgacgttgacgatcctccgccctctgacgtccgtcaggttgtagctgtggccgactgagacggccggtgaacagaccctgtgcattgcgtcctcgaggttcttcgcttctagcaggtcccgggacacgaagttccgggcaatggcgcccgcgacgatctcgtcgttcgccggggggaccgagttcagcgtgaaggccactccgttggtgttgaacccgaaggcgcagctcgggagctcgccggcgcaggtgtaggcggtgaaggacgcgccgtccggcagcgtggcccgcacgaggtacgtgtggccgagcagcgcgacgtccccgtcctcgttgtgcgcggcgatcgccgtggagtcgctgacgatgaggacgtcggagcagtcgccgccggcctcctccttctccttctcctcctcctgcttagggatgaacggcaggacctccttcctgaagttgaccaggatgacgtggaggagcgggacgccgctgccgtcggcggtgcccaccagctcgtcccagtaccgcgggtacctctgcctgttggcggactggagcgcggccaggagcgcctgcgcctgcgccgtcgacgcgaacggcagcagctgctcccggagcacgaggtcctgccgcatcctgctctggatgacctcggcgaaccgacggcccacggcgaggcccagcgcgtacccgtccgcgcagcggccggcgtcgaaggcgtctagctcgccggcgccgcccat

SEQ ID NO: 82740 - DNA, 405 bp, Zea mays
  Clone ID: MRT4577_175477C.1
atggaccgattggtcttttcctctttaagtcgatgcagcccttcgtctcaaggcatgtcgctatgccgaagctccctggatggtagcttcggaccttcagcgacgaagcagacccccaacaagccgtgccacaagcaaccacaaggatcggtcctatgtggattctatgcgtgcgagttcatgagagtgaacgaacgatacaccacaaaccctagcaaggaatttcaacaaggaaagccagagaacttggccgaaggtgcattgtatggcataattaaagacctatgcacattcatactgaaagaggtcattcccgctgaagggaaatatcacgatgcttccggtacattagccagaccagagtttagaatactaacagaagttagtagactatctcttaggtga

SEQ ID NO: 82741 - DNA, 571 bp, Zea mays
  Clone ID: MRT4577_175478C.1
ctccgcgtacgaccagcgagcgctcctacacaacatactcttacagccgtttgcgcgcgctgcactgtacggatggtgagcgcgtagatcgtaggaatggcgagcgcgtcgagcctgctgctctcgtgggtggtgcacgacctggcctgctgcgtctgcgacagcgccgtgcgcatggtcatggccacctcgtcgtccacgttcacggcctcctccttctcggcggcggcgtcgtacacgctctcggtggacgtctcgtaccgggccacgctgcatgtggcgttgacgtcgtcgctcttcctgcgcgtgaactggacgctctccttgcgcgggcagacgacgctctccttcgcggggcccactgcgtggcggaccggcgccctcctcctgcgctgcatgtgcacatactgcctgccgttctcgttcgtacacgacctgacagtcgcgatcttctaggacctgacatgcgccaggtacgacggcgctgtgctcgttgtacgcggaggccgtctccaggttctacgtggtgctcgtcgccagcgaccagtggtgctggtcgtgacgacctgct

SEQ ID NO: 82742 - DNA, 271 bp, Zea mays
  Clone ID: MRT4577_175479C.1
gcgcggcgcggccgaacccgcaggctcgttccggtactcggccatcagcgtgacgcaggcgtacctgctgcggggcgcggggcccgtgtggatcggcggcaggcggggcgcggcgctgaacggactgtcgcacgcgccgacggacacgccgatgcgggtggcggacgcgtacggcgcggagggcgggtgcacgctcctctcgcccgagcgcccgaccctgcggacgtccacgcacacgacgtccacttccctcatcaacagcccctacctg

SEQ ID NO: 82743 - DNA, 369 bp, Zea mays
  Clone ID: MRT4577_17547C.1
gcggctacaaccggtcgacggggttcgtgtggctgcggtaggccgacaggctgacccacaccttggggtcgatcggcaagcatgggtggtacgacagggaggttacggcgttcgtggagccgggtcggatgcacggcctctccggggtgaagagcaaggagctcctcatctgggtcaccatctacgagatcgtactcagcctctcctgcaccaagatcgtgattcgcacccccgcggggcgtcggacgcgccttccctgtcaccgccttacagctcgagcccgagggggaccacaaggccgacgacgccgtcgtcggcggcgaccactgatctgctctagcttccggctgcggcttgcttacatgggct

SEQ ID NO: 82744 - DNA, 440 bp, Zea mays
  unsure (1)..(440): unsure at all n locations
  Clone ID: MRT4577_175480C.1
ccccgcgtccgcgcctatctccccacgcgcgtcttcgtcttccttccccggctgtcgaatgccacgcgcgacccccaccaatggcgcccttcctccccaaatgatgtcgagtccccaccaacggttcccttccttccccggcagccaactccgcgctccgcgcgccccgccagccgtcacagtgatgccgcccttccttcccaggcagcccgccaccttcgcgcccccaccaaccccgnccccgagcctacctcccaccaagctcgaccccgacctaccttcaccaaaccagaaggcgagatccgccggcagctctgcgcttcgcgcgccccgccaggcgtnacagtgatgccgcgccagtcggggaaggaaggccgcgcgaatcgccgccgggaaacccgtcaggcatcaccgttcccacaggcgggatacccggcaac

SEQ ID NO: 82745 - DNA, 362 bp, Zea mays
  Clone ID: MRT4577_175481C.1
ctaaccgagcatcgtagagataggcgtcatcggactcgactacctccggagctaaacctttgccacttatccaattccctgcggacgccgccggtacattccggacaacgacaccatgacggacagcatcaaacatccacatcggtcaggccgtgttctatacaaataaacgcgggctgcgagctagactggcttgaccatggcaatcacgctgacggccattatgcccgcagacaagaccattgaaggaggcgaagatgctcctaacaccttcatcaagagactggtgctaagagcacatgccccgactgcactgatgacgtgtctcactgtatctatgatgtgagctgtgcctcagcagc

SEQ ID NO: 82746 - DNA, 155 bp, Zea mays
  Clone ID: MRT4577_175482C.1
tccactcgtccgcggacggtgggcgaccgtggggcttcatgaggtcatatccgacgacaggaagaacttggcagccattctcgatgaaaaccctagtgcactgaagaaaacatctcatccttatggcctggtgttggattccctggaagactttt

SEQ ID NO: 82747 - DNA, 1498 bp, Zea mays
  Clone ID: MRT4577_175483C.1
acccacgcatccgcggacgcgtgggcggacgcgtgggctagaggagaaagcaagaagtttacgtagggagatagtgaatcattggatcagtaaagaactccagaggctagaaagattaattgacagggcgagtgagaaaggttggcgcaaggaaaagtttgaataccttgataagaaacaactcttgcgcaagccatctgaacaacaacgtttacttgaagaggtgcctcaagttattccagagacagaagataataaagatactgaatttcaagttacaggacaagacaaacctattcaaaagagtactgtcgctttacaaggtaccaatggagagagcattgtttctttgaaaaaaggctcagaagaaaaatgtacatatgtgacaagggcttcttttttgaagagccacacagggaaaaaatccaaaggtactgatggggagagagatctttccttggaaagtttatcggaagaaaaacctgaagttaataaggcccacaccgatggtggtacagcctgtaatacacaatcaaaatcggagcactacagctgctattgctgcgctaccaaagtatttgcatcgccatgctgccactgaagccaataatgctggtgatattttcatctgttcaggagctcaccgatggtggtacagctgtaatacgcaatcaaaatcggagcactacagctgctattgctgcgctaccaaagtatttgcatcgccatgctgccactgaagccaataatgctggtgatatttcatctgttcaggagctggatggtgaaggtgttaaagctagcacggatgttgatacaactggaacagatgttcagcacgggagcattgaagctactaaagccaacgctgctggtgatacacctggagcattttttcaaaagcagtgtgctaaagctgctgatgttattaccattgacgacgatgacgaggacaacagtcatcgttgttataaagaagaacaaacagcagtagttgatcttgaagctgattatgctggggataaccatcccgtgcagcttgaggcaaatagtcgaggccataaacacgtgaaggtgaaggagcgcatttggtattacattgatcctcagggtgatgagcaagggccatttacaatgcagcatctgagcatctggtggagcaatggcttcttccccggcgacttcagggtctggagaacaggccaaactagtaatgacgccatcttgctcgtggacgtactgcagatgactaggtaggctagttaggagcctcgaagactagatgtatttatgttctgctggggtgtacatcctttatatgatatgatgatgacatcctatccccaccatcacctcacctaccaatcaaaaacatcttgccaaacaaaacaatggttgtttgatggcaaagacgatttgttgggatgaaatatttgtggactattcagtatccctgtgctgtgacaatgctattgaaaatctggttctttggcatgtt

SEQ ID NO: 82748 - DNA, 231 bp, Zea mays
  Clone ID: MRT4577_175484C.1
agctcggaattcggctcgagacacattccaccccacttatttccccccaaagcacccagacaccagagtggggttataacaaagcacaggggtctaccaccacgagagcgaacaccccacactcccaactgccgagagaccaagaactgacacaaccgcagaaccacgcccggcgccaaacctagacaccaccaaactggggccaagatgcacttcacaaaaccctcaacc

SEQ ID NO: 82749 - DNA, 367 bp, Zea mays
  Clone ID: MRT4577_175485C.1
ttcttccaccaccaccaccacgcggactacggggagggcggacttatcagctggtgggggatgtcaatgtggaactagcagagcaatcttcccgcgaggaccgaccgcacaaatctcgtgccaaacagaaaaaaaatatcatagtacatgccgtaattttgtttgtgcagcgacgctgcaaatggctgtattggaggaagtgtatgcaagcatggcagtagtagcagtagggagtagaattgggtaattaatatcgctaaccccaaacgctggtggactggtgcgaacgaataagtgcatcgacccatccgggcaagaacggaccacagttcttacgcatatatgtatagctggctgtcgatctata

SEQ ID NO: 82750 - DNA, 1572 bp, Zea mays
  Clone ID: MRT4577_175486C.1
ctaaactgcaaacaagatctagatttagaaaaggttcatgatgaagaacacagttcagatgatgattttgtgggcaatagtgatgacgacgatgacaacaagccatcttccacaaccaaatttaatggaacatcgaatacaatgaaattcttcctgagggaagataggccaatgaagaatggctatgtgggctggggttcaaaagagctcatggagttcctttcctctataggcaaagatacattgaattccctagatcaacatggtgctactgaagttgtgaaggtgtacattcaacaaaaaggtctcttagcaagagataagaaaaaacttgtcatatgtgatgacaagctcaagattttgtttaggagatcaaaagtgaggtacaacaggatatatagcttgttaggtaagcatattgctgtgaatatgacatcagaggatgaaacttttgctaactctgatgataacaatgaaacatttgtgagaaagaaagctcgtattgggaactacagttccagtactccaaagtgtactccagaaataaacaagagatgttttgctgctcttgttcgccataacattgatttaatctacttgaagaaatctttggttgtggatctactaagggagccggatacatttggcagcaaagttattggctgttttgtgagaataaagattgatctcaacgattatagtttctacatgcataaaaaggtgcaccaacatagaaagttgtatcagcttggactagtaacaggcaccagtaaatcccctgaagaatacaagataaatgatgtatcaacagatattcttttatgtatttccagcatacctgacatcaaaatttcaagtttgtcagatgaagaatacgaagaggaagaatgtcaagaccttcggctgctggccaagaatgaatcctttaaaaggcctactgttggggatctagaggagaaagcaagaagtttacgtagggagatagtgaatcattggatcagtaaagaactccagaggctagaaagattaattgacagggcgagtgagaaaggttggcgcaaggaaaagtttgaataccttgataagaaacaactcttgcgcaagccatctgaacaacaacgtttacttgaagaggtgcctcaagttattccagagacagaagataataaagatactgaatttcaagttacaggacaagacaaacctattcaaaagagtactgtcgctttacaaggtactgatggggagagagatctttccttggaaagtttatcggaagaaaaacctgaagttaataaggcccacaccgatggtggtacagctgtaatacacaatcaaaatcggagcactacagctgctattgctgcgctaccaaagtatttgcatcgccatgctgccactgaagccaataatgctggtgatatttcatctgttcaggagctggatggtgaaggtgttaaagctagcacggatgttgatacaactggaacagatgtccagcacgggagcattgaagctactaaagccaacgctgctggtgatgcacctggagcattttttcaaaagcagtgt

SEQ ID NO: 82751 - DNA, 2992 bp, Zea mays
  Clone ID: MRT4577_175487C.1
cggaccggcgaccaggcgcgtgggcacgggagcaagcgcccgcggcgggccgaggaggaggaacaggaggaagaggaaatggaaccgctggtgggggaggaggaggaggtggcggcgctggagggggaggactattgcttcgtctgcaaggacggcggtgacctccgcgtctgcgatttcaggggctgccagaaagcttaccatcctgcttgcgtggggaaagatagcggcttcctcaattcagatgaagaattcatctgtgaatggcatacttgctttatttgtaaagggcgttcacgttattattgcttttgctgtccgtggcaagccttttgtcaaaattgcgtgaaacaagcagaattcgtcccagtcttgaggaagacaaagggattctgcaccaactgtttaaggatggcaatcatgattgagaagaatgttgatgttgactccgatggggagagggttgatttcaatgacagggcaacttatgaatttttattcaaggaggaactacagttccagtactccaaagtgtactccagaaataaacaagagatgttttgctgctcttgttcgccataacattgatttaatctacttgaagaaatctttggttgtggatctactaagggagccggatacatttggcagcaaagttattggctgtttggtgagaataaagattgatctcaacgattataattcctacatgcataaaaaggtgcaccaacatagaaagttgtatcagcttggacgcctaacaggcatggctatgtgggctggggttcaaaagagctcatggagttcctttcctctataggcaaagatacattgaattccctagatcaacatggtgctactgaagttgtgaaggtgtacattcaacaaaaaggtctcttagcaagagataagaaaaaacttgtcatatgtgatgacaagctcaagattttgtttaggagatcaaaagtgaggtacaacaggatatatagcttgttaggtaagcatattgctgtgaatatgacatcagaggatgaaacttttgctaactctgatgataacaatgaaacatttgtgagaaagaaagctcgtattgggaactacagttccagtactccaaagtgtactccagaaataaacaagagatgttttgctgctcttgttcgccataacattgatttaatctacttgaagaaatctttggttgtggatctactaagggagccggatacatttggcagcaaagttattggctgatctttccttggaaagtttatcggaagaaaaacctgaagttaataaggcccacaccgatggtaggtacagctgtaatacacaatcaaaatcggagcactacagctgctattcctgcgctaccaaagtatttgcatcgccatgctgccactgaagccaataatgctggtgatatttcatctgttcaggagctggatgttggatgaattaaagctagcacggatgttgatacaactggaacagatgtccagcacgggagcattgaagctactaaagccaggggatctggaggagaaagcaagaagtttacgtagggagatagtgaatcattggatcagtaaagaactccagaggctagaaagattaattgacagggcgagtgagaaaggttggcgcaaggaaaagtttgaataccttgataagaaacaactcttgcgcaagccatctgaacaacaacgtttacttgaagaggtgcctcaagttattccagagacagaagataataaagatactgaatttcaagttacaggacaagacaaacctattcaaaagagtactgtcgctttacaaggtaccaatggagagagcattgtttctttgaaaaaaggctcagaagaaaaatgtaaacatttgcttctatagtatgtgttaaaaaaaaatccatgcaaggcgaacattgtgatgtttttattgtaggtacatatgtgacaagggcttcttttttgaagagccacacagggaaaaaatccaaaggtactgatggggagagagatctttccttggaaagtttatcggaagaaaaacctgaagttaataaggcccacaccgatggtggtacagctgtaatacacaatcaaaatcggagcactacagctgctattgctgcgctaccaaagtatttgcatcgccatgctgccactgaagccaataatgctggtgatatttcatctgttcaggagctggatggtgaaggtgttaaagctagcacggatgttgatacaactggaacagatgtccagcacgggagcattgaagctactaaagccaacgctgctggtgatgcacctggagcattttttcaaaagcagtgtgctaaagctgctgatgttattaccattgacgacgatgacgaggacaacagtcatcgttgttataaagaagaacaaacagcagtagttgatcttgaagctgattatgctggggataaccatcccgtgcagcttgaggcaaatagtcgaggccataaacacgtgaaggtgaaggagcgcatttggtattacattgatcctcagggtgatgagcaagggccatttacaatgcagcatctgagcatctggtggagcaatggcttcttccccggcgacttcagggtctggagaacaggccaaactagtaatgacgccatcttgctcgtggacgcactgcagatgactaggtaggctagttaggagcctcgtagaagactagatgtatttatgtatcgcggaaaaagcgggggggcttcgaggcagatatatgtgttctgctggggtgtacatccttctgtgttatatgatatgatgatgacatcctatccccaccatcacctcacccaccaatcaaaaacatcttgccaaacaaaacaatggttgtttgatggcaaagaggatttgttgggatgaaatatttgtggactattcagtatccctgtgctgtgacaatgctactgaaaatctggttctttggcatgttaggctgtttt

SEQ ID NO: 82752 - DNA, 873 bp, Zea mays
  Clone ID: MRT4577_175488C.1
actgtgcggcgcgccggccgggccggagtttgtctgccgagcgcacatcacaaccagtcaaccacacacaacacaacacaaccgatacgaagaagcttcttgtctagctagccgcgcccgcgcgccatgtcctccatgaagagaagcattgcgtctagcgtcatcgtcgtcctactggtgctctcccttgaagccaccttcgctgacgctgtccgcgtcatacccgacgccccggccggcggcgccatcgtccgccttccgagcgacggcgaaagaggagtgactacttcggcggcggcggcggacgacaagaagcagctccggtggtgcgagcacccaatctgcttccctgagtccgacatctgcttctgcccctacacccgcgccgaccggacgacgacggagagcggccgcggcgccaaggacgagctagtgcatgacagtctcgtagtgccgccgcgcgcaccagcaccaccatgcgagcacccgttctgcatttttatcaggggagagccggtgtgcaggtgcctcgacggaacccggccggcccccagcagcagcgtcgaaatgaggatgatgatgcacgcagacatggagagagccagcagctagcgtgccactgagccactgatgtacgtggttttggtttgtttgttcttggtccagcagtaacagtgatagtgtcgtgaatgagctagcacactgtcgagtctgtcaggatgatgctcattctcagtgtcaggtcgtctgtccgtgtcgagaccgatcgtacttacgtctttgttttggtataataaagcgtcgtgcaaacgagttctgttactaaaaaaaaaaaaaaaaaaaagcccctaaaaaaaaaaaaaaaggccccta

SEQ ID NO: 82753 - DNA, 148 bp, Zea mays
  Clone ID: MRT4577_175489C.1
gcctgacctgcactgttccccaaaaaagaagccagctgagagacacgagagctagcacaaacaatgttgacccccattccgcctaccccggcggacgctttacccacgacgacgggggggagggcctccaccacgacaacgacctccc

SEQ ID NO: 82754 - DNA, 311 bp, Zea mays
  unsure (1)..(311): unsure at all n locations
  Clone ID: MRT4577_17548C.1
gnggaattcaggagcaaaaagagagcagcaagggcgggccaagaaaganccaaccngaagcagcgggcncgggcggcagggggggccaacgcgaccanggngccncaagacgcacaagcgccnanagccgcccgncaagccccagaccgncgagcaaggaccgcngcagaaggggaggggggggggggncaacccnacaggagccagcaagcaaacgcaacaagcaacgnaccgacagcacaccagggcggggaacaagcgccagcccgagcgggggggcagggaggggnacaaaccaccagggcagagca

SEQ ID NO: 82755 - DNA, 773 bp, Zea mays
  Clone ID: MRT4577_175490C.1
ccggccgggattcggctcctcgtttctctctcctctcttcgttcccgcgcggagagggagagggagaaacaggggagcggcggccccctcctcttccctgccacggtttcttgcggattatttctaccctattttattcaggatttccggttggatcctcctatgcctttttgcaggggaaattttaacttctgctgcaaccggtggtgcaattaatcagccattcacgcattgtgctgttcattgaggcattatcggtgtggttcattgagaaagcgcctgtatgcgaattttcatgtaaaaagagctgatcagacatggctgcgaaggacggctcagggtcacaggaccaggggcacaggttgtggcccatgctgtcctacgcttgcggcgagctatgtgtgatcatgctgctctacgtggctgcctttgcatcccatgcagccacaaggctggcgcgcatctgcgggctcaggccaccatgcatcctgtgcacgaggctggaccgcgccctccatggaaacttgccatggttctccgcggacctggtctgttccgtgcatcggtccgaggtctcgtctctggctcactgcaagagccatggccggcttgcacggtccggcgatctctgcaaatcatgcctcctttcatgcacggcggtaggtgcccgtgaggaggtggtgaactctcggcctacgacatccagcagcaggttgtgttcttgctgttctgatccgttcaagaataatactggcgacacgcagaggcattct

SEQ ID NO: 82756 - DNA, 933 bp, Zea mays
  Clone ID: MRT4577_175491C.1
ctcgaccaggccgacagcgccccagccgcgtcgcccctaccgagccacccgcccaaggcctcgacacgcccgtgccaggaacctgcgcgccgagcccgacccgaccgaccgcctcgcgcccacgccccgacccgcgctgcgcagtagccgcgacctcgcccgaagccccgcgacagaaacgcccgtgcccagccgttcgtcttcctctgcgttattggtgattcaatgcgtccgtttttccctccccattactatcctccatgagccgacgccgttgatgggcgtttgaagacgccgaccgcccgtttgctctctcccaagcgctctacctcctcctcgctggcctataaaacccacagcccgcgacgttgtgctcacctccgcgctcgccgcctcgccacactttcgtcgcggttatcggacgcagccaaagcataccgcctcctcgccaagcttctccacgctaaagctcgtgccctcctgctgctcgtcagtcgattgccgattgtcgtgctcgctcgacgttgtcgttgtacccgtgctgttgtgctccttcgccgtctccgcgccaagcgtcgatcccacgccgaacgccgttgctgaccctcgttcgccgaagctcgatgtcatcgaatttattcctggtgtttccttctacctgttgtcctggtgtgagtggttgatctagtagttaagaatcaagatctactccgatccgtggaagaacctcaagttttcaataagcaagagggtgatgctggagactttgatggagattttatcgatgaggaattctaagtctaacgatacgtcggtcatcttcttgtgggagattgcccctgttatttatttccgctttactttgatgtgatacttgttcaagatacaatgatacagataatgtaataaagtattatactctctctttacgcc

SEQ ID NO: 82757 - DNA, 654 bp, Zea mays
  Clone ID: MRT4577_175492C.1
gccggccgggtcggggtgtattcactttttttacaaggaactcccaccgactggtacacgcctcccatggtcagcaaaggcagcacactcaagctatccatcattacacatctagagtgaggagtcatgaccaccgtcagcgccgccgcggtgaccaccatcggtgcccgcgccgcgatcgtgagatgctgtgctctagggctgcctgcgatgagtactacgagcgagagggtgcgtgtgcacactacatgcaaggcatgacatagaacgtccgccccagtcagcaccaagagcgcgcgcgcgtcgaatgctcgccgcaatcggggaggtgaccgctgtggcgcagaccgcgctggctttcgcgaaaaagcgcatgacctctaaggcgaccgggctgagcctcgggctctctgacaacctgctgaggtggatcctcttgggtaccttctccctcatctgcttgctctacaccatctacgcctctgagctctacgatgacgaatagacaggggggctctcgctctagatgcacctcctctcgtgataatgatctgattgaaaacctggtgcatgacatcggagtagatttacagatgtctatctgcatctaagatgccatcctctcttgatactaatgtttggagagtcctcctc

SEQ ID NO: 82758 - DNA, 357 bp, Zea mays
  unsure (1)..(357): unsure at all n locations
  Clone ID: MRT4577_175493C.1
cgaagcacggaacacggctcgatatccttgaacaacatttcgcctcctttcccagcnaggagcactgacccgccatgatacttttatcatatcgtacgtgagcccggccgcgagcgagggagaggcatggctgctccgaagttcgcgacgctggcgctggccgtgctcctggcgacgaccgtggtggcttcccccggccgaggcgcgcgcggggatgtcctgctccaccgtgtacagcacgctgatgccgtgcctgccgctcgttcagatgggcggggccatgccgccccagccgtgctgcttcggtatccgaagcctgctgcagcaggccaacaacacccccgaccggcgcaccat

SEQ ID NO: 82759 - DNA, 481 bp, Zea mays
  Clone ID: MRT4577_175494C.1
cccacgcgtgcggacctacgcgtccggcgatggcggtctcgactacctcggtaacccgagcctggtccacgcgcacatcatcctgcacatctgggcgcgccatgcggtgctcatgggcgccgtagaggggtaccgcgtcgccggcggcccgctcggggaggtggtcaacccagtgtaccctggcggaaagttcaacgcgctcgggctaaccgacgatccgataggcggtcgccgagctctaggtgaaggagatcaatatcggtcgcctcgctcatgtgctccatgtccagctatttcgtgcacgctatggttaccggcaagggccccctcaagaacctagtcgatcacatagccgaccccgtttacatcatcgcctgggattacgccaccttcttcctcctcggctagtgaacgagggcatgatgcttgcatgcgtgtacctgctatcgacacggtccctacgtactggagggtggaccag

SEQ ID NO: 82760 - DNA, 355 bp, Zea mays
  Clone ID: MRT4577_175495C.1
ccaaccacaccaagcttgtttattatccaccggccccatacatccaaaaacgacacaacccgaaactttaccttgtttattatccacccctgcgggggagggccgggtacgtgctccaaccaaaaaaataaaacccgctcggggaaaaagcaaatcacacgtggatcgacaaaacactaggaagggggatgcctagcctcaaattttgctgcccgggacgttaacaacaaagcgggacctgacatggttcctttttaggccctggatggcggtattgacgtaatccatcccgacgacctcaaaatccggggggatcccgtgcttgccggaaaagtcaagcatggcctggaatttc

SEQ ID NO: 82761 - DNA, 224 bp, Zea mays
  Clone ID: MRT4577_175496C.1
tcggaccgacgtcatcgacttctgtattggcgtcctcgataatacaggcactgcaacggcagagtgagagctgctttctgagcttgtgtactcgctgaacttgtcggtagccaaatacacggtgctctatgccttccaaccgtctgatgtgctgaatagccctttgcccttgctgcttggtacgcatactccctagaagaacactaacttctccaaaactgttc

SEQ ID NO: 82762 - DNA, 297 bp, Zea mays
  unsure (1)..(297): unsure at all n locations
  Clone ID: MRT4577_175497C.1
gcaccgaccggcgggcggccccacccgaagagcggcggagcgccaaccagaccgagcagagaaaggaccnnaggggggcggagcgcacacaccaagcgagccncgcgggcagggcgaagagcagcgcgagcaacgagccaagggaggccancnnnaccggggggggggggnggngcaaacgggaaagaaagagcngancnggngcnagcgggggaaccaggagaggcnaccgngnnaaaannagnnnggagagcacagggcaagggcagagggggaacnnggagagagcaagaaggg

SEQ ID NO: 82763 - DNA, 664 bp, Zea mays
  unsure (1)..(664): unsure at all n locations
  Clone ID: MRT4577_175498C.1
attgggaccctcgaggccnggccgggacgaggaaaataacagtcatccagcactaacatactatctctatgctcctatcacaaggtaggtgacgcacacaatggggggtgtgctgaactgtacgataacgcccgaggcggtgcgcgtgtgggcaggtggtgatcgctgctcgtcttcttccgtgtacgcaccaatcactcgtgcccggcaggctgggcaaagtccacgtgaaggccagcgcagtccctgaacgcagacagagggaaggcgcagcgaagcatcccacgtcgagcatgcgtgacaggcaatgaagagtctttacagcacgcggtgcacgagcgtgctgcggctggtgctctgcctttgcctcaacagcctcgccaataagccaccagagagtcaacatgggaatcgtgcgcaacatccccggtaagggccgccagtctcgcggacttccaatcaacatgcttaccgtgtgccaccagatgaaataagttacaattaccaatctagtacgactaccgaacgtacacaaactggcctcgcgctgcatcaagtatgaatccagggtacaaataaataaagctagctgtattgccacgagcaccatgcagtaacgaactatatatatactggactgnagnactctattatatatgaatgc

SEQ ID NO: 82764 - DNA, 129 bp, Zea mays
  Clone ID: MRT4577_175499C.1
ggctacaattagtagtatctgatcccttctttagtattataatatagaaattttgcaatatgaccgtcgagatgaaccaaaggttggcgattctaaacatagcctgtgaaattttctacatgttgcttg

SEQ ID NO: 82765 - DNA, 1211 bp, Zea mays
  Clone ID: MRT4577_17549C.1
cattgggtacctcgagccggccaggatcaatcaggatacacacgcccatgaagtcgttgagaggtagccgtcagcacccacttcactttcggcgaattgtctaccgtgcaactgcggcactcgttctgtgcctgataatgctctagcctccagagattcgatcgtatatattctcctccctggccgtgtccggggaggagtaattagtttgtgcccgtgtccgtgtttggttgaataataaattgacgaaagagggccaagtatagcttagagagagaagctagctagctgaaatggaggctagcagccgccgccgcgtctctcttgtgccactgctggtggtgatcatcgggtgctgtgcctgccgcgcccagatcccgatcccggcgaggacggacgggttcgtgtacggcgggaagccgccggcgtggggcgagacggtggtggtagaggcgttcttggacccagtgtgccccgacagccgcgacgcgtggccggcgctcaagatggtcgtcgagcactatagctcacgcgtgtccgtcgtcgttcacctcttcccgctgccttaccacagctatgccttcattgcgtgccggtcaattcatgcggtgaacaaactaaatccgtcgttcgtgtaccctctgctggagaagttcttcaaataccaggaacgttactataatcagccaacatacgaaaaatcaagagctacagtggttgatgaaataaccaagaaccttgttgtgcccatcatcggtgaaactaatttggcggcattcagagcaggtttcaacgattcacattctgatcaggctacaaggatatctttcaagaacggctgtgcacgaggtgtgaccgggacaccctacttctttgtgaatggcatacccatcaacgattcaggttctcctctggaatacaaggactggatttctatcctgcgtcccttggttggaaagatgtaacgcggttgctagtttgttcatcaataaagtcctagtggagagtaaacaaacaaaagctgaataataaataacattaatcagcatcgtcattctcaggaaaaaaaaagagtgctaactcagtaactctcctcggattcaaattgtgtacaagcaacagttcattctgtcaggcaacatatcatgcgtgtgcaactgtcccggattcaaacaaaaaaaaaaaaaagcgaaaaaaaaaaaaaactcgag

SEQ ID NO: 82766 - DNA, 718 bp, Zea mays
  Clone ID: MRT4577_1754C.1
gtgcggcgctcgaggcggccggtaacgaacatacggaaccgaagtcgcgtcaccttaacccaagaccgatgcgctcatgcgcaggagctgaagagggtcctgctgcacgaccccgtcagctgccggggtggagccgtctaccaccttacatccatggagaaccactctggcgacgacgccgcaaggacacgaccaccagacgatatcaacaaagccagccaggctgatgaaggaatggtagcgagtgcaacgcaaacgcggcgcccctacgctcgagagacaatctgcagaagcaatatattcagctagcaccagaagacgtcaatatcatcgaacgtcctgatccgtcacttcgcccaatatttgtgcctcgatcgcgccatcaatatataacagaacctagaagacacggcctacctgacacaggtcctatagatataattcctgttctgaatatggcgaaacatatctaatcttagtcatccacgagcgctaactactactcgtgaggactgtattgaacacccgcaacatatactattcggatatatactgatactgcttgcgtattatatgaagcagagcatatatgcttataattgtgcgtccatcatcgacggaccgccctaaagctagcaatctctcatcttcacgatctacacagagctggagtgattgtatataagtattatagattactacgtactatagatatatg

SEQ ID NO: 82767 - DNA, 153 bp, Zea mays
  Clone ID: MRT4577_175500C.1
cgccggattgctgacgcaatcgacgtacacgactgctcgtcttggatccgctatggttctaactaacgaagcatgttgaaggagtgaagggaagccattgccgctatgtcagtaagctttcatgagtctgactgctggtgcaattggtgcttg

SEQ ID NO: 82768 - DNA, 118 bp, Zea mays
  unsure (1)..(118): unsure at all n locations
  Clone ID: MRT4577_175501C.1
tggtcccgcggcgccgaggtacccgaaaatnnagagggctaagttaaannnatctgtcatgagannatatgtgtctcannattcaaatttactanntttctatctacttccataatat

SEQ ID NO: 82769 - DNA, 388 bp, Zea mays
  Clone ID: MRT4577_175502C.1
ttttcccgggccgactcgccctcttttcggcggccgccctcaagttcagggttttctttaagtagcttggccggcacacccaacggaacaagagcctgggaggggggccgaacccagtgttataacagttgaagagcaagggccacagaaacacaatgtgcatttaggcaaacaaatccttttgcaaatgggtacccaacctgatattgcaagtgcactgctgggggatacagatgaaatcctcttggagggtaacggttgttagcgtggaaatgaggctgggggacataacgatccgggtcattgctgtctccgtccaggacaaacactggactctcaagatcaggacccccagcatgctcaaagaaactcttaaggctgtcaccgg

SEQ ID NO: 82770 - DNA, 198 bp, Zea mays
  Clone ID: MRT4577_175503C.1
gccgccacggaagagctcgtagctagaatcaccggggccgacagaccttggctcgtccgctaggaattaagaagggcgaacatgctttttcctatgcctcactcctagcgcggcaacctgacgctggtgatggctcaaaaagcccacacaccgacagatgctatctctgacccggtagataggcgaaaaccctccaaa

SEQ ID NO: 82771 - DNA, 994 bp, Zea mays
  Clone ID: MRT4577_175504C.1
atacggcgtgcgttcattccttacatttgtcacgcgacggcaggagaaacagctgaggggaaaactaccctcgctgtgtgaagatcaaacacaaggcatgcgtcgccttgaccatttcccctacctaataatctatctaccgtcgctgtctcctgtctaataacctcggttcgccgactcgccgggtcccacaatccatccgaataaccaccgtcagcgaggaaaaaaaaaacggacaccgaaacaaaacgcgtccgcaacatggtcacgtccttctcttcttcttcttcttcttccctttgcgtcctgttccagctcgcagcacagcagcatccgtcgccactaattaattgcagctgtagcaccgcccgcccgctccgtggagcctacaagccaccagcgaggagagtcgaggcgcgcacgtgggtgggtctgcgcgcgccgtccgcctcctccaccaggccgcctcgtcgccgccgtcgtcgtcctagatccgcagcagtgcgtgccggagggacgcgcgatggccgccggccgtgggctcccgctcctcctcgtcctggccgccctcctggtcgggctcgcctccgcctcctccttcatctccgacggcgtgttccaggcgggcgccggatctaccacggggaggaccttgctgcaggccaagagggattgtcctgtgaacttcgagttccaaaactacaccgtcatcacaagcaggtgcaaagggccaaaatatccccctaaagactgctgtgattctttcaaggaatttgcatgcccatttaataactacatcaatgatgaaagcaatgactgtgcatccacaatgttcagctacatcaacctctatggaaagtacccaccaggcctgtttgcccacgagtgccgagaaggcaagctaggtctttcttgcgaaggcgtcccccagaaagacgttgttgcaagtggtgtccaaagggctcgaagcagctcgcttgctttgattactctc

SEQ ID NO: 82772 - DNA, 314 bp, Zea mays
  Clone ID: MRT4577_175505C.1
ttgacgtacctggtgcagactatgctgcagggggcatgtgagagggctcgggtgcagagcatcatcctgtgaggaaaccgcacggcccagtccgagacgaacaccgggctggggcaccccagcccagcggcgttcatggctgacgaaccgcccataggggtgtacgagaacaccacgctggaccaaggacacggtcactgtcaccagcggcactaagaggctgaaagcgaagccaacggtaccaacaccagcagcacgagcatggctgcagcccacacgccacttcccgggccgcaggcaatggccgtgaacag

SEQ ID NO: 82773 - DNA, 257 bp, Zea mays
  Clone ID: MRT4577_175506C.1
ctcgactccccgtcccctccctctgcctgtgccacccgccgcttccggattccgccgcccgtgccctcgccaccaggaattccactcggagtaaggagtgttttcactcgctgcttgcttggctcgtacggtcccggcactctgcgagatgtccgacgaggtagatttgttgggggggaagacggccctttgctacctattggcgctctccggctgtatcttcagcgaggactgctgttcctggaaggttatctctt

SEQ ID NO: 82774 - DNA, 266 bp, Zea mays
  Clone ID: MRT4577_175507C.1
ggatcacgtatgaatggccagctcccacatctgaactagtctctatcatcatgcaatgcacatcagcaaagcggcagagcgtacagaggatcgtagaacagaacagcatgaagacggtcatcgctctcctcacgtgcctagctctgtcagctgccagctcctctgcaatgcagatgccctgcccctgcacggggctgcaaggcttggacggcgctggcgctcggctgaccacgatgatgggcgcctgctggctgtacccctacgcg

SEQ ID NO: 82775 - DNA, 505 bp, Zea mays
  Clone ID: MRT4577_175508C.1
actacatgcataccatcacgaatattaacgacgagaggctgaaacgagtcaggatacccgaacgctggacttatagactggcctgcaagacaaccgacaacgtgccaaacacctgcaacagtatacgagaagtaggctatcgcaggacgcttaactagggagaaaactaacggtgatgatgctaggcgacgctaaaggcaacgcgtgcatattgcttgctccagagccgctctcactctgatgcatcttggactttgacttgacagggtggaacagatggatgctcagaccgcgatagggcacgcggcggatcccggtgccgaacgtgacccggtgatcctggctcaaacgacaagctgggagaacagcgctgaacacgacgatcacaagatccgtgactgacttgagattcttgggaggctccaggctctggtggagctgatcacaaatggggtgctgtgggtcgatctccattggatacctgcgccacatgtagccagccatg

SEQ ID NO: 82776 - DNA, 335 bp, Zea mays
  Clone ID: MRT4577_175509C.1
tttttttttttttttttttttcttttttttttggttttttttggggggtttatgttttgtttaacacaacaccccttcggtattttttgggaaaggcctattggtttcttttcgggaaggggcttcaaacatgtctagaaaaacacccatttcaaattttcctgaagggggggtgaatattactatggtggggggggggggcaacacccctattggggaggcgtcctcttaagtaggttgatcacccccccctggggagggggttctttttatctgactcaagagtttatctggggaattcggatcaatccacggccgggggccaaggtgtacat

SEQ ID NO: 82777 - DNA, 272 bp, Zea mays
  Clone ID: MRT4577_17550C.1
acgaggtcgtaactcggaagtcgtgctcgagacgacctcgtcgagctcttccacgcgcgcgccacgagaaggttccagaggggtctgaagaagacgcccatggcgctcatccagaaactgcgcacggcgacaaaggatgctcctgctggtgagaagcccgagccagtcaagacacatctccgtaacatgatcattgtccctgagatgataggaagcatagttggggtctacaccggctagaccttcaaccaggttgagatcaagcctgagat

SEQ ID NO: 82778 - DNA, 191 bp, Zea mays
  Clone ID: MRT4577_175510C.1
acggtaaaaatgcaatctagatattattcgtcaaggagtatagtagaaaggatggaagcttttcgggcaaatcgcacacgcatgctgtagttctgtccagaaaattttgagatgacatgttcattgactgaatatgggctcttggaatgtcttcatgagatgatttttcaagttctgactgtttactgaac

SEQ ID NO: 82779 - DNA, 692 bp, Zea mays
  unsure (1)..(692): unsure at all n locations
  Clone ID: MRT4577_175511C.1
gggctacaggcagnactgtgcaccaaaaagtgtgtacgtctacactatggtcttatataatagtagagattatattactctattttaatgttaaattactactaaaaaataaatgcacagtctattataaaataacaaactaagatttaaataagatgtctcttatgattttaaacatagtttgttctatattgatttaatataattaacttaaatttatcactaaatattgtattttctaatagggacaaaatcttcatagggatgaattccttgaagggaacagagatgaaagaaaaagtctcccgtaaatatttgcaggaacagagatagataatttttcttacaacggaagtcattcccgttcccgatgagtaattttccattgtcatccctggttttgacccagcaattagcaagtcccggaaacctaaaaccccaggcaaaccatccgacggttcagcagcacggtccagctcagccaacggccagatgggccaccgcgacactttgtggctctgtcctctccgatatattactccagctgtccagccccaagccctttgcactagcagagctaaaacccttgcggcggctacctttccctcacccctttctcgctcgcggcggctacctatcccccttctcgctctcgctcgcggcggctactttcccccttctcgctctcgctc

SEQ ID NO: 82780 - DNA, 364 bp, Zea mays
  Clone ID: MRT4577_175512C.1
acgcacgaatccaatgtgtctcgtatcatctcccgtccatattccgcttggggttccctacagcttcggcaaccgtcgcctcttgatccgctaggtgaagctgcccatgtcgtcgtcggcgcccttgccggcgggcactctacacaccatcaggcgtgttgccaacctgccctggtctgaagatttggctgatctggctatctagtcatacattcatgctggctttaagagccatgttccttcaggagaggatcttccgccaattgttcatcatggtacattcccctccagcgtacaccatgattacgaacagtcaggcttagttcctttggagggatgttctgccagtgtggcttcacaggtt

SEQ ID NO: 82781 - DNA, 489 bp, Zea mays
  unsure (1)..(489): unsure at all n locations
  Clone ID: MRT4577_175513C.1
ccgggncgacccagcgnccgggcgggcccgcaggcagcccccggggggggcgaagcagagccagacgagacacagccgggcaaccgaaacgaagacccagcggcgacgggcggcagaggcggcggccgccaaccgcggggcaccggaccggcgcgggagcgcacccggggcgcgaggccgccaaccgccaggggcgcggggggccganggaccgggcccgcccggacggcccccncccggggcccaccccgcacgaggggggcgccaccggccggcgcggggcccggggccgggggacgcccacgaccccgcccgcaccggccgcnccgcgggccagcccgcgcggacgaccgggagggggcggccancgnggagcgcggccggccgcccggccaacccggggcgaacagcgcccaacnccgcacggggggcagcaagcccgngaggcggccacagccccaccgggaccaagagggggggccgcacccc

SEQ ID NO: 82782 - DNA, 154 bp, Zea mays
  Clone ID: MRT4577_175514C.1
cgcgtccgagattgatgatcatttgagcgcgagacaaactggtggggatcagaatcagcatatcgatgctcagttgctggggcgtgctactatgtctgctgccagccttgctggttaatattagcagccgacagggtatgtttcaaaaataaaa

SEQ ID NO: 82783 - DNA, 226 bp, Zea mays
  Clone ID: MRT4577_175515C.1
taggcggcaaggagcggtacgagcatcgagtatcgggagctcgcaaacggtcgccagctgtctacgggttcacacgtaactatatctaacgcaacggctggtgcatcgaggtcatcacgtgaaccgccgcccagcgatcagatggcatggctggcacatgctttcgttgcttggtcctcgtatcgtacgtccgccgtcgtcgtcttgcttctggttattgcgctgc

SEQ ID NO: 82784 - DNA, 414 bp, Zea mays
  Clone ID: MRT4577_175516C.1
gggcccggaaggcccccctttttttttttgggaaaatgttccaggtgacaaccaatcaaagattttttaagggtccgggccaaattttgggctggcgaaaccaagcaatttaataaatcaatggatcaaatcctggggtttttttaaatgcccctccatggggataacctttaggataggggttttttttttttgggagatgggggaaaccaacaacaaactttggatacaagggggttgcactaaaaaatactagtacttttacgtcctgaccctaaaaaaaattggagtttctccaacagtaaccaggcaacgctggggttcccaccatgtactttgggttttttatgcactcccctaggggcgcccattttgggcaatttttgttttctttggggcagttgccctgggggg

SEQ ID NO: 82785 - DNA, 490 bp, Zea mays
  unsure (1)..(490): unsure at all n locations
  Clone ID: MRT4577_175517C.1
attccgcccccaccacgacttccgtgctcgccgccttctcggactaggggggttcggctcgagatctgatttcgggcgccggaggactacatggaggttagggagatggcgatggccgcggcggctgcggctgcggcgtccggcgggggaggcgtcaagctgccgccgcccaatcccaacctgccctacagggaggactgctggagcgacggcgagacggcagctctcgtctccgcctggggcagccgctacgtcgagctcaaccgcggtaacctgcgccagaagcagtggcaggaggtggcggacgccgtcgccttcgccgtcatcgtcctccccgccgcagccgcctatggctttgcctctacccaattaccgccgtgggtccccgctccctgctgctgccctcatccagaaggaagccgnggntgctgcggctgctgcgtntgattcagaggactccgatgatgcgggtggcggcaataatgacaaa

SEQ ID NO: 82786 - DNA, 272 bp, Zea mays
  Clone ID: MRT4577_175518C.1
ctccagtcatgcaacaacgcgttgccgacacttttgcagtagtgtaccgagctataggctgccacatggcgtgatacagccagagccaggcacatacggcacatggctcttgatatatatgacggctatggatctggaactgaagattaaacgggggaacatccatgtcaaggcactcgcctgtcggggtccaatgtgctaacagcgagcacctaaacatattatatatagagatccaaatatgtcacccgctaaaaaggcattttttatgt

SEQ ID NO: 82787 - DNA, 891 bp, Zea mays
  Clone ID: MRT4577_175519C.1
acgacttccgtgctcgccgccttctcggcctaggggggttcggctcgagatctgatttcgggcgccgcgagactacatggaggttagggagatggcgatagccgcctatggctttgcctctacccaattaccgccgtgggtccccgctccctgctgctgccctcatccagaaggaagccgcggctgctgcggctgctgcgtctgattcagaggactccgatgatgcggctggcggcaataatcacaaattgccccggtcgccttcgcgctcggtgtcgtcactctctgccagtaacaagaagcgctgcagagatgaggctggcagcagtgctgacaaaggtttcagagagttagcaagggcgatcgaagcttttgcggagatgtatgagcgtgtggagagtgctaagcaaaagcatgtggtggagatggagcgccagcgaattgaattcctgaagcaactggaggtgaaacgcatggagaatttcgttgatgcccatgtgaagctggctagagcaaagcgcacgaagaagactacagggggtgctgccgacggtgctggtggtatggagttggttgccaccgttgctgcgctgcctttcgtctccacctccaccttcctctgatattgaggaagagtttaggtaaagtctgtcttttatagtagcattgccctatgctactgttcctttttttttgttcaatggctatgttaaaacattgtaattccattgtggataatgctatgtttcagatatggacaatcacaagattgttatgctttatcagagatgtttttaatgctttaacttatgaacttaagaatgggttagtctgttccaagtataatctgctggagcataacaatcctttggcacctctagcttgtgcttg

SEQ ID NO: 82788 - DNA, 2255 bp, Zea mays
  Clone ID: MRT4577_17551C.1
accctcgcgtccgcgcgcgatctcctgtctgcgagtcggagacgagccgggtataaaaggcatcgtccatctctccgggcggctgcgctgcttcgctggctttcggcaacgccctttaccacatctgaatctcacccacccacccccgcgtcccccacctcatggcgccggcgatggggctgaagcggcctgcggcgggagcgggggcggcagcagcgcagaccgtcacactgtccgcgccggccgtgcgggacgcggtgcgcaccgccgtaagggaggccgaggccacggcgaaggctaccgccccggccgccagggtcccggcgacggcggcagtgccggcggagatcgctagggatggggtgctgtgcctggaggaggtcgacgggaggcggtggagctatgtggtcgacgccgctggcgccgcggtaaaggccaagggaagggcgtccgtcggcggcgccttcaaggccgtcccgctccagtccccgatgccgcccgtcgaggaaatcatgtcctttataagatcatatgttgtgcccgaaggctttccagatagtgtcacaccttcatatgttccatacatgacatggagagcattgaagcatttctttggtggagcaatgggtgtgtttacaacaaggaccttgctcaactctgttggagtctcccaaagcagggctgcatctggtgctgtggctatcaactggattctcaaggatggggctgggcgtgttggaaagatgctttttgcccgccaagggaagaaatttgattatgacctgaagcagctacgcttttctggtgatctcttgatggagttaggagctgggatagaattagctactgcagctttcccacagcttttcctaccaatggcatgcatagcaaatgttgttaagaatgttgctgctgtcacttccacctctactcgaacaccaatttacaaggcgtatgcaaaaggagaaaacatcggtgatgttactgctaaaggagaaagtgttggaaacattgctgatctgttgggaactggaatgagcatactaatctcaaagagcaatccatcactggtaacttcatttgccttcttgtcgtgtggatatcttctcagttcatatcatgaggtgagatctgttgtactaaacaccctgaatagggcaaggttcactgtggctgtggattctttcatcaggactgggtatgtaccctcgctgaaggatggaaactcacaagagacaatatttaatccaccttggcgacatgagccagttgcaataggatcaagatttggagatgcgtttcaagaacctgcttcgtttcttgctataaaacctttgttcgaggatgagaggtatattgttacatataacccaacaaaggacaaggtatatgctttgctcaaggaccaagcaaagccagatgacattctcaaagctgcttttcatgcacatgtgttactgcatttcatcaatgcctcacatgctaacctgaatgcacggaagcgcatgaactccaaccggtcgtaccagtatgacccactgaacatggactttgtaccacacatcgaagagtcgtgcaagatcgttatgtcatcttatggagttttcaagaagaaagcaagagaacagggatggataatgtctgaatcacttcttaacccgggacgagcaagattgtgtggagcagtaccacaatgatccaagcctttttcgtttttcatgatgaagaggatgagttctttttcatacaattggtatgtgagtcagcgaaactaacttaagtcgacaatcagctcaagtacataaaatgcaccaaattgtcatgagtcctgatcctgcaggaacagtacttgaacctggagcgttagatcgcaacaaccaccatgacaggggggtgctgactcaggaagggtccgtgaaggctccaaactgcggaagatcgactaacaatcagctcttgtatattcttttggtattgtataatggaggcggctatctttcctaatgttgaccggactaagtggtcatcggctgatttgttttgactatctgacaacaatcccccctgctaaccttgcggtatcgtggtcctcatttccctaatttggggagcggtacatgccagttttcgtaaagaatatcagtgtttatatgcaaattgatttgatcatttatgtctcaggcctgtttggaacaagggagatgttttatgcttatgtttcgtgaaattaaactgattcctatattttttgcact

SEQ ID NO: 82789 - DNA, 382 bp, Zea mays
  Clone ID: MRT4577_175520C.1
acacccttccaagccgggcaggacccccgaccactaaacagtgaaattccacttgtgccttcaaaccaattgttgttccttaaaccaattggggtaattttggggggttaaaatcggaaggcccttcaacaggccctttgttgttgaagaagagttcctcaggaaattccaggagtttccgtttcaattaaactttaagttggcgatggtgcacgcgtggttaatggttgccggccgtgcccttagcaccaaaggaaccttccacaccaaggttggccatggggggacgatgccccagggcttggttgttgtggatgcaacgcacttgtacccgggcttaagttacataaccgtaaaagactacttggacgttttccttccc

SEQ ID NO: 82790 - DNA, 579 bp, Zea mays
  Clone ID: MRT4577_175521C.1
cgaagcttttgcggagatgtatgagcgtgtggagagtgctaagcaaaagcatgtggtggagatggagcgccagcgaattgaattcctgaagcaactggaggtgaaacgcatggagaatttcgttgatgcccatgtgaagctggctagagcaaagcgcacgaagaagactacagggggtgctgccgacggtgctggtggtatggagttggttgccaccgttgctgcgctgcctttcgtctccacctccaccttcctctgatattgaggaagagtttagatcatcagtgtcgatctcagtgtgatggcatcctgtccagtgaaaggactgcttggcagtaaacactactgcccttggttactctaaagacggacatgttcttaggttcatcgcagtttgtaatccagtacatgattaattgaagactagaaattcctagcgtaaagctctgctgagagcgtttgtcctggctgttcgcctgattgttttattgactgtagctcagagtgtctgaccttatctggaaaaatatggtgacggaaaatggtcttggagtcaaaaaaaaaaaaaaaaaagcggcc

SEQ ID NO: 82791 - DNA, 361 bp, Zea mays
  Clone ID: MRT4577_175522C.1
acccacacggagctgctttttattagcttgtgtggaagaacagatctcaagctacacatgacaaaaagagctgcatccagggaaagggttggggaacctagcgcactgaatccgggccacccctaaatgtaccacccgtcgcacaggttatgtattggacctaactcaaactgcgaaacagacaacgtttaacaagggatactggttgtttctgaacgggtggtgcaccagaccggcgcacccacgaacctatgggaagccccaacggaaccgttgtggaaacctgaaatttacgggatactgaacaagacgcgttccattgagtaccctctcacatgcgcgctttgattgccagtagttt

SEQ ID NO: 82792 - DNA, 2130 bp, Zea mays
  Clone ID: MRT4577_175523C.1
ccctttattttttaaattcaattaattgactccaagaccattttccgtcaccatatttttccagataaggtcagacactctgagctacagtcaataaaacaatcaggcgaacagccaggacaaacactctcagcagagctttacgctaggaatttctagtcttcaattaatcatgtactggattacaaactgggatgaacctaagaacatgtccgtctttagagtaaccaagggcagtagtgtttactgccaagcagtcctttcactggacaggatgccatcacactgagatcgacactgagcgacgaaggggcgaagccccctatttcattaggaaataggaaagtttcagaacaacgacatccatcgcgatcaaacgatccgacagaatagcaattaggtcagatctctatctagacaccttacactatcaacctagataagtagagggcctaggatagaagataaagttcgacctgcgactagcggcataagactttcttatttacaaccagatcacgacagacaggcgaaaacaaaaggcacagattcaagtcatcaactaaaagaaaggctatctccaactgcagaatccacattccagttttgatcacccagaaattcgcaccacccaaacgcccggccaaacgcttcacttgctatctttcggattagcttgcttccttggaccaccattttttgctccctctttctctaaactcttcctcaatatcagaggaaggtggaggtggagacgaaaggcagcgcagcaacggtggcaaccaactccataccaccagcaccgtcggcagcaccccctgtagtcttcttcgtgcgctttgctctagccagcttcacatgggcatcaacgaaattctccatgcgtttcacctccagttgcttcaggaattcaattcgctggcgctccatctccaccacatgcttttgcttagcactctccacacgctcatacatctccgcaaaagcttcgatcgcccttgctaactctctgaaacctttgtcagcactgctgccagcctcatctctgcagcgcttcttgttactggcagagagtgacgacaccgagcgcgaaggcgaccggggcaatttgtgattattgccgccagccgcatcatcggagtcctctgaatcagacgcagcagccgcagcagccgcggcttccttctggatgagggcagcagcagggagcggggacccacggcggtaattgggtagaggcaaagccataggcggctgcggcggggaggacgatgacggcgaaggcgacgggggcctccgcacggctggtggatgcatgggcaaagcgaattgaggaggcagagacgccaagggtctcttggaggcggaggcgctgagggttgggccgacgaggcggtcgagctcggggaagtaggaccaggcggacggcgcgttgcgggcgagctcggccttgtacttcttcttgagggtatcgacgcggttcttgcactggatgtcggtgcgcggcgggcggcgccgcgcggaggctccccggcgcgagttgacggcgtccgccacctcctgccactgcttctggcgcaggttaccgcggttgagctcgacgtagcggctgccccaggcggagacgagagctgccgtctcgccgtcgctccagcagtcctccctgtagggcaggttgggattgggcggcggcagcttgacgcctcccccgccggacgccgcagccgcagccgccgcggccatcgccatctccctaacctccatgtagtcctccggcgcccgaaatcagatctcgagccgaacccccctagtccgagaaggcggcgagcacggaagtcgtggtgggggcgtgaattggggatgcgggcggtgaggcgggggagaataaaaggacacggcgagggggctggggcgccggccgaggacggcatgcgcgtcgcacgtgaccacgcgacctggcctgaccggcgggggcacggggcagccatcgtgatccgatcggagacgtgccggcggttgatgcgtttgaccgggtaaccggcgaaagcgaggccggtcggttttggtttcggagagagagaggtgggtggagataaaaacgcgacgagcgagagcccggcctccagcccg

SEQ ID NO: 82793 - DNA, 453 bp, Zea mays
  Clone ID: MRT4577_175524C.1
atttaataatgttgttaatcagaattggtcaagtctagtaatttgccttgttcttggttgagcgtttatcttggggtgggctgagttcctcatcccatttctttgcttcagttggggcataaatgagtttaccactttgcatttagcttctactatgtgaattatatgactttatatcctgtatgaacttcatgttttcccctccttgttatgttagtttcaaaggaggtgctgccggattttgctatatttcctttctttattacgcctcttgtgttgagtaagttaggtgggtggggttttttggtaatatccattgtgtgtgaccagtggggtgttacagatgcctctcagtaatcatcgtcggctgcagcatgatatcttattctagtaggaaaagtagtttgtactggatgacaatccttttaaatgaataaagcagttcttgtttac

SEQ ID NO: 82794 - DNA, 495 bp, Zea mays
  Clone ID: MRT4577_175525C.1
accccaaacaaaacttaatggaacccccccactggggaacggttttccccctgttaagccccatctgaaaacttcaaataccccccattttaatttaaactaccgacatgggcatgtaaactaccttcaacagagcacaccgaacatttcacagtataccttgcatggtacacgctaaacctgtccgggggggcgttttaaacctataaagagtggaaatataaaggacaattttggacattttcataaaaatggtagggggcccaagcctgcctttagaggggccaattacacctaactggggggggtttaaaaatcactggacggggatttacaaggcgttgactgggaaaaacctggtgttacacaacttaatttccttggatgacataacactttagacacccggggtgatagccaataagaccagaccgatagcctttatcaacaatggacccaccctaaaggggaatagaacccccctttagtggggca

SEQ ID NO: 82795 - DNA, 183 bp, Zea mays
  Clone ID: MRT4577_175526C.1
ggaggcagtcctgttcttggatatcttgctgctggtgtcctcattggtccatatgggctctccatcatccgtaatgtgcatgggacaaaggcaattgcggaattcggagtcgtgttcttactgtttaacattggacttgagctttctgtggaaaggctaagttcgatgaagaagtatgtcttc

SEQ ID NO: 82796 - DNA, 502 bp, Zea mays
  Clone ID: MRT4577_175527C.1
cctcgaggccggccgggcccgggaatatctaataactctccacagtgctataaaaagcacctgcccttacactcaccatgactaccatagacagctgagctcgctcccagtgccaccaacacgccccagccactgaagtgtccatcacacaatgagcaagaagaagaaacaccgatgactcgaatactacgcggatgctgacattccatcgctgcctgcatcctgccggtggaccgcggattatcctcctaaccggtccgcatcttcctggacatgcgcccctacacgccccacatctacctgataagatataaactagccgttatttcatttccttgacccagaactctccctaaatatatatacgatgaaataacgccggaatgccaaagaacaaaaaaaaaaaggactactagacgccgcaagctccaactatcgtgatccctataaggaggagaaattgcccgcgtggatgaatcatgtccacagctgtcaccatgac

SEQ ID NO: 82797 - DNA, 355 bp, Zea mays
  Clone ID: MRT4577_175528C.1
atgattccaaacaaacgagcggggttgaaattatattgtgtgcaaggcatgctaaccgaaccgtcttgtgtacgtacaaaacttttgagtacaaagaacgtgatatacacactaccggtagcgctcattgtgtactcaacccactaacccggcgccattattctacgggtatctgaagacatgtaaaacaattaccacctgcggtcgaataatctctcactccacgctgagtggaaacaatgggcgcgtttgctgaaatggcaacgatagccccatcggagacatgtgtcccatggcacgtttaaggttttttcgattgaccctttctcaggtttttttggggaagtttcaatgc

SEQ ID NO: 82798 - DNA, 663 bp, Zea mays
  Clone ID: MRT4577_175529C.1
ggccgcgggttttttttttttttttttgggatattcctcgaactcttggtattgaaaagatgttaaagaagagttcgatctggaataagagcaagaacaggccactgttcaccgtctctttcctcgcaacatttatactagctacctttgtacgtctatagcgttacaggtaacggttttattgcttaatcgatgcgtactgtctctctcttgagccaggctgttgtcacatcatcaccctcgaaataaccttgcgtcttctcaataaccttctcgttataagtgttgagccagtccttctctaccgatgtgagcagggtcgtatcaatcaggtttcgacagtaaggcaccatagtgacatactcaaagcccaagaaaggcttgtcaccaaacgagtgcttagtcttaacttccttgacaagaaccatgttctcgattcgaatgccgtattttccatcctcatagtacccaggctcgttggacaatacgtttcctggagcaagggctacttcggcgtattggacacgagtaccaatgccaatggggccttcgtgaacattcaggaatgatccgactccgtgcccagtaccatgtctgtaatccagtccgtttttccaaaggtgttgtctcgccaagccatcaagggcaaacccagtagttccc

SEQ ID NO: 82799 - DNA, 1410 bp, Zea mays
  unsure (1)..(1410): unsure at all n locations
  Clone ID: MRT4577_17552C.1
cgggaccttatatgttcnctacatgacatggagagcattgaagcatttctttggtggagcaatgggtgtgtttacaacaagaaccttgctcaactctgttggagtctcccaaagcagggctgcatctggtgctgtggctatcaactggatactcaaggatggggctgggcgtgttggaaagatgctttttgcccgccaagggaagaaatttgattatgacctgaagcaggtgcatatattaggttcaatgtgtgcccttctgcagtacttttttttctttcattctaatgactaattgaaatgaaaatttcctatagcttcgcttttctggtgatctcttgatggagttaggagctgggatagaattagctactgcagctttcccacagtttttcctaccaatggcatgcatagcaaatgttgttaagaatgttgctgctgtcacttccacctctactcgaacaccaatctacaaggcatatgccaaaggagaaaatatcggtgatgtcactgctaaaggagaaagtgttggaaacattgctgatttgttgggaactggaatgagcatactaatctctaagagcaatccatcactggtaacttcatttgccttcttgtcgtgtggatatcttctcagttcatatcatgaggtgagatctgttgtactaaacaccctgaatagggcaaggttcactgtggctgtggattctttcatcaggacggggtatgtaccctcgctgaaggatggaaactcacaagagacaatatttaatccaccttggcgacatgagccagttgcaataggtttgcgctcttagtaatcttatatattcctgtatgctggtgcaatgtagaacctctactcatcagttttgttctcttacaggatcaagatttggagatgcgtttcaagaacctgcttcgtttcttgctataaaacctttgttcgaggtaccatcttatttgctccattctgaatgctttctttctttggtgtaatcaaggattgttctgtgaagttgcaacgtggtttggctgcaggatgagaggtatattgttacatataacccaacaaaggacaaggtatatgctttgctcaaggaccaagcaaagccagatgacattctcaaagctgcttttcatgcacatgtgttactgcatttcatcaatgcctcacatgctaacctgaatgcacggaagcgcatgaactccaaccggtcgtaccagtatgacccactgaacatggactttgtaccacacatcgaagagtcgtgcaagatcgttatgtcatcttatggagttttcaagaagaaagcaagagaacagggatggataatgtctgaatcacttcttaaccccggacgagcaagaatgtgtggagcagtaccacaatgatccaagcctttttcg

SEQ ID NO: 82800 - DNA, 338 bp, Zea mays
  Clone ID: MRT4577_175530C.1
cggacgcgtgtgcggactcatgggtcgtcccggaagattgtgtccggtactggccgacgatctttttgttgtctaacgatgtcgttcttgaccctgactactgaaatgtgcttgtgaacattgaacatctttcccttgatattgttcagggtgtgctcggccactttactcagcgcccctaagagattgaaactggttaccaggggcacatgtttggttatgcgactgatgacacccctgatttgatgccctttatccatgtccttgccatcaagcttggtgctcgtcttacggaggtttctaagaatggaacctgcccctggctcaagcccgatggg

SEQ ID NO: 82801 - DNA, 1628 bp, Zea mays
  Clone ID: MRT4577_175531C.1
tcgagccggccgggaaatggaccctcgccgccctcattcctcactctttttttatcccctcctctgccattccctccctctcccctcaacccagcgcccccctcccgccgccactagggtttctcctccccgcccacccccaaaccatccccgaagcttccagtgcgtcgcgccgcaaccatgagcgacggtaaggactccctcgacctctccgccctcggcgccgccatccccaactcggccgagctcagcgcggaagacaaggctaaccttgtggcgtcgatcaagaacacgctcgagggattggcgtcgcggcataccgacgtgctcgagaacctcgagcccaaggtcaggaagcgcgttgagaagctcagggagatccagggcgaacacgatgaacttgaggcgaagtttttcgaagagagagctgctctagaagctaagtatcagaagttgtatgaaccactttactcaaagcgttatgaaattgtcaatggtgtggtcgagattgagggtatcacaaaagaaagtgcagctgaaaccccagaggagcaaaaaagtggagatgagacctctgctgagcaaaaagaagaaaaaggtgtaccagctttctggcttaatgcaatgaagaatcatgaaattttagctgaggagatccaggagagggatgaggaagctctcaagtacctcaaggacatcaagtggtacaggatcagcgagccgaagggttttaagcttgaatttcactttggtacgaatatgttcttcaagaattcggtgcttacaaaaacatatcacatgatcgatgaggatgaaccaattctggagaaagccattggtactgaaattgaatggtaccctgggaagtgcttgacacaaaaagtgctaaaaaagaagccacggaaggggtcaaagaacacgaaacctatcacaaaaactgaagattgtgagagcttcttcaacttcttcagtccacctcaagtccctgatgacgacgaggaaattgatgaggacacagctgaacagttgcagaaccaaatggagcaagattatgatattggatctaccatcagagacaagattatcccacatgctgtctcatggttcactggagaggctgctcaagatgaggactttgaagttatggacggcgaggacgatgacgatgaagacgatgatgatgaagacgacgaggatgaagatgacgatgattatgatacaaagaagaccaagggaactgctggaggggaagggcagcagggtgaacgacctgcagagtgcaagcaacagtgaggtgtgatgtcattaagttggttttgtggggccgttgggtgggggttcttgttggttttatggaactggcggggggatttttctgggacatgttacatgtgggtctgtattgggtttcagatgttatatatgctcttcatatgcttggagtgaagatggctcatggttgccactctggatgtcttattgtccataccactggcattgtgctctgtactttcaagcgccccgtcccccccgctgagaaattttgttcttaggggaaaggccaccctttcccctgaatgttatgcgaattgcatcttgccccccccccccgggcgttaaggtaccaa

SEQ ID NO: 82802 - DNA, 530 bp, Zea mays
  Clone ID: MRT4577_175532C.1
gtcagctttcctttgccttctgctccccctccggttcgggtagggtcttcgggaggctcttcgggggtcgagctcatcggatgagcggatctagatatgctgagtaccattttttgtaccgctgcttcgtctggggcctggactagcactcggtccaccactccttccacaactacttcaagacccacggatacgacctcatagctcaatatcatacaccatcgggacacgcagtagtgcttcggcttcttcttcaccaccttctccacggaggacgccatgcaggacgtcatcgggggcgtgatcggcaaggagctcatcagccgcaacatcgcccacaaccaggcccacccccgaggcggccgtggaggcggctacggcggcggctccggaggcggccgctaaggcggcggctaccgccgtggtgggcgccgtgattacggcggcggctacggctacggtggtggctacggcggctacggtggttgttacggtggttacggcggcggctaccgcggtggcgactacgg

SEQ ID NO: 82803 - DNA, 472 bp, Zea mays
  Clone ID: MRT4577_175533C.1
tccgcttccactactaaaaccagagaatttggttggctttgttaatttttatcggctttaggacaacaaatgcaaattaactagttttattgacggctgcttagccgataaaaattaagcctaactttcattggccatgacaatagatgatggtagttcatcggctttttactaactttcatcggttactgatattggatgatagaagccaatgaaatatatcactggcctgcacccacccttaatggagggatatctaccaatggtatcatcgtcatcgtcgtcctttggtaaagaagaggaggcgtcgctgtcgtagtagatgatcttcttaatacgcctcttcttcttccctttctttctcttgtttgagcctgagttggtgggcttgtcaccttttgactcgtcaatgttgagggtctccttctcctaaccaaaaaaaaaaaaaaaaaaaaaaaaaaaaaacaaaacc

SEQ ID NO: 82804 - DNA, 405 bp, Zea mays
  Clone ID: MRT4577_175534C.1
aaccaaacccgtttggtttattcgtcacgttcttcgaaaacccgcgcaacgccctgccggccaaggccgaagatgggatttaccaccctgccggggtcttgatgggtgggaacaccggccttggctggaaggaattgccgaaggcctaaattccctttttccggccgaaccccgttattttggaacccgccaaccggaatgggggcgtcaaccacttctaaccagtcaaccaacacggggcccccccgaaccccccgcaacagggggtgggccgcttccagcctccggtgaaccacccccgccgccagcccgaagggcgtccggtccgccccccgaataacctcctcaaccccgttaaacttgaaattggttggcaccggcccaattatctcctcccaaccaatc

SEQ ID NO: 82805 - DNA, 672 bp, Zea mays
  unsure (1)..(672): unsure at all n locations
  Clone ID: MRT4577_175535C.1
ctcctnaatcagtgtgcagcaattgacatttccgttgttctttatttgctttctttattctattcattgatttttgccactcacaatgttgtcttcttgacttcttgttataattaccactgtgtctatgaattgtgggtccagctgggtctatgaaatgtgagcctgatagcaattttacaaatctgtttcttgctgatggcaaatatcagaatctctcactgattacctgcatacattgttcttgaggtatcacctaggcgtccgggcagtggctgctcgccttggatatttgctgcctgggcatttcttagcctgcctaggtggctggaagttgtctgctcgccttggtcacgcatcacgtcttaaaacccatgcctgcatataagttttcttgcaccacctatgggagcatcacagcattatattttttgtttaataagtgtcttggttgctatggttccctactttaaataagtgttatgtatcttttcttgtctgacatagcgagtgctttattgatttatcaatcccattgacttctcaaactttccagtacaggtgttaaactttatgtggttgaaattctttcttatttggcgctacttccggttttggtcactggttgggaggagtcgagactcctgaaaactcccaagtgtataaataatg

SEQ ID NO: 82806 - DNA, 278 bp, Zea mays
  Clone ID: MRT4577_175536C.1
aaaaggaaccacttcatttcttaaaaggggtccagagtagaactgcctgctccaggtcacaattgaccacccgggcacagctgacaggcccaaactgaaaacaacaagacagccaccaccggcacgtgctggcccttattggggacgactaccatcctttttactacgcaggagacacgggcgtggtgcatcgcttgtcgatctgggccaggagggtctccttgctgggaccgacgacggtcttcaccgacaccccgttcttgaccaagtggaaggtc

SEQ ID NO: 82807 - DNA, 276 bp, Zea mays
  Clone ID: MRT4577_175537C.1
ttagtgcttttttaacagccacacactaggtaaactgaaacagacaatgggactggactagctacaaaacatgctttatatcttccatgcgcttgcttatgactatgactaatcaccacgcggtgatccacagcacggacggcgcgacaggcacgctactccacgagaccgctatcgtccacatgccttgctttgggctgctaaacgacatccaacactacttgcacgcaaactatttctgcagtgactacattattatagatacggtggcacacc

SEQ ID NO: 82808 - DNA, 392 bp, Zea mays
  Clone ID: MRT4577_175538C.1
atatttttttttttttttttatttttttttgtgtggtttttaattaatttttgggttttaaaactttttcttttttttttgccccaaaaaattcccaaagggaagcggtcaaaacctaaccactatggcccccgaaaaacttttttaaataaaaacaaaatttttccaacccgttcccgggtttttaaaaagctttaaaaaaacggggctttcccccaaaaggcctcccaaaacaaaaacccccctttgggggccccaagtttaaactttaaacaaccgggggccccggatctttttgaggggttcttctcttaaacctaaaaaggggccccctcatcaaaagggggttttaaaaaccctataagccctcccctttgggggtttttctgggg

SEQ ID NO: 82809 - DNA, 381 bp, Zea mays
  Clone ID: MRT4577_175539C.1
acatcccgtcgcattccatcccgactaccacccatcttgttgtccgccgattcgatccggttcttccaacccaggggcggtgatggcgacgaagaggagcgtgggcaccctctgcgaggcggatctgaaggggaagaaggtgttcgtgcgcgcgcgacctcaacgtcccgctctacgatgcccacaagatcaccgacgacacccgcattcgcgcctgcgtggcgccatcaagttgctcctctagaagggggcccaggtcatcctcggcagccacctgggtcgggcaaaggagtgaccccaaagtacaggttgaagcctcttgttccacgcttgtctgagctcctttgagttgaagtcgtgatgggcaatgattgcattggt

SEQ ID NO: 82810 - DNA, 177 bp, Zea mays
  Clone ID: MRT4577_17553C.1
accacttatatcccacagcgccctttggtagcagaagactagcaagacacatcatacatgcgtatctactaacacaattcattggcggactgagagatcacgaccgtgatgtcaaccatcaaaactcaagcctcctttggaatatacggctcctacttatagatcgctagctggcca

SEQ ID NO: 82811 - DNA, 729 bp, Zea mays
  Clone ID: MRT4577_175540C.1
ccgtcgcctaccggctatcatcagcacgcaccgccgccgcctctcatctcatcgccgcgctgcttccccgcccgcccccggattggcgctgccgcacccagatcttccccacccaaatcgactccgccatcgtccggatccacgcagagccgtcgcggatcgacgtgctgccgccacagattgcgcgctgtcgtacggatcgagagacacccaccgcaagccttccgcgctggcgccgttcgggaagtaaggaggctacggagagggcacaagctggggggtgtcgaactccgtggagaacgcgcgggcggtggatgcctagctctggtagtctggtgggagggtgaggaaaatctagtggctgacccacgggcacggctgtcccgattcgccggccatgaagtgccgctctgattcgtcaggcggtggcgacgaccaccgggccccagcacccgctgccacgggcgtcggtggtggctcgcccgtgggcgaaccgagtaagaagcagcggacggaggagccggtcgcaagctccagcatggcgggcgagtgctcgtcttcgttcttgcaggctcccccgccgctggcggagcagttgccacaggacgcaagagtgggcgagcagccgccgccaggttcggaggccggaggtgacgagcaggccagggtgccggatctcggggaggacctggtgttcgaggtgctgatgcgagcggaggcccggacgct

SEQ ID NO: 82812 - DNA, 893 bp, Zea mays
  unsure (1)..(893): unsure at all n locations
  Clone ID: MRT4577_175541C.1
ccgctcgaggccncggccggggctcgagccacatccatccaaaccaaagccaagcccatcgccactccaatccagcgaccgcctcgcccagatcgccgccgattcgatccggttcctcgacgggatggcgaccaagaggagcgtgggcaccctcggggaggcggatctcaaggggaagaaggtgttcgtgcgcgccgacctcaacgtgccgctcgacgacgcccagaagatcaccgacgacacccgcatccgcgcatccatccccaccatcaagtacctcctcgagaagggcgccaaggtcatcctggccagccatctgggccgcccaaaaggtgtcacccccaagttcagcttgaagcctcttgttccacgcttgtctgagctccttggacttgaagttgtgatggcccctgactgcatcggtgaagaagttgagaaattggctgctgctttgccagatggtggtgttctactcctagagaatgttagattctacaaggaggaagagaagaacgatcctgagtttgctaagaagcttgcatcagttgctgacctttatgtaaatgatgctttcggcactgcacatagggctcatgcttcaaccgagggtgtaaccaagtttttgatgccttctgttgctggcttcctcatgcagaaggaacttgactatcttgtcggagctgttgccaacccaaagaagccatttgctgccattgttggtggatccaaggtctcatctaagattggtgtgatcgagtctctgctggccaaggttgatatcctcatccttggtggtggtatgatcttcacattctacaaggcccagggattagctgttggaaagtctctttgtggaggaagacaaacttgaactggcaacttcactgatcgaa

SEQ ID NO: 82813 - DNA, 402 bp, Zea mays
  Clone ID: MRT4577_175542C.1
ataagatgtatctccagttctacataaatgagaatggtgacaaagtttacaccactaagggggaatcaccacatgggctgcctactcagtctgctcatccagctcgtttctcccccgatgacaaatactcaagacaaagagttcttttgaagaagcgtttcggattattgcctacccagcagtcgccactaaaatactgaaacatttcatgtaatgcatgctgtacttttatatagcatacttggtgtctttgtatgtgtaatgaagttcctcttcggctcatatctgagtccctttatgatgacgatggtgatttaaaattacaaacagctaagtaactttagtattttgtttgttccaaaaaaaaaaaaaataaaattaaatttttatttataatttatt

SEQ ID NO: 82814 - DNA, 340 bp, Zea mays
  Clone ID: MRT4577_175543C.1
ctcgaggccggccgggaagaagctcgcatcgcaagccgatcttttactcctctaattcaagccaagacatagcttgtaggctaaagcaatggcaagcatcgtcaggcccagcaagctcctccttgctctccttgtcgcagcaatggcagcttcccctcgggctctcgcgtacgacccgagccctctgcaggacttctgcgtcgccgacacctcctccaacgtgttcgtgaacgggcaggcgtgcaaggacccggcgcaggtgacggcggccgacttcgccttctcgggcctgcaggacgcgggcgacaccgggaacgcgttcggctccaaggtgacgctg

SEQ ID NO: 82815 - DNA, 586 bp, Zea mays
  Clone ID: MRT4577_175544C.1
cactggccggtggccgcgcttcccatcctgggccatgagctcatgaccccatctcccctcccctagtcccctcccctctgcggctgcccctgcgagctgcgtagtccgtcgcctactggctatcaccagcacgcaccgccgccgcctctcatctcatccccgcgctgcttccccacccgcccccggattggcgctgccgcacccagatcttccccacccaaatcgactccgccatcgcccggatccacgcagagccgtcgcggatcgacgtgctggcgccacagattgcgcgctgtcgtacggatcgagagacacccaccgcaagccttccgcgctggcgccgttcgggaagtaagtaggctacggagagggcacaagctggggggtgtcgaactccgtggagaacgcgcgggcggtggatgcctagttctggtgggagggtgaggaaaatctaggttcatccactcgccgctcctcctcgaaagcagtggctgacccacgggcacggctgtcccgaatcgccggccatgaagtgccgctctgattcgtcaggcggtggcgacgaccaccgggccccagcacccgc

SEQ ID NO: 82816 - DNA, 660 bp, Zea mays
  Clone ID: MRT4577_175545C.1
ccggccgggctcacccgaagcacatcccgtcgcatcccatcccactaccacccatctcgtcgtccgccgattcgatccggttcttccaacccaagggcagtgatggcgacgaagaggagcgtgggcaccctcggcgaggcggatctgaaggggaagaaggtgttcgtgcgcgccgacctcaacgtcccgctcgacgatgcccataagatcaccgacgacacccgcatccgcgcctccgtccccaccatgaagtccctcctcgagaagggcgccaaggtcatcctcgccagccacctggggcgtgcaaagggagtcaccccataggacaggttggagccgtctaggtccacgcttcggtgacttccttggagttgaagtatgctaagatttgacattagcttattttagtacctgctatctttcagttattctaagggctaatatgtgtgcataaataggtcgtgatggccaatgattgcattggtgaggaagttgagaaattggctgccgctttgccggaaggtggagttctgctcctagagaatgttagattctacaaggaggaagagaagaacgaacctgagtttgctaagaagctagcatctgtcgctgacctttatgtcaatgatgctttttggtacggaaaacagagctcatgct

SEQ ID NO: 82817 - DNA, 1938 bp, Zea mays
  Clone ID: MRT4577_175546C.1
tcccgtcgcatcccatcccactaccacccatctcgtcgtccgccgattcgatccggttcttccaacccagggtgagtctccggatccgtcgccgtctggtctccgtgtgctctcgtcgccgtcgccgtcgccgccgtctgactgaccccctcgcctcccgcggcgtcgggtctctggtgctgctgctactgctgctgcgtgcagggcagtgatggcgacgaagaggagcgtgggcaccctcggcgaggcggatctgaaggggaagaaggtgttcgtgcgcgccgacctcaacgtcccgctcgacgatgcccagaagatcaccgacgacacccgcatccgcgcctccgtccccaccatcaagttcctcctcgagaagggcgccaaggtcatcctcgccagccacctgggtcgtccaaaaggtgtcaccccaaagtacagcttgaagcctcttgttccacgcttgtctgagctccttggagttgaagtcgtgatggccaatgattgcattggtgaggaagtcgagaagttggctgccgctttgccagaaggtggagttctgctcctagagaatgttagattctacaaggaggaagagaagaacgaacctgagtttgctaagaagcttgcatctgttgctgacctttatgtcaatgatgcttttggcacggcacacagagctcatgcttcaaccgaaggagttaccaagtatttgaagcctgctgttgctggcttcctcatgcagaaggaacttgactaccttgttggagctgttgccaacccaaagaagccatttgccgccattgttggtggatccaaggtctcaactaagattggtgtcattgagtcgttgctggcgaaggtcgatatcctcatccttggtggtggtatgatctacacattttacaaggcacagggatattctgttggaaaatctctcgtggaagaggataaactcgagctcgcaacttctcttattgagaaggcgaaggcaaagggggtttctcttttgcttcccactgatattgtagtagcggacaagtttgcagccgatgctgagagcaagattgtccctgccactgctatccctgatgactggatgggtcttgatgttggccctgatgccaccaaaacattcgacgaagcattggacaccaccaagactgttatttggaacggccccatgggagtgtttgagttccagaagtttgcagctggcaccgaggcgattgccaagaagctagctgagcttacaaccacgaagggtgtcactaccatcatcggcggtggcgactctgtcgctgctgtcgagaaggctgggctggccgacaagatgagccacatttcgaccggcggcggtgcgagcttggaactcttggaaggcaagactctacctggtgtccttgccctcgatgacgcctagatccgctgctgctgctgctactcaggttctgccagctttgcgtgtcatcttgtttcggaccttggtgtagcactgcaaggctaaggtttactcctccacacatggactttcgaggataggcttgccaccgtgttttgctagatgagtcgtgaaataagcttttacttcctcgctgctgtgggtgaagtgactggaattcggaaatttggaactaacaaaaccccccgtggatttgtatgatatgttttgttcgacagtttgcgtcccatctttcactgtggtatctggtatggtatgttcttattttttgtctgacagagtgacagtttgcattcctgtgttgccgttgctattcgttcctgctacctgtggcgccagatgaattgggaacaaggttttctagtttagttggttaaattatcttctttcagtgttgttctggagtggtggtagctaatggcggcccttgcaaataaaaacttgctacccgagtttggcgctggcgcagcaatttattc

SEQ ID NO: 82818 - DNA, 1665 bp, Zea mays
  Clone ID: MRT4577_175547C.1
ttgggtacctcgaggccggccgggacccgaagcacatcccgtcgcatcccatcccactaccacccatctcgtcgtccgccgattcgatccggttcttccaacccaggggctgtgatggcgacgaagaggagcgtgggcaccctcggcgaggcggatctgaaggggaagaaggtgttcgtgcgcgccgacctcaacgtccctctcgacgacgcccagaagatcaccgacgacacccgcatccgcgcctccgtccccaccatcaagttcctcctcgagaagggcgccaaggtcatcctcgccagccacctgggtcgtccaaaaggtgtcaccccaaagtacagcttgaagcctcttgttccacgcttgtctgagctccttggagttgaagtcgtgatggccaatgattgcattggtgaggaagttgagaagttggctgccgctttgccagaaggtggagttctgctcctagagaatgttagattctacaaggaggaagagaagaacgaacctgagtttgctaagaagctagcatctgttgctgacctttatgtcaatgatgcttttggcacggcacacagagctcatgcttcaaccgaaggagttaccaagtatttgaagcctgctgttgctggcttcctcatgcagaaggaacttgactaccttgttggagctgttgccaacccaaagaagccatttgccgctattgttggtggatccaaggtctcaagtaagattggtgtcattgagtcgttgctggcgaaggtcgatatcctcatccttggtggtggtatgatctacacattttacaaggcacaaggatattctgttggaaaatctctcgtggaagaggataaacttgagctcgcaacttctcttattgagaaggcgaaggcaaagggggtttctcttttgcttcccactgatattgtagtagcggacaagtttgcagccgatgctgagagcaagattgtccctgccactgctatccctgatgactggatgggtcttgatgttggccctgatgccacgaaaaccttcaacgaagcattggacaccaccaagactgttatttggaacggccccatgggagtgtttgagttcgagaagtttgcagctggcactgaggcgattgccaagaagctagctgagcttacaaccacgaagggtgtcactaccatcatcggcggcggcgactctgtcgctgctgtcgagaaggctgggctggcggacaagatgagccacatttcgaccggcggcggtgcgagcttggaactcttggaaggcaagactctacctggtgtccttgccctcgatgacgcctagatccgctgctgctgctgctgctgctactcaggttctgccagctttgcgtgtcatcttgtttcggaccttggtgtaacgctgcaaggttaaggtttactcctccacacatggacttttggggataggcttgccatcgtgttttgctagatgagtcgtgaaataagcttttacttcctcgctgctgtgggtgaagtaactggaattcggaaatttggaactaacaaaaccccccgtggatttgtatgatatgttttgttcgacagtttgcgtcccatctttcactgtggtatctggtatggtatgttttttttgtctgacaaaaaaaaaaaaaaaaaagcggcc

SEQ ID NO: 82819 - DNA, 3445 bp, Zea mays
  Clone ID: MRT4577_175548C.1
tgggtacctcgaggccggccggacccgaagcacatcccgtcgcatcccatcccactaccacccatctcgtcgtccgccgattcgatccggttcttccaacccaggggcagtgatggcgacgaagaggagcgtgggcaccctcggcgaggcggatctgaaggggaagaaggtgttcgtgcgcgccgacctcaacgtcccgctcgacgatgcccagaagatcaccgacgacacccgcatccgcgcctccgtccccaccatcaagttcctcctcgagaagggcgccaaggtcatcctcgccagccacctgggtcgtccaaaaggtgtcaccccaaagtacagcttgaagcctcttgttccacgcttgtctgagctccttggagttgaagtcgtgatggccaatgattgcattggtgaggaagtcgagaagttggctgccgctttgccagaaggtggagttctgctcctagagaatgttagattctacaaggaggaagagaagaacgaacctgagtttgctaagaagcttgcatctgttgctgacctttatgtcaatgatgcttttggcacggcacacagagctcatgcttcaaccgaaggagttaccaagtatttgaagcctgctgttgctggcttcctcatgcagaaggaacttgactaccttgttggagctgttgccaacccaaagaagccatttgccgccattgttggtggatccaaggtctcaactaagattggtgtcattgagtcgttgctgggcgaaggtcgatatcctcatccttggtggtggtatgatctacacattttacaaggcacagggatattctgttggaaaatctctcgtggaagaggataaacttgagctcgcaacttctcttattgagaaggcgaaggcaaagggggtttctcttttgcttcccactgatattgttgtagcggacaagtttgcagccgatgctgagagcaagattgtccctgccactgctattcctgatgactggatgggtcttgatgttggccctgatgccactaaaacattcgacgaagcattggacaccaccaagactgttatttggaacggccccatgggagtgtttgagttccagaagtttgcagctggcaccgaggcgattgccaagaagctagctgagcttacaaccacgaagggtgtcactaccatcatcggcggcggtgactctgtcgctgctgtcgagaaggctgggctggccgacaagatgagccacatttcgaccggcggcggtgcgagcttggaactcttggaaggcaagactctaccgggtgtccttgccctcgatgacgcctagatccgctgctgctgctgctgctgctactcaggttctgccagctttgcgtgtcatcttgtttcggaccttggtgtaacgctgcaaggttaaggtttactcctccacacatggacttttggggataggcttgccatcgtgttttgctagatgagtcgtgaaataagcttttacttcctcgctgctgtgggtgaagtgactggaattcggaaatttggaactaacaaaacccccgtggatttgtatgatatgttttttttgaaagatgggacgcaaactgtcgaacaaaacatatcatacaaatccacggggggttttgttagttccaaatttccgaattccagtcacttcacccacagcagcgaggaagtaaaagcttattccacgactcatctagcaaaacacggtggcaagcctatccccaaaagtccatgtgcggaggagtaaaccttagccttgcagtgctacaccaaggtccgaaacaagatgacacgcaaagctggcagaacctgagtagcagcagcagcagcagcggatctaggcgtcatcgagggcaaggacaccaggtagagtcttgccttccaagagttccaagctcgcaccgccgccggtcgaaatgtggctcatcttgtcggccagcccagccttctcgacagcagcaacagagtcgccgccgccgatgatggtagtgacacccttcgtggttgtaagctcagctagcttcttggcaatcgcctcagtgccagctgcaaacttctcgaactcaaacactcccatggggccgttccaaataacagtcttggtggtgtccaatgcttcgttgaatgttttggtggcatcagggccaacatcaagacccatccagtcatcagggatagcagtggcagggacaatcttgctctcagcatcagctgcaaacttgtccgctactacaatatcagtgggaagcaaaagagaaaccccctttgccttcgccttctcaataagagaagttgcgagctcaagtttatcctcttccacgagagattttccaacagaatatccttgtgccttgtaaaatgtgtagatcataccaccaccaaggatgaggatatcgaccttcgccagcaaggactcaatgacaccaatcttacttgagaccttggatccaccaacccaaagaagccatttgccgctattgttggtggatccaaggtctcaagtaagattggtgtcattgagtcgttgctggcgaaggtcgatatcctcatccttggtggtggtatgatctacacattttacaaggcacaaggatattctgttggaaaatctctcgtggaagaggataaacttgagctcgcaacttctcttattgagaaggcgaaggcaaagggggtttctcttttgcttcccactgatattgtagtagcggacaagtttgcagccgatgctgagagcaagattgtccctgccactgctatccctgatgactggatgggtcttgatgttggccctgatgccacgaaaaccttcaacgaagcattcggacaccaccaagactgttatttggaacggccccatgggagtgtttgagttcgagaagtttgcagctggaactgaggcgattgccaagaagctagctgagcttacaaccacgaagggtgtcactaccatcatcggcggcggcgactctgtcgctgctgtcgagaaggctgggctggcggacaagatgagccacatttcgaccggcggcggtgcgagcttggaactcttggaaggcaagactctacctggtgtccttgccctcgatgacgcctagatccgctgctgctgctgctgctgctactcaggttctgccagctttgcgtgtcatcttgtttcggaccttggtgtaacgctgcaaggttaaggtttactcctccacacatggacttttggggataggcttgccatcgtgttttgctagatgagtcgtgaaataagcttttacttcctcgctgctgtgggtgaagtaactggaattcggaaatttggaactaacaaaaccccccgtggatttgtatgatatgttttgttcgacagtttgcgtcccatctttcactgtggtatctggtatggtatgtaaaaattgtcaaaaaaaaaggaaa

SEQ ID NO: 82820 - DNA, 555 bp, Zea mays
  Clone ID: MRT4577_175549C.1
ccaggagtaatataatctattttatcttcggcaatctagcacgtgcagcttagatacctttatcgcacgaccgtgctaccatttaatacagagtaccatcgctaatcaccaggatcgggctgcactttgtggcgggtctcaactcagccgccaactctcggccagacttccaggttcctgcttccagcatctgaagaaggctcaggtttaccccacgaggcttggacttgtcctgaagcatctgatgcaattcgtccaacaaagccgcagtcatcgctctccactcaacgctaacatccgacgaagcatccaactggggtagctcctggcccgagttctcctttccaacttgtagatcgccatttttgagcttgaggacccctagatcgacatacaggccaccgttgcggtactcgggcagtgcagggccaaattccatgttctcccatgtgcaccccaattgcctttcaaaacaaccgacacggagtaagccactcaatgcgtaagtctgtggaaaggctggatcatgctcttctcctgaatggcaccctcctt

SEQ ID NO: 82821 - DNA, 260 bp, Zea mays
  Clone ID: MRT4577_17554C.1
aaatatacacgctcaacatatcaacttcataacataatcactcctcctctcatacatccaagcttatccaaacgatcacatcatctaccttcacacactcacatcaacctcacatcaaatccttccccttccttttctacaccttctacttgtaacaccccttccccacatcacttaaacgatcatcaaactcttctacaactatccactaaagctattcaataccaatcccgtcactggcatatatactaatctcaaaa

SEQ ID NO: 82822 - DNA, 1670 bp, Zea mays
  Clone ID: MRT4577_175550C.1
cattgggtacctcgaggccggccggccggggacccgaagcacatcccgtcgcatcccatcccactaccacccatctcgtcgtccgccgattcgatccggttcttccaacccaagcgtgcagggcagtgatggcgacgaagaggagcgtgggcaccctcggcgaggcggatctgaaggggaagaaggtgttcgtgcgcgccgacctcaacgtcccgctcgacgatgcccagaagatcaccgacgacacccgcatccgcgcctccgtccccaccatcaagttcctcctcgagaagggcgccaaggtcatcctcgccagccacctgggtcgtccaaagggtgtcaccccaaagtacagcttgaagcctcttgttccacgcttgtctgagctccttggagttgaagtcgtgatggccaatgattgcattggtgaggaagttgagaaattggctgccgctttgccggaaggtggagttctgctcctagagaatgttagattctacaaggaggaagagaagaacgaacctgagtttgctaagaagctagcatctgtcgctgacctttatgtcaatgatgcttttggcacggcacacagagctcatgcttcaaccgaaggagttaccaagtatttgaagcctgctgttgctggcttcctcatgcagaaggaacttgactaccttgttggagctgttgccaacccaaagaagccatttgccgctattgttggtggatccaaggtctcaagtaagattggtgtcattgagtcgttgctggcgaaggtcgatatcctcatccttggtggtggtatgatctacacattttacaaggcacaaggatattctgttggaaaatctctcgtggaagaggataaacttgagctcgcaacttctcttattgagaaggcgaaggcaaagggggtttctcttttgcttcccactgatattgtagtagcggacaagtttgcagctgatgctgagagcaagattgtccctgccactgctatccctgatgactggatgggtcttgatgttggccctgatgccaccaaaacattcaacgaagcattggacaccaccaagactgttatttggaacggccccatgggagtgtttgagttcgagaagtttgcagctggcactgaggcgattgccaagaagctagctgagcttacaaccacgaagggtgtcactaccatcatcggcggcggcgattctgtcgctgctgtcgagaaggctgggctggccgacaagatgagccacatttcgaccggcggcggtgcgagcttggaactcttggaaggcaagactctacctggtgtccttgccctcgatgacgcctagatccgctgctgctgctgctgctactcaggttctgccagctttgcgtgtcatcttgtttcggaccttggtgtagcactgcaaggctaaggtttactcctccacacatggactttcggggataggcttgccaccgtgttttgctagatgagtcgtgaaataagcttttacttcctcgctgctgtgggtgaagtgactggaattcggaaatttggaactaacaaaaccccccgtggatttgtatgatatgttttgtttgccaaaaaaaaaaaaaaaaaaaaaaaaaaaaaaaaaaaaaaaaaaaaaaaaagaaaaaaaaaaaaaaaaaggccccta

SEQ ID NO: 82823 - DNA, 472 bp, Zea mays
  Clone ID: MRT4577_175551C.1
aacggggaaaccataataattaccacgttcatagctagtgctatggtcattgcttggatatggtacggctaaagaacattttagatgtcagtattgctcggtattgctcggtgatgcatgaattggcccggccgtccgctgagggacggtagacggcggctgtgataccacgtcgtcaagcactgaccgcgcggggctcgcctgacttggcggatggccggtcgtgtgtgcccagtaggtttaccaaaccgtttttccactgaaaaccgctagtcactggaacgaaaaaaccgcccaaaaaccgctaatccaatgtccatagagccgtcgtaaagaaccacatgaaagctttgactttccggtgcccaaaatgcagctgaggtcgccatggtttcagttctccaatgtcagtttatcccggaataaaccggggagcatttcagagtgccgcggctctgggttgatggcttcc

SEQ ID NO: 82824 - DNA, 620 bp, Zea mays
  unsure (1)..(620): unsure at all n locations
  Clone ID: MRT4577_175552C.1
tganatgatgaggcggggnaagnagaacccaggtgnctgaagaggacgagtgctcctccgctctgccaccagcgtcccagtcacaacgaagatcttctcttacagggagtgcaagtgatgggcgatatccagctgcttcgctgggctcaaactcagttcctttagcaacaaggaagagcatattatctgtacacctcgtgtagcgattttctgactttcctgagtgaggcggcgctattggctttgtctattgtgtagttgcaaaagaatctgtgaattaccagtcagtggagattgagagggattccccggctagaagctcaagcggattaggaagtggctcatcttcatccagtggtacagtacagtggagcaaatgagtatctatcaccattaatgctgagttatcgatcaagtagctcgttaattcgttaaaattccttgcagattctgactctgatgttacagtttattttttcagtaaccagaggatgacaagcctactacaagagttggtcctaagttatacaataagcctaactttttttacagagtacacaaatgtcaggtttttcctgtttgggctagcaccacaaatggaaacaaaaaattggactcag

SEQ ID NO: 82825 - DNA, 635 bp, Zea mays
  Clone ID: MRT4577_175553C.1
ccccgcgtccgcccacgcgtccgggttttagaagttgaaggtggatcacgaaggcatgcagttcacaaagatgagagcttgtcagaaataaggacacagctccttcagattaaaaatcagcaaagcagtttaatggagcaaatgagtatgtcaccattaatgttgagttatcgatcgagtagctcgttaattcattaaaattccttgcagattctgactctaatgttacggtttatttttctagtaaccagaggatgacaagcctgctacaggagttggtcctaagttatacaataagcctgatttttttacagagtacacaaatgccaggtttttcctgtttgggctagcatcacaaatggaaacaaaaaattggactcagcccatcgtgaagatatgaaggaagagcactatcccattattctgttttttcggaagaagaccatgtttctagaatgaacatgccagcatggtgccatcaacaacttctctgttagctcacggtacaccatgctccagcctgccccttggttatcactaattcagtcatctgtggtgctgattgtgttcccaagatgcactgaaatagagcaagatcaaatgaggatgaagttactgtgtagagatttttgttc

SEQ ID NO: 82826 - DNA, 1706 bp, Zea mays
  Clone ID: MRT4577_175554C.1
atgtgccaattaacgttccgtatcatcacttgtaaaaaaaaggtttatgttgggggcatctcctctgatgtctcttatgatgatctcaaaaactctgccagtcttttggacaagtagtggaagtgattactcctagatttctttgtgctagcttttgtttttgctttcttctaaattcagagttttttcttttcttttctgtaggttgaactcatagctgatcttcatgttatccatgctagcaatgtattgcgtttattcatatttctcttttataggagggggggtatatgtgataaagcatgtattcgataaagcagatctttccaagtagggaactaaattgaaaattgtattttatgaactttatgtttagtttcatggatcagtttgaggcatagctaagtataatttatatgattacactcacatccacttggtgtttttaaaatgtttgcaacggtccactattgagtttgaaatactgaacctcaaactccttgtcaaggtacacctcgtgtagcgattttctgactttcctaagtgaggcggcgctattggctttggtaggtctttctcatgatcatgttgtttgggtctgaaaatgctctgagtcatagtctcgtaatgttatgataacaataacatcattttcgtgaggatttggctgaaaggagaacaactcaacatcaatcttggttatcaaccaagatcctaaactcctttgtcatgtgttatcatttcaatcctgaactatgcattgttgtgggtcttgaagatctggttacaagcctacaacttaactgatatatatcacatgatgatgataatatgtatattcatggtgacacctttgctctttgaacatgttgtagtctattgtgtagttgcaaaagaatatgtgaattaccagtcagtggagattgagagggattccccggctagaagctcaagcggattaggaagtggctcatcttcatccagtggtacagtacagtggagcaaatgagtatctatcaccattaatgctgagttatcgatcgagtagctcgttaattcgttaaaattccttgcagattctgactctgatgttacagtttattttttcagtaaccagaggatgacaagcctactacaggagttggtcctaagttatacaataagcctgactttttttatagagtacacaaatgccaggtttttcctgtttgggctagcaccacaaatggaaacaaaaaattggacttagcccatcgtgaagatatgaaggaagagcactgtcccattattctgtttttcggtaattaaagcatcatctccattcttggttgttcccatttttctattatttactaagtagcttatctggctaatgttaaaaactggaagaagaccatgtttctagcatgaacatgccagcatggtgccatcaacaacttccctgttagctcacggtacaccatgctccagcctgtcccctggttatcactgtggtgctgattgtgttcccaagatgcactgaaatagagcaagatcaaatgaggatgaagttactgtcggtactgatttttgttccccctttgtagcagcacccatggatttttatttgcacagaattactctcttttactggttcattcaataattcaatttgttgcttggaaaccactgtataataaatccaaatgctatggtatgattttgtg

SEQ ID NO: 82827 - DNA, 502 bp, Zea mays
  Clone ID: MRT4577_175555C.1
ggggggggggagcaaggtgaataccaagagcgatctgacaatttattggattggtattacgatgaccagatttcaggcgtagcatagtggcggtcgtgactgcccgggcgatttcctgatctcgcgctgggccatgatgagttgttgtggggggggagggggttctgacgggatccatggttgctgtcagcggaggagttgtagcgaagtgggtggctctgctgctccagcccacggcgatggggctccagcgtgtgttgacatggttgatccgagagctgcctatagagagaaggtgctaattgaagcagagaaacagtttcaggacgatttcaattttttgaaggaaaagttattagtgatttttggccaattagtggatgtccaacggatggacatcatttgccaagttatgggcgacaagttcaagggttgtgtgctctggttgcaaggacacggtgccttggaagctgggaggccttctgtgaaaattatgggtgaa

SEQ ID NO: 82828 - DNA, 267 bp, Zea mays
  Clone ID: MRT4577_175556C.1
ctagcatgtaaatcggcatggctagttcctggaggattaggcaggtcgttactggcaatgaagtgaatttgtttttgtatattcagattttacgggacagagatgtcatttaccttgtaatttgaaggactattacatgtgcttatgacataatatgtagcagtttcatttgcatgtgtcaaaacccatccatcatgactggatcgaggtcaaagtagtcatgttttggccccgtttagtttgggatgactaaactaaactttagtc

SEQ ID NO: 82829 - DNA, 247 bp, Zea mays
  Clone ID: MRT4577_175557C.1
ccttgatcggacatatattttttattgagaggggtgtgatgaaacacatcctgatgtgaccccagaccattagggcaatcagcctcctcagtattgtcatccggggcttccagggtattgttaaagatcagacctttggacactcactcgataagactgagcaccatcttgttacaaggatcgacctccgtaaattctataattcattccaacaagctggcacccaatggttcagcgcgaaaattaa

SEQ ID NO: 82830 - DNA, 257 bp, Zea mays
  Clone ID: MRT4577_175558C.1
gcttacagttaactgctgtgaccttgtagaagaagcagtaatcaaaatgagcacaagcttagggtgggtgtccgtggacgtgagactgtgaattcagagggggacaactcagacaggatagcaagtttattacttggtaaagagcaaggatggtgtagacacaactttccacctcttggcatactacaactaggagttacccttcgaatatggagaagtataatttggaagacgaatgatgtctcatttcatctcaa

SEQ ID NO: 82831 - DNA, 753 bp, Zea mays
  Clone ID: MRT4577_175559C.1
gtgagagcggttgttgtcgaatttgatcgctacttcaactactacaaagtttagtaagtctatagtgcctcgcattgttacagcctacatgttactgcgttatttgtcttcattcattcatgttcatagatatagagatctaacatcaatcgttgtacaaggcatgtaaactcgccgctaatgcatttttcaggtatgggacactatgcaacagtgagaaactagggtgccttttcatcacaacaaataggatgcgtcgtcactaatcttacatctcactacaagtttttagattattacatctcttcaccttggcaggtttggaatcacaacatcccagatatgcatgatgggggactggttggttatcgatatcctgtttggtcaaaatggaggttgcaagactctcctcgttctccagggttcttatcaattcctcaattctaactctgacaaaggcactactgatttaacatcagcataaggttctgatttaacattaggataagaattgagcttggctgtccatccacagtcgaggaggaagcggaagccatcgacgacgaataggtagcacatggggtcctccccgtacaccccactgagaggcgtcacctacactgacgtccccatctgatctggaaaatactgcaaacttctaacaatttgacttgtagtcttttatatcttgtagataaaccaatacacttttatatatttgttactgatgataacttagtatcataaggcagc

SEQ ID NO: 82832 - DNA, 759 bp, Zea mays
  unsure (1)..(759): unsure at all n locations
  Clone ID: MRT4577_17555C.1
gagccggccgggnagccgtgcaccatcaccgtcgcagaagaggaaggaatagagccgagcagcaccttagcatcctctcgccatcgccgttgcggaagatcgcggagcacgggaagccatgggttggcggtgatttctcgtcggtcacctagcaccaccacagatccacttctcatcgtgggcagctcggtccctgtctccgccttcagaagggaggaggtgtcgatctacctacacgcattcgccgaaggagggcagtagctgatacagaaccagagatgaatcctcttcctgttggatctaatgttgttgttaccgcccaaatgcaactgctgcaacagatgtccaacaccatgatagagatgaaagctcaactccgccaaatccagcagcatccaccaccaccaccacccagggataagcatcgcgagttcatgagccacaagccacccactttttgtagctcccaagacccactacaagcagatgactggctgaagtccaaaaaagaggctcaacatagcccaatgcactgacagggaganagtactttatgcatcgggtcgcctcaccggccccactgcagattggtgggatgcatattgcaaagcgcatgctgctgctgacgccatttcctagacaaaaatctccaccatcttcagaaactaccacattcttgctggtcttatgaacattaagaaggaggtcctatccctccatagagaggcatgtcagtaagtgaataaagagccaaactca

SEQ ID NO: 82833 - DNA, 138 bp, Zea mays
  Clone ID: MRT4577_175560C.1
gttcgtttcgcgtcacccagagctcgtcggctctccgtccccgcgaggaagcgagtagcatgcgaccacccagcgtgaaggcttgctttgttgtggtgaaggtgatgggcaggacccggctttccaggggtcagggtg

SEQ ID NO: 82834 - DNA, 342 bp, Zea mays
  Clone ID: MRT4577_175561C.1
cggcatatagcgtggtgcctccaggaactcttggctgagcagcatcgagatgctgggggcgcccaacagtttactgtggggcgcactgaagatgcgcatgcacacccataggaagctacactgatcgcaactggcgcatggtaccaacatcggctgcatctatataaccagtaggtctctcagatccacaactgactattatcgtgggtcaatatgcgtaagagttgatcatatagcttaacatgcgcttgacatctgcctgtaaaacttcctgtttataatcaatgtactagggtttgtgtagtataatacttcataacacaaaaatttcaacatatgtag

SEQ ID NO: 82835 - DNA, 346 bp, Zea mays
  Clone ID: MRT4577_175562C.1
ttgttaagcgccagcgacgcggggcaccggagtggatataaatccgccgggcatgggcgccctcctacccgctgtagtccaccctgttaggatgccggcagtgcttgagcgcctggtgtgtcaacgcccacgcggctgcgagacgaccagggaggaggggagcagaggacggagacaaccgggagccgcagctgcctgctcgacgggcctggaggagcgatcacttctactgtctaccgacgacagttgcgaactccaactggagctgggtccccagagactgggggcggaggcagcagcagctcgatgcggaacatgaggaggacgactggctgcttggaaagcg

SEQ ID NO: 82836 - DNA, 292 bp, Zea mays
  Clone ID: MRT4577_175563C.1
caacaagcaacatagaaagtggaatacagtagcaaaaatagagcaacaatggcggccaggatattttccatcctgatgctccttgctctttctgcatgtgttgctaacgccaccatttttccttaatactcacaagcttctatagctgcccttcttcccccataccttccatcaatgaccgctttaatattgtgaaaccccagcctttaacccttccagatccaacaagccatcgcaaccagcaacttacctttattacaactggtcttttaacaattgccaggccctatct

SEQ ID NO: 82837 - DNA, 313 bp, Zea mays
  Clone ID: MRT4577_175564C.1
gcgaacctaaaactagtcccacgcgtccttgtttttttttatggaataaacctgataaaccaattccgtactacaacattaaccaaggcgggggggggggggaacctctaccccaaaacacaccccaaggagccctggttccacacacacaagtaatagcataactcaaaatttaccggctatgacctcccccccctagtgaaccgaaaatggccgcacccatcaccaaccaggaccctccgcaggcgagacaaaaatgtccaagcaccgtgcttccaaaaataccagccaaggccggctccgctcacaaaaa

SEQ ID NO: 82838 - DNA, 474 bp, Zea mays
  Clone ID: MRT4577_175565C.1
ctgacgacgaggaggccggaagggatccggaacatcagaggaatctacatcctgggcgacctggcgatcagaccaagactgcacacatcaaggactccgttgtgctcgggtgcatgaccgtgctcggctcgaacttaagcaggatggggggctagctcctggacggcggtatgcggagacattctggcgcaggagcgacctggcactttatcagctgcaccttcggggaccctaacaagagcaaccgcggtaaggtggcgctgaggccatcatgtatcagtgtctggtggacccgcctgcggtagtgtccagcgagagctaattgcgggataccttagactgggctgacagggaagcgagctatccgggccgccatgattgggacgaacaaacagacgtacgtgttcttgcttactaccatcagattccatggctggctcggcctttgtaccacagtgtaggccgtgaggtcat

SEQ ID NO: 82839 - DNA, 441 bp, Zea mays
  Clone ID: MRT4577_175566C.1
cccgacggcgctcatagctgcagatccttacctgcgcgtcgtatcatttccatccaatgacaccgacgtcgagactggcgacgagcataaagcggccttctccgtcgcacgggtaccatcgccgcggcgtagtggtccatcaaggcctacgaacggctcgcacctttccccaacgccgacaagaccgccggcgccgcgtcaaccaagtcataccctgcccacgacgtggagcgccgctctccaaggacactctaggctaagcataccaggatcaggtcgagaatgacgtctgtgtcggagctgatgcatgtcacacgaggcttcatggcgaatgagagtggcgtctccacactctccataggcaaagcggtgccccgtctctggatccctgaagatgacagcattagcaacgccccgcgcgaagctgacgtatgcgattgc

SEQ ID NO: 82840 - DNA, 431 bp, Zea mays
  Clone ID: MRT4577_175567C.1
ctagaacttgcaggcatagcgaattgaactatgagcgcaaaagtgcaccgaagaatgctgaacttcatgatggagaaatctgctgattcagagaatgcactaactgaggcaataaacatgagccctcatgactgcaatatgacaggacaaggtattgaccatcacagtgtcataatgatatggctcctcacatgatatctacggtgcagaactgacgaatcataatgtcccacaagaacaaacttatgctcaacggacagatctttggaaggaggagctatgcccatatgctaaatgatgcagccctaaatgtcattgctgcaattcatggcgttgattacaggatctgcgtaggcatagagctcataaaagctttatctgccggtgaagagaagcttgatgatattgctgtggatctgatgagtcccagg

SEQ ID NO: 82841 - DNA, 579 bp, Zea mays
  Clone ID: MRT4577_175568C.1
caaaaaaccaaacagtttttttttttttaaccctggaaaaaagaacccggctttcttccgtttgcttttttggaaggggggcccctaaagtagggaggaccccgggggggggggaaaatccttaaagggggccccctccccggggtggcagggggggccaaaaatggggaggggggacacctttaacaaaaaattgcgggagggaaagcgctcttccaaaaaacggggacaagggggtttttttgggaaaccggggggtttaatggaaagctgaagaacaagagcgccccactaattttttcctttttgaacccaacccatatgggggcttaaaaaaaaccgattagatcccccccccgcgggcccaaccccggggggggggggcccgcatccccccccccaaggggggggcgtcccccaagaagggcgacccaaacttttatttggtgaaaccggcccccccactttttatagggggcataaataaaaatctttcaaaccccaacggaggggggggggttatttcccttccaaagggagatggggggggtctgtcattccgccccgaaaaaaggggcc

SEQ ID NO: 82842 - DNA, 218 bp, Zea mays
  Clone ID: MRT4577_175569C.1
ttttttttttttttttttttttttttttttttttttttttttttttttttttttttttttttttttttggcgtaaaatccactggaccgaacaggcccttaaagggcacgtcccacgaagcaagccattaaacatcaatttgttttttcatgatcactgctacatgcaggtttattgaacaaaagaaacaaaatcacgtggccacctttacccttttg

SEQ ID NO: 82843 - DNA, 493 bp, Zea mays
  Clone ID: MRT4577_17556C.1
ataaaaaaaaaaaaaaaaaaaaaatacaaaaaaaaaaaaaaaaaaaaaaaaaacaaattaaaaaaaaaaaaaaaaaaaaggagggaaaaaaaaaaaaaaaaaaaaaaaaaaaatggtttgtacctcggggccgcaaccaaggggggggtaatttggggaaatttccatcagacggggggcggttcgagcttgtatggggggggcccaatcctccttatagggggttaaataaaaattgacgggcggttgataaaaaagggagggggagaaaaaagcggggggcaaccaaattaaattggttggaaaaacatctttttttagcaggttgggtaaaaaaaaaaaaggcccgaaccgatcttctttacaaaaggttgcccagattgaagggggaagggaccctccttgggggggttaattaaggggggggggggggttggttacagggagagggatcctttaatttgccagctacctaccgcccgttcctttggtt

SEQ ID NO: 82844 - DNA, 826 bp, Zea mays
  Clone ID: MRT4577_175570C.1
cccgtccgggcagcgagctgctgtttggcggtgtctgtatggatcatctcttcgcactgatgctgttggattggattcaactggtcactatccgtcccgaaagggtccaagtgagatagggtcaatgccatttcctcctggcgtgggtgaacgttctaatggtgaaattggcaacaacgaaaactatggagttattaccgctgatagcgcaatcgacgaaagcaatgtgggtaaccgtattatacgcaacatgggtgcgcaagagcgtctgggtctcggatccgacagcagcggtatgatggcaccagtccaggctaattccgaggccgtcagggcgggtctaccacgtctgcatcggaaggcagctccgaaatcaccttccagtagtagcccatgacaagatcctagtcgatgtgcaacattgacttttgttttttttattcggttgtcgtattttggcgtctatcttacttttgcttttacaagttatccacggtcttgcccatgtccttctgccgtcggtcctcgctacagaagtgtgatttactatcctcaaaacaataaaaaaaatacctctcatagcccccccgtcggtcgccccgtcgggaacagtaggcgacgcaacctcgcgtggcggggccgactgggtctcggaaaggatggcagcggtatcaaggaacgcaggccaggctctgacccggggacggctgggcgcggtcctcgtggccagggaatgacatcgtctcaaacattggattctgttgtaaagcctagacctgtcagtaacagcttagggactacagttatgggttattggattcaactg

SEQ ID NO: 82845 - DNA, 688 bp, Zea mays
  Clone ID: MRT4577_175571C.1
gcttcagtcagcccattaaccctctttcctgttgcgtagacactacctccacttcaactctcccccggcgtctgcgcgatctgctgaactgtgttgcattccagggtcacctctctgctttccctccgcacccgcgagttcatgaccaaccgcctcctgttccgctggcaattcgagcttgaggggatccaccccgttcgcgccaacgtctccaaggtgcagtggaaggtgaggtttgacaaggggtactaggtgaaggaccccaacatacatctttgacttcaagtgccgtacccacttcgcgatgaggaaatgccactgctttacggtctcatataccacaagctgctaggctgccaagatagttcaagtcgaaataccgcctcatcaggaatgctcttgctacgtaaggttgagaaagcccgcaagcaaatgaaggagcggaagaagatggtcatcaagatccgtgacgtgaagaagaccaaagctgatgacgccaaaaacaagtagacgttcgtttacatttgtattactggtctgggcttctggttgtactacctgcaatgtcctaattatgtctaccgctgaggctgtgatacacccttgtgactgaagtgatatttttttgtacttcctctggactgaagtgaagttttgtctgagtattgcctcgtaacataattgcccg

SEQ ID NO: 82846 - DNA, 1123 bp, Zea mays
  Clone ID: MRT4577_175572C.1
gggtgggggggggggaactctaacgaaacctctttaattcagcagctctataaagcaagcattgttctatggtctagctagcgcgcgacagccacttaaggtcacatctcggaatcaagaagaaattgttcagccgcggatccttctgagcacgaacatgccatatccgatgccaagaaacgtggcaatggagatcccgaagatgccgacgaggatcccgggcacgacgagcgaggtccagcctttggccgtggccatggcggctgcggtggtggggccgcctatgttggcgttggaggcgatgagcagcggcttcctgtcgatcccaataaccctgccggcggcgagcaccacggccatgtggacggacacctgcacgagcgcgaaggcgaagacgctgggcgcccgggtgacggcgtccacgacgttgccgttggcaccgacgacggcgaagaagagctgcatgaggatgagcgccagggtctcgccggcaggcgccagcctgctgagcggcgccgggaacgccgtggccaggaacacggccagcgccgtgacgcagggcagcgtgccgccctggagccccagccgcgcggccatggccgacccggccttgcagatgatgaaggacaaagcgaccgccgcgccaccgttcagcaccgacagccgctcgccgtccttctgcggactcgccgtcgccgtcttgggctctgctgggatgtttgacgccagtgagaagagcgccatgaagtagagcgccgagatgaggttgtccgctgcgacgccggcggcaaggacgggcggcgtgaggcctagagcttccgagatggcgacgtagttcaccgctccgccaatgtagctgcccatgagtgcagctgcgatcttccagctatcttggcccagcgatctcatggggatcagcagataggccaccgtcgtgccgattacagttgcaacagatccgagcaggaatgccttgaggaggtcgccggtggtgcggacgacgcggcggaggtcggcgccgaggagcagcagcgggacggcggccggcagcaggtactccatgacggcgtcgtgcgcgggcgccccgggggtgacgaggccgacggccgggcagccaggccgg

SEQ ID NO: 82847 - DNA, 580 bp, Zea mays
  Clone ID: MRT4577_175573C.1
tgtacagggctggatgaccagttttgtcggcgatcgccagcttacgcgggagaagttgctggggaaactgcggaatttcatggaggtgacggaggacaaaatggattacctggccgccttcattgatatgtccaccaattactacgagcatacgggcattcaaaccttggcccaccgtttaattgagcgtgcggtggcagaaatttaaccccaagctcttatagcttgtttgcaaagttgtattttgccccctaaatcccccaatactgggggacttttaatactttccccccaaacttggggggctaggggggcatttaaaacagactctcataagcaaacccatggccaaaaaactattactggtggggggaggccatagcaatgctttggtgctcaaacattggtgtcgccaccccctggctgatgtggaattaacccttgtcagtgacgttagacaaaccccctattccggtatgttgccggggtatttagctggtttttactcctacggcgaaagtcacattgatttagctcccctctgtgcttcagccggagcaatttttgtgcaagataaggc

SEQ ID NO: 82848 - DNA, 605 bp, Zea mays
  unsure (1)..(605): unsure at all n locations
  Clone ID: MRT4577_175575C.1
tatacttttgcgcttacactctcaccttgttgtggatctacataaacggtatttatactccccctgggacatgtgtcgggtagagagaggcaaatgcatgagatcatgactgctcctctctccctcatgactaccgcatttcgtatgttacgtacataaaccgcctcgtgcgtatcgagagcacattgctctcctggaaggctactttgcgaaacgtgcgcatctctgagtgttctctccccaatgagatggctgacggaaggaatattaatttatgataaatctgagggagctgttagggcacaaagaggccggataatataatagacgccctgctctccaaatgcctactggtgcctctgatttatgactatactgtgtatcaatgctacgatatctacctatatgaacttatcacagatagtcactcctgtatatatggcgtgaagaatggaatatagttgacctgttgatagaaccctagagaatttgatatcgtacactatgatggataccgctatactccccagcgaaggtggagaccgctacaaactagtattacccgaagacatgggggactgacntntgtttatggaactttcttt

SEQ ID NO: 82849 - DNA, 599 bp, Zea mays
  Clone ID: MRT4577_175576C.1
cattgggtacctcgaggccggccgggagtgagtctgcctcccgagccctatctatccttttctcgtcacctcgcgggtctcccgaccgccccgtcccgcagtcgtatcctctcctcactctcgccgccgccgcttcccctgcgcccccagccacgatgaatggtgctcagctcatagaagagccaggtgctgtgcgcactgaagggaacgtgagcatgctcacgaagaacaacgtagtgcactatactactaccacagatgataaaaggcttcatagcaccctgctgagaataagagtgaacgccattcctgtcattaaagaggtcgacatctatactgatgatgatgatattcaggatgtgaatcctaaagagcctgcttcaccttgaagctaatacatgggaggacagagcaactccacatacaaataagctgcaagatctgcttccatcaattatcaaccacctcaggcctgacgacctagacaacctgcgacaagctatgctgagcaattccataaacaggaccctgatgcctacggtgcagatgctgacgccaacgctgatgctgctcaggacgatgacgatgacgatcctgag

SEQ ID NO: 82850 - DNA, 374 bp, Zea mays
  Clone ID: MRT4577_175577C.1
gtacacacttttcctcaatcgccattaaaggcgccaacagggcacattgcgtcgctccttcagtgcatcagttcacacacactgcacacaacacagacgggaggcggggagactttatatttgtgactggtctctcacggtgcggggtgagggcgctgtgtacacatcattacacggatgcttagctcattcttcgcctcgatggaaaagtcctctctaacggcagtatcacctgcggctgattttagtcttactagcggaagtaacgtgcattttgactgtgccatgttaacacgcaacttgcgcctagtccttgaaccacgcaaccacatcaagttccatgtgattcacggaaaagcggatcgcataaaatg

SEQ ID NO: 82851 - DNA, 132 bp, Zea mays
  Clone ID: MRT4577_175578C.1
aaagctaagcgaccatttttggcgagttggcccgtgtgctcggcgtaaagcttgataggcacagcggatgacctccgcgctatagcggcaggagcgcacaccgggtattcctacctgcacagccaaccgacc

SEQ ID NO: 82852 - DNA, 359 bp, Zea mays
  Clone ID: MRT4577_175579C.1
gagcaacaagcagggatttatacgggaccttacttttaaatttttttggtcagtttattttacaacccacaatacttttttttagcattttctttaccttgggacaggaagaaccccgacccggccaaaatttggtttttgaaatttttgatagccaaataccttttcttataatgaaccaagttcaaaattccggtggtggacccttttgcccaggctccctccagttttttatccatggcccgaaaactttgttttaaacgccacgagttcacgccatccatccctttattcaaaaacgggtcatgccttgaggggctcctttgcctgccttttgagggaggaggggagctccaggg

SEQ ID NO: 82853 - DNA, 554 bp, Zea mays
  Clone ID: MRT4577_175580C.1
ggccgctttttttttttttttttactatataacaggagttctatacaaaataattaaataattacatcatatgaggaaacgatccagcaacccaaagttgactgggagacgacgacctagaccactcacgaactcatcacagcatcctccacgcgcctcatcctgtggtacctgctcttgacctgggacttgagattccaggtaccaggatgatcttcaggtgactcgtgacctcgcgcgcggattaagctcccaggagtcccgcccatggcacgctgtagtcccgcggcggagaacacgtcgacggcgagaaattggaggcgcacggcccgtcccccaaatgctccggtgagaaattagccaaccatgagacccagatcgagccccaggaagacccgcctagattcgcagtgcaccggtgaaccaccagggtcgcccaccgtggccaaccgcggcccaggcactggttagctgagagtgtggacgacggcgtcaaccttcttccccaccgcgttcccagtgccgggcagtaccgcgacgagcggacgcgtggg

SEQ ID NO: 82854 - DNA, 249 bp, Zea mays
  Clone ID: MRT4577_175581C.1
aatcaggtggagacagacaaagtttcgtgagggtgatccgcgctgagaagaaatggctaagatcgtcgcggatgcagtggctgatctgttctacgcaggccctggtgaccgttagccacatgccaatgctagccctaccggcagatgctgacggacctgcaacgctgggacgaggttcatcagtgcccgcttaacgcgttccacctggtcctcgaacataagctaacccgcatacaaacacgagctgga

SEQ ID NO: 82855 - DNA, 118 bp, Zea mays
  Clone ID: MRT4577_175582C.1
gatcttactgctggtgttgtcacctatccatacaacgtcaggggctgctaggactcggtacagctaggaaaccttccattaccggtttatttctgcagaagtattacaccaactttca

SEQ ID NO: 82856 - DNA, 250 bp, Zea mays
  unsure (1)..(250): unsure at all n locations
  Clone ID: MRT4577_175583C.1
cccgggtttttattcccaaaaaaactcccatctcgcggcggaaagagaggaggagaggtgcgagctggtaagatggatcggttgggggagcgggacattaagaagggggagagggagatggaggaggcgcgcaaggaagaggagcggaaggaggaggcgggggacaggaattcccaggagccgtttcaaggtgaagggctggggctnttacttgttaactgtggtttccgtggccggtcttgaatgtttt

SEQ ID NO: 82857 - DNA, 518 bp, Zea mays
  Clone ID: MRT4577_175584C.1
tggacgcctgcaggttccggtccggaattcccgggtcgacccacgcgtccgaggcagcccgcgccatgagcagcacggcagtggtccccagcgcgccaggcccgggcccaggccccagtggcgggccaggcggcggcaccgaggtgatccaggtgaccaacgtgtctccgagcgccagctcagagcagatgcgtacgctcttcggcttcctgggcaagatcgacgagctgcgcctcttcccgccggatgactcacctttgccagtctcctctcgtgtctgctttgttaagttccatgatccagactcagcagttgtggcacagcatctgacaaacactgtgttcgttgacagagctttgatagtcgtaccatatgctgaaggagttattcctgatgagactaaggctttgtctctattggcaccagctaatgcagtggcaggtcttctgcctggtggtggactcctgcctacccccaacccacttacccagattggcgctgttcccctggctgcgttg

SEQ ID NO: 82858 - DNA, 800 bp, Zea mays
  Clone ID: MRT4577_175585C.1
cattgggtacctcgaggccggccgggactcctccaattgaccctgaacttctccaccggattctctcgccgcctgttgccagccacacacaaccacccatccctctccatccaaccacacacccgccatggccgaccacgcagacgacctccacgccgagcagaccgaaggcttcaaggtcggagagaagaagacaatcgacgagtaccagaagctggaccagaatgacgagtctctgcaaaagtggaaggcgtcccttgggcttggccagggcaaggacatctccgaccccaacgacccccgcaagtgtatcattctatcccttggtctcgaggtagagggccgcgacgacatcatcatcgacctgcgtgctcctggtgcgctcgaggagctcgagaagaagcccttcaccatcaaggagggtgcgagtttccgcatgaaggcacagttcaaggtccagcacgagattctggcaggtctcaagtacctccagaaggtgaaccgcatgggtgttagcgccaagctgcaggagatgatgggctcatacggccccaacactgaggagaagccgttttacgagaagaagttcgagcccgaaaccgctccctctggcatgcttggtcgcggccactacacagccctttccaagttcgtcgacgacgacaaccaggtccacctgcagttcaagtggtctttcgacatcaagaaggactggtgataggcaatcggccaaatccgcatgttggaaaagggttgtattgtcgcacggcgcaatacggcagtctcttttagttgggagc

SEQ ID NO: 82859 - DNA, 581 bp, Zea mays
  Clone ID: MRT4577_175586C.1
ctagccttccaccctttatccaccagccgctcctcgagcacccccgtcccgcgccgcctccggctccggcgaggacgaggcacagaaggcagttgaaaggctcgatgggagattggtagacgggagggagatcatggtgcagtttgccaagtacggcccaaatgctgaacggattaataaagggagaatagtggagccagttccaagaccaggggggcgttccaggagtcacagtccaagacggaggtaccgtgatgattatcgagatgaccatgatagagattatagaaggcgaagtcgtagccggagtagagatagatacacccgtgacaggtacagggatagggattaccgccatcgtagcccgagtcgcagctacagtcctgatgattacaagaagcgtgggagagacagtttgtcacctgagcgaaaaagccctcgtcgtagccgcagtcctgatgattacaagaggcgtggcagaaacagtgcatcaccagcaagtaagagccctagtcgctccccacctcgcaagatgtcacctttctcctgagagatctcccgtcaggcgcaacaatgaccga

SEQ ID NO: 82860 - DNA, 1906 bp, Zea mays
  unsure (1)..(1906): unsure at all n locations
  Clone ID: MRT4577_175587C.1
ctagaggccggcccgtggttagccagcacgacttcgtatctcctacaaattggagatccctagtttatactcgcccccgctcttccccatcccctcttccctctctagccttccacccttcatccaccagccgctcctcgagcacccccgtcccgcgccgcctccggctccggcgagatgtcacgcttcggtcgatccggcccgccgccgccgatccgcgacacgtactcactcctcgtcctcaacatcaccttccgcacaactgctgatgacctcttccctctcttcgacaagtacggcgagattgtcgacatctacatcccaagggaccgccggactggtgactcgcgcggattcgcgttcgtgaggtacaagtacgaggacgaggcacagaaggcagttgaaaggctcgatggtgagtttagtttgagggagattggtagacgggagggagatcatggtgcagtttgccaagtacggcccaaatgctgaacggattaataaagggagaatagtggagccagttccaagaccaggggggcgttccaggagtcacagtccaagacggaggtaccgtgatgattatcgagatgaccatgatagagattatagaaggcgaagtcgtagccggagtagagatagatacacccgtgacaggtacagggatagggattaccgccatcgtagcccgagtcgcagctacagtcctgatgattacaagaagcgtgggagagacagtttgtcacctgagcgaagaagccctcgtcgtagccgcagtcctgatgattacaagaggcgtggcagagacagtgcatcaccagcaagtaagagccctagtcgctccccacctcgcaagatgtcaccttctcctgagagatctcccgtcaggcgcaacaatgaccgatctccacgctctcggagcccatcgacataagcgcaattcacttgcaaagcatcttgagtagctcaggatgaatggacttgctctgatcctatgtgtacgcatttgctcgatggtggcctcttctcagctaaagttgtgtagtgccgtctttcagttgctgcttcaaccttggaatactacttctgtttggcacctgaactgcttatcaaaaactttatgtacaccagttccattccacttttaaccttcgttttagcattatcctattatcagttatcaccatcttatcagtatttagtacttactattcatggtgacttgcacctttctagttacatgatgcagtgaagatgtgctggctgatatgcggtcaacatgcacgtagcttactgttgaagttgatattatctgtgctgtttgcgttgttgatgatggctgatgagatgattgatgatgatggcactgcagctgcctgcaccatttgctgtctgcacctattatgctgacaagtaagattccaatgatttatgcatcgccccatgcatctacatgctataggtgttaacccccattatagtatttggatttagatgtgtctgcactgatctatcatagtcctgttttgggtttttggatcataaggtctgcatgtgcacaattaatcgttgcatgcactggatgtgctgtcaattcatttctgcggtttgccaaacatgtcttatcgagaatgcataagcgcatgtcttaagcaggtgagtattaaagctgtatacacacttgtgacgcaattcaagtttattgacatgcttatcgtcataaaagggtatccttatctggctaccccaactgttctttgacatacccacgtaggcttgcaagttaatggggtcatgttttgcatgaaatactgcactaatgcatctannagtangaaaaggtatgattgcatgccgcatgcgagtattttggtatttttttggtgctcgttacccttcttcagca

SEQ ID NO: 82861 - DNA, 548 bp, Zea mays
  Clone ID: MRT4577_175588C.1
gttcgtctacgcgtgtatattggtcttggccggaactcggaatacagctgctccagctcttcttcagtcccccaggcagtgatgagctgaggaaccaggagtttgtcagtttcgcgcctaccaaccggtccagcctccgcgtccaagatctctccctctcccatccactagtgtctcccacagcccgttcgatcccccggccgggccggtgttcgccaaagtcgaggagcaatggcgaccgacgcgatcctggagacgatcaagccgcgggggagcgaggagcagctgccggtgaccacggcagggaccgggatcgagctgcggcggcgcatctcctccttctcggcgcacgtgaggccgtcgtcctccgtggcggcgttccggcgcgcgcggtcgatgccctccgtcaaggcgctggcggcggctggcgcgctgcggcggtggtgggagtgggggctcgagtgggtcacggcaccgttcgcgacccgcgcgctggagctcggcggcggcgacgaccaccaggcgcggctgctaagcctgagcgggtg

SEQ ID NO: 82862 - DNA, 295 bp, Zea mays
  Clone ID: MRT4577_175589C.1
gtggcatctaccagatggtactctctctctgtccacagatacagcagccaaacctggaatgtgcattgtaaagcacgaggtcaaagaagagccattgtctgaagaggtgggatgtcatcttaagttgggacttaggaaaaaaagcaatggccagtgggaaattagcaagagagtggatgctgatctggtgccgtcttctggtaacgaccatgaccattcaggacacgatgaaaacaaaaactgcatcactcatcaagcaatattgatgatacaaacattgcagatgaaggttata

SEQ ID NO: 82863 - DNA, 326 bp, Zea mays
  Clone ID: MRT4577_17558C.1
aacttttggtcacgacgaccaagagcattggctacgctgtcacactcaagatgcggatcatgggtaataccaatcgaccatccaatctacatgcaccatcttgtcaaggctactcaaggaaacgagaacaacattgctgtcattgcttacacaactacatatcacaattggatccaaacagttacacctatgaacgtgaccgacatgctgatcatggacacatcgatggccaggatcgtcaatgctatatgcttagtgcctcacatttgaccagctcgctcttcgtgcttcacttggccagaacacgggcctcttgaggtgcccca

SEQ ID NO: 82864 - DNA, 374 bp, Zea mays
  Clone ID: MRT4577_175590C.1
tgtaaacaaacgattcctcgtatctctcgtcttcctctccaagcattcccttcttccttcttccccactcagggcttattcggttattcccaatacacatagattggattggatgagattagaaaaaattaagaagaagtttgacttgtttgggattcaaacccatctaatccctctcaatccacctctaaccgaacagggcctcagaggggtccgatcctcgtccctgttccactctggatcctgcaacctcctacccctacgacactcgtcttcgtcgccagcgcgccaccatgaacattgacttctagcacctgcttgacgaaatgtccaagcgcttctgcggctaggatgcgaagttgacacaacgcctc

SEQ ID NO: 82865 - DNA, 141 bp, Zea mays
  Clone ID: MRT4577_175591C.1
gcggccgccctttccggctgccgccagcatcatccttttctatccacactgagacagattggattcttatagaattttggattcaacctgagctcaatcagacggcgctctaaatagccttccatcattggactctaccat

SEQ ID NO: 82866 - DNA, 430 bp, Zea mays
  Clone ID: MRT4577_175592C.1
atccaccaccatccatggccatggcgtcctccccggcctgccacttccgccacccgccccgcctccgcctcctcctcccgctgtccacctcggccccccacccgtggctctactcctggtcgcacccgcgccagcgcggccgactccgcgcgccgcccgccgcgctcgacctccgtccggagccgtccccgtcgtccgactccgacgatgaggacgccgtcggtgccagccgctcctccggccgctccaccatgtccctcatcctcagccgcctccgccgcgccggctacttcggcgaggacccgcgtgccgccgccccaccgcacccgccgcgggggtcggtcgaggacgtctttcgcgccgacgatggcgtgcttcccaacgcgcgcggcgggttctacgccgactacgaggagcgggcgctcgggga

SEQ ID NO: 82867 - DNA, 333 bp, Zea mays
  Clone ID: MRT4577_175593C.1
accatcgttctggtctgcttgggcacgatatgagagctcgggagcacgggcttctggcacggggcttggtgtttaggcacgagccatctccaagtgtggagcgacttctacgggcgctctgacataatgactgtttgcaggaatggagtttctgcggtatcgccgaagcttactgcggtaacggctgacatagacagagggacagatggaactgtagaagtcgcgtccatcggtagaccgtagctcttctaccagcttctgctgctccgactcgatgtcagagtgagcccttacatggcttgtacacctacgactctttcatagctcgcggcg

SEQ ID NO: 82868 - DNA, 462 bp, Zea mays
  Clone ID: MRT4577_175594C.1
cgcctcactggaagctgtggaacaccgctggaccatggcgtcacctttgtcttttaccgcacagagaacggcaaggggggctggatcgtgaagaactcatggtgcagtcagctggggcgagacctgctacttgaggatggcgcgtaacactgaggtgtccagccgatagtgcggtatcccggttgatccgtcataacccggtgaaggagggcgccaacccgtcgaaccctgtgcccagcccgccgtccccgaccccggcgcccggcgtgtgcgacaactactacttgtgccctgacagaaccacctggtgctgcgtctacgagtaccgtacgcactgctttgcctggggctgctgcccgcttgatggctccacctgccgcgacgagcactaccgctgcagtctccatgactaccggatctgcaacttcaggcagggaacctgactcatgggcaaggacagcc

SEQ ID NO: 82869 - DNA, 778 bp, Zea mays
  Clone ID: MRT4577_175595C.1
ctctcctcccttgcttctctctcacacatgcgcccagccactagaacctctgtcccgcacgcgcaccaggaagtcgaccaagccaccctcgcccgcgacccgcgacaccgacgccggccgagcaccgccaggaagccgacccggtgctctgcaccgaccacgccgcagcagcatgcgcccaggcgcgccgcgccctgcaccgagcgcctacccccgcgacgagcctcgaagcgccgaggccctgcccgaccaagccacgaccgcaccgcgccctgcaccgagcgcccaccccgagcagaccgcgagtccgatgccgaccgcgccatggccgagctcgaccaagccgccagccgcacgccatttcgtcttaaccgcattaaggatcttcagtgcttccgtttcttcctctcccattattttctttggtaaccgacgccattgaaggcctccatgaatacccgccggcgcccccatgacctccctggccgacccttcccctctccctcctgctccctataaaaccgagctcctcctctctcctctctccctcgcctacccgagctctctctcattcctcgcactctctccctcgccgttcgtcgccggagttcgccgttcatcaccggagctaagccaccccaaagttgagcccctgctcttccacccggccgataccccgtcgagccctccccgtcacacgtacgaacctaaggttgaagacgacccaaattaatttgtgtattttcgaaattcttttgatttgattcatgaatttgat

SEQ ID NO: 82870 - DNA, 352 bp, Zea mays
  Clone ID: MRT4577_175596C.1
atggtcgaaattgcctttgagactcaatggtgagcataacattatgaattgagggattgccagcaatgctcgcacattcgccagttagataaacatgctagtaacccagcctattctactatactggactccaaggccccagacgcatctatgctcacccgggactcaggcatttatcaacttaccaaggttatggggcagaccgatcctatacatcacttgacgtagcaacaaccaccgtcattatggaccatatgtttcctgtcacacctttgtatagggagataaagcacacggtttgcttgagcgtgatgatcatgacactaccccagcatttctgttatgagtagat

SEQ ID NO: 82871 - DNA, 278 bp, Zea mays
  Clone ID: MRT4577_175597C.1
cccaaaaaccggttaagttgaagcccccttttacttttaataaacaatcaagttgggttttataactaattacccaggttttcaccacggttttacatactatttttgggaagatccaaaggatgatcgaatttgaatttgggggttcactcgggtagaggcaaggcggacaggcggcaatgagttttaaaattccggttgttgagccccgcaccctgacggtgattttttgggtacctgcccaacaaccggggggcattgtcgtggtcctgggcggt

SEQ ID NO: 82872 - DNA, 308 bp, Zea mays
  Clone ID: MRT4577_175598C.1
tacgtaagctcggaattcggctcgtggccttggacaccaagatgtcgttcgaggaggtgggccccaaggtagcaatcgttgttcacacggaatgcacctacgcatgcctactacgaaggcagttacggcggcagcgccaagatccaggatcgctcacggtagttcgccagggaacgctcggcgaaggccaggtactcgacaaacagtcgcttcagtaggtcgatggatcactctgtatctccatcttcaataggcagtgagagagccatactcaaaacgcacacatgcgaggaggtctagggacaact

SEQ ID NO: 82873 - DNA, 413 bp, Zea mays
  Clone ID: MRT4577_175599C.1
tctgcaagcagcacagctaatgatatagggaactgccaaagctcaaatggaggggccacgtatggacattgctgataacacggcatcacagacattagctgaggtagaagtcggtaatttgatgagaaaaacaagtaccagtaagggtataaatcctacatgaaacacctcattcaacatggtacttcatggagagacaggcattgccaagggaggggggtatgaatcgaattctagcaacggcaaaaccaataacatgacacgctgcgagataaaggtaaatgatgttcatgacgtgtcaacactattttggcttatagcacataacatctggtcgatgatgcaaagcatactgatgcatcgaggacaaaataaaggaatgggatgctatattgagaggatataacatggca

SEQ ID NO: 82874 - DNA, 399 bp, Zea mays
  unsure (1)..(399): unsure at all n locations
  Clone ID: MRT4577_17559C.1
gaagaagccgagggaccacatgatcccactcaagtcaattattattgatggaaattgcagagtggaggatagagggcttaaaacacatcatggtcaaatgatttatctgctatgcatttacaacaagaaagaaaaggagaaccaaatcacgatgggtggatatgatattgaagatgccctagcctggaagaggaagatagagcttctgattgatcagcaacaggatactacgacagctaaaaaccataaagcttttgcttcgttggactttgatatagatcttggaggaccattttcgttctctgaccatgacagcggacccgaagaggaagaagagnccccgcccaccttgcttcgcaggacaactatagggaatggccctccttgatctgtacttga

SEQ ID NO: 82875 - DNA, 358 bp, Zea mays
  Clone ID: MRT4577_1755C.1
gggggaaaatttatgggaaaaaaaaggaaaacttatggggggggggggggtaaaggaaaacaccaggcccgggggttgggaaaaacacaagcggttcctacagaggaaagattcaaaaggacttggggaacagctcaaaaagggcctctgggggggaaaaaaaagggctgggggcggggtccatcgccgccaccttgttgggggggcaccgggggaccattgcctcctggtggtccggtttaagaatggggggggggggcgttttccgtcccccccgcgcacagtgttaacggggccctcgtcgggggggccgaagcccaacctggggggccccaaaggtgccggccccgggccgccc

SEQ ID NO: 82876 - DNA, 828 bp, Zea mays
  unsure (1)..(828): unsure at all n locations
  Clone ID: MRT4577_175600C.1
cctaatcgccggcctcatcacggggcgccccaacgcgcaggccgtcacggtcgacggcaggaaggtggacgccgccgaggcgttcaaggcagccggcatcgagggcggcttcttcaagctcaaccccaaggagggcctggccatcgtcaacggcacgtccgtggggtcggcgctcgccgccatggtgtgcttcgacgccaacgtcctcgccgtcctgtccgaggtcctgtccgccgtcttctgcgaggtgatgaacggcaagcccgagtacacggaccacctcacccacaagctcaagcaccacccggggtccatcgaggccgcggccatcatggagcacatcctggacggcagctccttcatgaagcacgccaaggaggtgaacgccatggacccgctgctgaagccgaagcaggacaggtacgcgctccgcacgtcgccgcagtggctcggcccccagatcgaggtcatccgcgccgccaccaagtccatcgagcgcgaggtcaactcggtcaacgacaacccnggtcatcgacgtccaccgtggcaaggcgctgcacggcggcaacttccagggcaccccgatcggcgtgtccatggacaacgcccgcctcgccgtcgccaacatcggcaagctcatgttcgcccagttctccgagccagggtttaccttaccgccgcaacccgagcctggactacgggttcaggggcaccgagatcgccatggcgtcctactgctccgagctccagtacctggncaaccccatcaccaaccacgtccagagcgcggagcagcacaaccaggacgtgaactccctcggnctcgtc

SEQ ID NO: 82877 - DNA, 305 bp, Zea mays
  Clone ID: MRT4577_175601C.1
acaagccaacgccatcactagatcgtgaaatattatgttacagatgctttcaaatatagaagagccatgcgagccttaagaaagcatacaacgtcatgtgcttatatccatggccattcatgaataccgaaagcacacccaccctgtttatttatgacatcatcactccaagccacgcacggcacccacacacatacatatatgtatgtaaatatatatgtatagcccacgtgcaatctcacggattgactcccaaggcaacacgagctgcaaattacttcatggattggcattggctgaaccct

SEQ ID NO: 82878 - DNA, 278 bp, Zea mays
  unsure (1)..(278): unsure at all n locations
  Clone ID: MRT4577_175602C.1
cccgtgctattctccagttttttcattccattccactacccacgcgcggggggggcgggggcgcacacgcacccacacgacacatccagatgatgcttagggtttccccgtccccggccgccgcggtgccaacccagctctccggtgcgcccgcgacccctgctcccgttttttttttggcggcgccncncgncttcttttggtttgtctggggcnccncntgcnnggccncnnncntggggatggaggtgctcggcggggtcttgttccngcccttc

SEQ ID NO: 82879 - DNA, 2286 bp, Zea mays
  Clone ID: MRT4577_175603C.1
agatctagatctttttgctgactgtccagcacaacggttgcgtgtctgggagggaggaagttacttacggggctcacatgtgtaccggtcctacgccgcagggcacggctctgccggatggcatgaccatgatcacgctgccggaaaacggcttcctcctatcctagcctgcaggccggcgtgggacaagtagatccacactctgcacaaggcatcatgtcttttaggcatctcaacgccggaatcttcggcaccggcagcgacgggcacacgctgccgtcggaggtcacccgcgcggcgatgctggtgcgcatcaacaccctcctccagggctactccggcatccgcttcgagatcctcgaggccatcacgaagctgctcaacaccggtgtcagcccctgcctgccgctccggggcaccatcaccgcgtcgggcgacctggtcccgctctcctacatcgccggcctcatcacgggccgccccaacgcgcaggccgtcaccgtcgacgggaggaaggtggacgccgccgaggcgttcaagatcgccggcatcgagggcggcttcttcaagctcaaccccaaggagggcctcgccatcgtcaacggcacgtccgtgggctccgcgctcgcggccaccgtgatgtacgacgccaacgtcctcgccgtcctgtcggaggtcctgtccgccgtcttctgcgaggtcatgaacggcaagcccgagtacacggaccacctgacccacaagctgaagcaccacccggggtccatcgaggccgcggccatcatggagcacatcctggatggcagctccttcatgaagcaggccaagaagttgaacgagctggacccgctgctgaagcccaagcaggacaggtacgcgctccgcacgtcgccgcagtggctgggcccccagatcgaggtcatccgcgccgccaccaagtccatcgagcgcgaggtcaactccgtgaacgacaacccggtcatcgacgtccaccgcggcaaggcgctgcacggcggcaacttccagggcacccccatcggcgtgtccatggacaacgcccgcctcgccatcgccaacatcggcaagctcatgttcgcgcagttctccgagctcgtcaacgagttctacaacaacgggctgacctccaacctggcgggcagccgcaacccgagcctggactacgggttcaagggcaccgagatcgccatggcgtcctactgctccgagctccagtacctggccaaccccatcaccaaccacgtccagagcgcggagcagcacaaccaggacgtgaactccctcggcctcgtctccgccaggaagaccgccgaggcggtggacatcctcaagctcatgtcgtccacgtacatggtcgcgctgtgccaggccgtggacctgcgccacctcgaggagaacctcaagagcgccgtcaagagctgcgtgatggcggtggccaggaaggtgctgaccaccagcctcggcggcgacctccacagcgcgcgcttcagcgagaaggccctgctcaccgccatcgaccgcgaggcggtgtacgggtactacgacgacccctgcagcgccaactcgcccctgatgaagaagatccgggccgtgctggtggaccacgccctcgccagcggcgaggccgagaaggacgccagcgcgtccgtgttctccaagatcaacaggttcgaggaggagctgcgcgaggcgctgcccagggagatggaggccgcccgcgtggccttcgagaccggcgccgcgccgatcgccaacaggatcaaggagagccggtcgtacccgctgtaccgcttcatccgccaggacctcggcgccgtgtacctgaccggcgagaagctcaagtcccccggcgaggagtgcaacaaggtgttcctggccctcagcgagggcaagctcatcgaccccatgctcgactgcctcaaggagtgggacggcaagcccctgcccatctgctgaggacgccaccggtgccaagatgcaagaccgcaagaggaggagatgacaccgtatgcgcgcgaggaagaaataaagaagggagtatttcggtattctcaagcaggcttcatatcgtttgcgatctgaagatcattatatgttgttcctctgtactcatcttttttgtttggagcttgtagcagtgatcgtgtaaacgtgtattctgtctgttgttcttggctttctcatctgcaatatgttttggaattaaaatatactactactactactatattgagtaaaaaaaaaaaaaaaaaaaaaaaaaaagcggcc

SEQ ID NO: 82880 - DNA, 686 bp, Zea mays
  unsure (1)..(686): unsure at all n locations
  Clone ID: MRT4577_175604C.1
taggggccttttttttttttttttttctaattccaaaacatattgcagatgggccaagaacaacagacagaatacacgtttacacgatcactgctacaagctccaaacaaaaaagatgagtacagaggaacaacatataatgatcttcagatcgcaaacgatatgaagcctgcttgagaataccgaaatactcccttctttatttcttcctcgcgcgcatacggtgtcatctcctcctcttgcggtcttgcatcttggcaccggtggcgtcctcagcagatgggcaggggcttgccgtcccactccttgaggcagtcgagcatggggtcgatgagcttgccctcgctgagggccaggaacaccttgttgcactcctcgccgggggacttgagcttctcgccggtcaggtacacggcgccgaggtcctggcggatgaagcggtacagcgggtacgaccggctctccttgatcctgttggcgatcggcgcggcgccggtctcgaaggccacgcgggcggcctccatctccctgggcagcgcctcgcgcagctcctcctcgaacctgttgatcttggagaacacggacgcgctggcgtccttctcggnctcgccgctggcgagggcgtggtccaccagcacggnccggatcttcttcatcccggggcgagttggcgctgcaggggtcgt

SEQ ID NO: 82881 - DNA, 2966 bp, Zea mays
  Clone ID: MRT4577_175605C.1
aattcggcacgaggcactcctccggctcttcttctccaccggcaccagtccaccacctcctgcaacaaatttttttccgcctgagactgggtcactgggagcagaacactataataacgatgaacgaatggccccacgctgcaccggggcccacacgacagttaaataaagcagtagtacgtaggattctttgcgtcactgtgcgctactgctgtgcttttgcctcctgtctcccgactcctgagaatcacgagtcacacagggaaggcaaaaacgggagcagatcagtgcaccctacacccacccaccaacagtcctggacacctcaatactggagtagcagtggacctgacggtcagatttagagacgatcgcaatccatcaccgaggaaaccggtgaccaaggacccagatcccagaattccagatctagatctttttgctgactgtcccagcacaacggttgcgtgtctgggagggaggaagttacttacggggctcacatgtgtaccggtcctacgccgcagggcacggctctgccggatggcatgaccatgatcacgctgccggaaaacggcttcctcctatcctagcctgcaggccggcgtgggacaagtagatccacactctgcacaaggcatcatgtcttttaggtcttgatattttcccttgatatagatgggtaatatggatactggtaccatgtacaccaaattgacgcacagtttttaactactgtcaagctgtgttcagccctgactctttttgttttcaacgttcacaaattagcacgtctagctactgtcagactacaacttgtcagttcagtaccgaaatctgtcgccatctatcggtgctgtcggactgaccggaccttgtgcgctggctccctttctctgcaggcatctcaacgccggaatcttcggcaccggcagcgacgggcacacgctgccgtcggaggtcacccgcgcggcgatgctggtgcgcatcaacaccctcctccagggctactccggcatccgcttcgagatcctcgaggccatcacgaagctgctcaacaccggtgtcagcccctgcctgccgctccggggcaccatcaccgcgtcgggcgacctggtcccgctctcctacatcgccggcctcatcacgggccgccccaacgcgcaggccgtcaccgtcgacggaaggaaggtggacgccgccgaggcgttcaagatcgccggcatcgagggcggcttcttcaagctcaaccccaaggagggcctcgccatcgtcaacggcacgtccgtgggctccgcgctcgcggccaccgtgatgtacgacgccaacgtcctggccgtcctgtcggaggtcctgtccgccgtcttctgcgaggtcatgaacggcaagcccgagtacacggaccacctgacccacaagctgaagcaccacccggggtccatcgaggccgcggccatcatggagcacatcctggatggcagctccttcatgaagcaggccaagaaggtgaacgagttggacccgctgctgaagcccaagcaggacaggtacgcgctccgcacgtcgccgcagtggctgggcccccagatcgaggtcatccgcgccgccaccaagtccatcgagcgcgaggtcaactccgtcaacgacaacccggtcatcgacgtccaccgcggcaaggcgctgcacggcggcaacttccagggcacccccatcggcgtgtccatggacaacgcccgcctcgccatcgccaacatcggcaagctcatgttcgcgcagttctccgagctcgtcaacgagttctacaacaacgggctcacctccaacctggccggcagccgcaaccccagcctggactacggcttcaagggcaccgagatcgccatggcctcctactgctccgagctccagtacctgggcaaccccatcaccaaccacgtgcagagcgcggagcagcacaaccaggacgtgaactccctgggcctcgtctcggccaggaagaccgccgaggcgatcgacatcctgaagctcatgtcgtccacctacatcgtggcgctgtgccaggccgtggacctgcgccacctcgaggagaacatcaaggcgtcggtgaagaacaccgtgacccaggtcgcgaagaaggtgctgaccatgaacccctcgggcgagctctccagcgcccgcttcagcgagaaggagctgatcagcgccatcgaccgcgaggccgtgttcacgtacgcggaggacgcggccagcggcagcctgccgctgatgcagaagctgcgcgccgtgctggtggaccacgccctcagcagcggcgacgcggagcgggagccctccgtgttctccaagatcaccaggttcgaggaggagctccgcgcggtgctgccccaggaggtggaggccgcccgcgtggcggtcgccgagggcaccgcccccgtggcgaaccggatcgcggacagccggtccttcccgctgtaccgcttcgtgcgcgaggagctcggctgcgtgttcctgaccggcgagaggctcaagtcccccggcgaggagtgcaacaaggtgttcgtcggcatcagccagggcaagctcgtggaccccatgctcgagtgcctcaaggagtgggacggcaagccgctgcccatcaacatcaagtaaaagaacgccaaggagaagaggagggaggggaggaaatacgtgaaaaaaaataaaacctgtacacgtgtatgtccagatcgcgtgccgtcgatcgttcttcgttgttgatttttggttgtattgatcgatccgtatgtgtgcgtgcgtgtgtggcgttgctctttcttcttttgtgtagctgccctgccaccggccgacgtgtgcatgccatggtggcgggcagcgttttctaaggtcatatactgttgttgtgtttaagtacatcttgcgtactcaattccttctaagtaagtatcctaatactagaatgttcctct

SEQ ID NO: 82882 - DNA, 403 bp, Zea mays
  Clone ID: MRT4577_175606C.1
ttttttttttttttttttttttttttttttttttttttttcctttttttgtgccgattaactagtcctttttcctgaatttcactgcctttataaatagagattacatttgcttttcattgacactgacagggacccgcgcacatttgacccagatttccagtctttaattagtcaagggcccttttggttgccacctaacacagataccactcgtttgacgagcacttttgatttacgacgtggggggcctcagtttctcccatacagaacttttttattctagcagggattgaatttttttggttttttgggaacccccggacgttccatagaaaaggtgcaccccaaccgagggggttaaatttttttcataaagaatatgggcccttaactttcgaagg

SEQ ID NO: 82883 - DNA, 307 bp, Zea mays
  Clone ID: MRT4577_175607C.1
ttttctattcacgcttcctctcactggtacctctttcacactgccagccaggccgccaacagctctatgcatacgacgtcttccactgcgacgattgtccttcacgagccgcatcctcatcgtccgttacgacatcagccttctcatccttgacagttagcctctgcgctccatctatatgccgccgtcgtcctcatcctgcatctcttcaatcctcaccgctcttatccctaggtgctcgttctcttaacaaccagcactctctttctttgcctattacgacagcatttcctttttccgccgtttc

SEQ ID NO: 82884 - DNA, 2564 bp, Zea mays
  Clone ID: MRT4577_175608C.1
gccggccgttccgggcttcaagaagagctccaagagtccatccaccaacacagctgcctcccgagctcttcttctaccacaccgcatcagcatcatcacacacatcccctcccggcccgaatggcgagcaacacggccatcctcgagagcgacccgctcaactggggcaaggcggccgcggagctgacggggagccacctcgacgaggtcaagcgcatggtggcgcagttccgcgaccccgtcgtcaagatcgagggctccagcctccgcgtcggccaggtggcggccgtggccgcggccaaggacgcgtccggcgtggccgtcgagctggacgaggaggcgcgcccccgcgtcaaggccagcagcgagtggatcctcgactgcatcgcccacggcggcgacatctacggcgtcaccaccggcttcggcggcacctcgcaccgccgcaccaaggacggggccgcgctccaggtcgagctgctcaggcatctcaatgccgggatcttcggcaacggctccgacggccacacgctcccgtccgaggtttcgcgtgcggccatgctcgtccgcatcaacaccctcctccagggctactccggcatccgcttcgagatcctcgaggccatcaccaagctcatcaacaccggcgtcagcccgtgcctgccgctgcggggcaccatcaccgcgtcgggcgacctcgtcccgctgtcctacatcgccggcctcatcacggggcgtcccaacgcgcaggccgtcacggttgacggcaggaaggtggacgccgccgaggcgttcaaggcggccggcatcgagggcggcttcttcaagctcaaccccaaggagggcctggccatcgtcaacggcacgtccgtggggtcggcgctcgccgccatggtgtgcttcgacgccaacgtcctcgccgtcctgtccgaggtcctgtccgccgtcttctgcgaggtgatgaacggcaagcccgagtacacggaccaccttacccacaagctcaagcaccacccggggtccatcgaggccgctgccatcatggagcacatcctggatggcagctccttcatgaagcacgccaaggaggtgaacgccatggacccgctgctgaagccgaagcaggacaggtacgcgctccgcacgtcgccgcagtggctcggcccccagatcgaggtcatccgcgccgccaccaagtccatcgagcgagaggtcaactcggtcaacgacaaccctgtcatcgacgtccaccgtggcaaggcgctgcacggcggcaacttccagggcaccccgatcggcgtgtccatggacaacgcccgcctcgccgtcgccaacatcggcaagctcatgttcgcccagttctccgagctggtcaacgagttctacaacaacgggctgacctccaacctggcgggcagccgcaacccgagcctggactacgggttcaagggcaccgagatcgccatggcgtcctactgctccgagctccagtacctggccaaccccatcaccaaccacgtccagagcgcggagcagcacaaccaggacgtgaactccctcggcctcgtctccgccaggaagaccgccgaggcggtggacatcctcaagctcatgtcgtccacgtacatggtcgcgctgtgccaggccgtggacctgcgccacctcgaggagaacctcaagagcgccgtcaagagctgcgtgatggcggtggccaggaaggtgctgaccaccagcctcggcggcgacctccacagcgcgcgcttcagcgagaaggccctgctcaccgccatcgaccgcgaggcggtgtacgggtactacgacgacccctgcagcgccaactcgcccctgatgaagaagatccgggccgtgctggtggaccacgccctcgccagcggcgaggccgagaaggacgccagcgcgtccgtgttctccaagatcaacaggttcgaggaggagctgcgcgaggcgctgcccagggagatggaggccgcccgcgtggccttcgagaccggcgccgcgccgatcgccaacaggatcaaggagagccggtcgtacccgctgtaccgcttcatccgccaggacctgcggcgccgtgtacctgaccggcgagaagctcaagtcccccggcgaggagtgcaacaaggtgttcctggccctcagcgagggcaagctcatcgaccccatgctcgactgcctcaaggagtgggacggcaagcccctgcccatctgctgaggagtgaggaggaggacgccaccggtgccaagaggcaagacccgcaagaggaggagttgacatgacacccgtacgcgcgcgaggaagaaataaagaagggagtatttcggtattctcaagcaggcttcatatcgtttgcgatctgaagatcattatatgttgttcctctgtactcatcttttttgtttggagcttgtagcagtgatcgtgtaaacgtgtattctgtctgttgttcttggctttctcatctgcaatatgttttggaattaaaatatactactactactactatattgagtacaaaaaaaaaaaaaaaaaaaaaaactcgtgc

SEQ ID NO: 82885 - DNA, 569 bp, Zea mays
  Clone ID: MRT4577_175609C.1
ccaagcttttttttttttttatttttttttttttttttttttttttttttttttttttttttttacctttcttttttttctttacccaggccgggcggcccccccaaaagggggaagtccaaaacacggccgggcgggaccacaggatccgagccaggaaccaaacagggggtaaccgggggaaaaggtgatccccgggcaaaatcgcaaaccccccaaaccgccaccaaaaaaacaaaacccaggggaaacaaaaaaagcccggggcgcccaataaaggagctaacccaaattaacggttttgagcccaaaaacccgtttccccaggggaaaccaggaatcccccccccctcaaagaaaggcccaacccccggggggaggcggttcgcttattgggccacttaccccttcccctcgaactgaccgggggggctagggggttcagctcccgcaaagggggtaatcccactcaaaggcggaaaagcgggtatccccagaaacaaggggtaacccaaaaaaaaacaaaggcccaaaccccaaaaaggcccggaaccggaaaaggccatggg

SEQ ID NO: 82886 - DNA, 193 bp, Zea mays
  Clone ID: MRT4577_17560C.1
tctttctgcacgcatacacaatacagagggagtgttgcatccgaaagaattgccttctgtgcgtcatgtgccctcgctccatgcttataacatccttgcgctattggtaagccatttattactggtgagccttatatattatgcggggacctatgatgcgcttgactaataaaaagggggggggacggtctac

SEQ ID NO: 82887 - DNA, 751 bp, Zea mays
  Clone ID: MRT4577_175610C.1
acgaggccgacttcacttgacaaacccaaggccacatgtggacacattagtgaaccatgttcagccagttctgcccgcagatcactaaatacattgttaaagtttgaagtaggaagcccttattatgatggagtggaacatacggatacaactaaaaagggcatgatctcagaagactcatcgtattttaacaagtcatttgaggaagatagtcctgtcttatttattgataaagacaaaatcgacgaagtagactcagtggatagccaggaaaagatagcttcgctacataccacatttgacatagtctgcgacatttctcatcctaccaagaattcacttatcacgaaacaggaacttttccataatattcttgccaacaacttggagatagaagaaattggggagatagaagagcagctgaatattttagaggatctggctcctgatttgatatcaaagaagatgataaatggaggagaaatactttatagcatccaacctatatcagatcaaaattcagttcgggttaggcttgtagaacctgtatgagatagctacagttggttcaaagctgaagaaattctttatatgtatgtaccactaatgaaacccacattagctaattaacatcatggaagcatctgcatcagcagcatcgctcttgtctgattggacttgaaatctatataataagttgaccctgctcaatgctgaaattttaatgaaacttaaatttgccctagctgct

SEQ ID NO: 82888 - DNA, 330 bp, Zea mays
  Clone ID: MRT4577_175611C.1
gtacgtctgcttgcctcctctacagccgccgacccttgctttcttttttgctttacctcccgagaggaaggcgttgataaggggttgtatctctattatacttaataatttagcagctgatgaataactactctgcaatactcgctctcactggaatacactaatttgtggctatattgagatcttttcctaataacacgacaccggatagcttttttatcagacagggtcatcgccctcggcttgttctgtgggggcctctcgtggcttgccttactcctgcaggcttcccgggagatcgggctcttgtacgtggcccatcttgttgcg

SEQ ID NO: 82889 - DNA, 470 bp, Zea mays
  unsure (1)..(470): unsure at all n locations
  Clone ID: MRT4577_175612C.1
ccctcgaggctggccggggagggccaccattcactatctttcaccctcacccacgataaatcctaaaccagaaggaccgcacgcaacacgtggtagctctcagacgcgagcctncgctcgctacatgacctggtgtactgcatcttagggtcttgctacgagcgctgagcgctgagcccgaaacgcggatgccgcagcgtcctactccgccgaaagaattgcaacacatcatcagacaccatcttatgcaaggagccactccaggcgtgaaagcgtcgtgctttggacgaagccgatggagtcggaatggacaagcatataatggaccccatgaacagcagctacggctaaacggacgaggacacgagaacgactagcactacagacccgtctgacattcatgatattgcaagctccttaactaaccggaaccgaaggactagacaaatactgaatcctgaacatattga

SEQ ID NO: 82890 - DNA, 432 bp, Zea mays
  unsure (1)..(432): unsure at all n locations
  Clone ID: MRT4577_175613C.1
acgagctgcgtgctgaggttgactccttctccttcccgatcctgaaatataaggctaccgctcgtttcctctctctccccgactccccctcccttccatctcttcccttgcatttagcctcccgcggttcaggaggcgcgggccattcccaaccatcgttgcagtggtggcaggtattggcctgtcgagacgagacccatgggcattcaggtcgcggcggtggtgaccccgccgccgtgctcttccccctcctcctctacggcgtcgccttcgtcctcggccattgccacgtcgccgcggcacgccgttcttggcgccaggctggcgaggagccagtcgtcgctggcttgctggaacgccggtcttggccggcggcgcggcgggatcaggcgcgctctcagtgcgagcatcgacagcgtcnggagcggcggc

SEQ ID NO: 82891 - DNA, 292 bp, Zea mays
  Clone ID: MRT4577_175614C.1
cgcaagcgtacgcacacatacatcgtttcttctactacacgacgaccaacctggggaagcctgccaagatcggcgagtgcggtggatacgcccgccatcttcgggatcttagggcgactccggatcggcttatccacgtcaaggtcccggctgcgaacgtcagctccatctcctcccacgccctcctcaccatctgacggcacagcttgccgctctaggcacgcccattaggtggcatgtcacatggctcactgctgcaatagcggtccatggccagcccaagcatagcccc

SEQ ID NO: 82892 - DNA, 241 bp, Zea mays
  Clone ID: MRT4577_175615C.1
agcatacttcatagatgcacagaggacagcaactaacgatgctggccgtattagcatgactggaagtgctcagtattataaatgaaccaactgctgcatcatcggcctatgggttcgagaagaaaaataatgaaacaattctagtgctggacttggagaggtgctacctctgatgtctctcgatctggaagttggagatttttgttttttgaagggctttacacatcaggtgatacacacc

SEQ ID NO: 82893 - DNA, 336 bp, Zea mays
  Clone ID: MRT4577_175616C.1
atgctggcaaatacttcgaattagattcggggctagaagatcataagtaaaagatctaggtaacaagtactgacaggtatgaggtaggtcctagttgagattataaaaaaacaattgtgctcagggccatataactcccagaagcagcactaattgctataatcctctttgttttcaaactatttggggactttgataatttggccctttcaaacaacatcacaattgatttgcctgggaaaacattaaaaaacaattgtataccatttgctaaattgcactcatctgaataaaatcatcatttacctacaaggccaccagcccaaatcctaattt

SEQ ID NO: 82894 - DNA, 1882 bp, Zea mays
  Clone ID: MRT4577_175617C.1
cattgggaccctcgaggccggccgggaccaagaaaaaaaaggaaacagcaaccaagtgatcaattcaagcaacacaccgacgaagcaagcaaagccaagcggtcagcgtcagaatagcatggcggtgtccgcggccaggatggccgtcgccacggccgtctccttagccgtgcactggctcctccggtccttcctccaggcgcagcaccccgcgctgggcctgctcttcccgaccgccgtcttcatcggcattgccgcgtctggcaacgtcgcaggcgctgccaacgacgcgccgccggggccgccggccgtgccggtgttcggcaactggctgcaggtgggcaacgacctgaaccaccggttcctggcgcgcctgtccgcgcggtacgggcccgtcttccgcctccgcctcggcgtgcgcaacctggtggtcgtctccgacccgcgcctcgccacggaggtgctgcacacgcagggggtggagttcggctcccgcccccgcaacgtcgtcttcgacatcttcaccgccaacggcgccgacatggtgttcaccgagtacggcgaccactggcgccgcatgcgccgcgtcatgacgctgcccttcttcaccgcgcgcgtcgtgcagcagtacaggggcatgtgggaggccgagatggacgccgccgtctccgacgtcgcctccgcggcccagcgcgccgccggcctcgtcgtgcggcgcaggctgcagctcatgctctacaacatcatgtacgggatgatgttcgacgcgcgctttcggctccgtcgacgaccccatgttcggggaggccaccaggttcaactccgagcgcagccgcctcgcgcagagcttcgactacaactacggcgacttcatccccgtcctgcgccccttcctgcgcggctacctcgccaggtgcaaggacctgcaggccaggcggctcgccttcttcaacagcaactacgtcgagaagaggaggaaggtcatggacgcgccgggggacaagggcaagctcaggtgcgccatcgaccacgtcctccaggcggagaagagcggcgagatcaccccggagaacgtcatctacatcgtcgagaacatcaacgtcgcggccatcgagaccacgctctggtccatcgagtgggcgctcgcagaggtcgtcaaccacccggcggtgcagcgcaaggtccgcgacgagatcaaggccgtcgtcgccgaccacgagcccatcacggagtccaccatccaccgcctcccctacctgcaggccgtcatcaaggagacgctgcgcctccactccccgatcccgctcctcgtcccgcacatgaacctcgaggaggccaagctcggcggctacaccatccccaagggctccaaggtggtggtcaacgcgtggtggctggccaacaatccggagctgtgggacaagcccgaggagttccggccggagcggttcctaggcgaggagaagagcgtggacgccaccgttggcgggaaggtggacttccgcttcctgccgttcggcgtgggccgccgcagctgccccgggatcatcctcgcgctgcccatcctcgcgctcatcgtcggcaagctcgtgcgcagcttccagatggtaccaccgcccggcgtggagaagctcgacgtcagcgagaaaggaggacagttcagcctgcacattgccaaccactccgtcatcgccttccaccccgtctctgcatgatagattgattgatagccaaccacgaatgctgcgcgtcgttttctgcatatcaatgttaccctacatacccagtcatttttttcgcttttatttactagccatttctcaggtataagtatctccaacaacaacagtgtgacctataaaaacatcctataatttgtttg

SEQ ID NO: 82895 - DNA, 292 bp, Zea mays
  Clone ID: MRT4577_175618C.1
gtttttcagggagcgcagcgacaaggaggcgcggcggatgtacacggagtggatgaaggcgcacggccggacctacaacgccgccggcaaggaggaacggtggtaccaggtgttccgggacaacctccggtacatggacgcgcacaacgcctgcgtcgacgcgggcgtccactgcatacgactaggcctcaaccgatgcgccgagctcaccaactacgagtaccgagccacctacctgggtgccaggaccaggccgtagagagagaggacgctcggagccaggtaccacgcc

SEQ ID NO: 82896 - DNA, 515 bp, Zea mays
  Clone ID: MRT4577_175619C.1
gtctgtggccgacaaacacgaccgggtctacgggcgagtcgaagaccgatcgggaacgactcgatccaggcggacctgacgcaggcgctagcacacgttcacagcgacatgctgctcgactcggacggcgagctgcaggcggctgaagctgaacgtcgtgcccgaggccgatctgatccgcgaggtccgggtctcctacgggctaatgctgccttcctgcgtgacgctcaagatccaccacatccacattggttgcataggttgctccgcgttgatcctggaccgcgagcacctaacttcctgctgcatcttgtacgacacccacatcgaggacttaaggcacctcagctccaactgtgcccatgagctgaggataccctgggacgacctgaatcagaggtgggccacactaaaagggctgctggacctgctgtcactcttcataggctgcaccagcgtgcaggacacttattaactgccgtactggctgaggacagaaatcatctactatgtca

SEQ ID NO: 82897 - DNA, 316 bp, Zea mays
  Clone ID: MRT4577_17561C.1
gaccgacgcgttcgacatggcttcaaaccggtggccaatttccgtatagaagtgtgcgcatcttctttcgggtacgtgtgcatttgatgccatgacgacctgttccacaactacgagatcattaaaaatcggttcaagctctagccatgcaacttatcgagcctgaccatcaccttgcgttttcagtacggctgctaactcatatacgtgctcgtgctcatcttgcacgactactgagacagcgacatggtgtaggccgccctcaagcatgacaccttactacactaggagcacgttcacgaatactggggctgca

SEQ ID NO: 82898 - DNA, 129 bp, Zea mays
  Clone ID: MRT4577_175620C.1
gggagaaaagacaaggtctgatgtgttgtgtgtttgtcaataaggttctatgtgccttcgaattttattccatatatgcatgtgtttgatgcggtcttcaattatcaccatcgtcgtcctcttcttgga

SEQ ID NO: 82899 - DNA, 639 bp, Zea mays
  unsure (1)..(639): unsure at all n locations
  Clone ID: MRT4577_175621C.1
gcccccccctctcgagnttttttttttctttttttttttttttttttttttttttttttttttttttggaaaaaaacaatttttgggaacttttttcagccaaaaggggaaagtttcttaaaaacttttttccaaactaccaatgcccggccccaaatggaagccccttggggtggccggaattttaattaagcaatttgggggggttgggattgaaataaaaccttacgggcctaaaattttccttgtttttgggaactgaaccgggattaaaaaaaacgggttggcttgccgggaacccaaatccttattaaatttcctttaaaactgcccaaggggccatttggattttaaatttaggggaaaccaaagggcctgtgggaaaaaacccttccttttgggccgttgcttgttaaaaaaagggttgcccatttggttgttgcttgggaaaaaacccattctttgaattgggccccccaggcttataccccttgtttgggaaggctgcccctaaaggaaaggctgacccttccttttgggggtaaaaatgttgaaccctttgaaaattgcccaaggccggggggaagggaaaatcaggggggacccagcccccgaacgggggggttgaaaaacaacggg

SEQ ID NO: 82900 - DNA, 325 bp, Zea mays
  Clone ID: MRT4577_175622C.1
ggggggggttttatgggggggggtgtttttttttttttttttttttttttttttttttttttttttttttgaacaaaaccaaaaataaactttgtgtgttttggaaccttcccgggttttacaaatttgtttcgaggttttaggggggggggggcctccttcccaaattttgggcaaaaaggggggcgttttgcaacttaaaaaaaataaaaatttgggggcgggggtttttccggggggggtttggtttttaaaccggcgggtgaaaccggttctcccacggcccaaaatttttggggtgggccccaaccccaaaaaggggggg

SEQ ID NO: 82901 - DNA, 339 bp, Zea mays
  Clone ID: MRT4577_175623C.1
agtttagttttattttaggttcgggcttaggctctggcttaggttcgggcttaggttcaggcttcggtgtaggcaatggctctggtttggattttggttgaggcttgggcattggttgaggttcagggttgggctttggttgaggttcaggctttggctctggatgtggcataggtttcgcgcgcaagcatggacgtgctgccgctgagatgccccagccggagccacaacctaaaactaagccggagccccatatgcagccactgccccagccagagcctcaacccgaacccaagccagcgcccgcgcctcagccggaaccgccctaaggcccgcgcc

SEQ ID NO: 82902 - DNA, 339 bp, Zea mays
  Clone ID: MRT4577_175624C.1
aaccgactaaccaaacatgatcacatcaatcatgtcagagaataacgtaacgtgcaaagtgcttgggctgtccattgtttattccttcacacaagacaacaacaacaaaaagaacagactcgaaaccaacccgtaatcactcgaccactgccgccctgctgctgctgctgctagacaatatacaacgcttttgcaacatcagctcccgaaacctacccccggcgtttgcaaaacccgcccccaagaaggcctccaacaacccgtttcaagccgagacctctaactcgggggccttaaaacgcttccacttgttgaacaccttcccgggattcttcaacc

SEQ ID NO: 82903 - DNA, 428 bp, Zea mays
  Clone ID: MRT4577_175625C.1
aattcggcacgagggtgcggcacacagcatgtgcggagaacatttattgacgttggagcaggaacagatgctgcaggatcaacagcatatgcgcgtgcacggtcgatactggataccatctgccctaccctagatgaaatagtgggaggaaaaccattacaccggcacggcggtggcatatttctttctcccggcagaaactacaatcacaggacccgaccgtggtggccgctgatgctgcgaacacccgttgtgcctgtgtaccctagccgtgtcaccatggacccaggtgggttaactccagatgatgccacagatttgcgcacgataggacatcagctaccaccaatttgaaaacttggaaaaaatggtggcgatgcctaccttgcgaaccaagtcagataatcattttaagcatgtgatcttgt

SEQ ID NO: 82904 - DNA, 480 bp, Zea mays
  Clone ID: MRT4577_175626C.1
ctcgttcttttttttttgaataatattatgattgcttgctttattccggtccgatgatggtggatgcacatatttctccatcaaaccttggtgctctaatacgatgacatttttccagattatgtgcttacaggattgtttgtgcctagatataattgtttttaccagtcctcatctggcactgcggatgacagcaagtttacatagtcggaaatgacattttcacattatggacctagcactaccaatccactaaagaggctacaccagactccggagccggggccggttgacgtaacaaaccccaggctaccgctgatatatgatctttgccagacaccatttatattccatagcattggagaagttcatacgctatgctggccattctgtcaagaacaccctattgtgatgttaggcctatgtgccaaactgcaatcctagatcagttaacgaggatttgccggacgcgtgggttct

SEQ ID NO: 82905 - DNA, 463 bp, Zea mays
  Clone ID: MRT4577_175627C.1
gaggaaaattatattattttttatttattattggtctcttgacctgcatcatttttacacgaacgatgttcacaatacaaggttttgcgcatttttgcaataaaaaaagagcaatacgaacgatatttaaaatctgaactgatatgcaagcagcgcatgtagatcgaccacaaaaaaaaatagggtgtgactgcgaggaccgagaactccaaaaaaaaaaggcttaaagaggggtctcgacttcattttcggcgccaaaaaaaaacaaaaaaagtttcttatgagccaggaaccgaccccttcagaacgtttttcgacagacaagtagcccgaacaaaaactaccaaaaggggaggatgggcaaaaaaagcgcggcgtaaaaaaaaacccaactcttgtggggcgggaaaaacacgaacacggcccagataaaaaaatgcgagcccagcccaaggacaccctt

SEQ ID NO: 82906 - DNA, 207 bp, Zea mays
  Clone ID: MRT4577_175628C.1
cctcgaggccggccgggacatgcctcttctccttcagctcactctggcgcttcatcccctctgtcggtctcggcacctggcagtcgcccaagggtgaggttcgtgatgctgtttgccacgccctcaagtccggctaccgtcacattgactgcgcctggggctaccagaacgaggacgaggttggagaaggcatcaggctctctggtg

SEQ ID NO: 82907 - DNA, 283 bp, Zea mays
  Clone ID: MRT4577_175629C.1
atattttttttttacttccaatattaattttgggttggttttacaaacaccggggggtcttaaattaaccaaaacaaactgctaatgaagtcccatgaattaaacatgcttaatatttgtccattcagatacgccacgagacgccaaatttggacacaattcactgaacatggaaaataaatgaattttttagctattttttattaaacaacatgcaccccattgttaggttgcattcgatcttcactttaccttgaaaccggccattttttaattggctttt

SEQ ID NO: 82908 - DNA, 438 bp, Zea mays
  Clone ID: MRT4577_17562C.1
cgcgtacggttaccctaccgttgtttgatgggctgcccaaaccaactttaggtttgaggaacaaggccaaaccggtttgtctgtaactggacccaatacacacatgtttgagcgttttcttttatgaacgacgagctgttgcgtgtcttggggactgacttggcaacaaaagatattttgctgcaactctggtggttgcacaattgattggcttggaccactcctacaaaagagaagagttaccatggggcctaccttcctggtatgtattcaaaatgcatacatgcatgtgttgatggaatgaaatgtattgtatcccatcccaagcagtgctacacacagatattctgtctgctgtgtgatggggggaaattggtttcaattactccctaaatcaaaaggaagggctttttttttaaaaaaagaacgaaccaaaat

SEQ ID NO: 82909 - DNA, 400 bp, Zea mays
  unsure (1)..(400): unsure at all n locations
  Clone ID: MRT4577_175630C.1
ttttgttttttaatgttatttatggttagttttgtatattcgtttatattttatatgtgtgtagaacgttnnnnnaaaaaaggccttttatgggggggcgggccatgcatcctgaaaattgggggtttttggtaatataaaattataaaacgccttttttttccgggggcgggggggttcccaaattttatttgaccaggagggttccaaaattttatttgaccaggagggtgacagggaaaaataaaacacattagttccaggtttggcagtggggtttaatttcaatggatacatccctccggagaaacttaaccttaactttttaatttattatcaccattttaacagggcgggggctggtataaattataaaaatggggggtactggacacttttt

SEQ ID NO: 82910 - DNA, 350 bp, Zea mays
  unsure (1)..(350): unsure at all n locations
  Clone ID: MRT4577_175631C.1
ttccacgcgtccggccactcgagcgggggcgcgtgggtcgtggtaataagggaagctagatcatgtttcattgcggtggggatgactagcagtacaatcgtcgggcttctgttggctggtgccatactgtcctagctggctcgatgctacgaaacctgcggttgaatctggtaacccaagaagccaccgacttcggcgttaaggccatacctctcgttctataccgagggccaccagaactgccgctggacctgtagctataaagggttacatggactgtaggctgtgtcacgaaagacgcgagcacanagtgtgctgctgctcccattgcgaatatagtatcgtatgtt

SEQ ID NO: 82911 - DNA, 296 bp, Zea mays
  Clone ID: MRT4577_175632C.1
agcgccggagcatcctcaccggcctcaagggtcgcgacgcccgcagcctcgacgccgggggcgaagcctgcggtgatgcagaagacggcgacactcgctaccaaccatgaccctatcgtggtctcgcaagcgatagaacccagccctccactccctttctccatcctccgatggaagatgcagacgcaaccgtcgcacgcccgatgacagcactcgcattcgtccctttttcttttccttccgggccagggcaaacctggcgtcactgggacgggaaaacggcaacccttggcttc

SEQ ID NO: 82912 - DNA, 1370 bp, Zea mays
  Clone ID: MRT4577_175633C.1
cctgccgggggtggagtccaagcgcaagttaacaccacaccaccgtccccgcttggatcacctgttaacctgtagattccgggccactcagtactcacccacccatctatctttccgaaagggtggtgtagcggcgagctcggagagttctgggatcgagagcgagcgaggccgatctgtacagtatagcctgcagtgcacgcagcagcaaaccaaagagctcagagttttcgttgtttgtttcggatgacgacctgtcgcaccgcgaacgcagccgccgtcgtccgtctcctgctgctgtgctctttctgcgccgccgccgccattgcctgcgaccctcctaatggcgccaagttcgggtacaccggctccgtcggtcccgaccactggggcgcactgagccccagcttcaggcagtgcgcgacagggacgaagcagtccccgatcgacatctccacggcccaggcggtctccaacccggcgctgcagccgctccacagggactacaccgtggccaacgccaccctcgtcgacaacgtcgtcaacgtcgcgctgcgcttcgacggcgacggcggcgccgggagcgtgagcgtcggcgggaagctgtacacgctgaagcaggtgcactggcactcgccttccgagcacaccgtcgacggccgccggttccccgtcgagctccacatggtccacgccagcgacgacggcaacgtcaccgtggtggccatgctctaccggtttggcagcaggccggatcctttgctctggcagatccaggacaagctggccgcgctgcacgcggagggctgcagagcggaggagggcggcggcggccaagttcccgccggagacgtgagcctgtggtcgctgaggctgcactcccacacgtactaccgctacgtcgggtccttcaccacgccgccctgcaccgaggacgtcatctggagcgtcatggcccaggtgagggagatgacggtggagcaggccgccgcgctgatggcgccgctggagaaagcttacaggcacaacaacaggccgacgcagccgatgaacggccgcgtcgtccaggtctgccacaggttcgtcatgagcaagaagacggcgccgtagccgtacgtgcgtgccccgtgccccggccgtatgcccggccgccccctgctcgttgccgtagacgacgcctcatcaatactgaagttggtcagtaggtctgtgggtttaattagctaggttcattcataggagatgtataagctgtttggtttcctgcaaagtggatccttcttatctgtaagaataaggtctctgtttggttatgagcggtaaagtttaccgtccgtcacgtcgacatcgaatgtttggacacatgcatg

SEQ ID NO: 82913 - DNA, 222 bp, Zea mays
  Clone ID: MRT4577_175634C.1
gggtacctcgaggccggccgggaaggggtacctgccattcctgtcatccggtgtggtctctgggagagggagagagaaggaagggtaggtttcttccgatacgatagcggctgtcccctattttcggttctttacaagcatgtacaaagggtaaccatctctctgctggcaaaatacccacataaacttggccgcataaacgtgtgcacacccgcatcatct

SEQ ID NO: 82914 - DNA, 283 bp, Zea mays
  Clone ID: MRT4577_175635C.1
ggtcggggttttcccaaaccgggccccattttcacaaaaaaaaaaacacaaacgggggttatttttccggtcgttttatccctagcgggtaggcccaactgaaatactacaattgcattttcaccaaagattttacctattaagccaacttcaccgggattttttctttctttttgcgcttttttacccttttaccggcctaacaagagctatgggtatatattggctacagactcaacagacaaagaatgtccatccgagattgggaacccaacacttttac

SEQ ID NO: 82915 - DNA, 486 bp, Zea mays
  Clone ID: MRT4577_175636C.1
gcgtacgtatagcttggatacctctagcagcggcacgccctattcttcttttattttttactttctttctttgtgtttgccttttagtttgggggttggggtcttgtcggttttttctatttttaagaaaaaaaacatccccggccctttttttgttatttttcacggggcccttttttgggggtttttgtgggccctacaacaaagaactttgggggtaaaccacctgtttctaaaatcaactcaagggggtgggcccctgtcctgcttgccccaggaatttagggcggaaaaatgggggggcccgccccccacaattttaaaacaccccctttttttttggtgggggggaaacgtaccccaccgctcggggaaaaaaaaaaaaatttccccttggggggtaaacccgggtttgaaaaaaaagaagaaggagaccccatattaagaaaggtccggggggggcggaagaacttttggttttttccc

SEQ ID NO: 82916 - DNA, 332 bp, Zea mays
  Clone ID: MRT4577_175637C.1
gaaacagaaagagccatttggctttcttaccgcacgacggggaatgttcgacccattgagcgcgaggcgtggaacaaccttgaggacgtggcgacaagcaagccgcacgggacgacccaggatgacctgggtaggatacaagacaccaacgtgccgtgggagacccgagacaacgactggctgcacaatgctacgctaggtctaccacggaatactgcgcttacttcccgaaggaactagggatgcccccctacaaacaagcaaatataagcgaaggcattgcatatacctcacagtgtaactgctgcaaaagtaaacatatctaccaagat

SEQ ID NO: 82917 - DNA, 292 bp, Zea mays
  Clone ID: MRT4577_175638C.1
caccccctctgactacagatactacccctaccagtccttccagactccacaacaccccagcttcctcttccaggacaagagggtgtcctggtccctggtctacctccccaccatccagagctgctggaactacggcttctcctgctcctcggacgagctccctgtcctgggcctcaccaagtctggcggctcagatcgcaccattgcctacgaaaacaaagccctgatgctctgcgaagggctcttcgtggcagacgtcaccgatttcgagggctggaaggctgcgattccc

SEQ ID NO: 82918 - DNA, 603 bp, Zea mays
  Clone ID: MRT4577_175639C.1
atgaagagtgccttcctcaatggaccaatcaaggaggaagtctacgtaaaacaaccgcctgacttcgaggatgactggtatcccaaccatgtgtataagctctctaatgcgctctatggatttaagcaagcgccaagaacatggtatgaatgccttagaggctttctaatttctaattcattcaatgtcgggaaagttgagcccactctctttagtaagacttgtaagtacatgcaagacatcctcaagaagtttgagatgaaggatccaaagcccatcaagacgtctatgggaacaaacaggcatttagactttgacactgaaggtaagtctgtagatcaaaagcaaattttaaggtatttagttcatacgcctcacttcgggctctggtatcccaaagggtctacctttgacctgattgggtactcaggttccgattatgacgggcacaaggtagataagcagagcacattagggacatgtcagtttttaagaaggtccctagtgtcctggagctccaaaaggccaagttttgttgccctatccattgacaaggccaagtatattgcgcaggccattgttgcgcgcaattgctttggatga

SEQ ID NO: 82919 - DNA, 498 bp, Zea mays
  Clone ID: MRT4577_17563C.1
attctttttcctactgaggcagatgttgtcggttgttttacttctagataggaggaagccgctggtcgttggcgccgcaattgctcgctcgtcactaacgaaccaggcatacgctcgtccgaagcgctggaggttctcggtgcaccagcccatgcggtcggacgagcagacgccgctgatagaggtgtacagcgactgcgcccagcgtctagttccatgaacgccctacaaggaggtagccctagggacacctacccatccaggttcttgtagtccaccacctccttcctgtggctggaaccccccctacccagtactagggaagagttcgaatgcatataccatcgaggctcaggtcttctgctttgaatgttctgatgacgtcgccggcatactctgcgaccgagtctaaggctgctgccgtgttcaaatgatgacgcgctccgctaccacgtcactacagatttggttcttactgagcagattcacatcgacgaa

SEQ ID NO: 82920 - DNA, 350 bp, Zea mays
  Clone ID: MRT4577_175640C.1
gcaaggcacacgacatgctagctgttgatgcaagattggacagcaccaacatttaaaaggcgacgtggttgtccagttttgcccccgtcgtttatatatataaataaatgtagtcagtgtcctctatctccctcattttgtgtagctgaggatgctatggttctcctttttactaatattattaccaatgcccttttcactttatttatctgagttttgtgggtggttcttgttgggtttcatttctagccttaggagtacccaacttgctttgggactaaaggccttggtgcgtcattacgcatactgcaggaacttgataaactagcaaaccttttcttcttccatag

SEQ ID NO: 82921 - DNA, 719 bp, Zea mays
  Clone ID: MRT4577_175641C.1
ggcgctcgagcggcgggcgggccccattcctcctcctccccgccggccgccgcgcctcccctcccttccagtcgacatcacctcgtcttctccttcggcgccgtgtccctatccgccccactcgacctcttccccggggcccagcctcccccgctcgctaccgctgtccctggtgcgcagcgggtggcggcgcacctttactcctccacggacgacgaggtccctcaccgctggccacccatactccaccttcttcctccccgggcaccccaacccatccccgcccgctccaagcccatccaccatggatcacgcccccaccccccggtcacacacctcccaaatcaccggattcggtgaccagatccacaacaccaacagccagcagaccgagggcaacagccctccctccatccacccgtcgcagctacctcctctagtttccctgcctgacggcatctccaccggcgccctgctcctccacaggcccgtcccggccatcttcatcctcgcacactcaccttctcctggaggatgagaaggaggtaggtgcggggcttggtggatgaggaggaggtaggtgcggaggtgcgagcgagcccaagaggaggagccacaggagcgcaccacgggtctattcccccaccattcgcgtgaacgtgcattccccccagcggcttccttgtccccgtcgatgcaggatccagcgacaccttcct

SEQ ID NO: 82922 - DNA, 749 bp, Zea mays
  unsure (1)..(749): unsure at all n locations
  Clone ID: MRT4577_175642C.1
gccggccgtttccgggaccaaccatcaccacaactaccacttcccttcgcttcattcactcaacaacaacaccatcaaaatggtttctttcacctccatcatcaccgctgctgttgcggctaccggcgctcttgccgcccccgccactgatgtgtctctcgttgcccgtcagaacacccccaacggcgagggtacccacaacggctgcttctggtcttggtggtctgatggcggtgcccgcgctacctacaccaacggtgccggtggtagctacagcgtaagctggggaagcggtggcaacctcgtcggtggaaagggatggaacccaggaactgcccgtaccatcacctactctggtacttacaactacaacggcaactcctaccttgccgtctacggctggacccgcaacccccttgtcgagtactacgtcgttgagaacttcggcacctacgacccctcttcccagtcccagaacaagggtaccgtcacctctgatggatcttcctacaagatcgctcagtcgacccgtaccaaccagccctccatcgatggcaccaggacctttcagcagtattggtctgttcgtcagaacaagcgctcttccggctccgtcaatatgaagactcactttgacgcctgggccagcaagggcatgaaccttggccagcactactaccagattggtgccaccganggttacttctccactggtaacggccagatcaccgtcaactgcccataaattc

SEQ ID NO: 82923 - DNA, 351 bp, Zea mays
  Clone ID: MRT4577_175643C.1
ggggaaaaataaagatagataaaaaggggggcctttcatctttgggttttccgggggggggggacaaaatttaaccccctaaagagcaatttgggttttttttggcaactaaaacaaagcttattccttcacaaaaaaccaaatttacacggggggggttccaacagctaaaaatggccttgccatgtcaacatttggaaaaactacctggggctgatcttttattcaattctccggggttgttttcaaacctaaaaaaaccgggcccctgccaaaaaaataccctaaaatacaatggccaaggggcccccataaacggggcattgaacatattctttttaaaagaggggg

SEQ ID NO: 82924 - DNA, 351 bp, Zea mays
  Clone ID: MRT4577_175644C.1
gaataatatcagtttgaatggataaacagctggcacacgtgacaggatcgcaggttgtggttgttcatgactgacaccgaatacaaaacggaagatcaccagcgtggaaaataacttaattattatgacgctgcgtcaggctaatatttcgctgccaactctgtaaatggtacggctggacagtgacactctcaagctggggattgagagtcgtcctcattattctaaacctctgcatggccatgatcaggctctccatgaggctcatgctcatctaatgaggccagcactctcaggggttagtgagcagcctccaagatcagctccacctgatcgatgcctttaccagag

SEQ ID NO: 82925 - DNA, 846 bp, Zea mays
  unsure (1)..(846): unsure at all n locations
  Clone ID: MRT4577_175645C.1
aaatccctagcacccgtcccgccgccgccgctgccgctgacgccctgaccctcgccgctgcagcagccaccaccgcgcaaccatgggtatcgacctcgtcgccggcggccgcaacaagaggaccaagcgcacggcgcccaaatcggacgatgtgtacctcaagctgctcgtcaagctctaccgcttcctggtgcggaggaccaagagccagttcaacgccgtgatcctgaagcgcctcttcatgagcaagaccaaccgcccgccgctctcgatgcgccgcctcgtcaggttcatggaggggaaggcggacaagatcgccgtgatcgtgggcaccatcaccgatgaccagagggtctacgagataccggcaatgaaggtggccgcgctcaggttcaccgagacggcgagggccaggattgtcaatgccggtggcgagtgccttacctttgaccagctcgccctccgtgctccgcttggacagaacacgcttctcctgaggggtcccaagaacgccagggaagctgttaggcactttggcaaagctccaggagtgccacacagccacaccaagccatatgtccgctcaaagggcaggaaattcgagaaggcaagaggaaggaggaacagcaggggcttcaaggtttaagctgtggaatttctggcgcacttgtgtcatattttgctattattatcggtccatcatcacttttttgggtaccagaatcatactgctttagatgtcagagtcttgtgtcgatgagtattcagaacagttcattcttgtttcagtattttgcaactcgagaccatgcctgcnatccagttatgaatatcatttctagtatc

SEQ ID NO: 82926 - DNA, 245 bp, Zea mays
  Clone ID: MRT4577_175646C.1
gcggccgccctgttgtacttgatgcatgtctttgtttggccaggtccctgaagggatggatgctcgaagtcttgatcgagtcgcaagagaccgccggagggcgaccaattttttttgttcctaaacaagggacacctttttttccccccaaaagtctacgttttccccttaaattggggcccttccttaacttcgaaaattttcttttatctaccaaggtgggggggggggggggggagggaccc

SEQ ID NO: 82927 - DNA, 293 bp, Zea mays
  Clone ID: MRT4577_175647C.1
cggacgcgtggaggacgtcagagcgcggagagagaggaccagtgagagaaactagaagccggccgccgctgcggatcctcgccggtggtgggaatcgacctccccgaatgccggcaccgcgacgttcagggccctggcaaggttgcttggggggaaatcgggtgaccaagcgctgagcttcgcacggctgggctgggacatggtgaccgccgccggggatttccatccgcgcggccggtctgccgtcggagaggggtcgtcagcaccgcaggcatcagctccggcatcatgga

SEQ ID NO: 82928 - DNA, 436 bp, Zea mays
  Clone ID: MRT4577_175648C.1
aaaacacttgcaaaaaggcgggaaaaatcccccaaaacccccctaggggtataattatccaaaaaaccccctggggggcaaattacttaaacccccccgggctgaaaacaacttttattaaaaatggagcagctttttatatagtcctacaaaaacattcatccccccgtaatagaaaaaaaaaacattttttttctccttaccacaaaaaaagggagccaccctatcaaaaaagcagggcttcccgtttttgaaaggcctgcttctttagttgggggcaaaagctttttttcctgctaaaggccccccccacgggcggagccaactcctttgtttgacaaactgcttttacaaaatcacaatttgcctttgggtataggctagtaactataccaaattgcccccctttggctgggcggccccccctgggcaaaaa

SEQ ID NO: 82929 - DNA, 405 bp, Zea mays
  Clone ID: MRT4577_175649C.1
ataatatatttccaatctacagcctcgtcgccgctgccggagaaatgccgccgaggaggcgagatcgccggagactcctggatccgttgccgtcgtactgcgatgcaagagcaccaccctccggcttacgcttgagtctcaccctcctcgctcccctccttactctggcactcgatctcgccccctttggcttctccggcctcctctcctattcccctcgaccctcccaaacgctacagacaacctgccactccgtctaccagcgcggtctgctgaaccgcgacgtctatgaacgatacaatcccctctgagcactcacggggtcccgagaaccggacaacccggaaatttgcgaacaccagacacggctatgtgaccccctgcgactccaaaggttataacatg

SEQ ID NO: 82930 - DNA, 506 bp, Zea mays
  unsure (1)..(506): unsure at all n locations
  Clone ID: MRT4577_17564C.1
acgttcctccgcttccgcctccccgcctcttcctaacacatcttcctcgccatcgcatcccctcctcccccacctgcgctcgagaccctagccctagccgggccaccttcctgcttcgaattcctcgtcaagcgcctcccaggaggtggcgctggaggcggctatggcggaggtgccggtgcaggaggcggctatggtggaggagctggtggaggtgcaggaggtggcgccggaggcggctacggcggaggagctggtggtggtgccggtggtggctacggcggaggcgccggtggaggctacggcggtggtgctggctctggcggcggcggtggttatggtgctggtggcggaggtggaggtggcatcggcggcggtgtctgaataactgaataagcgtctcacatgcatgncatggtggtgcaagcangaagcaagtgctcgaactcgctcgggattcccttcgcnagcgtgcgttgacgtggagtcnagctataccgatcgat

SEQ ID NO: 82931 - DNA, 845 bp, Zea mays
  Clone ID: MRT4577_175650C.1
ccggccgggatttttcgcctccgtttccctcccagtgccggtctcccactcctcccttcttcgcctcccaatttccaaacctctctcttgcccgggagcacgtacacgcggaggaaaagcgatcggcgccgcggcggcaagatgactgcggcggcgacgatgacgtggcacgaggacctggccactctcgtgggggacacgggcgttcacctcaccggcgccggggggcacgcgccggcgccggcgaatgttgcggcggcgggggccgggtggtacggggaggaggaagaggtgagggcggaggaggggtgggcgcagcaggcgaaggggttcgcggagtcgacggcggagatgctgcgggagctgggccgggggctgtgggacgtcgccgcgcagagcctcgccggcgccgaggacagcgaggtggcgcggcggctccggaagcgggcggcggctacggggaagcgcctcagcttcatgaacgagtacctccccgaggagcgcgacccggtgaggtgttggctcaccgtcgccgcagtcgcattcgtctcgctcctagttttaggttttgggagtggcaatgaaactccagtagagcttccaaagaaacttatcatcggccccccaagtgctgatagaatccaacttcctgatggacggcatctggcttatcaagaacaaggagtttcagctaacagagcaagattttcactgatttatcctcattcttttctttcatcaaggctagcaggaatccctggaattagtgcatctcttttggaagaatttggagtacgacttgtgacttatgatcttcctggttttggtgagagccatccacacgt

SEQ ID NO: 82932 - DNA, 166 bp, Zea mays
  Clone ID: MRT4577_175651C.1
atggagcgggatcggggtgttcaggcagcggccgaggaggaggcgcgctggggggcgatacgccacaccggggacaggttgccctacacgaggaagtgaggggtgcgccccacgggaccggaccctcctgctcgtcggacaccaaatgcactaggagctccccatg

SEQ ID NO: 82933 - DNA, 318 bp, Zea mays
  Clone ID: MRT4577_175652C.1
caccgcttcactgtatggaccatgtccgctggaagcgagaggccttactccttctcaccgccctcggcggtcccgggcccatggtcccgactctccggttccgtctgcgctcccaccacgggcgtgacagatagcactggaaggagctcgtgctccgtaccgcacgcgaagagcccaaagacaccgtttcggcccgccgtggacgacacaaagcccgtcctccactatacggttcgtatccgacccaggcagtatgaaactaggaactgctcctagcggcatctgttgttcgtgcagagtaactgacctaatggaatc

SEQ ID NO: 82934 - DNA, 320 bp, Zea mays
  Clone ID: MRT4577_175653C.1
aaggggtcgggcggattcggttggattcttcctggtttaggaaccggggggccgcccaccgaatggcaaaaaattccggggggggtgacattttttttgttttccaaccaaggggggggaaaaatatttgttcatagtggtggaaccccccccgaataaccctggggggggggttttgacaatacaactaacccttttattttggcccgacccccccctgaaaattgttttcatttactttaaagcccccctttttaaaccccagtgccttggtgggggggggacttttttcaaccaaggggggtttttttttctccccc

SEQ ID NO: 82935 - DNA, 2002 bp, Zea mays
  Clone ID: MRT4577_175654C.1
tgcgcgatggtgttgtgggtcttcggctacggctccctcatctggaacctcggcttcgacttcgacgacaaaatcctcggcttcatcaagggctacaaccgcacctttaatctcgcttgtattgaccacagaggcacaacagagcatccggcgaggacctgcacgcttgaaaccgacggcgaggcgacgacgaggccatatgccatggtacaagcctacaaggagaaagtttatccaaaaaacaagttgaactgctgcagcatgagccagaagttggttatgaactaccatataaggttcccttccagagtctcccatgctatatcgtgaattttcccaagcaaagcacctgccaggcgccaatatgccaccggggtagccattaaaatacttaaaatcaactccaaggctcatcgaacgttatccagtgcttcaccgtgtttctgaactccctaaagcagatgttgtcatgttggtcagtttggtgttggtttaatttctacgggtgtcgtatatcagagtcaatcaaaaagtttgactagcaactaatggtgcctatacatgtatttatggagcttcttctggtcatatgtgtagtggatctctcctcctgttgttcccttcaatcatgtccaaggtcaagaaccattcaggtcataaacccctacgacaggggccacgagggctcatcttcgccactgcccctactcccaccttctgcatgtcctgctcggtgctgttccattccctagcgatgttctccggctaaagacgcttggagtttgtggtgtggtgacacttaatgaatcatacgagaggcttgttcccacatccctatacgaggctgccatttgcattcaattttggtcaacattatgaactgaccagagattgatagtgatagtgttggatcacgattgcaggataaaagaagtaggcgcaatgaggagtcatgttcattcacaagctctaacagagaaagttggggcagatgttcatctttaggtgcagccagtgatgaattattctcaggcaataataatgataagcagatatgagcccttgggcctccagttcgggcaacaagcatatggcaaagagagtgagggggcatgatattgttttccaattccaaactgtgatgatgtgtagaggcaaaggatccttcagagttcatcactcatcgagccaaagattttgtgtcaagcatgaaggacattgaaacccggtttatgtgtatagttgaagcaggaaataaggtttctagaatgcttgaaaccaagaagatcttgcttgacatatgtgctaaaataccaggattctaggttctccagttaagctacctactgcccgattgtgtcagcacttcaagtgtgctgcaattgtgatgttattctcaaccatggtaaccagggatgaggacgttgttggactttgatgaacctagaactcttgcaccaacttgtctttttgttggaggtacaaaatacatggtgatccaaggtgaacctagagtggtcatccgaggaaagaagaatattttgccagtgatgacgtgtgtttagaggatgggatccttgcaattgtcaaacaaggagatgagagaccccttgaattgcttgctaaagcatatgctatcaaatcttttgacatagatccccagaacccctctgatgttgttttcacgttagaatgggaatcaatcggtgtcctaccttgtggcgagatggcgagaagaaagataatttttactaccaagggatcttaatcagaattctaggctcattcatacattcactacaatgccttcgaactcatgaacatttatctctggctctattgtggtgggttacatgaatagagtttttgcatgttcttcgttttatatggtgacatacttgttactatgtgacattgtttgatgaaacccttgcggcattgtattatttattttgttctatatagtcttaacattttatcaaataaaaatttatgtgacgtc

SEQ ID NO: 82936 - DNA, 2449 bp, Zea mays
  Clone ID: MRT4577_175655C.1
gagccctcgttcccctccccttccgctcgagttcgtcgccgtcgccctgccctcgtatctcctcccacgacaccggtgacaaccacaggccaccgtcctgatcctcatccgggtgatccccaggcaggcaggtcggcgaggagggcagcaagaccgagccgtgcgggggctcgggacgggaacgggacaggaccccaaaatctcagatccttcctgctcgcccgcccgtgcccgtcggcgcgtcgttcttgccgtccgcgccccacctccgccctctcctcctccaggggaatcagatatgccacaggctgcgcgatggtgttgtgggtcttcggctacggctccctcatctggaacctcggcttcgacttcgacgacaaaatcctcggcttcatcaagggctacaaccgcacctttaatctcgcttgtattgaccacagaggcacaacagagcatccggcgaggacctgcacgcttgaaaccgacggcgaggcgacgacgaggccatatcatggtacaagcctacaaggagaaagtttatccaaaaaacaagttgaactgctgcagcatgagccagaagttggttatgaactaccatataaggttcccttccagagtctcccatgctatatcgtgaattttcccaagcaaagcacctgccaggcgccaatatgccaccggggtagccattaaaatacttaaaatcaactccaaggctcatcgaacgttatccagtgcttcaccgtgtttctgaactccctaaagcagatgttgtcatgttggtcagtttggtgttggtttaatttctacgggtgtcgtatatcagaggtaaacaatattagatgtttatttatttgtttggaggtatcagttttctatgaatgtacaactgtttgctttgtgctttatttagacttctaatttatatcgatatttatgacatgtgtttacctgttttgtaagtcaatcaaaaagtttgactagcaactaatggtgcctatacatgtatttatggagcttcttctggtcatatgtgtagtggatctctcctcctgttgttcccttcaatcatgtccaaggtcaagaaccattcaggtcataaacccctacgacaggggccacgagggctcatcttcgccactgcccctactcccaccttctgcatgtcctgctcggtgctgttccattccctagcgatgttctccggctaaagacgcttggagtttgtggtgtggtgacacttaatgaatcatacgagaggcttgttcccacatccctatacgaggataaaagaagtaggcgcaatgaggagtcatgttcattcacaagctctaacagagaaagttggggcagatgttcatctttaggtgcagccagtgatgaattattctcaggcaataataatgataagcagatatgagcccttgggcctccagttcgggcaacaagcatatggcaaagagagtgagggggcatgatattgttttccaattccaagatctaaggagcaaagactattaattatcataaacaagatttctaattggtgaaagctttttatatatagcagactgtgatgatgtgtagaggcaaaggatccttcagagttgaagcagggtaaaagattttgtgtcaagcatcgagccaaagattttgtgtcaagcatgaaggacattgaaacccggtttatgtgtatagttgaagcaggaaataaggtttctagaatgcttgaaaccaagaagatcttgcttgacatatgtgctaaaataccaggattctaggttctccagttaagctacctactgcccgattgtgtcagcacttcaagtgtgctgcaattgtgatgttattctcaaccatggatgaggacgttgttggactttgatgaacctagaactcttgcaccaacttgtctttttgttggaggtacaaaatacatggtgatccaaggtgaacctagagtggtcatccgaggaaagaagaatattttgccagtgatgacgtgtgtttagaggatgggatccttgcaattgtcaaacaaggagatgagagaccccttgaattgcttgctaaagcatatgctatcaaatcttttgacatagatccccagaacccctctgatgttgttttcacgttagaatgggaatcaatcggtgtcctaccttgtggcgagatggcgagaagaaagataatttttactaccaagggatcttaatcagaattctaggctcattcatacattcactacaatgccttcgaactcatgaacatttatctctggctctattgtggtgggttacatgaatagagtttttgcatgttcttcgttttatatggtgacatacttgttactatgtgacattgtttgatgaaacccttgcggcattgtattatttattttgttctatatagtcttaacattttatcaaataaaaatttatgtgacgtc

SEQ ID NO: 82937 - DNA, 1618 bp, Zea mays
  Clone ID: MRT4577_175656C.1
ggccgctttttttttttttttttaactttaatattatattgatgatataaatatgtaatattattatagatacaccgacttaaatggaatgaactgatgtcaaacgaatattttcacagaacagcaccgttaacagcaaaactcaagcagctgacccctttggtctcaatctaagttctgctattccaggatctcaggcatacaacactccaactcagcagcctttctagtcgcaacaggcgacgctgtatccgaacgggggtgctggaacgtcctatgatcaggcatcccagtttaataatgttaattcagggtggaatgatcaagctgccaaccttccagcagagcaagcactgaattacgatatggcaagaattgtcatatctgatctgctgttatatctttctggaatactacttaattattactttattagtgtgtgcacttttctgtatcacttctgtctttcaaccagaactctctgtattcatatgaatctttctttttctatccgaagaagaagaaaaataagtgacgctagtatccatactctgtagatgatcaaagtggaaaccttccgccacctccttggaaggctcagccagcggcaggcaacgaattgtcttttggtgaatgggaggcgtgcaacctctccctggacagctgggcagttcggcggccaatgtacagcaaccagccaggagtagattcttgaaagtagaaaggtgtagtttaaagttattctcctgatctccagctacaaacactcatagccaatccacctaacagacaccataacagatacgatcaatgcagacactggataactgcttatcattattatcgcctgagaatgattcatcactggctgcacctaaatatgaacatctgccccaactttctctgttagagcttgtgaatgaacatgactcctcattgcgcctacttcttttatcctgcaatcgtgatccagcactatcactatcaatctctggtcagttcataatgttgaccaaaattgaatgcaaatggcagcctcgtatagggatgtgggaacaagcctctcgtatgattcattaagtgtcaccacaccacaaactccaagcgtctttagccggagaacatcgctagggaatggaacagcaccgagcaggacatgcagaaggtgggagtaggggcagtggcgaagatgagccctcgtggcccctgtcgtaggggtttatgacctgaatggttcttgaccttggacatgattgaagggaacaacaggaggagagatccactacacatatgaccagaagaagctccataaatacatgtataggcaccattagttgctagtcaaactttttgattgacttacaaaacaggtaaacacatgtcataaatatcgatataaattagaagtctaaataaagcacaaagcaaacagttgtacattcatagaaaactgatacctccaaacaaataaataaacatctaatattgtttacctctgatatacgacacccgtagaaattaaaccaacaccaaactgaccaacatgacaacatctgctttagggagttcagaaacacggtgaagcactggataacgttcgatgagccttggagttgat

SEQ ID NO: 82938 - DNA, 129 bp, Zea mays
  Clone ID: MRT4577_175657C.1
accaactacctccgcccgggcatccggcgcggcaacttcacgccgcgcgaggagcgcgtcatcgtccacctccactccctgctgggcaaccggtgggcggccatcgcgtcgcatctcccgcagcgcacc

SEQ ID NO: 82939 - DNA, 372 bp, Zea mays
  Clone ID: MRT4577_175658C.1
agagaaaagaaatttattttatcccccgttggtttacaagttaaaaccataaaaagtttaagggggtggaggagccaaaaccatgcccatcggaggccagggggtcgcagtggggggaacacaacaaccttcacatgaactttattttcggggacagggcaagggaaaaaaaaaagttctcctgctagtatgaacgaaaagcccttcacaacgaccttgaaacgctttgtttggggcggctaaactttgggttcccttcggaaaacatgggctttttttgggggggcaactaaaaaaaggggggggggctcgccgttccactccttggggcactcaaccagggggtcaatgtgcttgccctggttgagggcc

SEQ ID NO: 82940 - DNA, 106 bp, Zea mays
  Clone ID: MRT4577_175659C.1
cccacgtttacgggctcctctagttctggaactgcatgggatggactgagggatatctgcgtatgatgcgctcgccatcaattactctctcgatgattgactggcc

SEQ ID NO: 82941 - DNA, 298 bp, Zea mays
  Clone ID: MRT4577_17565C.1
taaagagctcaacacctgatcgatccgtgtacagtaagcaacacgttatggaacaattcggcgattgattgtacaataattgaagacaaggtttataactttaaaaaaaaaataaaaaaaataaaaaaaaaaccaaataaaaataaaaataaataaaaaaacaacatctaaacaaaaaaaaaactaaaatacataaaaagaataaataatggcactaattcctaaataaaaaaaaggggttaatgcttataagaatccatgttatatgactcatgaattaaccaatatgattataatt

SEQ ID NO: 82942 - DNA, 203 bp, Zea mays
  Clone ID: MRT4577_175660C.1
agcttcgactactctcaaatcatcgacatcctgcatgagcgaagatatcttatggtgagcgtgctgaacacgaacgacgcgtacgggtgggcgctgattcaaccagttgcaagcttcgactactctcagatcatcgacatcctgcttgatcgagcatatcttatggtgatcgtgatgagcacaagggactggaggggtgggcg

SEQ ID NO: 82943 - DNA, 431 bp, Zea mays
  Clone ID: MRT4577_175661C.1
gggggacggcccttacattccccaacaaggggttcccttaaaaacaggcaagggggcaccggaaagaaaattcataaaaccattcttttaaaaacccttggatccttcccaaaaaacaaccaggggaccagcatggcgtacccaggccagcactttaaacaaattcgggaacccccgggtccctccaggaatccttgggggggaaaaaaaaagggtggggcttgcccccccttcttgggaaacaactatcctactggggcccccaaaaatccccgggccaggttggaaccaaaccggggcttttcccctgggaaagcaaaaacaaaaggggggtctatggccccccctatacgaaaaaaacacagggtttctcctaaaccaatgccccaaaccgggcccccactcggggataaccccacccccccccacaa

SEQ ID NO: 82944 - DNA, 300 bp, Zea mays
  Clone ID: MRT4577_175662C.1
tcgggacccaatcgcagtcgccttcaacactatggtgacttcttccactgtcgagcaagaagaccaggagattgctctgccccggcaggaagcggtcgacaacgacgcaacgcaagccattgaaatggtcgcacagactgaagtggtgagcaccgccgaaaagcaacctttggaaaatccggaaacattaccggtcaattggacaattgaaaaccttaacaaggtcaatgagaagaaacactatttaaagggttttggtggtggcggattcaaatggagtgggccgatttttcccaaggg

SEQ ID NO: 82945 - DNA, 618 bp, Zea mays
  unsure (1)..(618): unsure at all n locations
  Clone ID: MRT4577_175663C.1
cctcgaggccggccgggaactcctccattgcaagcagcagtacaaaaaaaggaagctaccagcaatatgtgcacctcaaagtcaaagctcattgcagccgttcttctcgcagcagctgccctgcccctccatgccccaacgaccatggcagcaaactccaacctcttccgcgactacatcggcgccatcttcaacggtgtccagttcagcgacgtgccgatcaaccccgatgtcgagttcgactacatcctcgccttcgtcatcgactactccaccgaaaccgatcctccttccccgacgaatgggcagttcagcatcttctggcaggactcggtgctgacgccctccgcggtggccgccatcaagcagagcaacccgaacgtgcgggtggccgtcagcctcggcggcgccaccgtgaacaacagcccggtgttcttcaacgtcacctccatcgactcctgggtccagaacgccgtgtcctccctgaccaccatcatccagcagtacaacctggacggcatcgacatcgactacgagcagttccaggaggacccgtccaccttcgccgagtgcatcggccgcctggtgaccacgctcaanagcaacggggtgatcaag

SEQ ID NO: 82946 - DNA, 772 bp, Zea mays
  unsure (1)..(772): unsure at all n locations
  Clone ID: MRT4577_175665C.1
gggtatagtgttttttagagttttagggaattgacccaaatcttagcacaacctagaaccgcgggtattgggttggtttttactgttcccgcccttgtccgggaaacggtttcccaatggttttttaatccctttcaaaatttggaaaaaatgaaaaaactatagaaaccagggaaaatatgataaaaaatacatgatttcttgagttatttggtaaatatcaatttttattttttttaaaaaatgttcatcatttttcggtaaaaagacaacgaatttcataaagagcacacgggatctcggccgacaaatattaacttcgtttttctaaatttgaagcaattatttttagcaaaaaaaaacgagaaacaacatttctcggtaaaaaaacaacgaaaactagccaggaaacaacatttctcggccagaaaattcaaagattgtttttttttcaaattttgaaaatgaaaactggctagggaactgaaaagcgatgaaaatcgtctggtttctcgtttctggtgattagccagaaattagtaaaaacaggatagcccagcgattagcgagaaattagtaaatcgaagggcagttttttgtttgtggacggatgacgaactgtcagtctaactgaagtgaagatttatagacgttgacctgcttcgattctgatcgagcttcccaagtctctgcagaaggtgcttttncagtcctggctgcaatcggcaaaaacaagtcatgtgcaggcagacatttgcctagccgagcaagc

SEQ ID NO: 82947 - DNA, 154 bp, Zea mays
  Clone ID: MRT4577_175666C.1
agctatgaaaatcctgtggtgtctcgaattaatatgagaatacaagatctaacaggactagatgtttccacagcagaggaattacaggtagcaaattatggagttggaggacagtatgaaccccattttgactttgcacggaaagatgagccag

SEQ ID NO: 82948 - DNA, 410 bp, Zea mays
  unsure (1)..(410): unsure at all n locations
  Clone ID: MRT4577_175667C.1
cgacaacancgaacacggnnccaacgtcgctcttcctttccagagtccaccagccctcggtgccgttggctccggaccgtttcactagcacaaaccacannatttgattttnngacccgtcgcctgccctggcccgcnnctcctagtcgtaaagcccgcnncccgccgccttccccctcgctcggcccttctccgcttccgcgcggaccgccatggtgagtgagctcttcccttcccgtcccaaccctcgctcgatctacaacatcctaccctatcccccccctccccaccggatctgacggtgggctgcgtggcagtcggtgacgctgcacactaacctaggcgacattaagtgcgaggtgttctgcgaccaggtgccgcgcacggcggagaactttctggcgctctgt

SEQ ID NO: 82949 - DNA, 1197 bp, Zea mays
  Clone ID: MRT4577_175668C.1
aagggcgtctcccacgtcggccctcccttcaggggacggggacgcccccagtccctcacctcactagctatcgcaatagctcgcaccacgcaccaccgtgccgcgagcgccactctgagcactctatttatgccgctgccagcgcctgtgctacgagcgggagcggggtggtgctggtggtgaccaagaatcaatctcattcgagaggtttggggaggtgcagcgagctagtagctgcctagctatataccatgcccgcgtcgtccccggcctcggccgcgctggcggccaccgtggcggcggcggcggcgctgctgctgctgctgctgctctgctgccccaatgtggcgcgcgcgcagacgccggcgttcgcgtgcgacgcgtcgaacgcgacgctggcgtcgtacgggttctgcaaccggtcggcggcggcggcggcgcgcgcggcggacctggtgtcgcggctgacgctggcggagaaggtggggttcctggtggacaagcaggcggcgctgccccggctgggcgtcccgctgtacgagtggtggtcggaggcgctgcacggcgtctcctacgtggggcccggcacccggttctcgccgctggtgcccggggccaccagcttcccgcagcccatcctcacggcggcgtcgttcaacgccacgctcttccgcgccatcggcgaggtggtgtcgaacgaggcgcgggcgatgcacaacgtggggctggcggggctcacgttctggagccccaacatcaacatcttccgcgacccgcggtggggccgcgggcaggagacccccggcgaggacccgctgctcaccagcaagtacgccgtcggctacgtcaccgggctgcagggcgcagtgtccggcgccggcgccctcaaggtcgccgcatgctgcaagcactacaccgcctacgacgtcgacaactggaagggcgtcgagcgctacaccttcgacgccgtggtgtcgcagcaggacctggacgacacgttccagcccccgttcaagagctgcgtggtggacggcaacgtggccagcgtcatgtgctcctacaaccaggtcaacgggaagcccacctgcgccgacaaggacctcctgtccggagtcatcagaggggactggaagctcaacgggtacatctcgtcagactgcgactccgttgacgtgctgtgcaacaaccagtactaca

SEQ ID NO: 82950 - DNA, 503 bp, Zea mays
  Clone ID: MRT4577_175669C.1
aaaaaaaaaaaaaaaaacaaaaaaacaaaaaaaaaaaaaaaaaaaaaaaaaaaaaaaaaaaaaaaaaaaaaaaaaaattagttcataacgccgcaaccacccataagggaggatttttgcttggggcccgtcccccccggcgggccgcctttttgggggtttttttggcccttttcccccctttggggggccttttgggggccctttgggggcccttttacccctttttgagtggcatttccctgttttttcccccctttttcctggggaacccctggggtttcccccctggtgcccctttaaaaaagtcccccttcccgagcgttttttctaagggggggggaccccacagggccccctcccccccgcttttccgcccttttgggcccggggagcgcccttggtccccccctttaacaccccccttatcgcgcggtccctcgccccgaatcccctaatttgcccgcctcccttgctcccccccttcgccgttttttcctttt

SEQ ID NO: 82951 - DNA, 417 bp, Zea mays
  Clone ID: MRT4577_17566C.1
aaattataatttttatacaatgaataatgtcttaacaaattattacacgaaaatcttgtcacatgtaagtttaactggtctccattgaaaaagaaaatgatgatgaaaaatgcttggataaaaaatcttttccattcccttttaccctcgttctacccggatgagattttttcatttacatccctatttttttcatttacatccctatggaagaattttttctgtcccagaatttcccaaaaaaaaacccattgtcatttttgttatagacaattgttgcgaggaaaaattggggatgcaaagcaaggtgatgtgctgtatattttctttatgcgggtttgtttgacggttcaaacattaaatattaaaaagcatgctctaaattaagatattttgctactgaagtttaaaatgact

SEQ ID NO: 82952 - DNA, 2580 bp, Zea mays
  Clone ID: MRT4577_175670C.1
tcgtgtaggtcggcaagccgaccaagagtgctgacaacacacaacagtcgaacaatttcaccggcgggcggcggcggccaccagcgcgtcgccgcgacgttagcgcttgatccggcggcggcgactcagcccctttctctcccccaacgctcaaatgccaccgcgcgccttgcccactacctccacacccgcatctaggcgcgtcgtctacgtcatcctcgcggcgctcgccacagcgccgttcctgctcctcctcctctacagcggcgcctcccggtctgcgctctgtcccacctcctaccgcgcgccccgccgcctcccgtacccgtccgtgctctggtccaaggtgcccccgctccccgcgctctccacctcgccgcacccggacctccgcggctctcgctggatcgtcttcaccgcgtcgccgcacgccccgcggcaccgcccgctgcgcgcggtccccgggtggcaggtcctcgccgtcgccgacgaggctacccccgcggactggtcccacccaggtgccgtgctgctcacgctcaccgaccagggccgccttggattcagctccgtcgctttccttccggcccggggcccggcgcgcaaggcagcggcgtacctcttcgccgtgcagcgcggggcgcgggtcatctacgacgccgacgcgcgcaacgccgtcctgggcgggaacctcaccaggcacttcgatgtggatctggaccagcgccacggaggcgccgtgctgctgcagtacagccacgccaatcctaaccggacgatcgtgaacccgttcgtgcactttgggcagccatcgatctggccgcgtgggctgccgctggagaaggccggggagctggatgctgaggagttctacactgagatattcagtggtggccaattcatgcagcaagggatgtgtaatggccttccagatgttgattcggtgttctacttcactcggaagtcattggagatggaggcatttgatttccagtttgacgcggatgcacccaaggtcgcgctgccgcagggcatgatgacaccagtcaactctgttaacacattgttccactcgccggcgttctgggggcttgcgttgccagtgtcagtgagcccaatggcatcagatgtcatacgcggatactgggctcagaggatactatgggagattggtggctacctagttgtctacccaccaactgtacaccgcatagataacgtgcgtggtcacccatttgatgaagagaaggatctccatgtcaatgtagggaagctgataaagttcctaatggagtggcgatccagtaagctgacactattcgagcggattcttgatctaagctatgcgatgacagaggagggattctggagtgagaaggatttgcatttcatgactgcttggctgcaagatctggttgctatcgggtatcgacagccacggttgatgtcattggagattgaccggcccagagcaaccattggacatggtgacaagaaggggtttggtcccaagaagctgccttcagtgcatcttggggttgaagagattggggaagtaagcactgatattggcaatctaataaaatggaggaagcattttggtgatattgtgctcatagtgcattgcaccgaacttgtggaccgaactgcattagagtggaggctgctttatggtcggatatttcgagcagttgttgttctttcagagcaaagcaattctgatcttgctgtggaattcagcaacttgacacaagcctacaagtacttgccgaaggtgtttgatcggtttggaggtgcccaaggatttctgttccttcaagatcgtatggtcttcaattactggaacctcttgaatgctgataaggctaagctctggataaccaaccaggtgaaggaatcttggtcggatgtgcctctacatggtaacaacattgagtggtttgtgaaccaaggggatatgattaaaaaggcggtcagcaattttccatctcaatatcaagataattacaggagaagtgtaggtgaaaataatctgattcgttgcagcagtgagatattttacgtacctcaacggtacacccgtgatttctcagatcttgtaaaagttattgggagcttagacattcatcacagttttgcagtccccatgttattccttgcgatcgattcaccgagcaactttgagtccaaagctttgacaaaacttgtctacagggcagatcttccatcagatacaactctttcaacaatttatactactgaagcacatgcagtgtaccctgtgaaggttcagaacgagatggattttgtaaaactgataagggctatggctttaggagatccatttcttatggaattggtctgatctaggattgcctctcttttttaattcgtcaggttggcgatagaaaacaaaacaacgagataatgtttggttcgtctttgtcctcccttcttccatatgaggatgaggataatctagtgttactcgatctcagtttacatgtacaatcagataatacaggcttactttgttgagctaaaaaacgaaattccgaaattcatggtgttattttgttg

SEQ ID NO: 82953 - DNA, 684 bp, Zea mays
  Clone ID: MRT4577_175671C.1
ccccccctcgagtttttttttttttttttttttttttttttttttttttttttttttttttttttttttttttttttttttttttttttaacccccaaaaggggggataggaaaaaaccaaacagccaaagggacaggaccggctttcgaacgaccctggctttttttttttttttttttttttttggctaacacgtaacacacacaaacagggacgacggggaacaaacaggccaccatgcacaggcaagcggacgggcccccccggggagattttatttagaagaacaaaacagaaaaaaaggagccatcgatcatcacgcggagatgggaagatataatcatgaccacaatcgatgacccggccggggggaacgggggaagggggggtcaaacaaacagggggccggcggcgcgcgggggctaggttttagttcaccctggaccaaccgggggaggggctgatggggtaggggatccccaccccccacttgggggggatgctgggggggttcccggcgttgaggcccctaacccccctgggggggtttttgaggaaattgcagggggcccccctgtcggggggggggctgggggccctcttgaggttcctgacccccctacaaaaggacgggggggggccgaaccccctcccgggggcgtaaaaaaggcagggcccaaagg

SEQ ID NO: 82954 - DNA, 1511 bp, Zea mays
  Clone ID: MRT4577_175672C.1
cgggtaatgaaatgccaaggcttcaactatcttggagcagaagctgaagaattgccgatgagggatggaaaaccatatgatccaaatgaggacgatcatctaaacccaatgaagttcagcacaaagcatatcagctatttggaaaggagaagccgagaaggttcctctattgataggtcaactggaatggagatgaagccgagcgatcaagagtcagctgcatcagtagcatggccttactctatcctagagttgtgcactatatggaggttgatgaagactttgctgcaaagatcgatgatgaaatcacctctttgaatcaggtggcacagctatgaatctggaatctggcccaaacgccatgtgactaattctgtttaaattatctttttcaaggagagagctcttttatcttcaagaaaggtagcatactttggcacaatttgctatggaagtggctagagaatcacaagtgaggaatgttgaaggatgaattggagcagaaaattaagtattggtggtgaggatgttgaaatctgcatggaaatttcctcaaaacctgagagcttcaaatgttattggctgcttcacgcgctctttgtttttcaaccatactgtgacttgtgttttgttctaggatgttgtggctataaacaagtggaggtttatggagctaaaggaagacatgcaaggagatttcgttgctaaaaatgaagcatatgaggtatacacaaaatgttgggttactggaggaaacattgtctcccatggaagatgcagacgttgaagcctgaagctgaagcaatttttcttcagaggaaggaaggacagacttgcttgtttcggggggcaaaggtgaggctaaagttggataacgaaattgttggtgccttcaactatcttggagcagaagctaaagaaactgcttgagagtcaaagcgcagatgaggatgacaaaccatctgatccaaattaggacgatcatctaaacccaatgaagtttagcacaaagtagaagatggagagagaagctgaagcttaaatgagctgcttggtaagctggctaggacacggattgaggacgacctgaagccttgccgtgatcttattgagcagctgtttggaaaggagaagggttgacagatcaactggaatggagatgaagccgagcgatcaagagtcagctgcagcagcagtagcacgaccttactccatcctagagttgtgcactaggtggaggttgatgaagactttgccgcaaagatcgatgatgaatttctcgtcgttgaatcaggtggcacagctatgaatctggaatgtggaccaatcgtcatgtgactaattctgtttaaatcacttttttcttctaggagagagctcttttatattcatgaaagatagcctacttactttggcacaatttgctatgaaagtggacagagcatcacaactgaggaatgtatgttcatttaatggtataataataatggcatttgccttgtcccttcagt

SEQ ID NO: 82955 - DNA, 150 bp, Zea mays
  Clone ID: MRT4577_175673C.1
atggcgtcttcgggagctggtgaccctctggattctaagcgtggagaggccccgttcgctcagcgtatcgacccgactcgggagaagctgacacccgagcaactgcattccatgcggcaggcggagcttgcccactggcagaaggtccta

SEQ ID NO: 82956 - DNA, 314 bp, Zea mays
  Clone ID: MRT4577_175674C.1
ggattttgaccattacaaaccaaccaaacccgggcatgcgtaacgtttttacgtttttcattacacagcacagaatgcttttcaaaaaagcaacttcgttacgacccctgtagatacgtcagaggctaatcccgaccctcaggtgtataacgacgccaactcaaagcttgcaaaaaaacagtctacaatatgcaattaacctgagaacataaaacacgagtttcgcaaacacaaggagctctattccttttatcatcagggcggcgaggccaacgaaggaaacatacactcacaaggtctgtgcatataagaaa

SEQ ID NO: 82957 - DNA, 369 bp, Zea mays
  unsure (1)..(369): unsure at all n locations
  Clone ID: MRT4577_175675C.1
atgaacgaagacgagagcaatgaaatcattttcttcattttgtccatggcgttttttcacgagatggcgatcctggcgcggccggacaagaagggcaaagagaagaggatctggaactaatacgagcacaacataaggcgcgccgcgaacctgctttttatagaggggggttcctggncctcctcatcgcacaagatacaacccctacatgcggggggtacggagggggtaaaaaaaaaaagggtgcttgtcgtaagcgtcttccagaagaagcgctgctaccccaaccactactgatgagctagcgagccgtatgagtcaccactaaaatcctaacagctgtcggcgcagtttggtgtcgttaaactg

SEQ ID NO: 82958 - DNA, 190 bp, Zea mays
  unsure (1)..(190): unsure at all n locations
  Clone ID: MRT4577_175676C.1
tntgaagataactatacgacttcctaaaatcaaattaacacagtgccaaaggacacatatctctacacaatcttattgcagaaggtgaaataacacgagagggcccaaaaaatatatataagtgcacacgctaacacagctcaacatttcacacactaacagcaccgaccacaaacataacttgtaatga

SEQ ID NO: 82959 - DNA, 498 bp, Zea mays
  Clone ID: MRT4577_175677C.1
aaaaaccaacccttaaacccaaaaggtatccggggtaaagctcattgcacgggggcttcaatgggggggctttgtttcagttggggacaacaattttattagtaaactaaaaaacacccgggtcaaccatggttcctagggtctgacctttgttggaggacataaaattcaacacatgcttttccaaaggcttttttgcattttgccaacccacatttgttatcgcaagtttctaaggaggaagttcgccctcctcctgcactgccttgttgaccttgagggctaggttaaccatttcctggacagtctgctcgtgggttttcgagggagggccaaaccttttaaaaattagcccatcggcccttttttttttgggcaggttcaacagctttttctcctcaagctcatttttccgggattggatggcaatggagtagtagggtttattcagcccagggaaaaaagccggaataaagggtttatttaggggcccaacat

SEQ ID NO: 82960 - DNA, 391 bp, Zea mays
  Clone ID: MRT4577_175678C.1
acgggcccccccctcggaatcacttgctacggccccaaaaaaaaaaccccgggggggtaaaaaaaccgcccaggggcgccagaaagaaaaaaaaacccccccggggggaaaaaaataaaaacgcccccaaaggcagcaactgttcctccacaaacaataacagccttgtacgggccagcaaacacaaacccccccccccacaacgatgtcacccccgtcccactgcacccaaagcgccttggacagggcagccaaggtattttgaccctctggggcgacacgaacaccaacccccacaacttcaacccccccccgcctgagggcagggcccccccccccccccccgggggaaagggcccccccgccccccaaaaaatcgggaggggcgggg

SEQ ID NO: 82961 - DNA, 259 bp, Zea mays
  unsure (1)..(259): unsure at all n locations
  Clone ID: MRT4577_175679C.1
gntngtcnattgcananaacttcatnaccggnctcaaggtcgtcttcgacagggagaggtccgtcctgngctgggagaagttcnactgctanaggaacgcnagggtggcggacgcgccggacggnagcncgggcccganctcngccccggcggcggggcngaccaagatcnngcngcggcanaacnacngcagcggcagcgngtacccnggcgcggcgccnctgtcgangtcttccgnctcncncaacnccgncgccgc

SEQ ID NO: 82962 - DNA, 532 bp, Zea mays
  Clone ID: MRT4577_17567C.1
gagagaaaaaaaacattacaattgtttaagaactgcaaatttatagttacaattctagttacaggttgcagcaaaaaaaaggaaatatggaataaaaatctgcattactacagacacattcgattcgaggtccctgaacctttggagtatctcagtcacttccaaaacaaaatccccgaatcacattcatccatcagcccaggtaggcgttcagtaatctgggaactcagtgtgattctgccacacttgtagtggttggaatttctgagtcgccttgttcatgaatcccacgccaactccttgctgactttgatatccgagcattcacgcagcaacaacacgagatccttcggtaggcttttcatcctgtttggttccgtagctccatcggtggctgatgctactacatatgatcctgacccctctgacggagggttactctggcggatactctggtggaacatctgaagagcgtgatgtgctgatatttctcgcacggagctgagcagatcctgaggtttccctgtggact

SEQ ID NO: 82963 - DNA, 318 bp, Zea mays
  unsure (1)..(318): unsure at all n locations
  Clone ID: MRT4577_175680C.1
gacacgcaaaacccccccccngggccgccgctctnnngggccccngcctaccnccccctgcctgccncgnnccngcccccctctcgcgccccctcaactcaattccctggcccccnntnntccncgncgngcccgggnaaaccctggccttcccccncctaatccccttgccncncattcccctttcncccgctgcccnnncnnccnncaggcccccaccgnncgcccctcccccccntncccccccccgtatggccaatgggacccgccccgcancggcgcctttttcccccccggcggggcggctccccccccccg

SEQ ID NO: 82964 - DNA, 509 bp, Zea mays
  Clone ID: MRT4577_175681C.1
aaatgaaaccctatatcatttctcttaggtcagcgaatccgcatcatccacaaacacaagggggaggaaggaatttaaacacgacaaagtaatggggacatatacaatctccaacataaccgtcaccatttaggaatactatcatggtcctcgcgcagctgccctgacaactaactccccaacgtgcaaggttgactgcgaaaaaagttgcacgcctcgattcgatggccgaaggaaggtgtatgcctcgtggaagctgatctcgtcgtgatccacgtcttccccacgcttcgatacactaaaagtgatcttctaatgtagtctgagggtgatctcttcctgtggccggaggcgaggaaccggccaccgttccgggacgaggtgacctcgtcgctgcggccgccgtggcgcgctgacgacaagttgtggcacagcaggcccgtctgcgatgtggagcacggcatgttttcctttgcgcactctccaccactcgcgccgttggcgggggc

SEQ ID NO: 82965 - DNA, 1978 bp, Zea mays
  Clone ID: MRT4577_175682C.1
ctcgaggccgttcgccgccgtcccggtatccaccctcctccgccgctcgcctgcccgctgctgcgcttcaccccgctctcgcctcccgccgccgcgccgtcccggtcgcgatggccctgcgctccccggatctgcggtggctcggatcgctcacgaggcccggccgccttgcaccatccccactcgccgcgctcgcctccccacggcgccgccgccgcgcaccgtccccttcgccctcgccctccgactcctccaccccatctaccgcccctacatccgacagtgggccgggagcggaggggatggaggggccggagtggaagaagatcagtgccaagaggttcgggatcaaggagtccatgatcccccccgaggcctggaacgtactacaccgcctccgcagcagaggatatgatgtgtaccttgttggtggttgtgttcgagatctcataatgaaaaagacgccaaaggatttcgacataataacaacagctgatcttaggcaggtgaaagacactttcttaggatcagctgttatagtaggaaggcgttttcccatatgtcatgtacatgagaacaattccatcgttgaggtgtcaagttttaatacttgtgcaaggggatcaagtggtagccagatttacaattcaaagagccaaaattgtagcaagaatgattttgttcgctggaagaactgccaaaggagggacttcacaattaatgggttaatgtttaacccatattcagaaaagatctatgattacttgggaggcattgaagatattaagaaagctaaggtccgtactgtaattcctgctggcacttcgtttcaggaggactgtgcccgtattctacgtgcaatcagaattgcagctcgtttagggttcagcttccccaaagaaacagcttattatgtgagaacacttgcttgctcagtggcaagacttgataaggcaaggatactcatggagatgaactatatgcttgcttatggttcagctgaagcttctttgaggttgttgtggaggtttggcctccttgaacatttgttgccctttcaggcagcatatttctcttcgactcgttttaagaggaaggataaaggaactaatatgctacttgtcttattttctaagctggataattttcttgcaccgaacaggccatgtcacaatagtctatggataagccttttagcttttcatgaagcattggcacgcaaaccatgtgatcctttgatagtggctacttttgcactagccttttacctgggaggtgatatgtctttggcagtggatatcggaaaatcaatcaaccgacaacatgatactggctttcgggagctcttagaacccaaagtctggactgataagcatttggcaggtgaagtacaaagctttgctgcattgatgaagcagacattaactgaaatgactgatgagtatcatgtcgcaaatgctatggcaaaaatccctcaagcaccttcctcagatcttgtatttataccactacaagcctacctgaaggttctcaaatttatcgagtgtgttcaatatggcaaaaaggagcgtggccatgaaccaaaacgcgatgggatgatcaattaccataacctgtctaatggtacacatgcagaaataagaaacctctttacactggtggtttttgacacactgtaccctacagacacggaggatgaaaatgactgcagttcttagagagacatcatgattgggatgaattcaatactttgccagacatcaataaatactccatttgtcccaaaatatatttctttctagtcttttttttggtccacattcatccgaatgatagtgaatgtagacatacatacaaactatattcgtagattaattaatgaatgtttgtttagtcaaatgaattatatttttgactgagggagtaataaatagccagggaccagggacaactggagctgctgcatcagagtgaaggc

SEQ ID NO: 82966 - DNA, 405 bp, Zea mays
  Clone ID: MRT4577_175683C.1
gcatttgaagcgtgatggaaattcctacactgttcctcatgccccctatgtaatgaataggagccaaaagttagttttttgtgacttcttgagaagagtaaaatttcctgatgggtatgcttctaacttagcaaaatctattactagtgatggatgtaaccttcaaggattgaaaactcatgactgtcatatcctactccaaagaattttacctgttgctatccgaggaattatgcatagggatatatacgaaacaattgccgaattaagtaaattatttcaacaattatgtgctaaaactctaaagttagatgtttttcatacaatgaaagctaaaatcccattcattttgtgcaaacttgataaaatatttcctcatgcttcctctgatgtaatgctacacct

SEQ ID NO: 82967 - DNA, 567 bp, Zea mays
  unsure (1)..(567): unsure at all n locations
  Clone ID: MRT4577_175684C.1
gccacgcttctcgctctctggtttgtccaccgacggcaggaggtcgatgcgttacttcgaaggcgaaggcgtgatcgggtaaacatgaggcggcagccatggccaggaccgataatctcaagatcttcgccgctgaggaacccgcaaccactgcctcctgactcatttctggatctacggctgatgtctctccaacaccagtatcatcctatcctcgatacacgcaaaagccccgaacatgttgcttcacctcttttaacagatgtgagggcatgcgtcaccccctagaagacgtaaacaacttggatcggtacctcacgccaatgaccgcccacattgtctaccccctgttttttctggcgacgcagattggaaggcttttaccaatagtgaccgtctagaactctactacggatgcggcgaacactcatagggcctgaatcatatactgcaatgcggcagctacgaaaatggctgccctcctacaaaggggtgatagaatgccattacctctgaactgaccgtcgcgacggctacngcaactccgacgggaactggaggaactga

SEQ ID NO: 82968 - DNA, 1578 bp, Zea mays
  unsure (1)..(1578): unsure at all n locations
  Clone ID: MRT4577_175685C.1
aattcggcacgaggccatcacttgctggggggagctctgccgagacacgcacgctgctggagataggcatccagacacggcaccaccagtccaccaccaccaccaccaccaccgtgacgtgagtgcccgagcgcgcggccgccatcaggctcccccgtcgtcctcgccgggcggctaggtcagagccgggagaggcgggggccggcggcgctaggctaggctaggctaggcagcggcgtacgtgcgtggccgccgcgcgatcggcatgggcgacggcgaggcggcggtgccgagcaggttccgcacggtctgcgtcttctgcggcagcaacgccggccgccgcaaggtgtacgccgacgccgccctcgagctcggccacgagctggtgcggaggggcatcaacctcgtctatggcggcggcagcatcggtctgatgggcgtgattgctcggacggttcgtcacggcggctgccatgtcctcggggtgattcctaaagcgctcatgcctattgagatatcaggtgaaagcgtgggagaggtgagggtcgtggacgacatgcaccagaggaaagccgagatggctcgtcagtcccaagccttcatcgctctcccaggtgccagaccagaccagacgtcccctgctaaaacataaccatcatcgaccgaccgcgctggcaataattcagagccccccactccaacttgcgtttgcttacgtacggctacggcctgttggtctctctgctgccaggggggtacgggacgatggaggagctgctggagatgatcacctggtgccagctcgggatccatgacaaaccagttgggttgctgaacgtggacggctactacgaccccctgctcgccctgttcgagaaaggcgccgccgagggtttcatcagcaccgactgcagccagatattcgtctcggcgccaaccgcgagcgagctgctcacaaagatggaggtggcgagctagctagctagtacatgtacatcttcgatatacatacgctttttttgttcacgtacgctagctgttgtggctctttgcctgtgtccagcaatacacgcgggtgcaccaggaggtagccccagcgacgagctgggagatctcggagctcggctacggcagaggaggagacgccggcgccgccacgccgccagcagcagcagcaggaggagcagaagagggaaaaggcggctcgtagcacccacatccatctcctgaagcgttaccttcctccacctactgcttgctgatgtgatgacgcgtctgttacggtttcctggcaaatttgtttcgtcaaagtcgacctctccaaagtccaaaacccggttgaaccaggtgccgggtcgggacgtactggggagacgacgatgatatctctgtgttgggtgcttggattgtgtaagcttgctgctgctggtactattcttgttttctttaaaaattccccggtgtgtggtgcttgtggaaatggaatctgtgctggtgcattgcagtgcaaaanaaaaaaaaaaaaaaaaaaaagggcggccctcgcgatctagacggacgcgtgggcggacgcgtggg

SEQ ID NO: 82969 - DNA, 578 bp, Zea mays
  unsure (1)..(578): unsure at all n locations
  Clone ID: MRT4577_175686C.1
gctttttattgccctatggtacaatgccaacgagggggacaagnatattgctaaaaatattagagaagtgtggtctatggcactctaccaagtaactcaaaaatggtgggcgcaatgcaagactttatacacttttcatgtgttttttttttgtttaaacatgtttaggtaggaaccgggaggggggggtctccgcaccaaacaaccggtgngaagaaacatacagagagggaaacccgagtgtaagaagctccgaacatgcttaccatattacctggactacctacgggagatgtttcatggttatgctgtagatgggcgttcatcatgcattcccgagaggctaattatccaattgaagtagatgatgtgaatggggaaggagatgatgatggtattctcaatagccaatgagcagcagtactcgcaaaagtcctagcagcagcacatgtgacacaacagctagtccaccgaaaagagcaaaagtctgatgtttaacatgatgagaagcttgttagactgtctggaacacgatcagtcctctaacaaggaaacattagctgaaatatcaaaagcaa

SEQ ID NO: 82970 - DNA, 371 bp, Zea mays
  Clone ID: MRT4577_175687C.1
ggactaatgatttcgggtttgggccctctgtattggggatttcatccatttcacatacatgcgacacacctgtttcgtcgactttgatttgcacacgtgtgtgtgtgaacgtgtgcgcttggaacaaaaaaatcgctcgtgtaggcggcctactaacgaacgaacggattggtgaacccgggtgagagcctatttaattacccgaacctattgacggccaggagcgcgccgagagctaacttctccgggggcagcattaccaccagttagagatgcccgcgcctgtcagtctctctgacggggtgcacgaggccctcgtgccgaccctgggccgactccttctagacaccatgcacgccgtacgggcacca

SEQ ID NO: 82971 - DNA, 272 bp, Zea mays
  Clone ID: MRT4577_175688C.1
gctcccacgcgtccggagagagagagagagaagattagagttaagagagatagagagagaggagtgagatagtcgctattggctgccgtgtagttaccttatactcatctacttctaatgatggataatgtgattgcctgtatctgacctatcatgcattacttgtatcctttcttttttcttaataatgctcctaccttcttctcctataatgtttataatgctctttaattcttttctcctttccttttcttaaatttataccattaata

SEQ ID NO: 82972 - DNA, 623 bp, Zea mays
  Clone ID: MRT4577_175689C.1
cggccgggccgggatttccgtcccccatcccctccgcaccgcagctgtctcttcctctcctggtcttcgtcctgccactcctccacctcaacttgctctgctcttctcggattacggctcggggttggtcattggcggacaggtgaacgccaagaagaaggttagtttctgtgggaacaccggccacagccgctgcggtgaagttcatttagctgcggtgtgctccggtcgtatgcgaagcaaccccttctcacttcaggtttggtttgcatttccgttcaagtataaaggaagcagtatttggcatggcatttgaatagcgtcggaacctagaaaacagtgttccagcagtattacgtcacactggtgttatactattatagaaaaacatggtggacgtagaactgtttgttaaggagactagtgatcacagcatcagctctgaggaagaagatatccttgtcaggagctgtagcaatctcaatgtgagctttggataccattgtgattctcatcagaggttttctcctgaaaatgatcatggcaatggcatttctcctaagaacacgtttgggactaataccatgatggggtcacgaaatggctcattcacttgtttatct

SEQ ID NO: 82973 - DNA, 116 bp, Zea mays
  Clone ID: MRT4577_17568C.1
gttcccttcactcttcagtagcctctgctcatcagaaatgaccgaggagacttcctgtttcacctacctgcgcatcgggcgcaagaccctaaagaccgccccctcaggggccacag

SEQ ID NO: 82974 - DNA, 252 bp, Zea mays
  Clone ID: MRT4577_175690C.1
gggcaaaaatttagttccttttatcaacccatattaccgccccaatatttttttggacccaatgaaaagaatccgggaccctgccatgcacattggggctagggccatttcaggtggggaacatatttatccccggcgcaggttaaacagatcttccaaggaacagaccaaatggctttcccataacttaagatatttttggccggaaaccctcctcaaaattttttttagccccaaaatgcagttgggggg

SEQ ID NO: 82975 - DNA, 2531 bp, Zea mays
  Clone ID: MRT4577_175691C.1
cattgggtacctcgaggccggccggggttttccgtcccccatcccctccgcaccgcagctgtctcttcctctcctggtcttcgtcctgccactcctccacctcaacttgctctgctcttctcggattacggctcggggttggtcattggcggacagggcgtttcaagaaagggcggcggcgcttttcctgacgcaagttgccccggtgtcctggcttgctgcgcgcttgggggttgggctcaggaatggggggagagcaggcgctgcgtcgactggtcctgttcccatctctctgaaacttagatggatgcatctgtgaacgccaagaagaaggttagtttctgtgggaacactggccacagccgctgcggtgaagttcatttagctgcggtgtgctccggtcgtatgcgaagcaaccccttctcacttcaggtttggtttgcatttccgttcaagtataaaggaagcagtatttggcatggcatttgaatagcgtcggaacctagaaaacagtgttccagcagtattacgtcacactggtgttatactattatagaaaaacatggtggacgtagaactgtttgttaaggagactagtgatcacagcatcagctctgaggaagaagatatccttgtcaggagctgtagcaatctcaatgtgagctttggataccattgtgattctcatcagagcttttctcctgaaaatgatcatggcaatggcatttctcctaagaacacgtttgggactaataccatgatggggtcacgaaatggctcattcacttgtttatctggtgctgctattagtgcaaattttacactggcaaatacaaacatttgcaatggtcttattggcgaagaaattttaccagaactagattctccaaactccttcagaaaaattatttcttctccatcaatgtcaagattggactcgttctccacctcacaaggaagtcctgtgtcaactgagagctctatatttgagatcagtaaaaacctttggaggtccagtgcaccaacaactgtatcatccaattttctgactaatacagaggtgaaaatggctggcggagctgctggagaggatagagtccaagctgtgtgctcagagaaaaatggatggctgatttgtgggatatatgatgggtttaatgggagggatgcagctgattttcttgcggtaactctatatgataacatagtatattacttatacctgctggagaatcggataaggcaacaaaatggtttgtacaattcatcagaaagctctcttaatggtcttaaaagtgagttaacactagccatgagaaactcagaaaatgaaggcataaaattttctgaaacatttcgatctggcgtgctgaattgcctttctactgctgttgagcaagctgagaatgactttttatgcatggttgaacaagagatggatgatagaccagatttagtttcggtagggtcttgtgttctggttcttcttcttcatggaacagatctgtgcatcttaaatatgggggacagtagagctgtgcttgcttccatgccatatgtagaaaatggtgctttgaaggctgctcaactgacagagacccactcacttgaaaatccttcggaataccaaagacttttagctgctcatcccaatgattcttcagttgtcaggggtaacaaaataaaaggaaagctgaaggttactcgtgcttttggagttggctatctgaagcagaggaagttcaatgatgcactcatgggcattctacgagtccgcgatttgagcagccctccatatgtttacacaaatccacacacattgagtcacaaagttacagatgatgatttgttcgttgtgcttggtagtgatggcctatttgatttcttcagtaatgatgaagttgttatgttggtttatcaatttatgcacgataatccaatgggggatcctgcaaaatatcttatcgagcaacttatactcaaagcagccaaggaagcagctttaacagccgaagaattgatgaggatacctgttgggagtaggagaaagtaccacgatgatgtgactgtcgttgttatcacccttggaaatgcacagaggacgatgactgcgtcaacatccatgtgaaagaatggagagctagagagacgggctatatcagctggtaatttttgtgggtttttgcgtacgtgtcctccaaattacaagcccttttttttgttgagattggcgtgtggtagtcagtaaacccgaataaaaatgtatatattgttttggaatttgggaagtgaacaaaaaccttttgttcaatcgcaaggtgggcatggattgtttggcctacttttgtacatacatgaattaaaacatggaggctcgtacttgagccaatgaatccatgagcagagcggtggatcgttccggtttccgtttgccaattttttttctctgctaataagtatgtgctgtttgtgttgatcttagaattatgactcatggtccgaactcacttgaattgaagtctggttttcta

SEQ ID NO: 82976 - DNA, 471 bp, Zea mays
  Clone ID: MRT4577_175692C.1
ccggccgggattttccgtcccccatcccctccgcaccgcagctgtctcttcctctcctggtcttcgtcctgccactcctccacctcaacttgctctgctctcctcggattacggctcggggttggtcattggcggacaggtgagcgtgcgaatcgtccctctcctccctcggtccgcgttctgtagatgcggcgtttcaagaaagggcggcggcgcttttcctgacgcaagttgccccggtctcctgccttgctgcgcgcttgggggttgggctcaggaatggggggagagcaggcgctgcgtcgactggtcctgttcccatccctctgaaactttagatggatgcatctgtgaacgccaagaagaaggttagtttctgtgggaacactggccacagccgctgcggtgaagttcatttagctgcgggctgctccggtcgtatgcgaagcaaccccttctcacttcaggttt

SEQ ID NO: 82977 - DNA, 716 bp, Zea mays
  Clone ID: MRT4577_175693C.1
ggctatctaaagcagaggaagttcaacgacgcactcatgggcattctgcgagtccgcgatttgagcagccctccatatgtttacacaaatccacacacattgagtcacaaagttacagatgatgatttgtttgttgtgcttggtagtgatggcttatttgatttcttcagcaatgatgaagttgttcggttggtttatcaatttatgcatgataatccaatgggggatcctgcaaaatatcttattgagcaacttatactcaaagcagccaaggaagcagctttaacagccgaagaattgatgaggatacctgttgggagtaggagaaagtaccccgatgatgtgactgtcgttgttatcacccttggaaatgcccagagaacgatgactgcgtcaacatccatgtgaaagaatggagagctaaaaagacgggctatatcagctggtaatttttgtgggtttttgcaaacgtgtcctccaaattacaagccctttttttgttgagattggcgtgtggtagtcagtaaacccgaataaaaatgtatatattgttttggaatttgggaagtgaacaaaaaccttttgttcaatcgcaaggtgggcatggattgtttggcctacttttgtacatacatgaattaaaacatggaggttcgtacttgagccaatgaatccatgagcaaaaaaaaaaaaaaaaaaaaaaaaaaaaaaaaaaa

SEQ ID NO: 82978 - DNA, 258 bp, Zea mays
  Clone ID: MRT4577_175694C.1
cggactcatgggcacggatatcacagcttgctttcatgtgctagcttactctggcatcatggggatcgtgaacctggtctagctatagcgtcgaagaggaactagtacttagacgctcgcgactctggcgatgaccgttctgatggcgaccaacggacagtgttcaagtgcagacgcgcgaccggctatagaccggtgaagcgcgtacaggacgatactcccgctccttccgtcggtgctaatagacaggatgatgcc

SEQ ID NO: 82979 - DNA, 229 bp, Zea mays
  Clone ID: MRT4577_175695C.1
atcttccctgagattctcctgtgcctcctgttggctctctttgcatctggcctcatccaccgagtctgtgtcaccacctgcttcatcttctccatggttggtgtgtactacatcaacaagatctcctccaccctgtaccaggcagcagctccagtcctcacaccagccaaggtcacaggcaagagcaagaagagaaactgaccctgaatgttcaataaagttgattctt

SEQ ID NO: 82980 - DNA, 451 bp, Zea mays
  unsure (1)..(451): unsure at all n locations
  Clone ID: MRT4577_175696C.1
gtgttttttttttttttttaatttttttttttttttttttttttataattatttaaatttttttaaacatttaaacttttttttttttattttttattttactttatacacaatcttcaacattcaaaaaattattccaaccccacctagagttgttgggaagntaacccaaaccatnaaaaaanacccaaaaaccgaaaaaatggttctcttgaaacccatcaaatctctctcaaacaccaaacattaggctaaactttttgacaaaagggacaaatactatggcaactcccaaccccacacccaaaaaaccatgccaaaatgaaaaaatctcgcttaactgtggcttctacaaaagaaggtacaaccacaaaaatcggtttactacaggaaaaaacaagggacaactctagtgcaaaaatcaattcccaccaaaaaaaaaacaacttta

SEQ ID NO: 82981 - DNA, 868 bp, Zea mays
  Clone ID: MRT4577_175697C.1
gctcgtaatcctaaccgccctggtttctctacacgctacgggaccggtaacttctagaacccaccaccttccatccttccttcctttcctctctctctctctctcctcgcgcccacggtgcccgccagccagatccgcgcgttcaccggcgccatggccgccgagcatgccaccgccgcggtgggtgagccgcctcccgccacgtcgcagccggcggagggcgtgacggcggcggcgggccagaggtccgtgcccacgccgttcctcagcaagacgtaccagctggtggacgacccggcggtggacgacatcatctcgtggaacgacgacgggtctgccttcatcgtgtggcgcccggcggagttcgcgcgcgatctgttgcccaagtacttcaagcacaacaacttctccagcttcgtgcgccagctcaacacctacgggttcaggaagatcgtgccggacaggtgggagttcgcgaacgactgcttccgccgaggggagaagcggctgctctgcgacatacaccgccggaaggtgtcgccggccacgggggcggtcacggtggccgccgccgccgctgcggccatcccgatggcgctgcccgtgggctctccggtgtactccggcgaggagcaggtgctgtcaagctcgtccccggagcccccgtcgctgcagcagcacccgccggcgccgtccgggtcgggctccggcggggtggtctcgggcgacgtgggcgaggagaacgagcggttgcggcgggagaacgcgcggctggcgcgcgagctcggacagatgaagaagctctgcaacaacatcctcctcctcatgtccaagtacgccgccactcagcagccggacgccgccaagg

SEQ ID NO: 82982 - DNA, 463 bp, Zea mays
  Clone ID: MRT4577_175698C.1
gcctgtgatggactctctgctcagccaatctcaccgaaggctgagggcgggcggcagcgcatccgaatcgctgaggcgtctgggtcacttgtgacccgctgtgcatgcccgccggatagcttggtgcctaagtctatgctccgcgctgggctgctctgcccgagccatgaacgtggacattctcctcaatgtaggatgggccctggtgaccgcgcaatgcgaggcctccatgggctttctgatgtgtcctgcccggttcacgggaccaggagatcaaccgcttggcgctgttcatgtgtgccgcactcattctaggcgggtccgatggctccgatcgccgtgcttgacgttgactcgcatacgaggattctcatcactgtgattaggagctacggacgtggctcttgcatgctattctggcgctgacaacatccacaatcgcaggcaatacctgcacctgctc

SEQ ID NO: 82983 - DNA, 556 bp, Zea mays
  unsure (1)..(556): unsure at all n locations
  Clone ID: MRT4577_175699C.1
attgggtacctcgaggccggccggngataacccattgttccatcaggcaaggccaccttgcgaggacccatgacctctgccaaagaaaatgttccggtggcgccccaaacgctgcctcgacaaaacaggatggccaacggcgccactgagccgccggtaagcggcgtcctcaagtgcacgtgtttccgcctgcccagccgcaccaagaagcctctgccgccgtctccggcgccgaatctcagcagcaggagcgcagtggctccggacctgtcagcaacgacgacggcgtcccagtcccatcgggtcaccttccgggcgtcggcgcccctctccacgtggtggccgtcgtcaccgtcagccgtctctgctggtgccggcgccaccgccactccagctcctggtggcagcggcgggatcgccgtcgcgccgaggagggcgtcgtcggcgtccgtggcaccgactatgaaagccggtgccgggagcatgtcgtcctcgtccttctcgcactggcgctgccggtcgctgtcgtcgtcccgggtcatgccgcacggcgggc

SEQ ID NO: 82984 - DNA, 423 bp, Zea mays
  Clone ID: MRT4577_17569C.1
atccgatgatgctccagcgttattactatactgccgacttctgtagacagcgtcgaccctaccaaacccaacagttcctcgctcgctttcgtcagctgctagttaaagtatagtagcattcactgttgacgttgacgctgactcaggtgcatccatcttctctacctgcaggcactacggccacccgacggtgctgccggccttcacgccgacggcgttcctgttctgagcggcggcgaaccgcaagcaacgcaaaacgtcggcggaccggcggcggtgtttgtacagctcgtgtgtgtggtggtggtgcagctcgacgacgacggcttcctgctttgttttttttgttcttccaacctttatgcacagcaaagagctgatccctagcttagtgcttctgatctatatatgatgtgtatacac

SEQ ID NO: 82985 - DNA, 532 bp, Zea mays
  Clone ID: MRT4577_1756C.1
gtggtggggggggggtttttttttttttttttttttttttttttttttttttttttttttttttttttttttttttttttttttttttttttttttttttggggggggaaacagttttctccataaacccaaaactaaaacccgtttttttgggggggaggggccctggcaaaaaaaataaaacaaagcccccaaacccttaatggaaaaaaaaaaacttaaaaaaacactttactggggaacccaataaaaactaacagttttattaaaaaaaaaaagcgggggccccaacacaaggggcctttttccaaaaaaaagccctacaagggtaaaactttttccccaaaaaaaaaacacgtgtaaattgttggaaccaccccaccccatgttccgaaaaaaactccaagtttgccgaaaaggggaagctaaccccccctaacccttttttcctttcccctgggcgggaaacttggctcccacccccttttttggaaaaggaaaaatttttcccccggaaaaaactgggtttttt

SEQ ID NO: 82986 - DNA, 257 bp, Zea mays
  Clone ID: MRT4577_175700C.1
gtcagttggtttttattagctgcttggtatgcagtaacttgggtggaggcaaaacactaataaatagggtacaaaggaaaatgatgcttttcttctatattcttactctgtacaaataaagaagttgcttgttgtttcagaagtttaaccccgttgcttgttctgcagccctgtctacttgggcacccccactacctgttagctgtggttgtgcactgtcttttgtagctctggactggaggggtagatggggagtc

SEQ ID NO: 82987 - DNA, 295 bp, Zea mays
  Clone ID: MRT4577_175701C.1
gaccaactagcaacatagaaagcacaatagcgtaccaacaatggcacgccaagcatatcaggcctccttatcgctccttgctctttgtgcaagtgctgctgccgggaccattttccaacaatgctcacagcctactatcgcttacctttttcctccgtacctctcaccagtgacgtgttgggtatgtgaaaaccgaatacttaaaccttatacgatacaacaggcaaccggcgatggcatcttacctttatcacccttgaccctccaacattcatcaatcatattacataataca

SEQ ID NO: 82988 - DNA, 662 bp, Zea mays
  Clone ID: MRT4577_175702C.1
caacgaaataaaaaagattctctcttcttttaccctctccgcccgcttctctctctttgatctcttttcttgcccggcttctgatctctgctcgcctgccgcctgcaaccgccgagggaggaggggaggcaagaaggatcacgccgccggagcgtcatctcttccaacccaagggacggacagctaaagtagctgtggttgtgggatatggaagccgaagtaagcgctccagccgatcttaaggcgcctgataagacgacggtacacggtgatgacaaagaaaatataccgaatggtaatgcaaatttgcaagtgaaggaagccgacaatgatgaagacgatggaacaagatctgatgggtttgagctgatagatgtgaagcaaaacttcgattcagcaagagtggaggaagagatggccgctccaagaagtactacagtcgatacatctcctgttacagaagaaagtgaaacacaagaagacaaaacaacagcacatgaagaacaatcagttgcaacaaacacaagacatctagagtcctcaatgttgaaccaacaaacagaacaattggaaaagctgacaatgcgtattgaggagcttgaatctgaaaatgacaaactggtaaaggacttgacagaagcagaaaataagcagagcctgca

SEQ ID NO: 82989 - DNA, 819 bp, Zea mays
  unsure (1)..(819): unsure at all n locations
  Clone ID: MRT4577_175703C.1
cattgggtacctcgagggccggccgggttcttaatacaataacatatcagcacatttccttcaatagctaagatatctagttcatgtatggtggttcttcacatccttcactcctgaaaacaaagtaaagccgtactccataagtttatctgaacagtgaccatacttgcaatgtacttataataggaatcatttacgttgcatttggatctgagtagcactgaaacacggcgctccttttattttgtactagcttttgtatatacatacctgctagttttttttttaaacagacgacttgtcaattgtctacttacctatgatattcagattatgtatatttacagctgtctcctcaaggagtatgaatggtcctgctctgttttaactctcaagtgagcatgttgccttttgcaaaagacacatagaagtggaacaaattcttttttacagctggctactatttataggcgcttgacgagggtgaactgctgtacacgttgccgtcctccttgcagaaggctcaaagcttgaaaggctacagattctcatgttttgaactcaggatccactacaagggttgtgagtgcacgtggccacgtgggctagatggaaatgggaatctcaatatcttctgttctgcgtatatagctgattacaggtactcctgagttccttcggcctgaacgggacacacgagacccgcagaagcagaatatgtgctanagcatggactagacctggaccaatgaattatttctccggttggctgccaggaccttggagaagccacatgatcagacagcccagctcttggac

SEQ ID NO: 82990 - DNA, 293 bp, Zea mays
  Clone ID: MRT4577_175704C.1
attgtatcgattcaaatttgtttactagaaaggccaaattccccaactgggtgcatgcgggcgaaagggcatgaccagcgaacacggctctctaaatttatccgacgctagaagtcaaaaggtccgacggtcggaacaataaaaacatttccccccagaggttgtaccgggggaaagggcccacacaatttaaaattgcccctgtggggttagaaacctgggcaaactgtggggccaaaaggcccaggcaagggtttcccgctgtaatgaagtccaagagaataccggtcccc

SEQ ID NO: 82991 - DNA, 655 bp, Zea mays
  Clone ID: MRT4577_175705C.1
cttcccccccctttttttttttttttttaggttttttggatatctttattctctaacgaaaaaagagcaatatacaactgataaggttagtcaggttctccagttcaggaggtattgtcccacttatgttgttgttctcattccctaaggggtgatgatgtgcctaatatcatttgtcatttcctcccaaccccaattgtcacacatgcctcatgctttgctccatgttgactttcaccatctcgacaagcatcttcttcgctttgccgccacggtcttcaccatctatttgggaagcaatattggtcacaatgttcttgatcgtgtctgcctgcaactttgatctcgagtacggtgagttccgcaacaagtcaagaagaactatcttggttttatttttagcattgcactgataaatgcagattttccaacatttgcggaacccagtatatatacatctcggccctaatatgataaaaagaaatatcaatcaggatcgtaaaatgtagaacaagcaggggaagtgaagatctatagaacttgagactatacgattcgagcatggccatgaagtggacaatctaactgcaataatcacaaaaataaacagaaatgttgaccttcctttcctgatgattttctgatataaccccaa

SEQ ID NO: 82992 - DNA, 700 bp, Zea mays
  Clone ID: MRT4577_175706C.1
gaacacactaagcaggatcgacaactaagctagacgacgttggtcatcagtcatcaactggcttgaacaagagtgtagcaagaagcgagctgtgcgctgcggctgggagagaagctatcatgtcgtcttggacctactgtgagaacgcgctgttcgagcgcgcgctggccacctacgaccgggacacgcccaggcggtgggagctcgtggccgccgcggtgggcggcgggaagaccgccgaggacgcgaggcgccactacgcccacctcgtgctggacgtcggcgacatcgagtccggcggctacgacaacccgaacccccgcgggcccgcccccaccaacagcggcggtgccagcatcagcgggaacggcaacaacaggggcggcggcagagccaaccggccccagacatgacggcctcccgcctcccggaaaactacaccagcatgccgtgcgtgcaatgatactatgatagcgtgagtcatcagatatatatgtatgcatgttatgttcgtgtgcggtgtgcgtgtgtgtagatatataataatgtacaggcatgcaagagtgtgtgcattgtggtgttgtgcagacgccgtctgttcagtcagtgtgcgtactgtactactgtgagtgcgaggccggatgagcacacgggcgcatagcctgctagcaaaaaaaaaaaaaaaaggcccctagggccc

SEQ ID NO: 82993 - DNA, 951 bp, Zea mays
  unsure (1)..(951): unsure at all n locations
  Clone ID: MRT4577_175707C.1
aaagaaaagtaagttttcattataaaaaccaaataataaagtagaggcaatgtattttaggttttttggatatctttnattctctaacgcaaaaaagagcaatatacaactgataaggttagtcaggttctccagttcaggaggtattgtcccacttatgttgttgttctcattccctaaggggtgatgatgtgcctaatatcatttgtcatttcctcccaaccccaattgtcacacatgcctcatgctttgctccatgttgactttcaccatctcgacaagcatcttcttcgctttgccgccacggtcttcaccatctatttgggaagcaatattggtcacaatgttcttgatcgtgtctgcctgcaactttgatctcgagtacggggagttccgcaacaagtcaagaagaactatcttggttttatttttagcattgcactgataaatgcagattttccaacatttgcggaaccctgtaacagagtatgatttaaatcagatatagctacactggctgagaggcagaaacacaactcacattctccaaagttgtattgcctgaattaatgaagtttgttaaatttatattgatagcaatagcaattgcatatacaatataatgcacatatctttggacataaattgccctcttcattttccccctaacatctaaagaaaaacaaaataatggaagtgatgagtgtttaccagtatatatacatctcggccctaatatgataaaaagaaatatcaatcaggatcgtaaaatgtagaacaagcaggggaagtgaagatctatagaacttgagactatacgattcgagcatggccatgaagtggacaatctaactgcaataatcacaaaaataaacagaaatgttgaccttcctttcctgantgaatctctgatataacccctgtgataccgaccaatgatttgagctgtca

SEQ ID NO: 82994 - DNA, 170 bp, Zea mays
  Clone ID: MRT4577_175708C.1
cacactttgctttatagagaccggacgcgtggatgcagcggacgtaacatataacagccgaacatttatcttaaatgggcctgcaccagagcgggttgcttttgagtacagcgaagtgtagacaaaccgtctgctgaaagctcttcgcctaggttgcactcttcgctcca

SEQ ID NO: 82995 - DNA, 603 bp, Zea mays
  Clone ID: MRT4577_175709C.1
ggtaccctcgtcttcggccggttaatatctaatatctaatatgtaaatcatatgttcactctgaagttaaatttattttttattttatggatattaaatatgattttgtgccatcgaccattgtagagcattgtactaataattattaatggtaatattttttccattgctttttgggtgcctagataaaaaaagaatcgtagaattatttaactaagtgaatttcctttgctcgggatgaactacgaggctgtcctaacttgtatgggagctaaattaagctatttaaagtctgaatattatgctacctccatttttaaatagttaacgtccgatactttattttttaaccaaaagtgtcaaataaagaaaaacgaagagagtaatagttatgtactttctatggttttagacatggaaacacagtatatgtccactctgcatatattctgacattacattttatttccacttctctaacaatcgttgagaactgagtgaaatgagtgcatttttatgacaaatgacaaatccacacatcattttcacgcaccaagtcctaaagcttttacgtgtattatttttggttgcacgtgtgttatg

SEQ ID NO: 82996 - DNA, 475 bp, Zea mays
  Clone ID: MRT4577_17570C.1
tcgcgcgcgcgcgggatcctgccgctctatcggcggcggggaccaccacagccggaaggcgttcaaggcctacacgcggctctggcgcctgcagcaggagcgccgccgggacctcgtcgccgccggcctccgccgctgggagatcggcgaggtggcctcccggatcggccagctctactacgcgcgctacctccgcgccgccgagccgcgctcgctcgtcggcgcctacgtcttctacgaggccatatacagccgcggctacttcggcgcggccgcggcagcggtggggacggacggcggcggcggcggcgtcagccgccaccaggcgctcctgatccggtacaaggagcttcggttcatcgcgcggttcctcgtcgtggccatgctgatgcggcgggccgaggcggtggaccacctcgccgcacgcctacgtgcgctcgtcgaggagaccaaggctgcgtaccccaaaacaaac

SEQ ID NO: 82997 - DNA, 704 bp, Zea mays
  Clone ID: MRT4577_175710C.1
cctgccggggtcggcttcggcttcggctccctccgctgcggtccctccgtgtcgtcgtcctctgccaccattcatcacaccctggtcgctccccctcgtcgaagcttacggatatgctcctcgaccttccctcctccacccgcgcccgccatcgagggtcgtgacgtcagcctctcggtgaccacgcggcggggcagggtgttgccggtgcttaagggatgctccctccttgtcccgcccgggcagctctggatgctcctcggccccaacggctgcggcaagtccacgctgctcaaggttgtgatgcctacagtgggatctgatgtagcatttggtctcggtaagctcaaacttccgttagatgaggtcaggttaagggtatcaaaatctttggatgctgttgggatgttgagctactctcagaggccaatccaaactctgagtggtgggcagaaacagagagttgcaattgctggtgcgttagctgaagcatccaaagtattactgctggacgaactgaccacattcttagatgaacatgaccagataggcgtgataaatgcagtgagggactctgtggctgccgatggggaggtcgccgcattatgggtgactcatcggttggaagagctgaaatatgcagatggtgccatctatatggaagatggccagataatcgttcaaggcgacgtctctaccatacg

SEQ ID NO: 82998 - DNA, 228 bp, Zea mays
  unsure (1)..(228): unsure at all n locations
  Clone ID: MRT4577_175711C.1
atacttctgcttttttctacaaactcancccncttcaaagagttatttctactaaaggaaggaatgatctatctaatccttaaacctttcctgcttcttgctcaataccaccaggatttcgaccagactgtcgtatatcccaaacatatatatctcgttattactcaaactcctctcctcacatcaatacctatttacgctctcaaatcttccaataactcacattat

SEQ ID NO: 82999 - DNA, 1168 bp, Zea mays
  Clone ID: MRT4577_175712C.1
ttgggggccgtggtgtcggacgcggacggcgtcgtggtcgtatgggctatccaggtagagcaccggcccagaaactcctgctgctcttcttagctcgccgaaatgacgcacggcctcgccgtcggcttcggcttccctccgctgcggtccctccgtgtcgtcgtcctctgccaccattcatcgcaccctggtcgctccccctcgtcgaagcttacggatatgctcctcgaccttccctcctccacccgcgcccgccatcgagggtcgtgacgtcagcctctcggtgaccacgcggcggggcagggtgttgccggtgcttaagggatgctccctccttgtcccgcccgggcagctctggatgctcctcggccccaacggctgcggcaagtccacgctgctcaaggttttagcaggttttcagaatccaacggccggtacagtgtatataaacagaccatgcagctatgtcttccaaaatcctgatcaccaggttgtgatgcctacagtgggatctgatgtagcatttggtctcggtaagctcaaacttccgttagatgaggtcaggttaagggtatcaaaatctttggatgccgttgggatgttgagctactctcagaggccaatccaaactctgagtggtgggcagaaacagagagttgcaattgctggtgcgttagctgaagcatccaaagtattactgctggacgaactgaccacattcttagatgaacatgaccagataggcgtgataaatgcagtgagggactctgtggctgccgatggggaggtcgccgcattatgggtgactcatcggttggaagagctgaaatatgcagatggtgccatctatatggaagatggccagataatcattcaaggcgacgtctctaccatatcaaaatttataaagaaaaaacaggcacgctactttggtcattttgaactctaaatccccaaagttttttggcaaagcttatcttgtgtatatggattaattccaaagcaacttattttgttgttgtcaactgtagttttgctggaacttctattttagtcatttttcaaagcaaaaaaaaaaaaaaacgcttgtatgcttgcattgcaatgttgagtgtttgcctgtgattcgattcacttgcaggcatatatgaatacggcctggcctggg

SEQ ID NO: 83000 - DNA, 269 bp, Zea mays
  Clone ID: MRT4577_175713C.1
aaaaaaaaaaaaaaaaaaaaaaaaaaattatacaaaaacaaaacaaaaaaataaaaaaaagcaaattatacaaaaaaaaacaacccaacaaaaactttaaatccaaaacactctctcttcaataaccaaacttacatacacttacctgccactccatacccatcttttagacctaccaaaatttaattaaatcccacctcattatccaacgtactacactgcaaaatccttagcattccccaaattaatcacctttccacaaatccccc

SEQ ID NO: 83001 - DNA, 653 bp, Zea mays
  Clone ID: MRT4577_175714C.1
ggccgcttttttttttttttttttcctggtttaactctttcatatccaacctttcccctctaacaccctttacctctctctctctctctctctttttttttcccctcttaaacctgaaacctccatctaggatgtctatcccccaacgccaaatcctcagcgctatcatggaacccaggtacatgcggttcactttccagcaccttatctttctccgcattctcccggttaagcactacccacaacgcactcacaaccactaaattcagcaccagataccccagcgcaaaactgtgtccgagaatatatctcggcccgctattcgcacggtacaattgcgtacctaggacagcacccagattgccaatgctgatttgcagtgcattggctgttgcgcgtttggtttgcccgctgacgttgatggcgggccagcagaggacgagcgcgacggacgggtagatgccgacggcggcgaagaaagttccgacgtacgatacgcctgggcgtgcgcgcggattcgtgtttgcgagtaggatgatgtagccgatgattgccaaggtggaagtgaagaggatgaaggcggcgcggcgggcgtagcgttcggagaggatggcgatgaggattgtgaaaagggtggcgagggcgtagggggg

SEQ ID NO: 83002 - DNA, 294 bp, Zea mays
  Clone ID: MRT4577_175715C.1
aagtgttgatctcaagatttctaaattgtcaagatttacatggcattgtagtggaactagttaacacttagagcttttggtatgtaataactatttgctatgtactgattatatgtttcaaaagattgtgttcttcaattttggtgggttttgattattgtttttttaactgcctctcagattatatttacttaatttaaatatctttgctttattcattaaagtataataacttctggtctctgatatttattttcacttgtttactaattatttgcaaaacaccctttgttg

SEQ ID NO: 83003 - DNA, 270 bp, Zea mays
  Clone ID: MRT4577_175716C.1
gaggacactagctaagctaaacactcgcgacggcacaggattggccccgatcccctttttcctcctaggctgcctctgagcgtcttctctggctcctggccagagcagtgccccacagactcggacgaacacgaatcgcgtgcaacgccaccgagccgtgagcgtcgacgtgccaggcgctagtatactacacgcagaccacaaagacggacatgcccactctggccgacgagcgcgcgctcatacagctgagcttccaggtgcgctgat

SEQ ID NO: 83004 - DNA, 339 bp, Zea mays
  Clone ID: MRT4577_175717C.1
attcctcgggcgacgcgccgcgttccccatccttatatattttaagaactaaggacaacatatcctatattacgtattcatagagagacggaagcacgtacggtcgagtgcctagtaaaactacacaaccggtcgatcttgaacaattaagcgagtacgaaacgactgccctgtgtacatttactgactgttgaagagttacatgtactgtctgcgtgtcttatagtataaaacggaccgacctaatgccttaataaacagttcacttacttaaatggggaaagtgacgcgccctgtataaaggaatcaagcctacatactcttacatgcaaccctcat

SEQ ID NO: 83005 - DNA, 158 bp, Zea mays
  unsure (1)..(158): unsure at all n locations
  Clone ID: MRT4577_175718C.1
cacgcgtcctttgngtgagaacatttagctttagggatctcaacaagttgttcagaacgggggggatggagcacagttcccgctgctgatgccttaagttgtgttagaacatcaggggtcaatgtctatcacctgtgctcagtatggaagcaaaggag

SEQ ID NO: 83006 - DNA, 134 bp, Zea mays
  Clone ID: MRT4577_175719C.1
ccacccccacgctcctcgccgtggccgcttccgcgctctgcttctcatcctgctgcggcgtcgacgtcaacggcagcggcggacaccgtggccggctcgtgcgacgcgatccgcgacttcgtcgacgtggcctt

SEQ ID NO: 83007 - DNA, 489 bp, Zea mays
  Clone ID: MRT4577_17571C.1
tgaggtgatagggggcctgctcatttctttgtagccaccctggatcctggtgtccgagacaacttacgagagatgcctggggttcctgtgatatatggtctgaataactatttatgcatagaacagccctctatgcagtagcacacgtttgctcaattggatgaggaggagctctaatgtggatatctctgaacaccagaagttactagaaccgctgtatcagaaggagagacacttgccactgaaaatgctagtggctaataacaacatgagatgcctactagttctcttgtaaaaaacgctcttcatgttactgataaaaccacttttacgaggaacaacgcactgggtccaaacccactcttctgtgagaataagaaaccaaagctccccacggctatctcaaaacctgctaagttctgctgatggcgacgcacagaggaacagggttcggaatcctaagataggcacaaagataacaagcaattg

SEQ ID NO: 83008 - DNA, 248 bp, Zea mays
  Clone ID: MRT4577_175720C.1
atggtatctaagataaagtttgagcagccacggtcagggctccctaatgaccgccccctctagagtgatagaggaggcgaccgccgggcggccagcttagctcaagctttgtgaacaggccgtcattaatgggagtgggcacgctactaccatcctatgagccagcgctatctgaggactaccaattattgttcttgtttaggaaccgtccgtctgttcaacgagcactctttatgtcgtgcacgtgc

SEQ ID NO: 83009 - DNA, 397 bp, Zea mays
  unsure (1)..(397): unsure at all n locations
  Clone ID: MRT4577_175721C.1
cccgggataaaatacttttgtttactttgtgccgcctgcttgtaactaatcaacantgtggatcaccatnngccgcatgcatgtcagtctgtcgcattcggaaacgttcgctatgtaataggggtacctggtactgttgattcgtctctcntagaatgagtgtttggcagcaaaaaaaaaaaaaaaaaaaaaaaaataaaaaaaaaaaaaaaaaaaaaaaaaaaaaaaaaaaaaaaaaaaaaaaaaaaanaannnnnnnnaaaaaaaaaaaaaaaaaaaaaaaaaaaaaaaaaaaaaaaaaaaaaaaanaaannnaaaaaggggggcccactttaagaatccaaattttactccccggtccatccaaaaaaaaattttttttatggggcccccaaaa

SEQ ID NO: 83010 - DNA, 249 bp, Zea mays
  unsure (1)..(249): unsure at all n locations
  Clone ID: MRT4577_175722C.1
ggtaagagagacgacgctcggtcatggagatcttctttaaggggacgatcaccaagcgcactcgcctgcgaccagactgtggagcttgnggacaagtctaccgtcgacaaccggatctaccacaaggtgctgcttccgctgncancactgaacggggatgctctagctgggcacctaccattctgtggagggagtgctttactgcatgnctgactttgaccaggtgggcaagaggacagtgagcttgcc

SEQ ID NO: 83011 - DNA, 251 bp, Zea mays
  Clone ID: MRT4577_175723C.1
tcgatggcgttctactctaagtggaatggggagccattgcattcaagtcgctacttgttaacagatgttctgaagggcaagttaggctttaagggttttttcatttcagattgggagggcattgacaggatctgtgagccacaaaagcctcgagggtctgattatcgctattgcattggacaatcaggaaatgcaggaatggacatgattatgatacctcacaggtttgagaaatttttggatgatattgt

SEQ ID NO: 83012 - DNA, 366 bp, Zea mays
  Clone ID: MRT4577_175724C.1
tctgagcccgtgctcctgttccgcgccgccgcacgcatcccccgagactctgcgttccgttgctagaccggggtgcgccgatccattccgacttcggcctatctatccgttgtgataaggggccccctcgtgcttgggtcgatcgttgaaagatgaactccgtccttgtcttcgtttcctttgattggagcaatcgaatccacatcgttctctaatttctagaatggtgctccaatcagctcagcttgttgatttggtgaccgctaaatcccgactgtgttctgcatttctttggagctagtggaattgaacctgtttttgagacggtacaaagagttccttatagttaatctacatattgacacc

SEQ ID NO: 83013 - DNA, 320 bp, Zea mays
  Clone ID: MRT4577_175725C.1
accccaccgaaaccatcaaatcttatttcccccccaggaagaaccaccagaagaggaccagattctagttttaacaaaaaggaggttttttttggtttcgttaaaaacaaaacccacttatttgggtcctgttttcaaaaagttaaagggacccaaagagaggtctatcgaatcttacataaaaattagggcggattttttttttcataaaaaaataattaagggggggggattttccatttaccccagggcatactttggagcccagcttggggcaggggactcgaacttgtttttgtaagccttgaacaggggagcta

SEQ ID NO: 83014 - DNA, 861 bp, Zea mays
  unsure (1)..(861): unsure at all n locations
  Clone ID: MRT4577_175726C.1
atcgaggtgtcgtccgccggcgtcccccggacccgttcctcccccgtccgcttgcgcctccctctgccttcgcgcatcccggccagagcccgtgctcctgtcccgcgccgccgcacgcatcccccgagactctgcgttccgttgctagaccggggtgcgccgatccattccgacttcggcctatctatccgttgtgataaggggccccctcgtgcttgggtcgatcgttgaaagatgaactccgtccttgtcttcgtttcctttgattggagcaatcgaatccacatcgttctctaatttctagaatggtgctccaatcggctcagcttgttgatttggtgaccgctaaatccggactgtgttctgcatttctttggaggttcacccctgtgtcatctccactctattgtgattcgattcggagaattaatccttttttatcttccgttcagaatcctgtgtgcgcggtagcaattagtcttccgatcgtttgggatttcgctattttactgttctgtttacttccagtagagttctatatatgttacatgcgactgcatctgtggctgattggtcctgcttttaatgcaaagtctagcaaaaattagcatctcggatagcttgtaagtaaatctgtgccaaattagcatgatttatttttgtgtcgctttaatttaacaaaatattcctagatcgatatccctagtgctaaaacttttcagccttgctttcgcagctagtggaattgaactgtttttgagactgtacaaagagttccttatagttaatctacatattgacacccgggnncatacgataagggaatgtgttgatttgatattattgcaaantgggcgatgg

SEQ ID NO: 83015 - DNA, 359 bp, Zea mays
  Clone ID: MRT4577_175727C.1
gaaaagcggccatgcatatagcggatctttacccacaacagcatgaagagggtcatggctctttatgcgtgccgggctctgtcagctgccagctcctgtgacctgcatatgccatgcctctgcgcgtggtatcgatgctcgtactgccctgacgcctgactgacgacgattatgggctccgaaagcctaaacccctacccctactacctgcagcaggcgcagtgcagctcagatggcagctgtatcatactacgtcctgcgacgacaaacaagcgtcttgcaccagccacttcggcaacattgctggcagcagcacatgaggatgaaggacctacaacaccttgtgcataaaaacctta

SEQ ID NO: 83016 - DNA, 454 bp, Zea mays
  Clone ID: MRT4577_175728C.1
ctttattttttttttttttgttttttttttttttctcttgtgaattatcttttctttagggtgggttttcttatttggtgggttgtaagctttacaccgccccgggggaaaaatcataggaaaagacaagctggccaaaatgagccccaaaaaccaccagggggggaggaaaaaagcctccgtgcatgggggaacataaaacgggggccccaaaacaccaaatgggggggaacaaaaagaacccgtgccccataatgtttgaagcccgcctgacccccacctacaatatgcattcggcgcgccaaagcggggactataaaccccttcgacctgcggggcgcgaaaaaaccggtgttataaaggggccaaaaatgcggggaagcccaggagcaaaagggcggggggagccacttaaaaaacccatgcgccgttgtgggggcttccaattgggggg

SEQ ID NO: 83017 - DNA, 624 bp, Zea mays
  Clone ID: MRT4577_175729C.1
ctactatagggtaagctcggtaccacgcatgctgcagacgcgttacgtatcggatccagaattcgtgatgaattccttcttgttcaatacaactacagcttatttgaagcaatggaaattctattcccaccaattattaatgaaattaaactttatgaaacacctttacaagatttatatacgtatatacgtgaagcgtggggacattttgcccaaggaccagctggcatcatttcccgttttaaagatgaagctgttttcagcgttgattcccttggattacgcccagtatggaaagtagagacagagagctcttatattttctcttctgaacctggagttgtatcaccaactaaatatgtagcagaaccaaaaccactcgctcctggagaaaaagtcggattaaaatggaatgaacaagatgaacttgttctttatgaatatgacaaatatcaaatccaagtatataaccgttttaaaaagcgaattgatactaccaattaccatttaaatttatctatccctgaaacgaaaaaaatccaagggctatgtgattctgttcaagttgaaacgaaacaatacgtcgctttcggatgggaccgagaacatattaactcctgaaca

SEQ ID NO: 83018 - DNA, 490 bp, Zea mays
  Clone ID: MRT4577_17572C.1
ggccgcttttttttttttttttttctgcatgcgaaaacggagcaaattatgtagcactatatatggctgcgagagaaatcacaaaaggcgaccgtaacaaaagagcgctgcccaagttgggtggggggtggggatccgaaacagcagagttgtgtatacacatcatatatagatcagaagcactaagctagggatcagctctttgctgtgcataaaggttggaagaacaaaaaaaacaaagcaggaagccgtcgtcgtcgagctgcaccaccaccacacacacgagctgtacaaacaccgccgccggtccgccgacgttttgcgttgcttgcggttcgccgccgctcagaacaggaacgccgtcggcgtgaaggccggcagcaccgtcgggtggccgtagtgccggaagtcgtcgtagccggccgccccggtggcacggcgaggcgacctcgccttggccctggccggcgccgctgctggtttcgcctgc

SEQ ID NO: 83019 - DNA, 258 bp, Zea mays
  Clone ID: MRT4577_175730C.1
ccggaactggaatccgatacatggcatcgcatgtaagaacctctaaggccagaatgtaactataggcgtatgataccacctgtctatatctatgaattaccaagctatcctcgccaacagacccttggggtacttcctgacaaagaactttctcgcctcgtccaagaagagaatagcaatggcgaacgtgaaggggatgaagatatgttcgacaggagctcccctggtcaagaacgtcttctggaaaaaaggcacgta

SEQ ID NO: 83020 - DNA, 704 bp, Zea mays
  Clone ID: MRT4577_175731C.1
gccggccggttccgagacaacacagcacacacgcacgcacggcaccgagcggatcgcggtcggtcactgcatacagaagcactctttgtcttggcgagagcaacaaaggaaggcgacccaccaacgcgagaaatccaggaggatagatggaagggctgatcccgttcgtgatcgacgtgatcaggaggagccacgggcgcggcggcagcggctaccgctccgtctcgtcggacggcggcagctcccgcggcgggggcagcaggcgccacctcatcgactactcggagctgcctgacgccgcagccgcttccgcggcgagcgtcggcgccgccgactggccgccgtccggcacggtgcaccgccgcgcgcggtcggagtacgcggactcgacggtcgtcgggcgtcgcagcgaggagcacgccgggccggcttatcgccggaaatgagggggccggcaacgcgcatgcagcctctcaactttggaggatccatcgtgagcgtcagcagttcagcatgtttgggttgctggttgattagttggctacatatttgctctgtttgttaactcgtttagcactgcattgtaatctaaacaaaggtgcgaacttgtgagcgaaaaaaggtgttaattcgttgctgttccgaagggggtataaaagagaaatgtatatacgctcctaaaaaaaaaaaaaaaaaggccccta

SEQ ID NO: 83021 - DNA, 651 bp, Zea mays
  Clone ID: MRT4577_175732C.1
cgcgagcaatccaggaggatagatggaagggctgatcccgttcgtgatcgacgtgatcaggaggagccacgggcgcggcggctaccgctccgtgtcgtcggacggcggcagctcccgcggcgggggcagcagcaggcgccacctcatcgactactcggagctgcccgacgccgccgccgcttccgcggcgagcgtcggcgccgccgactggccgccgtccggcacggtgcaccgccgcgcgcggtcggagtacgcggactcgacggtcgtcgggcgtcgcaacgaggagtacgccaggccggcgcccgtggtcgccgccgggccggcttatcggcggaaatgagggggcggcgacgcgcatgcagcctctcaactttggaggatacatcgtgagcgtcagcagttcagcatgtttgggttgctggttgattagttggctacagatttgctctgtttgttaattcgtttagccctgcattgtaatctaagcaaaggtgcgaacttgtgagcgaaacaaggtgctcacggaatgtcaaagtgagagaatatctactactagtattacagtattcgttgttgttccgaaggggggataaaagagaaatgtgttaggatttatgggctcgcccccattaagattttcttattaag

SEQ ID NO: 83022 - DNA, 291 bp, Zea mays
  Clone ID: MRT4577_175733C.1
gcgcgaggaaccagtatcgcatcttgttttatggattgtatgcatgcgctcgctcggagtctccttaggaaggtgccgcaactccaaagcagcagaagattaagccgtcacaaaggtacatggctctatgtcaactccgtgcttccctttgactcttgcacaagggtgtgagttgcgatgcaccgacttgtcttatacgccgatgggccaacaggaataacacccccggtgtgggccttagaatccgcgcccccgatgtccacctcgttggttcactccattacccggcac

SEQ ID NO: 83023 - DNA, 474 bp, Zea mays
  Clone ID: MRT4577_175734C.1
tttggggtaccgcggccccttctcgagctttttttttttttttttttttttttttttttttttttttttttttttttttttttttaaaaccgggaaaggcgaaaaccccaaaacctattatcccccggcgcaaattattggaaaaaatccaaggcctgggacaatcctttgccagggccaggcccccaaaacatacgaaaagccaactcatcggtaaactccaaaatgacagcgcagggcaggaagggggggggggcctcgcctcctacttgggccccatgccgaaaaaaaccgggggggcgtgacggccgaagcaggtcagagaaaaatagggcccggttcgccggaaggacaagagcgaatgcatgataaccttttggtggtccaccatgcccaaggcccccccggttttgagcatcaaagactcccccaaaacctgttaagcaacaatcgctaagcctgaaggatcccgaa

SEQ ID NO: 83024 - DNA, 335 bp, Zea mays
  Clone ID: MRT4577_175735C.1
caaaagaaatagggcagggatgattaaattttggaacaccagggacatttggggggcagacaattttagagcagatttgatccgttgactcatttgccacgtttaaggttagacaagtttaacaaaattaccacattttggatccgggctgtccactatttgggggataggatgcccgggcaggcatataaaaatttagtgcaggcacggacagaacttaaccctgggatgggtaactggcaggaaaaaagcacactccgcacgcttggggggagttaaaatgctttttgagttcaaggcttgagccggggcgacttgtacatgggagcattttt

SEQ ID NO: 83025 - DNA, 1288 bp, Zea mays
  Clone ID: MRT4577_175736C.1
agatgcacccttaggtgcattttgggcaacacagcatgcacaaggtgctcaagctgcagataataggaatcctttgtttgacgaggagccaagtaaggtatcattgtcatcaaagcagaaccaaagtcgggtggacaccagcatcagtattcctggtgataggcatggtcattctggtcagacgtcacgaataagcaaaacaccgaataactccttgtccaatgatggtttcagaggtgtctctgacacggagatacataattctgtgaaaactaaagtgcaacaacctcaacccaagccaaaatgtgataaagatccattcaacatctttgttgcagattttgacactcacaatctcaacattgccgttggtaaggcatccgaacttgaacttgaagtgtccagtctgatttagcagttgaagaaacccacattagcagccgctgagatgacagccaagtatgaaaaaatatctgcaatctgccgatcacagcgtcaggagatccaagagctgaagcgcacgcttgctgagccaacgcctccctcaaacatggtcagctcaaggacccaagactctggatctcagcgaaaggaaaagatccaaggaaccttgtgggagcttggacacgggatgcttgctagcaatacctcatcagccagttctgacgtcaaaacatggcaggctttccctgatacacagactcaggcccgaccaaaggtcgatcatggaactaacggaagccaaaacataaccaagaacacaacatcaggtgcttcccccgacgcgtggggttttggtactgatagtttcagaacatcgtcagcaccagtaaaggctgctacacagatcaacagggctgcccaagggagctcatcccaaagatttaattctggtgtggccaagaaggtagagcaaccatctggatgggctggtttttaactccacatcgacatgcgttaaccatcattctggtcaaaatttgcaatctgcgttacgcaacagttgccgacggagttgtgatccttggccggcccctgggcgtcaaaatcggttatcttgagcgtgttcatcattttggttgaaccaacttagacattggttcatgggatcactttacccgttaataagtaaatgtgtattgacagtattgtgagtgtttctgtgtatggtgattatgaacatgaacggatgaatgtaatgtctaaatgccaagatataccgtctcataacaaagacttgagccttctgagctcaaaacagagagctagtcatatttgtcttttttgg

SEQ ID NO: 83026 - DNA, 371 bp, Zea mays
  Clone ID: MRT4577_175737C.1
cggaaagctcatgaccttgcgcaatatgacagaggggggggacacgcaaggcgacctgaggctgaacaccacccagcgcctgaaactcgacttcatactcatcacgacgctcatgaagcaaaggactcaggccgcgtcggtggcgtttggactcctcgaccgcatgacgaacatggagccctacagctttggatggttcacgcgctggatgcttacatgcaaggtgcaaggtatgggggttgattgagaatacccattcaggcgcagacgtgatcatgttcagaggattgtccttgagcatgtgggcaggacaagtcaaccgtccttcgtgggcagagcggctcctgcaagtacaccattatcgcgcttat

SEQ ID NO: 83027 - DNA, 1156 bp, Zea mays
  unsure (1)..(1156): unsure at all n locations
  Clone ID: MRT4577_175738C.1
gctgcaaactngaacntgagngccaatttgttggagtttttgaagaaaaccacattagaaaaggctgagatgacagccaagcatgaaaagttatctgcaatctgccgatcacagcgtcaggagatccaagagctgaagctcactcttgccgagccaacgcctccctcaaacaaagtcagctcaaggacacaagattctggatctcaggtgatttatctacatatgtctaatacagcatattcactctcctgaagtttattagcatcttgcatagtatttatactccatgcagcgaaaggaaaagatccaaggcactgtgtgggagcttgaacaagggatgcttgctattgctagcaactcctcatcagccagttctgatgccaaaacatggcaggctttccctgacacaaagactcaggcccgaccaaaggtcgatcatgcaactaatgggagccaaaacataaccaagaacacaacgtcaggtgcttcccccgatgcgtggggttttggtactgataatttcagaacaccagcaacaacattaagagctaccacacagatcaacagggcagctgcccaacggagctcatcccaaagatttaacgctggtgtggccaaggtagagcagccatctggatgggctggtttttaacttcaatcgacatgcgttaaccatcattctgatcaacatttacaatctgcgctacacaactgctgttgccgatggagttgtgatctttgacatccacagggcatcaaaattggatatttttagtgtgttcatcttctggtgtggccaagaaggtagagcaaccatctggatgggctggtttttaactccacatcgacatgcgttaaccatcattctggtcaaaatttgcaatctgcgttacgcaacagttgccgacggagttgtgatccttggccggcccctgggcgtcaaaatcggttatcttgagcgtgttcatcattttggtttaaccaacttagacattggttcatgggatcactttacccgttaataagtaaatgtatattgacagtattgtgagtgtttctgtgtattgtgtattgtgagtgtttctgtgtattgtgagtgtttctgtgtatggtgattatgaacatgaacggatgaatgtaatgtctaaatgccaag

SEQ ID NO: 83028 - DNA, 375 bp, Zea mays
  Clone ID: MRT4577_175739C.1
aagcctgaggccttttaaaaatttttaaaaacataattggattaactttattgacgcattataaaggaatagaaacatttttgaattataaaacatccttgcctttggaaggaaatgaaaacacgtgtgtgccgcaaaaacagatgccgaagtccgcgtgaacaggccgggggtactggtcatctattcattggcccggggctcaacccaaacaaaattacatacctgccctttacatcatgtgataattctttccaattttattatggagtaaatggtcttttcaattataaggagaacccccttactgctaaactctcggatgttttttgcttcacacctattgtactagaccaacctagatattttttgagc

SEQ ID NO: 83029 - DNA, 311 bp, Zea mays
  Clone ID: MRT4577_17573C.1
agcaccaaacgggtactatctaaattttcccaaaaaaaaagggtcaccgcctgaaacaaaatttttccggttcaccatccacacttggtttttgttttttttcccctacaacctacgggtttttgggggacaaattttttcccgggccgggaggtaaaccccaggggcagggggccattatgggggggggacccatttcctcgggttaaaatgaaccggggggaccttgcactgtttggggaccaaaaaggggccaccctgataaattttgtctcaacagtttagggggccctggttccaggagctttttt

SEQ ID NO: 83030 - DNA, 477 bp, Zea mays
  Clone ID: MRT4577_175740C.1
gaagccatcacccagaaagtggatgcctacaggttcggaatggtgctgctggagatcgtgtcagggaggaggaactcgcctaaggtatacaccaccaacagctgccacgtttcttatttcccgttgcaggccatcacgacgatgctccacgacggagatgtgaatagcttggtagatccacagctgcacggcgagttcaacttggaagaggctttaaggctatgcaaagttgcattttggtgtattcaggataacgagcttgaccggccaacaatgggtgaagtggttcaggctctcgagggcctacatgatgttggtatgccccatatgccaagacaacttgcaactatagcaagaaacgagttgtgatacaaattattagaagcatttcttttcttttctttttttccctttgttcccccccacgatttatagcgatgacaagaagctatatatgcaattaaacgtagcatatat

SEQ ID NO: 83031 - DNA, 396 bp, Zea mays
  Clone ID: MRT4577_175741C.1
tggcttggaacctttgggctgatttatgtgcttgtttatgtgcttgcttatgtgcttgtaagacttctccggagcctaaggaagaaaaaccccagggtgaggaaaacacggacgttgcgaggcgcgggtcggctttccgctcgggaactgctccgccgccgtctcgcggaattgccgcctagacatcgtcaatgccataacgaaatcgttagtagcaggttccgacgggcacgtcgttcacctcgccagggactcgcggaagtacgaaatctcactggaaaacgctgcacgaatccccggtgtctaagccgatgcgtacgatattaagacgcatactcccctcttcgtaattaccgctgtcctggaccgactaggattggcggacttaagaccata

SEQ ID NO: 83032 - DNA, 319 bp, Zea mays
  unsure (1)..(319): unsure at all n locations
  Clone ID: MRT4577_175742C.1
gggaaaaaaccccgcttaaatggggaccctggggaataaaaaaccgctaaaggggccgttaccccgttgggggttgggcggttcccctaacccttttgggaaaaaaggttttctggggggcagacacccacacaaacaggggggaacatgcgcttcccangcggggggttgggggggggggggaaaaaaggggggctgaaaccacccccccccaggaagggacatgccctttcccccccgggggctgggggggggggggaaaaaaggggggggtaaaacaaccccccccagtgagggacattgtaattcccaggggggg

SEQ ID NO: 83033 - DNA, 370 bp, Zea mays
  Clone ID: MRT4577_175743C.1
gcgtactcgttgtcttggtgcatttaccctatctggcggggggtatttgcgctgacacggatctgttcagggcctccaatgttcaccgaccgatatgggcgacaggtgccgtgtgctgtcagtggatgtggtcagggagtgtctcgttcgggttgtcttggacctgctgtcggtggtgcgccgtatctggcgccagtggaagtcggaggtggagtgctacggactaccaccgtttgtgatcggttggtgggttctgagctgcgatcatgagcgttttcaataaaaagaggggtcaactcggtggtatgatgacgaccactcatgaagacccgcgcgcaagcgctagattgttgtcaactattaccggctg

SEQ ID NO: 83034 - DNA, 296 bp, Zea mays
  Clone ID: MRT4577_175744C.1
ggtcaagccaggttccatcaagccccaccagaaggtggaggcccaggtttacatcctcagcaaggaggaaggtggccgccacaagccctttgtgtcccacttcatgcctgtcatgttctccctgacttgggacatggcctgtcggattatcctgcccccagagaaggagcttgccatgcccggggaggacctgaagttcaacctaatcttgcggcagcaatgatcttagagaaaggccagcgtttcaccctgcgagatggcaaccggactattggcaccggtctagtcaccaacac

SEQ ID NO: 83035 - DNA, 263 bp, Zea mays
  Clone ID: MRT4577_175745C.1
aataatgtgaatatactgtatacatgaataaaatgatggaacctagactacatgaactggggaaggccaccttgcgcttatttgaatatggttcccacatgaacaagcgactacagctcagagctatccatagcgcaccctatacatgaacaagatagtaaaccttgatcataccttaacaagatacagggccggcatcagaatatacatgacagccgccaaataagacgtgccattccgaagtgaataagaacgagatgagt

SEQ ID NO: 83036 - DNA, 2201 bp, Zea mays
  Clone ID: MRT4577_175746C.1
agttcccggtgaggaacacttgtcccgtcgtcgactccactccaggtcccagcccctcctcctacttcactacttcttcaagagtccaatctgctgccctgccggcatcctctattcctcttcccctcccactccccagctcctgccgccccgctccacgttccagaacatctgggggggtatcccactcgcatggtcaccccatagcccccccgagaaaccaccccaccgacgcaccggcagcaatggcggtgggcagcggcctggccctgtaccacgtcctcggagtggccacctgcgtggcgctgctgtacttcaccttcggcgaggtggacctccgccacatctcgctcccgtccttgcccgtctcccgcccgtcccccttccgcgcggctgccgtggcggcgcccttcgtggagcggcgcggcgcgcagctgttcctggccggccggcccttctacgtgaacgggtggaactcctactggctcatggaccaggccgtggagccgaggtcccgggaccgcgtctcccgcatgttccgcaccggcgccgagatgggcctcaccgtgtgccgctcctgggcgttcaatgacggcgcctacaacgccctacaggtctcccccggccacttcgacgagcgcgtcttcaaggcgctggaccgggtggtcgtggaggccgggcggcacggggtgcggctgatcctgagcctggcgaacaacctggaggcgtacggtggcaagacgcagtacgtgcggtgggcgtgggaagagggcgtcggcatgtccgcctccaacgattccttcttctacgatccagccatccgcgactacttcaaagtctacctcaagacgctgctgacgaggaagaaccacttgacaggggcggagtacagggacgaccccaccatcctcgcgtgggagctgatgaacgagccccgctgcaccacggacccctccggcgacacgctgcagcgctggatggaggagatgtcggcgtacgtcaagtccatcgacaagaagcatctgctcaccgtcggcaccgaggggttctacgggccgacgagcccccaggagaagctggacgtcaatccgggcacgtggaaggacaacaactacggttcggacttcatccgcaacgccaagatcccagacatcgacttcgcttccatccacctctaccctgacacctggctgctgcagcagcacgccacggtggacgagaagctcaagttcgtgaagcggtgggtggcgtcccacatcgaggacggggacaaggagctgggcaagccggtcctcgccaccgagttcgggctgtcgcaccgcgccaagggcttccaccactcccaccgcgacgtcttctacaaggccgtctacgacaccgtctaccggtcggccgcccgcggcggcgccggcgccggcgccttcgtgtggcagctcgccgtggaggacatggaggagttccacgacgacttctccgtcgtgcccagcgagcacccctcgctgcacaggctcatcaagtcgcagtcgtgcaggctggccaagcttaggcacggggtcggggaggaggccaagcggacgctgtcggtgtgcgccgccggctcgtcctaggaacgaccgacgagcggtgctgcgcaggcagaagccatttccacgcgtccccctttcagctttgttgcgcccagtccgagggttttgtctttgtttctgtcgtccgaatggagcgagtggtgatggtgaagtgtgtcagaaatagatcggagaaaaatgaaatagaaagcagcaacagcaacaagaaaaaaaaagtgtgttacctcgtgaggctttggtaatgctgctggttagattcgtttgtggccacagcaccgacgcctcacgcagtcacgcctgcccgtggaatggcagatcggcatagataagctacagtttccgtcctgtgcaactgtacgttagatgcccttgacctttgatatatagagtcatcgtcgggtggcatccaatggtaatagtcctccatatatagtgtatttctgcaatctggacattggacctatatttatatatagctgtaagcataagaggacaaaaaaacacaacatcttcgctttaatctttaatctgtaccggttgcttctacaaatttcgttttaatctgtaccagttgcttctaaaaaaaaaaaaaagggcggccgccaccgcggtgga

SEQ ID NO: 83037 - DNA, 127 bp, Zea mays
  Clone ID: MRT4577_175747C.1
cgctctcgttctatataagtctctcgcctgtctacagccttgcacggagtctatcgcgcgattggagctgaattcacacacaccctgacttgttgacggaacctcgacgtgcgacagggtccttttt

SEQ ID NO: 83038 - DNA, 250 bp, Zea mays
  Clone ID: MRT4577_175748C.1
gccacactgccgtgagaaaaacagactagtccgcgttctcctaccaaccgaaataggcgcacatggtgggcgggcgctaggattattccgatcggcgagttcacgctagtggagattgaccgatggcgcggaaccttccacgcacataaagggtctcctctacacgatcttactgttcgccggatgtcatccgaggtgtttcgccattttctgaggtgcgatgatagaaatttgcgggggtcgtttttaa

SEQ ID NO: 83039 - DNA, 1540 bp, Zea mays
  Clone ID: MRT4577_175749C.1
tttcctctccccgccaatccgcctttatttttatgttccgaccgacctcgaaaccctagcccccagaccatgcgactcggaaccgccatgccggacctcccctgcgacggcgatggcgtctgtatggtctgccgcgtcgcatccccgccggaggtcgacctcctcacctgctccacctgcaccacgccctggcactctccgtgcctctccaagcctgttctatctggggatcctgagaccgacaagcaaatccgtagagcaacaaagcgtgctcatttatctgttgctgaaaggctgcttaaagagtttggttgttctatctgccgggcggtgattaaagagccacttacaacaccatgtgctcacaacttctgcaagacttgtttgcttggtgcatatgatagccagtcctctatgagggaaagaagccgtggtggtcggactctaagggcacagaagattgtgaagacgtgcccttcctgccctactgacatctgcgacttcttagaaaatccccagatcaaccgagaaatgatggagttgattgagtccttgcaacgcaaggctgttgaagaaggcaagatggctgcaggtgatgccgaggaatctggtgatggtgactcggaggaaaatggtggtgctttggtgaagggagaagatgatagcaatttgaacgaggaaggtcaagacggtgtagacgctgatggttctgtgaagattgtggttgaaatggagggtgcaaaagatgataaaaagtcaaagatgggcgcggctgaagtggtggatgtgttagttgaagatgctgctgcgaaacagccgaagaagcgcacggctgatgaagatgctgctgcgaaacagacgaagcacaaggctgatgctgagactggtggcaagagggtgaagagcagtgctgcagtggaagaggttgatgtgtgcgtcactcctatgaaacggaccaggaagagtggtgatatgcatgatgacggcaacggcagccctgctgtgagcagcggccgcagggtgactcggagcagtgtgaatgccacgggagctgatgacagtccagcgaggaggaccagaagccgtggcagagcatgctgaaggtagtgggtgctgggcgccctcttttttgggtgtggaacctttgctgtgcgcagtgttgcagccatttcttttggtttgggggagaccgacctgctacaggtattccccatgcttctttcttccaggatgcaattcctatttaatttcaaggtagctgctgcactcgatctgcgagatgcaattttgttaactggcagccaggtgttggcttacgccatgattttggcacaacaggttcctagagagaaacaagatagctgatgttcttgcaaaaaaaaaagcaagacgggcaactaccccaaatccatgccttttctctaggggcttcattctccaacctgtaatatctagcatgtgttttgaaacttggattgttcggggcaacatgaccccccatctttgtaacatgtttatgatgtaataaatcttgaatttg

SEQ ID NO: 83040 - DNA, 1034 bp, Zea mays
  Clone ID: MRT4577_17574C.1
ctcgagccgacagaaaaaaaaaatatactaccgacttctgtaagacaagcatcgaccctaccaaacccaacagttcctcgctcgctttcgtcagctgctagttcaagtatagtagcattcactgttgacgttgaccctaactcaggtgcatccatcttctctacctgtagccggggccggccgggactcgaacggtaaagcaaaaacctgcaggcaagctagctagccacgcgcacgcagatcagcagatgaagctgttcgccttcgtgaggcgcgcgcgccggccgccgccgacggcgcccgacgacgacacagccacagccgccgccgctgcgaccacggagaagcggcgccggaggctgtcctcgtcttcgtcgtcggggtcggcgtggaagccgacgctgggcgccatctccgaggacgccgccatgacgtccgcgcccgtggcgcaggcgaaggcagcagcggcgccggccagggccaaggcgaggtcgcctcgccgtgccacccgggcggccggctacgacgacttccggcactacggccacccgacggtgctgccggccttcacgccgacggcgttcctgttctgagcggtggcgaaccgcaagcaacgcaaaacgtcggcggaccggcggcggtgtttgtacagctcatgtgtgtggtggtggtgcagctcgacgacgacggcttcctgctttgtttttgttcttccaacctttatgcacagcaaagagctgatccctagcttagtgcttctgatctatatatgatgtgtatacacaactctgctgtttcggatccccccccccccccccccccccaccaccaccaccatacttgggcagcgcttttgtgatttctctcgcagccataaatagtgctgcataatttgctccgttttagctcgcaaacgcggcgtggctactgatagggctactttcggagctacaaaacggaatctgtacccaccactactggaatctgcacccagtttcacctctttctttaattaattggggccgatccgaacc

SEQ ID NO: 83041 - DNA, 172 bp, Zea mays
  Clone ID: MRT4577_175750C.1
aaaggaggacctcgaccagggcaaacccccttcgttcggttccctggctgaatccccaaccgacggctcgttcgaaaggaaggaggctggctttaaccatggcgtttttgccgttcggcagcaccgaaccggcggccgtgccggcaacctaaggggggccccggccgttccc

SEQ ID NO: 83042 - DNA, 177 bp, Zea mays
  Clone ID: MRT4577_175751C.1
gcgccttctgtcaattagaagaacaagatagatctttgttctatcgcatttatcagtattgacacgcttgcctagtgcatagcaccagttgatgtattgacaaactgcgcgtgccatccatcagtaatggtcactaagaaactgtgaaacaattgcacactgtatctgatgctcaga

SEQ ID NO: 83043 - DNA, 2880 bp, Zea mays
  Clone ID: MRT4577_175752C.1
cccgcccgcccagcggcaaacccaaaattcccaggctccgctcgacctgcctactcccccaccatcccaaaccccactccagcctccgccgtcatcccctcctcccgccaatccgccacctgtcggacgcccgcccgtccacgaaaccctagcccccagaccatcccactcgcaaccgccatgccggacctcccctgcgacggcgatggcgtctgtatggtctgccgcgtcgcatccccgccggaggtcgacctcctcacctgctccacctgcaccacgccctggcactctccgtgcctctccaagccccccgccctcgccgacgccgccagctggagctgccccgactgctcccccgactccgctgccgtcgccgctccctcaggccccgccaacaccctggtccccgccatccgcgccatcgaggctgaccacacactctgcgaccaggagaaggcgcgccgccgcgaggcaatcctcaccggcgacgcccccgaaggagcggacgacgatgacgacgaagcgtccgacgatgcccttgagatcgtcggcaagaacttcagctgcgttttctgcatgaagctccctgaacgacccgtcacgacaccctgtggccataacttctgcttgaaatgcttccagaagtggattcaaaatcagaagaggacgtgtgggaaatgtcgggcgcagatcccggccaaaatggctgagcagccaagaatcaactccgcactagtcgaagttatcaggatggctaagatttcaaagaatcctaactctgctggctcagcagttccatatcaacggaccaggaagagtggtgatatgcatgatgacggcaacggcagcccctgctgtgagcagcggccgcagggtgactcggagcagtgtgaatgccacgggagctgatgacagtccagcgaggaggaccagaagccgtggcagagcatgctgaaggtagtgggtgctgggcgccctcttttttgggtgtggaacctttgctgtgcgcagtgttgcagccatttcttttggtttgggggagaccgacctgctacaggtattccccatgcttctttcttccaggatgcaattcctatttaatttcaaggtagctgctgcactcgatctgcgagatgcaattttgttaactggcagccaggtgttggcttacgccatgattttggcacaacaggttcctagagagaaacaagatagctgatgttcttgcaaaaaaaaaagcaagacgggcaactaccccaaatccatgccttttctctaggggcttcattctccaacctgtaatatctagccatgtgttttgaaacttggattgttcggggcaacatgaccccccatctttgtagcatttgtatgatgtgataattgttgatatatgcttcgtgtcctccaattgctggacctttgtctcactatattgtcttaaaaggtcgcacaaagagaagcggtcctcatatgctcctgaatctggtgtgaggtacgacggggtttacaggattgagaagtgctggaggaagattggtattcagggtaagttcaaggtctgcaggtatctctttgtacgctgtgacaatgaaccagctccttggaccagtgacgatcacggtgaccgtccaagaccattgccaaagataaaggagctgcaaggtgcaactgatataacagagaggaaagggcgcccttcatgggattatgatgataaagatggctggaaatgggtggtgcctccgccagtcagcaggaagcctgttctatctggggatcctgagaccgacaagcaaatccgtagagcaacaaagcgtgttcatttgtctgttgctgaaaggctgcttaaagaatttgcttgttcgatatgccgggcggtgattaaagaaccacttacgactccatgtgcccacaacttttgcaagacttgtttgcttggggcatatgatagccagtcttctataagggaaagaagccgtggtggtcggactctaagggcacagaagattgtgaagacgtgcccttcctgcccaactgacatctgtgacttcttagagaatccccagatcaaccgagaaatgatggagctgattgagactttgcaacgcaaggctgttgaagaagccaagatgacttcagatgatgctgaggaatgtggtgatggtgattcggaggaaaatgatggtgatttggtgaagggagaggatgttagtggtttgaatgagggagagcaagacagtgcagacgctgatgctaatgttgaaggttctgtgaagattgtggttgaaatcaaggaggaaggaaaagatgataaaaggtcaaagatgggcgcgactgaagtggtggatgtgttagttgatgaagatgctgtgaagcagacgaaaaagcgcaaggttgatgctgaggctggcaccaacggtggcaagaggatgaagagcagtagtaccgtggaagaggttgctgtgtgcgtcactcctgtgaaacggagcaggaagagtggtgatatggatgatgagcgcaacggcagtcctgctgtgagcagcggccgcagggtgactcgcagcagtgtggatgacactggatctgctgatagtccggcgaggaggactagaagccgtgccagagctgatgctggttgctgaaggggtagaggaagcggggaggcggcagaaccgcagaagccagccgtgtcttttttgggtggttgtacgtacatatactgggagccttgccttatattttggttgaggggtgcaagtcagatactgtttgctgtgcacacctgtttcttttggtttgggagaccgattgctgcttcctggatgctaagcgttcatccaagacccttaaaacattcaattcaaatcggacgcgggg

SEQ ID NO: 83044 - DNA, 349 bp, Zea mays
  Clone ID: MRT4577_175753C.1
gtgagctcagcacctcaagtagaggtgactcctcgatcatgtccagtcataccaccaccatctccagttgagacactagttccaccatcacagtcatcgccaccggaagaagcagttagctcaacacctcaagcaccagtgtcgtcatctccacgagctcctgtacgctcagtacctccactgaagtcctcgccgcctcgagtagtagagagcgcaccaccaccgacaatatagtcatcacttccactggctccactgagctcaccagctcatgtatgagaagacttctcgcatgacttgcacgagtcaactcagcagctccgtcatctacgtcatcagtaccagtagc

SEQ ID NO: 83045 - DNA, 583 bp, Zea mays
  Clone ID: MRT4577_175754C.1
ggggctttgggctttgcacacttaccggggaaagccaccgcgttagggccaacccaggtcttcgcagtcgggccccgttaactcttgacaaaaccctgtcaggcatttaagtccccgtaccttgctttggaggtaggatttgtcaccagcacatagacccgtgtaaggattcgtatgaaatgggttgttccattacgcacgaacgggtgcaggtaagaaagaggatacgttttagtgcgcgccgaattaaaaccaagaagaaccttgactacatccaatgggtggaataagagtaggaggacagtgacgttcccctcaggccggacgtggacgagtcctacgcgttgcaactcagtgaaaacaacgatcacgtccaagaggatgaggaagataggttcccggttgatgacgctgatcgtcacctcgaggagttagggagaggttacggtatggagggcctgtgagaccctggacctgacgacctattaacctaggaagagtttatgggtaagaggaggccctaccacgctaccccaggggatgaagaccccaacatgcccttacacaaggggtcaagaggtcc

SEQ ID NO: 83046 - DNA, 293 bp, Zea mays
  unsure (1)..(293): unsure at all n locations
  Clone ID: MRT4577_175755C.1
acggagatggagttcaccgaggcanatagtaacatgaacgacctggtggccgagtatcagcagtaccaggatgccactgccgaggatgaggagtacgaggaggaggaggaagaagaggaagagacctangtcattcatgaagtgctaganacagatatanattaacttgtatagatgttagaactanaaatgttgaagtacgtgtggtgatgcttgctaggaactagatgggtggtatcgctaataaatgcaatgaagacgtgccaaaactgcttttatttagtttatggttg

SEQ ID NO: 83047 - DNA, 446 bp, Zea mays
  Clone ID: MRT4577_175756C.1
gacacgcgtgcgtgcacgcgtgcatacactcgtgtaaccacgcgttcgaccggcttcacttcagggcgactctcgctccgtgttcgcggcgacagtcttgacatgctgacccttgaggccttgcactggctaggtttacactaacccggctccaacggggccaacaccgttgttgacgcctgtaccgagtagaccaggcagcaactgatgacgtagcggatgcgtctcgaccctccatggtaattgtcgaaaaagtgtccacagcatcaagaagctatcctgacgtaccattgcccgaatccatacacgctccgccttgggcgtccaacctctcatgatgctcctcgtatgcctctgtatcactgtcagtagtgacactgactcggcctcaagatatgaccgcacttgaagcatctactgatgatcatgctgcattacgcaagaaa

SEQ ID NO: 83048 - DNA, 394 bp, Zea mays
  unsure (1)..(394): unsure at all n locations
  Clone ID: MRT4577_175757C.1
gaccccaaactatcacagggggtatggttcgattttcaanaaccaacccacccctcccactacaatatcgtgctcactatcaaccccaacatacactcaaaagtccctccaccgctagataacacttttgaaggggtcttaaaccttgggggcgaagaagatgactgttcacaacttctttacaatactcacgatacatttcatcccctaatatctgatcccaatgattatcttgcacgcttgctcttctaatgcatcctcctgtgtcactacatccctcatctcaagtaccggttagagcttactcatcttctgcgaatatccaacaacgtagcctccttctctggtcgtgatgatcattgtcgcttgacggtaccacctatactgatatttc

SEQ ID NO: 83049 - DNA, 164 bp, Zea mays
  Clone ID: MRT4577_175758C.1
tatagctatatagaatatatattggtgatacacctgaactacaccctctacaaatcatcattccttcattataacattaaaaaaggaactcctctaactaattcagaaacaaactttttctactcttccacatatctaaattattccaataatttcaacccaaa

SEQ ID NO: 83050 - DNA, 286 bp, Zea mays
  Clone ID: MRT4577_175759C.1
gatgaaacatttacacaaacagaggtgctttaaaaaataacgggatccatatttttaaatgacaacatcacttaccttatccgttaaatctttgtgctagaggaaatactctatgcacaatccaaaacatagcacaggctgtacttaacctaatgctccaatgcgtgactataccaacaatttaaacgctatcaatttaacatcacatggaccatccaccaaaaacaagggaaccaaccatgcctccaaaaatttcaatcatcacacttagatcccaaatgtttca

SEQ ID NO: 83051 - DNA, 430 bp, Zea mays
  Clone ID: MRT4577_17575C.1
ttttttttttttttttttttttttttttttttttttttttttttttttggtaaataagaaaatgaaattaaagacaacaaagaggcacctgatgcccgcgtttcatactgacaaacttcaccaaacccaccctttgccagagcaaacagatcatgcatttttttgtgcaacggtacaaccaacaagggcatccattttgagaacaccgtccataacaaataaagaaaaaaatggtgaccggacattgggcacaatagggcacacaagggccattgcgccataaagcaacaactgggggggagacttcttaaacacaccaccttgggtgagggaaccactctcgtgacacccgagaaaagaaaacaccaatatgcgggacaagtcccaaaatatacacattcccaagatcctttggacacattgttccttg

SEQ ID NO: 83052 - DNA, 490 bp, Zea mays
  unsure (1)..(490): unsure at all n locations
  Clone ID: MRT4577_175760C.1
atcawgtatctttgattgttctttctggcctagaacatgttwwtatatatyatatatkgttgtwgakcgttcgtyakttgttatygtcttcatctctaactatatgcyaytcayytcgatactccttctctctactgctatacaggaaacgccaccagtnacggtgagctaacgttgawakctgghngcdcctgadadbgacggtgcaacgncracagctctctttcccacctgcwgcwgcmgcgaattatcttawgcatggrttcyagtgaatttttgtaaaattagtgtccagtatattattttataantctgttttcatatttttmaaaggtcattagggtctcaagtkactaactaatccacaaaagcrcacccgakgkaaggkaagakagtaggtgtdatcgtgtaagtkcaagakatgatgagcaagabgaaggcknctgtkcgagcaagatcctggcacctccctttcctcttcctgctgctc

SEQ ID NO: 83053 - DNA, 380 bp, Zea mays
  Clone ID: MRT4577_175761C.1
atcgcaaagtgcatatcagtatgacttgtatatggaaagaacgtgtaaggtcgataagtcaagacaacacatttatatataaaaataataataaaccacactatttttacaaccgcaagtaactcaagactcgctgaaagccccagcactcattatttaccactaacaacaacctaacactatgaacatggtactccaggcctcatccggagccgagccgtctccaatcgtgcacagacagtcggtgattacacgttgctacttgaggcctgcatcatgccgtcacggatctgctcgctgatgtccttcacgtggcctggtccgtggggtatgaagatcgtggtgtttttggagcccgtcccgagctccttgatggtgtc

SEQ ID NO: 83054 - DNA, 324 bp, Zea mays
  Clone ID: MRT4577_175762C.1
catggttataccacctctgggcccggtaccgactttggtgatgcttctcgatatcgcgcctctgttccccaccgacgtgccgacgggaacgacactggcgctgtaccgtcgcctaccgcactgaggcgaggccggggcatcgaaccaccaccacccgtgagtaccaggcacggccgcgctgtacccgcactcctacggagggtacgccttcacggagtccctcggtacgccgccgcaaccgatccccgtgctgctcgacaccggaagccacctgacgtgggtgccatgcaccttgagctacgagtgccgcaactgcttcttccc

SEQ ID NO: 83055 - DNA, 179 bp, Zea mays
  Clone ID: MRT4577_175763C.1
acttccttccgggtgggggagccaaaggagtccacctccgcccttattactaaggttaataaggggatccccctatagacataaggcaaaggataacgtgcggagggaatctagactacacagtcgcgatagcgggcttttgttaaaccttggtcgctctcctcattaagggatgattt

SEQ ID NO: 83056 - DNA, 238 bp, Zea mays
  Clone ID: MRT4577_175764C.1
tgttgttttctatgtttgttacgagggactcaaagagagtccttatttaagaaaagcacagaattcgcgagattacaactaccaagaaatatgccatatgacacacttcttggacaacacaaagttggatttgccatgcactactacgatggccacatcctagatgttaatttttggcatgaactttgccaatttgagagacatggtctccagaccataaccagagataatcgataaa

SEQ ID NO: 83057 - DNA, 317 bp, Zea mays
  Clone ID: MRT4577_175765C.1
ccttaaagcaaacgctcccaaaatttccattagcaaatatttaatggacttttcaatcgggattctttaaaggggaatggggtaattatcgcaccctttttcagtagaatgcaaaaccaaaagccggcgttagaaacacggcatttcctattccattagggatggcataaagcaacttgggcgaagcagatacccagcccatcacattggccgctttcaaccttcacatgacaacattggatccgccttcaaaccctatgcctttttgggggggttggggggctttttgggcgaattgggcttcttggttccccccc

SEQ ID NO: 83058 - DNA, 216 bp, Zea mays
  Clone ID: MRT4577_175766C.1
aacggagacccctctattcttgagaagacgtaatctaaattctctagaaggttcatggattactagttagtgcatcctcatgcatatcagggtgtgctatatcactttatcactagtcctaggtatattttgattgagtgttggggattggtatgttttagtgtcgtattcgctagtggagttgatatgcatctggctaatgactcccttagtggg

SEQ ID NO: 83059 - DNA, 297 bp, Zea mays
  Clone ID: MRT4577_175767C.1
ggccaccaaaaaatcccccctccaacttttggggggcctaacggcacattcaccttaaccattacacgtagggttacatacaggcccccattttttggggcccccagggtttttcccctttactgaaacatgtaattggagatggcaaaacataccccctcaaactttccgtggggaaaaaatttaatgattgggttgggttcttgacaacaacgggggacacgtgcactgacaggctaaaagtttatgtttgggggggggccttaaaagaaccaggtccctttttttccttccagg

SEQ ID NO: 83060 - DNA, 1150 bp, Zea mays
  Clone ID: MRT4577_175768C.1
gccggccgggtttccgaaagagtcaaccgaacagacacgaactctggaagctcagctgctcagctcggagtgaggtcgctgcgcatctatctaccacacgatgccgccgcctctccgctgtgtcctgctcgccttcgtcgtcgtcctctccggcttcccccgtctcgcccaccccttcacggctctcgagtctgaccagatcgcccgcttccaggaatacctccgcatccgaactgcgcacccatcccccgactacgccggcgccagcgccttcctcctacactacgccgcttcgctcggcctccacaccaccacgctccacttcaccccgtgcaagaccaagcccctgctcgtcctcacctggcgaggctccgatccctccctcccctccgtgctcctcaactcccacattcgcgccggccccgggaggggcgataggaaacgggtggcatggactccgtccccgcggagcccgagcactgggcgcaccctccattcgccgcgcaccgcgacccgaccgcgggccgcatctacgcgcgcggcgcacaggacgacaagtgcctccccgtccagtacctcgaggcgatccggggcctgcaggccgcggggttcgctcccgcccgcaccatccacatctcgcttgtccccgacgaggagatcggcggcgcggatgggttcgacaagttcgcccgatcggaggagttccgcgccctcaacatcgggtttatgctcgacgaggggcaggcgtcgccgacggacgtgttcagagtcttttacgcggacaggctggtgtggaggctcgtcgtgaaggcggcgggggcgccagggcatgggtcgaggatgttcgacggcgccgccgttgacaatttgatggattgcgtggagaccatcgctgggttcagggatgcgcagttcaggatggtgaagtccggggagaagggtcctggggaagtggtctcagtcaaccctgtgtacatgaaggccggcataccaagccccacgggtttcgtgatgaacatgcaaccttcagaagcggaggtcggctttgacctccgccttcctccaaccgaagacatcgagcagatcaagcgggagggtccgaagaggaatgggcaccatctcacaaaaacctgacctacgagctggtgca

SEQ ID NO: 83061 - DNA, 1916 bp, Zea mays
  Clone ID: MRT4577_175769C.1
ccgcgcgggccttcgctccctcgagggcgtccgggcgacaagctaaatacttcgctagacagtgacacacaggagatctgcaagtcaaccgaacagacattcgctggaagctctgctcggagtgaggtcgctgcgcatctaccacacgatgccgccgcctctccgctgtctccttctcgccttcgtcgtcgtcctctccggcttcccccgtctcgcccaccccttcacggctctcgagtctgaccagatcgcccgcttccaggaatacctccgcatccgaactgcgcacccatcccccgactacgccggcgccagcgccttcctcctacactacgccgcttcgctcggtctccacaccaccacgctccacttcaccccgtgcaagaccaagcccctgctcctcctcacctggcgaggctccgatccctccctcccctccgtgctcctcaactcccacatggactccgtccccgcggagcccgagcactgggcgcaccctccattcgccgcgcaccgcgacccgaccacgggccgcatctacgcgcgcggcgcacaggacgacaagtgcctccccgtccagtacctcgaggcgatccggggcctgcaggccgcggggttcgctcccgcccgcaccatccacatctcgcttgtccccgacgaggagatcggcggcgcggatgggttcgacaagttcgcccgatcggaggagttccgcgccctcaacatcgggtttatgctcgacgaggggcaggcgtcgccgacggacgtgttcagagtcttttacgcggacaggctggtgtggaggctcgtcgtgaaggcggcgggggcgccagggcatgggtcgaggatgttcgacggcgccgccgttgacaatttgatggattgcgtggagaccatcgctgggttcagggatgcgcagttcaggatggtgaagtccggggagaagggtcctggggaagtggtctcagtcaaccctgtgtacatgaaggccggcataccaagccccacgggtttcgtgatgaacatgcaaccttcagaagcggaggtcggctttgacctccgccttcctccaaccgaagacatcgagcagatcaagcggagggtcgaagaggaatgggcaccatctcacaaaaacctgacctacgagctggtgcagaaaggtccggcgacggatgtggccggacgtcccgtatccacagcgacgaacgcgtcgaacccgtggtggctgacgttcgagaaggccatcgcctccgcgggtggggagctgtctaagcctgagatcctgtcttcgaccacggactcacgctttgcgaggcagctgggcatccctgccctcgggttttctccgatgaccaggacgcccatactgctacatgaccataacgagtttctggaagacagagtgttcctgaggggcatccaagtgtacgaacatgtcatcagagcactaagctcgttccaaggctgattcgtaaaaacaaaaagaagaagaaggaaaagtgttgttgcgtggagtgtaacatagctggatccccaactctcatctgctgaatgaaggtgagagagttgcggcctagccagtacaggtttgtaataattggtccagtcacaaacacgccaaaggaaacattccgaaactattgggatctgtgaaactattgagttgaagcgcttcctctcgccccccgtgtttcgggggcggaggtggatggatggctgtcgtttgttgtgggaggaacactagcagctgggtcgtgtgatgagctcatgttcgggcttattgcttaatatatatctccaatcaatgcgtattcccagacgttcaactgtgctccaagcccagcgctggggttttttgatcaggccaaaaagattgggcggaaaccctttaaagtgcaagggcggcttaggccttt

SEQ ID NO: 83062 - DNA, 286 bp, Zea mays
  Clone ID: MRT4577_17576C.1
gcgcagtaccaagtcgtgaattgcaatgaagaatgagtaaagtgcagtgctgataagaatacatgttactgtatcttgagacttcactagtgatgaactagatacgactgcgttggagactgacgttacttctccgttgggatggccactgggacatctttctcgacgaggatctcgacactgcacgcatgccatgtgacgcggaccttgcagctgccagcaagtgaggatcatgccatctatgtgcagtgatggcaacgcttctgaaggtgctatgctcacatat

SEQ ID NO: 83063 - DNA, 285 bp, Zea mays
  Clone ID: MRT4577_175770C.1
cagcattgcgattctgcatacaactctgacttctttacgtatgggaaacaatcttacttccagtgctaatgcgtaattcatgcaaattgcatctaactacccatgataaagacctaaacttatatgctcatgcaactaattggttaaacaaccactgtttatatcacaagattcataaccaagatcactactttatgaagaatgaatcacaaagcagcgctccaaaaccacgtatgataaacggaactttcactgatccagaagttcatactgcacgtataaaat

SEQ ID NO: 83064 - DNA, 289 bp, Zea mays
  Clone ID: MRT4577_175771C.1
actttttctacctactcaagctgctcagggggcgggaaacgggctacgcgttggatgagttcctgaaactcaccaagaccttctatccggtgatgtacaacatcaagcatttgatgaagttctaaatttttagcctctattttttgctccacaaaccttgttttcttcttaagattcatccttttctgatccaccaccacgctcgagctaatttgttcactcccctggagtagcagtatacacccttagcaattttttttaattcccaccacgcagttgtcacccccca

SEQ ID NO: 83065 - DNA, 278 bp, Zea mays
  Clone ID: MRT4577_175772C.1
catcaccataccagcagaagacaaagcagaagtaatattgtccatagccaatcctgaagatctgatcaccagatggctgaggctgctttccatcctgcttatgagtcccattgccttgtgctacacatgctgtgacctccagtcttaatcctccttccttgcaccacctaaaaagttgtctctcatcctcatcctcaagagttctcgagccactcaacattacgcaaagtctcattgaatggctaatctttccatggctcaggattcatctgaatggg

SEQ ID NO: 83066 - DNA, 3731 bp, Zea mays
  Clone ID: MRT4577_175773C.1
cgcggggggggcgagcgacaatctttctttggggaagaagctgcgggacatggaactgtaggaggaggcgtggaacaggaagagcaaggagctgaacgagcagatgaggcaggctgttatggaggctgagtggctgtagcataatgaaattgaaaaccaggaaggacatagaaaagactgaagaacaagaagatgcctgctggcccccagtcccccgggctccggcctccgcggccgcgcacccacgcgaccgcccccccccccggggaccacggactgggcaaccgcctccgccctcccttcccctgcgccacgacgactggccgaaccctcccgcgcgtcgtcgcctctccgccggacgccaccgtcaatgtactctgcggtgctgcatcggggcatgaattgtacctcagttcagccagtggtggccgtggagcggacagtcttttaccgtgaaagagctgctggcatgtactcagctttcccatacgcgtttggccaggttgtcattgagctcccatacgcactggctcaggatatcctttacgctgtcatagtgtactccatgatcgggttcgagtggacggctgctaagttcttctggtacctcttctttgggtacttcacgctgctctacttcacattctacggcatgatggccgtggggctgacacctaactaccacatcgccgcgatcgtctcctcggcattctacgccatctggaacctcttctccgggttcatcatcccccgaccgaaagtgccgatctggtggaggtggtactgctggattgccccgtggcgtggacgctgtacggctggtggtgtcacagttcggtgacgtcatgcgcgggcccacctgagcaaagacaggcgaccatttcctttccttcacctcactggctcgctcgctcgcctttctctccgtgcggcgacgacggactgggcaaccgccaccgccctccctttccctgcgctagcgacgactgggcgaacgctgcctcgcttcgtcacctcttcgccggcggcgacgatcacccaccaggttgatgccgattttttggttgacaatttgaagattactaacttctatgatcctgagggcaagaagtaatgatccgcccaggctcaaaggactcgcaaaattatgataacaataatcaaagagtccatcctcaaccaatcgacgagaacatgaatcagaacggggactcaatggacactgtgatcgggaggatattcaacaacatatcctctttaaaatccgcctacattcagctgcaggaagcccacaccccatatgaccctgacaagatccaggaagctgataaacttgtcatagaggagcttacgaggctttcagaactcaagcacgcttacagagaaaaacatcctaagccaatagctgcatcccctcaagattcacgcttgctttctgaaatacaagagcagcagaacttgttgaagacctacgaggtcatggtaaagaagttccagtcccagatccagaccagagacactgagataacccatctacagcagcaaattgatgaagctaaacttcggaaatcaaagctagagaagaaactgaaacagaggggcctacttaacagggagtcggaggaatctgacgaagaagagaactacttttccattgaattgacaccaagtttgtttacatctgccgtcgataatgcctaccagtcgatacatgacttctcgaagcctttgatcaacatgatgaaggctgcaggttgggatcttgatggggctgctagtgcgatcgagcctggtgtggtttacacaagaagggctcacaagaagtttgcttttgaatcctatatttgccaaagaatgttcagtgggttccaagaagagagcttttctatcaaggattctaacatcagtgtttccaatgaggctttcttccaccaattcctcgcggtgcgagccatggatcctctggatgtcctgagccagaaccctgattcagtattcggaaagttctgcagaagcaagtacctatcgcttgtgcatcaaaaaatggaaggttctttcttcggcaacgtggatcagaggaactacgtcatgagcggcggccatccaaggacacctttctaccaggcattcctaaagctagcaaagtccatatggttgctgcacaggttggcgcactccttcgatccaaaggcaaaggtgtttcaagtgaaaaagggaagtgaattttcggatatccacatggagagcgtcgtgaaggacatcatcctagaagatgtcgcggagaggccgaaagtcggcctgatggtgacgcctggtttcctgatcgggaccagtatcatacagtcccgtgtgtacctttcaggtgccaagtgtgctgactgactgactgaagatgcagcagctacacaaggagctagatagagggtcatttgcttcttggaatcttgggagagctaccagctgcataagtttaaggtggactgtgctgtcctgtatgtaatgcgtgagagacctgttgtttatctgccgtgctgggttggacgccttttgccttttgtggagttttccatgtgccatgcgattctgtctaatggtacgatatgtttctgttcccctatgctgggtttccgtgtgctatactgctatgtaattctgcccaaatgtttgtacatgttatcagtgtgattggagagcctatgtgatgctcgtataggatgcacttttcatctgaaatgtgtttgcccaatcaatcagatgattctgttggtgttccatgtcaagtgttgtagcttagtttctttgaacaaggtgtgtggaggattttgatggacaatgataaaactgatgacaatttagttgcttcatatggattccagcataaacatttctcaaaaagagatgctttaaccatttgccgatgaggaattcgacgaggacgacgacgacctcgatgacgaagccgccgcggacgacggcgaaccctccgcgtccccatccgaggcggctcgcctcgaggccgtgctccggcggctcaccgcggacgaggtctggatccgggtgcactagatattgcggctgcaaatgaagatgaacaaacgactgctacttcgccacctagaagtgtcaaatgggtagttaagaaaattacccctcgaaactgaatcgtgcttatcacggacagtagatctgaaaatgtgtaataaactgtgatgttcccagtgaatgtgaaccgtgcttatcacagctggctgggtgggtggccgccgtggtggtggcgttcgccgtgctctttgcgaccctgtttggctttgccatcatgaagcttaacttccagaagagataatgacgataggagttgggaaatcacctcctaggagacaaagggatttttgcattcgttgggtcgtgcaagtagatttgactgtgcatattgggagagtacgccataatatatggattcgttgattagttaaagttatagaagttattgtgtgctcctgttttttttttttgataggatattgtgctcctgtttttttttgataggatatattgtgctccttttctaggagggtgatgccgtagtactttgtaaagaatatttcacacatccagtaaaattccttgtcgccccttgcaaaagatcaaccaatcatgtgaaaaaaaggcttaaagccatattgtgctccttttctgggagggtgatgccgtagtactttgtaaagaatatt

SEQ ID NO: 83067 - DNA, 582 bp, Zea mays
  Clone ID: MRT4577_175774C.1
atggcgtcgtttggtctgacaaatgtgccagctttcttcatgtacctgatgaacaacatgttcatggattctctagacaagtttatggtggtattcattgatgatattctcatatattctcagagtgaggaagagcatgtggatcacttgagtaagtgtgagttctggattcatgaagtcctgttcttgggtcacatcataaacagggaaggattagccatggatccaaaaaaggttcatgagagaaactatcccacacatgacatggaattagtagtagaggttcatgcattgaaaacatggaggcactacctgtatgggcagaagtatgatgtttacacagaccacaagaatctaaagtatatattcacccagtcagagctgaatatgagacaacgaagatggatagagttgattaaatactatgaattggagatacatttccatccaggcaaagcgaatgtggttgcagatgcactaagcagaaaaattcaagtcaatatgatggttggtcactcgatgtcgtatgagttagctaaggagtttgacagactaagtctcaagtttttgaaaagcacctag

SEQ ID NO: 83068 - DNA, 444 bp, Zea mays
  Clone ID: MRT4577_175775C.1
aaaaggggccaggaaaaaaatttgaaacgggcaatggccatgactgcaactttggttgagccgaaacccacatggggagacaagatttgttaacaaaggttttttgtttaaacaaaaaaaacctggggactggtatacagcattttattggaaaactaacaaaaaaccccttttgtttttttgggcgggaaaaacccgcccggggggaccttttcagtttaattgacccacccatcagcaattttcgggtttttcaatcccaccgggatgcccgaacgaatgtaaaacccctcggaggttttacggggttcatctcccccttgggagggggggaaaaccacttttttccctatcctcccatttttggctaagaaccccctttgaacacgtggtttccctccaaacccaaaaggaactttttcttttggaaggaatttttctttt

SEQ ID NO: 83069 - DNA, 582 bp, Zea mays
  Clone ID: MRT4577_175776C.1
ctcccggtcccggctcccgctatctttggttctgaagaaatatttggaacttccaaagtttacttgtttgctaatttaggttgtgagtattttttttgatacatctattcaacccctctctagacattgttaattctttcgccactggtagcttactaattaagaataccctttttattttatttttattttgtctatatataaatcaagcaaagaaaggaatatactcaagaaaaaaaaaaaaaaaaaaaaaaaaaaaaaaaaaaaaaaaaaaaaaaaaaaaaaaaaaaaaaaaaaaaaaaaaaaaaaaaaaaaaaaaaaaaaaaaaaaaaaaaaaaaaaaaaaaaaaaaaaaaaaaaagggggggcccttttaaagggtccaaattttccttccccgggcttggcaacgaaaaactttttttttggggccccaaaaataaattacctggcccggtttttaaaaccgctgggaacgtgaaaaacccttgggttccccaaattaaatcgctttgaaaaaaatccccttttcccaattggggtaaatacaaaaaagccccaacccattgccctttccaaaaat

SEQ ID NO: 83070 - DNA, 396 bp, Zea mays
  Clone ID: MRT4577_175777C.1
tgggaattccttacctgtagcagaagtatcatgattcatgaatgacaccatgacaaggactttgagagctggaggttctgttttatactttcgttggctaatgttggatttttatagaaagttgtgatcgtaataattcaacataactacataagaatgtgatgttggcacattcattgggaaaacttatgagagtcagtggtgtccgcaagtgtttaggatagagtttgttcaggagttgtatcagttcagccatggtttgttcaattgagtcaagggtccagagtttgttctatgcttttagttggagaaaaaaagtgtttgttatttggttccacctacttaacatgagtggtgttccaattgtattaagaagaaataaagttgatttcatct

SEQ ID NO: 83071 - DNA, 722 bp, Zea mays
  unsure (1)..(722): unsure at all n locations
  Clone ID: MRT4577_175778C.1
acgcctgcaggttctggtccggaattcccgggtcgacccacgcgtccgcccacgcgttcgcaccgccaggacaccgagatttctgctgctgttctgcagatcgttccgcagccttcgaggaccccagtcccgagcatacgccgcccttgtgcccggtgtgtcccaggtagacaacgggtcggatttcctggggaagaagccccatcgaaagcatcccggcatcctgcatcttccgcacgtccagctgccgcaagcactggctgacgccgcacagttaatgctttttgagagacccatgcgcagtatagagaagcaggtgcaagcactcaccaactatctctggagccgacatttacctgtagagccggaggagttgcaaagacgggctgcgtatcttgagaaaaaattcctggaaaaacaagactcagctcccacagaggagaaacttcgtgaggcagtactgcatgccctgcgcaaaactacctaccattggcaggaactcagctacagtgaagagctgagtctgatctatatggcagccagattggacggtggttttgctgcagttttcagggcattccatgagatccaggctcgaatcccagagtttcggccacagacgttgatggactntgggtctggcactggttctgtcgcctgggctgcccacagtacttggggccagagcctncgtgaatacgtgtgtgtggacagttcagctg

SEQ ID NO: 83072 - DNA, 495 bp, Zea mays
  Clone ID: MRT4577_175779C.1
gtccgaaatttatatatatcatctcagaagatacatgatattttatgaatctttacaagttcaatgctaaaaacaagaatataaacttgtatagtcgattttataatctatttatttacaatcaaagaaaaaagacccaaagctggtttccgaataaagtatatgttttcatccctaatgccttgtagcttcccaggtccagcagagttagcagaccaacacccccaagggaatctggtaccggttcaatatgataatatttctaaatagtacaacatttattattttaaaaaagtatgatatttgatatctttaaataactcatgataaacgactcgatagtgaaacttaaggcgggggggaagcaaaaggaggagtttagcttagaagatgacttaattagcttgtgctaaatgttatgcttgtatttaaaaacatggatggagaatatatggacatgttagtgagattgggacttgtttgtttcggcttttt

SEQ ID NO: 83073 - DNA, 296 bp, Zea mays
  Clone ID: MRT4577_17577C.1
agcatcatcaccatccgccggcggcacggccacggcgggagcagcccgcggtggtgtccggcatcgggtgccgcagcggccggttctcgccgtccgcggcgaggcgcgccgccgagagcgccgtgcggcggacgcactccgccagggaggccgacatggcgctgccgtcgtcgaagcggtcgctctccctcaacgccgctgctgtcaacggcaacgggggaggcagcgcgctctccaggcgggaccctggcgagcggtccggccggcgggcggactccccgacgggcaggcgcgcg

SEQ ID NO: 83074 - DNA, 398 bp, Zea mays
  Clone ID: MRT4577_175780C.1
tttaacggccaatggttttcctttaaaatgatcgccaactgtaccatatgatccctcgctctaaaactgacccattactgggcatgcaaacacaggggcgcctataggctgaccctggctttaaagccaactagcccaaatagtttaaaaggaatgaagattgaactgaatgcggccctattaaccagggttaaattcattgataaagcccttgggagccatttcgtaccaactgtttcacgcatcagaataccccacctggttgcataaaactactcccatgctgggctcaaaaggatgactacccaccttattgatgcatatccttatcttagaaatcatggagcacgtttagacacttttcttttacctgaatagtttactacccccaatagagt

SEQ ID NO: 83075 - DNA, 156 bp, Zea mays
  Clone ID: MRT4577_175781C.1
acgcccacgcgtccggaaggccctgcccatgcctttgctacaggctctcttgttgcttaactgggcagggtgccattgatgctgtgagagatatgagcatctgacaacctgtgtgctatcgctgtgtcatattgatactcagactccacttagact

SEQ ID NO: 83076 - DNA, 533 bp, Zea mays
  Clone ID: MRT4577_175782C.1
ggcccttcgccggcctcgacgtggagtggcgccccggtcgtcttccggggcgctctcccgtcccagtgctgcacatctgcgactaccaccgctgtgtcgtattgcacatcgtcaaaggcgactacattgcccacgctctgctcagtgtactcattcgactcgcctctacaccttctggggggacgggataagcggctgacgtcgcatacttgctggccgcctacgggttgtgggcggctagctgcatggacctgctcgttctcgctggcgacacgctgaaggtggccgagctgttccacgcactgcttaaaactctgtggtggcaacatatgactgtggacatgctgaaaacgcaccatatgcgacctgcccccgggcacacgcccacgctgctcaaaataccatctctaagaacaggtgctcctacactttcgcctagttttatgtccgccggtgattctacgaatgcgactactacgtgctaacaatacggtatactgtctggcttaccatatgccatgcgtgtcacgccg

SEQ ID NO: 83077 - DNA, 773 bp, Zea mays
  Clone ID: MRT4577_175783C.1
tgggaccctcgaggccggccgggccgggcatcgctgcctcgtaccgccgccgtgccgctgcgtttccgtgccgcagggcggtcgcctgtccagtgcatcggcgacggcgtctacgctgctaacagcacctaccaagccaacctccgccgcgtcgccgccctcctcctagccgagctccttatgccggcgccgcgacgtcaacggcacccacgttggctacccctgcgccgactgcatcgccggggccttcctcgaaatggagagagcgtgcccgtaccgcagggaggccttctatatcgatcgcaactgcagtgtcgaacttgccgagattcgcatcttcgggactggcggcatcttccaacggaacatactgatacaagccatggcttcgggattggtacttcaagcaattggatttgcttggcttttcttcttgctatttcaagaatggcgcagccggaaaagaggcaacttgatgcattccacccctcttttatctggagatgagaatgttggcagcatgtctaccaaggcgtaacggcaaatgttgcgtgaagggatcggattttctctcatcaagggaataaagattaaagaatgaatacttgctctccaaattgcaggccttcaattcggtcgtttaatttcaagccagctgaaatgttcattgttttcacacattcttatgttttcattggcatttcattcccacttgtcctgttcctagcttgaaatgtacatgtgaatacaaaaaataaccaaacttgccaaaa

SEQ ID NO: 83078 - DNA, 1219 bp, Zea mays
  Clone ID: MRT4577_175784C.1
cctcgagtccggccgggcaggagggactccagggtctagctgtagttggaagttggaacagctcggtgccggtgggcattttcaaccatcgtttgctttgcttcacagttcacactcgccctgttctagggttattatcaacccagttcatccatcaccgaccggcgtcaccacttgccagtcacctcaccaccatgaagaatccttggctcctattcctcgcccccctcctcttagccgtgccgtcatcgctgcctcgtaccgccgccgtgccgctgcgtttccgtgccgcagggcggtcgcctgtccagtgcatcggcgacggcgtctacgctgctaacagcacctaccaagccaacctccgccgcgtcgccgccctcctcctagccgaggtgtccgcctcccccggccagttttactacacgacccatgccgtcgggtactggcctaaccggttgctcgccagctccttatgccggcgccgcgacgtcaacggcacccacgttggctacccctgcgccgactgcatcgccggggccttcctcgaaatggagagagcgtgcccgtaccgcagggaggccttctatatcgatcgcaactgcagtgtcgaacttgccgagattcgcatcttcgggactggcggcatcttccaacggaacatactgatacaagccatggcttcgggattggtacttcaagcaattggatttgcttggcttttcttcttgctatttcaagaatggcgcagccggaaaagaggcaacttgatgcattccacccctcttttatctggagatgagaatgttggcagcatgtctaccaaggcgtaacggcaaatgttgcgtgaagggatcggattttctctcatcaagggaataaagattaaagaatgaatacttgctctccaaattgcaggccttcaattcggtcgtttaatttcaagccagctgaaatgttcattgttttcacacattcttatgttttcattggaatttcattcccacttgtcctgttcctagcttgaaatgtacatgtgaatacaaaaaaaaaaacaaaacttaaaaaaaaaaaaaaaaaaaaaaaaaaaaaaaaaaaaaaaaaaaaaactcgaggccccgattgggcagtcggccctgaaacaccagtgtccccttttataatgtatatacgtaagaacgtaccctcctaaaatgactccttgttttcaattgcaaggtcc

SEQ ID NO: 83079 - DNA, 248 bp, Zea mays
  unsure (1)..(248): unsure at all n locations
  Clone ID: MRT4577_175785C.1
cttgtttctagacacacagacaaccggagcgggaatcggtactaccaaccgaggacaatgtcacactaacagcgcctggacccatgccaaagaagagtaaatacaataccaatcattacgaggttcttggtgtgactaacaccccatgtcangattagcttaaaaaagtatacacaaaagctgacattaaaaaccatcctgataaggatggttaccctataaagcttaaagagctgtcttaagcttat

SEQ ID NO: 83080 - DNA, 489 bp, Zea mays
  Clone ID: MRT4577_175786C.1
cattgggtacctcgaggccggccgggatcacattccaggctgccgatcttggatgagtgcaacctgcgcctgttcgtggtatctatccacctcatactttttattaacatcgtaccgatctgtagcaacatcacctctctaaaaccatggtacgtttatgtatcaccatgcctgttcatgcttgaactttgcattctccacgttgtgtccacgaccaatgtacgacatgttcatcatgatgcaccaagactctaccctagatgtagctgtattgctgttgcctcatttattcagatggacttacagatcacaatatatataaacgtccctcgagcttcacttatatccctatatcctccttaatctgcacccatcgcataaagatgcgcataagtactaccagtgtgaaaatgatatccagtcactaatccactgcagctcactacgacggaaacatatactcgaaatccctgcgcagcttcacgattc

SEQ ID NO: 83081 - DNA, 468 bp, Zea mays
  Clone ID: MRT4577_175787C.1
aagggaagcggcaaaagctttgccccccaaattttttttttcgggggaaaaataatttaaaaacttcgcttcaaacttggggcaaaaagaaaaaaaaagcccaaagaaaacactttaacccccccccccaagacaaaaattacatctcaacttaacttgcaaaacagggtcctcaacttatcctgcttgttggcccaaaacaatttcccccttcagttggggcgatctgtcaacctgaaactccctgtttttgattgggaaatgaacccctgaaggaaaaggttcctgcaaaggctccaggtagggggagggtccccatctttccacttataaaatacaaaaggggtggccttttcccttaattttttgacacattaaaaaagtttggctgggtccccatgacccaacaaaatgcttaccactcattagtcaatcaaaaaaaaaagaaaccccccctatgtaccccac

SEQ ID NO: 83082 - DNA, 405 bp, Zea mays
  Clone ID: MRT4577_175788C.1
tacccactcgtcctactagtactagatctgcacccctcacatgcttcactacttatgatttcctccaccaaccacgccaccatgcatcttattctatcaactcattcttattatcaacattacaataataattttcttcctatcaacaacattcacatctactacctacctttctgcttatataattacattacctctactatctacttctctattaaatctacctcctattttcttcaataattatctcttttctttactcttctcttatattctatctatcacattatattatattattctcattttattttataattcttaatcatctttctaattctacttttctttctattaattttatcaaactatattattaattaaatttatttaaaaaaataaaat

SEQ ID NO: 83083 - DNA, 627 bp, Zea mays
  Clone ID: MRT4577_175789C.1
aattcggcacgaggctggcctgcctgcctgctttcctgtactcttatcagtcgcagaagcggcgcactgcgctttgcggtggcggggagatgccagagaggaagaacgagctagccgtctagcgtgagtagcgacttctacgatgctatgcctttcacctggtggtggtgctggggaggaagccaggtgggcagagcgcgtgctgatggtcgactgcacaacagctacgagctacacggcagccgtcgggaccgagagcccctgccgaacccgccgcggcagcggagcgcacacgcgtgcacagagttgcggcagaaaggcctgcacttgcacccaggaggagactgaccacggggcgcgcatcgagtgcgccctacacgaatgacgggactgctacgaacacgagcgccgggagggcactgcataactggccccagtgcaagtactacgatacaagcgcctaacagggctgccatacgcgagacctggagaccatgcatgaggagcggcgtccatgacctgcacaacgagttcaacaggcacggccatgactcgcagactgaggccgagtccatgctgctacggccacatgagctacgggcgtggtagagaccctaatggcgcgcc

SEQ ID NO: 83084 - DNA, 118 bp, Zea mays
  Clone ID: MRT4577_17578C.1
ccttcgaatccactggccgccaaggtggtcccgcgaagccggaatgggggcttctccttgtccttgggcaacggattgccgccaaaaacaatggtgcccccaacgaaggccaaccact

SEQ ID NO: 83085 - DNA, 325 bp, Zea mays
  Clone ID: MRT4577_175790C.1
acggcccgcggcgctagacgagctgatcaacacgcgccacgtccgttttaggttttgggagcgctgatgggcaactggggcctcggcaaccctacgccctccctgaccgccatcatccataaccactacaagatgcgcgcgaacaacctgagctacaacctggacggcatgggcgtgatcacagacgtcatcgacatcgatctggcccgctagatgctccaggccagcatcgcggacctcgccgtcgtggtcagcacggaggtcgtcttcttcacgaggtaccaccagaagcggggctccatgctcatccccaacgccttcatcc

SEQ ID NO: 83086 - DNA, 395 bp, Zea mays
  Clone ID: MRT4577_175791C.1
aggactaatatccatgactaatatagtagtaagctagacagagcaccacattgccatagtctatacataagtgggtagatatcagggaattacatgatagatccaaaccttcatggacttctggaagcctagatgatctttatacagggcaacatactcgcaaatcatcatagcattctttcgcagcaccaaggctataatgggatacaaatccacagtactatgcgactccatgatgcgtgatcataaaactcgcgatggcagtgcgcctagtgcgccctatccttgatctgatcgaggctgattttactcacatctgaggcctggagttcaacctgaatgctattgaggccactctaggatttatggatcgagcttgcgtaaagtatattgct

SEQ ID NO: 83087 - DNA, 711 bp, Zea mays
  unsure (1)..(711): unsure at all n locations
  Clone ID: MRT4577_175792C.1
gnactcaatccctcacccctacactaccttccgggttttaggatcagtagcaccatcacccgaggatggtgaagttcctctcgtccggccaggacatgatcctcctgtacggccggatcgccttgacgatggcgacgatcatatgggtgttctaggagggtacccgacaccgctcctactctcactgccttgtctccggcctcgcctcgtaccccaaaaatatgatccgcacggactcgactaagaacatggctaagaagtcgcgcgtctagtgcttcatcacgttcagctacttcactcttctcatgtcctcccggtacgctatcgacaacaacttcattgacgtgaccaccgtgcgggtcgacgcgatctccactcgagactagaaaatactcgcatgcaatgccaccacggcgagcctcgacgagaggttcaagaccggcaagaacaggtggttctttaccatgctccgcttctagactatatgcgtcccgactggaaaccgtaacgttcttgtctgggacacactccaatccatgtctcttttcttattgccatgaagactacttcgcgtctagtcctgtggctctcacgtatagtgtgcgagtgcacttcacatgttttgtcttgccttcctactgtactgaagaatggacaatttatgtcgtctctattaacatgcaatatcatttcctatcctatttatttcat

SEQ ID NO: 83088 - DNA, 1315 bp, Zea mays
  Clone ID: MRT4577_175793C.1
gcttgtaaaattagtcttgtttttcacataagattaccattatggcatttttaatttccatggaatagatagtgtacaacaatactcttgcttgtgtaagttaccaatggtctttgcatgaacattcaccatttacaaagtggtgatagcggttaacatctcttatgataatttcacgctgctcaatctgtgaaatcagcttgatgacaacatggcagtcctcacaaactcgaagattctttgtcacaagcaactttgtcctaggcggtgtactaatgagtccaaatgcaatggccaacctctcgctgtggccccataccatgttcctcttttcatcatcttccacattatggaaaaccggcgtggtgtcaggcacatagccagtttgactgatgagaccttccaatcgctccaactcttcatatatatcatctgatctaggatgagaagcatcacccacaagaaaaccatgggacttccctttcaattcgatccagctacaagcaatgatctttttcaagcctctattggtcatcagcttcctcacccttgcagcttcttcccatttcccagattcagcatatatatttgatagaagcacatagttaccagcatcttcaggctccaattcaatcagtttttgcagggctaattcagctagctcaacatttttgtgaatcttacaaccatttagcagtgcaccccatatccctgaatctggcttcaccaacattcctttaataacatcagaagcttctttgaacctaccagagtgaccaagaacatctacaaggcaggtgtaatgctgcactgtcggcttgatggaatatacagtcaccatcagatcaaatacttcttttgcttcttgtaccattcctccatggttacaagcagataggactccaacaaaagtaatatggtcaggcatcacctgagcctcactccgcattctgctaaacagctcaaatgcatctcgagccgaattccgagcttccgatccgcagatcatggcattccaagaaataagctccctgtgtaaaagttgctcaaagagaacatgcgccaccataacccaaccactcttggcatacatgtcgagaagggaagtcttcagcttgtcctgtgacccaaaccctctcctccaaccatatccatgcagctccctccctctaggcagcgcagacgcaacagctgcagctgatatcgcactcaccagagtggcgatcgttggcgcaatgccttcagccgccatgttacggcacagagtgagcgcctctgctggtcgcccattttgcccacaagcgtcgtgccgaat

SEQ ID NO: 83089 - DNA, 289 bp, Zea mays
  Clone ID: MRT4577_175794C.1
gactggtgtcatccatgcattgttggcttgatgaaccgagcacttgctcttctacagcgcatgatattgtggagccctcttcttgatgtgctaagcattatagtgcagtggtagactcgtcgggctcatgcaccaggctacatgactgaaggtgagtgcggtctcatgcaggaccaggagggggctcctggcgacgagctctacgctgaggtcggcgtgaatagggagtgcaccgacttctatctcatgatctagtaccgaatgctaggcctgatatggcatcctgaca

SEQ ID NO: 83090 - DNA, 347 bp, Zea mays
  Clone ID: MRT4577_175795C.1
acgcacgcatccgccggcacgtacacagacacacaccatctcattttcaaaaacaacaccctaccctctgggaggctttacatacaaacgcggccatcccatctcatccctcttctaaactctccacaaacttcaattaacttaccatcatcattcacccccatcactatcaaaacactttccttaccaacattaatctccatgtactacatacaccatattttctaccgcctttttatcaaaaaccccaataccaattaccctttcaaacaaatccacaacctaaatgtcccataaaaccctccctcttccaaccctttaaacacttttaactctaatatcttact

SEQ ID NO: 83091 - DNA, 806 bp, Zea mays
  Clone ID: MRT4577_175796C.1
gcgtccgtaagctcggaattcggctcgagaaattagggttttcctattaatttatatcgtaaggacggaacataaatgtcaaactacaagtctaagctcttcaaaaccatcgctgccaagccttctgccattgaagaatctgtcgctcaagctctcttcgaagttgaaaactccgttgctgaccttaaggacctcttgaaggatctctacgttgctggtgtcagagaaatcgaaaccaccaccaagggcaagaagaagaacgtcctcatcgtctacgttccttatgcctctcttcgtctcctctacagagttcaccccaagctcgtccctgaactcgaaaagagactcaagaccactgtcctcgtcgttgccaagagaactatccaatccaagtggatcaagagccacagatctcaacaaagacccagaaacagaactttgacctctgtctatgatgccgttcttgaagatttgtgccaacccgctgctatcatcggcagaagatacagacacaagctcgatggctccgtcatccaaaagatctatttggatcaacacgaagaacccgctgttagagaaaaggttgacagcatcgtcagcgtctacaagaagttgaccaccagagacatccaaatcgaattcaagcccgaatggcacttctacactttgaagaagaagtaaggaactcaaagattacctgaagagagctttataaatgtatgttatgaccctttgaaaaaagttgtttgtatgggtgtccaattaccccaacttgcatagataaacaataagactaaatcgtggat

SEQ ID NO: 83092 - DNA, 894 bp, Zea mays
  Clone ID: MRT4577_175797C.1
ttattaaggttgctgctggtggtttgctattcatcgaccacccgtacccgggtgcgctcctgttcatcaatgtcgcccgcaacgacaaggttggctatggggcccgcttggctggtgcgcgcggcgcttgcgggtgccactccctcatgttatgcaacatcacggagccgaacagggtcgggcggggccggggtgagggctacacggtcacctccgatgagctttggtctgccaaccctgggcgcctaccgcatgccattctcatgttcccgcaagtcgacatggacaggccacatgtagtgcattttgtcatcagcgagttcggatatgtgagaaagaagatgtggctggtcaccattgacatgagcaccaggagagtggagtcattttctcagtataccaatgggagggaggatgccattggaaccgagggcgcttacttgaccaaagtaaggtccggctgtcccatgcccttcctcccctctgagttctccaagtacctctgttaggaagaggaaagattatgagctgccaacttcattggacttgttatttatgtttatgtcttcctgaccaaccattttgctttcttgtaaatatcagatggttctacaagaaaggcttctgtcgtgttggtcaggaaaactgggtgagctatttactaagttgtggcctaataaggatcttatgttcttactaatatgctgtatgaacgctggataagttgtgtaagttggtgatgtgctcagtaggttggtagaaaaggttgtggtgtgttaaacttttaagcagagtctcaaattatgttatttgagcatgtgtcacttggtccttgaacttgcctgtgatgtaccaagtttgcatgtgaaatttaatctctgcgccgtaggttac

SEQ ID NO: 83093 - DNA, 412 bp, Zea mays
  unsure (1)..(412): unsure at all n locations
  Clone ID: MRT4577_175798C.1
aagccccattacactgcccagcgccagagngtcgctcgttgtcgcccaacagctagggggctaacagcccaacaacaccgcaccccacgcacgacccgcgagagaggcgaggacgcgggaacgacgcgaggcgcgatggcgcagacaacggacctggcggtcgaggcgcaggagntccgactgggcctgcccggcgggagcggtggaggtgagccggcgccgagcggcaaggccgagcagctcttccaccgcccccgggcagaggggcttcgtcgagagcagcgacccgaagatggagctggagccagcggacgtcgtggacgcggacgaggaggaggaggaccacggagtcgctggtgcccgtgagaaggaggaggaggtcgggaagatgaaccgtacgccgagccagagg

SEQ ID NO: 83094 - DNA, 159 bp, Zea mays
  Clone ID: MRT4577_175799C.1
caaatgcgaagacggtctcatcgacgtttttcttagctctacggtgatcaccatccttaagggccacttaaacaaccacagcggcgtcattctctttggcgccaaccactcctggccgcaagatcagaacattcacttcatcgctgatttcaaccactt

SEQ ID NO: 83095 - DNA, 227 bp, Zea mays
  Clone ID: MRT4577_17579C.1
tcctctaacactctcatacaaactcttggattttcaccttctccctgctccttacggcacggctccctaaacccacccgcctgaccgtcccccatgcctcaaccttctctcggcttccgtcaacatctacctactccttcgtcttctctgtttcatcacctatcattccacttaactttcacaattctcatcattctcgtacttctccaccccttcctttatactca

SEQ ID NO: 83096 - DNA, 837 bp, Zea mays
  Clone ID: MRT4577_1757C.1
gggatcaaaattgccccggtttggagtttagcttctctccacggcccgacaccaatccttgtctcatcccttccggattgaaccctgccacacgcgagacggcgcaacgctggcggcgcgggaggcgaagaagcggctgacggcgaccctccccaccgccttctcaccggtaagacgctaccctctcctcctatcctcgcgttatgcgttactttctgtgttgcgtgcctgcgagcgcctccacagtctcgatgcgtccgccgccgccgcctccgcgcgcaaggcgcgctggggcgcaagtccacaacggccatccggtccctgatgcatcgcgaaacgcggcagaactcaaacctgctgcggtgacggtgaatccaagaaaccgcccgggacgggttgcttgcagattgcaagcacgatctgcgaccgactgattccctgcccgtgtctcttccctgcgtacgccgcgcgccgtcgtttcgtacgcatacctgctgcactacactgggctggtggatgagatgcaagaagagaaactgatggcgctcggatatcggattcttctctacttgctgctacgtctagacgtgaggaagaacgcgaggaggcttggaaactggaggtcatggtggtcaagtgtgcattctgctgccactggtgcaaagtgatttttgagcttctatctaatcgagtgagtgagtgtcgtaggtgtttagtgagttctttggtttggtttgtatgccctgtccatatgcgaaatgtatgtatacacgtattggttggcaacaaacacaaaacaatatcattgtttcgtaatgacatacatctattttatct

SEQ ID NO: 83097 - DNA, 480 bp, Zea mays
  Clone ID: MRT4577_175800C.1
accttcccggttggtcttttacaaagggccaagccccccacaaaggggggcaaaccaaaacaagccgggcccggaaccaagggggccccaaccaggccaaaaggggggaacagaggaaaaaagcgatccccccagaaaaacaaacaacccccccacacagaaacaaaaaaaaaaaagccgggggaacaaaaggaaaaaccgaacccccaaaaaagggggcgcacccacaacaagcgggccagccaaaaaacccgccctcccagcggaaaaaaagaaccgcccaacccccaaaaaaagggggcaccccgcggggaaaggcgtccgctgaatagggcacccacccccttcccccgaaaaaaagccgggggggaggggggttagctcccccaaaggcggaaaaaccgcctcccagaggggaagggggtaacccacaaaaaaacgggggagccaaaggacaaaaaaaggccaaaaaccggaaaa

SEQ ID NO: 83098 - DNA, 356 bp, Zea mays
  Clone ID: MRT4577_175801C.1
ctcattattattgcgaaacttgaatagaaaagttttgacctgtcttacgaagcatttatagttattattgaaaaaaaaaaaaaaaaaaaaaaaataaaaaaaaaaaaaaaaaaaaaaaaaaaaaaaaaaataaaaaaaaaaaaaaaaaatgaacataaaacacaaaaaaaggggaaccttctaaaagatgcaaagctccgatgcgaacaatgagatgctaacgatgaagcacacgagaacgtacatgaaagtaaggagcccccatactagaaactcatacttgggaaaaccgaattggcacccaactaaagcctttggcgataaattccctttttaccagatgccctaaaatggaa

SEQ ID NO: 83099 - DNA, 207 bp, Zea mays
  Clone ID: MRT4577_175802C.1
atttaatttcgcgtcgattttattttctactagaaaaccacacctagggacattttaccacctatggtggtctacatctattaacaaattctattatccttaaggtctaatgcttataccttaaaaaatctcaatgtgccacttctaccctgtaaaatttttaccataaccatgtcaatatcctatttatttcgttacataagtcta

SEQ ID NO: 83100 - DNA, 668 bp, Zea mays
  unsure (1)..(668): unsure at all n locations
  Clone ID: MRT4577_175803C.1
atgaacgggcggctaggagactttggcctcgcgcgactctacgaccacggcggggcagacggcccaaagaccacccatgtggtaggcaccatagggtacatagctcccgagcttggtcgcaccggacgacagtgatcacgacggcgccttgttattggtggactgggtgcttagtcactggcagaatggatcactcactgaaacagtggacatcaggcttcaaggggactacgacagtgacgaggcatccatggtactaaagctggggctactatgttcacacccattcgtggacgcaagaccaacaagcatgcgacaagtcacccagtaccttgaaggccacgtagcattaccggactttatgccgccctgccatatactacccagcagcatgatgattccggggcaaagcgagggatttcatatgtacaacaatacgtcaagccaaatattcaaggcaagcaatgggagcatgtctagcctatcagggggaagatgacctagctgttatattatagtgtgngggggtgtctctctcatgggatactgtaaatgatcctttagtgtatgtgagataggtttaggggtcttaagggatggcaagtttgggcacccaactattttgatttaacccttcctattnccaaacaacacanaatatagggacc

SEQ ID NO: 83101 - DNA, 2406 bp, Zea mays
  Clone ID: MRT4577_175804C.1
gggtacctcgagccggccgggacattgagtcctcgagccggccgggataattgatgacttccgtaccgagagcacaaggcaattcagcataaacatgctagtcgaactgtgtcccatcttcagccagagccttgaaccccctgagtagcaaaaatggcacgcccgttgttccttgtataccagctcgtaagcctctgcctgaggcttaccaatctatgctccggcgacgaccagcagttcgtatactctggcttcaccggcacaaacctctcgacggatggcgttgcagcgatcacgtcggatggcatgctcgagctgacgaacgggacgctccagcgcaagggccacgcgttctacccggagccggtgcgcctccgcgagcctgccaacggcacggcgcggtccttctccacctccttcgtgttcggcatcctgtccgaccatgtcgagctaagcgcgcacggcatggcgttcgtggtagccggcagcagggacttctccggcgctcttcccagcggctacctgggcctcctcaacgtccagagcaacggcaactccagcaaccgcctcttcgccgtcgagctcgacacgatgcagaacgacgagttccaggacatcaacgacaaccacgtcggcgtcgacgtcaacagccttcactcggtgcagtcgtactacgccgggtactacggcggcggcggcttccgcaacttgaccttgattagcggagaggccatgcaggtttgggtggactacgacgcagaggtcgcacagatcaacgtgaccatggctccactcagcatggccaaacctgcgaggccacttgtgtcggccaggtacaatctctcaaaggtcctgactgatgatggcccggcgttcgtcggcttctctgctgcgaccggtgggacgctgaaatcacggcactatgtcctcgggtggagcttcagcatcgaccgccctgctccggccattgacctcagcaatctaccgaagctgcctcgtgtttccgccaaggacaggactaggaccctggagatcgtcttgccggtagcaaccgcggcattcctccttgccgccggcatggccatcttgttactggtgcgacgacatcggaggtacgctgagctgcacgaagactgggagctcgagttcggaccacacaggttctcatacaaggatctgttccatgccacggacggcttcaagaactctaaccttctcggcatcggcgggtttgggagggtgtacaagggggtgcttcctgcgtccagaacagaaatcgcagtaaaacgggtgtcgcacgaatcgaagcagggcatgaaggagttcatctcggagatcgttagccttggacgcctgcaacaccgcaacctcgtccagctgctagggtactgtcgacggaaaggcgagctgctgctggtgtacgactacatgccaaacggaagcctcgacaagtgccttcacgaccgagagggacgacagcacgctttagactgggctttgagggtccaaattatcaaaggcgtcgcgtctggcttgtcgtacctccatctagactgggagaaagtggtcatccatcgagatattaaagccagcaatgtcctcctcgacggcgacatgaacgggcggctaggagactttggcctcgcgcgactctacgaccacggcggggcagacggcccaaagaccacccatgtggtaggcaccatagggtacatagctcccgagcttggtcgcaccggtaaggcatcccctctcacagacatatttgctttcggcatcttcgttcttgaggtcgcgtgtggacgaaggcccatcaacaagcagctcacgcaggacggcggcgccttgttattggtggactgggtgcttagtcactggcagaatggatcactcactgaaacagtggacatcaggtttcaaggggactacgacagtgacgaggcatccatggtactaaagctggggctactatgttcacacccattcgtggacgcaagaccaacaagcatgcgacaagtcacccagtaccttgaaggccacgtagcattaccggactttatgccgccctgccatatactacccagcagcatgatgattccggagcaaagcgagggatttcttatgtacaacaatacgtcaagccaaaaattcaaggcaagcaatgggagcatgtctagcctctcagggggaagatgacctagctgttatatatgtgtgtgtctctctcatgggatactgtaatgatccatagtgtatgtgagataggttagggtcttagggattcaagttgggcaccaactatttgattaaccttctaatccaacaacacaaaaaaatagcacaaatatggacacaaggtgctatttggtaaggaatatatcaaaaatgcaaacatcattggaattg

SEQ ID NO: 83102 - DNA, 1066 bp, Zea mays
  unsure (1)..(1066): unsure at all n locations
  Clone ID: MRT4577_175805C.1
gctcagcatgctctcctcgggccggaatggcactccaccactgccactgacacaatgcctgggtctggtaaacctcccctcgcattctatgtctgtgcccatgaggaagtcactatccactttgtcatggtcatctgggtccctgtgccgcagaaattgagtgtgcgagccgttttgaggtagatgatcgagcagggttttcagggagaaagcatcgaggccgagcagagttgcagatggtcggagctgagattgcgcaaaagcgcatgcggtcacctctagctgccctaacagtggcaaaacagtcatgtataaaacccaacatcgatttttgatcgagtactcccaatcaagacgttgagtacgaggagaggcgcttccgatgtcctcgctacttgccgacaccttcgcccactcccagcaggccttattagcacacatttgcgacgcttctcgccggagaagggtgggcggaggatgccctgcctggcccctgccaattgacggccacatggcttcttctagcagggcatcatttcctctcctatggttaagttgattgaaacttttgctgttttttgcaagtctcagagaactgcttatagggagaaggtgttaattgaagcagagaaacaatttctgcatgatttcacttttttcaaggaaaagttatcagttgattttggccaaatagtggatgtcgaatgcattgatagtacttgccaagttctgtgtgacaaggtcaggggttgttgttcaatttgcaagtcaaggtgtactgaagctatcatcgattctctaaaaattttggctgaagcaatgactattaagcatcagaagtttttgaattccaacaaccttctggcgaaagatatggatattaagtcagatgagaaagctaccaaaattgataccaatgtgcagccagttgatgttaagtcgaatgagaaaggngctggtgtggacattgntgaggcttctcatggaaaagctcatgtggntnttagctagatgatgctgnggttatggttaatgaactactacttactactaattaccaggattt

SEQ ID NO: 83103 - DNA, 570 bp, Zea mays
  unsure (1)..(570): unsure at all n locations
  Clone ID: MRT4577_175806C.1
gtgtcctggacaccctgacaccgccgtcgccgagccgacgcacctaattgtcaccgccantttgcgcgcgcctcaaggtgcacgagctccgcgggtaagagcagaccgacctaggagtgcagctcaggagctgaggtctgatctctcctttctccgcgttgccaaggtcaccggcggcgcacccaacaagctctccaagatcaaggaggagcgcacctcgatctggcgcgcgctaacagcgttcttacctaagcagcattacgagctgcatggaggcgtacaataagaagaacctgctccccctggacctacgacctaaaaagacccttgccattcatcaacggctgaccaagcaccatttttgtctggagaccgtgagggaaaagaaccgggacaagtacttgcccgtgaggaagtatgctgtcaaggcctatgtaagaactgggacatgctgatctatagcatatgatacgttgtggaaaaaacatgtggctcgtatggacatgcgctagtgagtcggaagtacgaaggattcctccattttcataaatggctaaattggtctgactg

SEQ ID NO: 83104 - DNA, 178 bp, Zea mays
  unsure (1)..(178): unsure at all n locations
  Clone ID: MRT4577_175807C.1
ggggcggngatggggtgcgcgcgcgtcgagccgcgggacagcgaccgaagcaactggctggccaaccgccccgaccagcggacgccgcagcagngcgccgaggaatacgcccgaccacctgacaattgagctggattcgactgtaagccggtcggtccgtccatgcgcgcaaggcgtg

SEQ ID NO: 83105 - DNA, 835 bp, Zea mays
  Clone ID: MRT4577_175808C.1
attggtgcctccaactgtatgggcactgttattaggggttttgtaataaccacatgaccttttccatgagaagcctcaacaatgcccacaccaacccctttctcattcgacttaacatcaactggctgcacattagtatcatttttggtagctttctcatttgacttaatatccatatctttcgccagaaggttgttggaattcaaaaacttctgatgctcaatagtcattgcttcaaccaaaatttttagagaatcgatgatagcttcagtacaccttgacttgcaaattgaacaacaacccctgaccttgtcacacagaacttggcaagtactatcaatgcattcgacatccactatttggccaaaatcaactaataactttgccttgaaaaaagtgaaatcatgcagaaattgttcctctgcttcaattaacaccttctccctataagcagctctctagagataaaaaaacaaaattaagtaacaaaaaaataaacaaaaaccacatgaaaaaaattgcatataaaaaatatataattgagaacttgtacagaaaaaaaagaacaaactatccgagacttgcaaaaaacagcaaaagtttcaatcaacttaaccataggagaggaaatgatgccctgcaaaaataacaaaaaaatgtaaataaaaaactaaatataaataaacaatttctaagaactaaatatactgagaaaatacattttataactccacacaactatacttagctaacttagattatttacctaaacaataaacacaaaaacgattatcaatgatgcaaatcctggacataatggaacctactcttaaaa

SEQ ID NO: 83106 - DNA, 1272 bp, Zea mays
  Clone ID: MRT4577_175809C.1
aattcggcacgaggcacggttgccccggcggacgtccgacgcccgacgcccttccctcgtggacgcccgacgtccttccctcgtggacgcatctgctgtccttgtgaccccccctggacctctagtgccagccgccggcgccctctgctcctcgcccctgcggctgcggccctgcacggctgcaccagctcctcccaggcacccagcggcggcggtgtccaggaccaggatcccgcggcagctcctcccaggccccaaatgccggcgccctctcctgctcctgtcgttgtcttgatttaagcctttaattggcactcaaagttcaagatagcttgctgtagaccatcggctgcacagatgattgatgatgaggtcaactttggtaatatctttgatgcctcagaagaagttcacgcgtctgcaaagtttggtcccaagcaacggcccaaaacccgaaaaacagctctatcatccagatctgcagcgcctaatcctctgaagaaactggagataggaaagtaggaaccttcagtcaagtcaattcttctaaagagcttaccagccaagaaaggacatccttgatgtgccctagtactgagtcagttgatattatcgctggttctcatagaattctcgatacaccattggaagatgcattgacagttccccagggttctctgtctggtgcttctgctgcagataggacttctcaatatggtgagcacaatgatgatccttctaagttagctacacaccaagaaaacttggtggtttcagatatcaacgtcccacctaacagttcatgtagcaaggctattgatgatatagttgaatttggggacatgtgtgatgtgcaaattgaagaggaaagagttacaaagttccaaccaaaggcgcaaacgaagctccttaaggaaatagccaaatctcggaagactaaccaaaaggtggaaacttccactgtagatgtggttacacaaaatggaaagggcaataatattcagacaaggctccatggcgatcaggtacaggatcctaaaagtcatgaaagtgtgcagatcccagattctgaagaattattagcaactgataatagtaaaggttgcaatttagctaaactcaacaatgtccttgaagagtcagtccaagaggaaacaatagctaagtttcgttctgatttgcaaccaaagcccaggaaggcttcatcccatgttgctgtgattaaaattaatggtgctgcttgtgctccaatagttggagtttgtgacagcc

SEQ ID NO: 83107 - DNA, 321 bp, Zea mays
  Clone ID: MRT4577_17580C.1
gcgcccacgcgtccgaattatcctcttatgacacataatatcactagagatctcatctgtaccgggtcctagcgacctaatatttaaatgcttcgtgagattataatgaggcaccagacgatccaagaaaaaagttatactacatataccttctagcacattattgaattacgctcatatgcatgattacatacattaaaatacacttttattcaagacattttggagaaaaatatatgcatatggttgctcattattatagatccatgtcccctctaatagcctagcgttactatcctgcttccaaaactcacatctgcc

SEQ ID NO: 83108 - DNA, 560 bp, Zea mays
  Clone ID: MRT4577_175810C.1
gccggccgtgccggagacagcaacctccaacagagccactgcccagtgctcgcgtcaagcttgcttagctaggcgacatggactccctcgacgtcgtctccgtgaagaccgaggtcatcaaggggctcgacgggagatccatctccggaaggaagctcgacgtcgccaggccgtcggcccgctccatccgcaggcaccgctcagccgccgaggcggccaagtacggagacaagagcgtctactttgacctcgacgacatcggcaacaccaccggacagcgggacctctacggctctgacgcgccctctgcctacaacccgctacagagcaagctcttcgagacgttcgcggatccgttcaccaagagaggtctgctgctcaagttcctgctgctgggcgacgattcacttctggactacgtcagagcggctgcgtcaccggacctcctgccgatcaagaagggacctcaggagccgccgcagccgggcccgggcggcaggatctaaggtcagcttctccatttgcatggtctagaagattgctttgcactgctagcgccg

SEQ ID NO: 83109 - DNA, 250 bp, Zea mays
  Clone ID: MRT4577_175811C.1
gatgggtaccagcaatggtggttgatgacaggctgcggcagactataacaaagtacgtgattataccagatgtaaaacattatgattgttaggaataaagggactgtcatgcagcttcataaccaggaatgaccgaatagtgccacattgaaacggctgatgcctgactagaatgatgtgtatggcgctgtgaaccaggggtgtgggcaaagcgacacctacgccccacgctatgcatgaagcctgactg

SEQ ID NO: 83110 - DNA, 792 bp, Zea mays
  Clone ID: MRT4577_175812C.1
ggaccctcgggtcggccgggagcaccccaacagcgccactgtccagtgcgcgcgtcaagcttgcttagctagccgccatggcctccctcgccgccgtctccgtgaagcccgtggccatcaagggtctcgccggcagctccatctccggaaggaagctcgccgtcgccaggccgtcggcccgctccatccgcaggccccgcgcagccgccgtggtggccaagtacggcgacaagagcgtctactttgacctcgacgacatcggcaacaccaccggacagtgggacctctacggctctgacgcgccctcgccctacaacccgctacaggtgccatgatgtttccaacccattcaattccctgcggtaactagacttgctagggtgatctgatctctctgctgcatgcgttcttcacgtcaccagagcaagttcttcgagacgttcgcggctccgttcaccaagagaggtctgctgctcaagttcctgctgctgggcggcggctcacttctggcctacgtcagcgcgtcggcgtcaccggacctcctgccgatcaagaagggacctcaggagccgccgcagccgggcccgcgcggcaagatctaagctcagcttctccatttgcatggtctagtagcttgctttgtactgctagcgccggtcgatccgtcgcaatcgtcatggatcatctctctatcttgttgttacgctgttcataatttggtatatttgccattccgctattgtgtactctttggcatacatacaataattaaaatggcgttgcgtggctctc

SEQ ID NO: 83111 - DNA, 532 bp, Zea mays
  Clone ID: MRT4577_175813C.1
attataaaaaagcattggaagtttcaaataataaatctgcgcgagctatgcgctctctggctcgcagtgcatacaacaggaatgacttccatacatccaaaattctatgggaatctgcattgtcgttgaactctttgattccagatggctggtttgcatatggcacagctgcatggaaggacaaggatcttgacaaagctgtggatgcgtttagtcgtgctgtacagatagatcctgagaatggagaagcatggaacaacatagcctgcctgcacatgattagaggaaaaagccaagcagcagtccaagcattcagggaagctgtaaagttcaagaggaatagctgggaaatttgggaaaattacagtaaagttgctttggacacagggaatattagactgacacttgaagctttgaaaactgtattgaatttatcctcaaacaagcagtttagtgttggtatattggacaaggtgatgacaatgcttgaagaacaatctccagattttgttgatactcacgaagcatcaga

SEQ ID NO: 83112 - DNA, 546 bp, Zea mays
  Clone ID: MRT4577_175814C.1
gaccgcgcatctatagcaccggtccacactttcacgctcaggcgctcagctctagcaatggctgcctccaccatggcgatctcctcccggcgatggccggtacccccatcaaggtgggctccttcggcgagggccgcatcaccatgcgcaagaccgtgggcaagcccaaggtggcggcgcacgccaggccctggtacggccccgagcggggggggtgccctgtgcccttctccgcctcggccacaccaccggtcagcgggacctctacggctctgacgcgccgtcgccctacaacccgctacagagcaggttcttcgagacgttcgcggctccgttcaccaagagaggtctgctgctcaagttcctgctgctgggcggcggctcactcctggcctacgtcagcgcgtgggcgtcaccgtacctcctgccgatcaagaagggacctcatgagccgccggagccggtcccgcgcggcaagatctaagctcagcttctccatttgcgtggcctagtccctcgctttgtactggtagcgccggtcgatcc

SEQ ID NO: 83113 - DNA, 925 bp, Zea mays
  Clone ID: MRT4577_175815C.1
ggcgctcgggaccctcgaggccggccgggacacggcaccctccctatgggtcacggccatcttcgcgcctgggagtgcgaggcgtccacccacacaaatcccaaatcctcagcacgatacgatccgccgaattaagttcgtgcacgtacgcacgcaccgggacaccagcaacccccaacagcgccactgtccagtgcgcgcgtcaagcttgcttagctagccgccatggcctccctcgccgccgtctccgtgaagcccgtggccatcaagggtctcgccggcagctccatctccggaaggaagctcgccgtcgccaggccgtcggcccgctccatccgcaggccccgcgcagccgccgtggtggccaagtacggcgacaagagcgtctactttgacctcgacgacatcggcaacaccaccggacagtgggacctctacggctctgacgcgccctcgccctacaacccgctacagagcaagttcttcgagacgttcgcggctccgttcaccaagagaggtctgctgctcaagttcctgctgctgggcggcggctcacttctggcctacgtcagcgcgtcggcgtcacccggacctcctgccgatcaagaagggacctcaggagccgccgcagccgggcccgcgcggcaagatctaagctcagcttctccatttgcatggtctagtagcttgctttgtactgctagcgccggtcgatccgtcgcaatcgtcatggatcatctctctatcttgttgttacgctgttcataatttggtatatttgccattccgctattgtgtactctttggcatacatacaataattaaaatggcgttgcgtggctctcaaaaaaaaaaaaaaaaaaaaacccaaaaaaccaaagaataaagttttatgatggtgctggatatttgcgggcggcccttt

SEQ ID NO: 83114 - DNA, 2240 bp, Zea mays
  Clone ID: MRT4577_175816C.1
cttagcggtgttgtgcctgcggcatcagtttttgcatctggaactgcagagttcttgtccatcgctcagcaagcggatgttgcaaataaagccttgcaagacaacatccgaaaacttaggagactcacaagacaacagtcagtgctttagttaagaccgacacacatcttaatgaagctctttcagagatatcaagcctcgagagtggtttgcaggatgctgaaaagaggtttgtttatatgcaggagctccgtgattatatttctgtgatgtgtgacttcttgaacgacaaggcatttttaatagaggagttggaggaaaacatacagcaattgcatgaaaaacgagctttggctatttctgagaggcgtgcggctgacctagctgatgaatcaggtgtaatcgaagctgctgtaagtgctgcagtatctatccttagcaaaggatcaagctcaacttgcctatctgcagcatcaaatgctgcccaagcagctgctgctgctgctaggggaagttccaacctccaacctgaattggatgagtttggcagagatatcaacatgcagaagcgtatggatcttaagcgcagggaagaggacagaagacaaaggaaaactcagtcagagaccaagagattggcatctgcagcgaagaataaggacatcaagaagatcgaaggagagctaagcactgatgaaagcgacagtgagagcactgcttatgtttccagccgggatgagtttcttaaggctgctgaccatgtgttcattgatgctaaagaggaatactcgagccttaggattgtcaaggacaagtttgaaggctggaaagctcagtacccttctgcataccgagatgcccatgtagccctgagtgcaccatctgtgttcagcccttatgtgagactggagctcttgaagtgggatcccctccacgaaacgaccgatttctttgacatggattggcacaaggttctctttgactatggcgtgcaagatgacgagagcccctcaggttcgaatgattcagatgtggttccagtcttggtagaaaaggttgctcttcctatcttgcaccaccgcatcgagcgctgctgggatgtattgagtacccaagggactagaaaggctgtggaagctagcaggatggtgatcggttatttaccaacatcaagcaaggatttgcatcgactactggctgccgtgagcagccgtctaacccaggccgtcgccgatctttcagtcccagcctggggttcaatggtgacgaggaccgttccaggtgcctctcagtacgctgcatatagatttggagttgctgtacggctcctcaagaacgtgtgcctgtggaaagacatccttgcagatcatgtcgtcgagaagcttgctttagacgaactactgagagggaagattcttcctcatatgaagagcatcatcctggatgtccacgacgcgatcacccgggccgagcgagtagccgccgcgctctcagaagtctggcctaaacaaaaccaaaagctgcggcctttcgcagatctagtggctgagctgggcaacaagctggagaggaggcacgcgtcaggcatcagcgaggacgagacgcgtgggctagctcgccggttgaaaaacatactggctgttctgaacgagtacgataaagctagagccatttcgaaggcgtttcatctcagagaagccctttaggtcgtcctggatggagtcagagtgagaaatccagttttggcacaggtttctacatccttccagtttgcagagatgttgtaccacatatacatcttgaccatgatcgagtttttagtccatcgcttgatgctatcaaagaaagctgtgttgcttctaggttgttttctggttacgaacacacaaactggttataacaagatatgtattagatttattttttgcgagttcaagttatggtcccaatgtgtttatcaatggagctgggagcaaccctttggaatatgaacatagtactattatgctatttaacatatggggttactggtgatctgaaacttgtcagtatggcagccataagcgcgacccgattctgaggcgaatgctctgaacttttttcattgtattttggcaagtggtaggcatgaactagaactgagtcttagattatgctctgagatgaatgtaatgattttaatctatgcgttattgtggatgtgtgctaaaaaaaaaaaaaaaaaagggcggcccccgcga

SEQ ID NO: 83115 - DNA, 264 bp, Zea mays
  Clone ID: MRT4577_175817C.1
aagctggcacgcgtgcaggagccgggcctgaattatattgccggaacgacgagcctaactactcggaggccggccttaattattggagggatgaattaaacctccttgctcatattggctatatatatgggggataacaaattatctcacttggattaagaaaaacacaaaacacacgagagagacatgtacttaataaagaaataaacactaattaggcgagcacattctatgtgtttgacacctcgattccatacaactgat

SEQ ID NO: 83116 - DNA, 890 bp, Zea mays
  Clone ID: MRT4577_175818C.1
ctttaaagatttggttaacgatgtggccatgcagattgccgcttgtcccaatgtggagtacgttagcgtagccgacattccccaggaaatggtggctaaagagaaggaaattgaaatggggcgcgacgacctgggcaaaaagcccgccaatatcaaagaaaagattgtccaagggcgcattgataaacgcctcaaggagctatctttgctagaccagccctacatcaaagaccaaaatctcaccattgaagagttggttaaacaggcgatcgccgaattgggggaaaacatccaagttcgtcgctttatccgctttaaccttggtgaaggcatcgaaaaagcagaaaccaactttgcggaagaagtggccgccgccgctaagggctagtaactcaggcttgattaccgcactacttattagctaaatctaagaaccttttgaacccagatttccaccgccacaggccagggaagatttgggtttttgcttttgggataaaccccagaaaatcttggcagcccatctttgctttgcccagagagtgtgtcaaaatcgtgggtaacttagtctgtcctaggcttccataacttataattatcgccatcattgctatgttgccattgccattaattgctaacggaaaaggatttatccgcgctctagaaaacgacggggctttggcagtgtatgcccccctagaaggtggttatgaaggtcgttaccaaagacgcctacgggccaacggctacgccagtatatccctttcggcaaggggtttgggggacgtggaagcctatttgatgcaagtccatggagtacgtccggcccatttaggtaagaaaaacattgcccaagaaggagcggtgggaccgatttattttgcccagcc

SEQ ID NO: 83117 - DNA, 128 bp, Zea mays
  Clone ID: MRT4577_175819C.1
atgttcggctacgacatcaacaagaaaggcttacctacgggtcaaatcaaagtgcctgaggcactaggccttgttgtggggattgtctatttggtcattgctattatatttcagcagtttcactatgc

SEQ ID NO: 83118 - DNA, 295 bp, Zea mays
  Clone ID: MRT4577_17581C.1
ccatcgccatccggtcgagcacttcggcctctgctccttgcacgttcaatctcacctcccaccatgcgtaaacagaagtaccacatcaagattgcgcttactggcgacgttcactctcggcagtcgacgagcagaggacacctgatctacaagcttggacgcattgacaagcgcgtgcttcagacgtctgagaacgaggctgctgcaatgcacaagcggtccttcaagtacgcgtgggtgctcgacaagctcaaggctcagcgtgagacacgtatcaccattgatatcgctctgt

SEQ ID NO: 83119 - DNA, 350 bp, Zea mays
  Clone ID: MRT4577_175820C.1
attcgtatcgagctatgtcgtccgacttattttgcgccgcccgaccatatcgccagtggaggggggtatgacgacaatagttggctgcacccttaagaagggggagcatgacagagcattgttacacttctccctgcacggatgcctgtggtagactcggcagcgtgaagtaccctctcccagcctaatacgtacttctacgagagacctcgaaagacaacctacatctttacaatatgcagatggtccagacgccgtactgtaatggggcactatgggaagagtgtatttaagacgtcgaccatatagcgaacttttcgctcagacgagaaagactatgacaagcgtgg

SEQ ID NO: 83120 - DNA, 950 bp, Zea mays
  Clone ID: MRT4577_175821C.1
cattgggacctcgagccggccgggaattttccctcatcttttgtaattaccgccgtaacatccacggcatgctgaacgcgatcgcgtggggcgtcctgatccccaccggcgccatcatcgcgcgctacctgcgcgtgttcgagtccgcggacccagcatggttctacctgcacatcgcctgccagtgctccggctacgtcctcggcgtggccggctggggcctggggctgaagctgggcagcgagtccgccggcgtcacctaccagccccaccgcagcatcggcatcgccatcttctgcctggccacgctgcaggtgttcgcgctgctgctccggcccgacaagaagaacaggtacaggctgtactggaacatctaccaccactccgtcggctactccgtcatcgtcctcggcgccgtcaacatcttcaaggggctcgacatcctcaagccggccagcggctacaagaccgcctacattgtcgtcctggccacgctcggcggcgtcgcgctctgcctcgaggccatcacgtggcccatcgccatccggaagcgcaggcgtaacgccgccgacaaggcgtccaacggcaacggcaacggctggcagcagggtgcgtaggggcctgatcgccgggctttgtgcgcgcgtgtgtttgtgctatagttttgatgcgagagagaggtctgatatcgatgtgctgatgccgttgttcagagagagagatcgttgctgatgtgtttctttcctgttactactgcctctgtagtctgtactcctacctagaagagtagctcctttgattttttttcttctgttttgttgttgaattttattagggttctatagtgccatttgtacacattttttcccttcttattgatgtacgtacgactgctttgattactgtatggtttcagtcaggatgacacggctttccttactgctcaagtt

SEQ ID NO: 83121 - DNA, 190 bp, Zea mays
  Clone ID: MRT4577_175822C.1
gggacgaatatcattcacccctgctgttggcgttgggctccggggaggctgttccaacagctcatcgcagaaagaggaagagacatcaggtgaagcggcgtcagggggcggcaatgcaacagttatcaccaacttctgtatcttccgacgatgtcgttgctctgacagctttggaggagattacaacggt

SEQ ID NO: 83122 - DNA, 1528 bp, Zea mays
  Clone ID: MRT4577_175823C.1
ttggtaccctcgaggccggccgggccccttatctatcgagtcgcccgtcaccacagctgatattgaggcgacgcgccggccgtccagatcaaccaaaaaagaaaaaagtagccatggcgcggctcctcctcctcggggccgccgtgctgctgctcgcgtcggccgccacggcgcaggactgcctgtccgcgacgttcagcggcgggcggaccttcgggcggtgcaacaacctgccgtcgctgagcgccagcctgcactggacgtaccacccggagaacggcaccgcggacgtggcgttccgcgcgccgtcggacgccagcggctgggtcgcctggggcatcaaccccgaccgcggcggcagcatgggcggcagcagcgtcttcgtggcctcgccctcgcaggacggcagcggcgcggtgtccatcctcatgacccacctggagagcacgtcgcccagcctaaccaacaacaccctcaagttcaaggtgcccgtcggccccgccgccgagtactccaacggcgcctacaccatcttcgccacggtggagcttcccggcaactccacgcagcagttcacggtgtggcaggccggcggcgaccagcaacggtgccatctcccctcacccgacggcgccggccaacttggccagcacccagcggctggacttcctctccggctccagcaccgccgcctcaaactccaagcttcaccgccgtaacatccacgggatgctgaacgcgattgcgtggggcgtcctgatccccaccggcgccatcatcgcgcgctacctgcgcgtgttcgagtccgcggacccggcatggttctacctccacatcgcctgccagtgctccggctacgtcctcggcgtggccggctggggcctggggctgaagctgggcagcgagtccgccggcgtcacctaccagccccaccgcagcatcggcatcgccatcttctgcctggccaccctccaggtgctggcgctgctgctcaggcccgacaagaagaacaaatacaggctctactggaacatctaccaccactccgtcggctacgccgtcatcgtcctcagcgccgtcaacatcttcaaggggctccacatcctcgagccggccagcggctacaagaccgcctacattgtcatcctggccacgctcgccggcatcgcgctctgcctcgaggccatcacgtggcccatcgccatccggaagcgcaggcgcaacgccgacaaggcgtccggcggcaacggctggcagcagggtgcgtagtagggaccagatcgcccggcttgtgcttagttttgaatgcgagagagggatgtgatatcgatgtgctcatttcgttgttcagacttcagagggatcgttgctgcctgtgctttctttctcttcctgttattactacctctctagtctgtacttgtacgtagaagagtagctccttattttttttaattattagggttctataatggcatttgtacacattttttccctattcttattattgattacgattactttgatt

SEQ ID NO: 83123 - DNA, 614 bp, Zea mays
  Clone ID: MRT4577_175824C.1
aaaaaccaaggggccccccgggcccctttttttaggggccaccccccacaaagggaaatgtttttgtaacaaaaaacatttggggaaaaaaaaacccttttttttaacaggcccgaaaacaaaggggggttttggggggcccccatcctccctaaggggccccaccctaaattcctaaagttaacccggcccccgagggggggggggggctcccccccttaaacccgttggttgggggaccgggaacccccacctcggggttttccggggcccaaaaaactaattccccaaaaaaaaaccgcccccgggtggtaagtccggatttggtattttttttaaaaaaaacaaaaggacccccggccttccagaaacgaaaaaagaaacttttggcccaagatttttttgggggggggggggggcagtttaaaaaattgggcccccgtcttccccctgggaaaatttttttggggggcctttacggccccagtggaattggaagtttccccacccctggaggggggctccctaactataaaaagctgggggctaggggcccccaacccaccttggggaacccgaggacccccggttacaaacgggaaaaacccatgctg

SEQ ID NO: 83124 - DNA, 580 bp, Zea mays
  Clone ID: MRT4577_175825C.1
ttgcggtggacaggcacaaccagagccaccgctcgacgagccgccatccagtcggccggccgtccggcgatatatctccccgaccgccgtgcctgcgcgagagttgagttcgttgacacctatatatagaggcatggagacggtggcggcgagttacggcggcggcggcgaaaagagggagctgcagcagcagaacaagcaggcggcggcgggcgggtgcgggcaccagcacttccagatgccgttgcactacccgaggtacaggcgggaggactacgagggcatgcccgagtggcagctcgaccgcctcctctccgagtacggcctgcccgtcgccgccggctccgtccagcagaagcgcgccttcgccatgggcgccttcctctggggcgccggcgacaactaatgtctaattaattaacatgtagcagcagtcagcacagcagagttaaagtacgagctagttagcatgtatgtatatgaaccaatgctgtatatctagtacagtacgtctctgtatatgtatgtacgcggctggcttattgccttgaaaaataatcggatatttgcatattggtgg

SEQ ID NO: 83125 - DNA, 374 bp, Zea mays
  Clone ID: MRT4577_175826C.1
agataaacgaggtggacatggtgtgtgccactttgcttcacaatataatgtctgcgaattttgaagggttcaagcgataccagaatttacagagattataatgacaactacatgcatgttcacgagggattgttgactgtgatgctgctgacctaactttgaatacatgtgcttaaaaaagtcacggatcataaaacagcttacgtacgggaagggaatgcccactcaatatattctatttacccttttatgagcacatcggttagttagcctaactttaaatggtacgaggaggcaaggttcttatttccacagcacctatatatctcatctgcggggggttctatttttccccattcagtaagtgctgtatc

SEQ ID NO: 83126 - DNA, 500 bp, Zea mays
  Clone ID: MRT4577_175827C.1
ggtttgtttttttttttttttttttttttttttttttgttttttttttttttttttttttttttttttttttttttttttaaaaaaggaggttaataaagggtttatttcaaaaggaaattttggttttgggggagctaattttaggaaaggtgtgggatttttaaaaagaggggggggccaagaaaaattcccaacttgaaaatgttttccgccgggatgggcccggaaaggccgggctttggagaaaaaaggagggggggggccccgtttccgaccaagggaaaaagaaaaaaaacgccgggaaattcgggacgggaacttgaaggggaacaagttttccttatagggaggcgtataaaagttgggggaaataagggaaataggtgtttcttggggaaaatggtaatccgctaacaattcaaaaaaaaatacaagcgggaagaaaaaagggtaaaggttggggggcttaaggagggagctaactaaaataaatggggt

SEQ ID NO: 83127 - DNA, 353 bp, Zea mays
  Clone ID: MRT4577_175828C.1
ggcccctgggggacaaattcaaaaaaaaaaaaccggccgggggcacaaaaacaaaagtccagccgccccaaaaaaaactaccattgttctctggggggcccacaaaacccccacaggggaatcggaaggcccatgaaaatgccaaaaaataacccccaacaaggagcgaccaacccccgggagttcccggaacatgcccatggaaaaaacgggggataaccaaccttgttaaaaaaaccccagggccctggacacccctggttcaaagcacgcttcccaagggaagcccccacccccctcgaggctggggcaaaatcgaaccccccccccggggggaccttccaggggccaac

SEQ ID NO: 83128 - DNA, 492 bp, Zea mays
  Clone ID: MRT4577_175829C.1
tctgcgttgcttattttggacaggctattgagtcatcaaaaaccgattggggccgctaagatcgaaggacggcgcaccagcatgctgtgctgctcaagcacaaccaggaggaccgggggtcttgggacagtaatgaaaagccctctcatcaaggaaggaagcgcttgacagacgcaagatcatattttctcgagcaaagcaggacgtcccaacagtacgacaacccattaaaaagagcttgtagcaatcatgcgtgaagctcgtatgaaaggagcattctatatgatgcccaaagccaagcttctgttatgtggaatcaatacgtggtatcaatgcacatgcaccccaagaccaagatgatcttagcaattctgcgttctgaagcacatcttgaatggtgcatttctaactgttaacatggcacctattaacatgctactgaggttggagccataatgttgcatatggataccctaacctgaatagtgttag

SEQ ID NO: 83129 - DNA, 684 bp, Zea mays
  unsure (1)..(684): unsure at all n locations
  Clone ID: MRT4577_17582C.1
gccnggccgggtttcgggaaaagcctaggggcagcgcgataccgccgtcacgcccagagaaccagaccaggcctctgaccgcttgctgcgcgcgctgatagcgacgtagcatctccggcatctactgcgaggtgccagcttagcgtgaccggacttgtagccgtacacgncccggccggctctggtaccgtcgcaggacgactgcacagatcataccagtcgccacacctatgcgccgagggacttgcttaccgtcggacgaagtaccgtccaagacnagcatccaatcttcttctctgccatcctccgcatgcttctagatgctcttctcctacttcagctgtcagcattggcttgaggtgcctgtcaaccaacaccatcatgtggactagagctatgttcaacataaaatctcagtgttgagcatcttccagccaaatatgtaggaatcgggaatgctgatttgtctatatttgatggcgactgtctgcattcatatagagaggtattactcttatattggtaactatcccatgctattatattttgcaatgtgctgagaatgacatcgatcattgacataacgcctcaatttcatgcaaaaaatgctgcttacttgaggacttcctgcctagagatatgaaaagtgaacagctatttggtgctgcatatttctcgtgtttc

SEQ ID NO: 83130 - DNA, 349 bp, Zea mays
  Clone ID: MRT4577_175830C.1
cggattcgaattcgggccacgcccacgcgtccgggcctgccttctaatacccggatttgcactgccgtcgccgacgacgcacaggggagggcccatccgttataattcgttccttcgctctcggcggccgcgagatgagggagacacgtactggcagtcgacggtcctaatgacgactcactagatggagatgccacaacccatagcactctcacatccgtgacgagaagatggacatagaagcgttagcttatgcagcggacgggagcaagttctgcaaaggcgcagcctgagacttctatgacgccagcaactgctcgaatgaccacactgagaggtctgcgtctat

SEQ ID NO: 83131 - DNA, 675 bp, Zea mays
  unsure (1)..(675): unsure at all n locations
  Clone ID: MRT4577_175831C.1
cagactgggtgcaacagacagagacggtgtacttgttgacgcttatgctctctagatggctggcaaaccacggctagtctccttgccgcatctgatttctgtgtacaagggtgagaccgagtatgttgtgcttgcacacgtaaccacgacaagtctacacattgacgtgatgatggttgttgctgctctgaaagaattggtttctctaaggaatttcctaattgatttcctagagccacttgcgttgaaatttggttgggatgctaagggtgacgcgggccacctgaatgctaggaattggtccactgccacgttaaggaggacgttctgacagctgctccaagactttttcaatgccaagagttgggcaagaacatcaacctcaaggagctggagttcagactagagaactggttttgcaggaccaagctattcctcaaggtgttgatccaacggtcagaaatgtcagagctctctatgtggatggattttcatgcagcgaagactcatctctttactgttgccttgcttggggacaagcaagttttggtgagggggcatatgtcatggcccatacttgactctgaccatgacaaaggagacagtcggctgacgcgggtgtntgacgtgtgtatcgttgatttgaatataatagcgtgtgtagcagatgtgagt

SEQ ID NO: 83132 - DNA, 605 bp, Zea mays
  Clone ID: MRT4577_175832C.1
attactgagctagatttcattcgatccgttgagctagccatgacgaacgggtacctcttccgggagacatcggcgcgcagttcaccggcgtccggttctccgacgtgcccgtcaacaccggcgtcagctcccacttcatcctcgccttcgccatcgactacctggcgagccagcagtccaagcccacgccgaccaacggcgtcttcaagccgttctgggacacgggcaacctcacccccgccgccatggccgccgccaaggcggcccaccctaacctgagcatcatggtcagcctcggcggcgacaccgtccagaacaccggcgtcaacgccacctacgccccgacctccgtcgactcgtgggtggccaacgccgtctcctccctctccgccatgatcaaccagtacgggctggacggcgtggacgtggactacgagcacttcggcaccgacgtcgacacgttcgtggagggcatcggccgcctgctcacccagctcaaggcccgcttccccaacatccgcacctccatcgcgccctacgagctccccgtcaaccagaagtactaccaggctctgtggaggaagtactccggcgtcatcgactac

SEQ ID NO: 83133 - DNA, 185 bp, Zea mays
  unsure (1)..(185): unsure at all n locations
  Clone ID: MRT4577_175833C.1
ggttgaatccccatttcaccaggnagaggttccaattgnccagggctggttttttgatcacattcttcaaagccgctagncggccctcgatgaaaggaagttttaggccttggggctgcagcatttgctgcagctgctggagaactttaaccttcggaccagggccaaggccatatatcctttca

SEQ ID NO: 83134 - DNA, 525 bp, Zea mays
  Clone ID: MRT4577_175834C.1
gggaaaggggggaaatttttcccggttcctttttgggcccggggaaaaaaaaccgggttcctagaaccctttttttaggggcgttggggaccccatttttcccaagggattttttttttccaaggggaaaaaaaactaatttttttggggaaaaggaaaatttttgggaaacccggggggggaaactacccctaacgggggcatttttgcccccaaggttttttagtctagaagggggtccctgccttccaccctaggtaccggccccccttattcccactttttttctctctaaaacctatctcacggccggggggggccaccttattgaagggggaaagcaggattttccccaggagtgggccctttctgtttcaggcctggggggggcccccccttaaggcccccctattttacgttgttcttgggggggaaaaagggggcccctacagggccaccggttttattgggggggggctaggagctatccttttttttcacctttttagggggggggggaggggg

SEQ ID NO: 83135 - DNA, 320 bp, Zea mays
  Clone ID: MRT4577_175835C.1
tctcgtgaagctgatagctgccctccaccgccggggtcgtttctcccccaccggggaagccaaacctgccgccagggctgcccctacgccaccagagaaactgggggactctgcaccacacgcgcgtgccgtagcccggggtaagtgcaccacgtggactcgccgacctgggggctactgctgaaggcgcgccgcatgaggtgacaagagcaaccacacgcgagcgaggccgtgaaacgcatgcagctgggaactgctgcaagggctgtgcctactctgtctggaattgacatggggggttgacggccacctctacacga

SEQ ID NO: 83136 - DNA, 168 bp, Zea mays
  Clone ID: MRT4577_175836C.1
gtcatctttgactgatcctgtccggtctccacccctccatcccactccacgccacccccacaccccaccggccatgcaaacacgctgcacatttcagttcagacagtccaagaacagcaccagtaaggaccctttgtgagctttatgttttgcgaatgaataggaggg

SEQ ID NO: 83137 - DNA, 272 bp, Zea mays
  unsure (1)..(272): unsure at all n locations
  Clone ID: MRT4577_175837C.1
ggggatggttttttttttttttttttgccnntagaaaaaaagacgacccccaaaaggggtcgcgggttagaataataattaaaaatacacccgcggaaaatttttatgtgttttaaaaaaaatcgaaataacccgacccccgaggcccataggaaaaccaaaacgggaaaacaagtgccattattacaaatagaggggggtccaaatgtgcaaaactgcgaaagaaaattccaaacccaacaagtgaagggataggaaccctttattgggga

SEQ ID NO: 83138 - DNA, 436 bp, Zea mays
  Clone ID: MRT4577_175838C.1
atctcgatgggcattcttgcgaactgtctctgtctcctctgcttccgcattgtcgccgatgtcaggagcgagatgcacaagagcggacgctccttctatggccgatcgcgcattctatcccacatccaggatttcatcgattttgcttaatgtgacagacatcccccgtgcattatctactgtactagcgccttgtttgtataactgtatgagagccctgacgacctagcgactagaaacaacattcgtcggacgacgtggatctctctcctgaacataagatgcttgacgatgaatgtgaaattgagaaaagctactgttatatgcatctaaagaatcacgcccatgatgccagtgatggttctttccctagacgtggaattctttgcacttgagcgcgccgttgtcctgactttgtctccgtcgtatgaaggtg

SEQ ID NO: 83139 - DNA, 447 bp, Zea mays
  unsure (1)..(447): unsure at all n locations
  Clone ID: MRT4577_175839C.1
ntncgagaggcacctgatctcttcttcccgctctctctaccacaccgtcccatcaccattgctgccacgagagtgacngggagagggcaggtggcgagccggnggacatgggcgcccggggccgctgcagctcgccggcatcgagaacacagcatcaaccgcacgtgcccttctcacgcgcggaagggctgctgacgcacgcccacgacatccccgtggtctgncacgcagaggctcgccctcatcgtcttccccactaacgggccgctctacgactactctagccattcgaccatggcccgcattcttcaccgttaccagcgtcactcatctgaagacacggcagtacttaancccagtattgaacaccaggccaattcggcagctgcatatgtccggttaaaatccaaacttgatgcagttcagaagactcacacgcacctgtta

SEQ ID NO: 83140 - DNA, 276 bp, Zea mays
  unsure (1)..(276): unsure at all n locations
  Clone ID: MRT4577_17583C.1
ccaggtaagcagcagcaggaaccctagcaccgccgcatccgcagccatgggtatcgacctcgttgccggtgggaggaacaagaagaccaagcgcacncgccgaagtccgacgatgtttatctcaagctccttgtcaagctctaccgtttcttggtcaggaggaccaagagcaacttcaatgctgtcattccaagaggcatcttcatagcaaaaccaantgcccaccaagtgctcaatcgccgccgtgtcaagatcantgaaggacaggagaagaac

SEQ ID NO: 83141 - DNA, 229 bp, Zea mays
  Clone ID: MRT4577_175840C.1
gtgggggggtggtttttttttttttttttttggggcgaaaagttattttacatactgcacaacatatgaattttaattcttagcatcctctccagagtccagactccaggggccgggtcattattcacctcttttggcacggcaccgggggggggggggggaaacagggggccttttacatttgagaccgttgctgtgcattgaggaccatggggcattatttttcaac

SEQ ID NO: 83142 - DNA, 486 bp, Zea mays
  Clone ID: MRT4577_175841C.1
gtgtaaatatttatgagcaaaagacaaaagagtgcgccaacagagtaggggaacaaaaagtgttaatccccgggaggggtagctttaagcgggggggacaaaaaagtcacggggtcttattaaagagataacaccacccaaaggaaaaaccatgagtaatcccaggaggggggttagggggaaacaccaccccgggggggctcgttcagaatgtgtagggggaaaagggaaatgtggagatcgctgccatagaggtggagacaaaattgggaagacttaaaaaggggggggtaagcataaaaatttataactggggggggagggggagaaaaagaagattttgagggaaaagattcatgcggaaaggggcggggacctaaaacagaataaaaagggctgtgtgcgatgggaatacccggggcaaaaaccatatcttgagaaaagggggggccaaattttttaaaaaggggccaccaccaatattta

SEQ ID NO: 83143 - DNA, 802 bp, Zea mays
  unsure (1)..(802): unsure at all n locations
  Clone ID: MRT4577_175842C.1
gtccatcctctccccaattccttagctcttccctccgcccctcccaaatccattcactaccgccggcgccggatccaataggaggaggaggaagatgactgtgggcatgatcaacgcaaacccggtggtgcacgagcggccggagcgcgcctcgcacccccacgccgccgatgtgctcgaccctctcgatgtctttggtagagtacttcagtcctctcctcgataaccttcactccaactgtgctgcactgcagtatggccacagtcattggcctgtgcctccgacttaagttgatgcagaacttccctccacatttcaaggttgacatcaaagttgctccaggatctcttgctaatgaagaatcagtaaacaagcaattgaacgacaaggagagggttgcagcagccttggagaaccccaacctacgccagctggtcgatgaatgcttatgcttcaatgatccatactcacgttaacttgttccatgctgcttcacaagtcgcaaccctgcctgctgtacagtagtaaccatgcatgctgtagtctgccctatatgttgacgctgtcgttgtacctggcaacgtgtaattaactgccccggagacatctgtttttgccatctttaaaacgtatggatctcaataatatgacaagagttgcctgcttatgtgacattagcatccaaaagcaagtgtcatttaatgtactaaaatctttggtctttgttggtcatctgtatcggacgtgtcaattctgatcttgatatgttcggntctgaaaaaaaaaaaaaaaaagccccta

SEQ ID NO: 83144 - DNA, 271 bp, Zea mays
  Clone ID: MRT4577_175843C.1
cggccgaatcccgggtcgcccagcgtccgcaccgcaaggtgccagctgcgagtggtgagaggctgtctacccctagtctactctacctttctggtgctgacatccatacgccccgtagacgacgaaggagaataacgcatagcttggctcccggcctatgcttctgccgcccgaccgttaatgatagtctctactgactgttcatcatgtgttcagcaacccagcagggtattgagcgggtatgtaatggtattgcaactatatagggtgt

SEQ ID NO: 83145 - DNA, 567 bp, Zea mays
  Clone ID: MRT4577_175844C.1
acaagcttttttttttttttttttttttttttttttttttttttattttttttttttttttttttttttttttttttttttttataattaattttttttttcttcgaaacggccagggctaatcccaggaaccccggggccgagacgagaaaaaccgggggcccaaccaagctgggggggggtaccagcaaagggggggccggtaccaaagggggcgcccctcacaccaacacagagatcacgatgggaaagcatagatgcaaagggagacgagccaaaggagcaaaataacaaaaattaaaagccgggagcgcaaagcgcaaaacccggggggcaaaaagggcgagcccaccaaaaaaaagagccaagcccccagcggcgaggggccagtcgggaaaccggctctgccaccttgactaaagaagcgacccactccgcgggaaaggttggctgcccggagggagctcatcccactccagggccacaaaactgctatccacggaatcagggcatccggcaggaaaaaacatgtgactcaaaaggccaaaaaacggccaaccacaaaaa

SEQ ID NO: 83146 - DNA, 827 bp, Zea mays
  Clone ID: MRT4577_175845C.1
ccggccgggaaaagtgcaccaatgattgagacccgactcgtcgttcgaggtctcccgggattccttagctctgccctccgcccctcccaaatccattcactaccgccggcgccggatccaataggaggaggaggaagatgactgtgggcatgatcaacgcaaacccggtggtgcacgagcggccggagcgcgcctcgcacccccacgccgccgatgtgctcgaccctctcgatgtctttggtagagtacttcagtcctctcctcatacggtgcgggacatcaaggacccggagcacccgtactccctggagcagctcagcgtgccgtcggaggagtccgtctccgttgacgagacgctcggacgcatccagataaccttcactccaactgtgcagcactgcagtatggccacagtcattggcctgtgcctccgacttaagttgatgcagaacttccctccacatttcaaggttgacatcaaagttgctccaggatctcttgctaatgaagaatcagtaaacaagcaattgaacgacaaggagagggttgcagcagccttggagaaccccaacctacgccagctggtcgatgaatgcttatgcttcaatgatccatactcacgttaacttgttccatgctgcttcacaagtcgcaaccctgcctgctgtacagtagtaaccatgcatgctgtagtctgccctatatgttgacgctgtcgttgtacctggcaacgtgtaattaactgccccggagacatctgtttttgccatctttaaaacgtatggatctcaataatatgacaagagttgcctgcttatgtgacatta

SEQ ID NO: 83147 - DNA, 393 bp, Zea mays
  Clone ID: MRT4577_175846C.1
ggagaccgactagactcgctcatttgctcttctactattctttgctcctgactatgtgctattgcctgatccagaacatagccataccctaagatccagctactgccgtgatgaccctgaccccaagatcaggatactagcaatgttagaaatgaacagtaagaggtgttcatgatgtcccctagtgtatgtagcttgctcctgagcacaagctaatcggatcgagagaagagcttgctgatggccgccttgactatcactgggactgtcaccaagaactgcaacgaaaggatgcctcccccattaggacccgggttaacccgctgcatgccctccgaatcaacaagatgctttctagtactggggctgataggctcaagactgcaatgaaaa

SEQ ID NO: 83148 - DNA, 983 bp, Zea mays
  Clone ID: MRT4577_175847C.1
actcctatgggcgattgggtccctcgaggccggccgggaaaaaccgcaccaatgattgagacccgactcgtcgtcgtcggtcctctccccacattccttagctctgccctccgcccctcccaaatccattcactaccgccggcgccggatccaataggaggaggaggaagatgactgtgggcatgatcaacgcaaacccggtggtgcacgagcggccggagcgcgcctcgcacccccacgccgccgatgtgctcgaccctctcgatgtctttggcgggctttcgtggtgcggtgcgtcagatacggtgcgggacatcaaggacccggagcacccgtactccctggagcagctcagcgtgctgtcggaggagtccgtctccgttgacgagacgctcggacgcatccagataaccttcactccaactgtgcagcactgcagtatggccacagtcattggcctgtgcctccgacttaagttgatgcagaacttccctccacatttcaaggttgacatcaaagttgctccaggatctcttgctaatgaagaatcagtaaacaagcaactgaacgacaaggagagggttgcagcagccttggagaaccccaacctacgccagctggtcgatgaatgcttatgcttcaatgatccatactcacgttaacttgttccatgctgcttcacaagtcgcaaccctgcctgctgtacagtagtaaccatgcatgctgtagtctgccctatatgttgacgctgtcgttgtacctggcaacgtgtaattaactgccccggagacatctgtttttgccatctttaaaacgtatggatctcaataatatgacaagagttgcctgcttatgtgacattagcatccaaaagcaagtgtcatttaatgtaaaatcttggtctttgttggtcatgtgcatcggacgtcaattctgatcttggtatgttcggttctggaagtgagaacctgtcgttatgctgc

SEQ ID NO: 83149 - DNA, 385 bp, Zea mays
  Clone ID: MRT4577_175848C.1
gagcttactagtcggcggccgccctttctgttttttttttttttttaatctcaagagggtgcagatcctttaagcatcacaagcacgctaaacaccatcattggtcatgacagacaatacacgtccaactggtgggttataagacgagatccacctccaccagatgttaagcataccttcattaccaagggacccaaacgctttaaagcttcagattccctgcaaacgaaagtgctcagagacatgtagccacaacataccatgaccaccttcccacactatatcacctaaactggcagaacaccaaacaggaacaactctcctactgactatgctgtaaaacacatactggtcaccaggtttttctccaaacacaacgaataca

SEQ ID NO: 83150 - DNA, 1780 bp, Zea mays
  Clone ID: MRT4577_175849C.1
aagtacgaagccgcagcctccaaaactttatagccccttgatttgatccgcaccgcacgaacaacgtgccgcgacctgacgcggtagatgatttcttttagccaacaaaccaggcaaggactgggcaacagcagctgctaatcagcctctgtcaccataattaagacgctctcttggctgccttggtttggttcctgctcctccttactctacctgaccagctcggcagctccccagccgcgacagagtccacgacgacgatctttcttcccacccccgtctgcctccggatcccagctcccctgcccgctcggtcgactccctcgtcgccgagtccagctccgactccgagaaaaaatcaaatcgaccgagtccgcccgtgaagccgccgacagaaggagagagcacagagcgggcgaggcaggcagcatgaagtccatgggcagccgcgacaagctcgcggcggcgtcgagcccccgccgcgtcctcttggtggtcttcgccttctgcttcgcattcgccaccttcctcaccttcctctacaccacctcccacttcacgaccgcgcccggctccggctccggctccatcgcggcctctaccaccaccaccaccaccacgacctccggctctgcgggcggcggcggcggccaaggccaagcagggcccgagtccgtgtccaagcggctgccggtcccggtgttcgaggcgctggtccacttcgcgtccatctcgaacgcgacgcaccgcatgtcggacacggacatccgggccatgtcgtccgtgctccgcgcgcgggcgccctgcaacctgctggtgttcgggctgggcgcggaatccccgctgtggctggcgctgaaccacggcgggcggaccgtgttcctggaggagaacgagttctacgtcaagtacctggagccgcggcaccccgggatggaggcgtacgacgtgtcctacacgacgaaggtgcgcgacttccgggacctgctggcggcggcgcgggcggcgagggccaaggagtgccggcccgtgcagaacctgctcttctccgagtgccgcctcgccatcaacgacctgcccaacgacctctacgacgtggcctgggacgtggtcctcatcgacgggccgtccggctggaaccccaactcgcccggccggatgccgtccatcttcaccaccgccgtgctggcgcgctccggcgccaccgcggctaagggccccaccgacgtgctcgtgcacgacttccagttcgaggtggagcaggtgctgagcagggagttcctgtgcgacgagaaccgcgtcgcgggaagcggcaccccgtcgctcggccacttcgtcatccgcgggggtggggccggggccggcgacgccttctgctctgcccaggaggacggctcgtcgggggagaagacgcgccgccgccgcagccgcaagtaaattttacttgtccgctgtccgtctatcttgccacggagacgggcagacggcattagccgccagcgacctctcacttcttcctggcgagtggatctttaccgctcctcctcacccacctgttaattaattttttctctcttgcatatacatatatgttggttgttttgtttctcgggacaagaactgtaagaacaaccctggtaatatgattgcctccatcacaaaagaaaaaaaaattgaaaaagagaaagaaaaggagaagagaagtgatgtagcaacaaccctgaaagcatatatactagctagtagctttacacatctataatctaccaaaaaagggcgg

SEQ ID NO: 83151 - DNA, 486 bp, Zea mays
  Clone ID: MRT4577_17584C.1
actccaagaatggtctgccgcccccctccgcgcaccaccatgctgctccgccgcctcctccacccctcccaccacctccggcgcggcctccagaccctgaccacgaccaccaacgccgccgccgccgcgccctcggccccgcatcctctctccgcccctctcccatttcgccgcctccccgcccgcctcctctcgccgcggctcctctccacctccggcggcgacgacgacaccagaagaccgtgggccttcacgcaggactccggagatccagaccccttcgccgatgtggaccccgccgccgccgtccccggcgaagcgccgctagggtcgagcgccgtcgtcgaggacccgtggtcgaaggacttccgcgcggaggacagcgacaaggccgacgtgttcgaggagatctacaaggatgcggccgcggcagcgcctaccgcgaggaaggcggccctggccgagccgtgggcgtgggatttggag

SEQ ID NO: 83152 - DNA, 493 bp, Zea mays
  Clone ID: MRT4577_175850C.1
ccggccgggacggccgccatctcccctgttcggctttaggagatctgcgccgctctcctccggccactcgagctcgcctaaatggtcgtccacaggttccatcagataccaggtggtgggtcgcgcgctgccgacccttaccgatgattagcataagactaccgcatgatgctcagggccactaacgaggctgtggccaagaccaacttctggtacttcctgagaaagctgaataaggtgaacaacaacagtgacctcaggctggacatgaacgagattttcgagcgcaacctatgcaccatcaataactagctgatcatggctgtactaccggatcaagacggactaccactacatgtacagggacgaccgcgacaccaccctgaacgacgccgagcaccagatgcacaacgagatgggctcgagctacagcttgaggtccccctgcatgcagatcatcgagacgatgacgatccacttcaagctgtgcaag

SEQ ID NO: 83153 - DNA, 417 bp, Zea mays
  unsure (1)..(417): unsure at all n locations
  Clone ID: MRT4577_175851C.1
aattcccgggnnanaagcatactagtcgttggccgccctttttttttttttttgttaaacattggtatttatttgcatatatttgaagcaatgctctaaaaagtgtagaatcaagctcatgacttaaactttgtttagctctaaggcccttgatttagcctgttcttaacttcctctatataaagctcaacggattatataaagctaatctgtcgggtaggctatttctatctctaaggttatcttttgttgcttttaatggcaacatgttacatgtgtatagaaaatacgatgataaaatacgcaccatttcaaagatggttatgcaacaatgattttccttttttcttttctttttgtgaatgcacataatgcatatgatcaagcaccttcccaaccagaaaatcttgtaaccaa

SEQ ID NO: 83154 - DNA, 467 bp, Zea mays
  Clone ID: MRT4577_175852C.1
caattacatttcataattgtcttctcatattaatgaggtggaaatgaacattgacttttttctcaacgcattaaccagcttacaaggcacgcaaaggctttagtatacaggccaaggcatcacattgtgctactactcggtaggaagggattactatgctaatggcccacagcttccttaaaccttgcaacccacggctgataccgactgccatgagcacttctggaacttccttgccttggagcgcacatatggctaagattgtggttgtgcgacactccaagagccttgccaaagtgcctgaccaactgacgggcattgttggggccactaaagagatctgtttcttaacagtggagcactgagtagcaagctgttcaaatgtgaagcactccccaccagcattgacaatgatggccctagccgtctgggagaacctcatggcattaaccttcattggtggaacc

SEQ ID NO: 83155 - DNA, 336 bp, Zea mays
  Clone ID: MRT4577_175853C.1
gttttctttttttggctggaattgcacggacaaattattattcaagcagagtacggagcacctgcccatggttgtgattgctaacactaccactaagctaacaaaatacagagtgctgaaggaaatatgcaggagttcttccaaatgattggacatcgaacataaagttgtcccgaaggtcccgacccacccaggcctcattattaaattttttcccagccgaagacccctactcgctgatgcgaggtcattagatgcctagcaaataatggtctatctcccagcttcgataggcatctgctaaatatccgacagatttaaatgctggactataaa

SEQ ID NO: 83156 - DNA, 442 bp, Zea mays
  Clone ID: MRT4577_175854C.1
aaaaaaaacccctataacttttggtttataaaaaaaacaagaatcgacctttaaaaagggcaaacagggctaaacgtaaattctgcccaaatttggaaaaaattcgactactcactatccgaacagttttttgaacaagtttttgctttatcccaaaaacattgaaaatagttttctgaacaaggttctgcaaattaactacttctctttgcaaaaaaacaaaaaagggcttgatgggacccaaggaccaatatttgttgggactggttatgttttaaaaaaacatgctttgtttggttatgaagccccaactggaacaaaaccttctaacaaaaaatgtaactggtggccaaagacatgctgtttgggttggggatccaaaagaaaatgttccaaagcttagaaccaaccagaactctcaaagaaagtgaaatgccggaat

SEQ ID NO: 83157 - DNA, 1412 bp, Zea mays
  Clone ID: MRT4577_175855C.1
ccgagctacctctccaccccctcctcgtgccgtccacgcaccaccggcgcgccgcgctgccatggccatgaggccacgcgccgcgctcgccctctccctggcagccggcgtcccgctggtcctcctcctcctcctcctcgcgcccggcgcgcgcgccgacgacggcagcggcgggtgcggggcggcgggcggcggcgaggcggcgccgggcgaccgcgcgcgggccagggcgctgaagatcgcggccttcttctccatcctcgtgtgcggggcgctgggctgctgcctgcccgtgctggggcggcgcgtgccggcgctgcgccccgacagggacgtgttcttcctcatcaaggcgttcgcggcgggggtcatcctggccacggggttcatccacatcctccccgacgcgttcgagaagctcacgtccgattgcctctccggcgggccgtggcaggacttccccttcgcggggctcggcgccatggtcggcgccatcggcacgctcgtcgtcgacaccgtcgccacgggctacttcacgcgcgtccacttcaaggacagcgccgccgccgccgtgggcgccgccgccgtccggcgacgaggagaagcagcatgcagcaggcggcgtcggcgccgcacgtcgacgacggagcagacggcgacggccacggccacggcgggcacgtgcacatgcacacgcacgcgacgcacgggcactcgcacggcgcctcggcgctcgtggccgccgtcggcggcgccgagggcgacaaggagcacgcgctgcgccaccgtgtcatcgctcaggttcttgagcttgggattgtggtgcactcggtgatcatcggcatctccctcggcgcgtctcaagaccccagcaccatcaagcctcttgtggtcgccctcagcttccaccaaatgttcgagggcatgggtctaggcggctgcatcgttcaggccaagttcaagctgcggtcgatcgtgacgatggtgctcttcttctgcctgacgacgccggtgggcatcgtggtgggcgtcgggatctcgtcggtgtacgacgaggacagccccacggcgctggtcgtggagggcgtgctcaactcggtggcggcggggatcctggtgtacatggcgctggtggacctgctcgccgaggacttcatgaaccccagggtgcagagccggggcaagctgcagctcggcatcaacgcctccatgctcgtcggcgccggcctcatgtccatgctggccaagtgggcctagtttactagccacctttttgctctctgccctctcgattccagttttttttagttgagttgctgtaaaatactactgttatggagaaacgaacgaatacaacaactcttttttctggaaaaaaaaaaaaaaaaaagggaaaaaaaaaaaccccaacc

SEQ ID NO: 83158 - DNA, 200 bp, Zea mays
  Clone ID: MRT4577_175856C.1
caggtgacctgatctttattttgataaaccgagaaggggagctagtacctgctgtggtgggccattaatcaattcttaaatcaattgaacctgatactgatgctacagctattcctagctgaggtaatgctactgattttacactaacgactagatctgcgactgcagcagcatctataacacatttctatgcgctccaa

SEQ ID NO: 83159 - DNA, 1105 bp, Zea mays
  Clone ID: MRT4577_175857C.1
tcgcgcgccttcacccaggtccaaaaactgccgcaagaagaagtgtggccacaacaacgaggtaattaagctttgttttcatctgccatccaagtgttctgtaagcacgccaatattattaatgttcttagatttgctcttctaccttaatgcatacatcgtttgcaggctcgacaaccaaaaaaatataacgccccgtttggatcattgaaattgaatttcattctaataatagtaatttaggcatatatcaattaagataattcagttttatacgaaagatatttgtatactattattagcaagatgtcggagatatttatgtgctaaatttttactatagagtagtgagacgaagagtgtcatgtaagttacagagtagaaacaaattctactaatatataaaatcatttcccatcttccacactatgaatttacgatagacttatatctgaactttggaaagtgatggaatctcaaattctaaactaaataagttagtttattgagtgaattccatttcctctaaaaatgaagggatccaaacgccccgtaagagtttttcttcgttttgttgcaccgttcatactatgctatgttctccgtcatcatgtgatgctgatgtaagagtggatataaagtgtcatcaccatattcacgttttatcaatagcattgtaccagtttagattttaatgtccaagttcgtttattttcatgtaatgcttgttctagtttcttaattagtctatattaattaatctactcttttcagccatgtcctgtttagaacaatatttagaacaatacagtgtagtggcttttttgttcattctctgatttcccccctgatattacttttcagctgaggtcaaagaagaagttgtctccaggtttgccatgtgaggtttggaaagcaacattctggtgtgcgtcatgtatcagttgaatcgactcgtctaaacgtttctattgcggctgttagttgtccgaatttaagtttctacctgcgcgttgaaccttaaatactctttcaaatactccatgcggtttcggcacgtgcagcggcatgcctaaacaatactagcgcgagttcttttggctgg

SEQ ID NO: 83160 - DNA, 157 bp, Zea mays
  Clone ID: MRT4577_175858C.1
cgggggggcgcttgaatgcgcattatgcacaggtggctatactcgtacatctgaacaaacaaactctgtttaccttgctacagatgaacatcagtctatttaccgactgttcctactatagtcctactatgtactccggccggagcgggagcggtga

SEQ ID NO: 83161 - DNA, 728 bp, Zea mays
  Clone ID: MRT4577_175859C.1
ggacgcctgcaggttccggtccggaattcccgggtcgaccacgcgtccgaaaggaagaggtgacccactactgtaagacatgtcaacgactggtgtgccaactctgcagagtacggcgtacccacagtgggcacaagatcacaccagtgctcagtgcctaccaggccctcaaggataagctaacaaagagcctggcatacatcttgggaaaccaggacactgtgcagacccagatttgtgagctggaagagaccatcaggcacactgaggtgagtggtcagcaagcaaaagaggaggtgtcccagctggttcggggactaggggctgtgctggaagagaagcgggcctcactgcttcaggccattgaagaatgccagcaagagcgcttatcccggctcagcgcccagatccatgaacaccagagcctgctggatggctcgggtctggtgggttatgcgcaggaagtccttaaggaaacagaccagccttgttttgtacaagcagccaaacagctgcataacaggattgcccgagccactgaggccctccagacattccggccagctgccagctcctccttccgccactgccagctggatgtggggcgtgagatgaagctgttgaccgagcttagcttcctgagaggctgtggccaccgcggactctgctccggagcaccccagtgcccgaggcgcccgtcatagacacccaacgcacctttgcctatg

SEQ ID NO: 83162 - DNA, 346 bp, Zea mays
  Clone ID: MRT4577_17585C.1
ataatgtttgcacaaccttatttggaatgggtggcgaattattttgttaaattaaataatttcttgacctttagttcatcttaaaattcaagtacttggatggtgcaaataattattcctttgtgtttctgtactattgtaacaattatttctaggccacttgttactgatatttatattcccatcacttaggttggtaactgtttattttccccacattgattacgatcatgagtgtttctacttgtagatcatgctggagaggcacacaaaccgccacaggggctttggcttcgtgacattcgaagatcgaaaggcagttgacagcgctatcaaagagatgcgt

SEQ ID NO: 83163 - DNA, 184 bp, Zea mays
  Clone ID: MRT4577_175860C.1
gtggaaacaaagggcggaaatttttacttcccgttttttgaaaaataacatttttttttcgcgatatgaaacaaaacccgggaatttctcctgaagggaagtcgacaaagctgttttcccgggtttatcaaccgtcccaaaatttagagggggcggggccaacacaagaggggttttttggtcc

SEQ ID NO: 83164 - DNA, 258 bp, Zea mays
  Clone ID: MRT4577_175861C.1
atggaggcctattgaccaagcacactcagtaaagcattagtcgagtgttatcgagccattaacgagtgcctgcgacactcgacaaaacactggcagtggataaacgcggtgtatatagcgttctgtacatggcttaccaccatatacagtacactggtttattattgcaccggcagcagacgagaacccatggaattatccatggagctgagcttatgggatcatcaggcatcgctttgacaggcatgaaggtcgatg

SEQ ID NO: 83165 - DNA, 450 bp, Zea mays
  unsure (1)..(450): unsure at all n locations
  Clone ID: MRT4577_175862C.1
gatngtatctgctccataataatactaatctacgcactaccactaagcgtaattcatagagacgcacatcataagagacaggaaaagaataaagaacttagatcaacatcaataaaatgaaggaatcctaaccagattagaatttaatcctcctttaaatactaaaagctataagtgttgctatacttaaatataatgactgaaaacattatttacattttgtaaattgctataatatttgaagtatattactatcaaatacactacatatgtcgatccacttcaaatataatataaaaatatggaagaataataattcgtaggagtttttagtataatcactgatattctgtatcataagacagacataaaggtcttaattttagaataactactcattagaatgaacatgagaatcatactacgtaaaaatatattaatcgtgctatc

SEQ ID NO: 83166 - DNA, 330 bp, Zea mays
  Clone ID: MRT4577_175863C.1
acagggggggaacgggggtcaatttattttagggaattttacaaaccaaaggtcccaaaataggttgggaaccgggaaatccgatgcatgtttacaagggaacatcacgttgtacaaaaacccttatttttcaaaggttggttgagtaaaaaaatagggaaccccttttttttaaaactttggaggggctccttgacccccggctccaggggaaaaaaatcgaggcccaagctttttaacttcccctttgaaacctgggagggggggaaaaaagggttggaatttgcaaacttttcccaaaaaagaaggggaggaaacaatttggggaaa

SEQ ID NO: 83167 - DNA, 186 bp, Zea mays
  unsure (1)..(186): unsure at all n locations
  Clone ID: MRT4577_175864C.1
ctgaactttacgatattaacncaaaaagcgggaccacactcaagttgtttcggtaaaannataactcgacccacagtgcattaaacgttaacaactcgacaaccaaacaataatagacaagaacactctataaacacatgtattaatcaaatatttgaagaatacgacaatactaatattgaaaga

SEQ ID NO: 83168 - DNA, 183 bp, Zea mays
  Clone ID: MRT4577_175865C.1
ggagggaaaatgcgggggatttaataaccctttggagttttttttcacaagccccactgaacggggtttcaaagtaacccttatttactccacaaatcccgcaacaccaaatttttttttatggaatgaatccccccaaattggcaaattccacataccaatttacagtttacaaaaggcccc

SEQ ID NO: 83169 - DNA, 973 bp, Zea mays
  Clone ID: MRT4577_175866C.1
taacaagacgtcgctgccggcgaccaggggaaaaccgcaacgacgatgaacgtgccttccgctctgggcacgcgaggcgcggcggcctccacctccaccctctaaaataagacgttgcagccaaccaggggaggccctccgcggtccgtggctccgtgccatcctctcctgggcagcgagcagtggtggccgcgggttcccccgcctcgtcctcccggatccggcgacgaagattaattgaataacttcgataagatgggtcgtggtattagcagtgggggtggtcagagttccttgggctatctctttggcagtgacgaagctccaaaatcatttgagaagcctgcaccagttcaaaagccaactcctccatcctctgcagagagactaaaagatatcgctgctggtattcaaagtagtaaatcaaacaattacaaaagatctgaaggccagaactgtggaaatttccttacgctgttgtgggatgctgcaggaccgtccgtcgaccaaggtgcaagcagctccaggtggcgactcttcactcggttatctttttagtggcagcaaagatggcaagtgatgtacacctgctgttagtgttcgccatgatcatgggagaaggtttctgcttaacaaaggaaaaagggaaaagaatcttgtattcccatgagtaaatatcaaactgctcatggtatctatgttgttgggattgcttgtatgtgtgtacatgttcgtgtgtgtcgtgtgttgatccacagctactggtagcaagagcttctatccctgctgatggaattgtgcgcaatgccaatgttgacattatcgtgggtgatgctattatgttgtggtgtattattggatatgtttgctgtttaatacacattgttgtagaaaaaaacatccacagttctgttcaatttcagagtgtcctgttcaattttcaaaaaaaaaaaaaaaaaaaaaaggcccctaa

SEQ ID NO: 83170 - DNA, 640 bp, Zea mays
  unsure (1)..(640): unsure at all n locations
  Clone ID: MRT4577_175867C.1
cggccgcgtgggctagttcctagnacgcgagcggccgcccacgnaccgcgcgctggcccgcgtcctcgccgtggcggcgcggtgcgtgtccgagagcgtggagcggcggccggccatggacgaggtggtggccgagctgcgcgagtgcgccgggtggcggcaccgcggcggcgtggtggggcgggtgtgcgagcgcgtcgcggcatggggccagcgcgtgatgaggaggggcagtaaccgggtggtggcgaccaaggtcgagtgcaccgagcactccgacagcgacgtggcacccgatcgccagggctcctcctcctcctcgtgcgcgaccgcggctctgccaccgcatcggaacgacggcatgatgaccggcgcacccaaatgaaccgaagacgaggtagtgtctgacccaattcgagagcgagtttggatctcgttttcagtagttgacaaactacggatgtttactggtaatagtactagctagttacgtgtcacgagactattactgtcacagcagttatggcatgcgctaatctgcgactgctttgctcgttccgatcatcgcacagtctcgagatatggattgacgtcgtggtatataaacgcttcttcattttacgtttggaatttgggtttc

SEQ ID NO: 83171 - DNA, 665 bp, Zea mays
  Clone ID: MRT4577_175868C.1
tcctttaacccatctgtccctcgacaggccctccgtcccccttccgctggcgccgacccgccgccgcccccttccgcaacgccagtggcgctcccccacaagttggtcctcgccgccggacgaggttgtacgcctccggccatcctcgtgctgctcctccggcgagagcggctccattcacaaccgtcgggccgcgctccaccgctgacccgtctgctcctatccaggtcaccgtctgctggccgctcccttcggatcctaggctcgccctctccggatcaaaggtactagtgagctttcgccatgtcgaggctgcgggcgctctggcaagcttccgtgaacgctaccaagcgagctgttgtatggaattcagaagatttatttccaccaagtgaaagatacatcttcaatttcaattcaaaagatgaggtgaagaagtggcacttgtactcggattcagagtatggaggtttatcatccgcatcactggagataactgatagtgtttctggtggagatacttcatcaacaggtgtcttttctggcaacctctccttggatatgtccgagggatcaccatggaggatcaggcggagtggtttctgcggaatgcgatcaaagaagtttgatggttacatcgatcttgattcgtatgatacaatagc

SEQ ID NO: 83172 - DNA, 404 bp, Zea mays
  Clone ID: MRT4577_175869C.1
cccagcagcgctcgacaccggccggccatgcgggcccccgaaggtgccgaccgggcccaacatcaccacctactacaacggcaagaggcctcaccgccagggccaccatggacggacagcccaacggcgccggcgctcctgacaacaagcggtgcgtgcgggatcaagaacgtgaacctgccaccctacaggggcatgacagctagcggcaacgaccgcataggcagcgcccgaaagggctgcggaacatgctaccaggtgagacgcaaggaaagacctaatagcgccggctatacaggcacggagtaccatactgacatgaactacgagccaactgctcctgaacacagcgaaccgagcggcagggccccccgatccctggcaaagcccggctcaacgacaag

SEQ ID NO: 83173 - DNA, 2031 bp, Zea mays
  Clone ID: MRT4577_17586C.1
gagcagtagcggtggcgatggagggcaaggaagaaggtcggatcttcgtgggcggcctgtcgtggcaaacggacgagcgcaagcttgaggacgcctttggccgcttcggcaaggtcgtcgacgcccagtaccattgctgcttgagccttgaggacagtaaatgattctgccatccggaccaatgctgggtgctggagcagaaaattgatgctagcctcaccagtgtggaccctttcagccagctccatgcgatgcattgcagttttgggaagacaaactgggtaactaggagcccagcttaccagcagctcagacttccactgttgttaccatggaaatgcaagtcgtttggctttaggtttgtgcattggtttaaatgatctggtatgcaaactagagaatatggcagtggacatacctgctacattgtcctgtcaccagaatatgctgacatttttgagaagttagttcatgtcggtaacggtaaaattggttccttgttggaaatagcccagttctccaaaacatggttcccagaggctctatagctttgctccttgtccgtgttaacgagctttgctgtcttgggactagactttttcatgaaggtagttacagctagatgcatctgtgtcaggattatgatttgttcttgaattaccgagatccaggaataacctaatctcagtgcttctcttctgagatcatggtggagagacacactaaccgccacaggggctttggcttcgtgacatttgaagatcggagggcagttgacagcgctattaaagagatgcatggccaagaaatagatggccgtaccatctcagtgaacaaggctgagcctaagatgaatacagatgacacaaggtatgccggtggtggtggacgaggagagtatcgtggtggtagaggtgatggtccaccccctggcaattgctttgagtgtggtcgtcctggtcattgggtccgtgactgccctagtgctgctggcggtcgttctggcaggttcccatccaagttcagtggtggcagtggcgttggcaggggagaccgcttttctggttcagataggtttggtgatcgttacatggatgatcgttatgatggtggtcgctatgggtaccgtgatcaagctgatgcaagggacaggtatgctggtggccgagatcgctatgccaatgaccgttacccatctggtggcgatcactttggtggagacaggtatggaggtggtccggattgttatgtgccaagtggttatggtagggagcgagaaagaagctacgagagagatggagttcgtggtggtggtggcggcggcggcggctatgataggagtggcccaaggggtggtggtgggtatgacagggatggtccacgcggcggtggaggaagtgcacgctatgatggaggaaattacagggagaggcctgggccatatgatcgccctagcaggggaggacgttttgatgatcgctactgatgaactgcctgtagactcaagctccttgtcttggtagtttaatgtttgcagttttgcatggccgaatgcttaatgggctatggaagatgcttaatttatccctcttcggcactttaatgtctgctctttatttcaaccagtactggggcactggtttgccttgataagtttatccagctgacagtttttgcatgagatgagtcatgctctgggctattaccctgcctgttggatatttcagtagctgaggtttgcagtgatcgattgtcattgttgatctgaatatctggtatgcgtggactatgtttaaagtgattgcctgtcatcattggtctatatagttggtgagcatatatatgttcagtgtcggtgcttgtcattgttgttggtctggatatctaggcttgcaaggatatatttgcagggctgagttgcaagggcttaacagaacaatagccaaagtaccttatattttagtagctggagaccatgttaattatgctataattagctggagaccatgtaaatttagcttagtttttgtc

SEQ ID NO: 83174 - DNA, 400 bp, Zea mays
  Clone ID: MRT4577_175870C.1
gaccatgccaaacattttaacacattccatcagccgaaagcacaagtacaacaagcggttagagatggaaacttttggtcataaagtttgtcttcggctaatgtttttactacgacttaacagacgttcctcttggctatcgggaaaaaaaattccttatttgtgtattgaaggaattccacacattgcatcaggtcccgagtgttatttatactccagcttctttccagactccaggatggaccaccccaaattgggtgttatagttgaaaacattctccagatcttagggtgacttttgtttgccaaagggttttaatggagggtcattcgtcttatgggtgtttatcaaaatcagattagacttaaaggtgcaaataaaactttgttttgtacaatt

SEQ ID NO: 83175 - DNA, 387 bp, Zea mays
  Clone ID: MRT4577_175871C.1
aaaactgaaaatcttgccttccaaggaacccattttaggcctcaaaacaagggctgtattttggctggtttggcctaaaaaacaaaacttagtttcgatttatatgtacaatgttaaacttaaactttttgaacatagtatttacatatgcccaatatttgacaatatgccacccaagaaaggggcaacaaaacgaacaaacattttattgttcaaaaaaaaaaatttggtttggggggtcgggcttttcgggggacccaggtgttgaatgccgtacccaaagggggccatttttcaacttttggggttgaaaagttgaggccctgttgcaacaatttttggccttttgaaataggcaagggggaaataattcccaaaaatgttttt

SEQ ID NO: 83176 - DNA, 649 bp, Zea mays
  Clone ID: MRT4577_175872C.1
accctcccctgcctgctttctttccgatcgccaacccagccaaccctccctgcctttcgttaactcacagagggaccgaccggcacccaccgagggcaagaagccagccgggaagaaacacgcccaggaagaaccagcccgcccgccggagaaggatcgctctgggaggaagccaaccgcgggcaagcagctccctcccggaaaaaacatccgccaggaaggcgggggtgacaagcaggagcggacgaaggacagccagaacgagcggacggacaagctctacatacataaggagcggactcaagcgcacccacacatacatatgtacttcatggacaggcacatccagaactaactcattaatgacatacatcagaagcaagccggccaggcaggcaagctcgcccgtcacaaccagaaggacaccatcaattacctggagatacatacatacgtccgtctggctctacctacccagctagctaagcacgcacgctgggagggcaccaacgacggcagcaagcacacctacctctaacttactttctagtaagtacttacgcgcccggcggcgctccgactgactggaaggaatgtcatccgacagaagatctgaccaaggcgatctataattcaggcttgctgactg

SEQ ID NO: 83177 - DNA, 344 bp, Zea mays
  Clone ID: MRT4577_175873C.1
ttatttttttttttttttaaaactacaaacttgggataattagaagcaaaaagggggttttccagccctctagagtactacacaccacgcccccgtatcgaatagtatccatagagtcctcatctcaaactgtatgatgtacccccttggctacaaacttgttaggggcacccaatttttttgaaccccttccattctacaccagcatttattctccatcagatcctcccatcttatataacaacaaaggggccccactccaaagaactgccccgatcaacctcaattccatgatatcatcaatggcacgcttcattccaaagcttggcatttgttctgccctt

SEQ ID NO: 83178 - DNA, 345 bp, Zea mays
  Clone ID: MRT4577_175874C.1
tttctattttgtatttcagcagacactatatataaaatttgcggggggccacacagaaacacagatcacgacatataaaacagcactggacaccacaagcaacacttatacatcacaaaatagcgcggggaaattagactctgcatcataaaaaggaattgcaccctgaccctttggtcgatcgggaaataacagaccacgtgcctgccggcgctacaatattcccctccgacagttgtcttacagcctggccgatacgtgctaacagctgcatcctacgttagatcgtcattctttcacacctacacacaacatacaagccggcagcataaagctgtgaagcct

SEQ ID NO: 83179 - DNA, 539 bp, Zea mays
  Clone ID: MRT4577_175875C.1
ctgtttgatgtgatctacttgtgtgtgtgtgcatataagggcgccgaggcgagcccaacccccaacagccagctgctcggagctccacgcgatggcacacaaggagactaatggcagcaaccgccatcacatctccacccgcccgacgacgaccccctcgccccttcgcttctccaagctctctcaggctaaccggcggatccaggacactggtcggcgcggactcaatcagctcccacctccaagacaagctcatggagaaccagaagcacgagggcattgccgctgataacttcctcactgggtcaaaagacaacctgaagaagaggattggccacccaagatttgagcccacccggcatgatgacaccaagccgattattttgataacccaccaaatctatcaccttgctgaccctgcttcaccaatcttctacaagcacaaccctgtcaagaccaacaagacaaatgttatggggacccctgaacatgctaggacttgcaaagagaaaaagagctccggataacgtgacaacaac

SEQ ID NO: 83180 - DNA, 2246 bp, Zea mays
  Clone ID: MRT4577_175876C.1
ccctcgaggcctgccggaccatcccaccgctgctcatctcgaatccagcccgaaacctcgcgccacgcgttcgttgggcccagttcgtgcgcgttcagctgctgccccgcgctcagggatcgggaaggcaagctctttggtggttcctaagggcgaatctcgtggcgattcgctcagatttggatttagggtttaggaggcgctcattgggtccctcgaggccggccgggtctacttccttagctaacttcccagccccgacaccttggccgccgctccgtgcgcacccagttgctgaggttgcaacgctgcagccggcgaggatcggatgaaccaccaacccctcctataaatcctaaccgagtcctctgcttctgctctcatccatctgtagagtgcaacatgcagtgccccatggacactgctgctagtggaacctcgccagtgatgcaattccatagcaatgctgatgagtctatcgcccattcatctccattggcaacattaatacaacgttcacagcgccattgctatggggatggatccccaggcgaatttccccttgctgtgagcccctccattgttctccatgtgctctcatcttgtgatctaggtccgaaagatctcgccaatctggaggctacatgcgtatttttcggcaaacctgcaagttttgcaccagactttgcattgtcacttccggagcttgcggcatttgatatgtgccagaaaaggaccatgtttaagcagatgaagcaagaagatcaggagtgtctgaaacaacggtgtggaggctcttggaagcatgttcttgggtacattctggttagggagaagaatggttctcgggtgattgccgggccaggccacagcatcattatcacctcaaatggagatgtatattcgtttggagcaaactgctccggtcagcttggccttggggattcagaagaccggttcaagccatgtgttattaggtctctacaaggcatcagaatcacacaagctgcagttggttcgagatgcacaatgcttgtgagtgacacaggaagcgtctactcatttgggaaggaggatttcagggtcgcagaactagttgacggtgctcattttcagatcacaactcctaggattgaggagtcactgaagggtgtgtttgtagttcaagcagccatagggggttacttctctgcagttctgtccagagagggtcgagtgtacaccttctcatggggcaaagccgagaggcttggccacagttcggatccttcagatgtcgagcctcgtcttctccctggactcgaggatgttcctgtcgcatacatctctgcaggaaattgctaccttcttatgctggcctaccagccaaatggaatgtctgtgtactctgtaggctgtggtttagggggcaagcttgggcatggatgcaaaaccaacaatgggatgcccaaattggttgaacagttccagtccatgagcttcaaaccagtttcaatagcagctggcacttggcatgccgtggcccttggcgctgacgggcgtgtgtgcacctggggctggggccacaccggttgtctggggcacggcgatgaggagtgcagggctgttcccacagtggtagaaggattacgcgacgtgaaggcggttcatgtctccacgggtgaatacacgacgtttgtcgtcgctgagaatggggacgtctactcctttggatccggtgaatccttggctttccagttggacgatgaggcggaggaggaaccggattcctcgacaccgagcatagtcagctcgctcaaggatctgaacaagaaggtcgtgcagatcagccacacaaacgcctcgtactggatgaactcggaaatgggccacccgcacacatttgcggtcatggactccggcgacgtctgtgccttcggaggaggggtcagaggccagctcggcgtgaagctgcatgagggcgtcgaaaaagtgcgcgtcccgatgaatgttccaatcggtctcaattgatccccttccaccagcattcgcctgaacattttgcgatggcactctgcttccgcgaacattctgtttgggccttcagaccagtggcgtaagcttagacatgctaggatgtgaatattagggatgatttgtttttatctgaactcttcgaagtgatatagatcgtctgcataaagtttacctaatccgtgaccgctcttttatccaaaccatttaaagcaccaaaaaaaaaaaaaaaa

SEQ ID NO: 83181 - DNA, 269 bp, Zea mays
  Clone ID: MRT4577_175877C.1
gcggcccgggagcgcgctcacctcgcgtggccacttccaacctgagcctctctctcttcgaggccgcagacgcaagtgatcgagacatgagggtgttgtgcgttgactcgtttgccggatgtcgctgcgagcgccacctgcacgtatacaagcggcggctgcggctgccagccaccgccgccggcctatgtacaggtcggcgttgcatatcgcgacctgcgtcttatcacgccacctgcggggcatccgccattgccggtccacctgcc

SEQ ID NO: 83182 - DNA, 794 bp, Zea mays
  unsure (1)..(794): unsure at all n locations
  Clone ID: MRT4577_175878C.1
ctacttccttagctaacttcccagccccgacaccttggccgccgctccgtgcgcacccagttgctgaggttgcaacgctgcagccggcgaggatcggatgaaccaccaacgcctcctataaatcctaagtgcaacatgcagtgccccatggacactgctgctagtggaacctcgccagtgatgcaattccatagcaatgctgatgagtctatcgcccattcatctccattggcaacattaatacaacgttcacagcgccattgctatggggatggatccccaggcgaatttccccttgctgtgagcccctccattgttctccatgtgctctcatcttgtgatctaggtccgaaagatctcgccaatctggaggctacatgcgtatttttcggcaaacctgcaagttttgcaccagactttgcattgtcacttccggagcttgcagcatttgatatgtgccagaaaaggaccatgtttaagcagatgaagcaagaagatcaggagtgtctgaaacaacggtgtggaggctcttggaagcatgttcttgggtacattctggttagggagaagaatggttctcgggtgattgccgggccagggcacagcatcattatcacctcaaatggagatgtatattcgtttggagcaaactgctccggtcagcttggccttgnngattcagaagaccggttcaagccatgtgntattaggtctctacnaggcatcagaatcacacaagctgcagntggttcgagatgcacaatgcttgtgagtgacacaggaagcgtctactc

SEQ ID NO: 83183 - DNA, 653 bp, Zea mays
  unsure (1)..(653): unsure at all n locations
  Clone ID: MRT4577_175879C.1
cggccgggccgggcttcttccttagctaacttcccagccccgacaccttggccgccgctccgtgcgcacccagttgctgaggttgcaacgctgcagccggcgaggatcggatgaaccaccaacgcctcctataaatcctaagggagactatatgatcagtctgtcttctgcagacagcaacttagatgaaacgcagctatgaataccgagtcctctgcttctgctctcatccatctgtagagtgcaacatgcagtgccccatggacactgctgctagtggaacctcgccagtgatgcaattccatagcaatgctgatgagtctatcgcccattcatctccattggcaacattaatacaacgttcacagcgccatttgctatggggatggatccccaggcgaatttccccttgctgtgagcccctccattgttctccatgtgctctcatcttgtgatctaggtccgaaagatctcgccaatctggaggctacatgcgtatttttcggcaaacctgcaagttttgcaccagactttgcattgtcacttccggagcttgcagcatttgatatgtgccagaaaaggaccatgttttagcagatgaagcaagaagatcaggagtgtctgaaaacacgntgtggaagctcttggaagca

SEQ ID NO: 83184 - DNA, 822 bp, Zea mays
  Clone ID: MRT4577_17587C.1
gttcctccaccaaaaactagggttagggttagggcggcggcggcggctttatttccgatcgcgatcgccatggccaccggaggcgccccaaagccggaggaggagaccgtcgtcttccccgattgggtgatgctggaacgcatcttccgcaaacggtgccacgacgacctagacgctgctggtgaggccgtcaacaagaacaagaccgccgctccagtcaagattgacagcggccactcctgcttcgtctccttcaccctcgcagctcctccagggtcctcctacttcaacctccattggccggagagacaaggctcagaagaactccttgccttcgtccgggcagtcgacaagaaccttgtcctcttcgacatctcgatccccgaccggattcgctacttcgacgctccgccagatctgttcgtctacacggcctctgctcctccccccccggtgcagcagcttcctcggcgcagcacaaagcagttcctggctcatcagttcaccaccggcattctgcagctcaaagcggagcactgctacatcgttgccgacctcaatgtccacctcaagaaagagggcgctagtgctgaactctgtgtcttcaactccggcgccaccgattggagaatcatcaccgaggtgcttgctgataagctccctgacctctggtttaccgatgatgtgtttgctttcgatggccgtttcctttgctgggtggactacttcagcggcgttgtgctatgcgacttctccaaaatgtggactcccaggtgctccacttcgtgccttttcctggaggaatcaaataccctgatgacg

SEQ ID NO: 83185 - DNA, 1002 bp, Zea mays
  unsure (1)..(1002): unsure at all n locations
  Clone ID: MRT4577_175880C.1
ccacgcgtccgcgtacgcgtgggttttcctgccatcctttgtgttgctaagccgtagtttattctgatgctaatttgttagggagactatatgatcagtctgtcttctgcagacagcaacttagatgaaacgcagctatgaatgtgatcatctaactctttgttgctgctgctgttctccttccagtttgtgtaaaacctgcacttgctgcacaatctatttgtcgaaagtgtgacggactgtcatttgtttctcttatcagaccgagtcctctgcttctgctctcatccatctgtagagtgcaacatgcagtgccccatggacactgctgctagtggaacctcgccagtgatgcaattccatagcaatgctgatgagtctatcgcccattcatctccattggcaacattaatacaacgttcacagcgccattgctatggggatggatccccaggcgaatttccccttgctgtgagcccctccattgttctccatgtgctctcatcttgtgatctaggtccgaaagatctcgccaatctggaggctacatgcgtatttttcggcaaacctgcaagttttgcaccagactttgcattgtcacttccggagcttgcggcatttgatatgtgccagaaaaggaccatgtttaagcagatgaagcaagaagatcaggagtgtctgaaacaacggtgtggaggctcttggaagcatgttcttgggtacattctggttagggagaagaatggttctcgggtgattgccgggccaggccatagcatcattatcacctcaaatggagatgtntattcgtttggagcaaactgctccggtcagcttggccttggggattcagaagaccggttcaagccatgtgttattaggtctcnaacaangcatcagaatcacacaagctgcagttggttcgagatgncacaatgcntgtgagtgacacangaaacgtctactcatttgggaaagaggnnttcaaggtcgcagaactaa

SEQ ID NO: 83186 - DNA, 469 bp, Zea mays
  Clone ID: MRT4577_175881C.1
gtcgctcgttgcacttctgctgtcgtcgtctcaggagacgtagacgtatctaacgtgagttcctccgccgaagctggacgcaatatgggtctccagaacatgattgagctgctcagccgcttctctgaagtcgagaatgctccattacaatgaatactcggacaagcacccaactctcttctgcatgcattgtaaatagccattggacgtgttgaacttatgacactgcatttcgaccactcgcctatcactgtgtgtctggtgtagagccttgcgcttcgccatcacctgctgcctcttgaccatgccacgcattgagagtgaattggaaggtgtctactgcagtgtctgatgcttgtccgaaagaatggatatatacagatatgtgatgtgctaacccgctcttgatctatgacagatactagaggcttgagctgactttgagctaagaatttccataatttgcttg

SEQ ID NO: 83187 - DNA, 309 bp, Zea mays
  Clone ID: MRT4577_175882C.1
aagggggggtaaactaggcgggattttattcacgtcgttgtctgggcaaaaaatttggtatgtaacaattttttagcccacgcaagggtcccacatgccataatgcttccgctttatccagacgcgtttcatgatgactggataacttattcttagtagagcgaacgcttttgttggtgaaataaaatcaggccccgtcatggtttttctttttgaaaaacaccccccctttaaccgttttaaattcattttcacaactccctgtcctgtaaattttctttgggccttttaatattttatttaatctaa

SEQ ID NO: 83188 - DNA, 442 bp, Zea mays
  Clone ID: MRT4577_175883C.1
ttttttttttttttttaagcgttcagtattctcatgatttcgatttcaagatatatacaaatttaaacaacaaatcgccgcaggagatctaaactgaattaaacatagtttagaaaatagaacaaaatctatgtcatcttcaaccttgctccactaattcttgcacagggacgaaatcgaagagcaaggggtcggccagggagcaggggcgcggctagcggcagggcaggcggctagcagggcaggcggtcggcgtgctctggtcggtcctcgatagtggcgcttcggcggtcctggacggcggcggcgctccggtggctccggttggcgattagcagggcgtcggcgagcgtggcgagagaggatagggtgtggggcgagctagggtggccgggggaacagattcatgggggcttggcgtcaatatttatagagagaaagg

SEQ ID NO: 83189 - DNA, 639 bp, Zea mays
  Clone ID: MRT4577_175884C.1
attgggtacctcgaggccggccggggtgctttcttagaggtgggttgggttctcctccccctccggttcgggttcgggttcgtgaggctctccggcgctcgtcttcgatgtcgagcggatcgcagatggtgccgccggatgttgagtaccgctgcttcgtctgtggcctcgcctgggccacggacgaccactccctccacaacgccttcatcacctacggagtaggccctcgagtgcaatatcatcctctatcgagagacgcagaggccccgcggcttcggcttcggcaccttctccacgcaggtatgtgatgcggaactgccatctaggaaatgaacgccaagggattggacggccgacaacatcaccgactgcgatgcccaatcccacgactggcgcgtaccgcgcagctcttccatcctgacgcagtcgtccgtggaaacgaggattacggcgacgacttcggtcgtgatgactacaccattgacaaggagattgttgacctgtgccttgaccgcatcaggatacttgcagataattgcactgtactccagggcttcctcgtcttcaactatgttgacgcaggaacgaactctgggaattgatctctcctcctggagcgcctgtctgatgactatg

SEQ ID NO: 83190 - DNA, 259 bp, Zea mays
  Clone ID: MRT4577_175885C.1
gcttgataaaattggatagtaggattggattgtagtatcgatatcttagtggagtgttcaaactaaatgacggtgttcatgtcacctttggcgtgattatcatgctctgtgagaatctgcttttattaacctttggtgagcagttccaaacaggcccatgcaggattgatgtcgtcttgccttggtaggatcatgggtacagaaacaacgccgatattatgactttagagatctaatgaatttattgggctgaaactaa

SEQ ID NO: 83191 - DNA, 541 bp, Zea mays
  unsure (1)..(541): unsure at all n locations
  Clone ID: MRT4577_175886C.1
agcagtggtaacaacgcagagtacgcggggaagcttcagcattactttcaagcatatcatatagttgttccttcgtcgcgacctttgaaagacataatgaggaatagagaagctattgggaggataggaaaatgggctgccgagctcaatgaattttctattgactatgtacacaggtcctcaattcagtcccaagcgttagcggatttcatcgctgattggacgccaggggctcaagaagaagtaacaaaagacgccgaagcctggacaatcttctgtgatggttcttggggaaccttcggcgcaggagccgccgctgtcctagtagcgccgtctaaagtcagaacatgctatgcagcaagactggattttagttgtacaaataacattgctgagtacgaagcccttctattgnggattcggaaactaaaggcaatgagaattagaagggcgatccttaaaactgactcccgagttatctctggccatgtagacaaaagcagcaaggcaagggatccgaagcttgaaaatatttggacac

SEQ ID NO: 83192 - DNA, 1707 bp, Zea mays
  Clone ID: MRT4577_175887C.1
atggtcatatcctgtgtcatcaagggatttctggtccataatgttctcgttgacataggcagtgcagcggacattatgctcgcaaaggctttcaagcagatgcaagaaccagaggacaagattcatgatgctacacacccactttgtggcttcggaggacggcagattgtggcacttggcaaaattacaatgtcagttaccttcggttatgtccacaacacaagaactgagcaagttgtttttgatattgtcgacatggaatactcgtacaatgcaatcattggtcgaggaacacttaatgccttcgaagcaatacttcatccagcatacttatgcatgaagataccttcggacctagggcccattgccatccatggaagtcaagaagctgctagaagcgtcgaagggagttggacagactcaaaggcaatccacaacataaatggagccgaagcttatatagcagatcaaagggtactgctgggatctcagctatctgatgagcaagaaaaaactctgataagatttttgttcaacaacaaagatgtctttgcttggacaaccaatgatctttgtggtgtcaacagagatgtcattgaacattcacttaatgtggatccatctttcaggccaaggaagcaaagacttcagaagatgtctgatgataaagctgaaggtgctcggaatgaagtaacgagacttctcagtgctggtgttatcagagaagtaacaaatctagaatggctagctaacactgttatggtgaaaaaggctaaaggcaaatggagaatgcaagatggtctgaaattaaatccagaaaagtgtgtttttggagtaaagaaggacaagttccttggttgtctagtatcaatgaagggaatcgaagctaatccaaataagatcgaagctatccttcgtatggagccgccaaatacgaagaaaggggcccaacggttggcaggaaggctggcatctttaaatagatttatatccagatcagcagaaaggaatctaccattctttgaaatattgaagtcagctgaagttttccagtggggtccggctcagcaaaaggctttcgaagagttaaagcaatacttgatcgacttgacaactctaactccaccttcaccaggggctccgttactcctgagaagcaagatggccaggtcagaaaacaagcaccagtatattgtctccaaagttctaagcttatcaaagaaaaattacacagaattggagaaggtgctatatgatgtgttgatggcctccaggaagcttcggcattactttcaaacatatcatatatttgttccttcgtcgcaacctttgaaagacataatgagaaatagagaagctactgggaggatcggaaaatgggctgccgagctcaatgaattttctatagactatgtacacaggtcctcaattcagttccaggcattagcagatttcatcgctgattggacgccaggggctcaggaagaagtaacaaaggacgccgaagcctggacagtcttctgtgatggttcttggggaaccttcggcgcaggagccactgctgtcctagtagcgccttctaaagtcagaacatgctatgcagcaagactggattttagttgtacaaataacattgatgagtacgaagcccttttgttggggcttcagaaattaaaggcaatgggaatcagaaagggcgatccttaa

SEQ ID NO: 83193 - DNA, 294 bp, Zea mays
  Clone ID: MRT4577_175888C.1
gaaaccaatatttttttgaaattgtagaagcattggttcgtgttttatgcacattcaatgcttggggggacccaaaagggccacaaagccgatgaaacaaggggccgggttttccccccctccaaggctccggggggggtttaatcggataaaaggcacccccctaaaagccagagcgatttttctttttcccaagcggcaagggggaaaaaaaaccaaattgtggaggcccccgccggggtggggggataatcccctcccccccggggggttggggaggaaaaaaaacccctc

SEQ ID NO: 83194 - DNA, 176 bp, Zea mays
  unsure (1)..(176): unsure at all n locations
  Clone ID: MRT4577_175889C.1
naggccggncgggatggtaggttaaccactcaaagcaacaacgcacggacgtacattcatgcttaccaatagagtcttaccgtcggatcagtggagcggcgctatattataagaattgaagaacttaagtttttgagctggagttatntatanaacataccaacttaatttttttt

SEQ ID NO: 83195 - DNA, 496 bp, Zea mays
  Clone ID: MRT4577_17588C.1
gttcggagtacacacaaacatggcacgatgcgattcatctagtactgcagaaacacactgtgtgagaacagaacttgggctctgccatcaagcaggaacggatgagcagcgttagggccaccgaggtgaagcgacacgcctcgcgcaactggaccgaggacacttaattacccaggtggtaagacaaatgggggggtttggccccttacacctctaaaaaatgaacacgcagggcatccactagggggcttggaaaaaaaatgagaggctggcctgaatccatgttagcttatgggcaccatgggcctaaagctacactcacacatgaacgagctggggggtggttctcattccatacccagttttacctacgcggactctataaactacatgcctaggttgtcaaaccctcctcatgagtactgccaaggcccctttcttcagaacaaccaggctttgataatacccccaaactttttctatctgatctggcaga

SEQ ID NO: 83196 - DNA, 728 bp, Zea mays
  Clone ID: MRT4577_175890C.1
tttcagtccctcattccgccattcggccatttcaatccggcgataactgccgccctcgccgccgccgacatggacttgcctgagaaccacggtccacggctgctcttgggtgtggatgttccgttgttcttccctgtggatccttctgccaaatcatgcatccatatgtttccgcagcggcagaggcgctttgctgtggacactcgatggagctcaacggtgagaggttcctgtgttctcccccgcccatatatttaatactagcgattacttattttgctagcattgtatgtctctttgcaaaaagcttgctggcttgtagtataacttagtggagattacacatttttatgtttggcaacatcagtgttattttctgttggaatgcttgtctgtttcactgaatatactgaacatttctttggtgacatggcgacattgtaaggggagaaaaacataagaaattgttttcgctggtaggtaacaatttttgtttgcacaaataggaatactgaaatgacgccaagaaatggatctaaaactttggttctcaattgagtaactttctgtacaccttctatcataatatatatacacacacatcaaaattgctttcatgacagcagaccctctaaaggcgggtgctaatggcaggggggagagctgtttatgatctatctaccaggtgagagtatctagaaaggaaactctgctatggattaatgccc

SEQ ID NO: 83197 - DNA, 223 bp, Zea mays
  Clone ID: MRT4577_175891C.1
ttgacgccctctgggtttggtgtttttttaccaccagatttttcctgagatgcatatataagggcccaaacaccacaagctatgcgcgtgacgcattaagaccttactcactgactgatacagagggctcaacaaacagcaagtgctccttaacagtatttttttgaagggtggatggacactgcagactccacactgcaataatgcggctgctgagcagatg

SEQ ID NO: 83198 - DNA, 409 bp, Zea mays
  Clone ID: MRT4577_175892C.1
gttgggcaacagtgtccgcttgctgcagtcgaatacagtccttttgctgaacaagcgctgctaacgcttcatggggcctcgcttggtacactagaaggggcccttttatggggtcaaaacctgtcaaacaaacaggctcaaactcagtaggaaatacaatcatataggtgcggatgatggcgctgatggctactatggtggctatgctacaaggttattatgcttattacagacagtattcacaacctcatgatcctaacattgctcgatatcgcgcttatagcaggtatcccaattaccaacatcgaccagctgcacattagcaacagcaacacacatgatacctgtttcgctcggataagtgattgcctttgtcgctcacggaattaattaaatattatttcacgac

SEQ ID NO: 83199 - DNA, 432 bp, Zea mays
  Clone ID: MRT4577_175893C.1
caaaaaactttatttttgaattacattctaataagcattctaaaagagggcaccaccaatgatgtgttgttggtaggaggctgctgggtttgacaaaaaaagtttggacaaagggcaacaattgttgaagttgtaaaaggggtgcccccctagccgcaaactgctggtagaacggcagcaactgttgttgagtcaagaaggaagcacggcttgctgtagctagctggctaaagggtaggagtatttgctgctgcaaataagcaaaggggttcaatgcggtcaattggttaaaaggaagaagctgttgttgttgagagtaggcaatagctagctggctaaatggtaatagaagatgctgcaaataagcagcagggttcagtgtaaacaggtggatgaatggaagaaattgaagttgcggacagtagggagaaa

SEQ ID NO: 83200 - DNA, 266 bp, Zea mays
  Clone ID: MRT4577_175894C.1
agcagtggtaacaacgcagagtacgcgggggcctaagtatatgatagtagtcctataatataaataataatagtcttttagtagctcctgctggtatcaagattcaggtgattaaaaccgtagatggcgtagttgccgtagtactagtaaaaactagacaactagtcttggcagccacttgtagtgaagtgacatggctgcatacagacatccaaaaaaaaaaaaaaaaaaaaaaaaaaaaagtaccctgcgttgttaccactgct

SEQ ID NO: 83201 - DNA, 200 bp, Zea mays
  Clone ID: MRT4577_175895C.1
tgggcggccgccctgctggatacaaatttttggagaaactgtacatcactatttttgcaggcaacaaccgcttactaagagatcactacgtgagtaatcgcataataaacacctatccttagtgcgagaaatatttaggacaaacaatgaagagcctgcccttcctgcaatgttatattactgttaaaattcatttattg

SEQ ID NO: 83202 - DNA, 1308 bp, Zea mays
  Clone ID: MRT4577_175896C.1
atgaagatagcttcagaacaagggcccattactgtccatgggagtcaagaagctggcagaaaagtcgaaggaaactggatagattcaaaggcaattcataatatagatggagccgaagtctgtgagcagtacaaatacaaaagagagaaggctgcttcggcggatcagccgaagcctatgcttctatgtgaagatatagcagagcaaaaggtactgctggggtctcaactatctgaagagcaagagaagactttgataagatttctactcaacaacaaagatgtctttgcttggtcagccaatgatctttgtggtgtcaacagagatgtcattgaacattcactcaatgtggatccatccttcaggccaaggaaacaaaggcttcggaaaatgtctgacgacaaagctgaaggtgctcggaacgaagtgaagagacttctcagtgctggtgttatcagagaggtgaaatacctagagtggctagccaatactgttatggtgaagaaggccaacggcaggaatgtactgacctatgttgatgatatcatagtgaaaagtacgaagcaagaaaatcacattgctgacttgcaagagacatttgccaattttaggcaagctggcctgaagttaaatctagaaaagtatgtttttggggtaaagaagggcaagttccttggctgcttagtatcaacgaagggaattgaagccagcccaagcaagattgaagctatgcttcagatggagccgccaagcataaagaaaggagcccagtggctagcaggtagactagcatcattaaacagattcatatctagatcagcaaaaagaaatctgccattctttgaaatattgaagtcagccgaagtttttcaatggggtccggttcaacaaaaagccttcgaagagttgaagcaatacttgattgatttaacaacattaactccacctgcgccaggggctccattgttcttatatgtggcggcttcgcattctgcagtaagtgcggcgcttgtacagaagaagctagatggccaagtcaaaaagcaagctccagtgtacttcgtctccaaagttttaagtctatcaaagaaaaattatacagaattggagaaggtgttgtatgctatgttaatggcctccaggaagcttcgacattattttcaagcataccacataattgttccttcatcacagcctttgaaggacataatgaggaacagagaagctactggaaggattggaaaatgggatgtagagcttaacgaattcgctattgactatgtgcatagatcttcaattcagtcctag

SEQ ID NO: 83203 - DNA, 120 bp, Zea mays
  Clone ID: MRT4577_175897C.1
aagaaaaatactggctgataatagacattttcttaaacaactcctgactgcagagctgcgcgtgccgtctgcacatctgatctagctatttcagttggtacaaaaagggggcgctcgtca

SEQ ID NO: 83204 - DNA, 586 bp, Zea mays
  Clone ID: MRT4577_175898C.1
ggaaaaagggaaacagcacctgtaacattgatcccagggttaaaacttgcaagcccccctactaggagtataagggcgaaacttttttttagcaggggcttgaattttacaatcaacaggcacccaataaacgtcaacggtttttatccgccatccttttccagtttttccaagggtgatcgggccctaacccttgaaaaaaaaccagccttcacagcccttattaatgggcattttcatcctcattttcataaatccctccccagggggggagggcaaacaggacctccttgaagggcaccattccgtttttgccccagcccatttcctaaaattttttcatggctataggcccaaaaaagcgctctcctggcggggcctcgttaatgggtgggataatctaatccttgctcacaaacccatttttatttttatccaaaaaaacaaccccttcacccaggggctggaagggggcctaaagatttcctagccccatttttatttttgcttccaaaacagttgtttcattgaaaagatagacagggcccaaaaagacaatgaactcgttgaacttcatgcccatatt

SEQ ID NO: 83205 - DNA, 141 bp, Zea mays
  Clone ID: MRT4577_175899C.1
aaagaccacgaaagacatgtgcaggatgtacatgggggtgaataactccagtagagaagtctcataccatgcttgacatgtatcagcaatattcagaacactgatctcatataccctcacattgttagcgaccatgcctaa

SEQ ID NO: 83206 - DNA, 472 bp, Zea mays
  Clone ID: MRT4577_17589C.1
aatatgaagactatgctgctctgcactcatgctccaaatgtgcgttgcgacgcggcgccgccgacgcgcgccagacgggccgacataaaccgactaccgaaagaaagactgctcaactagcagggagctaaaagacgagcgtgggcgcccggtgagaaggccccaagttgcaaacgggacttacccagatgactactacttggagtctctcaaatcatggggcagaccattggtagtaggaactccgaccttgggaaaaaccacgctttatccgaaatgacagcactggcaccacatacgcgtttccgctgcctgaagtaaagaacacaagggcaagttcacatctgcaactcgaacagtacttgacatgacaaccttaacgatactgcccacttcttccacgcaataaggatccaggggtatataacatgctctcatgaagaccagtaaatgtgacagactcttatggccg

SEQ ID NO: 83207 - DNA, 856 bp, Zea mays
  Clone ID: MRT4577_1758C.1
catcagtgtcagtgggtacatttacgattcccactacgatgttcacatccagggaaaacgcaagttacaacttttcccaacttgcaacaactagtacactaattaggtttatatcaagcaaagctagtacattttgcatgggtcaatcacaatgttctttcatccatactagtaccagtcattctataagcttgtatgcttacatttgttgatgatacagtaatggaaaatctaccactgctctttggggcactttcagggttatgttgaccgagacgatgtgctcattgaatccctcacagtacgagagatgctatacttctccgcgctcctgcagcttcctggtttcctatcttcgaaaaaggcaattgtggaggatgctattgcagccatgtcattaggtgaccatgctgacaaactcattggcgggaattgttttatgacgaggcttcctggtgtccaagccgttcgaggctcgtacgacatttcgtcttccccaaacgcgaagtgggtgaacctcctggttctgctactgatggcgctcggatatcggattcttctctacttgctgcttcgtctagacgtgaggaagaacgcgaggaggcttggaaactggaggtcatggtggtcaagtgtgcattctgctgccactggtgcaaagtgatttttgagcttctatctaatcgagtgagtgagtgtcgtaggtgtttagtgagttctttggtttggtttggtttgtatttcctgtccatatcagacatgtatgtatacacgtattggttggcaacaaacacaaaacaatatcattgtttcctaatgacatacatctatttatcgaaaaaaaaaaaaaaaaaaa

SEQ ID NO: 83208 - DNA, 368 bp, Zea mays
  Clone ID: MRT4577_175900C.1
aaaggagtaaaaaaaaaggccttgtttaaaaaagtaaaaaaaggggcctaatttaaaacaggatgaaggacccccttggttaaaaaattggaaggggtacccaatttttttgaaattttaaaaatttaaaggagaatttattctccataagttcctcccatctcaaaaaaaaaaaaaaagttagatgtcaaaaaattgcactgatcaaatcatttaagtatattatgaatgggacgctttatttcaaaactgaaaaaagggttggcattaaacatgttaaaaaagcaaaggcaggtttacttccaaaagctaaagctatgggttatttgaggggaagggtgaccatacataaaggagggacctttttt

SEQ ID NO: 83209 - DNA, 700 bp, Zea mays
  Clone ID: MRT4577_175901C.1
ggccgctcccgaggccggcccgggtctgggaaaagacctgcagccaaccatctaccctcgactcggcgagcgagagcagcacacacgcagctagctaggagcagcagccgagtgggaggcgatggcggactccatgatctcctcggcagctctggcggtggtgcctcagggcctgccgcccctcggacgccgcgcctcctccttcggcggcgtctgctccaagaagaagatctagaccgacaagccctacggtattggtggtgacctcgaccgtcgcacgtcgacgctcaacgaagagaaagggcaaggtgcaaggtcgtgcaccaggtcgtcgacaagtacgagagcgtaacgtcatacgcgatacagtgccaagtcatacaacgagcgatgactgtggctcccaccggacgacgtctacgtcggcggaaccactgggcttctgatctgggccgtcaccctcgctgtgatcctcgcgggcggcgccctcctcggctacaacaccagcgtcctctccggctaaggatatccaatgcatgcgcttcttgcgattcatcatgtaaaatcagggtgtatgtctataatctaggctccatgcatgctcaaccttcgctgtgtgacaatagtcaatggtactcttcattacataattttgatgctatatatatataagaatatataatatcattagtaggaatct

SEQ ID NO: 83210 - DNA, 363 bp, Zea mays
  Clone ID: MRT4577_175902C.1
tcgacccacgcctacgcccacgcgtccgggacgcatccatattattgtgaccaatcgcgtccttccttttggaatgccagttcaacaactttgcaacattttttaccaagtattcttcatatctactccattttttactaacttttctgaatctttttcttaatttttcacatgcattatccatattctgttatttttttacaaatttacaaaaattttatatttttaaataatatctgcaaattttttaacattttctaactttttttacttttctacagttattaacatttattttccataatttttaaaaatttgtctaattattttttcatatttttttcacattttttttatatattt

SEQ ID NO: 83211 - DNA, 242 bp, Zea mays
  Clone ID: MRT4577_175903C.1
tggcctgtaaaatagagtgctagagctcttacgcgcctcgccttcttcccaacttcctacttcctagcccttttatcaactcctagaatagttaaagagagacacgtctagatgggatgagaggtgccctaagcaggagaaactgaacaaaaggctagaggcatgggccgaggtaggaattgggcctagagtgaagactgggctggcgttaagagctttcgaggaaggagtacttactcccc

SEQ ID NO: 83212 - DNA, 312 bp, Zea mays
  unsure (1)..(312): unsure at all n locations
  Clone ID: MRT4577_175904C.1
naaagtcttgnagagtagtagctcgaatcgctcgaatgtctatagatgcagagatcagagacaccagctagtatcatcatacgatcagtagatcagagtcactgccnacttctcaagcctactgagagtacagatgaatgtcatcagagacgagangatatgataagagacatgatccagcgtcagataatgtgtcatactctgacactcaacaagcatcggagaactcacgtcagatgatgtatctacagattctagatgatagctagagagatatatgcatgcatgctaattacgcatgagagtgatgac

SEQ ID NO: 83213 - DNA, 262 bp, Zea mays
  Clone ID: MRT4577_175905C.1
aacgacccacctgtccgaaaaaaaaaaaaaaaaaaaaaaaaaaaaaaaaaaaaaaattataattaaaaaaaaaaaaagacaacacatttggggcgtccaaatttacttccccctaccttccacttcataactattatatagccttacctaaattcaatctaattaccatcctttacaacttccttactgtgaaaaccctggtataacccaacttaatctccttttaaaacattcccctttcaccacctttcgtaatattaaa

SEQ ID NO: 83214 - DNA, 1324 bp, Zea mays
  Clone ID: MRT4577_175906C.1
tgaatatttctccttttccttttaggataacacaatccgcacacgtcgacatgagcttgttagcacccttctgtcttcataccgtaatagtaccagtgcatcactaccaaaacggatcctaaaatggactggaacctgtataagaatttcgaagatggcagatgaacttctgtggcgtatccaggtatgaagatgcagtcaggattctaaagacactacttagcacagttgcttgtgatagacggcgaggatattgggcattgaggctatccattgatttggagcatatgggtcgttcaaatgagagcctatccacagctgaaggaggggcaattgatccatgggtccatgctggttcaaagttcgcgaagcaaaggcgagttctgcgtttatgcaaaactccgcgacgctggaaagtgcccggatacgctgattatgttaagagaaataaaagagaggttagtaatttaggtctggtatttaagaggcagaatgtatcaagttattttagatagaagggcaaatctgaaatgtgtgagctatgacattgtggtcgtgtagcttatacgtaagagtgtggtggttcgtaacatgccctttcgaactgtgacatgggaataacaatatttggccttctaatgtgggatgtgatgttttcagacatacatgatgttttccagtctaaattccagacagcccttgatctgggaaatgatttttacaaatctagagagaacattgcagaatctcagttgaagaggatacgggacggaatggccgaagagatgctaatcagctcatgggagctacatcaggggacatcctgccagggtgtaaactgggcccgttattcgttaactgatctacgggctgttgttgcatgcgttggtggccaccgtttggcatcgctcctccgccatctagccgttgattacaggagctggtcgagtggaatgcccgatctgctgctatggcgtttccttgatgaaagaggtggaggtgaggctaaacttgtggaggtcaaaggacccagggaccagctgtcagagcaacagcgtgcatggattcttgttctcatggattttggatttgacgtggaagtttgcaaagtaagcccggtcaccaagcggagatagttcgcttgctaaatttagtctgattattacgatgcaaaatgtatttggttgattagatagaagggcaaatctgtaacgcataagcaatggcattgttgtcgtgttgcactgaagtaacagtcaagctctacttgacatgctatcaaactttgagagggaaggatgcatttagttgtctgaatcggcac

SEQ ID NO: 83215 - DNA, 269 bp, Zea mays
  Clone ID: MRT4577_175907C.1
gggagctcagaccccaaccctggatcccaggagaaaggagtggaccgaggaaggaaggaaggcaaggctgtctgtccatccgtccgtctgtccacctacctgtcagtccacataggctcctggcgtggacaaggggtctgtgaagggcgggaactgggtgagcacctggggcaggtgggtggttaaggtccttcccacttcgcaggtgtcagaacctagggctgggctctcggggccaggcaggccagcccagcccacgccgagctggc

SEQ ID NO: 83216 - DNA, 932 bp, Zea mays
  Clone ID: MRT4577_175908C.1
cgcaaaaaggaatctgctttacactaaagcgtgattttaagtttcttgaggttgcctatccatatgtagcaaagcgtctgttaacagatccaaaccctgctctccgtgaacgcttgattcaggtgctattcaaagatggggcattccagtggaaacgactagaaaaccttatagttcttgccaaggagaatgtgactaagatgagcagcaaccctgcactgaaaaagaatagttcgcaagctgtaagaaatcgacaattggagagcaaacttgatctcactgaaacaataaaagatggagcacggatgttccttatcgatgctggtatcaggagacaacttatactggccttcactgaagactccaaattgcatgtagaagagcttgtggatgtatacagactggtcgaagatcaaatagatatgccttcagttgcccttgggagtcttcatgttcctccacctgttgcacgtgacggcgaccacttatactgggctttcaccgtgtcagctagattgtacgtatgatcttttactgatgtatacagaatggttgaagatcctcgagatgatccttcagttgccgtcgaggttcttcaagatttaccatctgttgcgcgtgatttcatgctttcctggagtgattccatcctgtcagatcgccagtactaacgatcttttacaactagaagagaaagcaagcagagtgaatagggccctgcatggttatggtatctcgatataatctatacaagaaaaatggctagacaagaattcctcctcgctgtatacagtttctttttcctttgatttttgtatagcaaaatatgcaatgcgcagttaaattttttcgttttgccttgatcttgtcgatttctcagcacaagccatttgtttagtatagcgaatgggatcttttatgtaaatgagctc

SEQ ID NO: 83217 - DNA, 849 bp, Zea mays
  Clone ID: MRT4577_175909C.1
gcttccgcccgcccgcgacagtcacgcgcgcactccattccacgtctgctccgctgcgccgcctgcgccccgtggccagcgtcaggcatcagccctcctcctctctcatcctcccctcccctccactccactcaacgggcacactccccggccgcgtagccagcacaggagcgcggacggcaagagcaaggccttgtcagcgaggaggaggcccagctcggtgctgggacgccaatggcggggcggcatgcggcggcggtttccgcgttcctcttcctgctgctcgtggggcactgccacggcggcaagaccggcatctgctacggccgcaacgccgacgacctgccggggcccgacaaggtggcgcagctcatccagcagcagtccatcaagtacgtgcgcatctacgacaccaacgccgacgtcatcaaggccttcgccaacaccagcgtcgagctcatggtcggcgtccccaacgccgacctcctcgccttctcgcagtaccagtccaacgtcgacacctggctcaagaacagcatcctcccctactacccggccaccgccatcacccacatcaccgtcggcgccgagatcaccgagagccccatcaacgtctccgccctcgtcgtgccggccatgcgcaatgtgcacgccgcgctcaagaaggtcggcatgcacaagaagatcaccatctccagcacgcactcgctcggggtgctctcccgctccttcccgccgtccgcggggggcgttcaacagcagctacgcgcacttcctcaagcccatgctggagttcctcgtggagaaccagcgcccttcatggtcgatctgtacccctattacgcctac

SEQ ID NO: 83218 - DNA, 582 bp, Zea mays
  Clone ID: MRT4577_17590C.1
gggcccaactaggatgggagatccgacctccgcgcgcgcgcgcgcacatggaccggtgccccggaagcgcagggcgcgcccccggtgtgctccgccggcaggtccctgcaaaatttggcctcccgcaagcgcgcctgccgcggctccgtgccgcagcattcccactgcaccgacgccccctcccccgatgcggtgatgactgaccccaccgatagcggagcgtttgcgtcagcaggggtcctcccggggcgcggactcaagcggaaggtggactgcatcgacaacgccacgcagatcgggccgtggaagcggctgtataaccagtacgacctcggagaggagatcgggcacggcaaggtcggctccgtccgattttgccgtcccaaggcacctgacccggtgcgaggaagagttcggctgcaacgcgctgccgaagaacagaggtgacacggcccaccgcgaggtggagatcatgcatcacctcttgggccacccggacgtggtcactctcaaggccgtctttaaagacaccgactccttctacctggtcatggagctctgccacggcggacggctccttaa

SEQ ID NO: 83219 - DNA, 1850 bp, Zea mays
  Clone ID: MRT4577_175910C.1
attgggacctcgaggcggccggacagagaaacgcaggtgtcgaaacacattttcttgctccagagaatttaaccgctgcgaattcaattcgaaagcccccagagaagcatccatggcttccgctaccacctccatctcgtcgcaccccgccgccctccgcgacgtcaaagctgcgaggattggcgggctgaggcagcagcaggcgagcgtccgttccgggtgttcagcctggacacggggcgtctgaacccggagacgtaccagctattcgacaaggtggagaagcactacggcatccgcatcgagtacatgttcccggacgcgagcgaggtgcaggagctggtgcgcaccaagggcctcttctccttctacgaggacggccaccaggagtgctgccgggtgcgcaaggtgcggcccctgcgcagggcgctcaaggggcttagggcatggatcaccggccagaggaaagaccagtcccccggcaccagggccagcatccccattgtccaggttgatccttccttcgaaggcctggatggcggggccggtagcttggtcaagtggaaccccgtggccaacgtcgacggcaaggacatctggactttcctgcggaccatggacgtacctgtcaacaccctgcatgctcagggctacgtgtccatcgggtgcgagccgtgcaccaggcccgtcctgccggggcagcacgagcgtgaaggccggtggtggtgggaggacgccaaggccaaggagtgcggcctccacaagggcaacattgacaaggacgcccaggcggcggcccccaggtccgccaacggcaacggctcggcgggcgccccggacatcttcgagagccccgccgtggtgtccctcacccgcaccgggatcgagaacctgctgcgcctggagaaccgcgccgagccgtggctcgtggtgctgtacgcgccctggtgcccgttctgccaggccatggaggcctcctacgtggagctggccgagaagctggcggggtccggggtgaaggtggccaagttccgcgcggacggcgagcagaagccgttcgcgcaggccgagctgcagctgcagagctttcccaccgtgctcctgttcccgggccgcaccgccaggcccatcaagtacccgtcggagaagagggacgtcgactcgctcctcgccttcgtcaacagcctccggttcgtagagaaggaggtggaggggactgggtttggtagagacacaggaagggaagagggttcaggggaaaaaaaatcaggtgtagcttttgtaactgcaaaatgattgcagcaggtatacctgaagtctgagcttctgaggccctgtgcttggtagccgagggagagattacttgttgtgtgtgcttatagtcagtggcgagtggctactgtaaggttcacccatatggttatctaaagcactgccgtagattgtattatttatatagtagagttttaatatagacataagaatgtgtaagccgacagagatagcctaaaaaaatcaaataaaaaaaatgaagatttgagagaaaaaaaaaaaaaaaaaaaaaaaaaaaaaaaaaaaaaaaaaaaaaaaaaaaaaaaaaaaaaaaaacttaaaaaaaaaataaaaagggggccctcggcccccaggttttattccttttaataggggtaaactgcgcgctgggcttatccagggacaaagccgccccctgacgaaaacggtaaccccctcacaatcccccacaacgtccaagccgaaagctaaaagacaaaagccggggggccctaacgggccgcttaacacacatgaaacctgtcgcgccagctgcccgattgcaaccgggaaaaccc

SEQ ID NO: 83220 - DNA, 572 bp, Zea mays
  Clone ID: MRT4577_175911C.1
tcctctacatcatacgcgactccgatggcgttccgcctccggtcagcctcacggcgtcgctgtccgccacagcgtaccgtgacctcatccatcaccttccactttaaatcagggcgtacgtcacatgtccaatcggaggttgccaccggggctcctgagaagacgaagtaccggaagtacagctacctcagtgaccacctaaatgaccttctcgacctgcccactgacgacctcgtgcagctcttccccgcgcgggcctcgataacgatccagaagcggctgaaaaagaagcccatgtggctcatcgataaactgtactaggataaaaaggatgctcctgctggtgagaaggcacagacagactatacacatctcctactgatgtagcattgctgctgagacgactggaagtcttgatgcgggctacgactgcaagacattcaaccaaggtgagatccactctgagatgatccgccactaccttgctgagttctccatctcctaagccgtgcaagcatggaaggtccggtatcgaggccaccactcctcgcgggttattcctctgaaatgag

SEQ ID NO: 83221 - DNA, 1194 bp, Zea mays
  unsure (1)..(1194): unsure at all n locations
  Clone ID: MRT4577_175912C.1
ngagataaataggcaggcgngactcgtcgtggtggtatcatccactttgttactccctccgttttttttatttgtcactggatagtgcaaaattacgctatccagtgacaaataaaaagaaacagagagagtacgtaataactgtaggagtagatgttaatctttcagccatgacatggatcatggatgtgtgtattctagaatagatgtcattttcgttttacgagaagttaaatattttaaattttaatcaaatacaaatataaatcaataattgtgatagtatcattaatagattgttatatctagttttattttataattaaattatttagagatacaaatgataaatttatttagagatatagatattattagtatttttataaatttattgaagcttaataaagtttgatcatcggaatacgggcaaacctagcttaactgacgacgccgatcttcgtgtggttctcggcggcgccggccgcgcccgtggccgacgaggcggcggcccttgcggccgtggactacgaggccctggcgcgtgagctggagggcgcgtcgccgctggagatcatggatcgggcgctggccatgttcggctccgaaatcgccatcgccttcagcggcgcggaggacgtggcgctgatcgagtacgccaagctgacggggcgtccgttccgggtgttcagcctggacacggggcgtctgaacccggagacgtaccagctattcgacaaggtggagaagcactacggcatccgcatcgagtacatgttcccggacgcgagcgaggtgcaggagctggtgcgcaccaagggcctcttctccttctacgaggacggccaccaggagtgctgccgggtgcgcaaggtgcggcccctgcgcagggcgctcaaggggctcagggcgtggatcaccggccagaggaaggaccagtcccccggcaccagggccagcatccccctggtccaggttgatccttccttcgaaggcctggatggcggggctggtagcttggtcaagtggaaccccgtggccaacgtcgacggcaaggacatctggactttcctgcggaccatggacgtacctgtcaacaccctgcatgctcagggctacgtgtccatcgggtgcgagccgtgcaccaaggcccgtcctgccggggcagcacgagcgtgaaggcccgttggtggt

SEQ ID NO: 83222 - DNA, 1553 bp, Zea mays
  Clone ID: MRT4577_175913C.1
attgggacctcgagccggcccaggaaggggataaaaaacgcaggtgcccaaaacacgttcgccccagagaattgaaaacttaccactgcgaattcaattcgaaagcctcagacccagagagcttcccatggcatccgctaccacctccatctcgtcgcaccctgccgccctccgcgacgtcaaagcggcgcggaggacgtggcgctgatcgagtacgcgaagctgacggggcgtcccttccgggtgttcagcctggacacggggcggctcaacccggagacgtaccagctcttcgacagggtggagaagcactacggcatccgcatcgagtacatgttcccggacgccagcgaggtgcaggagctggtgcggaccaagggcctcttctccttctacgaggacggccaccaggagtgctgccgcgtgcgcaaggtgcggcccctgcgcagggcgctcagggggctcagggcgtggatcaccggccagaggaaggaccagtcccccggcaccagggccagcatccctctggtccaggttgacccttccttcgaaggcctggacggcggggctggtagcttggtcaagtggaaccccgtggccaacgtcgacggcaaggacatctggactttcctgcggaccatggacgtccctgtcaacgccctgcatgcccagggctacgtgtccatcgggtgcgagccgtgcaccaggcctgtcctgccggggcagcacgagcgggaaggccggtggtggtgggaggacgccaaggccaaggagtgcggcctccacaagggcaacatcgacaaggacggccaggcggcggcggcggcggcggcggcccccaggactgccaacggcaacggctcggcgggcgccccggacatcttcgagagccccgccgtcgtgtccctcacccgcgccggggtcgagaacctgctgcgcctggagagccgcgccgagccgtggctcgtggtgctgtacgcgccctggtgcccgttctgccaggccatggaggcctcctacgtggagctggccgagaggctggcggggtccggcggcgtgaaggtggcccggttccgcgccgacggcgagcagaagccgttcgctcaggccgagctgcagctgcagagcttccccaccgtgctcctgttccccagccgcaccgcccggcccatcaagtacccgtcggagaagagggacgtcgactcgctcctcgccttcgtcaacagcctccggtgaggcccgccagtgagcgagaaccatcgttctctgtcagtatgtaccgtgttacatgttggtgtccatctaggtgtgctgtacgtagagagggaggcggagggaactgggatgctagaaaaacagatgcagctgttgcttgtaactgcagaatgatggtaggtatgcccgaagtctgagatcctgtgttatttggcagctgagggaggcagaggttatttgtgtgtgcttgtagttgtagctagtggcgatggagtattctaaggaaaatcaaataagaatcgaagttttgagaaaaaaaaaaaaaaaaacccgcggcc

SEQ ID NO: 83223 - DNA, 1927 bp, Zea mays
  Clone ID: MRT4577_175914C.1
agggacggcgagcagaagccgttcgggctcgaggggccgggtgacggagctttcccaccgtgctcctgttcccgggccgcaccgcccgggtgttcagcctagacgtcggaggtctgaacccggagacgtaccagctattcgacaaggtggagaagcactacggcatccgcatcgagtacatgttcccggacgcgagcgaggtgcaggagctggtgcgcaccaagggcctcttctccttctacgaggacggccaccaggagtgctgccgggtgcgcaaggtgcggcccctgcgcagggcgctcaaggggcttagggcatggatcaccggccagaggaaagaccagtcccccggcaccagggccagcatccccattgtccaggttgatccttccttcgaaggcctggatggcggggccggtagcttggtcaagtggaaccccgtggccaacgtcgacggcaaggacatctggactttcctgcggaccatggacgtacctgtcaacaccctgcatgctcagggctacgtgtccatcgggtgcgagccgtgcaccaggcccgtcctgccggggcagcacgagcgtgaaggccggtggtggtgggaggacgccaaggccaaggagtgcggcctccacaagggcaacatcgacaaggacgcccaggcggcggcccccaggtccgccaacggcaacggctcggcgggcgccccggacatcttcgagagccccgccgtggtgtccctcacccgcaccgggatcgagaacctgctgcgcctggagaaccgcgccgagccgtggctcgtggtgctgtacgcgccctggtgcccgttctgccaggccatggaggcctcctacgtggagctggccgagaagctggcggggtccggggtgaaggtggccaagttccgcgcggacggcgagcagaagccgttcgcgcaggccgagctgcagctgcagagctttcccaccgtgctcctgttcccgggccgcaccgccaggcccatcaagtacccgtcggagaagagggacgtcgactcgctcctcgccttcgtcaacagcctccggtgagagacgacctccagtgagcgagaaccatcgttctctgtcagtctgtatgatcttatgttggtctttatgagtttatctaggttcgtagagaagggaggtggaggggactgggtttggtagtgacacaggaagggacgagggttcaggggaaaaaaaatcaggtgtagcttttgtaactgcaaaatgattgcagcatgtatacctgaagtctgagcttctgaggccctgtgcttggtagctcgagggagagattacttgtttgtgtgcttatagtcagtggcgagtgcctactataaggttcacccatatggtcatctaaagcactgttgtaaactgtattatttggagagtggagttttaatataggcataagaatgggtaagtcgctggagatagtctaagaaaaatcaaataagaaaccaagatttgagagttttcgtttgtttggttggttgtcaaatgagggtttgcttgttagacccgtttatttactaaagtttaaaaaaaaaaagatgcgaaggtattcaaccaggattctgtcagtctgtatgatcttatgttggtctttatgagtttatctaggttcgtagagaaggaggtggaggggactgggtttggtagagacacaggaagggaagagggttcaggggaaaaaaaatcaggtgtagctttccagtgagcgagaaccatcgttcttgtaactgcaaaatgattgcagcaggtatacctgaagtctgagcttctgaggccctgtgcttggtagccgagggagagattacttgttgtgtgtgcttatagtcagtggcgagtggctactgtaaggttcacccataggtttctaaagcactgccgtagattgtatt

SEQ ID NO: 83224 - DNA, 1294 bp, Zea mays
  Clone ID: MRT4577_175915C.1
cctcgaggccggccgggtcaccttctcgaggaaggaccagtcccccggcaccatggccagcatccccctggtccaggtcgacccttccttcgaaggcctggacggcggggctggtagcttggtcaagtggaaccccgtggccaacgtcgacggcaaggacatctggactttcttgcggaccatggacgtccctgtcaacgccctgcacgcccagggctacgtgtccatcgggtgcgggccgtgcaccaggcctgtcctgccggggcagcacgagcgggaaggccggtggtggtgggaggacgccaaggccaaggagtgcggcctccacaagggcaacatcgacaaggacggccaggcggcggcccccaggactgccaacggcaacggctcggcgggcgccccagacatcttcgagagccccgccgtcgtgtccctcacccgcgccggggtcgagaacctgctgcgcctggagaaccgcgccgagccgtggctcgtggtgctgtacgcgccctggtgcccgttctgccaggccatggaggcctcctacgtggagctggccgagaagctggcggggtccggggtgaaggtggccaagttccgcgcggacggcgagcagaagccgtttgcgcaggccgagctgcagctgcagagctttcccaccgtgctcctgttcccgggccgcaccgccaggcccatcaagtacccgtcggagaagagggacgtcgactcgctcctcgccttcgtcaacagcctccggtgagagacgacctccagtgagcgagaaccatcgttctctgtcagtctgtatgatcttatgttggtctttatgagtttatctaggttcgtagagagggaggtggaggggactggggtttggtagagacacaggaaggtgtagcttttgtaactgcaaaatgattgcagcatgtatacctgaagtctgagcttctgaggccctgtgcttggtagctgagggagaggttacttgtgtgtgcttatagtcagtggcgagtgcctactataaggttcacccatatggtcatctaaagtactgttgtaaactgtattatttatagagtagagttttaatataggcataagaatgagtaagtcgctggagatagtctaagaaaaatcaaataagagacgaagatttgagaaaaaaaaaaaaaaaaaaaaaagttttcgtttgtttataggttggttgtcaactatatagaccgtagaaatcgaagggtttgcatatttttagacccagtttatttatgaggggggggtttgttaaggactaaaa

SEQ ID NO: 83225 - DNA, 292 bp, Zea mays
  Clone ID: MRT4577_175916C.1
caccctattgtttttccagccgccatcagccttcttcttcccccacgccttcttctccccctggctttttcctccacgcgcacagcagggagtcgtgctcccctccatggcgagcagcaagccggcgccctctccgtttttcccctgctccttcctccaagctgaacgccagccgtgctccctgttcctgtcttcctcgcggctgcgcgcaggagcttcctctcagccatggcgcccagaaaagatatcccaagcctgcgcccttcgcctacccacggcaagcagtagctcg

SEQ ID NO: 83226 - DNA, 690 bp, Zea mays
  Clone ID: MRT4577_175917C.1
tcgaggctggccgggaaaaaaagaaaaaaaaaaaaaaaaaaaaaaaaaaaaaaaaaaaaaaaaaaaaaaaaaaaaaaaaaaaaaaaaaaaaaaaaaaaaaaaaaaaaaaaaaaaaaaaaaaaaaaaagaaaaaaaaaaaaaaaaaaggggccctgggggctcaatttttggtcccttttagggggggaaaatggccccctgggcaaaaaaagggcaaaagtgggcccctggggaaaggggtatcccgttaaaattcccacaaaaaaaaggacccgaaacaaaaagggaaaaacccggggggccttaaggaggggctaacccaaattaattggggaggccttaacggccctttttcaagggggaaaacctggctccccaattgattaaataaatcgcccaccccgcggggagggggggttgggatttgggggctttttccctttcctgcataaaaaactggggggactgggcctttggcttgcgggaaggggattacgttaattaaaggggggaaaaccggtacccccaaaaggcggggataacctgggaaaaaaccttggacgaaaaggcccaaaaaaggccctaaacccaaaaaaggccccatttgttgggttttttcaaaaggacccgccccctgacaggaaataaaaaaaaccgcgcttaatgtaaggggggggaaaccccccgggg

SEQ ID NO: 83227 - DNA, 267 bp, Zea mays
  Clone ID: MRT4577_175918C.1
gttaccatttgctcccagcactgagcttaaccgagcttcacaaagatgaatcgggaaaaattgatgaagatggccggttcggttagaactgggggaaaaggcaccgtgagaagaaagaagaaggctgtccacaagacaacaaccacagatgacaaaaggcttcagagcaccctgaagagaataggggtgaatgccatcccggctattgaggaggtcaatatctttaaggatgacgtgattatccagtttctaaatcccaaagttcaa

SEQ ID NO: 83228 - DNA, 118 bp, Zea mays
  Clone ID: MRT4577_175919C.1
cacgcgtacggccggatgcattacttctctagagcgtccgcccctccgaattttaagaggctctaccaatcccgatggcctcctcgaaagggtgagagtatttgggccataccctccg

SEQ ID NO: 83229 - DNA, 263 bp, Zea mays
  Clone ID: MRT4577_17591C.1
gctactcggacgaccacacgaacgttcgaggtgagctgcacatagtatcaaatgcgctacttggatgtgatgtatacggcacattgccacctactaaactacaaaactagaaccagtgaatgcgcagcctgtcttacagaaggtagatccacatcacgcatgcgacagttatcgtgtgaatagtcaaatgatctaggcatgtatgatagtgatgcaaccgtagacatataacaaggtgtcagagttatgagactataattgtc

SEQ ID NO: 83230 - DNA, 386 bp, Zea mays
  Clone ID: MRT4577_175920C.1
aggagaactggcgccgcgcctgggtgctggcgttgtggttcgcggccatggcggcgctgttcgtgtggaagttcgtccagtaccggcgcatggcggcgttccaggtgatggggtactgcctccccacggccaagggcgtcgcggagacgctcaagctcaacatggcgctcgtgctgctccccgtctgccgcaacacgctcacgtggctccgctcctcctgggcccgcttcttcgtccccttcgacgacaacatcaccttccacaagatgatcgcgacggcgatcgtggtggggatcacgctgcacgcggggaaccacctggcgtgcgacttcccgcgggtgatcgcggcgagcccggaggagtacgcgctcgtcgcgggcgcgttc

SEQ ID NO: 83231 - DNA, 321 bp, Zea mays
  unsure (1)..(321): unsure at all n locations
  Clone ID: MRT4577_175921C.1
cgtcccggggccatgcccaacccgaccccagcagcgcctcattcttcgcgcggcaaggccagctggtaggatgggccgcgacccatggtcggattaccaagcatccagaagggagaaagcactctccagcctggtgctccgcctcaggggtnggcatgcnagatttttgtgaagacatntgactggcaagtaccattcaccttggaggtgngagaagctctgacatnccattgacaatgtgaagggccaagaatccaggacaatggagggcatgtcccccagaccagcagcgtctggaatctttgcgggccaagccagctg

SEQ ID NO: 83232 - DNA, 243 bp, Zea mays
  Clone ID: MRT4577_175922C.1
ttttgagctcatcgcaccgaacatcttgttcgcactgactcctttgaagacgagaataacgccatacaccctggggttcatgatcaagtgccacagacaggatatcacgcacgccgacatgacaaaggacgagataaggctgatgcacgcggaaaacaactacactaacgcctggtactgaccatgccagcctatcaacaaactgttcaacggacacgcgcaccaaggtactcatgtacaact

SEQ ID NO: 83233 - DNA, 778 bp, Zea mays
  unsure (1)..(778): unsure at all n locations
  Clone ID: MRT4577_175923C.1
gggtaagaataaacacaatgataacaatttctcctgtttaacttccgtgcaatataaaacaaactagaaattaatagaaggtacctaaaccctaaatatgtaaagcttgtttcaagttaatggcaaaaaatgtgacaaaatagattgtcagaccaatacaagttgttaccttcctagatcgcttgtgtgtgcctttttaacttttagttgcactccccagctctcatttgctcttcctagaatttgattcatgcagagtgtacaagtgcaaaacatagtgacaagtaaaggaacaaacattgaaacatgacatcttctctttgcttgattttgattcactttgctccacaaagcacaaatcaagattttagcgcgatgcttttagttggttgcttacatatagtttttcaggcttcatctacctatactgttgtacaacctcaatgtaagtttgctttttggttgtgaatattgaagatgttacatcttttgtgttacatttccctactagtggcagaattaacctaagcntttgtgttataattatgcaagatgtatagtcaactgttaacctagtatgtatctatgcaatgtgtttgaatacttgttatctctccttctttgtaaaaggttaaagactctttctgcanattgttactcgtcaaagcgagcaatctggtgattttgtgtcaactacatgtgtggggtcgtgatacgaatggtaatgtaggataatattatttttatgaccaatctaacttggctacatgagtgctac

SEQ ID NO: 83234 - DNA, 497 bp, Zea mays
  unsure (1)..(497): unsure at all n locations
  Clone ID: MRT4577_175924C.1
cccaagcgcccgccctctcgtgacgagcgtccagatccgaggcatcacgctgctcaacagaaagcgccgccacctgaacatcttcgagtgctttgacgagctgatcgacaaagagacggtcaaggcccacggagacagttccaccggccccngnaaagacgtaggngannnnaggaaagggtccatgagaaagatcaccctnggggggggggaggagagactctccatcggcccagggagcaagaagagccgcatgcatggcggcaagagcgggccaggccacggcatcagcgccggcagcctggggcgctacaaggacgagaaggacgcggaagacgggcaggagacggggagcacgatcgccggcaccacgaacggccggcgcatgaagtcgcacgaggactccaagccggcgctcaaggccagcaagttcctgcacgagggcatcaccatggacaaagtctcctaccccatgatcatcgaccagaaagactgcc

SEQ ID NO: 83235 - DNA, 298 bp, Zea mays
  Clone ID: MRT4577_175925C.1
gcattgactaccttgatatccattcctgttatagatacttctttggaagtatcaaatattatttacaaaaatgcttagccctgcttagatcttgtggatagaggttgtcttttgcaataatgcctagctcaggggttatcctgaggaaggatggcttctacctacaagaatattttcattgggagcatggtgggatcttactgcaaagttccctataatgctcttttcatcctaaggatggaagtacttaaatcgcgacttgggctaggaacaggtgatgctccacccaggttaatta

SEQ ID NO: 83236 - DNA, 347 bp, Zea mays
  Clone ID: MRT4577_175926C.1
gcgtccaaacgctacactcccggcagcggctcaagaactgaatcaccagcacccgtggatggctaagttggtcaagcccggcagggacattatcctactgcagggcactgttcggcggcatgaaggctagtgatcgtgcgcgtgttcgaagatggcacccacgaccgtccctacagccactgtctgatagccggccttaccgagtaccccaagaaggtggttcgcatggactcggccaagaagacggcgaagaagtcgcgcgtcaagtgcttcatcaagctcgtcaacttcacccacctcatgcccacccgctacaccctcgacgtcacttcaagacgtgccaccgc

SEQ ID NO: 83237 - DNA, 436 bp, Zea mays
  Clone ID: MRT4577_175927C.1
ctgactcgtgggttgccaggaagatgctatcttcacgacccacaatggttagctggggagatgttgacaaagttcctccatatgaatctatttgcaagcggctacgataagtacccctacacaatgacctctggttgactttgaaggatccttccgttgaaaactaaacaatcgcttgtatgaagtgccctagctcaagaactgcttttttttgggggcattcaatttagtgagcttaggatttcagcagctacgttcagttgtaactgttccatagtagattaggaagactggcgatcatttttatgtccattttctgcgactatggatagcatgagtattctgctggcctgaattcccggtgtaaacggcttctgaaattttgaatcattgataaactaatagtgtttggtttgaggaaaaaaaaaaaataaag

SEQ ID NO: 83238 - DNA, 127 bp, Zea mays
  Clone ID: MRT4577_175928C.1
tctttttattcaaaccggcggtcatcaagtgttcagtccacttcacacgggtggttgttgtcccccccatcttaagtattactacatattctcttacaattacaacattagcttcccgatctctaaa

SEQ ID NO: 83239 - DNA, 220 bp, Zea mays
  unsure (1)..(220): unsure at all n locations
  Clone ID: MRT4577_175929C.1
atcccctatcggccgacacctactcnatgtgccctaccatatctcaccatcatacaggctatccatatattcaacataaactctcaggggtagcatcttcaagggaaatatgtttgtacagggcattcttatttatgtatattctaatgggctttaaacatccatagacacagctattccttttatatttggcactatccaatgctatcatattttgcca

SEQ ID NO: 83240 - DNA, 146 bp, Zea mays
  Clone ID: MRT4577_17592C.1
acggacggctgtatccttcagatcttacaggatgactttgacaatatatctacgaaacggacattaactactggcagtataaaacgttgccttctagacattctctatgatctataatttgctatgattgcttacactcaatgtag

SEQ ID NO: 83241 - DNA, 322 bp, Zea mays
  Clone ID: MRT4577_175930C.1
tcgtgatgtttttcgcgacgtttggtgaccgccagccgtaccccacgccatgtgccgagggcttctccgggcccttcgccgctcgctggtgtcgagcacacaccatgagcaagaagactatttttaaaacatttcatgttcaaaaaggttggtggagagcaactagattattcttttcatggaatcatggatgaacatgaactgttatttgcatttatttatgttctatttctggtggacagtaacagcatggatgaactggtctgtaatctactatttagttcttggatgaataactatgcaaatgcaactaagcatgttt

SEQ ID NO: 83242 - DNA, 786 bp, Zea mays
  Clone ID: MRT4577_175931C.1
gacactccaggcttgccgggaattctttaattatccttcatctccttgtgcaccgtcgaagctccctgcctgcatcgcttccctgcctccccgagcggatgtgccatctctcacctcgtccgtgcctctgtactagagttcaccggatcccgcgcgctgttgtgccatgatcgccgtggagcttccccgccgcgccccagctcggatcttcctctaccggcgctcgcccagtctgggcaccgcagcttccttctctgctcggcgccgtccctggctccaactcggccatggccgctgcgccgcgcccctgcgctcgccgctggagctctctgtaccgcgcgccctcgagctcccacgcgctcggccgcccagcttcctgcgccgtagcttttctcctgagctccctcgccatggtcgcccagcccagccgtacctgctccctccctgtgctcgccatggtcgcgcgttgtcgcccagctagccctcagccatggacgtgccaagccgcttccttcctagccggccgtcgtgggtacctgggtctcctcctaatttgatttggaactgctgcgcctcagcctcgatctgtcacatcccggctcatcgccgcgcgcgcgcctgcttcctgtgcgcgcagccgctccctccccagccgcaaagcaccccgttaagttctcctccgccgggttgtcgtacatgcgaaactgctcgcgatcggcatcgattcaaccgctcgaccctgttccctggccaccgctcgactctgagctctggttcctgcgcgct

SEQ ID NO: 83243 - DNA, 179 bp, Zea mays
  Clone ID: MRT4577_175932C.1
attgtagatcgcgagcggacgcaccttcctacattcgaaggaagattatgagtgccactgtcccaaagagctgaccagacgtcaacgtgaatccatgcccatccgaatggacgatgaagttcagggggaactgtggcactataaagggcagcagattcgcaaagtagtccaggttacag

SEQ ID NO: 83244 - DNA, 297 bp, Zea mays
  unsure (1)..(297): unsure at all n locations
  Clone ID: MRT4577_175933C.1
ggggggaaccaaacnggaggggaaacgnanagnncnnncgtggaggaagcgggngcaacnggaggaggggagaggaatcttattatattttctgttgncnggggagnnaanncaaagggggggggggggacaaaagctaantnncataaaagctnnnancgggggggggggggggggggnacaaaaaaaaaaaaattttttttttttttttttttttttttttttttttttttttttttttttttttttttattttttctctttctcctctctcttttttttttttttttttttttt

SEQ ID NO: 83245 - DNA, 1115 bp, Zea mays
  Clone ID: MRT4577_175934C.1
ttgggtgtccggttgagacctcatcaggtgggaagatgtgatggggccccttctcacagaatatcttggttcaccacagcagcaggctgcagcttctaaaagtaattctgaaatcgatgatacaagcaaaactgaggatatgattggttgtgcaagttatgatggtgaaaatatagatagctcaaagcagagacatgacaatgctgaaggtcagcagcctatggacacgtcagttgatcatcctacctgtgcaagtgaggtggatgggatggacgtggttgattgcaatcatgatgaaaacaatgtggcttctggtgaacaaaattgtggggaagcatcattgattaatggtaaacccattgagacatcatcagataatagtttggagcaaggcaagacatgcaaggatggttcttccagtccaaacaacaatgtccttgctgctaatgcatgccagtttaagaatgtcgttgctattgtagaccctccacgtgttggccttcaccctactgtgatcaaggcattgaggacgcatccacgtattcgacgtctagtgtacatttcctgcaaccctgacagtctagtcgccaacgggatcgagctttgcacaccaacacccgagaaacaagagaagaacaaaggcaaccgagggtggcggtctatgagcagcgcgggtctcgctcggcagaggacgaagtcgatgcccaactctgaaccttttatccccaagagggcaatggctgtcgatctgttccctcacacaccgcattgcgagatggttatgctttttgagaggtgaaggaagtgtgtctaccaattggacgcagctggcgtgcctcagattcttgttaagagatttttgacctttgtgtcgaggaccatatctgtttttcctcctcaccttggcccatccatatgttgtaacttagtaacatctattcgattgagaggccatgacggttggtgttggtggttactctttcggatttgccttctgttcggctacacttaatcactggtatgtatttctttttcgtgttaaatggatggcatagtaggactaattcgtaaaaataaaatgtgtgctaggggcggtacctggctcagctttttcc

SEQ ID NO: 83246 - DNA, 249 bp, Zea mays
  Clone ID: MRT4577_175935C.1
atgatgaaactatcggattgcgggcattgctatcatctagtgaccgagcatcggcacactctcccagaggggatcaatgcgctcaggcgcgtatatatgaagagacaggcgtaatgaatcgtagtcattaagccatcgtatgaatgtcgttaagaaaagccctgcgactggaattgtacaccgaaagtgtgttcaatccatcgcctagtaaatagcaatatatccacggacgcgtgggcggacccgtgg

SEQ ID NO: 83247 - DNA, 1803 bp, Zea mays
  Clone ID: MRT4577_175936C.1
ccattgggtacctcgaggccggccgggagagccgaccgacaacatcatggcgaggattccccaggttctggcgccgctcctcctcctgctgctccccgccggtctccgggagctgatgatcgaccgccggcccctgccggaaggcgctgccggcggcgaggtcctcctccacccgctggtgctggtgcccgggctgacgtgcagcgagctggacgcgcggctcacggacgcctaccgcccctccgcgccgcggtgcggcgccatgaagggcaagggctggttcggcctctgggccaactgctccgacctgcccgggcaccactacgtgcgctgcttcatggagcagatggccctcgtctacgaccccgtcgcgaacgactaccggaacctgcccggcgtcgagacgcgcgtgcgcaatttcggctcctcccaaggattccagaagaacccagagcacacgacctggtgcttcgaggtcctcagaaacgagctgggaagggccgggtaccgcgatggcgacaccctgttcggggccccgtacgacctccgctacgccccgccggtgcccggccagccatcggaggtcttctcccgctacttccggcgcctggcgagcctcatcgaggacgcgagccgcaagaaccggggcaggaaggtgatcctcttcgggcacagcttcgggggcatggtggcgctggagttcgtccggagcactcccatggcgtggcgagacaggtacatcaagcacctcttcctcgtcgccccggtgccggcggaagggttcgtgaagccgctgcagtacttcgtctccgggtccaacctgatgtacgtcccgacagtcagctcgctcgagctggcctttaggccgatgtggcggaccttcgagtcctccctcgtcaacttcccctccccagcggtgttcgggcgcaggccgctcgtggtcaccgcgcggaggaactactccgcctacgacctggaggacctcctcgtcgccgtcggctacggcgccggcgtggagcccttcaggagacgggcggtccccaagatgagctacttccaggccccaatggtgccgaccacgtgcatgaacggggtgggcaacgacacgccggagcagctcgtctactgggacggcgacttcgacgcgaccccggagatagtgtacggcgacggggacaattccatcaatttggtcagcatgctggcgttcgacgagaagatgcgccggcagccggaacagaacaaggtgtacaagtcgatcaagattcgtggggcccagcacggtactattgtgacagacgacacggcgctcaagcgggtcatgcacgaaatccttgaagcgaatcgtagttaggctactcacaatggggatttcatgtctctgtttccttatatgccacatcagatttatggatgaatgaaataccctctctcaatagagactattagatataagattatctaatagatgtttgaatggactagagataatagttagatggttaaaaaatccctagcggaattatctagctaacaaatatctagctaaatattagctaatttgcttaaagtagctaatagttaaataattatctagcctatttaaaagcattcagctaattttagcagctaactattatctctagtatattcaaacactctgtactatatttattttgtattatagatattgttactcgatcttataaagttactaaaaataaatagtttaatttgtgcagattgtaaaattgattttatttggatatggaaggagtatattaattataaaaaaagaaaaaa

SEQ ID NO: 83248 - DNA, 345 bp, Zea mays
  Clone ID: MRT4577_175937C.1
taggccacatgtcttatcttgggaacagtttacattccttaacgacatacaccagcgagattggtacagagttcagacgttgcggactgggaagctcacttcgaccgagtttaaggggattctgaacagagataatccaaaacaacacatcacatgagggctgacgcacatctttgtttcagcattattggcacattggtccggaagcaactcagggtgggcgaggccgaggcatcggccgggccttatgccttcggagccaccagctgggcgatgtattgcacaggacatattctggcgatggacatatcggccggcaggggctagacctgcattttcaccaca

SEQ ID NO: 83249 - DNA, 289 bp, Zea mays
  Clone ID: MRT4577_175938C.1
gccgcctcctgtaactttcatcccttgcgaacctgctccatcggccatgtgacatggataccttagcatttcccgctgcgctcaaacacctgatctcactcatcattaacacacttctacctccaacaagggtatcttcctccgcaagcttatctccaactttcagcgatgcgctgcacatgatcaggctgaagagtctcactgacaagagcacgctccacacgcagtcagggctctttatgcaacttctcccagacaaggccacaaacacgctctagatgatagacag

SEQ ID NO: 83250 - DNA, 436 bp, Zea mays
  Clone ID: MRT4577_175939C.1
attgaagtacctgaagtggtcttaatggccttaatcagccttcttccgaccataccacatagccttcctgctgatgctcctcctcttccgcctccatctccaaaagcagcagcaacaataatgggttttgttgcatgcttacacaggctacttacatcaagaagtatggcatcacatatgatggcgtttcctgtcgctgttgggagaataatgggtttgcttaggaatggttcggaaggagtagctgctgaagctgctggacttgtggctatgctaattggtggtggtccttgtgattcatctatcttaatggatacaaggggagaatcccatgccacctacatgcatgcaaagtctgtactattctcgcaccaatgtatgttccgatccttggtaaccggttgaagccaatatcggtgtcaccatttgtatctct

SEQ ID NO: 83251 - DNA, 244 bp, Zea mays
  Clone ID: MRT4577_17593C.1
tggcctattcgcgccgccgccgctgctgggggggctttctagacgtcgtgcgaatagtacactctaacgccgccatggggcgtatgcacagccgcgggaagggtatctcttagtcggcgctgccgtacaagaggacgcctcctacctggctgaagaccggcgcctacgacgtggaggagatgatcacaaaggcagcgaagaagggacagatgccgaagcagatcggcgacctgctccgtgacca

SEQ ID NO: 83252 - DNA, 237 bp, Zea mays
  Clone ID: MRT4577_175940C.1
cggaaagagaaacccagaagccggtcttgttggatgtatgaccggccatgacgtgcgcggtcaccttcattgacttaccgatccggatgctcaccgtcgtatagagggaccacaagttagggtggttggatgctgatatgcaggcgcagatggactacttggcgttagaaaacgcggttctggaagacaggttgagtgtggtactacgggtgcgggtagacatggtggtggttcttg

SEQ ID NO: 83253 - DNA, 570 bp, Zea mays
  unsure (1)..(570): unsure at all n locations
  Clone ID: MRT4577_175941C.1
cccccccccctctctcctcctgctggagttcgtgcgacgacggcgaggcagacggcggtacgggctagctcctctctgtcggcgaaggtgccgcggagatggggatctcgttcaagctgtctaaggttggcgttcgcgtgcaaccgaccgcgcgctctgccgctccggagctaccggccgcggcggagacggagaagccgggcgccggtgagaaggatggttccagaccggaagccaaacgggaggatgctattgtcgagagagctaatgatgcgaatggcatcaatatttcaccagcatgctctagggcgattttgccagatcatgaagtttctttcactttcagtctctatgatagaggttacctcatcgccaagtcagcagtgctggatccttgccagccctctgttcaggatgggaaaacactgcatccatatgatagagcgtcagaaaaattgttttctgccattgaagctggaaggctgcctggagatattcttgatgagataccaagcaagtactaccaatggttcagntatctgtgagatacgcgactaccgaaagcatgca

SEQ ID NO: 83254 - DNA, 592 bp, Zea mays
  Clone ID: MRT4577_175942C.1
aaaaaaaaaaaaaaaaaaaaaaaaaaaaaaaaaaaaaaaaaaaaaaaaaaaaaaaaaaaaaaaaaaaaaaaaaaaaaaaaaaaaaaaaattttcctccctcccatgggggggccctgggttccctttgttaaagcccccataagccgttccagttcgccatggccaccgtggaacatggccatgccaagctggccgtccctgctccatccgatggggggggggtttgcatttcccatgggcgagctcaccgggtccttgggtttgagtccgtcgacctccagttggccagccgggccctccttgttggcccagcccttttgttcattggtttttccccccgccggcggcagcaggcagccatggcacctctttcccctgttggccctccttttgggcccagcctcctttttgtttttccggggggcattggccctcctttaattttgcaggggcggctcctcccttttttcattgggcctccctggtggggggcccaggcgcctgccccccttttttttgtgtgggggggggccccggctcttttttttttttggctgggcgtgggggtgctttcttttccctccggtttgc

SEQ ID NO: 83255 - DNA, 383 bp, Zea mays
  Clone ID: MRT4577_175943C.1
tacttgatgactgacaatttatgagggaacttctaccgacaggtgtgacatgtgctcttcaatgatgagaccatacaaatatatcgaagtctgcatgatactgatggttgcaatgcagtattaaaacagctaaattaaaataacaaaatttatgtatggctaggattacaaatggattatgaaatatttttttataacaatataagacacattttatatataagttattatgttattatatgttcccgttgcaacgcacgggtactcacctagttagatcagaagttacatggcagtccatggaacattgagtgctcattggaagtaaacttcctagcctttgtacctcggctaagctaaattagtagttatgggtttaaatg

SEQ ID NO: 83256 - DNA, 558 bp, Zea mays
  Clone ID: MRT4577_175944C.1
tccaccgcggtggcggccgcccttttttttttttttttttttttttttttttttttttttttcttttttttttttattctttcactgtttattatgcgggcccaaagatctaaccgttcttagttattttagagcacactttttttcccattcactgaaaaccaaacatggcccatgatccaagaacacgcttttcttagtactacacctcctaccaccaaaatttttgagttaacaaaaaatctaaatggacataataaggccggtccaaagattggaagggggtgctgttattacacaaccaacggaatttcctaagcctgccagtcaaaattaaaccagtttgtggcttttgcccccggaccttggtccattgggggggcgacgccttttaatagggtttgcctaaaagggttgcctgttacttttccccgcatgactaatccgaaatgttagaaatcctcttgttgccgaggttgtcgtggaatacattgacctcggcgccgatggccggctcgtcagcaaggcccacctggaactaagccccgtccgcgtaca

SEQ ID NO: 83257 - DNA, 860 bp, Zea mays
  unsure (1)..(860): unsure at all n locations
  Clone ID: MRT4577_175945C.1
gccggccgggtccggacgaacaccaccctccagctcactcgacgccgtgctacgcgcagcgacttcatggnatcttttgagcgaataatttccaacacgatctatctcgccacagtgaccgctacaaatctataccaaaggacacagaacatcccgacaaggaccaattacacagaatatcaagcatttcatccagtaacaagttatcagactacagtactcaggccaccaccgccaatgtagactgtgtccaacaactagccagtctcgaacgtcttccactggtcttcaaacatattaccatcttttgaccagcgcgctaccagatatacaatacttccaactagctggaaatcttgtgttagagtaggcaatattgcacagcctcagagcagtacagttaagatgggatccatgaacatcccgaaacgagttgtccttcggtttagcgttcaatacgagcgtgaggaagcgactatcaatgaacaattctttgcattgcatggccctgaacctccaaatgaagatttcttttctcacttaatggccccaaacgaatcttctaagatgcacatcgttctggatttctactgcaagtcacatccgaccatcgacaacagcatgataccatacgaagtcttcaaagtaaaaaagcacggcaattttaaatttgaaaaactagacgctactgcatgccaacttgctcgtaagagctgcgagtcaattggggtcaaatggggtaccaaccgacctcaatctgaggagttagatggtgtccgtgcgttgcaacaggacactctccggctacgntcgtatcttgaatatcaagagataaagggcagtctcgctgctggtcactt

SEQ ID NO: 83258 - DNA, 2241 bp, Zea mays
  Clone ID: MRT4577_175946C.1
atgggggaggggagcggcaaccagcggatcgacctgggcgcgccgctccgctcggcgcgcctcgccgacgcgccgacgcagtacaaggccggcctcaactccgggcccctgcgccacccgggcaccgtgcccttcgcgtgggagcagcgcccgggccagcccaagagcgtccgcacacgccgcgcggcgccgccgacgcccccgcgggaaacttcccgggcgcggccgggcgagacaggcggcagcccctactacgacgccgttgcggagctcgatctccaggcgcttcgtggcgtcgccgaccaaggttcccggactgccgccgcatcgcgcaaggtggtggtgggggagaacgagcttgcggtggcggtggaatcgaccaaggatgtgaagaagcacgaggcgctcccggcggctgcggtcctacagaagcaggacggcatagtagaagaggaagaggagaggttctccgacgcgctcgacacgctctcccgcaccgagtcctttgccatgaactgcagcgtcagcggcctcagcggcgctctggaccccggacatggcgccgagccaggctcccggggcttcatgatggaccggttccttccggccgcgcaggctgtcgccgtgggctccccgcagtacaccttccggaaggccggcgccgccggtggcaccggcaattctggcagcgggcacgcgcgcgcggctgcggtgaaggcaggcgtgggcaatggcgaggatcgaatgaggagagcgcctgtccagctcccataccagcacctgccgcccaattacttgtcctgcgcctatccaagacacgaagagcatgaagaggaggatgaaggggatgacgatgacgatgactatgatgtgcatagtacccgggggttttcagccaaggggtgtggtttgctccctagcctatgtgcgaaaacttccttgttgctcttaaatccaatgcctgcaatgaagcgcggcaagcaatcatgggaggatgtgtataagcataagttggagcagaagtatcttggtcaaggagaggatgataggaggagcaagctgacaagtgagtcgaatcagcttactttctggagtgattcaccgactggggatggatcttcaccatattaccattccatagctggtggcatgtctccatatcgcagttatgctgtgatgtcaccatcaagtaaaccaaatgggtcgtctggaacaggagataaggatgataaagcaagtaggagcaatggttctggttcgtttgggaaagaccatgatcgaacctcgttggttggatcagatgatagtagcttcaagcgatcaagttccatgagctcaggaccagatggaacagtgcatgaagattcaatggatcaccacagagatactgattcagacacatgtcacttgggtgtgcttgtgcatacaaaagcagcattggatgcaaacatatatgacactcaacctggagggcgaaagacagttggaaataatttgattgtgaaagatcaagtcaatgatccattgactgaaaagatcgctgaacttagagaacccacatttccattggatgatggaaaagatttgcagcgtaatgctagtcatgagttaccacaacatctcgaagacaatgatgttgccaaaaaggaaatcataccattacaatctctgctccctttaccagtacccaaatcaccttcagagtcgtggctttctcgcactttgccatccgtgacaaataggtcacctctgccatcttttcttggaattcaagtacactcaaagaaacaggctccctgggtcataacgcaaccaaaggagaatgatcataaaccttccaggccacgacagataagatttgcagattatctatccattcatggtgttgccttgaaggctatcaaggtcatatacctcactggcacttacgagttcctaggatgtgcctctgctttttacagatgtggtcacttgatacagctgctggttaccacttaccatgttggtaattggagttcacatgccatgtttgctggactgtggtcactggatatgtcagtacttgtgcttgatagaatcatagaactgtatctagtgccatatgttgtgtcagttgtgtctgacactatcggctgtaaggtgtgcagtcgagttcctggttggttgtttagctcaaatttcgacacttgcttttgtccccaattctgccattagtatattcagcatatttcattcctatag

SEQ ID NO: 83259 - DNA, 1939 bp, Zea mays
  Clone ID: MRT4577_175947C.1
gaccctcgaggctcgccgggcaatgcctgcaatgaagcgcggcaaggtgagagggcgagttagaggctggcagttaccgtgcaaaggccaaggccaaggccaaatggcgcagagtccgcttgcgcggagctcgcagaacaagcacctgggatgtgattccaacgggcaatcatgggaggatgtgtataagcataagttggagcagaagtatcttggtcaaggagaggatgataggaggagcaagctgacaagtgagtcgaatcagcttactttctggagtgattcaccgactggggatggatcttcaccatattaccattccatagctggtggcatgtctccatatcgcagttatgctgtgatgtcaccatcaagtaaaccaaatgggtcgtctggaacaggagataaggatgataaagcaagtaggagcaatggttctggttcgtttgggaaagaccatgatcgaacctcgttggttggatcagatgatagtagcttcaagcgatcaagttccatgagctcaggaccagatggaacagtgcatgaagattcaatggatcaccacagagatactgattcagacacatgtcacttgggtgtgcttgtgcatacaaaagcagcattggatgcaaacatatatgacactcaacctggagggcgaaagacagttggaaataatttgattgtgaaagatcaagtcaatgatccattgactgaaaagatcgctgaacttagagaacccacatttccattggatgatggaaaagatttgcagcgtaatgctagtcatgagttaccacaacatctcgaagacaatgatgttgccaaaaaggaaatcataccattacaatctctgctccctttaccagtacccaaatcaccttcagagtcgtggctttctcgcactttgccatccgtgacaaataggtcacctctgccatcttttcttggaattcaagtacactcaaagaaacaggctccctgggtcataacgcaaccaaaggagaatgatcataaaccttccaggccacgacagataagatttgcagatgtagtagaaaaaccaacttcgttggattcggagatatgatatcttctcgcaaaaccagtatctatccattcatggtgttgccttgaaggctatcaaggtcatatacctcactggcacttacgagttcctaggatgtgcctctgctttttacagatgtggtcacttgatacagctgctggttaccacttaccatgttggtaattggagttcacatgccatgtttgctggactgtggtcagtatgtttctcatggtaagctggtaggtggtggtttaggtttggagtaaatcttatattcgtacaggatgacttcagctttcttccttactgtcgatagtgaaataaagcaatagtacccaaaaccaaaaaaggccgagttgttgcaaaatgtaatgcatcccaaagaataagaagatgtcaaaacagattaggcttccattcctgatacattttctattcgtaattgtatcacctggatatgtcagtacttgtgcttgatagaatcatagaactgtatctagtgccatatgttgtgtcagttgtgtctgacagtaagtatattcagcatatttcatatctatagtaaatttatttgctacattgttgtcattgattgacatcaagatggaagattatatagcagaagcagcaacgttccaactgtaaaagctttagagattctccaaaaagtgttgccgtgtgatgagctcatgagcagaaccttatgaattgacgcatgaccttaacaattgactatcggatgtgggtcaactgccgaatgggttgtagtgctgttcaactagaacactcgttgggcttttcatttgtcgcctcacagatattttcttgtgctctgtaaacatcatatgaattctgtgggcaacttat

SEQ ID NO: 83260 - DNA, 801 bp, Zea mays
  Clone ID: MRT4577_175948C.1
tgcgaggatcgtatcgaacaacggccgggcaatagcgcccggccgggaaacgaagacatttccagatcacgactcaaccccccttccaacttctccttgatacacatagaaatcttcgaggatcgcccgacgagaaaaaaatattcaagatgtcggacgtagaagacaacacccccgaggtcgccgacgttgtcgaggtttccggcgatgcccccaagggccagatgtccattctcgatgctctcaagggtgtcctgaagctctctctcatgcacgatggtcttgcccgtggtctccgtgaggcttccaaggctcttgaccgtcgccaggctcacatgtgtgtcctgaacgagaactgtgaggaggaggcctacaagaagcttgttgtcgctctctgcaacgagcacaacatccctctcatccagatccccgacggcaagcagctcggcgagtgggccggtctctgcgttctcgaccgtgagggtaacgctcgcaaggtcgtcaactgctcttgcgtcgttgtcaaggactggggtgaggagtctcaggagcgatctatcctcctgaactacttccagaccgagcagtaaatgtctgaactggcgttggatgtgaggatgattagaggtgcggacttggtttcatgaccgcttgacacatacgtgctgtactctagccacttcgactggcatctacaacggttttaaggccttacgtctcatggccattgagaggaattaaaaaaaaattgggcatcatccgaaaaaaaaaaaaaaaaacccgcggccctcgagctccagc

SEQ ID NO: 83261 - DNA, 350 bp, Zea mays
  Clone ID: MRT4577_175949C.1
cggaccccggggcctggtggtgctcggcttcccgtgcaaccagtttgggcatcaggagaacgccaagaacgaagagatgctgaattccctcaagtacgtccggcctggtggtgggttcgagcccaacttcatgctcttcgagaagtgcgaggtgaacggtgcgggggcgcaccctctcttacgccttcctgcgggaggccctgccagctgcccagcgacgacgccaccgcgcttatgaccgaccccaagctcatcacctggtctccggtgtgtcgcaacgatgttgcctggaactttgagaagttcctggtgggccctgacggtgtgcccctacgcagggacagccgccg

SEQ ID NO: 83262 - DNA, 170 bp, Zea mays
  Clone ID: MRT4577_17594C.1
ggcatcgtgctgctgtcatttccacttgcctcctcaatcaaggcaaccgcctcgaccactcaaatgctgccgacaaccgccacggccgccgcgccgccgccgcccacgggcggtcccgcctcctccccgagcgagccgcacgccgcgctcctcctggctctgatctacat

SEQ ID NO: 83263 - DNA, 194 bp, Zea mays
  Clone ID: MRT4577_175950C.1
ggtagttattagaaccagatacctgctgaacagcatcatatcccggcggtaccgaagttcaaccaaggctgattatcacaacatgatccaaagaacctatagcgacattgtctttcacttaatttcaaccaactgcaaccagctggtggcggtgatccttatctttctagcaagacttttgggatcttcaatac

SEQ ID NO: 83264 - DNA, 2080 bp, Zea mays
  Clone ID: MRT4577_175951C.1
cattgggtacctcgagccggccgggggtcgcaagtcgaacccacgctggctctctcccggctccgaactgctaagccccccgccggatcgggttgcgggtcgccatccccgacccagatccaccacagctcgccgccggtcgccgccgccgcagagtgggtgatcgtgtacgtggtaacatgctggagccaacagcaatggaggtggtcgttgctggctcagtgagcaatgcagtggtgcctgcgcctgtggttcacaacccacgggcacgcaagctgcggtctgcagtttggcaggacttcacgaaggagcgtcgtgccgatggtaactgtgtggctgtctgtaaccactgcaagaagcagctcacggcaactagtcggtcaggcacaacgcacctccgcaaccatctcgcaatctgcaccaccaccgccacacggcgtgctggtaagcgccggaagcttgttgtccgccgtattctccacaacaaatcctccatcgatgggcgctcgggtgagggtcacgcctcaggtgaggaccatgataatgagggcacacactttgatcaagaactcagccgtcgagaccttgtgcacatgattgtccagcatggctaccggttttcgattgtggatgatgtgggcttccaaaagtttgttaagaactccagcctcagtttaggatggtgtcgtatgaaacagtgagggctgatagcatggaaatatatgaaggtgagaaacttaagctacatgatgttctctttaagatcccctgcggaggttagcatatcagttgacatgtggcggtcaaatacacagatggaatacatgtgcttgacttgccactacattgatcatgccaatgatgagtggaaagtcaggaaaaaaattctcaactttgtgcatatggaggcaccttttacacttgatcagatggttaatatcattgtagagaagttgcatagttggggtattgacagaaagctagctgctgttgtgctagacaactgcagcagcggtgaaaattcggcacgagggcttcacagagttttccaggctcggaggcttctattgaatggggatttgttccaagtacgctcttgtgcacatattctaaatctcactgtccaagaaagctgggaacgggcatctgatataactgatagagttcgcaagatgattaactatgtcaagtttgaaagattccaaaagtttcaggatattgcaaaggtattgcgtatggatcaaaagctgctagttattgattctcctgataactggccgtctacgtacttaatgtttgactctgcatgctactatcaagatgtgtttgtgcgcctgacagaacaggaaggtcattatgatgtttttctgtctgctaatgactgggctgatgtgaaagccctcactgaaatactggacgtagtctatcatgcttatggagaagtttcctgtagaaaacccaactgcaaacctctatttcaatgagatgtgtgagatccacgtgcttttgaaaacctggtgcaagagtccatctactgttgttgccaaagttgctggccagatgctttctaagtttgaaggttactgggatctcactaggcctgtaatggcatttgcatctattcttgatccccgttacaagatgaagtccctcgaatacttttttcggctcatttattctgatgagcaatttacagcaaagacaatgatagatgtcatccagaatacctttcacaatctgtataatgattataaacatcagtcatcagactcatggaagaatccatctgttctctgttactctagaaacagtaattcttgcatgggctctgtgtacagcaatggggatgattctaagaccttttcgcgtatcacattatctgatgctcgacggggacttgatcagtatatacaagagacctcatcagggcaatccttgaagtctgacttggagatgtatctcgaggaagcagtttttcgtcaaaaagaaggaaatcaggataattttgacattctgggatggtgggaagtcctttgccgccaagtatcctgtactttcacaaatggctcgtgatatttta

SEQ ID NO: 83265 - DNA, 326 bp, Zea mays
  Clone ID: MRT4577_175952C.1
tacttccccgtcctatgcaaagggggtggccttttttttggggcccccttttttggttgggggggccgacgttttacacctttttttttggggaaacccctggcgttccccagcttattctttttccagcccatccccttttacccccggggcgtcccccctaaaaggcccgtcccgatcgccctttttaacagttgggcatctttattggagagggggcccccccctgtttttcccctttatgcccggcggttgtggggtttcccccccccctttccgttaccttttcaagccccctggggccggttctttccccttttttccct

SEQ ID NO: 83266 - DNA, 626 bp, Zea mays
  Clone ID: MRT4577_175953C.1
gctgacgattcggcagttgtgatccccgcagagcggctggcgtcggcattgccatctgccacggtggcgccgtcgctggtcgccgtgcgggaggaggcagacgcggctgggatgctcgatctgaggttgttgctgcggggggcacacgggaggtgcgtcctcatggagctcgactccagcgtgctgtgcggctgtagcgacttcttcgccgccatggccccgcgcgaggatgctgctggcgctggtgggaagaggctcgaggtggacggggtggagaatttggatgctttctgcgccgctgtggagctcatgtacaatcctgatccaatagggtgtcttgcagctgctggtgtgtcaagggccatagatgtgcttgaggtatgctcctctatcatgttcagcaagggaatcaaatcatgtttgacatacatagaagctgttccctggaatgaaaacgaagaggagaagctgaagaacctctttgcaagattcacttttgacgaagcaatgtcccaggatatactggcaagattgcgtccgcacaactggaaaagctcagatgacctcactatacagcttattcaatctgtcactggaagcaccagcactgtggcaagaaaagacat

SEQ ID NO: 83267 - DNA, 823 bp, Zea mays
  Clone ID: MRT4577_175954C.1
tttgaacaagaaaatttaattttcttttttgctccaaaaaataacaaaatggacaaatataaattaaatgataactcgaaaacttttatcaatgagctgttcaacttttggggtcagaggggtgtcactaatctaaagattcctcaaattggtggtcgtgaacttgatctgatgcatttgtataaagcggtttgcaaaagaggaggattccatcgcgtctgcagcaataaactctggaaagaaatcgtccttgagttcggacttcccagaacatgcacttctgccagttttaccttgcgtaatcattaccagaaatatcttcttgcttatgaacaaaaattcttctttggcagaaatgaagaagtagaatatcctgaagttcaaggtgccagacccagaaaagtcgtcagacctgttgaagaagaacccaaatttattgcactagaaatcgccccaagaaatcaatccattgaaaatgttctcaacggaatgtaccaaaatatcccagataatagtgaaattctttacttgagaaaatacaaaacagtccctgttgtgagtgaaatgagtagaatccttctcgctttcgagtcacatatgcaagaagaaaccacttttgccctcaattctttattactttactcttgcaatgctcatttccatctcgagtatcaccccaccctcttggacactctctttgtttatgtcgaaaacatcatcaaggatgtcccttactacaaaaaatctatctcaagacagacaaagaaaaaaactcgacgttgttcataacggcaattaccctgtctcagaaatatcagcacaa

SEQ ID NO: 83268 - DNA, 446 bp, Zea mays
  unsure (1)..(446): unsure at all n locations
  Clone ID: MRT4577_175955C.1
tcgggggagcgcacgcgtgcgtgctanttccaaggttccttccaaatttcttgaactaccggcatggaacttctatgcgaccctaacttgggtggagcttaaatgtctttacagagaacttaccttccaacatcttttgaatggctgaagacaactgacaaaaactgggtgaacttcaaagcaacctggactggatactttancctggcatccttgatcctggcatggggggggggcacatcattgagggttggacatgggattatgacaactggatctggcataagctggataattggaattaatacatattatcttttttttttggcgattggaacatctcgtgaggcatggttgacttcaaaaaaatggtgggggtaggcatttttatggacaggcctaccagcagtcatggtcacatttaccttggtgcgacctttcgtata

SEQ ID NO: 83269 - DNA, 255 bp, Zea mays
  Clone ID: MRT4577_175956C.1
agggaagaacaccgcgttttttaccataaaaaggggttgggggggtttcaccatacatagcattagtttttacacacgacacgtcgcacattttacaggaaacagggttaggcaagacaaggaacatttgtttgccccaagggggagaatggctttatcaaaacatttaaacaagatgggcatcacaatttatacattttggagagctcgcactccaagggtttcgccttcacatttgggggataccattgattt

SEQ ID NO: 83270 - DNA, 268 bp, Zea mays
  Clone ID: MRT4577_175957C.1
gccggtcgggactccttccctccgtttcatccctgggctgcgcctactgctcccccctgcgccctgcggcgtgcgcccctgctctgctggccgctgctctgctcatgttttcacattcaagcgcctgcccctcgccctcaccgccacagtggtaaccgatccatgccgggcggcggccgctgacttgctgctgttggcttcgacggccacaggcaaaggtcgtcatcgctttccggcagcccgtttcattgagaaagcgacaacaagg

SEQ ID NO: 83271 - DNA, 353 bp, Zea mays
  unsure (1)..(353): unsure at all n locations
  Clone ID: MRT4577_175958C.1
ctcgctgacgattcaccccgcaccgcgagcgaggagaggagcctggccgcgagggcgtcnacnctgatggcggcgtggtggcggatgaaggtggtgccctgcgcgcgccgcgcctgggccgtcctctccgcgcggctccgcgcgcgtaagcctggcagtggtggcattctgaagctcaacgaggacgtgcagacttgcggctacaaggacgtccaggtcatgttcgacatgttgacatcggaactcgaggcagccgctcaagcccagaagccaccgacgtcgccgccccgcaaaggaggagcgctaccgcctgcatggcccggccggtcctcgtcggcgatcactgctgcaca

SEQ ID NO: 83272 - DNA, 409 bp, Zea mays
  unsure (1)..(409): unsure at all n locations
  Clone ID: MRT4577_175959C.1
ggagggagtatttaccaatatcagattttttttnccagacttttaatgcttagtttcattaagtgcaatcaaagtaagcagtgattcaccacagttccaaagtgacagcataggccaaaaaaacataaatggataccacatgatctagggttaatgaatacaacaaagctgcaacaaaaaattcacagcactaccaaataaagtaccctgttgtctgattatattatatatagccatccaagaacacagtaatctgtacacatttaggtgtatagcagttgttgagtaaatgaacaaataaaccaggacacgttcctttccctaaagcaggacaccagatacaggtctaggacaatgagacaatcatgccaccaaagagtcaacaagcatgacaaaatcgacagcaacg

SEQ ID NO: 83273 - DNA, 107 bp, Zea mays
  Clone ID: MRT4577_17595C.1
ctcccagtcaacttttgggttgctgcaccgttgtctccttataacgtaatgatttatttattgtgtgtagaactcctgttgtatagtaaagatgtgacattcgatcc

SEQ ID NO: 83274 - DNA, 282 bp, Zea mays
  Clone ID: MRT4577_175960C.1
ctcgccggaagaccgtcaccgccatggatgttgtgtacgccctcaagcgccagggccgaactctgtacgggttcggaggatgagcgcatctttttcctcgtctgcagcggttgtcgggggcgtttcctcagttccctctgccttgcttggcttgatgtacagagttatcaaattaaaatatatgtgatgtgcttcgttattgggtggaatcatgtgtcccatcagtgctgggaaatcgagatcaagatgtatctttctttggactaatgaaatgataaaatc

SEQ ID NO: 83275 - DNA, 1739 bp, Zea mays
  Clone ID: MRT4577_175961C.1
ggccccttttgagttttattttttaaacccagaaaccagcaatggaccatattgaaacaaaaataaaaatacacctggggattgaaagtaagcccctcttgctctctctttttcccgatgggcgaaaaaaagtgttcagcagtggttcatatcatcctctatttacacacctaaacacgatgtttgggagcctctctatctctcgcgcttactcctcatcttattgttctcgctgcaatttttcgctctttctgacggaagaagggcagggggcggcggacgcctctctaatggtactgttcgcaggtacctactgtgcagcagtgatcgccgacgaggaccggccgggccatgcaggcggtagcgctcctcctttgcggggcggcgacgtcggtggcttctgggcttgagcggctgcctcgagttccgatgtcaacatgtcgaacatcacctggacgtccttgtagccgcaagtctgcacgtcctcgttgagcttcagaatgccaccactgcctggcacatgatccagggtgtccaggtgatatccaggcttacgcgcgcggagccgcgcggcgagggcggcccaggcgcggcgcgcgcagggcaccaccttcctccgccaccacgccgccatcagcgtcgacgccctcgcggccaggctcctctcctcgctcgcggtgcggggtgaatcgtctgcgaggaccgaggaggagtcgcagtttccgcaggcaccagtgcgcaggcaaggcggttttatccgcaggaaggaaacggggcatgatagaccatccacgtcagtcgaattatcttagtcgttcaatcgttggttcccatgctctctcgtgcgcccatgtgtcttatctggaggcttctagcatccctgcccacccacggctccggcgacagcggttgctgctttggactccggatccggccgccatcgctgcaacggtccaggttctcctcattttcgtttttttgggtcgaagcacttggagcaatacctctaggactcagtgtctgcatcagtcagtccgcttcttctacgtgttgtggcacagtggccaatcagcatcgagaccgcgcaacaccagattgcgttgtctcatcatccttggctccggagggcataccgtagaaatgatgaatattgtaacaatgcttcagaaggataggttcacaccaagatattatgtggctgcacttactgacaacatgagtcttcaaaaggcagagatctatgaacaatcgcttattcaggttacctcctcgcatcacaagattccaaatgataacagagaaacgacttgaatacaaattgctctccagtataccctttaaccctttgctatacagattgcagctcgaaactccatggactacgtacaggggagcttcaaaacccgaaggaaaacactgaatttcagattcaatttactgaaccaattgctgaaatcccagtctgatagagcgacttggagcagcattttctcccttttctaagcaaggattctggctctcatcaagtgactcctccccctcacgttgactttgcggacatatgtctcaattccagtggtggagctacgaacaacaatctgatgtcctgatcgagagcgatggagctaatgtttgaatttgtgaactatggatgtgaacttgtgtgaatttgtgaacttatgtatttggacttatgtgaatttgcgaacttatatatttggactatgtgaatttgtgat

SEQ ID NO: 83276 - DNA, 370 bp, Zea mays
  Clone ID: MRT4577_175962C.1
gaagtcttacaaaataaaagataaatataaaatgaactaaggtccatccttggcgccataaagtcaactgagagacgccacctagatcaaatcaaagtcctcgttgtgtggctcctcttgaaccacctattcttctcctgtgggagggttgtgagacagcaagggtgagctcacacatgttcatcgctcaacaagttatggggaataatgtggcatgaactcaccaaaggtgggagttcatgtgatgtgtaaagctgatcaacaataggggttaaagctgagcgttgtttttaataagttggtcaaattttattagcatttactaaatgtaagtgaataccaaaccataataagaataatagaacaaaat

SEQ ID NO: 83277 - DNA, 338 bp, Zea mays
  Clone ID: MRT4577_175963C.1
cattgggtacctcgaggccggccggggtccaatccctggccacgaaaaccccgggccaaatcgcccccgcgaactttttttcgctatttggtgagcacgcttcccggccctcaccgcgggggagctcggtgatttcgctccccacctcagcaggtcgggaagagcttccctgtccgctctcacgaagcctcctcctccccgtctccctcgcaaagccaccgcctcctcgtctccctctcgaagccgtcgccgccctctgcctcgcactctcttggactggatctgtcgtcgtccggtgattttgctgaacacgagcacttcctgcttcctggcaccgc

SEQ ID NO: 83278 - DNA, 169 bp, Zea mays
  unsure (1)..(169): unsure at all n locations
  Clone ID: MRT4577_175964C.1
tcttccncgtccctcaccctccttcgtcagctagtatctagtattagcgaccctggtccttggcggcctttcgttcgggggtggcgtgcccaattcccctgcgtcatcgtcactggactctccgaggtggaggtggttcttatatcttataggcatccatggcgctact

SEQ ID NO: 83279 - DNA, 348 bp, Zea mays
  Clone ID: MRT4577_175965C.1
cccacgcgttcgcactaatatgatgtgtagtatatttgagtcaccttatgatgagtggtatatatatgattttaaaaatttgtaaaataaggtactgttggaggtgtttttttagaagttgagccctttatttagggcattgatttaagacaggcttggagatgctcttagtccattcacaatggaagtttaattagatattttataacattaattagtataccacataggatttgttggaggtgtttttttagaagttgagccctatatttagggcattgatttaagacaagcttgaagatgctcttagtccattcacaatggaagtttaattagatattttatgac

SEQ ID NO: 83280 - DNA, 379 bp, Zea mays
  unsure (1)..(379): unsure at all n locations
  Clone ID: MRT4577_175966C.1
ggtactgancccttagaactagggttgnttgacgtncccgagacctagtggangggtnngcttttgccgtcttatgctagagagatctgagtntgatggtttggctgnttggctctttgcntctatccggcntanggatccatcgctgcctaccgggtgtgccatacggtagnttttggttggggaatgctgttntggtgtnntggggctgtttttgttgtgttggtggtgcttctaggaaagcaaattttttttttttttttntttttttttttttttttttttttttntttctttttttttttttnttttttntttttttttttttnntttttttttttttttttnttttttttttttnttttnntttttntttttt

SEQ ID NO: 83281 - DNA, 369 bp, Zea mays
  Clone ID: MRT4577_175967C.1
tttgtttgagcaactatcacatcgggaacgcggggaccgtggtgttaaggatcttcggcttgatcgccagtatgggctgtacgggctcagcgctgacggggttcaaccacagtcgtgtctggagcaccatgagcctggcagggggacgacttggacgaagatagtgggtggacgctcactctgctcgccatggggtacatacgtaacggatgggggtacaccgaacacactcttatttctattacttgggaggggaaccagttgcattaattggacatcgatttggtgacccggatacggtggcatcgagtacgggaccgatctgatgggctcaggggggcggttaaggtgattgtactgcactgaagg

SEQ ID NO: 83282 - DNA, 405 bp, Zea mays
  Clone ID: MRT4577_175968C.1
aaaagggcggccgggcccagaatttaccctcttacgaggccaaaagtaagctgctcgctgttcttccaccccccccgttcgtgcgattccttctatccgccatggacgctcccaggaacccgacggggagctgggcccttcttgcgctgctcatcgtcgcctccagtgaaacggtgtcgactgctcatgacgagagctggtggaaggacgacgaccaccaccctatctgatttcacgaagactgcgcggcgacctgacacgatccacggcacgggcgacagcccctgcaactgtctatggtccgacaagccgaattgccagtgcctgctgacagactgcgaatacgaccgaacatctgcgtcccatgacgcccagaatgcctccccgccccatgaacgatcaacg

SEQ ID NO: 83283 - DNA, 348 bp, Zea mays
  Clone ID: MRT4577_175969C.1
ctagctattaatttcgagggagctgatatatggggcagagtgctgctcaaccggtgctcactccgaggattggggcaaagcagaatctggatccacgctttgctggaagaaggccaaaaacgggcgcatgcaccctatgaacttcatggacggggaaaaaactagggggcacgaccgcgcgctcgtcaacaccgcccaatagcgagttgtttaacgaatacttcctaagatacctatagttcccgaacttcgaacaccgggtatccggttaactggaagaggaggtcatacactcgtacaccaagtgcctaaaggggcttgccgactgcgagatctaaaacaaactca

SEQ ID NO: 83284 - DNA, 244 bp, Zea mays
  unsure (1)..(244): unsure at all n locations
  Clone ID: MRT4577_17596C.1
gcgcgacaccaccactttttacattttcaattttctataaagctcctttanaattttgcaacatgaatccagctcctcctaaacccgtcaacagcgtcctagaaagcgttggaaacacccagtggtgcgcctaaccatgttgtgccaaggatgcgcagagtctacgtcaaatggagttcttcgccccaagaagctacaagatcgcatgctcatcaatgtagaagagcagaacgcgcgagattaa

SEQ ID NO: 83285 - DNA, 578 bp, Zea mays
  Clone ID: MRT4577_175970C.1
aactaaggaacttgaagatagtatcatctatattaggaggaaatgcaagaagtcttatatactatgattctttacatgtttattattcttgtgcgcaacaacagtgtacaagtgaaacataccactccaagtgaagaatggacaaacagaattagacttgaatctgatcatggacatcctcgaaagatctctccccgttaatggtttcacgattctctacatgttgcaaaaactccataaccacttggtcggtccaaggagctccgttgggagcttcttcacctgccacccatcccaagtgccctcctcttggtgtcacaatcaacacgcagtttgggtttgccttgatgtcatcgcgagggatacctctctcaggagcaatgggatcatttgctgcctgaatgcaaagcaagggtatgcggacatgttttatagctttggagctgcccgacttggaatagtactcatctactgatttgaaaccgaacgaaactcgggttaagccattatcgaaatccctaaccgtctcagcatttgcagccaaaggaatggtaaattcaccccctatgtcttcaaaa

SEQ ID NO: 83286 - DNA, 316 bp, Zea mays
  Clone ID: MRT4577_175971C.1
tttactcgtccgaatgtgtagattgttgggggcgtgcttatgaactgggtgtgtgtcatgaccatgaatagggtcaaaatctctgtccttaagatggtggacgaggtgcgaactcacttcaacaccattcctgggaagatggacggaacagccaaaccctactactcaacctgtcagacgatctgcactgatgctttcatgaacgacatgattactcctggcgctaatggcatgctgactaccctgatctgtgtaacccttttaagccatcacggctctcaacgtcattattgctggaaccccaagttttttaggg

SEQ ID NO: 83287 - DNA, 272 bp, Zea mays
  Clone ID: MRT4577_175972C.1
aagtgccaatccactcgtactcccaaatgatgatctacccttactcatatgcttacaaactcggtgagaacaatgctgtattgaatgccctggctatagctactgtgaaagaaattgcctcactgcacggcaccaagtacacatatggcccgggagctacaacaatctatcctactgctgggggctctgacgactgagcttatgacaaaggaatcagatattccttccactataaactaagaaatacaagaccatatggctttctccatcca

SEQ ID NO: 83288 - DNA, 831 bp, Zea mays
  unsure (1)..(831): unsure at all n locations
  Clone ID: MRT4577_175973C.1
attgggacctcgagccggcgggacttcactctcccgctgaattcgcatgctgttcattatttgactacagttacgctttcgagcctgatccctttgacatgggctcaaagcagctctccttcaaattcagcctctggcacggtgcttactagtacggtcgcctcaagatctagagcatccgcaggtgtaacttctacatattcgcaatcgaacgtaccaacgggaacacccattgctggcaactatgatggcgcgtaccggcctcaggtccacttcagtccgccaaatggtttcatgaatgatccaaacggcatgtttgtggatgacaatggaacttatcacttgtactaccaatacaacccgactgccaatgtggccggaaaccaacattggggacatgctacaagcgatgatctctacacttgggttaatcagcagattgccatctttccgggtggtcccaccgagggggtgttctccggctctgctgtagtcgatgtgaacaatacctccggcttctttgcgaaccagactaatggtgtcgtcgccatctacacgatcaatgtgccggacaatcagacacagcatattgcttactcgcgcgacggaggatacacgttcacaaagtattccgggaatcccgtcctcaagccaggtggaatcaatccaacccagttccgtgatcctaaggttatatggtacgaaggcacgcaaaagtgggtaatggtagtcgcatatccagtcgacttcaaggttggcattntctccagccctaaccttattnnactggacgccgagagcaacttttcccactatggcgtcaccggacta

SEQ ID NO: 83289 - DNA, 615 bp, Zea mays
  Clone ID: MRT4577_175974C.1
tcgccctccacgccgggctccccgtctcacggcggctccgggtcctcgccgacagcccccggacgcgtgggcggctacggtggctccccgtcccacggcggcggcgcgtacggtgggtctccgtccactcccggcagcggtggcgcctacggaggcgggtctccctcgccggcccatggtggcggcgcctacgggagctccccgacgcccgcgtacggcgacgccccctcgcacggcggcatagggacctcgtcgccgacgccgttcggacccccacagcttcggctctctcccgggctcctgcgactactggaggtcgcacccgatggagatctggtcggcgatcggcgggcggttcccgggcacgtcgtcgtcgatggggacgatgggccacttcttcggcgcggctggcagggtaggcgggacggacgtgagcatccaggacgcgctggcgaacacgcggtcggacggcgcgggcgcgctgctgcgcgagggcgccgccgcgctgctcaactccatgacccgttcgggcttcccctacacgacggagcaggtgcgcgacgcgttcgccgcggcggcggcggcggcggcgggcgggtccgacggcgcggccgc

SEQ ID NO: 83290 - DNA, 417 bp, Zea mays
  Clone ID: MRT4577_175975C.1
tcctgcggtcccgccgaacgggccctcttttacatggcagcaagggcgaccagctccaagggtcgggcgatcgttgcgagcatccccagacgtatgctgcacgtgaagggcgcctccaagaggtactgggaccacggccatcactaacgcggcggcgccccgagacggatgatctttaggtttgctatgctctgtgctagaatagcgatgaccgcacatcaagcgctccaaggttattgactggcgacgccccctaagccggcgcaatcgaagaaccagatgtaccagaatgctctcaaagaacctagcccattggctcggctgttaacaaaaaggacaacactgttggcatcagatgcagacgagacgctgtcaagcagacaatgctggcgagaaattcacggacaacaggccaac

SEQ ID NO: 83291 - DNA, 352 bp, Zea mays
  Clone ID: MRT4577_175976C.1
ggaaaccgggccaaaaatacgttgttttccactcgtgggccacattttttggagcagcccctggaaaccaggccccttgggccttaaaggaccccccacaggctttttcccaatttcaagcaacccaccctccacattacccccagataaaaaaagaaagaacgcggccaaaaaaaactttgggggaaaaaaaaacccccccccccaaactttccctgttaattcttttacctccccatatccccttttttgagcttttttgggagattttgaccactttgttgccctgcccttttgggggggcctcggggttatcgggttttttggcgtgggggacggggacctttacccg

SEQ ID NO: 83292 - DNA, 193 bp, Zea mays
  Clone ID: MRT4577_175977C.1
atcgctagttctagatcgcgagcggttgccctatgggatcgtttttacatacaagggacttggacaaactgcattgcagctcggcacggcatagtgtatacgatccgaccgatcgatcccttttattgacaaacaaaacctgtgcacaagggaccttcattgaatgccctgcgcaccatcaacatgtctatct

SEQ ID NO: 83293 - DNA, 2729 bp, Zea mays
  unsure (1)..(2729): unsure at all n locations
  Clone ID: MRT4577_175978C.1
ccacgcgtccggggtggcgcgagcacacagacatagaggcacggaaattcggcacgagaaaacagagtgcgacgccgacgaagagagagacagagagcaaaacccaaaccctaacaatcatttgcagcccccggcgtctccagaacctccaaggaaccatccacaggagaaggcgcgagcgcgggtgtttggatcgggggaggcaacgctggcggctcgcggcggcagcaggtgatggcggatccgcctagcggtgggggatctagggcttgtgtctgcagggagagacaggtcgaggaggcagaggcgggtctggggctcgggagaagagaacaggggaggaaggagggaggatgctgagcgtggttcgggtacacctgccgtcggagatcccgatcgtgggctgcgagatcacgccgtacgtgctactgcggcggcccgacggtgcagtctccaccaacgatgtccccgaaaccgcgcccgctgatggccagttcatgcggtacagatggtatcgcatacagagcgaccggaaagtccctatctgcagtgtgcatccaatggaacaagcaactattcagtgcctcggttgtctcaagtcaaaaatacctgttgctaagagctaccactgttcagctaaatgtttctctgatgcatggcagcaccacaaagttttgcatgaacgagccagtagtgctcaaaatgaaaatggggctgaagaagaggagttatgtggcagtggtggttctggggttctaagtactgctggatctggttctttgtcaaattttggacagagccctagtattaacaatgaacctgtgcctttgtatccctcaggtactgatnnnnnttctggagaaacttggtatgaagttgggcgcttgcgaacgtatacaccaactgctgctgatattgggcatgcactaaaatttgagtgtgtagctgtggattcagnnnnnnggtctccaattggacctccgacctcagttatgacgtcacacgtaannnnnnnnnnnnnnnnnnnnnnncgtcgccttatccaagtgaatggggatgttttgggtcacttggatttagacagccaaacttcatccttggggacattcactgtattatcttacaatattcttgctgatacatatgctacaagtgatgcatatagctactgcccaacatgggcacttacctggacttatagaagacaaaatttgttgcgtgaaattattggttatcatgctgatatcatctgtcttcaggaggtacaagtaaaccactttgaagannnnnnnncacctgagcttgacagacatggatatcaggcgcnnnnnnnnnnnnnnnnnnnnnnnnngtattctggaaatcctatggccatagatggctgtgctacnnnnnnccgcagagacaagttttcgcatgttnnnnnntacgaggttgagttcaataaggctgcacagtccttaacagatgcgattattccttctgctcagaaaagactggctttaaatcgtttgattaaagacaacattgcactaattgcggttttagaagccaaatttgctaatcatggagctgaaaatcctggtaaaagacagctactttgtgtggcaaatacacatataaatgttcatcaagacctaaaagatgtgaagctatgggaggttcataccctcttaaaaggattggagaagatagctgtcagcgcagacattcctatgttggtctgtggagatttcaactcgnnnnntgggagttctccacatgcgcttcttgcaatgggcaaagttgatcagcatcatccagatctggcaatagannnnnttggaattttacgccctccaagcaagttgaatcatcagcttcctctggtcagtgcatactctgcatttgcaagaatggtaggtgttggctatgatttggagcatcagcggagaaggacagaccctgcaacaaatgaaccactcttcacaaattgcacaagagattttactggaactgttgattacattttacacagcggactccttgacagtggattcattattggaacttttggatgaggaaagtttaagaaaagacacagctcttccatctcctggatggtcatcagatcacatagcactgttagccgagttccggtgcaagcctagaatcagaagttgacacattaggtcttgtagaaaaaggttattgtcatcatccttggtggtggaacagcgttccatgtgggtatgacgggacgcgggctctcggggaagcaagcagcctaggtagcagcctcagcaaggggaaggggcatgtaacatttgattttacccttttacattttagctcatgatactcaagctgcccatgtgtaccattacttcctatagaagaaaatacttgagagaaattttgaaggctagtttggaaactctattttttccaaggtatttctatttttcaaggggaaatgaaatattttttcgtggaaaaatagaaatctctagaaaaaatgaggttcctaaactagcccttaaagggctataagcccctttttttctttccccctggtcgcgttggatttaacctctttgctgtatccatatgctcgctgcctacaagatgtaggagccttcagtttctctaccaatgtaattccagttccagttttngttctnaaaaaaaaaaaaaaaaaaaaaaaaaaaaaaaaaaaaaaataaaaaaaaaaaaaaaaaaggccccta

SEQ ID NO: 83294 - DNA, 182 bp, Zea mays
  Clone ID: MRT4577_175979C.1
ctacgcaatccgagcgagcaggagcgctactcttacttctacgaccctgaagataggccaacgtcaccatgccgtactgtatgtgctacatttaggacacagtatacaaccctactttacacgagacctggcccaacaagagagcacatgggatgactaccgcttgatatacattggtacac

SEQ ID NO: 83295 - DNA, 356 bp, Zea mays
  Clone ID: MRT4577_17597C.1
ggtctgtccaattatgtttactggctaccattgccggcttatttcagattgtggggctaagaagatttcttgtttatttcatatacctagctgtgctgatatataacttttggggtggcttgatcactttttaataatgttttgtgatcttgtgacttctctaaaacttttctttctagttgggtattgcactcacgttctaacttgtgctaccggctatactaggaagtggttttctcttagctatgttattgcactcacattctaactttttgtactttcatattattggaatatccactgaatttgcctttcttgctaacacctcatatttcgcaacacacttaattctatgt

SEQ ID NO: 83296 - DNA, 2680 bp, Zea mays
  Clone ID: MRT4577_175980C.1
ctcgagcccgcgaagggagagagagagagcaaaacccaaaccctaacaatcatttgcagcccccggcgtctccagaacctccaaggaaccatccacaggcgaggcctcgctccgtgcccggatctcccatttccgcccggccggcgcggcgggatcctgatactggtgctgtctgctggggtttcgtgtaggagaaggcgcgagcgcgggtgtttggatcgggggaggcaacgctggcggctcgcggcggcagcaggtgatggcggatccgcctagcggtgggggatctagggcttgtgtctgcagggagagacaggtcgaggaggcagaggcgggtctggggctcgggagaagagaacaggggaggaaggagggaggatgctgagcgtggttcgggtacacctgccgtcggagatcccgatcgtgggctgcgagatcacgccgtacgtgctactgcggcggcccgacggtgcagtctccaccaacgatgtccccgaaaccgcgcccgctgatggccagttcatgcggtacagatggtatcgcatacagagcgaccggaaagtccctatctgcagtgtgcatccaatggaacaagcaactattcagtgcctcggttgtctcaagtcaaaaatacctgttgctaagagctaccactgttcagccaaatgcttctctgatgcatggcagcaccacaaagttttgcatgaacgagctagtagtgctctaaatgaaaatggggctgaagaagaggagttatttggcagatttggcagtggtggttctggggttctaagtactgctggatctggttctttgtcaaattttggacaaagccctggtgttaataatggacctgtgcctttctatccctcaggcactgataaaaattctggagaaacttggtttgaagttggacgctcacgaacatatacaccaactgctgatgatattggacatgcactaaagtttgagtgcgtagctgtggattcagaaaaaaagtctccaattggaccctcaacctcaatcatgacatcacgtgtaattcccgcgccaactcctacccctcgccgccttatccaagtgaatggggatgttttaggtcacttggatttagacagccaaatttcgtccttagggacattcactgtgttatcctacaatattcttgctgatgcatatgctacaactgatgcatatagctactgcccaacatgggcacttacctggaattatagaagacaaaatttgctgcgtgaaattattggttatcatgctgatatcatctgtctacaggaggtacaagtaaaccatttcgaagattttttttcacctgagcttgacaaacatggatatcaggcgctttacaagaaaaggacaacagaggtgtattctggaaatcctatggccatagatggatgtgctactttttttcgtagagacaagttttcacatgttaaaaaatacgaggttgagttcaataaggctgcacagtctttaacagatgctattattcctgctgcccagaaaagagtggctttaagtcgattgattaaagacaacattgcactaattgcggttttagaagccaaatttggtaatcatggagctgaaaatcctggtaaaagacagctcctttgtgtggcaaatacacatataaatgtccatcaagacctaaaagatgtgaagctatgggaggttcataccctcctaaaaggattggagaagatagctgtcagtgcagacattcctatgttggtctgtggagatttcaactcaacccctgggagttctccacatgcgcttctggcaatgggcaaagttgatcagcatcatccagatctggcaatagacccccttggaattttacgccctccaagcaagttgaatcaccagcttcctttggtcagtgcatactctgcatttgcaagaatggtaggtgttggctatgatttggagcatcagcggaggacagaccctgcaacaaatgaaccactcttcacaaattgcacaagagattttactggaactattgattacatattttacacagcggactcattgacagtggattcattattggaacttttggatgaagaaagcttaagaaaagacacagctctcccatcccctgaatggtcatcagatcacatagcactcttagctgagttccggtgcaagccaagaatcagacgttgacacattagctctccaggtcttgtagaaaaggtcattgtcatcatccttggtggtggaacaccgttccatgtgggaacttgaggcagggcggggacgcgggctctcggggaagcaaacaaccaagcagcctcaggaaggggaagaggcttgtaacatttgatttttaccctcctacatttgagctcatgatacttaagatgcccctgtgtaccattactttctatagaagaaaaatacttgagagaaatatttgaagggttataaggcccgtttttcttttttgttcactgcggtcgcgttcgattccttttggctgtgtccatgctcgctgcctacaatacgcaggagtcctcgacttctgtaaattctgtaccaatgtaataccagttccagtttttgttttccacaaaaaaaataaaaaaaaataaaaaaaaaaaaaaaaaaaaaaaaaaaaaaaaaaaaaaaaaaaaagggcgccggtacc

SEQ ID NO: 83297 - DNA, 355 bp, Zea mays
  Clone ID: MRT4577_175981C.1
ccccgtcatcgatctcgtttcaaattcatccatcctagcgtactcagccccgcaccatctcaaccggatggccaagatcaagatcggtatcaatgctctcggcaggatcggaaggctggtggtcacagtggccctgcagagtgaccatctccagctcgtggtcattaaccaccccttgatcatcacccactacatgacctacatgttcaagtacgacactgtgcacggacagtgcaagcaccatgaagtcaaggtgaaggactccaaaacccttttctttggtgagaaggaggttgctgggtttggctgcaggaaccttgatgagatcccgtggggttcggttggtgctgaatat

SEQ ID NO: 83298 - DNA, 194 bp, Zea mays
  unsure (1)..(194): unsure at all n locations
  Clone ID: MRT4577_175982C.1
cccccctcngagccctttttttttttttttttttttttttttttttactttaggttggagtacagttccaaatgttcaaaaataccatggttatctgcaaaaccatnggtattcaaaacangattttttacaatttgaaccaaaacaccttttaagcaaaacacctgagaaatactatagtatttcttcaatat

SEQ ID NO: 83299 - DNA, 2398 bp, Zea mays
  Clone ID: MRT4577_175983C.1
gtcttttgttcgttcctcgcgctcggcaccaggcaccaccacacacattccaatctcgcgagggcaagcagcaggggtctgcggcattgggcctcgaggccggccgggcctttcctcctccgcacctccccacccctctcgccttcgcttcgtcgccacggcgagccccacgccgccgatcggggcgccgccagcggcggcggcgcccgatccgatggaagcggaggtggggccgccgaatccgccgcggccggagccagccggatcggagcccgacgacgcgcgcctctccccgcctcctcctgctcctgctccgccgcctccgcccccgcctcctcccgccgccgaggctgccgccgcgcccaccgcctccgcggccttctcgctgcaggctccagctccggcgccggcggaggcgaacggcagctccgactttgctgggtgggggaagaggaggaggaaggcggaggacggggacgggtgcaaggcctgcagctgcaagaagtccaggtgcctcaagctttactgcgtgtgctttgcttctgggttacattgtactgaatcatgtggatgtgaacctgtcataacaagccacaattgcaaggtactctgcggatggcaacagttttacctctgaaacctgtccaaacattcgaagctggccaagatatagtggaacaagtcataaggtctcctatggatcttattagaagaaaatgcacatgcaagaagtcaggctgccttaagaagtactgcgactgctaccagggaggggcaggatgctccatcaactgtaaatgcgatgattgtagaaacccatttgggagaaaagtcggcgttattttggacggtaaaagcagtcttactgcacctatactgcacgaaagaaacgggactgaagttgactcaagcgacgaggaagacgacttctacatgaatcgacagctctccccaatacctccgtctccggtgtctagggagtcttcgttccaacaggagactctagtcggcgtcgaggtccagaccatgaacgggcacctgtaccccaaaccactgacccaggtgcgccccgagccgtcgtcctggcagctctcccggaggcccatcgaggaaccgcgcggggagatatggcgcttctcgaggaggccgagcgaggacgggacctctgatgccatggaagcgcacgccgtcgccccgagagagagcaagaaggcggcagaggtccgcggggacaggttcggcatcccgcggtgcatcgaggtgatgagcgccatggtggagctgtcgccggtggagaagtcgctggcgcccgacgtcttcttggacgcgagcaaccgggagatcttcctctcgctgagtgtagatattaggccaatctggctgaggcgcaagatgaagagccttgtctagctagacgctacaacagagatagcctgagaaattttcgtcgtcggcgtatacctaataaacccgtgctgtactgtagatatataatatatgtgccttagattcagagttgagttctggaccgatgggtgtaatataccttagtgctaatttatggtgcatgctgttatattggagttcaaaaaaaaaaaaaaaaaaaaaaaaaaaaaaaaaaaaaaaaaaaaaaaaaaaaaaaaaaaaaaaaaaaaaaaaaaaaaaaaaaaaaaaaaaaaaaaagaaaaaaaaaaaaaaaaaataacctccccgggcggccttttaaaaggggaacttttgaaaaagagcatgaaactgggggccctttgagggggcatttaaaggggccgcatcccgcggtgcggcgaggcgatgaacgccatgggcgagctgtttaaaaaggagaagtcaatgcaattgaggagttggaaaatgggttctactgaataatttcaaagtgggagttctgtctcagatttctggtttggctctgtttggtacctaagtattgcacaagtttcttccttaactgacaactatataggttatttgcatgacctttgattttcattgcttgacactgttctgaacaattttatgtcctaccattcttaggaataactacatagtgttgtcggaaacaaaaaaggggatgtgataaaattgttggtagcctcctgatgaatagtttgttttgtatggtattttctggattccttgaagttaccctgatacgttatgttgtctccctgaatattttcattccgataaaaagtaacatgtatgttttttcccattatattcgtttaacggatgatggcttgcttggtatttgctcgctaatgggataagctactatttgaagctgcaacttcaacccgttcctgaaactaagatattcctcgttcttattctgcagtcggcgttattttggatggtaaaagcagcggtcttcccg

SEQ ID NO: 83300 - DNA, 404 bp, Zea mays
  Clone ID: MRT4577_175984C.1
accggatcggattcccggccagacctacccgtacgcgccgcatccgaaccatgtcttgtgcttgcgagaacgccagtgtgaccgacccgacgaagggaacagcgcaggtcacgcacagccagatgatccatggtgctactgctaactacactgatgctgcagacctgaagtggcgctcttgccggacaactgacgacctgcatatgcagaactgttttcgttatcgtgctgtttcatggagcctgcgctggtctgaatcctcctgcagcactggcaccatctcatactctgaccggtcttcctcctccagttatacgtccaccacaaggctcctccactgcttaggttcttggacgacaaagacggccacatctaactcgtgcacacgctgtgacagcttgacc

SEQ ID NO: 83301 - DNA, 470 bp, Zea mays
  Clone ID: MRT4577_175985C.1
ggaacacacaagtatggggcatgtgcatatcgcatgacacactaatttaacatgacaaacgcatgagtgcaaaggggcaactacagacagataaacattactcagaccatttagctaaaaaggcaaaacggttcacggctctcggatggactacaaaaatggcaggtactcctttctcaagcttgcagcacaaatgcttgggactgatactgaggagccgtatatgtgcttgtaacagcgaccgaactagcagagttcatttgtgacgctccaccggccttaaccattctacagtccttgcatagcaagataccaactgctatcttgtacatggcaaacttggcacagaactcacaaaaaaatttgaagagctgggagaccgccagcttctggatcggggtacgcaaactggcaccatacctggtaccatatttgccaaccattcctggctggttggtgcagaaccacca

SEQ ID NO: 83302 - DNA, 203 bp, Zea mays
  Clone ID: MRT4577_175986C.1
gagctatgatcgtcgcatgcccccgtacgtcagctgggtaattcggctggagcaggaacaccctccctttttgaggctgcggctgaagatacgaggggggggattttacagaggatatctgggttgctgccaagacgggaaacttctgagattggagcggcgtagatatgatccttaaggttgccgccataggggaggaccac

SEQ ID NO: 83303 - DNA, 159 bp, Zea mays
  Clone ID: MRT4577_175987C.1
ttctttttctttttttctttatagccagatcacgttgctcttgagaaactgatttttccaaagatatataagaaaaatgcattgtgcatgtattacaaactcatcgacttgcaaagtgtagcctcgtacatactggagaagtgagatacatatacgtgt

SEQ ID NO: 83304 - DNA, 186 bp, Zea mays
  Clone ID: MRT4577_175988C.1
tattgatatactcttttcaatataggaaccatagtccgtataagcattatcctattgatggtgtcgaggatcatcttgtcgagaggaaaataatttctaacagggtgaggacaagaacctagggatgatcaataggataatgcttatacggactatggctcctgtattgatatgcgtttttcaata

SEQ ID NO: 83305 - DNA, 569 bp, Zea mays
  Clone ID: MRT4577_175989C.1
aattcggcacgagggccactgttgccacgccacgcaggcggcagcgagcgcaataatgcgcacgcagaggagcacagcggcgtcactgctgcggcagtaatggccgcctggttctcccacggcgtctactagcgatacaccgagaccacttttctcttgcttccttcgaccccgccccctccggcctccggatcgcgcaccgcgcctgccctccacccaaaaccgctccggagcctttgcgaagcggcgccgcttactggccggcaaggcgaccccgtctctcggcggcctgcgttgatctggttgctgctgttgaggtgggcagagcggcggccgcgatgggcatctcggcgaggtggctcaagtcattagttgggctgaggaaggtggagcagcagccgcgtaaggagagtgcagatgttggacgaatgaaaagtgatgtcgccgatcagtttcattttcagaatcagcgctctcaagatgacagcagcattgctgcacaagaagaaattccagaggttccttatggaaatgatccacctgaagatgattctaatgcaccttgatgc

SEQ ID NO: 83306 - DNA, 775 bp, Zea mays
  Clone ID: MRT4577_17598C.1
ggacccccgggtcggccggttatgttctaagctgtagtcagttttaatttggtagtctggacatttttgtgactgagtattgttgtaccacaacctacactattaaagccacatatttctgagctgtattcattgtccagtattatttttatctatctggtagatgataacttttaaggacataaaggaaattaattataatggcaatatggcatggatttactcctcatgatgatcaacataccttgatatatttgtagtaaaagaggatatgccatatcttcagttatactatataaactatgcttgacattcttggttaatcaggtagatagggtcatgtttcaatacctccctactaggataggaccctcctgaaccctgttcatgattttagacattcaatgcctatttttgtaattttaaagggtagttaggaacaattttatataagctgcaaatctgtccacgttctatttgtttgcagttatgactcatgatacaagggcctggtatacttagacattttttcacttagtttgacaaattataacagtattgaccgttagcactgaaacagggaactttataagaataacattcaaggaacagtcccttctgagcttggcaacttgaagaatctaataagcttcgacttgtacaagaaccaacatttcggggacaatacctcctgcccttggaagggttgaagtcccttgtattcttgcgtctcaatggcaatcatttgactgggcccatcccaagggaactcgct

SEQ ID NO: 83307 - DNA, 319 bp, Zea mays
  Clone ID: MRT4577_175990C.1
gggaggatatacaaaagtatgtgtttttcaaacacgcaggacaactgagtctcttcgtattcagactatgaaaagggctagagaactgcgagccccaaaacacattgctaagacttgggaaacagactcgcggagcgacgcactcactaatctcgaccacagcaaagaaacatgacctggatcaagctagaggattactcgacaacaagtcaacatcctaattgccttctcaccagggagcccgcaaagtctcatgtcctctgcggctaatgacagcacatgctgcacattcagtctgatccccatcccatcgaagaca

SEQ ID NO: 83308 - DNA, 323 bp, Zea mays
  Clone ID: MRT4577_175991C.1
atcgaagatgccgttgacggcgccatcagctggctggacagttaccagctggctgaggtggaggagttctatgacaagatgaaggagcttgaggggatctgcaaccccatcatcgctaatatgtaccagggcgagggcgcggtcatggagcgctgatattgatatatgatttgttgctccagatggtagtagcagttctggttccaatatcgaggaggaggattaagtaggttagtgttcgaggtttggtttagggaggtgtgaagagcctaaactctgatggttgtttgtgaggtgtggtcgcaatagctgcggcctgtggt

SEQ ID NO: 83309 - DNA, 746 bp, Zea mays
  Clone ID: MRT4577_175992C.1
ggccgggtccgactgttgcacgcctcaaccaccacgcaggcggcagcgagcgcaataatgcgcacgctgaggagcacagcggcgtcactgctgcggcagtaatggccgcctggttctaccacggcgtctactagcgatacaccgagaccacttttctcttgcttccttcgaccccgccccctccggcctccggatcgcgcaccgcgcctgccctccacccaaaaccgctccggagtctttgccaagcggcgccgcttactggccggcaaggcgaccccgtctctcggcggcctgcgttgatctggtgatgcgctttttcacggggttttttcactccctttcccccctccgtcctttgagattgtgctgcagttctgtgccgatgctgagggaaaccgggaaaaaaagcttttcaggttgctgctgttgaggtgggcagaggcgcagagcggcggccgcgatgggcatctcagcgaggtggctcaagtcattagttgggctgaggaaggtggagcagcagccgcgtaaggagagtgcagatgttggacgaatgaatcagcgctctcaagatgacagcagcattggtgcacaagaagaaattccagaggttccttatggaaatgatccacctgaagatgattctaatgcaccttcatgcttggaacccacttatagttcagctgatgtgccacagttttcaactgaagaggaactgaaagaatatgggctgctacaattattcagac

SEQ ID NO: 83310 - DNA, 251 bp, Zea mays
  Clone ID: MRT4577_175993C.1
actccctatagaacgtcgtattatggaggcgatgtctaggccggagatggtcgacaaggaggtggggatgcagtcattcctgtgcagccgggtgaatgacagcgatcggtccgcggtcatggtcgctgcagcggcggcgccgtcaggtgggtcggagcagcgacgttatgtacgcgccactcaccaggctgatgcgcgagcgccaggtgcagcagggtcaaggcgctctgtctgtgcgttcgagactgtca

SEQ ID NO: 83311 - DNA, 447 bp, Zea mays
  Clone ID: MRT4577_175994C.1
cccacccgtccggctggcgttctccctcgcggcggcggacgaagccagcgtgttcaacgttctgcgcatgctgcgggactagagggagctcgccatggcgctcaccggatggaccaatcactcctatatatctcgcaagcacaagctgaccgacgtccacatgcttagagtcatcctcgccatcttggagatgaggcgaaaatcaaatcggctgctactcagtcggtcgatcggcgattatcacagtcgtgcatggatgcatgcatgcacgctcaatgtcaattacgatcatgattccatacataattcatgacagagggtccgtgcaatttgtctcagaaatgatcgaccactgtactgtactgtaaaatctcataaaccattacacgcacggagtgcgctgcatcttattaattgagaataatggtgcacacatcgagaactctc

SEQ ID NO: 83312 - DNA, 694 bp, Zea mays
  Clone ID: MRT4577_175995C.1
gctcatcagttgttaaaaggctatcatccaacaataattctcagcatgcacaatcatgtacaatgcccgttttcacctttggtaggctaatgggaggacgatgttcatcatgctgaatcataggctttactttactctacaaactaccttctccaggtacaaaatatttagtatattatggtcctactacgtctgaggctgcactgctcttcttctagactgcaggatgcagattcctgctcagacaatcagtgctgcattgcatcccgacggctagggcgccgagctctcctccgacgaggaggaggaggaggtggaccgggaccgcaccgcgccaaacaccggaggagcgtgcgtgttccccacccgccgcgaccacccaccggccgccgcccgctcgttcaccttcacaacgtccctgcagacgtgatcgagggccgtgaggaagtcgcgcaccaccatgaagatcctcagcgggtggccttcctctctggccgagtcaccgtggaagaactcggtcgtctccctgacgcgggcgagggcgcgggccctcctgggcctgcaccccggcgaccttagccttggccttcttgaggaactcaccgatgggggccgcggaacctcttggccttgcaggccgtcttctgttggctgcgctcaagtggcgggacctcgcctgttcctccgggcttcc

SEQ ID NO: 83313 - DNA, 481 bp, Zea mays
  Clone ID: MRT4577_175996C.1
gccggccggtccggaaaaaaccctcaataaaaataaaaatgactacagttaacaagccaaaatccgaaatgacagaagaagaacttcgtcaacaagaagaactcgaatttaacactggtcctctttctgttttgcaacaatctgttaaaaacaacaatcagattttgattagttgtcgtaataaccataaacttttagctcgtgtaaaggcatttgatcgtcactgtaatatggtgcttgagaatgtcaaggagatgtggaccgaaacacctcgtactggaaagggctctaaagctaagcctgttaacaaagaccgttttgttagtaaaatgtttcttcgtggtgatacagtcgtattagttcttagaaatgctgtataaaagaaagaagggatttacaataaagaaaaaaaaaaaaaaaggattctatttctttttattgaacatgccatttagaaaaaaaaaaaaaaaaaaggccccta

SEQ ID NO: 83314 - DNA, 218 bp, Zea mays
  Clone ID: MRT4577_175997C.1
ccacgcgtccgaccaggcgcacacaacttcccccgagccatcgttatccactcccccatgatcccatcaccgaagtttataaacaaccggggccaccacaaacaaactgaactggacaccaacatcctatcggttaaccccaactgcactctcaacacccgcaattacactgaagtcaacccctacctgaccaacataatctacgccagttaacctca

SEQ ID NO: 83315 - DNA, 352 bp, Zea mays
  Clone ID: MRT4577_175998C.1
atttttaccgcttgcttctattcggaggggcagagtcatcaggcgtgtcgctgccagggacgggagtaagagagaaggggttcttccatttatttttttcctctcggttgatctgccgcgccggccggtcgaggaagggaggaagaagtatgtttggggactgccaggtcctatcctcgatggccgcggtggccggggcctcctcgtcggcggacacgctctttatccccaacccaggcgccctcgccgggttcatgttctcctccttcggcgtcgtcgccatgccatttcaccatttcttcaccaccgtcgtctcccttgtaccaaaggaggagggcggcatcatgggtgc

SEQ ID NO: 83316 - DNA, 2097 bp, Zea mays
  unsure (1)..(2097): unsure at all n locations
  Clone ID: MRT4577_175999C.1
nanacggggcgggggggttttttttttttttttagaaatcattcgaggtcaccatttcaaggaaccaaacgggccctaagcgaaattttcactatattggagtaaaataaaagatgagcattctaagtaattagcagggagttacataaactccgtccagttggccgttatatatacatacatacagggatagtacaagcatggcgatacacgcccacttggttaattagaaatcacaacaatcgcggatacagttattagaatcccgctctctattcgccccggtcaagcctgcagccagtgactgcaagcaggaggcaccattaccaagagcttctcttcgggtcactggcgcgcgccctcatggaccttcgatctggatgctgctgaatgaatgggcgagaccgccgcttcccctcaaattctggagctctgctttgatcgtctccgcaatcttggcctcctcaaggccaggcgagggcacatccacgtggaccgagccttgttttctgggaccaacggagtcctgattcagagattgctgctgcttcatgtagttgtacagctgctggtggaaagggtggtcgtaggagtagcaatctactccatccagcgagtcgctggatgaacctgacccttctctcttgcagaagtgcggaagtgactcgtagtccatgaccttcagtaactcatccctcccagagccatacaggacttggatcttctttttagttctttcttgtaagagtggcttcacaaccttccaacacgctgaaaaaacatatggagcatttacaatgtaataagtttccgttttctcaggataattaaggtcatcaacagtagtaatcatcgtcaacatctttatttggctcagtgcagacagcttgaggccagtcatatccataaccttcaagcaggtattaatctgtctcccaaacttctttgatgcagccggcaggacaacacgatctcgatattcattcatctgtatgtgtgattgcacatagtagttcaccgaggccttgtcaaaagtactaagacccacaccaaatgcataaacaggttgtccctgcttggagtaccctgtcaatccaacaagtaacgtgtcccgaataactctatatatatcagatggcagaatgggtttagctaacacgatgtcaatctcattctgtactctccagtttaagcaatccattagcattttataagctttaggcacactccattctctagccttcagaaaacgcatcaaagtccctctcagatttccttgatgcacattctggaatgtgctctttagcggctcctctagctgctccatgagcgccgagaactgcttgattgcctcctcggaggtggccgccattgccctcaacagggtacttggggtcaaaagccgggtctttcctgccttttccagctctccgttcctctcctcctttctccctatgtttctcgccctcttgttctgttcttgtgcgcttcgtcgccagtcgccacaccaccaaaccgtgtggtacagtgatgtttgtggggctcagctccggtggttcgccggcgatcctaaggttcgggccttcgggacctacagagtggtgaggggtcccgtctcccgtctcttaaaaaggatcaggcgagcttagttttttttttctctttttcctctcatgctgtctgctacatattagctcacgcaggagcctatagctagccggcggggggcggccggcgggcgcggtctagtcgctgcccgggggcttgtaggcgatgaagctgacgccctgcgtctgcttgatgttgtcgaagccgatgacgcggtggaaggcgtccgggtaggatttgatggcctcctgcagctccttgtacacctgccccccgtcgttgcagccgaacatgggcagcttccacatggtccagtagcggccgtcgtagtagcacggggaggtggagttctcgcggtacacgaagccgaccttgctgaactcgaggcagggtatccacccgttgcgcagcaggtagtccacctgcttcacccggtcgtccgtcgacagcgaaggcaggtacgcacagcgtgtcgagcttgctgttgcc

SEQ ID NO: 83317 - DNA, 770 bp, Zea mays
  unsure (1)..(770): unsure at all n locations
  Clone ID: MRT4577_17599C.1
cccacgcgaaggggaagagtcagcaatggaggcgaggattgcaggagtgcccgaagatgaagagtccggcctcctcccccgcccgtccgcagccggccgacggccgtcctcccgcggcccccgcttcccgcctccaccggcagcctgggcgacggtggacggccccctcgggcttccgctggaggacgcggagggccacgcccgccgcttcttcatgtggggtttcgcgtgcctccccttcctctgggccatcaactgctgctacttctggcccgtcctccgctcgtcggtcgcctcctcgcccgccgccttcgcccccatccgcccctatgttgtgcggtcggcaattggcttcaccatcttctccgttgttctggtcacctgggccacgaccttcgtcgtcggaggcgagcggttatttgggccagtgtggaatgatcttgtgatgtacaatgtcgccgacaagcttggcatctctggattcatgggatgagcctgcgatgtctccctcacttcagctgggctcgcttcacccaagcgtggaacgatctattccatgcatctccctagggattaccactgtctcatgtactttattgttgttattattattgacagactgactggtcagaacaatgtctagcatggctagctcatgttatagaaggaatatggatcgatgaaaacgatgataaatggaactcaatctgatggacaaatttgtgtgtgtgtgtgttgttaaaaaaaaaaaaaaaaaagcccctaaggnc

SEQ ID NO: 83318 - DNA, 512 bp, Zea mays
  Clone ID: MRT4577_1759C.1
gtccggattcccgggctgatcactgcgtgcgcagtgctcgatcacctttaccctggcttttctgtcgtcggtttactatccttgagccctgagcatagaaaatcggtgcagccatgtggtactacggcgaccggcgcgcgtagtcgtcgttcgttgctgcgccgacgctgtcgccagtggcggacccggcgatcctgaggctgttgatggtgggggtgttcctgagcgcctcatggatctctacttatgacgactgcatagaggaatcgtcgcataaactgagttgagcgctgatggtcttgcggataacgcttgacctcctaatgctctgtatctcctcctgcgactccttaagagggctacctgggcttctaccctagtgagagcccctggaagggccactaacagctgagccccgcctaatgcagttagctctgagaggtggtcttgcaactgatcatagttctcgtgctctgcaactaccactccaccatgcacgatattacagggcc

SEQ ID NO: 83319 - DNA, 349 bp, Zea mays
  unsure (1)..(349): unsure at all n locations
  Clone ID: MRT4577_175C.1
tcttctctgttcattcactaccttcccaacaanttgagaaggtttttttttcacaaaggcggccacctttatctccttctttatcacaacatcacttacttttctattatttcccacaacttatccaccctcattctcaataattatttctatctatcttttcaaatatacattatttttactaacaaactttccattctcctcatccaataataccatttaaatcttacttaattttaattattctcttctttttttttacatattactataattgatattcttttataccatttctattctttatttaaacttttcatattaacataaattattctattattaaaaa

SEQ ID NO: 83320 - DNA, 1085 bp, Zea mays
  Clone ID: MRT4577_176000C.1
gccggccgggccgagcaggacgacccaagcaagcaagcaagcagcgagtacatacatacatactaggcagccaggcagccatggcgcccaccgtgatgatggcctcgtcggccaccgccgtcgctccgttccaggggctcaagtccaccgccagcctccccgtcgcccgccgctcctccagaagcctcggcaacgtcagcaacggcggaaggatccggtgcatgcaggtgtggccggcctacggcaacaagaagttcgagacgctgtcgtacctgccgccgctgtcgacggacgacctgctgaagcaggtggactacctgctgcgcaacggctggataccctgcctcgagttcagcaaggtcggcttcgtgtaccgcgagaactccacctccccgtgctactacgacggccgctactggaccatgtggaagctgcccatgttcggctgcaacgacgccacccaggtgtacaaggagctgcaggaggccatcaaatcctacccggacgccttccaccgcgtcatcggcttcgacaacatcaagcagacgcagtgcgtcagcttcatcgcctacaagcccccgggcagcgactagaccgcgcccgccggccgccccccgccggctagctagctagctagctcctgcgtgagctagtagctagctagtgccatgcgtcgtctctgtcgttcggttttgcttcgggtcaccgtaccctttgcttgcttggtttcttctttccttttttccttttttttttcttcttttccccggccatggttcctttgctttccagcagttctctgctggatgtgatgtatccattgttgcaagcatgcatggccttgcattggctacctctatacctgctgctacaaaactactgcaactatatatacttgggggtgaggaacatgtgaatgcaagctccggctatcatatacatgtaatatggatacaaactatataaatccgccgaggcgccgacaatactatacgacaccgtgttaataagttaatatataactggtgttttttatttaaaaaaaaaaaaaaaaaaagggcggccctcgcgatcggacgcgtggg

SEQ ID NO: 83321 - DNA, 740 bp, Zea mays
  Clone ID: MRT4577_176001C.1
gagcgagtcttacatactaggcagcccgccagccagccagccagccatggcgcccaccgtgatgatggcctcgtcggccaccgccgtcgctccgttccaggggctcaagtccaccgccagcctccccgtcgcccgccgctcctccagaagcctcggcaacgtcagcaacggcggaaggatccggtgcatgcaggtgtggccggcccgaggcaacaagaagttcgagacgctgtcgtacctgccgccactgtcgacggacgacctggtgaagcaggtggactacctgctgcgcaacggctggataccctgcctcgagttcagcaagcgcggccccggaagccgatcgaactgtaccgcagcgtgctaccccaccgagtggtactggcgctcgctctcgcgggggatgtgcacgagctgcgacaggaggacctagtcaacaaagctgaactgctgaacacgcacaaccccggacgccagttggtctcctgtcctcctccacggtgaccgcgctggctgcgagttcctctgcatcgtcgagtacgtcgacgagacctttcgaccatggcgcgtggccggggatcctcccggccgactcctacgaccgcgccaccgcccgcttctggggtgacttcatcgacaacaagaggttgaagccgatgtggctgtcgatgtggacggacgtggacgcgcaggcgcggctcctcagggagacgaagagacagcctgagggtgctggacgc

SEQ ID NO: 83322 - DNA, 354 bp, Zea mays
  unsure (1)..(354): unsure at all n locations
  Clone ID: MRT4577_176002C.1
tccannacaaaatttggggatccttttttttgcaaacaacccaatcgcttgttcattggctgtgctgtattacttatactgaaagtggaaaaaagggcgggcgcacattatttattctgtataactcctactgcaagggtaagcgtaaggactaatgccctgactttgaactaaaccgattggaatgcgtgcctcatactgtccattggacacgagtggaagctcctggccatccccttactgaacaatcttatcgggggatactgccctaaagggtcatttcacgaaaagctctccgcctgctcaaatttccccccaatgctctaaaaggaactcttgcaggtgacttcaatc

SEQ ID NO: 83323 - DNA, 267 bp, Zea mays
  Clone ID: MRT4577_176003C.1
aatgcaataccttcttcatgctgtctgatggccagtcgtgggctatgctgcaaaatctcagggacaatgggcagtctgttgcatttgattgccctgagatggataaagttgttgatgaggttaaaaacgttgaagagtggctcaatcagtgccactgtactctacttctagatggaaataatagttctttgctctccatacttgtaaagataagaggattattggatgatgtttgcacgttatatgctgaggattgtatgaagttaa

SEQ ID NO: 83324 - DNA, 1271 bp, Zea mays
  Clone ID: MRT4577_176004C.1
gcgtccggcaagcaagcaagcagggagttcatacatactaggcagccagttcagccatggcgcccaccgtgatgatggcctcgtcggccaccgccgtcgctccgttccaggggctcaagtccaccgccagcctccccatcgcccgccgctcctccagaagcctcggcaacgtcagcaacggcggaaggatccggtgcatgcaggtgtggccggcctacggcaacaagaagttcgagacgctgtcgtacctgccgccgctgtcgacggacgacctgctgaagcaggtggactacctgctgcgcaacggctggataccctgcctcgagttcagcaaggtcggcttcgtgtaccgcgagaactccaccttcccgtgctactacgacggccgctactggaccatgtggaagctgcccatgttcggctgcaacgacgccacccaggtgtacaaggagctgcaggaggccatcaaatcctacccggacgccttccaccgcgtcatcggcttcgacaacatcaagcagacgcagtgcgtcagcttcatcgcctacaagcccccgggcagcgactagaccgcgcccgccggccgccccccgccggctagctagctagctagctcctgcgtgagctagtagctagtgccatgcgccgtctctgtcgttcggttttgcttcgggtcaccgtaccctttgcttgcttggtttcttctttcctttttcctttttttttttcttttccccggccctggttcctttgctttccagttttctctgctggatgtgatgtatccattgttgcaagcatggccttgcattggctacctctatacctgctacaaagctactgcaacgcctatatatacttggggtgaggaacatgtgaatgcaagctccggctatcgtatacatgtaatatggatacaaactatataaatccgtcgagcgccgacaatactatacgacacctttgcaagttagttttaactgctggtttttatgtatccatcgttgcaagcatatatatacattaattacctcaaaacaaaaaaaaaaaaaactactgcaacgcctatatatacttggggtgaggaacatgtgaatgcaagctccggctatcatatacatgtaatatggatccacactatatatataaatccgccgaggcgccgacaatactatacgacaccgtgttaagttaatatataactggtgcttttatatattattactatgtctcatcatatatgctaatggatgtcccaattccttctttcc

SEQ ID NO: 83325 - DNA, 630 bp, Zea mays
  unsure (1)..(630): unsure at all n locations
  Clone ID: MRT4577_176005C.1
gntggagtcgacaatggnagtaagccggcggtgatggacgcggcgcgcggcggcggaggggtcgggcgggccaagtcggaccacctggcgccgtcgctgtcgctgagccggacggcgtcggcggagacggttctgggcacggcggcggacgcggccaagcccgccgggttcgggaggaagcggcgctccgcgtcggtcggcggcggcaacaacaacagccacatccgcaagtcccggagcgcgcagctgaagctggacgtggaggacctcgtcagcagcggcgccgcgctcagccgcgcctccagcgctagcctcggtttctccttcaccttcaccggcttcaccccgccgctccagcacatgtgctccgccgacccgccttcattcagcgacgacgagaacctggacatcgaagccggcacacggcgcaagaaactggtgaccgagccgaccctgccgatatacctcaagtttgcggaggtgaagtacagggtggcggggaagggatcgccgcgggagatactgggagggatatccgggtcggcgtcccccggcgaggtgctggcgctgatgggcccgtccggcagcggcaagacgacgctgctngagcatcctggcgggatggccgcc

SEQ ID NO: 83326 - DNA, 465 bp, Zea mays
  Clone ID: MRT4577_176006C.1
gggacaaccatgccatgggctttattcaggaaacaggctcagcaaaccatccattggggctttggcggcaaaactaccggacatgttttttttttactggatcacggatctggacaggagcaggccctttttaacaacgcacgcatgggttgccttcccggaatctacaaaagctggcggtttaacagcaagggtcgctgatgaaaaaattgggggactgggggctgactccacttcctggattttggagaaaatgcttggaacctcctggggcatgccattttgggacaagggacttataaaaaagctccaggtccccagggtgggccttgttttcgtaaaaagcattttgctgaacaaatttacaggggttttgagttggcccttctgtataaaagcagggattaccgaatcccaacacgttgcatttggggacatgccttgaagctgggtttgattcaaaaa

SEQ ID NO: 83327 - DNA, 1200 bp, Zea mays
  Clone ID: MRT4577_176007C.1
gcacgaggtcccacatccgcttcgtcacgccccaacgagaggcggacgcggatccagcgacatggacatggctctatatatgccgtcggtgggggagcccctacaggacgacccaagcaagcaagctcgatctactactactactagctggtacacatactagccagcctgccagccagcttgccatggcgcccaccgtgatgatggcctcgtcggcaaccgccgtcgccccgttccagggtctcaagtccgccgccagcctccccgtcgcccgccgcagcaccaggagcctcggcaacgtcagcaacggcggaaggatccggtgcatgccctcgtggccggcctacggcaacaagaagttcgagacgctgtcgtacctgccgccgctgtcgacggacgacctgctgaagcaggtggactacctgctgcgcaacggctggataccctgcctcgagttcagcaaggtcggcttcgtgtaccgcgagaactccacctccccgtgctactacgacggccgctactggaccatgtggaagctgcccatgttcggctgcaacgacgccacccaggtgtacaaggagctgcaggaggccatcaaatcctacccggacgccttccaccgcgtcatcggcttcgacaacatcaagcagacgcagtgcgtcagcttcatcgcctacaagcccccgggcagcgactagaccgcgcccgccggccgccccccgccggctagctagctagctagctcctgcgtgagctagtagctagtgccatgcgtcgtctctgtcgttcggttttgcttcgggtcaccgtaccctttgcttgcttggtttcttctttccttttttccttttttttttcttcttttccccggccatggttcctttgctttccagcagttctctgctggatgtgatgtatccattgttgcaagcatggccttgcattggctacctctatacctgctacaaaactactgcaacgcctatatatacttggggtgaggaacatgtgaatgcaagctccggctatcatatacatgtaatatggatacaaactatatatataaatccgccgaggcgccgacaatactatacgaaaaaaaaaaaaaaagttaatatatgactggggctttttaatttattatcctgctcatcctttttttttgcctaattaatgggatgtgtggtcctccttcactct

SEQ ID NO: 83328 - DNA, 820 bp, Zea mays
  Clone ID: MRT4577_176008C.1
cgctgggaacctcgcacgggggacgggggaaggaaacatgcatgcaggtgtggccggcctacggcaacttcaattcgagacgctgtcgtacctgccgccgctgtcgacggacgacctgctgaagcaggtggactacctgctgcgcaacggctggataccctgcctcgagttcagcaaggtcggcttcgtgtaccgcgagaactccacctccccgtgctactacgacggccgctactggaccatgtggaagctgcccatgttcggctgcaacgacgccacccaggtgtacaaggagctgcaggaggccatcaaatcctacccggacgccttccaccgcgtcatcggcttcgacaacatcaagcagacgcagtgcgtcagcttcatcgcctacaagcccccgggcagcgactagaccgcgcccgccggccgccccccgccgagctagtagctagctcctgcgtgagctagtagctagctagtgccatgcgccgtctctgtcgttcggttttgcttcgggtcaccgtaccctttgcttgcttggtttcttctttcctttttccttttttttttcttttccccggccatggttcctttgctttccagttttctctgctggatgtgatgtatccattgttgcaagcatggccttgcattggctacctctatacctgctgctacaaaactactgcaactatatatacttgggggtgaggaacatgtgaatgcaagctccggctatcatatacatgtaatatggatacaaactatataaatccgccgaggcgccgacaatacgaaaaaaaaaaaaaaaaagcggccc

SEQ ID NO: 83329 - DNA, 341 bp, Zea mays
  Clone ID: MRT4577_176009C.1
ctgggggcacccaaagttgtcctccatatttgggttcgccccagggaaaaacaggcaaaagtaggtttttgtgtatcccaaatttttggggacaccccttaccacagggacttttaataaaggtttcttttcctttacgccccggggccggggctttttttggcttttttaggacaaatttaatttttaacacagaattcccgcgagaattttttaaaattaaaccctttttaaaccccggttttttttggccccttatttttttggtttgggccctataaacagggtttttttttagccctttatgggaaaatttgggaatttagggggttttttttttt

SEQ ID NO: 83330 - DNA, 161 bp, Zea mays
  unsure (1)..(161): unsure at all n locations
  Clone ID: MRT4577_17600C.1
tttcgcgcattccgcagccttttcgnagctctgactccaccccctcgnatctttcgaagcgcagcagcagcagtcaggggcggccatggnnacgcgnagcgcatgccggnnagtccggcgggnaaaggggcgaagtaagggcntgtcggccgggcccgcaa

SEQ ID NO: 83331 - DNA, 1945 bp, Zea mays
  Clone ID: MRT4577_176010C.1
ccggagccttccatcccgtcgcacactctccccctcgatatgtgcccgtctgtgtgggggagcctactaccaggacggcatgcatgcccggtcaggacgacccaagcaagcaagcaagcagcgagtacatacatactaggcagccaggcagccatggcgcccaccgtgatgatggcctcgtcggccaccgccgtcgctccgttccaggggctcaagtccaccgccagcctccccgtcgcccgccgctcctccagaagcctcggcaacgtcagcaacggcggaaggatccggtgcatgcaggtgtggccggcctacggcaacaagaagttcgagacgctgtcgtacctgccgccgctgtcgacggacgacctgctgaagcaggtggactacctgctgcgcaacggctggataccctgcctcgagttcagcaaggtcggcttcgtgtaccgcgagaactccacctccccgtgctactacgacggccgctactggaccatgtggaagctgcccatgttcggctgcaacgacgccacccaggtgtacaaggagctgcaggaggccatcaaatcctacccggacgccttccaccgcgtcatcggcttcgacaacatcaagcagacgcagtgcgtcagcttcatcgcctacaagcccccgggcagcgactagaccgcgcccgccggccgccccccgccggctagctagctagctagctcctgcgtgagctagtagctagtgccatgcgtcgtctctgtcgttcggttttgcttcgggtcaccgtgtaccctttgcttgcttggtttcttctttccttttttcctttttttttcttcttttccccggccatggttcctttgctttccagcagttctctgctggatgtgatgtatccattgttgcaatcatggccttgcattggctacctctatacctgctacaaaactactgcacgcctatatatacttggggtgaggaacatgtaatgcagctcggtatcaatcatgttatgaaaaaagaaacaaaagcctacggcgatcgatcgagaagctggtcatcgtcaggatgtcatcgccgcagtcagcagcgccgcccgtgaagctgatcacggcgttcggcagcccgttcgcccaccgcgtggaggtggcgctcgctctcaagggggtgccgtacgagctggtcgtggaggacctagccaacaagagcgagctgctgctcacgcacaacccagtccaccagtcggtccctgtcctcctccacggtgaccgcgctgtctgcgagtccctcgtcatcgtcgagtacgtcgacgagaccttccaccatggcgcggcgccggggatcctcccggccgacccctacgaccgcgccaccgcccgcttctgggctgacttcatcgacaacaagtgcttgaagccgatgtggctgtcgatgtggacggacggcgaggcgcaggcgcggttcgtcagggagacgaaggagagcctgggggtgctggacgcgcaactccaggggaagaggttcttcgccggcgacgcgctcggcttcgtcgacctcgccgcctgcacgctggctcactggctaggcgtgctggaggaagtggccggagtgcacctgatagcggcggacggcgagtaccccgctctgcgccgctgggccaaggagtacgtctccgatgaggtcgtgagccggtcgctgccggacagggacgagctcgtcgccttcttcaccgccagcaaggagaggtacaagtcgtgggtcagggcagaggtggagcgacattgatcgctaaaaatgacgctggttgttgaactctgtacgttctcttgtagtcgaataatgtgtggatcgttatgtacgtatttcatcgtgttatatacatctaataagacatgcaagcccaaaaaaaaaaaaaaaaaaaaggaaaaaaaaaaaaaaaaaaaaaaaacccccc

SEQ ID NO: 83332 - DNA, 323 bp, Zea mays
  unsure (1)..(323): unsure at all n locations
  Clone ID: MRT4577_176011C.1
ctgcacgcgtacgtaagctcggaattcggctcgagctctnggngcatnggtgcnccattngctcnatattnntngcacgnatctaaggacaagttccagaganntagggatcgcnaaaggcctnngagagcctacatngatggatngctttgatctcatgcactacngccatnaanatgcantgcngcaggccanattgctgngcgatcagcttcnagtcggagtggttngtgatnacnagatngtggcaaacnanggnccanctgncctnnctatggaaganagnngannctnnttatngngctcaggngtcctgaggtngt

SEQ ID NO: 83333 - DNA, 225 bp, Zea mays
  Clone ID: MRT4577_176012C.1
ccggccggggagccttctggtgacccctgaagagaggtccttgatcgacgccatcgcctttgctaggagccaccttgaggctatgattggtgagctcatgtcgccgatggtggagcaggtgtctcgcaggcttgacatccctcttccccgcttctcacggcgactagagagaatgcactacattgttgagtacgtggaggaggagggatgtgctgatgacatttt

SEQ ID NO: 83334 - DNA, 311 bp, Zea mays
  Clone ID: MRT4577_176013C.1
ctgcgaggccgaggcctaggggggggcgtctgcgagttttggaggcaaaagagcagccgcagaacctacccattccacgcgcaatattggggcgctggcctagctcaccgacaacacccgcgtgaacatacaagcccccaacgatgtgtacacacccccggatctggtgaacgacgcaatggaatccccatgcacacaatgcccccccaaacaggaaagggcacacaccctctcgctcccggaccggaaagacccgcttggttcaatccctgaaccacggccgcattgccaacccgagcaccaaacacagg

SEQ ID NO: 83335 - DNA, 580 bp, Zea mays
  Clone ID: MRT4577_176014C.1
aaaggggttcccacttccccccccggaaagggtggcccatttaaaggggaaatcaatttttttggtttttttttaaaaactaacccttttttttccccttgggttgggccaggtttttggggggaacaacgggaaactttcccctttttttttagttagttccaaaaaaaaaaaaaagtttcttttgaaaaaaaaaaaaaaaatttttttgccttccgttgggaaaaaaaaaaaaaaaaaacttttcctgggtccctttttttaccccccggttttgggttcccccaatttggggttttaaaagggaaattttttggacggttttttccaattcctttaaacccggttttttttgacaaaacctttggtttggaaagccccaaaaaaccctttttggggttttccccaaggccaagggacatggaccttccaactttttcttttaaaagacccctttttttttttttttttacaaaaaaaacaaaggaaaggctttcattgggggtggccccccccatgggaatttttccattttgggatatgaaaattagggagcaatggggggggcttaaaccttttt

SEQ ID NO: 83336 - DNA, 589 bp, Zea mays
  unsure (1)..(589): unsure at all n locations
  Clone ID: MRT4577_176015C.1
gccnggccgggttcggngatctaccagcgactcagctgagcgagagcagcacacacgcatgtagatataagcagcatgagcgccgtcggcgacggcgccctccatgatctcctcatcaggtctggcggcggcacctcaagctctgccacccctcgcgcggcgcgcctcctccttcgccgttgcatgctccaagaacaagatcaagaccgacaagccctacacgattgagagagggctgaccgtgaacgccaacacctacggaacaaaggcgaagggcaagagcgcgaaccatctcacccaccagcaccctacgaacggctacagatacagcccaatctacaacgagngatgattggtctcccaccagagacgtgctagcgtcaagtggaagcatgtgtggttctgatctcgacttcgtgacccacgtctgggatcctgcggtgacgggaccctcttcggatacaacaacagacgccctctaccgctaaagatatccaatgcatgcgattacttgaagatcagcatgtacaatcgcatgtgtctagtatataagctatgccaccgatggatgcctcagccatccgtcatg

SEQ ID NO: 83337 - DNA, 561 bp, Zea mays
  unsure (1)..(561): unsure at all n locations
  Clone ID: MRT4577_176016C.1
tttgtattgggggatgtgtgaakgtggtatgkatagagtttgtakgttanrgtnragaatvgggggtagtggtagttttrgaaytnaggttggkgngatgatgtaatagatawkggagtgattagtttagtgttaggatgtttkgatttaagagttgtagatttgggtggttgtgttttwataatagatgagagkgtggtggttttkgttaatggatgtycghattggrgttcgttgggytttwatttttgccagaayatyayggaycgygyyatkwatttyttcgyaaatagycgygtgaagagyaagtktgkktakktgggatgtagtgaaagatkggttcgygaayytcaayatyagycagtgyayygtyttgaygtyyyyggyggtgyaggttkttgygattytttyyyggygttgyatwtttgyytygagaggyattyyttywtywtyagtggttgyytyagyytmaygtcagtccaytgygcytgcgycytccayccacacgtgccgggagagccytgatggccaaccatgcgtaytaataagcatgttgggtgg

SEQ ID NO: 83338 - DNA, 382 bp, Zea mays
  Clone ID: MRT4577_176017C.1
gcctcctttgctgaaaagggggtgcaagcctactgtctaaagactgaaaagccgctctagttcgaatgacttatgatgcatgattgtgggagatctacatgaccagcattgtgaaagaggacattgaagcacagcctatctcagtgcttgcatgacctctgacctgtatagacctggcactggatgtgtacaagtagtgacctgccaagggtgagtctaactgagagacggtttcacttgacaacggccaataaaagagtggatcatatggatcgaagaagctgcaaagtcgttagtgtaactggttccaatgcaacattacaagatgccgatagtgaacccgctagccggtcaaaagggcaatctgaatgatcctactgag

SEQ ID NO: 83339 - DNA, 565 bp, Zea mays
  Clone ID: MRT4577_176018C.1
ccccttggaaaacccctttttttaaaaaaaaatttggggaccaaccccctttcggggggaaacgggaaagccccctttgccggggaaaaaaaaaacttggggaagccccggggggccccctaacccaaggggggggggggccttaagtcctttacccccctttcccttttaaaaggccgccaagggggggggccaaatcggcaaaccccccacccgggggggaaaaaaagggaaaagcccacctttcccaggggggggaaatgggggggggggattaaggggcccccttttcgttttttggggcccggggaaccttttttgccattggggaaaaagacggggcccccccccccatatggggggctcgaagggaaaggccccccaactttttaagggttcccggcgggtgggccccaatatttttggggacccggggggagccaacattggggggattggcaaacccaaacttcatttttatgggaacgactggacccacgggtggtccatcttcagttttttgggtccccgagcttatttttttttcaggctggggcttaaactt

SEQ ID NO: 83340 - DNA, 818 bp, Zea mays
  Clone ID: MRT4577_176019C.1
cattgtacccctcgaggccggcagggagtcagtccctcccagcggctcgccagccacctgctcctccagtcctctctccatccctctccggctctccgcctctccccctcgtgaggaggtgaggagaggagaagcaacagagggggccgcggcgaccgaccgaccgaccgacgtgtcctgagtcctggtgctggtggtgggtgcttctcgttcctggcgggtccatacacggcggggtgctagctaagggagaggtgccggcgtcggcgtcggctgcgaggagcaggagcagcaggccaccgacggattcggagatctcgccggagaagatgaagagatctgcatctctgtttcaagtccttctggttttcacagccgtgattgagatccaatggtccactgtatccagcatttactgcaaggacatgccgccgaacgtgtatcggcctcacagtgtcacaataactgaatttggtgccgttggggatggtgtcaccctcaatacaaaggcattccagaatgcaatcttctatctcaattcatttgcggacaagggtggcgcgcagcttttcgtgcctgcgggaaggtggttgacggggagttttcatcttatcagccatctcactttatcactggacaaggatgcaataataattggatctccggattcatctcattggccagttatcgatcctcttccatcctatggtcgaggtagagaccttcctggaaaagacatcagagtctgatttttggattaaatctgacggatgtaattataactggtgctaatggttcaattgatggtcaaggagcta

SEQ ID NO: 83341 - DNA, 452 bp, Zea mays
  Clone ID: MRT4577_17601C.1
tacctcgaggccggccggggacactgtcatctatcatcccccgagctgagcttagcttcactccagttccaatcacagtcgtgaccagagcagagagctagactagagggacagtgaaaatagacgatcaatatgatcgccctggggagccaccacgaggtgtaccacccgggtgccctcaaggtggcgttcgctgagttcatctccaccctcatcttcgtgttcgacgggcagggctccggcatgggcttcttcaagatgaccggtggcggcccgacgaccccggtggggctgatcgcggcgtacggggcagcaatgttcgcgctgttcgtggcggtgtcggagggtgtgaacatctccggggggtacgtgaaccctgtcgtggacttcggggccttcgggggcggtgacgtcaccctgttccggaggtgcctgaactggcgggtgcagct

SEQ ID NO: 83342 - DNA, 2025 bp, Zea mays
  unsure (1)..(2025): unsure at all n locations
  Clone ID: MRT4577_176020C.1
tgggtacctcgaggccggccgggccgggattcagtccctcccagcggctcgccagccacctgctcctccagccctctctccctccctctccggctctccccctcgcgaggaggtgaggagaggagaagcaacagagggggccgcggcgaccgaccgaccgaccgacgtgtcgtgagtcctggtgctggtggcgggtccatacacggcggggtgctagctaagggagaggtgtcggcgtcggctgcgaggaggaggagcaggagcagcaggccaccgacggattcggagatctcgccggagaagatgaagagatctgcatccctgtttcaagtccttctggttttcacagccgtgattgagatccaatggtccactgtatccagcatttactgcaaggacatgccgccgaacgtgtatcggcctcacagtgtcacaataactgaatttggtgccgttggggatggtgtcaccctcaatacaaaggcattccagaatgcaatcttctatctcaattcatttgcggacaagggtggcgcgcagcttttcgtgcctgcgggaaggtggttgacggggagttttcatcttatcagccatctcactttatcactggacaaggatgcaataataattggatctccggattcatctcattggccagttatcgatcctcttccatcctatggtcgaggtagagaccttcctggaaaaagacatcagagtctgatttttggattaaatctgacggatgtaattataactggtgctaatggttcaattgatggtcaaggagctatttggtggggctggttccacaaccacacattgaattatactagaccacatcttgtggagttgatgtattctaccaatgtcgtcatatctaatctaaccttcaagaactcgccgttttggaatatccaccctgtgtactgcagccaagtgcttgtccggcatgtcacaatcctagcgcctttgaattcgccaaacaccgacggcgttactccagactcttccacgaatgtgtgtatcaatcattgctatgtaagaaatggcggtgatgttattgtcattaaaagtggctgggatgaatatggcatttcatttgctcaaccaagctccaatatcagcataagcgacatcacaggggagacaaggggtggttcagggattgcctttggaagtgagatgtcaggtggcatatcggaagtacgggctgtgggcctccgcattgtcaactcccttcacgggatcagaatcaagacggccccggggcgcggagggtacgtggagaatgtgtacatagcagatgtgagcatggacaatgtttcgatggccatcaggatcactggaaactatggtgaacatcctgatgacaaatatgacagcactgctctccctgtgataagcaatattacaatcaaggatgttgttggcgttaacattggggttgctggtatattggaaggcattcagggggacaatttcagcaacatttgtctgtccaatgtttccctcagtgtgcaatctgcacatccatggaattgttcacttattgaagggtattcgaactcggtgatcccagaatcatgcgaacagctcagaagcaattgtagacagacatccatttgctacgatggaagcagttcttcagtaatgagtgtgcagcaaccaagacatacatcgcccaccagccggttgctagatctttttactggagttggcttcattttagtgtaggtagagctgtgcttgttcttgctgcaaagggggcttgcttcatgtagtgagagccctattagtcatgtatatctgattcttgcaattatttgtgattagagtgccacttgcttcatgtatatagctgttgagatgactgtcggtgtatctttgcctgttttgttccaatttttggtatgtgaatgcaatctgcataactttatggttttgaacacaaaaaaaaaaaaaaaaaaaaaaaaaaaaaaaaaaaaaaaaaaaaattatnaaatttctttttatctttatatc

SEQ ID NO: 83343 - DNA, 2931 bp, Zea mays
  Clone ID: MRT4577_176021C.1
gggtaccctcgggctcgccgctgcgtcccagcagtcctccgagcagtgccagtccaccttgctagctcgcccgctcgtcgctccctcgatcagatctaatcggcatttaatccttttttttcagactaaaatgaacactccccactcgtcctccacctcctccgtcccaccacaccgcgcctcccctccccagatcccccaatccctaaccctagcacccacggcgtcctccgcttcgccctcctcctcctccgcgtccggtatgcgggacgcggcggaggacgactccgactcgccgccgtcgcagatgtccgaggacgaccccggcggagggggcggggaccggtgggagccggatctgcggggcggcaacggcggcggcggcggcggcgggaggtgggctcctccggaccaggtgctggagaacgtgctcgagaccgtgctcgagttcctcaccgccgcgcgggaccgcaacgccgcctcgctcgtctgccgctcctggtaccgcgccgaggcgcagacgcgccgcgagctcttcatcggcaactgctacgccgtctcgccgcgccgcgccgtccagcgcttcggcggcctgcgcgccgtcgtgctcaagggcaagccccgcttcgcggacttcagcctcgtgccctacggctggggcgcctacgtctccccctgggtggccgcgctcggccccgcctacccgcgcctcgagcgcatctgcctcaagcggatgaccgtctccgacgacgacctcgcgctcgtcgccacctccttcccctgcttcagggacctctccctcgtgtgctgtgacggcttcagcacgctcgggctcgccgtcgtcgccgagcgctgccggcatcttcgtgtgctggatctgattgaagactacgtcgaggatgatgaggacgagctggtggattggatctccaagttcccagagggcaacacctatctggagtcgcttgtcttcgactgtgtcagcgtcccgttcaactttgaggccctggaggcacttgtcgcacgctcaccggctctgcgccagttgcgtgtgaaccaccatgtgtcagtagagcagctgcgccgtctcatggcaagagcaccccagctcacgcactttggaaccggtgcattccgatctgagggcgcccctggtgggggtttggctgtgactgagcttgctacatcttttgctgcatccaggtctctcatttgtctatcaggtttccgggaggtcgatccagaatacctcccagcgatctaccctgtctgtgccaagctcacgtcactaaacttcagctttgcaagcctaaccgctgcggaactcaagccagttattcgcaactgcaccaatcttcgcactttttgggtccttgatactgttggcgatgaaggcctacgtgctgtggctgatgcatgctctgatctccgtgagctgagagtttttcctttggatgcctctgaggattctgagggttcggtctcagatgtcggtcttgaggcaatctcaaaaggctgccggaagctagaatcaatcctctacttttgccagcggatgacaaatgcagcagtaattgatatgtcgaagaactgtcccgagcttgtagtgttccgcctctgcattatgggccgccaccgccctgaccgggtcaccggggagcccatggacgaaggttttggcgcaattgtgatgaactgcaagaaactcaccaggctttcggtctctggcctgcttaccgataaagcctttgcgtacattggaaaacatgggaagctaataaagaccctctccgtcgccttcgccgggaacagtgacatgtccctccagtatgtattcgaggggtgcaccaagttgcagaagcttgaggtcagagacagccctttcagtgacaggggtttgctctccggactggactacttctacaacatgaggttcctatggatgaactcttgcaggctgacgatgaggggctgtagagatgtagctcggcagatgcaaaatctggtggtcgaagtaattaaggaccactccgaagatgaaggggagggggagaccgttgacaagctgtacttgtatcggtcgctggcaggaccgaggaatgatgctccgccatttgtcaccctcttgtagcactggtatcggaagaacacagccctgcttgtacccacgaacatgtttgttgtattgttaacttaccaagtttccagagcaagcgagggatagcgtagcgtcctgtggatgatattcaagttgctgcagcaggagcgctcgtgtaaaatcaagtaaagaacctgccgattattccttggaacttgatctggcatgggggcggcatccagagttggggcagttgaggagcacatccagacctagtatagcagtgatgggtagtaactgattgcacaggaactgactgcacactgactccagtcagcaggctccggatggttctttggcagtggcacccaagtctccagttatttacctgccatcttccgttccattttttcagctcatctcagaccaaggaatggcggcggcgctggtgcgtgctgcctatgcccggaagcttcaatggctccaccggccattaattacaagttctagtggatccaaaactcaatcccgctatttttctccccctcccattgtttgtagcactccagagttatttttgtagacctgtagaccaccactacccctttcctccgtcccacgccctctgctattttaaatcaagaagctactggaggagacctgggaattcgatcggcaaaaaaaaaaaaaaaaaaaaaacaccacagaccctggcggctgctcgtcaacgtcactgttcgattgcttgccagtcgccatgatcgtcgtgctcctagatattatgaggtcgaccgcgacagctctgtcgctataataaaaaaaaaaaaaaaaaa

SEQ ID NO: 83344 - DNA, 1074 bp, Zea mays
  Clone ID: MRT4577_176022C.1
cccacgcgtccgcccacgcgtccgcaccgataaagcctttgcgtacattggagaacacgggaagctaataaagaccctctccgtcgccttcgccgggaacagtgacatggccctccagtatgtattcgaggggtgcaccaagctgcagaagcttgaggtcagagatagccctttcagtgacaggggtttgctctcaggactggactacttgtacaacatgaggttcttgtggatgaactcgtgcaggctgacgatgaggggctgtagaggtgtagctcagcagatgcagaatctggtggtcgaagtaatcaaggaccactccgaagatgaaggggaggctgagaccgttgacaagctgtacttgtatcggtcgctggcaggaccgagggatgatgctccgccatttgttaccctcttgtagcactggtatttgaaggacagccccgcaccgtactgacggacatgtttgttaggtcattccttaccatcaagttgccatggccagcgagggaaagcgtagcgtcccgtgggtgatattcacaagttgctgcaggagcgctcgtgtaaaatcaagtaaagaacctgccgattattccttggaacttgatctggcatgggggcggcatccagagttggggcagttgaggagcacatccagacctagtatagcagtgatgggtagtaactgattgcacaggaactgactgcacactgactccagtcagcaggctccggatggttctttggcagtggcacccaagtctccagttatttactttgccatcttccgttccattttttcagctcagaccaaggaatggcggcggcgctggtgcgtgctgcctatgccgggaagcttcaatgctccaccggccattacttataagttctagtggatccaaaactcaatcccgctatttttctccccctcccattgtttgtagcactccagagttgtttttgtagacctgtagaccaccactacccctttcctccgtcccacccacgccctctgctattttaaatcaagaagctactggaggagacctcggaattcgatcggcatttgcttag

SEQ ID NO: 83345 - DNA, 468 bp, Zea mays
  Clone ID: MRT4577_176023C.1
tggatcccccggacagcaggaattcggcacgaggggaaatggaaggtcgtatcccttttgtttacagggctatagtcgagtacaagagcggcaaagacgatcacgttttagcaacatgggtcatcgagtcaccctcggcttcttacatgagactccccaccggggattctgatcgcttccaaatatccgatgatcgaatctttgagtcagatacttatgggaagttttccacttcatcatcatcatcatcatcatcttccatgggtgctccttctgctagtactaagattattttatcagccggagttcaatcgtcctgcgtgtctgctccgtttgacctctctccgcacggggccgtcgatacatgaaaccatcgcatacttatgggttaaactagggtctgggaatttcatgtatgttgaacatatatatgtatttctgtggacgttaatcattatggtcgggtac

SEQ ID NO: 83346 - DNA, 765 bp, Zea mays
  Clone ID: MRT4577_176024C.1
tttttccagtctacatgagctcgcctcactcgtcctccacctcctccgtcccccaccgcgcctccgctccccagatcccccaatccctaaccctagcgccacccacggcgtgctccgcctcgccttcctcctccttctcctcctcctccgcgtccggcatgcgggacgcgggggaggacgacgactccgactccccgccgtcgcagatgtcggaggacgaccccggcgccggcgccggcgacaggtgggagccggatctgaggggcgggggcggcaggcgggcgccgccggaccaggtgctggggaacgtgctcgagaccgtgctccagttcctcaccgccgcgcgcgaccgcaacgccgcctcgctcgtctgccgctcctggtaccacgccgaggcgcagacgcgccgcgagctcttcatcggcaactgctacgccgtctcgccgcgccgcgccgtcgagcgcttcggcggcctgcgcgccatcgtgctcaagggcaagccccgcttcgccgacttcagcctcgtgccctacggctggggcgcctacgtctccccctgggtggccgcgctcggccccgcctacccttgcctcgagcgcatctgcctcaagcggatgaccgtcttcgacgacgacctcgcgctcgtcgccacctccttcccctgcttcagggacctctccctcgggtgctgtgacggcttcagcacgctcgggctccgcgtcggcgcgagcgctgccggcatcttcgggtgcctggatctgatga

SEQ ID NO: 83347 - DNA, 180 bp, Zea mays
  unsure (1)..(180): unsure at all n locations
  Clone ID: MRT4577_176025C.1
cgaattcgcggccgcgtcgactttttttttttttttttttgttttttcccctcttttttggatctttttttccttactttgcgcggntagcacgccgctctggcgcggaccagcacgccaatggatgcaatttggaggcgggctacgcgctggtccgcaaaccaaagcggccgggccacc

SEQ ID NO: 83348 - DNA, 756 bp, Zea mays
  Clone ID: MRT4577_176026C.1
tggtaccgcctgcaggtaccggtccggaattcccgggtcgacccacgcgtccgaccggtctttctgggtttacatatgtggctccatctgtacttgaaagtgtgaaagaaaagttttcatttgaaccaaaaatccgatctcctagaagatttattggtagtccacgaacacctgtcagcccagtcaaattctctcctggggatttctggggacgaggtgcttcagccagcacggcaaatcctcagacccctgtggaatacccaatggaaacaagtgggatagagcagatggatgtgacagtgagcggggaagcatcagcgccacttccaatccgacaacccaactccgggccgtacaaaaaacaagcttttcctatgatctccaaacggccagagcacctgcggatgaatctatgatgaaacaatgcttttattaatgcaaaatcaaaaaggaaacaaatccgggaaggggatgtgtgagcatcctgcaatataaaaacaagaataaaatggcagtctcaaagagtcagtgtcattacctggaatgctttcgatggaggaaaaaataaacatggattgtaaaaaatcaatcaaaaatggtgcaaaaaaaaataaacccacaaaaaactcaagcaaaatagtattggtggaatccacagacacatcagctgactggttcctatcctagcaacatctcagcgttcgcaagggttctcatgctgatggctgcaaactgacagtattaagggtagggatg

SEQ ID NO: 83349 - DNA, 631 bp, Zea mays
  unsure (1)..(631): unsure at all n locations
  Clone ID: MRT4577_176027C.1
ggtacccgggccccccccgcggcccccccccccccccccccccccccccccccccccccccccccccccccccccccccccccacaaagcggggaaaccttaggaaataaggaacaggaggcttccttttattggaaatattaggaaaaccagtggagcgggacaccccgagttggtagttcacataggaccacaaagaagtggtggcacctataagaataaataagaggtcncacatcgtcggaaggtgagaacaacacaatgcttgaaggcgcaagtggaaacattaggatccatggtaaaaaaagggagagagcttgggactaaatcggtgaccctttaacaccaaaagaatttttttcaggtttagggttggaaaaccgggagccatatggttttttgttaggaatttgtttttgggggcttggtggtccaccattggcccggaaaaacattaagaaattttgatcttgggggggaaaaagagggagaaccccttttgggggggccccttggcccaaaaaaaaaaggtcttgcccgggatttaaaaaattaacggagagggctgggggatttactagaacgcgggttttggttgtaactaagacttggacttccgttacgggagaaa

SEQ ID NO: 83350 - DNA, 526 bp, Zea mays
  Clone ID: MRT4577_176028C.1
ttttttttttttttttaactacagagtgtatagagataaatgtcgtaaaacatcagagtatttattacatagcggaagacttattaaaaaaataaaagataaaagtaaaacgaactaaggatcgtcggcgccaatgtcaactgagaaacgccacctagatcagatcatactcctcgccttgtggctcctcctgaaccacctgctcttctccttcaatgagctcctgctcagctacttcaacctgctgctcaccagggtcctcggtcacgggctcttcggtggttgatcggtgtagagagccgacgacggggtttggcggcagtagcggcctccgtcgagcaattatggaggtccaggggcccttctcgtccagcgatgtgatgagcggctccagtggtgtcaggcgaaactccctgcactccaattcggccacgggtggcgcggtggtctgggaacaagtacggcggctactttctttcgcaatggcgcacggtggcaatggggaaagggagaggaaaggaggggg

SEQ ID NO: 83351 - DNA, 247 bp, Zea mays
  Clone ID: MRT4577_176029C.1
tcgcgtacgcgtgggctgacgcgtggtcttacgcttgtgaaaaaaataaaaaatatacgagataggtaaatataaagacgtagcgaatgaaaaaagaaaacatctattatgtacgtccaacatattctgttaactaaccagcccattatagtcatggctactaattatagagcggtcatttctctagtactacttatgtgcatcgatagcccttaatgcttgcacggcccttaaactgacgttatgc

SEQ ID NO: 83352 - DNA, 364 bp, Zea mays
  Clone ID: MRT4577_17602C.1
ccccctctgctcccttccttcacggcattagaaattttttagtgcattccaattctatcaacctacagagcattccattattccaaccttattccagagtagttctgtgcactttaaagtcgaacgtttttggatccagaaaagaagcaaattttgtatgtatatatgtgtagatccaggtgatggctattgttagcttttgtttacaatggtcgccacccaaaaaagttgtaactgctcatttctagacttgtgaataatgttgttagcactatgtttgcttttgcagtgacactacctaatgcttgtaatgttgcttggtcgtgaactgttgtcgcgctatgtaatgtaagatctagacata

SEQ ID NO: 83353 - DNA, 463 bp, Zea mays
  Clone ID: MRT4577_176030C.1
aaaaaaaatcccaactaatcctttaacacataaccaaccttaaaacggggcccaaaattttcaggggtccaacccagctaaaaacaggggtaaaaaaaaaggggggccctaattttaacagccctttaaaacaggcagggtttggtttacccccccagccaaagggaaaaaagggggaagagaccccccaccggttggggggtgaaaaggcaacccccccccggttttttattggggggcctcccccggattggcggcaccggacagggagcaaacccccccagcaatctttggaaaccctgggccctggcccggatctggaccccaaaactgttccatgagccttttccactccggataaaaaaaagcgggcacagggggcccaagggggtggttaacaaccccccctataatggccccaaagggcaaatgggcaaagggttcttccccaggggggtttccc

SEQ ID NO: 83354 - DNA, 484 bp, Zea mays
  Clone ID: MRT4577_176031C.1
ggtgcatgttctggaggctgcgggaacagaaacacggacacccacaaacagagcgccacccaccacaaggaaacagcaagccagaaaccacaggccacaaagccaacaccaaaaagaaacagcaaacctgcaaagagggggaggagacgctgcagcaacgacaagccgcggccgaacgaccggccggaagccttattcatgttggcaccggccccgggctatgctccgacccgctggatgcctcccacagccaccgtgagtgacatggcaagggccgggagccttccccgggcaggaaaccgacacaacgaaggcagcagcatggacttgggggcaaacaaccacaggataccaggaaaaccattcctccaaaaccagacctccggcactaacgaactgtcttaacccccccccctgctgggcaggaggtctggcaaatttagcgactcaacgaaagaaccggaaaacaagaatggggggtagg

SEQ ID NO: 83355 - DNA, 781 bp, Zea mays
  unsure (1)..(781): unsure at all n locations
  Clone ID: MRT4577_176032C.1
aaaaaaaaatcctatgaggattcatatctttgatttataaatatgcaacatataaatctcgtaccgaataatacaatcctgacgaatgaacactctcctatgtagggagaatatctcctagatgagattatagttccttaatggaacctctccaaaagaaataaagtctatgttaaacaccaaagtttgataatccctataaagggataaagacccatacagacccgaaaaggaataagatgaggtaccaaaggacttgaagttcaccgaataagcacatgtgtgtaaggaaaatggaccccgggccatttggctaatcgagttttggtgtttgatgaacaacacaatccgcgaactaataagttttctagtgtttgtgtttgtagttcacaggatgcaatatttacttggactaaggaattgaggaaagcaacaccttaaaagaagacataaaatgatgcacagaagtccaggactcaagaacaaaagaagcccgaagaaatcaacgaagaaaacttcaagagggctgtcagtcagcgcctggtggcgcaccgaacagtgaacagtacctgcccggtgcgcaccggactgtctggtgggacaaccagacagtctgcgcagagaggccacagacaggcgctctcgggctgtagcactggctgnnccgggggtgcaccggactgtccggtgtgcaccagacagaaggccacgggtcggatccaacggtcaactgctataggcgccaacggtcggctgacgtggcgtgcaccggcactgcaca

SEQ ID NO: 83356 - DNA, 549 bp, Zea mays
  Clone ID: MRT4577_176033C.1
ctgtgcggcgctcaggcggcgggttccaccgtccggggcctgcctctgctcgcgacaccccagcccctaaaccgcgcccgcaccccacgaaatcgtcgctcatcccgcctgcctgccgccgccgccgtcatgtaatcatatcagccctcttggcgtcgtcgccatcgtcatgtaatcatatcagcccccctggcgccggcgccggttcctgccgccggctcccattggaaatggtggacgacaccagcagatacaactgcttcgagcctgggacggtcttattatggagctcaacaacttgatggcgctcaactggcggcccaggtcgtattcgattgttaatgcattcaataaacagacattcgcaactcttacaaatttgtacacttagtttacattttcttttttggtggggggcaattttgtttggagtccagggtatttttgcttcagtgcaattcctgtgagatttgagcaatgcaagtcctttgaatttaagcattcatcatcaaaaaaaaaaaaaaaaaaggggcctaccatgagatatat

SEQ ID NO: 83357 - DNA, 199 bp, Zea mays
  Clone ID: MRT4577_176034C.1
tcggtcttgaattcccgggctgaccaacacatagtgatttcacacttgccctcataagtattgattttcttcaagatacccacgctaagagcaatggctctataccataagatctaccctgtgatgaatacgcatcacaactttatataaccatctctctaaaaatatatttaatctacacctccataaaccacatcac

SEQ ID NO: 83358 - DNA, 500 bp, Zea mays
  Clone ID: MRT4577_176035C.1
gccggaggatcgccaggaaatctgcgtggacagcgcggcggcttgcgctagtgacgtacacggcggcagtggggaacgtaagggagatggcggcgggaggaaagggctgggcggagcgcgtacgccgcggggcgaggaccgcttggttctgttgtccacggagccctcgctgctcgtggtgtctgcgacggagctggagtcagcgggcgacatgtgagtggtgctctggctcgaggcgcggctcgtctgcttccgaggtgacggtctgcgaggccacctccagcgctaccgttaccgtgagctcgcttgacgacatacctctcctctccatcgttcgatccgacgtaatcacctgtgtgtacctcatggctgatacttctggtctctctcatgagccttaccttgtaacaacaactatctgttccttggattctctgctcatcttgttaattcaagtatctgttgatagtccgctccaggacattgtgcccgagctctca

SEQ ID NO: 83359 - DNA, 360 bp, Zea mays
  Clone ID: MRT4577_176036C.1
ttttatgcttgctggattaaattgttctgtgattcttattatatctaacggttttgctaagcgcttttactatcatcataagctcattatcgtgcagccatcatttgacccactcgtccggctttacagctgacacttttaaaaaaaggcgttgatgagaccgctggggctggcatcgtgcgtgagaggctccgagaactaaaaaagctcaggctggatcttgggggccaagctcttgccgagctcgacgccccactgatcgaagctagagaggttccagatggcacccccagagaaagagaggagctcgtagcagacgaaaagagcaccaatagtggcaggtgcgaacttgtcccccag

SEQ ID NO: 83360 - DNA, 271 bp, Zea mays
  Clone ID: MRT4577_176037C.1
attaacacaaacagcccggtatttattggccaaagaactcagccctgggcagggaactgcacgttcagaaagatgacaagcctaacagaacacggggcgataaaggaaaccgggcgacagactcgggggcgttatacaaagtacaccacagtaatgcgctttcgcaaaacttggcacatcaccttagaaagagccaaagatgggccaatgatgttaaaggacctaaatattatagcgctcagacaaaggagggaaaattgcatgccagacc

SEQ ID NO: 83361 - DNA, 1152 bp, Zea mays
  unsure (1)..(1152): unsure at all n locations
  Clone ID: MRT4577_176038C.1
gccggccgggtcgcgctacccaactcgagcaaggttgccctcctttcctgtcatgctttgctgttcttgtgatgtgggttccttctgcgtttactttggaatttgggagctaatcttgcttctgctgcttttggcgaatggttttcgcaagtgcagacggacaaggcttccatgcttgatgatgccattgagtacctgaaacatcttcagctccaggtgcagatgttgtctatgaggaatggcctctatctgcccccaggaaacctgtctggagcacccgagactctggcacccttagaaatgtgcgcagcacttaaccaaagtggtgccaaggcatcaaattccggcgttgtcgttccacctggaaacaaaattcctgtagctcgtcttctacttgatccaccaaaccatgatcagcggcatgaaaacccgcttgtactacaaagcgtccctagtagttcgaccgctgtagagactcggttccttcaacagccagcacagcccaacctccaatcctttcagctggctgtacctcccgagatgatcttcgacgaggcggacatgatgctaaagcatcgcctagcttcaggtcgagaaaccacatctctaccagtaggacatgaggccaagcctggtaggcaggaagcatgcatggtaaattctgatatttctaacagaggttcactcgggaaagaagtatttatgccctacttgcatagcttgcagagcggcgatacggagggaggtctgagggcaggatcaaactaactacacggtggttcaccctgcaagattttccccatcgggatggacagaggtgcctagctaggagtcgctagtcgatctgaaatgttagaagctagatcaggttgcagtctagtaaaccatcttgtaaaacagagagctacccatctatatgcacgcatgaaatgaatctcggccacactgacctggcggccttgttccagcggcaaaaaaaaaaaaaaaaaaaaaaaaaaaaaaaaaaaaaaaaaaaaaaaaaaaaaaaaaaaaaaaaaaaaaaaaaaanaaaaannnaaaaaaaaaaanaaaanaaaaaaaaaaaaaaaaaaannnnccggggggggggcccgggccccaaaacccccttaatgggagggctttaaccccccc

SEQ ID NO: 83362 - DNA, 513 bp, Zea mays
  Clone ID: MRT4577_176039C.1
attcggctcgagcgcaagcaaaaagaaagaatcccaggcgaggagaaagatggaggggaaggagcaggatgtgtcgttgggagcgaacaagttccccgagagacagccgattgggacggcggcgcagagccaagacgacggcaaggactaccaggagccggcgccggcgccgctggttgacccgacggagtttacgtcatggtcgttttacagagcagggatagcagagtttgtggccacttttctgtttctctacatcaccgtcttaaccgttatgggagtcgccggggctaagtctaagtgtagtaccgttgggattcaaggaatcgcttgggccttcggtggcatgatcttcgccctcgtttactgcaccgctggcatctgagggggacacataaacccggcggtgacatttgggctgtttttggcgaggaagttgtcgttgcccaaggcgattttctacatcgtgatgcaatgcttgggtgctatttgtggcgcttgcgtggtgaaggg

SEQ ID NO: 83363 - DNA, 303 bp, Zea mays
  unsure (1)..(303): unsure at all n locations
  Clone ID: MRT4577_17603C.1
gcggncgggaaaaaatttttcaaaaaaaaaaaaaaaaaaggccacttacctgcagtcaccactcccaagccagtacccacagtcctacgagnagtcgnacgcaagtgtnaagagacgaaacggncgacatggntcgcacgcaatctgccgtagcggtcgccgtggtggccgcggtgctgctgctggcagcggtggcgacgacctcggaggncgccatcacctgcgggnaggtgagctccgacatcgcgccctgcctctcctacgcccgnggaacggggtccggtccctccgtgtcctgctgta

SEQ ID NO: 83364 - DNA, 547 bp, Zea mays
  unsure (1)..(547): unsure at all n locations
  Clone ID: MRT4577_176040C.1
accgtattcgaaatacagagaaaactacgcctggttgaaagctcggtgggcggggagggagaagaaatcgccgccgccgtcgcgtccttcgtttccacgcacccgcagtcgctggtggagggcagccgccaccatggctgtctgcggggtggtgtccctgcacgtcgggcggttggaatcggcccaattccacgccggggactcacccgaatcgcggatccgccgctcaccgtggctgggctttctgcggtgaactgtgtgcagtgaggtcacgaggatttgaagaatcatcctggtacctggaatctcaagtgctaggagaagaacaggtggttcaagtggagccacacaacgaggagtttgactcgatctaggtggcgtctcctagttgactttatggcgtcaaggatggactttagttagttttatatttatcttttattttgtaagacttctgctatgtaataagtactctgattattgtcaaaaaaaaaaaaaaaaaaaaaaaaaaaaaaaaaaaaaaaaaaaaaaaanaaaaaaaaaanat

SEQ ID NO: 83365 - DNA, 362 bp, Zea mays
  Clone ID: MRT4577_176041C.1
cggtccagattcccgtcgagacacacgtacgcaaaatcaactacttaaactccatatattataccctgataacaaaatacgaacccattgagcatcataactagatctatgcacgccaaaacatatacttcatccaaatactactacatcaccatctcactcaaccaatactcatattactaaaccaacccctccaatatgataccgacctgtaccctacacaactactacctctcactccctcaatcctaaatcgtacttacactagcagctacacctaacattcctccaacttatacataatcttttcctgttgtacaatcttctacaaataaactttttcgccagcatctctgatcaat

SEQ ID NO: 83366 - DNA, 321 bp, Zea mays
  Clone ID: MRT4577_176042C.1
cccccaaaaccagatttccattgccattccaaattttaaacaaggcaggttttaaaggcaaacccctcgatttgccttccattttgccccaacttttgttgcccgactttccaaacaagactgaaacaactttactggggttttatacagaatggtttcccccctccatccccccctgaaaaggccagactgccaaatgcaagacatataagtcagacaaagggtgatggcagggggttttataatttttgccaaaacccttgggggaagaagggtggccctagggccttttgtgctgttaaacggcttgggggatcatac

SEQ ID NO: 83367 - DNA, 496 bp, Zea mays
  Clone ID: MRT4577_176043C.1
tctaagacggccggggtttctttcccactctccaggctctcttacgctccgtcgacgacctgctcgcccgaaccaccgccggcaactgcctcccaagagagtgctcgggcgccggcccccgcgaaaaacaaggccgtggtgacgacccgctcttcgagaagaggtcgatacagcttggtgatcggcgccgcccttccgaacaacaaggacctccaccgcttcctcaagtggcccaaggtcgtgcgcatccattgccagcgccgcatcctcaagcaatgcctcaaggtgcccctggtgtataaccagttcacacgtaccctctaccagaactttgccaccaacttgttcaagatgcttcttaagtaccggcccgaggacaattgtgccaataacgagaggatcttgaagagggcccaggctgaacacgaggggaatattgttgagtctaacaaacctttttgctgtgaaggacgggcttaaccatgtgactttacct

SEQ ID NO: 83368 - DNA, 312 bp, Zea mays
  Clone ID: MRT4577_176044C.1
gtggggggttttttgggtggttttttttggaaccaactgatcctccatttttggttggtgggggaacattggatgactggaagctggaacgaactggtgcaccacttccggttgctgagaggggtgggggaatttttcccggagaggggggcacatatttgctcattttggttggtaaaccggcaggggtgggagggtcccccttattttggtaggtaggtgggcataaataaaaatctacttactactagcggggagggcggatttatttgaataggctcaggctatttattaccatgggctaattttacc

SEQ ID NO: 83369 - DNA, 127 bp, Zea mays
  Clone ID: MRT4577_176045C.1
gcacattcgcaggctgcaccgttgtcaacgccaccaggaccaccgccactgtcgccattcctaccttcaccattctcagaccctgaaccagtctacgcacccggacgacaacgacagtgtcgaccat

SEQ ID NO: 83370 - DNA, 422 bp, Zea mays
  Clone ID: MRT4577_176046C.1
gctatctttgacaagatgaaaaaggacaagaactcagaaaattcacaaggagaaaggaaggacaatagtatgcatagcgttggtgaagggaccggacaatcaaagagtcaaaaccttcacgtgtctcaaagccgccgtagcatgaaagctccgaatttttccatgaaaagaggtccttcaatggccatgagagctccttcagtagcgatcagagcgccctcaatatctctgagaggtccttcaatgtctttgagagcatcttctatgtctgtaaaggaagaccaaagttcctcaaacaagtcagatgaggaaacggaatctgtgttggtgaagctgagcgcacgtcagatcacacttttgctgtcatccatttgggctcaatcaacatcccctgaaaatactcctgtgagcaatggcttcat

SEQ ID NO: 83371 - DNA, 284 bp, Zea mays
  Clone ID: MRT4577_176047C.1
aatcgatcaatcctttagttgttttcataatggcgccatttttcctcctcaatgcggggtttaagaacatgtcgggggggccaaaaccactttaccaccttttttgaatcactcctttcaccacatgcccacttcttgtatccttgccggctagtcccttataatcttattccacaattctttataatattttttattattttcaactccatctaattcatctcttacatacctcattatatatctactttttttttttatttattatacatctacttcatttt

SEQ ID NO: 83372 - DNA, 967 bp, Zea mays
  unsure (1)..(967): unsure at all n locations
  Clone ID: MRT4577_176048C.1
ctgnaaaaacattgagggtctctaatgacaagatgacatggcttacagctgctcttcttcagcttgcacctgataaacaatacgtattaccgagttcatccccgagcacaagtcttattcaaggtctgtttacctgccccgagggagacatagcaaggaactctgttatggatcatagtgatatatatgctggtgcccgtagcttggcaagagcatctgaccttggaaatcaataccatagagatgctaatccagtgtctggttccagcaacaacatggcaaacaattaccatgttggaaggagacctggggaacataccccagacagccatgtgttgccaaccggtgctacaagagtgaatgaaggatctaggtatggcaaaactgacagtgaaatgatttggcaggctgtgctagagaatgttcagtcagactcattaagaagattgttagccagagagggtcgactgatatccgtcagcctaggcacagctccaactgtacaattaatattcaactctcgagtaaataaatctaaagctgagaagtataggggccaaattctgcaggcatttgaatctgttctttcttctaccataatacttgaaattcgatatgaatctaaggatgatctggcagcaggccatgctccagttatttctgcctaccctgaggatggctcctcaaatctggtattaaggaggtcttttactaaacatagttcagtttcttcggggggcgagaacttaattaggaggcttcagaaagatagtgtggtccaacttggtagctcaaatcagacacgctggatgcaatctgatccacatatattgactgaaggtgaaattattgaagttggatctcaaatggattggcgtgctgaacaagatagtggcattgttatggcaaacagaagacaagaggctgtctcgggagaaggtttgtcatcacagaatcaagaaatttc

SEQ ID NO: 83373 - DNA, 482 bp, Zea mays
  Clone ID: MRT4577_176049C.1
acgtgcacgcgcgcgtgcgctcggaattcggctcgcgggtctctaatgggaccttgcgtcacggggagtcttctggcggagcggggacttatgagggccgtcccgagactctctatttggctgggccatatcttgtgtctgaaagcactggcatgagcagcgcaacgggtggacttagggttcctcttgctagccctgatgggcatgttttaggcggtgctgtcccaggacctgtaaccgcacctgcgccaggtcaggtggtcattggcagctctctggctgatccaaaaatggaccttgaccctggatcaagacctgaacaaacatgttgctagcaggtttcaaactacccacactgcatctaggggtaccggaatctttggggggcatgcaagcccaccaaacaccacaggctccttgagcaccagcacacagccaggcgttccaagctgttccacatggaaatgagactacctgcgatg

SEQ ID NO: 83374 - DNA, 428 bp, Zea mays
  Clone ID: MRT4577_17604C.1
gtgacgcgtgggcacatacctgaaaacctggggagtttatacaaccttcgggtggcacctccaagcacccaggcccagccatggcgtctcatgaacatcaccactaccactcccactagaccaccaccaccagtcccacggagactgtggcggccatgcggatgggggatcgtgggcaggggaggacggacgcgtgaggcactctcacgacggaactgcgcccaacttccacgagcacatacacatcagacggcgactccaccaagcgtgcgccggcacttggactaaagcgacttcgatgtccgagccattacagtcggcattggctcgccccagaaggctcagggaaaactgtcctaaagcaagcaccgggcccacttctacccgacaagtatatcaatgctaatgtaacaaatgatttatactcc

SEQ ID NO: 83375 - DNA, 322 bp, Zea mays
  Clone ID: MRT4577_176050C.1
ctcacacgttcgctctacttcagctgctgaccgtgtgcaactcgacagggcaaggtgggaggctcgctcgagggtctgaagctagggtaagctagtgaagctacacgctgtagcgcagtgtctcctgcgagacagctaatgccttctgttaatgtacctacgctactaagtctgccggattatggatactgcgtgcatacgtctcatgtgtaactaagaatgtcgtgctttgaggcgctcgcaactgctgtgcctagatttatctttatggatgtcaagtaacatcatgtaccattgacattgttgaaaactttgctttttc

SEQ ID NO: 83376 - DNA, 520 bp, Zea mays
  unsure (1)..(520): unsure at all n locations
  Clone ID: MRT4577_176051C.1
gaagctaggaacctgagagcggccgtccaaaaccaagggttaaaaccccagacggaaaaaacanacggggggaagcattaaacacaagcccccgatgcaaccggaaatgcaagctacacggaaagccaagagccgcatgcaaacgagcaagagcacagacggagacataacgtaccgaaacacacacgagtaatagggcaagcctaaaaaacaggaacccctcaaaggaaggaacaacaaccattctgccactctaacactacgcacaacagccaacagcagcaccagaaactgatgacgaagagcaaaccaaccgccgcgacgaagatggacgacgggaccccgaatcggaggcggcaccagaaggagaggaagcagcccaagaacagggcccgccaggcctgcacgcagacaaccagaatcgccgcaaagcccaggagggagaggaaaccaaacaggagccgacccagcaaggaagagccaggctaaccacctgaaccacgagaaatcgaaagccgcg

SEQ ID NO: 83377 - DNA, 556 bp, Zea mays
  Clone ID: MRT4577_176052C.1
aaaaaagaaaaggagctgtggcgtttagagaataacccaccattcccgtattccttatctacagagatgggggtggccaaagccaaaaaacgcaaacgaggaagaggagcggtcttatctcccaatctatagacgagggattcttgaccaattgaaacaacattccttcctgggcattgatcgtgggcgttcagccaaataaatgatccacttttccgcccgactagagagtagcggaaccaatgagaaataacaccccttttcctggcccaagatgcctgcttccgcttcttttcggcgccacaccattttgaaaatgcatggccgtgacgtcccctttgtgggcactagtggattatcagcctggttggattttggaggggcgaaagaacaccatcgtggccatccaagaaaaaggctgaatcgatggcgacgaacagcgcgatgccattggagtgcgccgagaccaaatcgccgacggattgtagatgctgattgctgcgcctgccgccggggacaccatccggtattgaatcccatgggcggtttaacctct

SEQ ID NO: 83378 - DNA, 626 bp, Zea mays
  Clone ID: MRT4577_176053C.1
ctctctctccccccactctttgcccaagcccccctactgccggcggcggagacgacggaaacatggtgcagcgtctgacgtaccggaagaggcacagctatgccaccaagtccaaccagacgcgggtcgtcaagaccccaggtggtaagctcgtgtaccagtacaccaagaagagggcgagcggccccaagtgccctgtgaccgggaagaagatccagggggtgagttgccgccaagctttgcatctatatgaaattcttgattgtttcgctttgccatgataggggtattcgatatctctgtttgtatggtggatgagttggattcttttgcttgggtatgatttatgtgtggtaaatgtggtttatctccatctcacacatgtatatggctatcaacttgtagagtgcctttaaggcttttaccagatgcacaattagcagatgccgatttgaccttatcgggcatcagatttatgtttagaccgtttcctcatatcattcctgagaagttattcctttgggggtttgcgttagtgcatgagtatcaaattcagagttggttgtccgacagttggtatgatggtgtacgtggacagctggttgtgcagagtagtactgctgcat

SEQ ID NO: 83379 - DNA, 293 bp, Zea mays
  Clone ID: MRT4577_176054C.1
cggatttttgggcggacacgtgcgtggcgcttcactaccggagtccgtccttccggtgggcggtggcagtggcacctgcttccactggagtggagggaaagcaccgaaaggcgcggctttttttacctctctctcgctttgcttgccccttcttttcacttacctccttccctgccttttctctccttgccgctccatggcccccgctgcgccagcgagcctggccttcgtctcggtcgcggtcgccgttgccgtgctcgccgtcgctgagttgtcggccgacacctactacc

SEQ ID NO: 83380 - DNA, 428 bp, Zea mays
  Clone ID: MRT4577_176055C.1
gaacaaaaaaaaatccggggcatccaaaataaaacaacgaaattggaccctattttcaaactaaaaaaaaggtacataggggcgctaaaaaacaaaaatactcatctatagggggttctggggggtcggttcggtggggtccgcccctgaccccgattaccaacagcgaccaacttttttggtggtcgtggggggctcttgcgggcgggccggacacttggagggtcgccattgccgcggtcgctgacatgcggaaggaccttggggatccaacaaccggcgtcctggcctgggggccaacctccttgcatacatgggccaggagggacaggaagtccctaaccaccataaagagcctcagagggggcgcttcctcctttccgggaaagggagggaaatactcggggacctccggacgcgggggcgga

SEQ ID NO: 83381 - DNA, 231 bp, Zea mays
  Clone ID: MRT4577_176056C.1
ggggaacccaacctacgccacaacaccgcgtacgtcgccgcggcatcggactgggcttgttggcctagcctcggtagcagccctctctgccggcgcggacgagagtcgccaccaccaccaccatgcagccagcccttcccttccccagcagcaggctccagccgcagacatggccaagccaccggcggccacctacacctccgaccccatgctcgggggggtgatacaacc

SEQ ID NO: 83382 - DNA, 266 bp, Zea mays
  Clone ID: MRT4577_176057C.1
catcagagatgagcaatatggcacatcctgctagatttataaagatcattgctaatagggatcgtgggagataatgcaaagcactaaagatgacttctggtggatggtcaaacttcgaggatcaggcacttgttgtccttgtccatgatatacgtaaaaactgggaactagttagtgacgcaatcaacaacatcgtgcagttcaagtgtgtacataggcagcctaaagagtgcaaggagcgccacaaggttcttttggatagaagc

SEQ ID NO: 83383 - DNA, 665 bp, Zea mays
  Clone ID: MRT4577_176058C.1
attccagaatctttctcccctctcgctctctccaccaagaacagcaagacctcgacctcggagcaccaaggaatccgccgccgcccggcaaaagggatccaaagctccaatggctggcaagtacatcgtcgccggcctcgtcggctcctgtgtcatctcgtacgcttgtgactacatcgtttctcagaagaagatcttcggtggcaccatcccagggactgtgtccgacaaggagtggttgaaggcgacggagcagaggttccaggcctggccccgggtcgctgggccgccggtcatcatgaaccccatcagccgccagaacttcatcgtcaaggacctcaacccctgaggctcaagaccttaaggattgcggtcggttcggacctttaccctgatggcgatgcctgttgctaaatctacctatatgtgctggctttactctcgaggctatttggtctgtctcaataattagatcaacactattgtgtagggcaccgtggttatatttcttctgaagaacagaagagaacctgaagcatatttgctttggactttttgtcatctttcgtttgcataaacatatgtttacttttcaatttgtgcttgtcggagctttggagtatgtgccttgcaaattcagaccctttccctaactccagactagg

SEQ ID NO: 83384 - DNA, 766 bp, Zea mays
  Clone ID: MRT4577_176059C.1
cggaagcgtgggcggaagcgtggcggaagcgtgggcggacgcgtggggtgcggctactgggtaaccgccgccgctgccgccctacgccaggttctcaaggtcattgtcagtccccttacttcgccggctcattcggcggcgacgagcacccagaaatcctagctgctttgggtatggaggcgctgtttgggtgcaataaccatggcggccacaaggccgctgatttggcatcgcttataatcgcgcaggctgccttggaggtgccaaggttacttgggctccttgccatgattctgcataatgaaatctttacatctggtggagaccagaatttgattactaggattctgggcaaaaacaaaaatgcaactaatcccgagaacaaggatgatggagagtccgatgatgataatgatgatgaaggagacgatgatgatgctgaaaacgaggaggaagatgatggtggtgatgagggatcagatgacaatgagaatgaggaagatgacgatggagatgatgatgatcctgcagccaatggcgaagggggaagcgatgacgacgatgatgatggtggagaggatgaagaggatgatgacgacgacgacgatgatggggacgatggcaatgaggaagaggaggaagaatctgaagaggatgatgatgatgatgatgaagtcccccaaccacctactaaaaagaggaaatgatcaacggctgcgacgagtggttgcttatacgcaggaatgctgcctgttcgtccctgcgc

SEQ ID NO: 83385 - DNA, 213 bp, Zea mays
  Clone ID: MRT4577_17605C.1
ccgaaaaaacttaaccacagcgaagtcagttataaacgactattttagggaccgggggtaaaaaaagcaccaacagaatccctatattcccacaactccaaacaaaatcaaaggcagggaaaccggatccactaacaaaggaccttccctgaaaaaaaaacaccaaaaaccacaccccaaaaaaaatcacaaaggaaatcaacaccccaaacc

SEQ ID NO: 83386 - DNA, 139 bp, Zea mays
  Clone ID: MRT4577_176060C.1
acaaatcatctattgagcgattttgattctaagtacttatatattttacgccgtgtgctgtttacatctggtcgaattgcccatcttatccacaatatcatctttactaaacttgatattactcctcatgaacttcctc

SEQ ID NO: 83387 - DNA, 295 bp, Zea mays
  unsure (1)..(295): unsure at all n locations
  Clone ID: MRT4577_176061C.1
cacctggttggacacgccctccagagccgggggccagcggacatataaagcagaagccccgatcacatggccgcatcggccacggcgcctctggcaaggcgaccaccaccggncacctgatctacaagcttggaggnattgacaagcgtgtaatagagaggctngagaaggagggtgctgagagggggagncgctcttaaaggatgcttgggtgctcgacaagctcaagggtgagngtgagaggggcancaccattgatattgggtctgggaagttnnagaccaccaagcattac

SEQ ID NO: 83388 - DNA, 1336 bp, Zea mays
  Clone ID: MRT4577_176062C.1
actccccgccgcgctttctcctagtgaggctactgggtgaccgccgcctctgccgccctacgccaggttccaggtcttcgtcactccctttccttatcttcgtcgtctcattcgccggcgacgagcacctaccaggtacgcacaccccttctcttcccttcctgcccatgcgaaaccgagcacccgaaccctaacttaagctgcttgtattcggatctgatctgagtaaacttcgatttttatgcattttttttttgtgtgtacatgactacactcatgcccttctactttgtccgcccctgaccgtaggttctatcgtagatctcactttattagctccgaaagttccaaatttctgccatctttttttctctcctgtttttccattattcgtgtactgaatttctgtcttgttgtagaaatcatagctgctttgggtatggaggcgctgtttgggagcaataaccatggcggccacaaggccgctgatttggcatcgcttataattgcccaggttgccttggaggtgccaaggttacttgggctccttgccatgattctgcataatgaaatctttacatctggtggagaccagaatttgattactaggtatgcccatctggtgcataatgcaaaaatatgtagtgcattattattgtcatggtcacttgtctcccaaagctgaggaatgtatgtctccttttccccaaggattctgggcaaaagcgaagatgaaactaatcctgagaacaaagatgatggagagtccgatgatgataatgatgatgaaggagacgatgatgatgctgaaaacgaggaggaagatgatggtggtgatgagggatcagatgacaatgagaatgaggaagatgacgatggagatgatgatgatcctgcagccaatggcgaagggggaagcgatgacgacgaagatgatggtggagaggatgaagaggatgatgacgacgacgacgatgatggggacgatggcaatgaggaattaatgaggaaacatctgaagaggatgataactgatgataatgtcccccaaccacctactattaagaggaaatgatacatgcctgtgatttggttggctggttgcttacatgcaagaatgctccctgttagcccctacctagcagtatcctgtttaatgggtataagggttttagcttgatcgtggacaattcataccctagcttgcattcaacaagaagcatttaattgtgcatgtactattaaaccattcctttaatcatgtatctcagattgctaccaacccctgtgatgctccgaatggtttctacattgtgtttgcttcagtttaaacaaa

SEQ ID NO: 83389 - DNA, 1281 bp, Zea mays
  Clone ID: MRT4577_176063C.1
atgtcctctctcctgggttgctcgccgcccgggaactccccgtcgcgctttctcctagtgaggctactgggtgaccgccgcctctgccgccctacgccaggttccaggtcttcgtcactccctcttatcttcgtcgtctcattcgccggcgacgagcaccagaaatcctagctgctttgagtatggaggcgctgtttgggtgcaacaaacatggcggggacaaggccgctgatttggcctcgtttataatcgcgcaggctgccttggaggtgccaaggttacttgggctccttgccatgattcttcataatgaaatctttacatctggtggagaccagaatttgattactaggattctgggcaaaagcgaaaatgaaactaatcctgagaacaaagatgatggagagtccgatgatgataatgatgatgaaggagacgatgatgatgctgaaaacgaggaggaagatgatggtggtgatgagggatcagatgacaatgagaatgaggaagatgacgatggagatgatgatgatcctgcagccaatggcgaagggggaagcgatgacgacgaagatgatggtggagaggatgaagaggatgatgacgacgacgacgatgatggggacgatggcaatgaggaagaggaggaagaatctgaagaggatgatgatgatgatgaagtcccccaaccacctactaaaaagaggaaatgatcaacggctgcgacgagtggttgcttacacgcaggaatgctgcctgttcgtccctgcgcagcagtttactgtttagtgggtagagttttttagcttggtcgtggacaattcatagcctagtttggaaacgaaaaagaaacatttaattgtgcatgtactattaaaccattcctttaatcatgtatctcagattgctatcatggtttctaaattgtgtttgcctaagttttgtattgcagtttgacatgtctgggacgaaaaaaaaaaaaaaaagcggccggaaaagaggatgatgatatgatgatgatgtcccccaaccacctactaagaagaggaaatgatagatggctgtgatttgtggttgcttacatgcaggaatgctccctgttcgcccctgcctagcagtttactgtttagtgggtagggggttttagcttgatcgtggacaattcatagcctagcttggaaacaaaaagaaacatttaattgtgcatgtactattaaaccattcctttaatcatgtatctcagattgctatcatggtttctatattattttctttaatttt

SEQ ID NO: 83390 - DNA, 844 bp, Zea mays
  Clone ID: MRT4577_176064C.1
ggccgggagcatcgttcgagccccgatcgagctgacgaggccccatccccaacccctcatccatcgcttgctttctgccctctgggagctcgagcctcctcggttgaattgtgagtcgagctgctgagaaagacaagtagtgcgcgcgagatggcctccgtcctgccggatactgcgtcggatggcaaggccttgacggacgcctgggactacaagggccgccccgccagccgcgccaccaccggcggctgggcgtgcgccgccatgatcctaggcgcggagctgttcgagcggatgacgacgctgggcatcgcggtgaacctggtgccgtacatgaccggcaccatgcacctcggcaatgcctccgccgccaacaccgtcaccaacttcatcggggcctccttcatgctctgcctcctcggcgggttcgtcgccgacacctacctcggccgctacctcaccatcgccatcttcaccgccgtccaggccacgggggtgatgatcctgacgatctcaacggccgctcccgggctgcgtccgccggcgtgcgcggacgccaagggggcgagccccgactgcgtgccggcgaacgggacgcagctcggggtgctgtacctgggtctgtacctgacggcgctgggcacgggcgggctcaagtccagcgtgtcgggcttcggctccgaccagttcgacgaggcgcacggcggcgagtcgtcaccggcggcgagcaaggggcgctgtgcacgcggacggacgtggaggagtgaagcaggtggtgcggatgctgcgctctatctggtctactctcttcttcagcatccacgcgctgctgaccacttctcgg

SEQ ID NO: 83391 - DNA, 411 bp, Zea mays
  unsure (1)..(411): unsure at all n locations
  Clone ID: MRT4577_176065C.1
cggccgcgtgggtttttcttttttttttacttccaaacagacccttgctttgcttaggcaaatctctgttcaaaaggcagtatttacattgttttgctgttagtattcaggcaatttacaagctgaaagcctaaatgttaaatttaaaatatctagtaaaaatagataatatgcattccaaacaacaaaatacaggataaaagcaattctctgggaggggtggctctattttacttctgggcagcgggatcgtgggcctgataatccagctccaaagaaagttgttggaagtatgtggaggacgaggctacacttgcgacggnagaagcgaaagttcttctgaaaattgcanattcgcatctgattnctagnccaacagntangnccctcccagagaattgcctttatcct

SEQ ID NO: 83392 - DNA, 329 bp, Zea mays
  Clone ID: MRT4577_176066C.1
tttgtttttttgtttttttttttttttttttttttttttttttttttttttaaaaaatagccaaaccactggcttaaaatgtacagatttatcccacttttcacaagtttcactgtcagttcgtaaaatttgagcctgctccccatttaatcccccattttttacgtggcaattggaacacttaggaacaaaacccagcacaacccaaaagaattgtttaagggggggaagggcctacaaggaaatgctacccccaagcttaccccggagaacctgttttagcacgggcattgaccaacgagagagccatggccattatcatttgctcc

SEQ ID NO: 83393 - DNA, 444 bp, Zea mays
  Clone ID: MRT4577_176067C.1
gacatcaatggtcagagttcgaccataaccacatatatagttttaacaatgtctcaagttttgtgttattatctgttgactgccatatgtaatagtttccttttacaaggcaaaagcacttccttcccattttctttgaagtacttgaattcctatagtccattcccagatttctttttagccaattacaaagacaaagataccaagtccaaagttctaaataagatatagacaacttgactaaggactttgccaatgagaattaagggactggtacctcactttcaggctacgccatgaaacatcaggtctaatgatgaaggcgttcgacagttggacaccgttcaggctcacactcaggaacccagcatctgcggattctgtgtccgtatctcctgatgaggtgtcatccgaacagtacgaatggttgcaagggatcaacca

SEQ ID NO: 83394 - DNA, 202 bp, Zea mays
  unsure (1)..(202): unsure at all n locations
  Clone ID: MRT4577_176068C.1
cttnnttttttttcaatgaaaatatcactttcatggggttagcattaaaggctgcacggggacttccccagccgacctagatcgcctgaacttcagcacataacggtcttgacacgaagcagagccaaggttccttttttcaggcatgctatcgatcaaattaagaacacacggtaacacattaccgatgaaggatgccacg

SEQ ID NO: 83395 - DNA, 2593 bp, Zea mays
  Clone ID: MRT4577_176069C.1
tagcttctctgccgagtgcctggaaaaaaaattcggccgggatcgacaccttgaagcgtgctagggtttccccccgtcttatcgcttcgtcctcgttcccgcagccgccgcccaaaccctagcaaacccgtcctccgccatggccgacgaccactactcgtccaagcggaagtacgacgacccctcgccgccgccgcggcgcacggggttctcttctggcccgccgcctgcctcgccgcccgctggcggcgccccgtcgtacaacagcgttgcgccgccccccgatgagatccagctcgcgaagcagcgtgcgcaggagatcgcggcgcggatctttaacgccgcagaggccaagcgccctcgcgtcgacaacggcgacgatgacgtcggcggcttcggtggaggaagttccctgggtggcagcggtggtggtggtggtggccgcatcgggggcgcaggacttggcttctcgtcctctgccggtggtgggcatggggcttctatcccaccgttatcttctcagagcagtgcaccacagtactcatatggtggacatcagggtacaagcaaaaagattgaaattccaaatggaagggttggtgttatcattggaaaagccggggaaactattaggtatatccaacttcaatcaggagcaaagattcaagtcacaagagaccatgaagctgaacctggtgcactgacaaggcaagttgagctttctggcaaacctgagcagataagcaaagctgaacagttgatcaaagaagttctggcagaggccgatgctgggtcatccggtgctggatctggtggccggaaatacaatgcaacacagccaggtgctgagacgttccagatgaaaattgctaataacaaggtgggactgattattgggaagggtggggagactataaagtccatgcaggccaattctggagctcgtattcaggttattcctttgcatctgcctgctggtgatacttcaactgaaagaactgtgcatattgatggtacccaagaacaaattgaagctgcaaagcaactgatcagtgaggttaccagtgagaatcgtgctaggaatccaatgtctggtggctattctcagcagggatatcgccctcctcgtccccagtcaaactggggcccgccttctgtgccaccccagcagcctggctatggttatatgcagcctggggcttatcctggggcaccgccacagtatggtgcacctcagcaaccttatggtagctaccccccaacatctggtggctatcagactggatgggatcagtctcaaaaccagcaatctcatacaactccccctggtactgggtatgattattatagtcagcagcagcaacctcagcaacaatctgcccctgggacagctgcttctactgatgccactagctacaattatggtcagccttcgacgtatgcttcacagggatatgattctacctacactcagcagagtggtgggcagcaagcatatggacatgatggctacactggttaccagacccaagggcagcagcagggctactctcagcagactggttatgatcagcagggttatggcacatctgcttatggatcagctgcaaactcgacccaggatgggtccaactatggtggtcctggaggggccagtcaggcatctccagggcagcaaacatcaaacccagctgctggaagccaacctggctataccagccaaccgcccactagtgctgcagcaacttacccacctcaaggttcagctccatctggatatggcgctccaccatcccagtctggctatggcacccaaccaccacagcaaggcggatatggtcagggcgcttatgggcagccttctccacagggccagaaacctcctgcattgtcaccttatggacaggctccgcctcctggttctgctcaggctggttacgggcagtatggttacagccaacctgcttacggtgcaccaccagcttaccctggtgcacccattgcaagccaccagggctatggccagcagcagtcttatggcgatgcttatggtagtgcaagctatgggcagcctccagcctacactactgaagcaacacctcctgctgcatcccaggatcactctgctgcccctgccgcggcccttggaacaacagcttcgccagctcctgaaaacagtgggggcgcccaaacatccgctgaaacttgagcttcagcagctaattgggaacaaacattttccaagaccctgccgtgtggtttcctccgcgctgttgcttaatataattacgcatctaatttagggtctacaactacaagttatttctttttctgcctgttgtttttgaccccatgacttgctgtttccttgctatattgagtagtactttgcagtttttttattgctggttatatgtttggactggtgatatatgtgtttgtgcggttacccttgttggactctaatgggtacctaccggcttggtctggacagataaatgcccatctatatgtattctgagccctgttatgtttgctaaaaaaaaaaaaaaaaaaaaaaaaaaaaaaaaaagccttgttatgtttgctctca

SEQ ID NO: 83396 - DNA, 150 bp, Zea mays
  Clone ID: MRT4577_17606C.1
cacggcaaaaggcacaccccctgtcgcggcgcatccgccgcggggggggggcccgttccgcgcggcgtgaccagctctctggccagcgccttggcgccgggtgcgggcgcttatagcccttcttttctcgggccgttccttcgtttttcc

SEQ ID NO: 83397 - DNA, 1739 bp, Zea mays
  Clone ID: MRT4577_176070C.1
gtgcttttgtatgtctgctatttgtgctgctattttttttctattatgtgcactatgtctctttgtcatatacatatacagatgtgcaaactatatttttgcagaatcgtgctaggaatccaatgtctggtggctattctcagcagggatatcgccctcctcgtcctcagtcaaactggggcccgccttctgtgccaccccagcagcctggctatggttatatgcagcctggggcttatcctggggcaccgccacagtatggtgcacctcagcaaccttatggtagctaccccccaacatctggtggttatcagactggatgggatcagtctcaaaaccagcaatctcatacaactccccctggtactgggtatgattattatagtcagcagcagcaacctcagcaacaatctgcccctgggacagctgcttctactgatgccactagctacaattatggtcagccttcgacgtatgcttcacagggatatgattctacctacactcagcagagtggtgggcagcaagcatatggacatgatggctacactggttaccagacccaagggcagcagcagggctactctcagcagactggttatgatcagcagggttatggcacatctgcttatggatcagctgcaagctcgacccaggatgggtccaactatggtggtcctggaggggccagtcaggcatctccagggcagcaaacatcaaacccagctgctggaagccaacctggctataccagccaaccgcccactagtgctgcagcaacttacccacctcaaggttcagctccatctggatatggcgctccaccatcccagtctggctatggcacccaaccaccacagcaagccggatatggtcagggcgcttatgggcagccttctccacagggccagaaacctcctgcattgtcaccttatggacaggctccgcctcctggttctgctcaggctggttacgggcagtatggttacagccaacctgcttacggtgcaccaccagcttaccctggtgcacccattgcaagccaccagggctatggccagcagcagtcttatggccagcagcagtcttatggcgatgcttatggtagtgcaagctatgggcagcctccagcctactctactgaagcaacacctcctgctgcatcccaggatcactctgctgcccctgctgcggcccttggaacaacagcttcgacagctcctgaaaacagtgggggcgcccaaacatccgctgaaacttgagcttcagcagctaattgggaacaaacattttccaagaccctgccgtgtggtttcctccgctgttgcttaatattacgcatctaatttagggtctacaactacaagttatttttttttctgcctgttgttttgacaccatgacttgctgtttccttgctatattgagtagtaccttgcagttattttattgctggcatatatgtctggactagtgatatatgtgtttgtgtggttacccttgttggaccgtaatggtctggacagataaatgcccatctatatgtattctgagccctgttatgtttgctctaccgtcggaggtttctatgcccacttcagctggtgatggttatgtatgaaatttggtttcaatattgcgtaagacttatgtatcggaccataaaaggtttaagcagcatgaaagtctgcctttttgttttaaaaaaaaaaaacaaaaaaaaaaaaaaaaaagcggcc

SEQ ID NO: 83398 - DNA, 4744 bp, Zea mays
  Clone ID: MRT4577_176071C.1
ccggccgggaccttgtctacaagggttttccgctgtcttatcccttcgtccacgctccctgcagccgccgcccaaaccctagcaacccgtcctccgccatggccgacgaccactactcctctaagaggaagtacgacgacccctcgccgccgccgcggcgcacggggttctcttcgggcccgccgcctgcctcgccgctcgcgggcggcgccccgtcgtacaacagcgtgccaccgccccccgatgagatccagctcgcgaagcagcgcgcgcaggagatcgcggcgcggatctttaacgccgcagaggccaagcgtcctcgcgtcgacaacggcgacgatgacagcggcggcttcggtgtaggcctgggcagcactggtggcggtggccgcatcggcggcggaggactcggcttctcgtcctctgccggtggtgggcacggggcttctatcccacaattatcttctcagagcagcgcacctcagtactcctcttatggtggatatcagggtacaagcaaaaagattgaaattccaaatggaagggttggtgttatcattggaaaagccggggaaactattaggtatatccaacttcaatcaggagcaaagattcaagtcacaagagaccatgaagctgaacctggtgcactgacaaggcaagttgagctttctggcaaacctgagcagataagcaaagctgaacagttgatcaaagaagttctggcagaggccgatgctgggtcatccggtgctggaactggtggccggaaatacaatgcaacacagccaggtgctgagacgttccagatgaaaattgctaataacaaggtgggactgattattgggaagggtggggagactataaagtcggcacgagccaattctggagctcgtattcaggttattcctttgcatctgcctgctggtgatacttcaactgaaagaactgtgcatattgatggtacccaagaacaaattgaagctgcaaagcaactgatcagtgaggttaccagtgaggtccgccttctttctcgttgtgtatattcctgatctgtaattgctttgccgttttgcgctttatctatcttagttaggttgcttctggttcattctgtttattgtctcattttatgattttccccgattctttttgaaaattttgtttcttttgcttattgctgccctacattgattacactgcgtcttcgctaatcaatgtctgaaacatattgttcgtgggtacatcctcagcatgcaaggggattgttatatgtgttcttccctgtttatgaacataacttattaatggttttgggcaaggttcacaactggagtatataataaagcgaagaaacatatttgtaaactaacttgttatttatcaattagccactgctaggctcgttaaatggttttgtacagaaactgcatctaaagttttgacaagtattgatttgaaattcatatgatcgtttacatcatatggaatatggatgatactattttgggaaaaaaccagagagtccttgttccacttgttctattcagtggttattgtttatttgtttttccacatagagccaattagtgtcattagcttgccaggaggactgcaaactatcctggagagcaggtgtgttactgtttaatatcaatgccctactggatataactctgtattttcacttataacatgttttatggattatgtgagctgacgtgctttatctggcatctgtatcatttcaaatttttcatctgatcctcctgtttctctggagcacaatggatacatatacattgctttctcatggcttgtttgtgagaaagaaatgctctaaacagacccaggtccccaggtgtttcggttgtttatggtggtcatgcattccaatttaggtccttctgttctagttgcacatatttagttctgatgtttatgatcactacagaggcaagtttttccttttaattcactattcccacctatacaacttggtggttaattaagagttgtattctcatctacatagtctctgattcatgatacttattttatagttggtcccaaaaattaaggatctatattctctaaagtgtgcatagaccactaaagaagccagttaatagtgcaactaaagaagggttgtactggcaaaaataggtaaacaggctaaaatttgggatccaaatacagtccatcttatacataacttttatttggaatttggaatattcctgaatatcatatatgccaaactgttttgcaaccgaaggattcagaaaaccctgcatgaagctattttattatgtgttatctgtctctattatatgtgcctggtggatctgcaggttgctgtccaatgttgtttttgtgcttaaatagtatcatttgaatgttgtctttgatgcttcattctgtttaatatttttcaacctcagtaaagtaacctagctgatttttatatatcctgtcatttagcaatgaattgaatattttagatggtagtgaaagcacctttctatatcacatacatctctagacatctattggaactctattccacggcattgctattcaacatatgtatatgtatatgttcgtctagtccaatcttcattagccccatagttttgcacatgggcaacgctagatgggcatcactagcctgacgatttgatcggtgagttgctccctccatttttcttgttggttattgaatttatctacaatatgtcttctgcttttgtatgtctgctatctgcactgctatttttttcttctattctgttctccatgcccctttcatgtatacatatacacatgtgcaaactatattttgcagaatcgtgccaggaatccaatgtctggtggctattctcagcagggctatcaccctcctcgtcctcagtcaaactggggcccgccttctgcgccaccccagcagtctggttatggttatatgcagcctggggcttatcctggggcaccgccacagtatggtgcacctcagcaaccttatggtagctatcccccaacatctggtggctatcagactgggtgggatcagtctcaaaaccagcaatctcatacaactccccctggtactgggtatgattattatagccagcagcagcaacctcaacaacaacaatctgcccctgggactgctgcttctactgatgccactagctacaattatggccagccttcaacatatgcttcacaaggatatgattctacctatactcagcatagtggtgggcagcaagcatatggacatgatggctactctggttaccagacccaaggccagcagcagggctactctcagcagactggttatgaccagcagggatatggtgcatctgcttatggatcagctgcgaactcgacccaggatgggtccagctatggtggtcctggtggggccacccaggcatctccggggcagcaaacttcaaccccagctgctggaagccaccctggctatgccagccaaccgcctactagtgctgcagcaagctatccagttcaaggttcagctccatctggatatggtgctccaccaccccagcctggctatggcacccaacctccacagcaaggtggatatggtccgggcgcttatgggcagccttctccacagggcgagaaacctcctgcatcttcaccttatggacaagctccgcctcctggatctgctcagggtggttatgggcagtatggttacagccaacctgcatacggtgcaccaccagcttaccctggtgcacccactgcaagccacccgggctatggccaacagcagtcttatggcgatgcttatggtagtggaagctatgggcagcctacagcctacactactgaagcaacagctcctgctgcatcccaggatcactctgccgcacctgccgcggcccctggaacaacagctgcgccagctcctgacaacaatgggggtgccaaaacttctgcggaaacttgatcttcaacagctaattgggaacaaactttttacaagcctctgttgtgtcgtttcctccactgttgcttaatattacgcatctagtttaggctccacatctacaggttatatctttctgcctgttgttttgaccccatgaatcgctctttccgtgctgttgattagtactttgttgtttttttattgctggttagatgtttggactggtgatatatgtgcttgtgcggttacgcttgttggactctaatgggtacctaccggcttggtctggacatatactgtcctatatttgtttttagcctccttttacattggttattatgtgtgctgtacaactgtcggacgtttccatgagctggtgatggttatggatgaaaatttggtttcggtttcaatattgtttacataaaaggttcgtatatgtctggactagtgatatatgtgtttgtgtggttacccttgttggaccgtaatgggtaccttccggcttggtctggagtctggacagataaatgcccatctatatgtattctgagccctgttatgattgctctaccgtcggaggtttctatgcccacttcagctggtgatgatggttatgtatgaattttggtttcaatatttcgtaagacttatgtatcggtccataaaaggtttaagcagcatgaaagtctgcctttttgtttttgctgctggtaccaaaaaaaaaaaaaaaaaaaaaaaaaaaaagtactctgcgttgttaccactgct

SEQ ID NO: 83399 - DNA, 387 bp, Zea mays
  Clone ID: MRT4577_176072C.1
gtgccttattttttttttgaacaaggcactgacatgtctatttaaggacagggatttcgaccaatccacacggacttaatgcgcgctaccggccattgaaaaatgggggtcaaccaattggggggggggcgggctactaatatcctcaaacgtttttggggaacggataaaactcttcacatggcgatggggcaaagcttggggtaacccccttttgatgaagtagaacaatggcctcgaccattttgacccctcccaagatttcatgttcacaaccactctaaacttatcggtgtcctttgccctctttagaaccactcttcaaaaggttataggaccaaaaggtaaagtcgtacctaaggagccaaattatcacagtgctttctt

SEQ ID NO: 83400 - DNA, 255 bp, Zea mays
  unsure (1)..(255): unsure at all n locations
  Clone ID: MRT4577_176073C.1
attcggctcgctattaccatgccaaacctgagtttggagcgcatcacattggcaaggcaatggcacactcgagacaaagcatcttctacctcacgnncatactagggagaccgccgccgaacatggagccatnnnnnnnnnntaatataaatnnnnnnnaaagaaaannttttttttnnnnntnttntnnngggatccatatactgacaaaatttcctccgtccattatacatcagagactgtcgctgagggcaa

SEQ ID NO: 83401 - DNA, 475 bp, Zea mays
  Clone ID: MRT4577_176074C.1
gactgaaatcttgaaggttgccctgttaaccagatgtgtttagctgcaactacaaccagaccttaaagccattctggaaacagtaataacttaactgaactatttcgactctctatatttccaaattaagtccccgggcatctccagagcacctgccaacttctacctatgtgtttgggcgctcaaagagagcacagagcacaattattagtgtgctggcttgcccactgttgtgactaggtaggatcagttgcatgactcaaggaggatataaactaccatgaagatgtatgaattaatcccatgtaatgcagattactttataacctaatttgttgattacatgagactggctctatggatgatggtcaaatgctactcattctgtaattgttgttttcttcttcttttttgaactacgccatcattgttatctcgcattgcaacagtctggtcttccttccagtaacttctg

SEQ ID NO: 83402 - DNA, 138 bp, Zea mays
  Clone ID: MRT4577_176075C.1
cctacgcgtccgcccacacgtgcgagaacccgtctgtgaacgggagctgctttacatttgggcaagttactccaaggtataaggccttgatcttaacaacatcataatgagggagtatgtatggttacctgatgatgt

SEQ ID NO: 83403 - DNA, 181 bp, Zea mays
  Clone ID: MRT4577_176076C.1
gggcgcggcgcgacctttttttgtggatcccctcgtctaaatgtaacttaccctgatccttgctcaaaaaattttctcgagctatcacccggatgagttattgcacaatgctggtggagccgtataaccggtgcggtgactggcatcatgcgttggaggtggaagacggcgccactgtttg

SEQ ID NO: 83404 - DNA, 382 bp, Zea mays
  unsure (1)..(382): unsure at all n locations
  Clone ID: MRT4577_176077C.1
tacaattttgcctcatgttccattggattcttttttttgttgtcatcatatatgtttagcaggcataaaagaagaaagaccatttcttgtggagatttatgctgatgacataaatccaactacaactataaaagggaagcactacatcggctctggtacttcagtgaaaagatttcaccatatgcaggtccatgtttatgacaaatcatagttctccgttacattacatcgatataatcttcacacgaagtctcaacaatatttggttgctcacttacaccccaccctagattaacatgttctaatttttctttgttaactgctgcaattgacacatgctaaatgacaatttctttataatgatccaattgagtttgtnnaa

SEQ ID NO: 83405 - DNA, 1126 bp, Zea mays
  unsure (1)..(1126): unsure at all n locations
  Clone ID: MRT4577_176078C.1
cttaaagcaagagcacttcatgatcttgggaaagataaaggcctaatgaaaggcaaaacaattgtcgatgttgtgggaaagttcacctggacccaataaggcaagaaaacggcaaagagcacaatagttctcatatgcctnattattcccttgattcatgattataactttgcctcctgatttaatgaccctttcctatcatttgagatatacaggtcaccctaaggcataaaagaagtggggccatttcttgtggagatttatgcagatgacataaatccaactacaactataaaagggaagcactacatcggctctggtgtgcttaactatatctttgattcgcgaatatagttttgttattaaattagtgagaattcaagctatatccttttgtgctctctgacattatgacatttgtttagcaagtactttagtgaaaagatttcaccatatgcatgtccatgtttatgacaaatcatagttatccgttacattacatcgatgtaatcttcacacaaagtctcaacaatatttggttgctcacttacaccccaccctagattaacatgttctgaattttctttgttcactgctgcaattgacacatgctaaatggcaatttctttataatgatccaattgagtttgtaattgcacatgtttttgccaagtttcatcaagtactgctccaacagaacaagcaatcatggaatattgagctaaggcactggagtctcaagaaaaggtctaggaatcctaagaatggatggataacgatgcttaaatatggatgacatcatttatgtcttgataaccatctacatgccggtgataatgttttttgacattcattcatggggctcacctttctaatgtgtaagaaagaaaactacgttgatcttaatctgagttgtgtgttgatggttgatgtagtaaagaaggggcacttagacattgttgttcatggatttatgtactgccaacaaaccttcacttctgattcttataggcggtgcctggctctaatggcttgcatgtattttatgcattgactacatgataagaaccgtgcacgttgttgatggcccaattattacctctgaatcaaggtaatgtttaccttt

SEQ ID NO: 83406 - DNA, 644 bp, Zea mays
  Clone ID: MRT4577_176079C.1
ctctgctatgcccactggattttctcactcctataagggaaaagttgtgctatgtggtctacggaatgggagtatagcccctgttgatgtacggcaaaaacagcataatcagcctacctggagtagcttcatctagcaatgctaggaggacagttcctatgctgcccacaaggcatggtgggaagcaaagaaaccaggctagcaaggataaattttcaagagttatttctatgtcgtcagcagtttgtagcttggtttcactctcatcagatgagaactacttcttaggaagctccatggatggatctgtaagttatacttagaccattttttagtgttatgagcaagatttttttctcaaacattgtatcattatatttagaatacaaaaaaatgggcaagagcccttacaaatctgcacagactcaacaccgactcacacacatacaacaataacacctttacccaaggtgacgatgacctgacctagaaaactctactcaacagcggcaaggaagattgaaatgcctctagcccgggttaaactccaatgacaaatcatcactagcgagcaaaatagctctagctagattaggtggaaaaccctcaaacacacactttgctcaggatctgctaggattgat

SEQ ID NO: 83407 - DNA, 323 bp, Zea mays
  Clone ID: MRT4577_17607C.1
ggaaaatggaataaaaaaagactgtaataaaattgtcctataaatataaatgtgtaaaggggggggggaaaaaaacttctgaaaaaaaattgtgtaaagggggggtcaaaaaaatgtgtaaaaaaattggcaaataaaaataaatggcctttggaaaaatttcaaaactttacccgggtgtgcaaaatttggaggggccggattttaaatggtccttcccctgtcgaggcaattggttcttaattaaaaaaaaaggtttgaattcgtaaggaaccctattaggaaggttaaccaccggaaatggataaacaaacattggtttt

SEQ ID NO: 83408 - DNA, 369 bp, Zea mays
  Clone ID: MRT4577_176080C.1
tggctctggacctttgggctggtttatgtgcttgtttatgtgcttgtacttacttatttatttatctagatttagtcgtatttctctgtcttcccagcgtgttattgttggttacggtcgttcgtttattgcttctttttattatacggttagcttagtgtatagacacagtagtaactatccaacgtcagtcttctctttttgcgagttgcagtcctatctcgtacgtatcttggttacgggtttacggtcacacaagttgtcgagtcgtgacgttatagtattgtgtggttctaagtagtcttccctcctagtagtatagtcagtcagttacggggagtaagggggcggtgtctgtgtcgtcgtctc

SEQ ID NO: 83409 - DNA, 386 bp, Zea mays
  Clone ID: MRT4577_176081C.1
tttttggttggttttttggaagaaccatctgatctaactgcttattattttgccaaagttgcgcacgcctaactaaaaattacacattaacagcgtggacacacctgtaaccactttgttcaacagtaggggaccaccacatgatgcatcaacagggaaaagcactgggatccatcaacagtggccctgaaacacggccaaggagacattgaaaaaaaagagagaaccaattcttttgagaagcacaacctacacagtacgcaatttttttctcccgcaccctccaggaatttaccgtcacgacatggtatgatcatacccttcccttggtttcgccagattaagcgaccgtgctacccatgccctagtcctttatcattcagaga

SEQ ID NO: 83410 - DNA, 322 bp, Zea mays
  Clone ID: MRT4577_176082C.1
ggggggctccccaaacccggaggccccgggtcccctaaaccccccgccccccaccgggggggggggggcccgcaagggtggggccggcctgcaaaggacagaacccagcacagccagcccccggcttggggggacccaccccaggcgagggcaaaagaagatgagggaaaaaaagccgggggcaacaagagtgttgggcccatgcgacagagggccaatgcgaaggggcgcaccggggcaggggcaggcccccgcaaaggcaggctctttcgagggtgagcgctggggcccccgcccgaagggtggagagggggcgcctcgg

SEQ ID NO: 83411 - DNA, 354 bp, Zea mays
  Clone ID: MRT4577_176083C.1
tccaaaattcccggcgcgagcgcacgcgtgcgggcctcttatccttaaaataacctcttgtgtggtgatcacatacactcacattcacttggggtacaagggggcattccagcccttcacagtcataacacttcacgcactattccatactcaacctccaatttccttaacccttctgaaaacaatttccccttaaatcaaccattactcaacgccgggctgcttaaatgagtcagattatctttcatgtgcaaagaatgtccaacaggcaaatcaacacttttcaacctttgtgaaagtttacaaatcccggaccagccgaaagttactctacatcactaaattcaacaacta

SEQ ID NO: 83412 - DNA, 838 bp, Zea mays
  Clone ID: MRT4577_176084C.1
ccgggattgcagaacatattggcactagagatttagtgcaggaattcctggccttatggtttttccaacttgaaagagtggacaatgccgaagcttaaaggggaaaagaaaaagggggaactcgtccggctgccctaccattataagttcaagaaatactttaaagtaccctgccaagaatggcttgatacaattgaaataatgagtaatgaaattcttgggaattactctaaaaaagaggaccaactaatgacagcggccttcggcactcggccgaaacgaaggctgaacagggtacttgatgccataggatttgaatacgctgactatggtcgactgggcggagatgctgggggcccgaagcgaaaaaggattgccagcgctactgacgaagaggtcgtcaaggtagccaaaaagaaaaagaaagattctgaagatctgagcgctgaatagttaaatcctgagccgaaggtggccactacaaaaaagagaaaaaatgcatccccagagccggaaacgccagtccgagaagaagatactcctgcttctccttctgctattgaagtagaggaaattatgaaggtaatgactgaacctttgcctttcaggctaagtccgctggcactggaactgacgaagttttttcagaaggacaaggcagcttcggcagtagaaagtcccgcgaagccgaaaaaacggagaattattcaagtgacagatgtgatccatcagacaccgccaccggcgacggtgtcaaaaattgtctttaccgagactgccgaagccgaatcactggaatgaaaactactgaagctgaaaccggcgaaaccggaactac

SEQ ID NO: 83413 - DNA, 340 bp, Zea mays
  unsure (1)..(340): unsure at all n locations
  Clone ID: MRT4577_176085C.1
tctttctgtttcggcgcgggcgnacaaatagcangggtaaaattaatagtgcgaagcgacaataaatatctcacntnactccattcacaaactcctagccaccctttgaaagcataatgcctgtaggaagaagctaaagtattatctttgtctccagccaaccaacaccaatttttcaatcaataagacagttatgattgtccgtgtttctgtaggtaattttaaatgtaagtcttttcatcttgatactggtaactactcattnngaattgatgcttttacccgcaagacctcttttctctactttttctacaatgtatcaaacaattatctttttatg

SEQ ID NO: 83414 - DNA, 489 bp, Zea mays
  Clone ID: MRT4577_176086C.1
aaggcattgcagatgaaatgggtctagaggcatcgtttccagtaaaacgtcgtgccttgaggaagaaacaatttgatgaaagtaatgatcaagaagaaattctagaggctgaaagggtttttaaagtgaaatatttttggttgtagttgatatggcaatcacttctttgaaaaccagatttgaagaacttatggtgttcaaagatatatttggttttttattgagatcaactatcctgaagtcattgaatgatactgaactagaagagtcttgcaccaaacttgcagacactttctctcataatggtttatctgatgttgaggtgcatgatcttatttctgaattaaagattttgaaatttactctaccagatagcatattgtctgctatggagatattcgagcatgtcagagatttagattgctatcctaatgtcgcaatcgcttatcgaatattatttactatgcctgtgacggttgcatcagctga

SEQ ID NO: 83415 - DNA, 474 bp, Zea mays
  Clone ID: MRT4577_176087C.1
acacgcgcagctaatcctgaccgaatgccgccagctccagagcctgaactaccacaatatcttcgaccacaagcataagcccgccttcgacttcgacgaacaaaacagtcccgacccgcacatcctcgaagtggatccgcttcgtcaccgactccatcatcaagccgctcgacgactgcattaactgcatgcccgccaacgtctaattctgatgaggtgctccgttggatctgatgcgcggaaggataaggaactaggatgaacgttcctccttgcagatcgatgtgttgcaggatcctgtaaaagtaggacgggcggtgataacattccatgtatcatgctgtcgtattggaggagctctagaaaagtgaaacatacctgcgggcgattgcgctcgtcctggggaaatatccatgctcagtagaacaccgtacaccctataatatgatgtggttgcttcaattgtggacctat

SEQ ID NO: 83416 - DNA, 304 bp, Zea mays
  unsure (1)..(304): unsure at all n locations
  Clone ID: MRT4577_176088C.1
gcagcattcaaaaacacaccaagcgtagcgcactagcaacaacctaacaacaaaggctaccaagatattagctccttcgtgctgcttttgcccttttagggagcgcaacacatgcgtacatatatcacacagtgcttacttgttcctagcgccattattgcacaattactcccacccggtacttcaatgggcttcgaacatncagccgtgcaagcgtacatgctacaactagcgcttgcggcgagcgtggtacaacatccaattgcccaatatgtacaacaatccttggatcatctaaacctac

SEQ ID NO: 83417 - DNA, 686 bp, Zea mays
  unsure (1)..(686): unsure at all n locations
  Clone ID: MRT4577_176089C.1
tacccacatactactccgcacgcgccgccgccgccgtcctattcctctgacaggagaagcctgcggcatgtcaatcacataccgnccgtataacggcactttccgaaaagatgcgcatctttgtgaaaacgatgaccgagaagaccatctccctctaggtcgagagcaatgaccccatcgacaatggcgaggtcaggatccaggacaatgaacggatcccgacggaccatgagcgcatgatctttgtcgccaagcatgtgaaggatggccgcacccttgtgaactataacatcctccacgagcctacgctccaacatcgtgctcatggtccacggacggcatcaattgtagacctacgctgcttgcgctcgctgcacagaactaccaccacaagatgatctgcaccatatgctatgcgacgggtgtgccctagggctgccaactggctcaagaacaagagcggtcacagccacctgctgatggccaagaagaacatcaagatctgctgtgtcgctgctaggcacttacctgaacaatgctgctagttcgccgaaccgtgtctgctgactaactgtactgtcggatgggtgaagaaccgtgaccgtataacgaacttattggccttatgctatgatgtaccacgagtgacaatgacgcgatactatatgacgataccgactatgcta

SEQ ID NO: 83418 - DNA, 151 bp, Zea mays
  unsure (1)..(151): unsure at all n locations
  Clone ID: MRT4577_17608C.1
ttttgatgagtaagagtgaccagtaaaagaagcggcttggagcattttggttttaccatttctttctccaatttgtttgatctaggaatgataaagttaattggcttacatatnggagtatgtacatttanatatttatcttttctctttc

SEQ ID NO: 83419 - DNA, 302 bp, Zea mays
  Clone ID: MRT4577_176090C.1
gaaaaagataacaatcattttttttacttatatattatacctggccattccaaagggtcatagaagaaattgctcacactgccacccttggtgatgggtgacactgcgccccccatcccgcggttactgactaaactagggagcttggtacctagacaacggctccattaccttattactacagtacataatttcctcaggaataaacaccgcaggcagttaaattgcaatggcaggaacctgcctgggtgagctgaaagcccaacatagccgtcagctgctgcgctaactgggccaacata

SEQ ID NO: 83420 - DNA, 327 bp, Zea mays
  Clone ID: MRT4577_176091C.1
gttctaagtacgagtcggctgttcaagtctccttgatgagccggcgggtgaccaagcaagctcatacatctgaattgactagtcagactgcatgagcgctctggggactaatcagactcaagaactgagtttcatgtctgatctcgacgtacagcttccatctgcttttgatccagttgcagatgcgaatgctgatgattccagtgctggtgctagatcaaaggactatgtgcacgtgcgtattcagcagcgcaacggaagtaagagtctgacaactggtccaggcttgcagcgagagtacagctactacatgatcctcaaggatct

SEQ ID NO: 83421 - DNA, 327 bp, Zea mays
  Clone ID: MRT4577_176092C.1
ccttttgcgagagaccaccggcgttgaagaggcgcgacccggaagaggcgctctacacggagagctatgccatatgctgggcgttgaccatcgtgacgaccaccgttcacctgggcggcacacccacccgatgagaaggtcgactagcgtagcaagcgagagccgtgtcgacagctgaggcgagcttcagggcgatgtcagactggggtctgatgcagaaagatccccatcaggagatagaggaggagccgcctattggatggaaactggaataccgagcaaaagatccgaacttccatcacagattccttgagacacggcttgaga

SEQ ID NO: 83422 - DNA, 328 bp, Zea mays
  Clone ID: MRT4577_176093C.1
agcatagcggttcttcagccaaacacgtgtcctcagccaagggtcttatacttcaaacaagacagaaacatacaactgaacccacttaatgcatgtaacccacccgctctcaatacaggaagtgactatctctcacaagacagagaaagatgaccgattaacccaatttgatcataattgaaatcatggatgtggcatagcgaaacctttccttgacaaaccacatcataagataataaaagccgggctatctatcgcgttgaaccaaacacacgcaaaagcccatcaacacacacatccatcgcaatcataaaccttgtgactatac

SEQ ID NO: 83423 - DNA, 943 bp, Zea mays
  unsure (1)..(943): unsure at all n locations
  Clone ID: MRT4577_176094C.1
aaagaccttcaccgaatgacccctgcccatgatccgcatgacttctgaaccggcaccgctggcataaccttcgaattcatcactatcctgaccgacgacggacaaatacataccaagggcggtgccaactttcgatcggaatcgacaggggttcaccgtctcgcagttcgctgctgatcgacggcgactgtaactgaaagaaagtttttgctagtaaaagtacaccataggaaacatagtgcatatcgatggctttgaagtagtaatgtatacagtgaacataattgtatagccatccgagaagccttactagatcataatacncacgaggcgtactatgagtatattgtcgacgcaacctagaacataggtagtttactgtgactgctgccaacggaacaaagaactgattgaatactacttccccatgcatctactgattcacagatctgaatagcaatattgggctgtgtaaaaataatactgtgnatgtgatagtgaactcacatgagccaactgttagcatgcattacatcgccgtacctgcatgcgatgtccacactagaagatgacctggatagaaaccttgtctctgcctatgatcgctgaataaacgcaataaacgatatcgatgcaaacactttcaccggaaaaaaagtgatgcacatagaagaatactcacgtccagatcaagaccctcacgccctggacacttaggtttcatctgctactttccacttagaagcacttgaatagacatctgataccactgaccttcgcgttttctaccctatcattctactagaaactgaacttgacatgcgcatactttagcaagctaggacggagatgatgcttaatgcactaggcgtagaactgtcattacaaaaagttaatctccgtcctatgattcgggatgcacatggccgaaagatgtcaaaat

SEQ ID NO: 83424 - DNA, 416 bp, Zea mays
  unsure (1)..(416): unsure at all n locations
  Clone ID: MRT4577_176095C.1
cccgggncgacccacgcgnccgcccacgcgnccgcggacgcgagggggtttgaggggggnaaagaacggcncnccggcnccggggagancancannncanancnnncgncccanncccgacaaaaaaaaaaaacngnacaancnacnacaanccagcccgngcgcgcgncacngccacncgcgcgngncgcaggggggacgcccggccngcncgacnncnganaccngcaccccancnncnnanacccggccggccncccaccggcgcggcagcaccnccgacnccgcccacacccacnggccgncggagccaccggncaccaccagccggaaccgcagcggccccggcggcgccagcgccgggcaccacgccggcccgaggacccgcgccaagaaccgccagnnggacgacccca

SEQ ID NO: 83425 - DNA, 292 bp, Zea mays
  Clone ID: MRT4577_176096C.1
aggatatcctgtcagcagcttacacatttgtctatctccatgcttcctttctttagttggagactggattattttttgttgggataaacttagtacattatcagagcatcttaactctggatatgggtgcctttaagggatatccaataaacaaaatttaaacacatttggtttgtcgtataggtacaaagccagcacatgcttgggcaggtttgatcagtttcactaggaactgttcactaattgactgtctcagtaatacaattgaatagcctgcaactcagttagccat

SEQ ID NO: 83426 - DNA, 215 bp, Zea mays
  Clone ID: MRT4577_176097C.1
cggcgggggaaaaagttgcaccgcacccaagataacgacaaataacagtggacacggaaaaggcaattctggctgttttttttttttgacaaaaacaatcagcaggggggggggtgggggggtaaaaagaagggggccggcgacaagcgtcagtcagccattgttgttccaaaaccgcgccaggacggggtccctgtcgccgggtgtcggggtgt

SEQ ID NO: 83427 - DNA, 490 bp, Zea mays
  Clone ID: MRT4577_176098C.1
atcacagcaaaccacgccacgattcctaagctcgattttttaggtaaatcgtgctagcaccttagctccaaggccataaatcagcagctaaaaaatgttactatccaacaaggtcacggggggggggacaagtttataaatgacgctagttgttaagctctggtactaggatgggcgtgggcaggacacgcatagatagaaacgcttaaaattgactaaaggctggtttgggggtcaaagaattaaaaaagatttatggaagagaaatctccttggtacccaaagaaatatttcttttttggggaccatcccaagctgcttgtgttaacaggttttcacaaacttcttgggggaactaagaggccctttagtcacatgataggctggagcacacattttttcctctaacgcaggggctgagcttcaatgggctttgaaggcccaaacctttgaagcgccagaatcagtacagaccgaataatgccaaaag

SEQ ID NO: 83428 - DNA, 538 bp, Zea mays
  Clone ID: MRT4577_176099C.1
ctctattccttttttatttatggtgatgaggctgcaagcctgcagctctgtagagtaggatacaagcggttttagtaacaaggcgatcaaaatggaacggaagaagggctcaccgagaacgaacatgaacaatctaacacaaaacatttaatccaacagcccagaggggaaaaaagaagaagaagaagaagaaaaggatggagaaaaatatagtcggttttttgcgaataaaaaacatgtaggtaaatggagagcaagaaatcaggagctcagaatttgtacggggactcctcggcgccgccgccggggtcgtacaggtcgaagggtgcccagagcgcatcgagcgggcacggccgcccggcgcccagccgcgcccacggcttgccggacccggaccaatgcagcaggctcacgggccccgggtgcaggtcgcggcagctgcccaggacattgtcgccgccgaggccgtgctggttccaccggtgctcgatcggcgccacgtgccccgcgaacaccagcaggaagggcgctcgtgccg

SEQ ID NO: 83429 - DNA, 294 bp, Zea mays
  Clone ID: MRT4577_17609C.1
cccacgcgtccgcccacgcgtccgaaaaaaaaaaaaaaaaaaaaaaaaaaaaaaagagagaaaaaaaaaaaaagaagaaaaaaagtacaaatgatatatagtgattcagatttatttaaacgtacttgcatatgttataagcgattagggggtgccattttatgggttttaattttccttcggtttacttgggaggccttggtatttctttgggtattttaaattaatttgcttggccgtatttttacatttcgaaagttggaaaaattttgaattgtccgattttatttgctt

SEQ ID NO: 83430 - DNA, 500 bp, Zea mays
  Clone ID: MRT4577_1760C.1
cccacgcgtccgcggtcgcgtgggtccggctacaactttcgcgacgtctgcgacatcagaaaactgagctcgccccctcttgccttccctcctccgccggaccgctgctgtccgcctccaaccctccagttcgacgcaggcggcgacggcggcgcgccgagatgaaggtctccgtgaagacgctcaagggatctagcttccagatcgaagtggagcccaccgacaaggtactcatcggttgcgctcccgatctgtcgctatgtttctagttgctgatgtattggcggggctgcttcgctagatttggctgctttttaggtttgtttggggtctaggatttggttggttccgctgtggaggagatgagagtattgaaagccgcgggcgaagctgccgtgaatccaatctgaaggttgctgatttggttccggtggtgcgtgtggaacacgcggaacggagagctgttgcaaacttcgactgtggattttctgggttcaatt

SEQ ID NO: 83431 - DNA, 1263 bp, Zea mays
  Clone ID: MRT4577_176100C.1
attgggtacctcgaggccggccgggactgcctgtgcctgctgtgccgcccagtccaatggagagggccgcgtcggtcatctcctcgctcctcggcggcggcggcggcggctccggggcacaggcggcaacggtgaagtccgtcctcgtgtaccccatcaagtcctgcaggggaatctccgtgccccaagcccccatcaccgccacggggttcaggtgggatcgccagtggatgctcgtcaactccaaagggagagcatgcacccagagggtggagcccaagcttgctctggttgaggtccagatgccgccggaggcctttgccgaggactggcaccctacgcccgacgaccacatggttatcagagcacctggaatggaacccttgaaggtccctctttctgtggaatgtgccacaatcagtgatgtctctgtgtgggagtggactggcgctgcttatgatgaaggtgctgaagcagccgaatggttttccacatttttggggtgcccaactcgactggtgcgctttaacgaagattcagaaactaggctgactgaccctgactatgcacgaggttacaaaaccatgttttctgatggcttcccttatctgatagtctctcagggctcattggatgcactaaatgagatactcaaagagcctataccaattaaccgcttcagaccaaatattttagtggaggggtgccacccatatgcagaggatatgtggaaatcagtaaagataaacaagttaacgtttcaaggtgtgaagttatgtggccgttgcaaggttcctacaattaaccaagacactggaatacctagccctactgaaccaactgaaactctgcagacatatcggtcgggtgaagtgctgcttcgtagccacaaaaacaaacggcaggtgtactttgggcaaaatgcagtctgcaaggaatctctgtcagcaaatgtggaaggaaggatcgtcaaggtgggggatccagtttatgtgacacagtcgttctcttcatctgttgaagtaccagcctgagtgaccgaatcaggaccccggctacgtaacaaccacctatataatttttagcactattttagatttatatttgctgaggaaagttaaattaatatttacaaagttttaaatttaagtttaaagagttttagttaagtttttctataagaaataattggttattgtccattatattaaaatcagcgtggatatttaatttgagagtactaaagaatattgaggttaagtt

SEQ ID NO: 83432 - DNA, 1303 bp, Zea mays
  Clone ID: MRT4577_176101C.1
gtgtgttcctgtagaaggacgggccggcggagctcatctctttgaggctttgagctggagtgctggactgcagctgccagcggcatttgcgtgcagcactgcctgcgcctgctgtgccgcccagtccaatggagagggccgcgtcggtcatctcctcgctcctcggcggcggcggcggctccggggcacaggcggcaacggtgaagtccgtcctcgtgtaccccatcaagtcctgcaggggaatctccgtgccccaagcccccatcaccgccacggggttcaggtgggatcgccagtggatgctcgtcaactccaaagggagagcatgcacccagagggtggagcccaagcttgctctggttgaggtccagatgccgccggaggcctttgccgaggactggcaccctacgcccgacgaccacatggttatcagagcacctggaatggaacccttgaaggtccctctttctgtggaatgtgccacaatcagtgatgtctctgtgtgggagtggactggcgctgcttatgatgaaggtgctgaagcagccgaatggttttccacatttttggggtgcccaactcgactggtgcgctttaacgaagattcagaaactaggctgactgaccctgactatgcacgaggttacaaaaccatgttttctgatggcttcccttatctgatagtctctcagggctcattggatgcattaaatgagatactcaaagagcctataccaattaaccgcttcagaccaaatattttagtggaggggtgccacccatatgcagaggatatgtggaaatcagtaaagataaacaagttaacatttcaaggtgtgaagttatgtggccgttgcaaggtgtactttgggcaaaatgcagtctgcaaggaatctctgtcagcaaatggggaaggaaggatcgtcaaggtcggggatccagtttaggccttgttcgtttacatcggattgtacccggaatcattccggctaatcaaagtttatataaattagagaagcaatccggctcggaatcgttccgacccaccaatccgacacaaacgaacaaggccttatgtgacacagtcgttctcttcatctgttgaagtgccagcctgagtgaccgaatcaggacggctatgtaacaaccacttgtataatttttagcactattttagatttatatttgctgaggaaagttaaattaatatttacgaagttttaagtttaagtttaaagagttttagttaagtttttctataagaaaaaaaaaaaaaaagaaaaaaaaaaaaaaaaaagcggcc

SEQ ID NO: 83433 - DNA, 305 bp, Zea mays
  unsure (1)..(305): unsure at all n locations
  Clone ID: MRT4577_176102C.1
cttctggtctcggctgttggtggtgcgtttgcttggtcgtttctcnnccgctgtgccngggcggtttgtggctggccgccttgtttttttttgttnnnngtctttggtggggctgtttttttttgcnccntttgctgctgttcgtgtgggtggtgttctcttncctgnncgttgcggcctttcgggtgctgttgccgcgntgcttgtgtcttcccctttcttcccgccccgttccttcctgncgggtgctttgtgttgttgcttctggcttgctcggttnggttggtttggcccttnggtttttt

SEQ ID NO: 83434 - DNA, 301 bp, Zea mays
  Clone ID: MRT4577_176103C.1
tcggcgccgccgcgctgctgcaagcgccagttcgacggcgtgcgaatagtacactctaacgccgtcatggggcggatgcacaggcccgggaagggtattttggccttagggcctgccggacaaaaggacgcctcctacctggctgaagaccgccgcttcgaacttgaagaggatatccccaaaggaacccaaaaaggcccagatgccgggacatatgggggtcttgctccgagaccatcacggtttcccccttgtaaagagtgcaaccgagagcaaaattctccgaatcctaagggcccat

SEQ ID NO: 83435 - DNA, 301 bp, Zea mays
  Clone ID: MRT4577_176104C.1
ggtgtggggcttgtttttgagaaaagatgaacttcaaaagctttccatatatatttttaaggaaataattgatcctgagcggcatagattaacactaccgataaatatctaggaggaagaggggataataccgccactagctttatgcaaaagacttggttaggtgcgtccgccccaagtggattgctgcgggtcagaaaactcatggccatgatccaagaaggagttggatgttagcacttatgccttgttgcatgcaaagaaaacttttagtacaagctcacgggtgaaccccattccc

SEQ ID NO: 83436 - DNA, 168 bp, Zea mays
  Clone ID: MRT4577_176105C.1
gtttcatcgtgttcaagatcaacgagaatctgcagcaggtggtggtagacaagcttgggggaccaggtaaaagctacgatacattcagggcctacgttcccgccaacgatgtgccgctacgcgatgtttgattttaactttgtcacggatgggaactgccagaagagc

SEQ ID NO: 83437 - DNA, 394 bp, Zea mays
  unsure (1)..(394): unsure at all n locations
  Clone ID: MRT4577_176106C.1
aacgggcccgaatcccgggccgaccaacccttccaacccttccggaaaacctgcctttttttttttcaattttccggggccaacttaatgggtggggtttctggaataaatatccttccccccaaccccataggcccgaatcttgaaatgggttaaatcttcgaaataatggatttctttagtgtnaaaaaaaaaaaaaaaaaaaaaaaaaaaaaaaaaaatttttaaatttatatataataaaaaaaaaaaaaaaaaaaaaaaaaataaaaaaaaaaaataaaatttgggccgccctccttaatgaatcaattttacctacccctttcttccaacttattatttttttatttggtcccctaaatttaaattatctgccctcttttttaaacct

SEQ ID NO: 83438 - DNA, 501 bp, Zea mays
  Clone ID: MRT4577_176107C.1
ctcaggccacgcggtgcaatcgaatttttaggggaagcaaccgggccgagtgtgtgtaaagagacccaacaccactttacgagggacatcgggggaaaaaatatgcggggggaagcaaaaaaatggggacatgagataattgggggggaattgcggcacaccggttggggactcattcaactcccccatggtcctccttaacaggatttcctgggacctgggggcacattggctaaccttttttttggactcatccgggttttttttccaatccttggggggttaaatatttggtggagactcgggattcggagtaaagaggattgaaatgaggctcaaaactatactttcaaccgggggcgctggggggcaccgtgcggttggaaggtcataaccactgggatcttcaccaggggggggaagaataaaaatggaaacacgcccatccggagaaacattcgggtgggacatcccaaaagtaaatcttactgaggggggggt

SEQ ID NO: 83439 - DNA, 546 bp, Zea mays
  Clone ID: MRT4577_176108C.1
tttgaattcggcacgagggcaagagcctccaacaagctagctggttaaaccgaaccgagctcgccatgggtctccagcggaagattctgggaaagagaaccacccggcaggtgcctgaagaagatgttagcattccgcagctggtggagctgcggccgctgaagctgaagcggtcttactcccgcggcggcgacgaggacgaagaaggtccacggcagctctcgccgctgtcgtcggcgacggcgagtggcgctggaaccgaacgccccccgcgctgcccgccggcgccgaagaagccgaggctgctgctggggtgtagcctggacgggttcaaggtgctgcgcgtgatggacctgcgttgcttcctgcgccgatgagccaagtgacatgcatgtagcttttgagtttcggctgcagcatccccgttatagtgtccagtccaactcccagagatgtgtactatgctctgctctgtcgagaccttcatctagctaatgtacaagtgtgagtgtcgataatcatagctttgcacgcacacatatatgc

SEQ ID NO: 83440 - DNA, 296 bp, Zea mays
  Clone ID: MRT4577_176109C.1
gttgaagttttaaatttaaatgaaatgtacaaccaaaatctccaagacaaaaaaaagtataattccatttatttatttatgattttaatcatttaagcaaatacacacataaataagagtttctaatgcatatcctttatgcataaatattttagtgaacgtttctaaatatatataattctatagagggaaattttaatttatatatttttttaatcttttattagatgcacatttattttaggagaagtagtttcaaatgtaagagaattctgattagaatatattttatttga

SEQ ID NO: 83441 - DNA, 279 bp, Zea mays
  Clone ID: MRT4577_17610C.1
acgtcctaatttggcaaataatcccaaacattacacatttgggggggggtcccagtcttgttaatcctcaaaattaaacggtggtgttgggcctaaaaaaattattttacgtccacgagatgggaggggcccttgttttacgggttttcatactacactggtacacctgggaaataggttttgcattttcttttgggaatttttaaacttttttaatcaagggccatggttttaccacgtcccccaagttaacccggggttttttccacccaaaagctt

SEQ ID NO: 83442 - DNA, 825 bp, Zea mays
  Clone ID: MRT4577_176110C.1
cagtaacacacaggctcctggagaagctcggctgccgggtcctttcggtcgcctccggtgtccaatgcacgagctccttcgccgccgagccgtccttccagctggtggttctggacctcgccttgcagaggacggacgggctcgaagtggcccgcgcgatcaggaagttcagtagcaatagctggctgccgctgatcgtcgccctagctgcgaggatcgatgacaaggtccgagacggatgccagaggtcggggataagcggcctgatccagaaaccggccacgttagctgcgctgggagatgagctgtatagggtccttcagaacagttgaaagtgccgcctgatggttctcattgctttcagaattctcaatagaccgctgtagcttggttagatccatacattcacaaaacatttgggggcaggcgaagggaaatgtataggaaaagctggaagaccgctgcttctcgcttggttcctcagtagtgaaggacgacggtgacaggaaggtacagaattttggagagatcatactggtagagcttagactcattcatttgtaaaaccctcggataatccaaggtttagattcttgcactagcactaaccacgatataaatagtttggacgaaatccatggatgggttcagtgaatgctggcatagtagatgcctaaagggggcaaggaacttttgttatcggttagacatgctgaaaagcaggccggatgagattgcggacaggaaggcagctgatacggccgatgctgaccttgtatcttgttgaagattaaatactatggtagtagtacttgcagcccgtgc

SEQ ID NO: 83443 - DNA, 615 bp, Zea mays
  Clone ID: MRT4577_176111C.1
ccggccgggctcggttaataagccaagcacgtggatagttactctttcctgcacaagacctcgctcttggcagaaaaaaacgcgataggcgataatggagggaggcgctgtggcgacgcagcaaatggacggtgcatgtcacactagcggcgtctggctaacggggctcctggctaggatgaagcatactccaggcacccctacaccctgcgggcgaccgcgctcgatcccatgaacgctgcgaagacgaagacgtcgatagaccttaccacacacaacggaacgcctgtcctatggaaagccgacctgatgggggaaggacattaacacgaccccatcaagtgctagctccggcgttttacacatagacacccccatagactatactggcaaagaccgtggcaatgaagtaattaattcgacagcggaagggacgacaatcatcatgcggtcatgccatgaaggacgataccgtgcgtggcattcgtctatactaactacggcggcactgacaacctgtaggagcatcagacgcccggctacaacgaggacagctgcaccgacgtcgacttctgccgtcacgcaaagatgacacgatggatgtactatgagtat

SEQ ID NO: 83444 - DNA, 2765 bp, Zea mays
  Clone ID: MRT4577_176112C.1
gccggccgggtcgggctgttccatttccagtccagcacagaaggccctgcctgccgcccactcgttaaaccaccaaaaccaaaacacttcgagacatgcagcttccctgagatctatcgtcacgtcgccagatctaaccaagccccaaatctgcgcgccggcaatggcggtgcgcgcgagcctcgcctgcttcccctccgacccagcgctccacgcggcttgcggcatgccgtggggcgtcgccatcaccccgttctctgccacagatgagcgcggcttcccgccggccaccggcgccgagggccacctcctcccgcgctgccagtcctgcttcgcctacttcaacttgctctgtccgctcgaccgctggtcctggaactgcgccatctgcggcgccgagaatgacctctccgccgacgcagctgcgcgctacgcccgcgacggtggccacgacccgcccgagatgcgctccgcgttcgtcgacctcctcctcccaggggaggagggcgaggcggcagcggcggcggctcccacgcccgtgtacgtggcggcgatcgacttgtcctcttcagaggagttcttggagctagtcaaaagtgctcttcaagctgctcttgaagctcttttgccaggatcactatttggacttttgacatttagcagcaaaataggattatatgatgtccaaggtccaataccaatcgtgaagaatgtgtttatccctcctgattctgatggtgccttacaagtcgaccttgaagatatcatgcccctttgctcatttttggctcctattgatagctgcaaagaccgcattactgaagcacttgaaacaattaaaccaatgtcttcctgggaagtagcagcaaatgcgcacgatggacaggatcatgtattgcatcacatacgtggttttggtgtagcgttggatgttcttatcaactacctaagttcagaatatggaaatgcatttgagcttgctaggatatttgcgtttttatctggtccacccaattatggggctgggcagctggatataaatgaggaccaaaattctggtaaagcaaggggtgctgatcatatattgcttcaagagcagacaagtttctacagaaatctggctactagtgctgttcaagcaggtgtatgcgtggacctttttgcaattacaaatgaatacactgatcttacttctctgaaagttctgagtgttgagagtggtggatcactgtttctatattccagtacagatgaatcaacacttccacaagatatatacaagatgttgagtcgtccttatgcttttggatgtgtaatgcgattgagaacatcgtcgcagttcaagattgttgattcttatggccatttcttcccagacccccagtacatgcatgttcagcacataaattgttgcgactcttttgctacatacagttatgactttgagtttgaaaaggattcccaattttccaggaagtcaagccctcccattattcaaattgcatttaagtacactgtgcttgtgcacaatggtgatatatcagatcttccaaattctgggtgcagatttaaatacttgttagaaaggaggctaagagtgcggactatccagtacaacacaactgctaatatctgggacctttacgattttgttgatccagatgttgttttgacaatattggtacaccaggttattttggcttctttaagtgatgcactggaaacaaggctgtggctccaagattggttggtggttgtcatcgctcagtacaacaaagcatacaagaatgtcacatctggaggtggtactgagatttataatattgatgtcaatttctcacactgctcgcaactgcagcctttgtcgcggtttgtgtttgctattctgttgagccccctgcttcaagtcagcagtgaaggcattcatccagattatgtgacatatttgcaatgcctcttgagtgcactggagccagcttcgcttcggcaggctatttggcctacgttgatttcatactcctcccccgatgtagaagcagaagtacatcaatcactaagccggactgtgttcaccagtgagaggccaatatatattcttgatgcatacaaagaccttctggtgtattactcacctacagctagtagcgaaatcccttttcctcctccacgaaactgtctactgagatcaacagtcgatagactaaaacaagaaaggaatataacacccaaactggttttcattcacggagcacatgatgacactacagaatttgagaaataccttgttgaggatcagaccttggatgggtccccgttatctagctccacaggtttcagctcattccttgatgaggttagaagtaaagtggctgagcatggcatttgaggaccagtgtcacctgtctcccgattgctgaactgtgatgttaaacgggtgatgactgatgacccatgcaacccagaaatactgtcatgaatagaaagagtaagtgctttgctggtttaccggcaaacgtttttgtatgtgtgctgtgtgtttgatggatgctgttcgccatttttttaccgacagctagatgaattttaaagctttcctttacaagacagcgctatatgtttttgtaatatccatgcgctactatgtttttttgggtacattgcctgttgctaaattaagcatttgctatatacattgctgaaaaacccgttcattataattctagattgctctatagttctaaaaaaaaaaaaaaaaaaggccccta

SEQ ID NO: 83445 - DNA, 333 bp, Zea mays
  Clone ID: MRT4577_176113C.1
cgcgacgtatcactggctcggcacacagacacaccaagcttcttctaccaacggcttactaccatcatgtaaagctacttctcagaggaggtgaggtccatgtccccggccgtcttcagccgccacgcacgcatcctccaccagcacttcttcaaggagaagttctaggacctctacacggtctcactctccgtctccaaccaccaccaccaccaccatgctcaccacgactgccactgcttcctcatgctcgagaccaggatcgagaagtacatcaacaccttcaccgtcaaggtccactagcgcatgtagagcttcctcaccagttctaac

SEQ ID NO: 83446 - DNA, 280 bp, Zea mays
  Clone ID: MRT4577_176114C.1
ggcggcgaccgtcggcgccgtccccgagaccaaggcaagaagagcgacggggggagtaaacccaccgtgttgtccgcgagcaaacccgccgtgttcttcatgatcaccgacgaggcggtcaccgacgattacgaccgttactgcaccaccggacactccttcgtggctgtggtgggacagtgctgcatatcaactgattgatatttctgaggatggatttgtgagccttcttacttgagatggcaacactaaggatgacattgttattttcattactgag

SEQ ID NO: 83447 - DNA, 808 bp, Zea mays
  Clone ID: MRT4577_176115C.1
aatgttccaatcccggctcgtccatctcttccttctcatcctcttcgtcccctccctccgcgccgcccccaacaccaccgccgtggtgtccaggatcgcatttggctcctgcgccaaccagagcgcgccccagcccgtgtgggaggccatcgtggggttcgacccgcaggtcttcatctggctcggggacaacgtctacggggacaacaagcgcccgttccgggtgttcgggagggagcggacggtggggccctggaggaacgtgccgcggttctacccggcgaccgaggaggagctgcgcgggaagtacgagctggccaaggccaacccggggtacgccaagctgagggagagggctagggtcattggaacatgggatgaccatgattatggagtgaatgatgcaggaaaggaatatagtggaaaagtgttctcccaaaggcttctattagatttcctggatgaagatgaagacagtccacggaggaagcaagcaggtgtttatgcctcatacatgtttggccctgaaggaaaacgtgtaaaggtaataatgttggacaccagatatcacagagacccactcttaagtgatggaactatacttggagatcctcagtggcagtggctggagagggagctacgtggtcctcagtcagagatgaccatcattggatcttcaattcaggtagtgtccaatctttctgccaccactagacctttgttctgtgtggagtcctgggcacgctttccgagggagagagaacggctatttaaactgatcgatactagtaagagaaatggggtctta

SEQ ID NO: 83448 - DNA, 238 bp, Zea mays
  Clone ID: MRT4577_176116C.1
acccagctcttccgctcctctcacagccgccagacccgcctgctgagccccatggcccgccgccgcccccagcaatccccggctcctgcgagtggcactgctgctcctgctcctggtagccgctggccggcgcgcagaggagcgtccgtggccactgaaatgcgctgccagtgcttgcagaccctgcagggattttcaccccaagaacatccaagagtgtgaacgtgaagtcccccgg

SEQ ID NO: 83449 - DNA, 481 bp, Zea mays
  Clone ID: MRT4577_176117C.1
aaaaaaaaaataaaaaaaaaaataaaaaaacacaaaaaaaaaaataaaaaaaaaaaaaaaaaaaaaaagggaggaaagaattaaaggttcaaagttggcgtacccttctttacgactcaatttatttttctatgtgggtccaaaattaaaattaattggcagtggtttaaaaacgtattaaattggaaaaacctttgaaatttccaaatttattgaatttcctgcatttccccttttaaaaagtttggtaaaaaacaaaaaggcctcaacttatggcatttccaaaaagttcccaaccttaattggtaaataggaatctggccctttgaataagatgccttatatagccccgccgctttgtggtgttaacattaaaggggaaccgttaaattggcaacccccttagggcccgttcttttggcttttttcctttctttttttcctacgtttgccggttttccctttaaagctataaatgggg

SEQ ID NO: 83450 - DNA, 124 bp, Zea mays
  Clone ID: MRT4577_176118C.1
cccgaagtaccccacaggcgtgcgaacgaaacgtgctactaacgctagttacttgaagacaactagctaaaaccatgacatctatacctacagtcatcagctttctgcttctgccacctcatcg

SEQ ID NO: 83451 - DNA, 385 bp, Zea mays
  Clone ID: MRT4577_176119C.1
ctttcttttttttttttttttttttttttttttgtttttttgttttttttttttttttttttttttttttttttttttttttttttttaaaaaaaaaattcacattgcaaacaagtttttcatttggggcaataccggtcatttttgggggtggggagcccctccctccccctttttttttcattgggggggtgagaaaccactggcttgctccatccagaacaggaatttccttttctccaacttggaggcaagaaaaagccccttaggggtttgggtttcgccttttgagattttcggggcattaaattaagcacgcgttcacaacttggaactcaaaaacccccctaaatcctaaaggtttggtttgcaaacacccccccct

SEQ ID NO: 83452 - DNA, 396 bp, Zea mays
  Clone ID: MRT4577_17611C.1
ggatcctgtatagcggtcgaccttacgtatataattttttttcccctaattttaaaagggggcacggggcaatttattggcgaacaggggatacaactggttaaacactactcctatcttgccagaaaaagttgcctttaaacccctgatccaagggctatccaaaaacgtggcttaaaaggattaacaaacccaccaatgtattgctttacaaaggacaaaccttaaaatttctaagtggccttttttttaaacctacgcgacaaacatgggggggtcctgtcacaaaataacggccctaacaaaagagaggggcccgccttacaaggacacttttcctttccggtgggacaaccctcacccaaagcccccgggcggaaaaagaacgaccccctc

SEQ ID NO: 83453 - DNA, 211 bp, Zea mays
  unsure (1)..(211): unsure at all n locations
  Clone ID: MRT4577_176120C.1
agataccacanctggaaattgatatcagcttactcaaacttattaccgttgtcactcgagtgtgaatcattaccgttgtcatccatgttacaattcgtgaactaaaaaagaccttatagccccaaggcagctaggagtcgttggagctccatttggaaggtcatagttgctttctgtccgtgggcgcaccggacagggaacagtgtcgatt

SEQ ID NO: 83454 - DNA, 104 bp, Zea mays
  Clone ID: MRT4577_176121C.1
caacggcaccacattggccaatgtcgcacagttgcgtccaaatacagaaccaacggcaccacattggccaatgtcgcacagttgcgtccaaatacagaacatta

SEQ ID NO: 83455 - DNA, 240 bp, Zea mays
  unsure (1)..(240): unsure at all n locations
  Clone ID: MRT4577_176122C.1
ggctgccatgcatgcgacgctcatagcatgttcatatagatgacatcctaaatagaattcacttggactgtcagtttaacaacgctggngactggcaaaaaccctgactgggaccaaacttgaatgtgacttgcaggaaatccccttgttagccagctcggcgttaatagcagaagaggctccgaaccgaaacggccttgccacaacagtggcctcacccatcaatggcgaatgggacaa

SEQ ID NO: 83456 - DNA, 310 bp, Zea mays
  unsure (1)..(310): unsure at all n locations
  Clone ID: MRT4577_176123C.1
ggaccctgaggccgccggaatccagctatctaatataaggatgacggtgaagtgaaacctgagctcggagctacgtggtggagaagcgcggataggccaacggcggatccggcggccgatgaggaagagaattgggaggccaaacaggccgccgacgggaaggggaaagagatcaaggggaaggacgacgggggtcccaaggaggacaacagaaggaaggtgtcggtgcgggtgcgcgccgccgacatgcccctgccgctgcagcgccgcgcggtccggntcgnctaccaacccatcgactccatgccac

SEQ ID NO: 83457 - DNA, 282 bp, Zea mays
  Clone ID: MRT4577_176124C.1
ggtcgggactcgagactttacggcctgtaatcacttaagtagctacgactattacactgctagcatcgtcaaccctgatggctttgctggattcccctgtgcctcttacaacgtcttcactgcatacaagtatttcccttgtctaagtggaggctgtccatagatgggtcactatgctgatcgatatcctgggaaaacaaatgatgtgggccagcaattttatctagacactggtgatgccagtaattttgcacgttggaggtataaggtatctgtcacact

SEQ ID NO: 83458 - DNA, 346 bp, Zea mays
  Clone ID: MRT4577_176125C.1
cggacacttgggcggacgcgtgggtcacgatgcaaaggacaccgcggcgaaaatgactgatgcgatggccgccggtgaataactccggctggggtagggcggtggtgccacgtatgggttgtctcgccccgacgttatccattcccgactgcgcacgaacctggacggcggcggcacgagtttttgcgcagagaggtcgccgtcggtgagatttttctgtcgcggtgatctgatccccaattgagttactgtagcatggcgaagttcagttcagacgcctgacagagccttttgaagcttagttttctctcaattttgaatggctacttaacccaatatctgcatc

SEQ ID NO: 83459 - DNA, 480 bp, Zea mays
  unsure (1)..(480): unsure at all n locations
  Clone ID: MRT4577_176126C.1
ggggggatntgaggttcccatagccatggatctctcggctggatgctggaggtcgccgttaccgtgagcctagagagaggagagaaggccgagaggatagggtactgaaggtacacggtgtgacccactggtgtctccgtcgtcggtctgctcttacaacctcagaactaggcgcttgctgcggatatccagtcatggtcggccgggtcggcgctaaacttgccgtgaggacacgtgtcatccgaagagcaagtggtacctggaatctcaagtgccaggttaagagcaggtaccgcaggatgaggcgcttggaggatgctgtgatgagttcgtgagaggtctaggccgtcgtctcccagtcaactttgggttgttggaccgttgtctccttataatgtaattgtttatttattttgtatagaactcctattatatagtaaagttgtgacatccaaaaaaaaaaaaaaaaaaggggcggcc

SEQ ID NO: 83460 - DNA, 477 bp, Zea mays
  unsure (1)..(477): unsure at all n locations
  Clone ID: MRT4577_176127C.1
cacactacggaaaccctgggctcctatggcctgttgagccctaagacttgatgattgcagtttttaatgacactagctgggcggcgcgagtaacacaacgaggtttggcttccggggattgcgaccgtcgacctttccgtaaggggggggacactaatccgcgtggaaggatggggttcaaccccccaggttggccattgctcacgcacgacctgtataagcctactatgtccctcacgcgggcaggcccattcggcacaccgttactatgcttcaccatggtttctaggcccccttttataattcctacnaagagggctggccaggaccgcgctgcaaataacctgtccccccttggcgaagatgtgcattttgccaaacctgggaaccacagttagccgctttaggttcttaccgcagtttccccagcgggctgggttcttgcctcaacagcttctctgttcaaagaggccctat

SEQ ID NO: 83461 - DNA, 2286 bp, Zea mays
  Clone ID: MRT4577_176128C.1
agaattcaaatttgaattcgaatttggtcctgaaatccatcaatgataaaagtgcaccaagttcaaatttttggagtatagaagtactttcttatttatatattttattctaccttatttgtttagtggtgttttctcttttctcaattttcaagaattcccttttaaagcttaaatagcctttttggtattaatatatttcttttctctttatttttatattgtcacaaaatgcatacacacaaaaataatatccagcatgatgcataatttatttgagtgtcttttgttaattatttatttgtttaattgtggtgttcacatgaaatgagaaacatagataactcatatatgtatacggaatacaatttctctgcttagactctgtttacaaagtgggtgttacaaatcctaccccccttaaaaataatctcgtccccgagatttaagaagaactagagaaaaggtagggaaaatctatgcgaagctcttcttctctttcccaagtcgcttcatcttcgccatggtgactccattgcactttgcacatctttatcaccttgtttattgtaattcgagtcaatgtgtcaagaatcttgataggatactccgtgtaagtcaaatcaccttgaacactaagctcttccattggtaactgttcctcagggacacggagacacttctttagttgagatacgtggaacacgttatgcacatccgatagactatccggtaactcgagttggtatgcaacctctcccacttgctttaagattaaaaagggtccaataaaacgaggggacaatttgcccttaactttgaatctcctcattccacgaagtggtgacaccttgaggtacacataatctccttcttcaaattccagtggtcttcttctattatcagcgtagctcttttgcctggtttgagctacctctcaagttctccccgattatacagacttgttcttctgcctcttgaataagtttaggtccaaagaactgtcttcctctagtctgatcccaatacaaaggagtcctgcacttcctcccatataaagcttcaaaaggtgacatcttcagactagcctgatagctattattatatgagaactcagcatatggtagactcttatcccaacttcctccatgctgaagggcacaagctctcaacatatcttccaaaacttgattagtcctttcagtctgtccatcagtctgatgatggtaggccgaactaaaattcaacttcgtaaccatattctcatgaaaacttttccaaaatctggaggtagactgtgatcctctatccaaaatgatcttcttcggtacaccatatagagacacaatccgagccatataaaactctgccaattgatatcccttataagtagttttgaccggaataaagtgagccactttggtcaatccatccacaatcacccatatagcatcatatcctttctgggtgcgaggcaatccagtaataaaatccataccaatctcttcccacttccactcaggtatcttcagtgggtgcagtagtccagctggcctctggtgttcagccttaactctttgacacacatcgcacatagccacatgtgcagctacatctcttttcagcccataccaccaatacttttgcttcaaatcctgatacatcttagcgctcccagggtggatagaataatctgagtcatgtgcctccttcaatatggtttcccgaagactatcgatatcgggaacacagatccgattcttgaaccatatcgtgccttgctcatcctctgtgaactctgggcctctaccctctgttatcagatccttgatctcctggattttggcatcaccaacccgacctttacgaatttcttgctccaaggtaggttccaattcaatagtcactccttccgtatgtgtaacaattcccgggttgagcctctcaaaatcttttgctaattcatcaggtagctggacaacaaaagcggagtgaacatgctctttccgactcaaggcatctgaaaccaaatttgccttgcccgggtgatagtgaatctccaaatcataatccttaataagctccaaccaacggcgttgcctaaggttgagatccttctgagtgaatatatacttcaaactcttatggtccgtatatacttggcacttggtccccaggatataatgtctccaaatcttaagcgcgtgcacaacgactgccagttctaagtcatgagtagggtagttcaactcttgtttccgcaactgacgagacacgtaggcgacc

SEQ ID NO: 83462 - DNA, 368 bp, Zea mays
  Clone ID: MRT4577_176129C.1
gccggccggtccggggacctgcattcaccatcgtagcatgtcgactcatccaccgacgaggagtacacacgcaggtactctaggagcagcagcaacggagacatcgatggcggcctccatgatctactcgtcagctctggcggtggcgcctgaggcactgacgaccattggctgaagaagcctctctcacttcgtcaggggcagctccaagaagaaaatatagaccgacaacccctacagcatagggggcgcggttacggcttagtcaccttctccacggaggacgcgatgcgcagcgccatcgaggccatgaacggaaaggagctcgacggacgcaacatcttttttttttatgcccacccccgcga

SEQ ID NO: 83463 - DNA, 497 bp, Zea mays
  Clone ID: MRT4577_17612C.1
gcacgaggagtttgggacctgtcgccaccaccaccctcaccaccaccctgcgctagtctgagccactagccgacgccggacgcgtgggcggacgcgtgggcagcctctccaggccagaacggccagaggtggtggcacccagccacgaccgccgtcgcatagccggtcgcaatcataccagccaaagccacgttgtgccggccgcgccagccgcagccgcaatcgtcgctcgacgccagacgtcgcccctcccatacacaggcgcgcgcccctgcctcacgggcaccggatccggcccgggcccaaccggatctgggaccacctgctacccgacggcggggaggacgtcccgcgccggcgagcactctccagggggcgagacggccgcgcctggcatgagcccaccaccacggctgaacgccacccatgccacagcccggcagatgacccgccggctgccgcgaacgcagccgtggccgtcaccacagacgacgcgc

SEQ ID NO: 83464 - DNA, 225 bp, Zea mays
  Clone ID: MRT4577_176130C.1
aataattcttctacaccaaggtcctttcataggggggctttatgaagcgagggcgttatatcccctcgaacaccaaaaaaaattccaagtccccaccactagcaaaataaaaaacaagcccccaaaagctctaataaaacacatacgaaaaccaaaaaatacccttaaccacttacgaggggaaccaggattgcctcccggggtagtagaacaaccacgcgggcc

SEQ ID NO: 83465 - DNA, 790 bp, Zea mays
  Clone ID: MRT4577_176131C.1
agtttccagatccctctccgctccgctctcctcacctacctacctcgtcgccacgggcaaaacccccggccgctctccaccctgagccgccgagccgaggcgccgatgcagtcgccggagtcctcctcctccgccgcgccggtcctcctcaacatcggggggacgaagtacgcgaccaccgccgagacgctcacgcagcgggagcccgactccatgctcgccgccatgttcagcggcaggcacacgctcccgcagcaccccaccacgggggcggtgttcgtggacagggatgggaagcatttcaggcacatcctcaattggctaagggacggtgccatcccggcgctctcggagtccgagcaccaccaactcctgcgagaggcggagtactaccagttgctcggtttggctgattacattaatgagaaattggctttgaaaaagactgacaattcgtgcgaggccgaattgacacgcaaagatgtgatcaagtgcattcaagcccagaaaatcagatttcgtggactgaatctatctggccttgatctatctaagcttgacttatcagaggtggacttcagctatgcgtgcatcgagagaaccaacttttcgtgtgctagtcttcataaagcaaagtttaggctggtggaagctgcacattctacatttgaacaggcaaatttacatgagtgtgagcttactggagcaaatcttcaagaagctgtcctggacagagcaaacgttcaaagcgcaaacctgcaagatgcatgcttaacgggatgtagcttca

SEQ ID NO: 83466 - DNA, 1122 bp, Zea mays
  Clone ID: MRT4577_176132C.1
caggattccccttgcgactgcaccacgccccacccaaacccacctaccgcctccgctcccctctccagcgagtcgggggcacggacgggacgggacgggaccagacgaccaggccatggggaagtacatgcgcaagggcaaggtgtccggggaggtcgccgtcatggaggtacccggcggcgcgctgctcggcgtccgcacccgctcccgcacgctcgcgctgcagcgcgcgcagaggccgctcgacaagggcgacgcggaggacgccgccgcggagtacctcgagctcaggagccggaggctcgagaagccgcacaaggagcatccgtcgccgcccgcgaccgcgaccaagaggggcgccgggaggaaggccgccgccgccgccgcggtgcagcacgtgctgatgcaggacgaggtcgaggtcgaggtctcgttcggggacaacgtgcttgacttggacaccatggaaaggagtaccagagagacaacaccgtgcagcctgattaggaacccagagatgataagcaccccaggatccacaactaaaagcaaaaccagcagcaactcgacgacttcccgccgcagaacggaggaaaccccgagctgccggttcataccgagctcgctcgagatggaggagttcttctcggcggccgagcaacaggagcagcatagcttcagggagaagtacaacttctgtcccgtgaacgactgtcctctccctggccggtacgaatgggcgaggctagactgctagattccccacccagcacaagagcaccattgatctgattgatatgtgtctaccacaccacaatgtgactagctccgccgccgccgccgtggaccgtggaggaggcgcaaccaactgtggatctcgatcgcattagctttgttgtctgttgtaaaaattagagtagttagctttgtagccggatgaatgatcttgtgtaaccaacaggcgtggttcacccctggtcacacaacctcactgtaacctgttaactgctcaagctgctgtaaccgaaccaatctcatgtagcgtaggcctagcgcagtcttctcatctgttcgtagctctcgaaattgattgaatggaattagagttaaaatttgcatggc

SEQ ID NO: 83467 - DNA, 226 bp, Zea mays
  Clone ID: MRT4577_176133C.1
gactctagccattgccagaatgctgaatctctataggaaggctcgtgtgcaacaaaaaaagcttcagaggcagagaaatttgtggcagcaggttggtgcaaaagcaataaatgttgttaaaatctacacccgatagattggcttatattgctcgctaagcggtgaaggtgagcggtcgcatcgctcgcactctctgatcggtggactaacacaggacattttttac

SEQ ID NO: 83468 - DNA, 185 bp, Zea mays
  Clone ID: MRT4577_176134C.1
gagcacaaacatttttttaattgctaataatagcctgaaacatagttcatttgtacacttgtagtcctctttaggatactattagcaattaaactatgtttcaggctattattacaagcgcaggtgacacaccacggtaccacgccatcttattcagtagactacagttcatttgtacacctgta

SEQ ID NO: 83469 - DNA, 1471 bp, Zea mays
  Clone ID: MRT4577_176135C.1
cctcggggccgggaaaaaatgtgttatccataccgttggtgcggtgggccgcagaaccgcgcgcacgggggagccaatggcgatcgtggccgttctcgtcgcgcccaccgccagctacgtcgggccgcgccgccggtggcgcgccgcggcagcctcgtcttcggcggcgtccggggtggacctcaaagcgctgcaggccgccatcgataagaaaagcagcgatgatgttaggcaggcgctggaccagctgagagagagcggatgggccaagcggtggggctcgcagccctatgtgtcgcgccggacgacatctctacgggagctcactacccttggaatcaagaatgctgagaatttagcaattccaagtgttagaaatgatgcggcattcttgtttacagttgtgggtaccactggattcttagccgtccttgcaggccagctccctggggattggggcttctttgtcccctacttgattggaagcatttcattgatcgtattggctgtcggaagcgtcgctccaggtcttctgcaagcagcaatcggagcgttctctacagtctttcctgactaccaggagaggattgctaggcatgaagctgctcatttcctagtcgcctatttgattggcctccctatccttggatattctttggacatcggaaaggagcatgttaatttgatagatgagcaattacaaaagctaatatacagtgggcagcttgatggaaaggaactagacaggttagctgtagtttcaatggcaggactggctgctgaaggtctagaatatgacaaagttgtaggtcaatcagcagaccttttcacccttcagaggttcataaacagaactaagccgcaactaagcaaagatcagcaacaaaaccttaccagatgggcagtcctgtttgctgcatcacttctgaagaacaacaaagcagcccatgaggcgcttatgtcagcgatgtcccaaaaggcaagcgtgttggggtgcattgaagcaattgagaatgcatcctgatcaaaatgtaacctgagtagtgtactagcatcactggactcgatattgtttcaccgcttctgattactgctgctgttggttcgttgagcctgaggaatcgggtggaggagaggatcgaggcgtaggaaggagaaaccctaatcatcaccgtcgattcctgtacttctgtagacatcaaaaactcaggccacagggaagtcaagtgctcgaaactccaaagggaaggaaattcacacaatgacaaaaacaatagcctaatctgctgccatttactatcatacacgtgtgccccaatattactcattactcccatcttttgttttcgtatataatgcgcgattgtcctctccaacaccacactttgaccattaatatcttgtatgctgtaatattcatactatgaaagtggacattatataaataacgtgttttcaaaatatgaatccc

SEQ ID NO: 83470 - DNA, 691 bp, Zea mays
  Clone ID: MRT4577_176136C.1
gtggagccccggcggcggtaagcagtggagcagcgacgccgccgccaagaagcccgccgccgccgccggcagcaataatggaggaggggcggtcgtcgcctgatcgtcgtccgtcgagattactagtgaactttaattaattagctggctaattccggaaccgtcgttgttgttcgtgggagagagagactcgatcttgtggtcgatcgattgtgatagctgatctatccgtgtgcatgtatgcatgcatggctacgatcgaatgattatctagctgggtaatcatcgggtgtgtggtagcttattaagtattgtacgcgtcgtgatatcatgtgagctagcttttgtttctttttattttcttttatgtggttttgtaataaagttggagtacgtagtagtgagtggcccttttgtttttttgacagattttggcatgttgtgtttagacgttgattgctgctctgagcttatctcctccagacatggctaagagaccgtacatggagtagtttgcagggtagataaaggttaattaattccttgcattgagggtgctgtctgctgtgcgtggaacacgtacacccgcaatctggagcatggaaaatgcatggtcactcgagcggcatgcatgggttcgatcctcctgtgatctgcaggcgcgtctatatatatgatactccataagctt

SEQ ID NO: 83471 - DNA, 247 bp, Zea mays
  Clone ID: MRT4577_176137C.1
ggcaaggcatgagctacacttccgccgccgtggcgctcgagctcctcctggccctgctcggcggagggcagcgccaaaaggaccagctggacgccatagacgccggaaccgggacggagaactacaccgacagcgacgacgccgagtactggggcctctgtcagaaggcacgggccaactgatacggacagcccaacggtgccggccccgaagacaacagaggcgcatgcggattcaagcacacaaa

SEQ ID NO: 83472 - DNA, 507 bp, Zea mays
  Clone ID: MRT4577_176138C.1
aaaccccctggaaaaggttttttgtccccccgcccccccggggatattaaaaaaaaaccttttaggaggaaaaggcccttttaaaaagaagagggggccttttgtttttgggcccaaaaaagaaaaagaaaaaaaaaaaaacggggggcaaaaaaataattttttttaagaaaaggaccaggttcaggcggggttttttttttttgaaaaaaaaaaaaaaaaattggggggacccggacggtttttttaatggaaaagggggcccgggaaaaaaaagttccccccccaaaacaatttttttgacaggggaaaaccaaaggcctggggggcagggcccacaatttttaaccaaaaacaaccaaggttgaaaaacccgggggaattggtttttttggcaccccccccccccggggggggcgaaaagaaaagtttccccccgcccgttttttccaaagtttggggtttggaatttcccaaggcccctgggccccagccaaagggttttta

SEQ ID NO: 83473 - DNA, 428 bp, Zea mays
  Clone ID: MRT4577_176139C.1
gtgggttttttttttaaaaaaattttttttgttttttttttttttttttttttttttttttaaattaattttcttttccttttttatccaaaataaaacccccaacccaatatttaaaaataactatacaaaaacaacaaatatttggggccgtggggaaaaacaaaacaacttggcttatccctttaaaagagtgaaaacaaaacaaaaccctccttaattaaccctgaaaacaatttttttccataaaaaaacttttcaactgccaatcaacataaaaaaaagtcttaaacctttcttaccaaaacaaaattaccctaacaacaaaatccctagaaaaaggacccaatatcgaaaaaacctctcacaaccagacttttgaacacaaatttcttaaccccccccttttaaaccccaccttttaaaaa

SEQ ID NO: 83474 - DNA, 362 bp, Zea mays
  Clone ID: MRT4577_17613C.1
ggtcgatactagcttaactgacaagagacagatcgcccatgagcatgtccacgcgagcggactccaccacgcgccagctgctggtcgccgcctgggaaccggcggctaagcctagcaagctgagctcgcacctcacgctgccgtcgatcgtacatgcgcggaccggccccgctcctcgcgtccacctaggaggcgtagcaggcgcctaaggggatcgtgaccccgcatgattgccccaccacggcggacccgatctccaagtgatgcacaaccggcctgatccccatggcgcacttgtacaagttttacaccatcacatagacctacaccaccgagcacgtgctatagatgatcaccggagg

SEQ ID NO: 83475 - DNA, 601 bp, Zea mays
  Clone ID: MRT4577_176140C.1
ccctagtaccaactcccaactcacaactctgatcgttgctcacttttgctaccacctgcgattgtcctctctctttcattctcctcgctctattgtgtgtcttgccggtctactcagctcgtcgaaccagcacatggcacctactaccagaaaagcgaggaataatgagaatgcgcctagaccgctgctaggtgccccatatggagggctccaactccgtcagccccacgctacgctatatagcttcgcttcgtgttggcgttactgctgctcatcgacagttccacgtcgctgctcgtaactgccgacgacagaaccaaaacgactacaccgcgtgagtcgatgcatgatatagtatctgagctgtagggtgcacctacttaatctatttttctgattcctctgacgtctcactcttccatgcatgtgccataacttgaaacagcttgcgcaaacttcacttgcagcagacgtcgagcgatccgacgtactgtagcgagcctagtacatacgcagcgcagaacttactggacgtgtcaggttctacgcgaaccgcctcccgttaccatcagatatggcatgcaccagcacatgtgccatc

SEQ ID NO: 83476 - DNA, 676 bp, Zea mays
  unsure (1)..(676): unsure at all n locations
  Clone ID: MRT4577_176141C.1
ctatagaaatactatgacgtccccttgcccgcccctcgatagccgccgggatggcattgtgtagtgttttgagaaaataaacagaaaattgtcccaactcgtagtgtcatcctctcgatgagagtaagagtctcgttgcttacacatatgagggtttttatctgtcttaagagaagtacattctggatcttcttgatcgggcctctcttactgatagcggacagttgaggctcctatggaactcaatattcatctatgtgccacggatggtgagcctcttgaagaccctaatcattattgtcacattgttgggagtcttgtttacgttggtgtgactcgtcctgatatcttttattctgtacataatctcagtcagtttgtttccgcttccactcagcttcactatagtcacttgctttgggttctacgttatcttcgtggaactatatctcgtcgtttgttctttccacgatccaactctttacagttccaagcgtactatgatactacttgggctagtgattcctcttatcgcccttctctttctgctattgnngttttttttggggggttctttggaagactaataaacaggcaggtggttttctcgttcgagtgtagaggnctgagttgcatgatatggctcttgtgactgcagagggtggttgcttgagga

SEQ ID NO: 83477 - DNA, 225 bp, Zea mays
  Clone ID: MRT4577_176142C.1
acgccactctgacctgctgttgcatcgcgaccgtcagcaaatcccttcgactcttccgcaccatctccactgagaaggctgtctactgactgcgcagacctgctcggtggagccatccaccagcatgcccattatgtcgacggaaggcgcaacacacgcgcctgctacttggcggagaggaggacagctctgctaccttttcatccactagaatcatcagcgctg

SEQ ID NO: 83478 - DNA, 231 bp, Zea mays
  Clone ID: MRT4577_176143C.1
acagtagaggccacacggaatgaaaagcggatttattgggaggcgtttgctgattacagcgtatcgataagtggagagacaaacgccccagagaagacatggtagaggcaaaacacaagctgactacacgagaaagggtgtacacacgaacgctgtttaatataaattgctagtgcactcatagacgttacagacacggcaatactgcggatcgatcaataggcaacatga

SEQ ID NO: 83479 - DNA, 651 bp, Zea mays
  Clone ID: MRT4577_176144C.1
ggccgctttttttttttttttttgtttttttttttttttttttttttcaatacctatttatatgatatataacaatggtagcaaagtatgaacaactggctagtaacatatacatgtatacatatttttttgcaaaaaataatgagtattcaattaaatactgaatacccttatttgcatccttacttgcatgtaggtccgccttaattaagaggacatagcatctaacgaccatcgcatttttacattagttacaacatagtacaagtacaccatgcatcgcaccacgaacatttcatcatcatcatcatcatcgttgacagtctacccagtagtccgcccccaacaaaaagaaaaagttccatatcggccatcaaacctaacaatgcatgcatgtgtggtagcactcctcgaactgccaagttcatcagagctcctcatttgggggtgaaggcctggaagatggtggcgtggccagggtcggcgaggtgggcgaagaggttgtcgatggggccggtgccggtgtactcggcctggaaccaagcgcccatgacggcgagcatggcgaggcgtccgttcttgatctccttggtgcgcagctccttgatcttctccggcgagccggagccccagccgagcgggtcaaaccac

SEQ ID NO: 83480 - DNA, 388 bp, Zea mays
  Clone ID: MRT4577_176145C.1
ttccacgcgtccgcccacgcttacgtggccggtcctttccggctcctcttcgtctccaccacaccacatgcacacgcctactgacaccgatgcggcaccccagccacagcacagtattgggagtcaccggcgccatcggggagagcgacccgctgaactggggcgcggaggcggccgatctggccggggagccacctggacgaggcgaagcccatggtggcacaagcccggcagccggtggtgaagatcgagggcttcacgctcctcgttggacaagtggccgccgtcgagtccgtcagggacgcgtccgaggtcgccgtcgagctccacaagaaggcccgcccccgcataaggccagcagcgagtggatcctcgactgcatcgccca

SEQ ID NO: 83481 - DNA, 923 bp, Zea mays
  unsure (1)..(923): unsure at all n locations
  Clone ID: MRT4577_176146C.1
agtaaaggaatactgttcactatttataggcacaggacacagcctgtgaggaattacaatcatgcccctcataaaagtttacaacaacgactcaaatacttatggactaaaaggtcattctacttttaagtcggtttgtaattgcgaagcttcatgaagagcaaccttcggtcatcacatgcggacagcttcagctgaagctgtttcttcctgcaggacattcggcgacgaagcatggtcccaacatcgtacgtgtacaacgtcttcatactgtaaaagagggtacccctgattcaaggtaccgacattatttatatgatatataacaaccgtagcaaagtatgatcaactggctagtaacatatacatgtatacataattttttttgtcaaagataataagtattcaattaaatacccttacttgcatgtaggcccgccctacttaagaggacatagcatctaacgaccatcgcatttttacattagttacaacatagtacaagtacaccatgcatcgcaccacgaacatttcatcatcatcatcattgacagtctacccagtagtccgcccgcaacaaaaaaaatgaagttccatatcggccatcaaacctaacaatgcatgcatgtgtggtagcactcctcgaactgctaagttcatcagagctcctcatttgggggtgaaggcctggaagatggtggcgtggccagggtcggcgaggtgggcgaagaggttgtcgatgggtccggtgccggtgtactcggcctggaaccaagcgcccatgacggcgagcatggcgaggcgtccgttcttgatctccttggtgcgcagctccttgatcttctccggcgagccggcgccccagccgagcgggtcaaaccacaggccagcagggaccccgacgtcggntgccggtgagcttg

SEQ ID NO: 83482 - DNA, 330 bp, Zea mays
  Clone ID: MRT4577_176147C.1
ccttggggaaaaccaaacgggccatagattaacttttgctcccccctttgatcttaggaacaaaacgtcaaacattttaaaacggggggaatttcaaagggaatagaagggaaacatgaaggccctccccttattgatggaagccccgtgggttgggggttcccctccccttttaaaaacagaacacgggcaaactaaaccatgtttttattacccctaaagggcacaaaagcatggttagaaaccaaaactggttggggattttggaggcccataacttggttcccttggtcccgggttttcgggcccgcatggaaacctggccctttt

SEQ ID NO: 83483 - DNA, 266 bp, Zea mays
  Clone ID: MRT4577_176148C.1
ggtgttcgttcttttttttttttttttttttgttttttttttttttttttctttttctttttttgggggcccttgtttttttttttttttttgccactaaaaaaccaaccgccctgattcttaccaagggggggggggacacaggtactctcctacgggacacgagccggaacccggaggcccccttacccccggggaaccaataacgcggggatgctttatccatcacccccgggtattacttaccagttaaatccccccccccc

SEQ ID NO: 83484 - DNA, 1324 bp, Zea mays
  Clone ID: MRT4577_176149C.1
gcgaacccgatggcgccgcggtacggggacgaggaggtccggtggctgcaggcgtcgccgcaggcctcgccggagatggactacagctccggcggctcgggcacgccgtcgccgcagctgtgggcgcaccaccaccagctccaccggcagtacccggcgtcggcgggcagctcgccgtcgcgggcgcaggccatcgcggggtaccgccgcgagatgctcgacctcgtccgcggcctcccggagtccgcctacgagctctcgctccgcgacatcgtcgagcacccgtcgcccccgtcccctccccacgcccctaccaaccctctgccgccgcctaccaccgccggaccacgcgcgagtcgcgccgtccccgtcccggcgcaggagaagggcgagtccgccggcgccaggaaggacgccgtcgcggcggcggacgccgaggacggcggcggtagcaggaagcagggaggctccaagggcaagaagcaggggaggaagcagaggacgatgcggaagcagcggagccggagcctggaccgcagcgtcagcctggacaccggcctgctcatcaagctcttcctcccgctctccctcggcggcaagaagaaggtctcgcccaagcccgacgccgccaaggacagcaagaagaagaagaggaaggagaagaaggaggcggcggtgcaggaggaggagtggtggaccaagagcgagttcagcgaggccgggaacagcagccggaccagcagcagcaacagcaacagcagcgccgccagcctcaggaatgccaatggcgccgccaatccgagagcgccggacaggagctggagcaggaagcggaccgggtgctacgctttcttcagggcgaacaagggcaagaagaacgaagccaaccaggactagagctagtgatgacgacacggcctctccatgaaacacggaaagaagaagtgtttctccggtgaaacgttggtggtggtcgtagccatcagcagcggcgtcacgcatgcagctagcacaaggaagctcgagcaagcagcagatctccatactgccgtaccgtaccctaaaattgatgctgttcagtgcctggtttctgcacacgagtagtggcggctccggcatcgtcgtcgtcgtcgtccttttcctttctgttctggcatgtgatcttcatggtataaacagagaggacatgccatgtgtagcgtacaatagttttgactggttcgcacagctcgtacagaaatactgtattgatatggacggcacgccggaggcagtgacaccaatggattaatacttgcaataaaaaaaaaaaaaaaggccccta

SEQ ID NO: 83485 - DNA, 358 bp, Zea mays
  unsure (1)..(358): unsure at all n locations
  Clone ID: MRT4577_17614C.1
cgcgctttgaacgctttcgctgaaatcagcccccgcggcgagattgccctgcccctgagtgntagttctttttgtcccgtaagggttcttggtcttgcgtcctccgtctttcgccgctgatacaccgaggtattaaagaagttgtctggttccgggcagcagaggccgccgtcgcctgcagcaatggccgacttctcatggctcacggtgcttggcttcttatccctcaccttcaactcaggtatggccgccttatcgcccctacggcgacgccgcctccgtcgctttcgccgcggtatcttctcctccccccggcgcccctgttccccccgcccgccctactccgaccagccggccc

SEQ ID NO: 83486 - DNA, 253 bp, Zea mays
  Clone ID: MRT4577_176150C.1
cccacgcgtccgatctcgcccgtattcgcagctctccgcttcttgcatctcaaactctcaatacgtctcgtctccaaccactcaactacagcgcgtccgatgacttcctcggtcaacatgatgatgcctcacgagatgttccgccggaccagtgccgctccggcgccgcaccaaacggtctccgtgccggcgccagagaagctgcggttgtcggaactcaactggaatggcgacctgggcgaagggggcttcg

SEQ ID NO: 83487 - DNA, 212 bp, Zea mays
  Clone ID: MRT4577_176151C.1
cacacgttaccgacgtcagccgccgcccaagaggctaatcaccaaccatggcctacagagctctcagcacgtcgcagtggccaggtccggccgcacccttgcatctgacgttgcccagggtcccgttgcccagggaatagcacctcctctgatctccaggcttggcgcaatagctcgtcttctcagcacaaagcccaccgcagcagaggtca

SEQ ID NO: 83488 - DNA, 361 bp, Zea mays
  Clone ID: MRT4577_176152C.1
gccgagctgaagctgcaggccatcatgtcgtgccaccagtgcggcgggaacgtctgctacatactgaacatgcggatccggtaatggatgcaggacgtcgtcaaaagcaacatcaacattttatacaccaaccggagtggggtgacgaacattgagtatctgacgcttggagtggacaaccagactgtcttccatgggagaactgccatttatgtggatgctgattacatgaaaagctggatgtagaacatggcagacttattggatgctggtgtggatgccagacattgaggtgtgactggagcctgctgtcgagatgaggtacctatcgtatcttcagagtcagggatgggtgtaacta

SEQ ID NO: 83489 - DNA, 280 bp, Zea mays
  Clone ID: MRT4577_176153C.1
attacaaataaaagatcaatgatatataatgttgctcttggcgtgattggtaccaaccatggccttgtcaaaaaaaaaaaaaaaaaaaaaaaaaaaaaaaaaaaaaaaaaaaaaaaaaaaaaaaaaaaaaaaaaaaaaaaaaaaaaaaaaacaaaaattaaatacgagtcaatctaaacgtaatagcgtcattctataggcatacctaaaattaaattaaactgtccgttaaatttacactggttggcaattggaaaaaaccctggcattaaccaaaatt

SEQ ID NO: 83490 - DNA, 151 bp, Zea mays
  Clone ID: MRT4577_176154C.1
tctcataaagtcgccggtgccgcctaccaccgggtacaccgagggcttggtgttgtgggagcccccaaggacggacacggagcccctgttgccgcggtggcggagcgagatcttggccgccagcaggttgtggagcccgtctaagctcgtc

SEQ ID NO: 83491 - DNA, 300 bp, Zea mays
  Clone ID: MRT4577_176155C.1
ataaataattttcctctcaagccaaaaaaaggtgaggaaggggggggttttttagaagagacagaccatggccgccaaagaaaatgggaacaacagacagacacgaaccagacaaaacgaccgccaacgcaagaggaaacaacgggaaagcaaaagaaaagtgagagagccgggcccggccaaaaaccgacgggcggaggggcggcccaaaaccaagggcaccgaaggccgagccaaagggaccgaaggcaaaaacgggtacaggaaacggccaagggcgcacgcaaacagccaagggcc

SEQ ID NO: 83492 - DNA, 327 bp, Zea mays
  Clone ID: MRT4577_176156C.1
gcataggtctacaagacgagacaagagaatgcctgtgagcaagatcgccgtgggcgctgcgggcgagctgttgcaaccagacaccgacaagggcgccgaggccgagttcatgtccatgctcatgttcatcttcagcggctcatgatcatgcatggccttaagtaagctcacggacggtggcgcctgcactcctgccggccatatcgccgcgtctgtggcagcacgcactatccctattactggccgtcttcgggggtgccaacatctgctgcggccacgtgaaccctgacgtgaccttaggtgcctttgtgggcgggaacatcagac

SEQ ID NO: 83493 - DNA, 379 bp, Zea mays
  Clone ID: MRT4577_176157C.1
cattgccattgcaaaaacattgatacatgcagaagtggtttttgtttttgtttcagcttctggccactagaagctgctgcagactgccaagcgcacaacttttcagcccgcttctataataatcaatttagtcaaaaccgttcaaaatcaacgtgaacacagaatcgaccgagtcgttgcgaacttgcgatagtaggaaaccgtcactttctacatcctaaacatatagacttttttatcttcctccgcatgtagtctccacaatactcattctctccacagccagattctccccacaactagtttctcaaaaaagctcatcagaaaaagctgaaccaaacaggcccgttatccccgcttcgtccttggatcactaatg

SEQ ID NO: 83494 - DNA, 539 bp, Zea mays
  unsure (1)..(539): unsure at all n locations
  Clone ID: MRT4577_176158C.1
gctcatggcgctcccgtgcacatgtgagcacttttaatctggatcatcccttcctcatccaacgtccagcagcaattttacataaaccccctcccgccgtagctcctgcactctctggttcattgtgatttgcccccgatggcccagtggaccggaccggaccgaactaggcgccctacgctgatcgcacaactgatggtcttcctattcgtcctgcgtgatgggctgatggcagacggcagacctcaccatggcagcccgccgcctctaggtcttcccactgtttgtgtgcgtgatggcagacctcaccattgagacctctctcggcgctgtggatggagaagggatcgccgcaccagccaccgaaggacgggggtgatgagagacaagtgcaaggcatcgatgtgatgcacagtcaaggccgtgcgtcgcctctccttcgaatcttggttggaacaatcgcgtattacattggggtgaatcgtcctcttcaaaggtttttgtacacccaaaaaaaaaggccatacgtncctacaaat

SEQ ID NO: 83495 - DNA, 378 bp, Zea mays
  Clone ID: MRT4577_176159C.1
tcctatacaactactccgtaggaggacacatgatgtcattttaatatcttaattcggatcggttctcctgagtcgctgctgctactctcacatcattattctttggatactctactcgctcagatactagaagtatgtgccaccacaaaacacgatgatccacaaggagccaaccacggtactctcacgaaccaacatctaacatcaaagagccactaatgacttaaatcgtaaacctcatgtgaacctccaaattctttgaaatttcccaactatttgagctaatccttgtcaacagaatcagattctctacactaaacttgatccgttaaatgactcatcaaaatcttcacaacagaatccaaacgattatggtcc

SEQ ID NO: 83496 - DNA, 199 bp, Zea mays
  Clone ID: MRT4577_17615C.1
acgccgacgcgtacgcgtaagcatgcgcacatttgcttttcttcctaacttgccgaaagtagggtgaggatagactgcaacgctgtgcggcgatctcatactactaccgtcctgtcctgatccagctcaccaacatcctagtcaactgcaagcaatgcttaacccaagctgactaccttgaacttaaagatgatcatca

SEQ ID NO: 83497 - DNA, 235 bp, Zea mays
  Clone ID: MRT4577_176160C.1
atatgaatcggtctcatggatttgtacctgttctcattgccatgcccggccaggcctacgctaattaagcaagaacttaagctgcctctaaagacctccgtgcacggaccactgtgggcatggccccatgggggcacgccgggcagggaccagctgcttatgcggatcatcgatgatcgggtttaccctcggccgcacgttagagggaacctctctatggaatgaacctacacag

SEQ ID NO: 83498 - DNA, 527 bp, Zea mays
  Clone ID: MRT4577_176161C.1
ggccgcgggttttttttttttttttgatgaatcacatttcagcttttaaattattctgtttttgtttgacatatatatgaatcacatttcagcttttaaacatgcatgcttctctcgcttgtgtacacattcccacggcggacggcgcggcggtgaatacaatcgacgatgattaaatcatgtggtgaggatgggcgggaggatgtcggacttgttgccgagcaccttggcgttggtgtccgggaaggtttccgtcgtggccacgacccggccgtcgtcgtcgtcgagcacgctgaccgggtacgccatgaggtggcccgggaggtcgccctggaacgcgtcgctcgcgaacatgtcccagtgctgcttggccacctggttcatccggcgcacgcaagccaggctcgacggacggaagagatcgtcgcccattcccgccgccgccgcctcgcccaggtgctcctgccacagggagacccggaagccgtggacctgccccttcgccggccggttcctgtcccggccgg

SEQ ID NO: 83499 - DNA, 400 bp, Zea mays
  Clone ID: MRT4577_176162C.1
cccacgcgggcgcacaggctgaagagcacacgctcgggatctccttcgaggtctgctaggatcgacttaatgccctggctataaatatggttcttattcacagcatcacatctgatcaaagggtcaatcatgcttctacagctcacaactcaattgcagctgctggatccagttcacctagctctagatccatatcctacagaaactgcaactactaccatatcacgcgtttctaccgaaaccatacatgcatcttgacacacaccaggcgctgtacctctactctacaagctctacgttacgctggctgtcttttactactgcgacaattgctgccatttaaccaacttgatctgacataacgcgtagtgttatagcgacaacgaataatgggacatga

SEQ ID NO: 83500 - DNA, 287 bp, Zea mays
  Clone ID: MRT4577_176163C.1
ttattagactcggcacaggacgctcactgtcgcaacatcaacctacactgagtcgcagagtctcaacagccgtaggctctagctagtggcgccactgtttcgcggagccagcaggctgaagatcgccacgaatggcgcactgccgagggccagaccccagaccgtcgcggaggctcgcgaagccctcgtagtagagacagcaccgacggccgttgctccctaggagtctgcacccgccgaagccgacgccgagggaaaggatcgaactaacgctcaccccaaggagc

SEQ ID NO: 83501 - DNA, 201 bp, Zea mays
  Clone ID: MRT4577_176164C.1
cataccataagctttatctactacagagcgcagaagaacccgatggactccatgacggtgtagctggaagccctcgctctactggctctagctgagagcaccacctacacgcatacaagcgagaaggtgcggctgccaggcaccatcgccggttcatatacctccggcagtgcgtcagccacctccgggtcacctgccacc

SEQ ID NO: 83502 - DNA, 652 bp, Zea mays
  unsure (1)..(652): unsure at all n locations
  Clone ID: MRT4577_176165C.1
gctttgatcctgtatatgtatatgcaggtctcatgtcttggttttccctaggtcccctttcggattcttaggaaaaactggttgaatcactgtgagacggattagacgagaaacatttcacctggaaattactagaaacgcctctcttgcttttatgcctcgcaaacgcacgattctgattctcgtctcttttctccattggcaaccatagctttttggttagttcttctataatttagtaagttcaaatacgttgcatttagttgttctaggaacaccaaaaactgtataattatttgaataatatatttatatgatttttatgggaaaaatatattcttttgatcataatctaacttaccagccagattgttttcatggagtacttctgattctaaaaacgtttttttaagagaatataatctacccacacactcttagtccagacttctaacaaaaaagcagaagataaaacataaaagcagttatttagactgctgcagcggtaatctatatagacaaaaacactataaaaacagtagaagacggtacagattaaaactaagcgaacagtctgaaaagaaatgctaaacttttatgtatganagtctggatggtttatatatttgattaataatatttttttgcgttc

SEQ ID NO: 83503 - DNA, 152 bp, Zea mays
  Clone ID: MRT4577_176166C.1
tgatgatacagttgatcctgttcgtgatttggaaactattagtcaagaactgaggctcaaggatatagagtttgtgcaggttaaaattgatgaccttgagaagtcaatgaagaggagcaatgacaagcaacttaagatagaccatgaattat

SEQ ID NO: 83504 - DNA, 436 bp, Zea mays
  Clone ID: MRT4577_176167C.1
cgggcttgggtcggcacggctcaacgaagtcacgacgtggtttagggctaggctggaccattgtttttacactttaggctggcacgacacaacttaaatttttttgagctttcctggcccgaacacgaagcacgatgggctttggccgggcctaatcacgacagcgtctgatggctgcgtcacggtcaccctaccaaacttgttaaactttgtcagtgcagcacggctgcaaactgaccagcgccggcctacgtactacgcacaagttacaagtaccatcatgatgcttgacttaaatcatactgctacatacagtgatatatacaggattgacggactggatggacgctgctggtgcaggactgccacgtgcacgcgatcgcgcgggactacggggcgctgacggcgcataaccggcagagcatgctggaggaca

SEQ ID NO: 83505 - DNA, 271 bp, Zea mays
  Clone ID: MRT4577_176168C.1
tttacgtttcgcggacgcgtgggcggacgcgtgggggggctgctgcagtacgtgtactggaccaacggacgacagaccccaaggcggagcgtcgacaacaagaaaagagctgggaagaaattaaaggcactcgtgggcaggctaatcctcgccgagactttcatacgctacgacacatttaccgccgaggtcggtaaggagctgcttggcacaagagttatctgcaccggtgttacgaaagctacctccggtccggagggcgagtaaaccg

SEQ ID NO: 83506 - DNA, 325 bp, Zea mays
  Clone ID: MRT4577_176169C.1
gggtcgacccaccgtcgccacgcgtgcggcctcccagccctatccttttccccactttcgttctccagcattcctatcctctgcggcccgcgcgtgccgtcgccgtcgcacgcgccatggcttctcttcctttgcgactacgatgaaggtttaaagctcaagaagaggcccgtgctgtacgcactcgggggaagggtacagtcgccggaagaagaaagcagtctccaaaactccaaccacagttgacaaagctgcttcaagcacctcgaaaggaataggagtgaacatggttcctggggttgaagaggtcaacttctttaacgat

SEQ ID NO: 83507 - DNA, 223 bp, Zea mays
  Clone ID: MRT4577_17616C.1
taagctcggaattcggctcgaggggagcttgcttgcgaacggtgtataacagggtggatagcatcatggacccgggagacgaatggaatcgattgaagacatccgtagctgcaaaaatgatgaacctgtggtccactacgcggcccccctgttatgagcacaccatcctaacgagggccagtgtcaatacctattaacatgcccaacttatgtgaatctctga

SEQ ID NO: 83508 - DNA, 433 bp, Zea mays
  Clone ID: MRT4577_176170C.1
ttgactctttttcttactcttttttttttttttttttttaaccaaggcaaacagcgcacgttaggcacctgaacactgccactgggcaaaatgttctgtctaagcactggtttagggaccaaaaaaatgaagggcattcatagaccatagggatgaaaccccttactattagggtttcatcttatggatctgctctatttctctggccaccaaccagccttgatagttttttaaacccccctcccccccgaaataaattgtaccattaaaccaaaacttcatgaatgccagattttcaacgggtcaaaccccccattcaagttgttttgcctgtggcacaagaccgtggccttttcatttgcacagtaagccaccacacctgagcgactcatgctaccagctttggattttaggagctggttttggagtttga

SEQ ID NO: 83509 - DNA, 1195 bp, Zea mays
  Clone ID: MRT4577_176171C.1
agcggagtgtttgcccaattgccccgcgccgccgcccccgcagcagagtagcagaccagcggtggatgtgatggccgcgagcggtatggaggatgagagagtgagcggggaggtcagggagcaggaagacgacgaggacaacgtgcctcaactcagcgctgcggcgatggaggcgctccgggagttcctggcggaacagcatcgttcggaggagcagaatgaagctggaggaggggaagacggggtagagctggtcccggaggactggcggttgagccagttctggtacgatgggcgcaccgcgcgggagctcgtggaggaggtcgtccgccttgtctccccttctggatcaggctccgccgccggtgccgtggcctgcatcgcatgcccgacgctctacgcctacctgaagaagacagaccccggagtgcccgcgcagctgctggagtacgacgagcggttcgggcagtacggcggcgacttcaccttctacgactacaaccgaccggaggagctgccggcggcgatgaagcacgcctaccgagtcatcgttgccgaccctccctatctgagtaaggagtgcttggaaaaggttgccaaaacagtatctttcctcgcacgacctgaaggttcattcctgctgctgctcacaggggaagttcggatggaccgggcattggagctgctgaatgttcgtccctgcggtttcaggcctcgccactcgaacaaactaggcaacgagttccggctgttcacgaattaagatcctgctgacagacttggtggttgggagcaaagtgatggtgcccccatttaactataaactaatacaatttttgttctagagctgttccatctttatgaacatgttgcatctttgatccacagctcactgatccctccaatttaaattgtagtgacaattatttgaggaatctgtgtgctatgatgtatgattaatcaaacatttacactgttagtgtacctcattttaatttcattttaaaatacactgttagtgtatgtttcattttaatttcatcagtattctttagaatgtctcgttggcttattcagatttatagccaaaatgacattatcttggggatagttcatcagtattttttaatttcattatctcgttcggcggcggcatccccgacgggcacagcctgcacactggcgggcaggtcgt

SEQ ID NO: 83510 - DNA, 735 bp, Zea mays
  Clone ID: MRT4577_176172C.1
atggcgaacgcggcgtcgggcgtggcggtggcggaggagtgcgtggcgcggttccaggagctgcgcggcggccgcgcgcaccgcttcgtggtgttcaaggtcgacgacgcgctgcagcgcgtggtggtggagaaggcgggcggccgggccgccggcttcggcgacctcgccgccagcctccccgccgacgactgccgctacgccgtctacgaccacgacttcaccgtcggcgtcggggacgccgccgccgccgctggggagctcgaggcgccgcgcagcaggatcgtcttcgtggcctgggccccggaggcggcgggcgtcaggagcaagatggtgtacgccagctcctgcgaggggttccgcaaggagctggacggcgtgcaggtggacctccaggccaccgagcccggcgagctgacgctcgacgtcctcaacgaccacgcctcctgaatggtcgaggaggatgaggcgcttgctttgcgttgccgtccacggtccgtccattccgtcaccgtcacgtacgtgcgtgcaaggtggtggtgtgccgtgtacggagggcgtttgcgtagttgcattcgtgcgtactactactgtataataataccgagtcagctcataccgtgcttggattgttcccttcctgttattgctgtatgcgtgtacgcgaacactcgtactatgctcattgatcagcgtgcatcacaagtgctgttgcttgctgctggccacggcttc

SEQ ID NO: 83511 - DNA, 437 bp, Zea mays
  Clone ID: MRT4577_176173C.1
gctttgcctttatgacagcgaggcgagctgcacctgaagaagacagacccgggagtgggcgcgcagctgctggagtacgacgagcggttcgggcagtacggctgcgacttcaccttctacgactacaaccgaccggaggagctgccggcggcgatgaagcacgcctaccgagtcatcgttgccgaccctccctatctgatgagaggaaatatcgaggagaaatggctattattcattggttgatgatgtagagtaaggagtgcttggaaaaggttgccaaaacagtatctttcctcgcacgacctgaaggttcattcctgctgctgctcacaggggaagttcggatggaccgggcattggagctgctgaatgttcgtccctgcggtttcaggcctcgccactcgaacaaactaagcaacgagttccggctgttcacg

SEQ ID NO: 83512 - DNA, 475 bp, Zea mays
  Clone ID: MRT4577_176174C.1
ggatcaaagatgcaacatgttcataaagagggaacagctctagaacaaaaattgttttagtttatagataaatgggggcaccatcactttgttcccaaccaccaagtctgtcagcaggatcttaattcgcgaacagccggaactcgttgcctagcccgttcgagtggcgaggcctgaaaccgcagggacgaacattcagcagctccaatgcccggtccatccgaacttccccagatagggagggtcggcaacgatgactaggtaggcgtgcttcatcgccgccggcagctcctccagtcggttgcagtcctagaaggtgaagtcgaaggcgcactgcccgaaccgttcgtcctactccagcagctgcgcgggcactccggggtctgtcttcttcaggtaggcgtagagcgtcggtcatgcgatgcaggccacggcaccggcggcggagcctttatggggggagagtattagggat

SEQ ID NO: 83513 - DNA, 1529 bp, Zea mays
  Clone ID: MRT4577_176175C.1
ccggccgggactcccccaatccccagcagcctcctccaacccacgaggccacgagagagagagagagaggcagaggcagccgctgccccggagccacgcctcccctcgcctcagacccgcggctggtgctcgctcgccggcggcggagcgccggggcaggtgatccactgctatcattactgccctattttgctggctgcaggcttgtgataatggacaaccttgggcatagagaaaatggcaggcaaaggcctgagcaatataaagcgcttcatactcagtggatgatacctcaaaggcagctaaaagaccatcaaagtatgaatctcctggcactgatgaatgagaaggacagtgccatccgagaaagggaccatgctctcgctgagaagaaagcagctatagctgagcgagatatggcattcgcccagcgggatgctgcaatggctgaacggaatgctgcaatagtggagagggacaacgccctagctgcactcgaactcgcccgtacaaatgggtttaatatgaatagtgggaatggatttcaccaaggacctcctctcaatggaacaaagaacatccatcaccatgaccatctgtctcatgtccaaacatccccgctgcagctggccaattctccatatgaccatgtcagggagatgcacatatcagaagcataccctatcgcaacagctcccgcaagtgtcgggaaggctaagaagccaaggaagagcaattctcaagcttctccatcgaagaggccatcaggtgtactccgaaaaaccaagaaagcaaccagcgactggaagaatgcggggactactggtggagcaggagattcagcccgcgcttctgtgatgaagaacgagtggaaggaccaggatctcggcctgaaccaggtggtgttcgacgagtcaaccatgcccgcgcctgcctgctcatgcacaggggagctccaccaatgctacaaatggggcagtggtgggtggcagtcgtcttgctgcaccatgaacatgtccatgcacccgctcccggtgatgcccaacaggcgccacgctcgcatggggggaaggaagatgagcgggggcgcgttcgcgaagctgctcagccggctggcagcagaaggtcatgacctctcgactccggtggacctcaaggaccactgggccaagcatggcacgaaccggtacatcaccatccggtagccagccggcggccacgttgaagcctgagcctggaaggggggagagatcacacaaacgtcgccttgtcctgcatcccctaaaccctctcttttgctatgctctgtaatgccattggtttgtagtggatggagcacttctgcgttcatgaaaccacagcgttgtaggttctcccctccattgtgctggactagtaaactgtgctcgcgagctggagtgctgaagtccgcgagaatccatgtgtaattgtagctcagaagtattcgtcgcgtgatagctgtacagtttgacatctggattcgagtcgagtggtggtagttggaggtc

SEQ ID NO: 83514 - DNA, 1200 bp, Zea mays
  Clone ID: MRT4577_176176C.1
caccagcggagtgtttgcccgtttgcccaattgccccgcgccgccgcccccgcagcagagtagcagaccagcggtggatgtgatggccgcgagcggtatggaggatgagagagtgagcggggaggtcagggagcaggaagacgacgacgacaacgtgcctcaactcagcgctgcggcgatggaggcgctccgggagtttctggcggaacagcatcgtccggaggagcagaatgaagctggaggaggggaagacggggtagagctggtcccggaggactggcggttgagccagttctggtatgatgagcgtaccgcgcgggagctcgtggaggaggtcgtccgccttgtctccccttctggatcaggctccgccgccggtgccgtggcctgcatcgcatgcccgacgctctacgcctacctgaagaagacggaccccggagtgcccgcgcagctgctggagtacgacgagcggttcgggcagtacggcggcgacttcaccttctacgactacaaccgaccggaggagctgccggcggcgatgaagcacgcctaccgagtcatcgttgccgaccctccctatctggtactgtttctaccctaccagagattgcctattaaaaagtgtttgatcagttcttaacatttgagatgagaggaaatatcgaggagaaatggctattattcattggttgatgatgcagagtaaggagtgcttggaaaaggttgccaaaacagtatctttcctcgcacgacctgaaggttcattcctgctgctgctcacaggggaagttcggatggaccgggcgttggagctgctgaatgttcgtccctgcggtttcaggcctcgccactcgaacaaactgggcaacgagttccggctgttcacgaattatgatcctgctgacagacttggtggttgggagcaaagtgatggtgcccccatttaactataaactaatacaatttttgttctagagttgttccatctttatgaacatgctgcatctttgatccacagctcactgatccctccaatttaaattgtagtgacaattacttgaggaatctgtgtgctatgatgtatggtcaatcaaacatttacattgttagtgtacctcatttttccgtgatcatgtttcggaggactataggtgttgtttggttcacatatttgtaatggataataaataacgttaaatc

SEQ ID NO: 83515 - DNA, 897 bp, Zea mays
  Clone ID: MRT4577_176177C.1
cattgggtacctcgaggccggccgggccgccactcccccaatccccagcagcctcctccaacccacgaggccacgagagagagagagagaggcagaggcagccgctgccccggagccacgcctcccctcgcctcagacccgcggctggtgctcgctcgccggcggcggagcgccggggcaggtaagccggcccccccgtgcccgtccttcggaagtgtctctgcagcagaggaggacacgctgctgacagtgtgatccactgctatcattactgccctattttgctggctgcaggcttgtgataatggacaaccttgggcatagagaaaatggcaggcaaaggcctgagcaatataaagcgcttcatactcagtggatgatacctcaaaggcagctaaaagaccatcaaagtatgaatctcctggcactgatgaatgagaaggacagtgccatccgagaaagggaccatgctctcgctgagaagaaagcagctatagctgagcgagatatggcattcgcccagcgggatgctgcaatggctgaacggaatgctgcaatagtggagagggacaacgccctagctgcactcgaactcgcccgtacaaatgggtttaatatgaatagtgggaatggatttcaccaaggacctcctctcaatggaacaaagaacatccatcaccatgaccatctgtctcatgtccaaacatccccgctgcagctggccaattctccatatgaccatgtcagggagatgcacatatcagaagcataccctatcgcaacagctcccgcaagtgttgggaaggctaagaagccaaggaagagcaattctcaagcttctccatcgaagaggccatcaggtgtactcccgaaaaccaagaaagcaaccagcgactg

SEQ ID NO: 83516 - DNA, 298 bp, Zea mays
  Clone ID: MRT4577_176178C.1
ctcttctcccccttcttttcctcaaaaaaaaaaaccccaatctgcctaaccgtggccaccaaaaaacccaccccccacctccccaaaaaaaccccgagctccttgggccacacataggctaaattgtccccggccaacccctctaatttttccttggggccaaaacccccacctgggatttaaacccccacacaaaagaacccccttctttgttaaaaaaaaggggccccccccatcttacccattttaccccccctaaccccactttgaggtgggttgcccgcccctgtttttcccc

SEQ ID NO: 83517 - DNA, 986 bp, Zea mays
  Clone ID: MRT4577_176179C.1
aatctcccagaagaagaagaagaagaagaagaagaagagagggagaagaagaagaagggatggagcctatgaaggtgtacggctgggcggtgtcgccatggatggcgcgggtcctcgtctccctggaggaggccggcgccgagtacgagctcgtgcccatgagccgcaacggcggcgaccaccggcggccggagcacctcgccagaaaccccttcggtgagatcccggtgctcgaagacggcggtctgacgctttaccaatcccgcgccattgcaaggcatattctccgcaaacacaagcccgggcttctaggagcaggcagcctcgaggagtcggcgatggtggatgtatgggtcgacgtggatgcccaccagctggagcccgtactcaagcccatcgtgtggaactgcatcatcaacccgttcgtcgggagggacgtcgaccagggcctcgtcgatgagagcgtcgagaagctcaagaagctgctggaggtgtacgaggcgagactgtcaagcaacaagtacttggacccggggatttcgtcagcttcgccgacctcacccatttctccttcatgcgctacttcatggcgacggagcatgcggttgtgctcgatgcgtatccgcctgtgaaggcatggggagaggagctgggcgttatttcttgatccaataattttgcctatggcacattctgtggaaactttgacggatctttgcctgcttttctatgcgatgtaagctgctaaacctgcactatcaaatgttgtgtatgcagatggtaccatgcatttgtttccctgaaaggccatcggtcaagaaggtgatagctggcatgcctccggattttggattcgggagcgggagaataccatgataaagcatgcttgtttgtctatgatgctctgatatctttactgaacccacgagcaataaagtaagcaagatatttatgtccaaccccatgttctcccggtttttcattcg

SEQ ID NO: 83518 - DNA, 263 bp, Zea mays
  unsure (1)..(263): unsure at all n locations
  Clone ID: MRT4577_17617C.1
ggaaaggggaacaccaacagggaccaccccaaccacaancatccggaaaggatacgggacgggagcaatgcagacaccgcagcgaactcgaaccagatgtacaaaacggacgtcacaccgcccaaggaaaagggcacggacacagatagggcatggacctcaggaaccagaacaccggcggacggaacaaaacaaggaggcagaaacccggaggggaggaagaaccacagaaaccgcaccaagcgggggctggaaaaccgaac

SEQ ID NO: 83519 - DNA, 474 bp, Zea mays
  Clone ID: MRT4577_176180C.1
cggctgggcggtgtcgccatggatggcgcgggtcctcgtctccctggaggaggccggcgccgagtacgagctcgtgcccatgagccgcaacggcggcgaccaccggcggccggagcacctcgccagaaaccccttcggtgagatcccggtgctcgaagacggcggtctgacgctttaccgtaagccttcttcatgttttctgttttatttttgattcagtaggcatattgtttttctaccaattattaagcaatttggtgggcgtgataaaaaaacccgaggggtactgatttctctccgcaatttattttcttgagaatcccgcgccattgcaaggcatattctccgcaaacacaagcccgggcttctaggagcaggcagcctcgaggagtcggcgatggtggatgtatgggtcgacgtggatgcccaccagctggagcccgtactcaagcccatcgtgtggaactgcatcat

SEQ ID NO: 83520 - DNA, 534 bp, Zea mays
  Clone ID: MRT4577_176182C.1
aacctattattgagacaacacgcaaatataaggtggaatacagaagtagcactagagcaacaactggcggccaagatcttgtccatccttaggctccttgatctttttgactgtggtgataacgcgaccatttgttcctcaatactcataagctgctatagctggccttattgccccatactttccatcaatgaccgcttcaacgtgtgaaaacccacgcattcaaccctacaggatgcaacaagcagatagcaacaagcagcttacctttatcacacctgtgctttcaacattcatgagcgatatctttgaggcactcatcgcgacaaaccatgagggcacaacacgttcatcaagtgctgctaccagtgatcagccatgtaactgtggacaaccttcatcactactgtgaccagcaacaatgtcttgcattgaaccaactgtctacacaacaaacctgctgctgatttgcagcagcagcaaactactaccattgcaaacagctaggtactggctactgtcatcatcaacgat

SEQ ID NO: 83521 - DNA, 1818 bp, Zea mays
  Clone ID: MRT4577_176185C.1
cattgggtacctcgaggccggccggggtcccatttctcctctgtcctccctcgctcgctcccgttctcccctgcctcgccgcctctctccctgtcgtacccacctgccccctcgcggtctctctctccttcctgattggatcaatctggcctcgcggctccgactgatccgtggcgcctcgctcccgagcggaaccaccacctgatttgacgagactagcagatactgtcatggctcaggatgaagctgtggctacccaaaagactggaaatacaacatctccttctaaggattacccaactccttctccatatcctgattggtcaaccatgcaggcatattatggccctggtgtcttgccaccaacatattttactcctgcaatagctccaggtcatccaccgccatatatgtggggtcctcagcctataatgccaccccctttcgggacaccatatgctgcagtatacccacatggtggagcttacccacacccccttgtgcccatgatgtcaactccaatgagcgtggagccagccaaatctacaaatagcaaggagaaaaattccaataagaaacttaaggaaatagatcggactgcagtgtctgctggcagtggtaacagtaaaagaacagtgtcatccattgaatacagtgcagaaggctcaagcgatgtaaacgatcagaatgtgaacgaaacgtccaggaagcggagctcagatggtggacctggcgcagaaaccaccacaggtggaaacacggaatgcgttttagctcctaacatacgctggggaatgctaccattttggcacacactgcttttcagctccaggcgtcaagcccagtgctacaaatgtcgcgaactcgagggcgataggcacggcattatctccaccacctggtgtgatggttccagttcataatgcagtaccatctgacttatcagttaaggatgagagggaattgaagcgcgaaaagaggaagcagtcaaatagggagtccgctagacgatcaaggctgagaaaacaggtgtgctgtgtgatacagttgtacaatgaagcagcatcctgaaacatgggagtggagtctggcttggattatttgtcctaacaacatatcttcaatcttatacttatgccctcccttggtgtaggctgagacagaggagttggctacacaagtggagtctcttgcagcagagaacacgtcccttagatctgaaatcggccggctaacagagagctcagagaagctcagactggagaattcagctctaatggtgaagctgaaggacaccgcagaaccgtctccgagcaaagcagccgcatccccgtcctctccccgtgcctccgcggagaacttcctttccatgatcgacagcgccaacgcgccgagcgtcagcaggcacacggagcacggcggtcccaggctccggcagctcctggactccagtccggcgacagacgtcgccgccgtaagctgacgatgaagctggtccggcaaatacgccacagcacatgcatgtggcctggggattccgcaggctcatgcggctcgagtgctcgccgtaaacgtcagcgttacggactcggactctgtactccagtttaggcactgattccagtgaagtaaccgagggtactcgtaattttatctgctctcgcgccagagtgccgggctgcctgcgaccactcctgtgtacccagagttgtaacgtagtagggtgttgtgctgcatgccgaccttttgaaactttggagaccgtcatttggaccatttttttcgtcgcaataacacaatacagatcggagtttgtac

SEQ ID NO: 83522 - DNA, 576 bp, Zea mays
  unsure (1)..(576): unsure at all n locations
  Clone ID: MRT4577_176186C.1
ccggccgggagacactgtctctagctccgtgttctatcactgctgtagaagtctagctcgcatgactgcatttcacaggaaataaacctgcaggcatatcgcacattgccatgcgcatgagcatcccccatgataagagactccatgaaacaggctctgagctcaccttggatgcctttctccatgctgattgcatcgatctctaccaaagtgactcctgagaatatcgacatcattattgagtgctatgactactttaagatcaagaaaataacccaaggagaactaaagaacaagctgaggcatgtatctgaggatagagtgataatatcgaccataaagcctctccaagataagttcctccacgcataaacgtgaggatccaaaccatcatatgccaatgtgccatcgaaaccatgacatngctgtcattaggtggtgaaaaaatgcataatggcatgatccaggcgacttgacatagaaaaccctgtgggaaatacggaactatgaaccctcttgcatccattgtgagcatgcacgctgatgtttcgaatatgtatccaaggtgtgtaccct

SEQ ID NO: 83523 - DNA, 613 bp, Zea mays
  Clone ID: MRT4577_176187C.1
ttgcttactctaaaaaagaaaaagaaacctgcacatgcctccaacccggggaaatgaaggtcaccgtactccttgcattggccacggccgccgttgctgacatcatcaacaacgagtacctcaagaccgaagtcattactgaggccaagtgctctcgcgcgagcaaggctggcgacaagatccacgtccattaccgcggtactcttacagacggcaccgagttcgatgcttcatacggtcgtggcgcgcccttgagcttcaccgtcggctcaggccaggtcatcaagggctgggaccagggtctgctggatatgtgccccggcgagaagaggaaactcaccatccaacccaagtgggcatatggcgagcggggtgctggtcccattccccccaacagcgttctgatcttcgaatcagagctcgtctccattgacggcgttgaaaaggaggagctctaaacgttgtatatgacctacgactgtgcgctctccagtttccggttggatacctgagttatgagcaagcaacaatgcaatacgatatcatgaaataaatggtcaagaggacctcacatctaaaaaaaaaaaaaaaaaaaaaaaaaaaaggcccctaa

SEQ ID NO: 83524 - DNA, 335 bp, Zea mays
  Clone ID: MRT4577_176188C.1
tcttggtgaccgcgagggcccacagcacgagcgggttcttttaagactatctgccgtccattcccgcctctagcgaccgaccaacgcgttcggccgagatgataagtcagacgtacgaggacaaccacctgatatgctagatcataggacaccacctcacatcggccgccatagttggacacgagcgggccctcagcgataagagcactgaatcggcagaagtcaagtgccactagaaggctgccatcatgaaagattgtgacgagccggggcacactaggcccaccggactaatactgggaggcaccaagtacatgggcattcaaggggaacct

SEQ ID NO: 83525 - DNA, 484 bp, Zea mays
  Clone ID: MRT4577_176189C.1
gccgggactgagggactgcaatctcgacctcgagctcatcgactacacctttctagctgatcttagggcctgactgaccctccgtgacacgaacctagaggatgaaaccttgaggcatagaggcataggactgtcacgactgatgagggtactaacgcacacattctgggttgcgcttactcgaccctcgctatcgcgtaagcttgcctgtacagctgaacgcttgaataccgcagcatgcggacatgagacagcttgcgtagagcgctcacttccgcttattttctgacgtgagtccgttcgctcagtgagctattaggcactatcgaaaggaggtcagtttatagccaaacccggtgtactgccatagccaccggatctcgcttataactaacatgggagcataagggccttagatggccatcaaccgctgaaaggctgtggacgatgacagcttatccatagatctccgtcactggtgaga

SEQ ID NO: 83526 - DNA, 369 bp, Zea mays
  Clone ID: MRT4577_17618C.1
cgggctcttgggtccggcctgtggccgttcccaacctcatggcgtatttagcgagcagcacagcatgccaaaagcggcgccgccccccgcacgcacaaggtgattatgtctgggatgggatctgatgattcacactgggcaagatgaatgtctgaacggagatgtttcacagaaaaaagtatgacctgggccgaccaggatgaagcgtaaggaatgccctcacgacacgaggtggaggactctacgacaaaaaagctggggggtagattgcccaagctggccgccgtggacagacatgaagatgcaggagctcgatgcgaccagattcggtgctgttgtgcccagcgggggaggggatctaacaggcct

SEQ ID NO: 83527 - DNA, 377 bp, Zea mays
  Clone ID: MRT4577_176190C.1
cgcgctcctcggcctcccgctcccgtgcacctgcgcgcgcccgcacctgccctgcctgctctccttcctggcgcgctacccgtccctcgccgccggatccctccacgccgccctccgcgcccgcttcccattcgtcggccccaccgaggacgaggaccaccgtcaggagggggccgaggaggagggggaggagcaggccgtcgatgcgcggaaggaggaacgggaccttcgtcaccgcgaggaggcgcgcaccgagctacggcgggagctggagaaagagcgcagcgccgcggcgtcggcgaccgaggaggccatgtccatgatcctgcgcctgcagaagagaagtcggcgctggagatcgaggtgcgacagcagcg

SEQ ID NO: 83528 - DNA, 422 bp, Zea mays
  unsure (1)..(422): unsure at all n locations
  Clone ID: MRT4577_176192C.1
aggaacgcggcctacacgctttctttttctttgttctttttttttggtggaattgtcacagagatcaaggatgctttactccctagcggaacagccatatgaagtgaacgtgccacatgcacctgagtgagtaaaaatgccacagtgaacagtacctgggtacatgcgagatctgaaaaacagtctggtggagatcatatgtgcaataaaagtgtaattcagggcatgttttgtatcatagtggtattttgtgcgcttaaatgttgtaggggagaatgttggaggagaaaatgttaggtacatggtgaatagtcnaattttgatgaaagtaattggatgggangttgctaagggtgagttgtgaagaaataagggcgatggngggagattgggggtggatttagggggaaaagtgttgggta

SEQ ID NO: 83529 - DNA, 118 bp, Zea mays
  Clone ID: MRT4577_176193C.1
cccacgcgtccgcagaagatcaattgctttccaaatccacgctgacaccaactcgacgagctgcgcgccaagcaccaaagctccgatgggccgcactaaacagactgctcgcaagtcg

SEQ ID NO: 83530 - DNA, 421 bp, Zea mays
  Clone ID: MRT4577_176194C.1
ggaaggaatgggtggaccgacgcgtgcgtacgcacaccaagcgaagcgcactagcatcgacctaacaacattggctaccaagatattcgccgtgcttgcgcttcttgccctttttgggagcgcaacgaatgcgttcattattccacaatgctcacttgcgtcctagtgccattattgcacagattctcccaccagtatacttcaatgggcttagaacacctagctgagcaagccaacatgcaacaacaagcgcttgcagcgagcgtcttacaacaaccacatgcccaaatggaacaacaatccttgccacatttaacacttctagccatcacaacgcttcagacacaacagtttctaccagcactgacctaactaaccatggtgaaccctgccaactacttgcaagagcagctgcttgcat

SEQ ID NO: 83531 - DNA, 441 bp, Zea mays
  Clone ID: MRT4577_176195C.1
cccgaaacccccggggaaccaacggatcttcccataaaaagaaaaaagaggggccagcaaaacaaaacaaaaaaaaccaaccccacacgaaaaaactaatcttaaacaaaaatttaacccaaaaaggggggggaaacccttggaagggcaggcggaaacagaaccaaaaatgggggaaaaaccagggtttaagaaaacccaaagccccccaaggggggaaggacaaacgacccgaccccaaaaacccagggaagttagggggccccaccgcaaaaacaaaacccgaaaaaaaagggcaagcaacggaaggaccccccaaagggggattttaattccggcccccggggcaggggtaaagggggttggcggcccccaaaacggggggaaaaccccaaaggggggtaaaaaaaaaaccggtttttccttggaccaaagccccag

SEQ ID NO: 83532 - DNA, 597 bp, Zea mays
  Clone ID: MRT4577_176196C.1
cctcgaggccggccggattctcttttcctccgcagcggcgcctacttcccctcccgtgaactccggcttccgtgctagatcgagctagcgtttgatcgttctctacaccggctgacatggaccacataccaataggaggacaactacacggtggaggaccttgatgcgccctgcaatcctgacaacccccacatcatcagcgaccttgacatcttcatccaccagcgagatgcggcgcaaacatataacttggatgctgatatcaaccttcttcgcctgtgccagtttgatgcagtaaagatgagcatacatattgaggcccacatactgatccaggctctcatgactatgccattccctgacttcagcctatgcttattcttaagtcctgaacatgagaagatggaatagcaattcaaggcattgacagatctttctcactatctagagactgctatcgctcactgcatgatatgcgatgacgcaacatacaaccgccacatattggaagcagttccacgttctgagcatgcaatccaatcctatgcaattgatgtactttgcttgacataccataaaggtcccaggtatattctt

SEQ ID NO: 83533 - DNA, 359 bp, Zea mays
  Clone ID: MRT4577_176197C.1
ccctccgcgtcggcctggacgccaccaccgcatccgactaccgcttcgtcgtcgccgccggcgaggaggcactcggccgcgccaccgaggcctacgaggcgctcaccggccctgcccctgggaccttctggaccgcctgcgccgggtgccggctcctacacgagttcgagcgcaagtatgtgggataccgactggcctgcccatcctgccgccggaccttgatcggcgtggaggtcacacctccgccggaagacgaacccgttgcccggatgcctgcgcctcatcagatgccaccgggcaagatgcccgagaagatggacatgacgctcgccgtgatgcaactccagctcgtcaagaag

SEQ ID NO: 83534 - DNA, 246 bp, Zea mays
  Clone ID: MRT4577_176198C.1
ggggggttttgaagcatcaacaagtcgcatgtattcccctctgtaacatggagctacataaatctcattaggtctggaacattctagacgctatcaccaaaaccgataactagggtttgatcacccagaacacacggaagaatgacattttactgagaaagaaagggtaaacaagctgcacctgcacccggcgggagctatttatgtgggcccagaattcagagctccaactttggcttgacgatt

SEQ ID NO: 83535 - DNA, 250 bp, Zea mays
  Clone ID: MRT4577_176199C.1
gtcgcccacgcgtcggaaactgagtgagaccaggttgaggtgaaaagagggggaaaacgctgtgtatggttgctattgtggggaacgacaggacctctcaagatgtggtccttgcgcatgctcccctattgatggcgtgggctcgtccgttttgggtaacctcgctgccacaggctgttggtgcctggtgggatcatgctgggttgaggagggcgtgagacactggcttctgcagtcccgaatgagcagt

SEQ ID NO: 83536 - DNA, 379 bp, Zea mays
  unsure (1)..(379): unsure at all n locations
  Clone ID: MRT4577_17619C.1
ggcgatatggcctagnanaagaaaagctgcgaggagtttgaagctgcagttacagaaacactgaaccatgggttccgaactggggacatatattctcctggaacaacactggttggatgcaagcggatgggggaggaagtcttgaagacagtggagtcactgaaggaagtggctgctgtgaactgatgcatgctggtacttgattcattgcattttattagaagtcgagccgagtgtaagagagcatggtgtggctgaactgatagccacttcgcatttctgtggtttgttggtctccctgtagttttttctttggtacaaggaaaggataggcatatgtttgctcaataaaatgggatagtttatgccgctttgaatt

SEQ ID NO: 83537 - DNA, 490 bp, Zea mays
  Clone ID: MRT4577_1761C.1
gggcccccttgcgagtttttttttttttttttttttttttttttttttttttttttttttttttttttttttttttttttttttttttgagaaaaatagaaccaatttcaaattttaaaggccccttcggttgggagggaaaaaaaaatccaggggggacccaaaagcaaaggccaagccaccgggaacaggacgggggtcctgttcccctttttatgggcccgggggcccccccaaacaaaattacaaacaggccctttacattgggggaaaattttatagccctttatggggggcaaaagggccttttcatttttaagggggttcccttttttggaaacatgccaaagttttcctgtttaaaagtttggggggtggggaaacctttggagcttttccctttggggaacgagcccaaaaatacctgctcacacattttaagccgtttttcccttgaaaacctttgcaaaaagttccattaaattttcct

SEQ ID NO: 83538 - DNA, 196 bp, Zea mays
  Clone ID: MRT4577_176200C.1
cctgccctctaataacagctgcagcagcagccgccatggcttccagcagcaagaagctccaggcgttcatcctcacgctgctgctggtgctctccaccgctcgtgactcccatcctctcgctgtcagtgctagacgacgatgtagcctgcgactgtgataaactctaggcgctccaagcgtcgcatccgcccaaga

SEQ ID NO: 83539 - DNA, 415 bp, Zea mays
  unsure (1)..(415): unsure at all n locations
  Clone ID: MRT4577_176201C.1
aacagccccccggctgaatggtattagtcgaaattcccccaatagggggtgcgggcccaatgcctctccctgggtaaggtcacatattagtaccggcactcgggggccaaaatttgaaaggtaaaaactttgttttttgtttnngtttaaaaaaaaaaaagaaagtagaaggaaaaaaaaaaaaaaaaaaaaaaaaaaaaaaaaaaaaaaaaaaaaaaaaaccaaaaaaaaaaaaaaaaaaaaaaaaaggtacaaaactcacgcactaaactaaactaggatgataatgatgatagaagcggtgacctagtgccagagctctcacatgtgacatgtgtggagtttatgaaagagataaaccgtcttcctccgtaaattccgtaaatacagagatgctgctttgaacgcgtggtac

SEQ ID NO: 83540 - DNA, 444 bp, Zea mays
  Clone ID: MRT4577_176202C.1
aaataaaaaaaaaaaaaaaaaaaaaataaaaaaaaattaaaaaaaaaaaaaaaaaaaaaaaaaagaaaaataaataaaaaaaggggggggccctctatagagtccccattttcacacccgcgcgcgcgccattttatatcttttatatgggcccccatatataaaattctggccccgtctttacacaaccttgactcggaaaaccctcgcgcatccccaaattaaatccctttacaacacccccctttttccccatgtggtataatagaaaagggccccacccatctccctttccaacacttttccacccccattatgtattgggacccccccctctttgtctcatattacgcgccgggtgtgtggggtttcccccccatttacaccttctcttttcattgccccatagcccccgcctttttactttttttcctttttttttcg

SEQ ID NO: 83541 - DNA, 261 bp, Zea mays
  unsure (1)..(261): unsure at all n locations
  Clone ID: MRT4577_176203C.1
cccacgcgtccgncccaagnnnngtgtttaccctagaagcgcatctgctgccatggacgccaccttcactggaggtggagggaaggctaanaagggagcggtcgttctcaaggccttctggccgaggaagaattctttgactaggtccgtgaaggccggtctccagttccccgtctgccttatcgtgcgctaccttaagaagggccgctacgcgcagctctgtttgcagctttgccctcttctacctcgcgttcgtcctgg

SEQ ID NO: 83542 - DNA, 193 bp, Zea mays
  Clone ID: MRT4577_176204C.1
gggctctgcgccgccggccacgctggccgagttcacgctcgacggcagtggcgggctggacttctacgacgtcagcctcgtggatggctacaacctccccgtgctggtggagacctcctgttgctcatgctccagcgggccggcgttgttcgcggcagccgggtgcgcatcggacctgaacgcgatgtgcccc

SEQ ID NO: 83543 - DNA, 1306 bp, Zea mays
  Clone ID: MRT4577_176205C.1
cgggcccacgcacactcgtgcgtctctcctcctcctcccccgcgtcgcgtgcgcgctctgcttcccttgccgccgtgtgctgcgagggtcgactgtcgagcgcgcgctgcttgctgctcgcctggccgtcgatgagcatggggcgcttcgtcaactccatggatccgacgtcggggctggaggtgatcagagactggaacggcgtagcccaggtcgtgctccgctcgcccaagggagcctccgcgcgggtgagcctgtgcggtgggcaggtcgtctcatggaggaacgaccgcggcgaggagctcctcttcaccagcagcaaagcaaccttcaagccgccaaatgccatgcgaggtggaattcagatgtgtttccctcagtttggatactctgggacattggagcgacatggatttgcaagaaacaggatatggtccctggatgatgagcagccaccactgaatcataatgataacggaagcaaagtttctgttgaccttattctaaagccatctgaagatgacctcaagtgctggccacattgttttgagttccgtctgagggcctctctttcaaaggatggggacttgtcattgatatcacgcatcaggaatgtcaatggcaagccattcagtttctcatttgcttatcacacatatctttctgtttctgacatcagtgaggtcaggattgaaggtctggagacacttgattatcttgacaaccttagccacaaagaacggtttacggaacaaggagatgccataacatttgagtcagaggtcgaccgagtctacgttagctccccaaatgtagtagcagttattgaccatgagaagaaacactcgtttgtcataagaaaggaaggacttcctgacgttgttgtgtggaatccatgggaaaagaaatcgaagaccatggtagacctcggcgacgaggagtacaagcagatgctttgcgttgatgcggctgctgtggagagagcaatctcgctgagaccaggggaggagtggactgggaagctggagctttctgcggttttatccactaactgcagcgaccatcttgatcatcctgtcagcatctagcgtttattcccattgtagtgctatatatttgcctcacaagagaagtatgggccccttttgtaaatgagatcaataggtagctctgttatcagttagcagctcgacttgatcctggaaccggcacaatttgtgacctgtttttttaatgtgagtattgaatgatagcagcgccttgcttcatgcataatgcacacaaaatggcaagatttatcaaaagg

SEQ ID NO: 83544 - DNA, 245 bp, Zea mays
  Clone ID: MRT4577_176206C.1
gcctaaaaagcctaaacatacgatgttacagactaaaacgcttatctacgcggggaacctagcaattaatttggtaaatatctacatattaaatgaaaaataaaaaaacatacaaattatgaagtttgatgattacttttctcgctcatttgtaattgctagcgtatacaaattctgatgtgaaaagatgtttatggaataaactgagtataacatagctgacattctattgaaacatattcctg

SEQ ID NO: 83545 - DNA, 173 bp, Zea mays
  Clone ID: MRT4577_176207C.1
tttatttttttttgttgatcagggagagggggagggacaatttcaaaagggcagattcatataaccatttcgaaaactacaaggggtcgctgataatggttgctaagcaaacagacgtgaaaaaggaccaagaatagcatgggatccaattaaagaagcttaggagtacaata

SEQ ID NO: 83546 - DNA, 514 bp, Zea mays
  Clone ID: MRT4577_176208C.1
cggatgcgtgggcgcccctcggagccggtgatggcggcgaccgcggagacgtcttcgccgccgccgcaacggcgcccccgcacgggcccacccccggggctgaagaacctcagcaatacctgctacctcaactgcgtgctacagtgcctcgcgtccacgccgcccctcgccacgttctgccttgcctctggccactccgacatttgcaagaaggtgtccccgaatagggacaaggagtgcgcgttctgcgtgcttgagcggcagatcgcccggctgcttcgggcagatgctggggcgctcgattccccagcaaaggtaatccgctgcatgcccctattcggtgaggacttcaagtgggggcgccaggaggatgcgcacgagttcctccgctatgtggtagaagccctgcacactgctggcctcccgacgcgcaagctgctactcgctaaaggtgccaatggtaactgtggtgaggaatggagggggcagggggcatgtttgttatgagggagac

SEQ ID NO: 83547 - DNA, 709 bp, Zea mays
  Clone ID: MRT4577_176209C.1
gccggccggttccgagtcgttaaaaccgagaagagaagaggccgaaggaaaacaaatcctgaaaccaagccatgggtctgcaggaggaatttgaggagtacgctgaaaaggcaaagaccttgcctgagagcacgagcaatgagaacaagctgatcctctacggactgtacaagcaagccactgttggaaatgtgaataccgaccgtcctggcatattctaccagaaggacagggccaaatgggatgcatggaaggctgttgaaggtaaaccgaaggaagaggcaatgaatgattacatcaccaaggtgaagcagctccaggaggaggctgcggctgccacttcttaaagtctcttaatagttgccaaacagctattgtcagctgagctttatgccatttgttcgtgagaaatagatcatttgatccactggggatctgtgaactatgtacctgcttatgtaactggttaccaatgttatccatctatctacatgtgaagacttaatatgtctgtgtattaaggctgtgtttggttcagtttctaggaagtgcgcttctgctggccaaacgggtagaacacgaagctgtttttccaaaataggctgttttcatgtagtataattatcccacaccttggaccctgctttgcctttcagctttcagttttccaaatgggtgaataaaataaagagatgttttcatttgcttc

SEQ ID NO: 83548 - DNA, 817 bp, Zea mays
  Clone ID: MRT4577_17620C.1
ggatcaaatccatccattgtgatatttctgcaattaactaactctagaatggtaagagatgttagattcgcgggcagagccatcggctcggtgctttgctcacagccaagacaattacgtagtgtgagttcctcaagagatgtcaaatttgcgagcagagctttctgaggcagagtttccatataataaagggagagtttcctcaggcagggggggagagggttgatgatgctctgagtctgagtctgagctgctcgtcctctgatggaccaccgagagaacaacttgtcacatttgcgtatggtcactgactcgagcgacaagaggccacagaatccagcttcttcctccatgggtaggatcagattcttacaccctttgaaggtgacatctcttagagagctagagggcggaaaatgcagtaccacttcctcgtggtcctcatctgacggtgatgccatcacatccaaagaggaaagtgctgggaaacatttgaacaaatttgacatagaatttttggtaggtgtaaatcgtccaagattgagagattggactgtgggtagcacaacaccatcatccagtcctctcaaaaatgtttcctcgcatctactgaccactacatgtctcaaggaatgtagctttttaagatccataaatgacaagagtagtgcatcgctagctatcaatgtctccaggtcacccagattttggaaggcaaatctagaggggttattaatgtaaaacacggtacgatcatcataagcaaagtctttcatctgaatacgggatacctttgaagtgtgaggcacccggccgg

SEQ ID NO: 83549 - DNA, 240 bp, Zea mays
  Clone ID: MRT4577_176210C.1
aggggggggtttgcagcaatggggctaaaacatttttctaaaccaagggtttggttgtcccttactccaatgtacaaacctaaaaattacttcccaagatttaacgacagggttttaacaaatttaattcccttattttttggggaattggaaaacacattccttttaacaaaaaaattttcttttaccttgtggaaaaagggcaacaacaaggtttttccaaaaaatagtttcccccct

SEQ ID NO: 83550 - DNA, 1322 bp, Zea mays
  Clone ID: MRT4577_176211C.1
gggtacctcgaggccggccgggaaaattttcgggtcgtcgttaaaaccgagaagataccaggccgaaggaaaacaatcctgaaaccaagccatgggtctgcaggtacacggctcgtcactctctaaatcgccatattctgctactcgcttgttgaagatcgaacgtttattcatctgatggtcaccaagattggttctttgtttccatttggttctgaatctccagttccgtttcgattcttgcactgtaccccaacccacagtagtgtctatacgaggttcgtttttaggttctccagagaaacgatctagacttgaaatccgctgctgcgtggtcttattttccatctagatttgtatgcgtagccaagatctggtggattcagactgttggctctttgtaccctttatgctcatgcttaagaggggatccaatgcttttgcgccgccctaactctcgagcggttcatcatgcctttggatgtaagatggaaaattccccgtttgttttaagtattttgcgacttatcggttttccatataattctatagagaaatagagtggcgaagcgcgtgggtcaaagtctggattgcttaaaatggtttgcatgaaagatttaccttgtgaaatagtttagcatagtattgcaatcgtggtcccctaggaatatgagctgtatctctgttgcaggaggaatttgaggagcatgctgagaaggccaagaccttgcctgagagcacgagcaatgagaaccagctgatcctctacgggctctacgagcaagccacggttgaagatcgtgaataccgttagtattcgtcctggcatattctaccagaaggacagggccaaatgggatgcatggaaggctgttgaaggcaaaccgaaggaagaggcaatgaatgattacatcaccaaggtgaagcagctccaggaggaggctgccgccactctttaaagtctcttaatagttgccaaacagctatttgtcagctgagctttatgccatttcctcgtgagaaatagatcatttgatccactggggatctgtgaactatgtacctgcttatgtaactggttaccaatgttatccatctatctacatgtgaagacttaatatgtctgtgtattaaggctgtgtttggttcagtttctaggaagtgcgcttctgctggccaaacgggtagaacacgaagctgtttttccaaaataggctgttttcatgtagtataattatcccacaccttggaccctgctttgcctttcagctttcagttttccaaatgggtgaataaaataaagagatgttttcatttgcttc

SEQ ID NO: 83551 - DNA, 153 bp, Zea mays
  Clone ID: MRT4577_176212C.1
tttggggggggggagaccccggttttcctggtgaggggaacaggcccggccgatggacctcaaccggtgaccaacattgggcccctggactttgcttttgacaaacctactgacaaacaaaaatttttgcataacaggggctttcggctagag

SEQ ID NO: 83552 - DNA, 1197 bp, Zea mays
  Clone ID: MRT4577_176213C.1
caaatttctccatagttatgggcacttccattctcgacgccctgaacgttcgcgtggaaggttccggcgacaagtaccttgtcctggcccacggcttcggcacggaccaatccgcgtggcagcgcgtgctcccttacttcacccgcaactacagcgtcattctctacgacctcgtctgcgccggcagcgtcaaccccgaccacttcgactaccgccgttataccaccctcgacgcctacgtcgacgacctcctcaacatcctcgacgccctccgcgtcccccgctgcgcctacgtcggccactccatctccgccatgatcggcatgctcgcctccatccgccgcccggacctcttctccaaactcatcctcatcggcgcctcccctagattcctgaacgacaaggactaccacgggggatttgagcagggagaaatcgagcaggtgttttcggcaatggaggcgaactacgaggcgtgggtcaacggattcgctccgctggcggtcggggcggatgtaccggcggcggtgagggaattttcccggacgctgttcaacatgcgccctgacatctcgctcttcgtgtcgcggacggtgttcaacagcgacctgagggggattctgggcctggtgaacgtcccctgctgtattatgcagacggcacgtgacatgtccgtgccggccagcgtggctacctacatgagggaccacatcgccggaaagagcaccatccagtggctcgacacggaggggcacctcccccaccttagtgctccttcatacctagctcgccagctagagattgcgctctcgcagtagcgcgtgtaagtctaggcgcgtggctctggtggttaattaagtaattaactctactagtactattactaccagattaggctagaagctactgctacagaacaacaacaacaacaacaacaagtgtacgaaaggctccgaaactggacacctggcgaataacgtgtgggtgttggttctttgactgggatttttatttaaggataagaatctgcacgtggatttcacgtgatgcgtggccatttttagtattattaatcaactattattgctcttgtgcttctctccttttaaaggaaagaaaaaaaaaagagaagaaattagagagacttgtttgttagtgtgattgtttgtttttattaatattattattattattatc

SEQ ID NO: 83553 - DNA, 2130 bp, Zea mays
  Clone ID: MRT4577_176214C.1
ccgcgcgcagctatataatggtggattaaccctaggaacctgttgggtccgcgcaatcgtcgactgctgctgcgttctgttccgttcggaagatgttcttggagagcttccgggtggagagcccgcgggtgaagtacggcgacggcgagatccagtcggagtaccgctacgacaccaccgaagtcgtcccgccggggaatggcggcggcgcggggtgggtggtgcgcccaaagtccgtcacctacaacttcaagaccagcaccaacgtcccaaagctgggggtgatgctcgtcggatggggcggcaacaacgggacgacgctcacggccggggtgatcgccaacagggaagggatttcgtgggagacgaaagagaaggttcacaaggccaactacttcggctccctgacccaggcttccaccatcagggtcggctcccacaacggggaggaggtctacgcgcctttcaagagcctcgtgcctatggttgaccccaactctatcgtgtttggtggatgggacatcagcaagctgaacatggccgacgccatggccagggccaaggtcctagactttcacctccagaagcagctcaggccctacatggaatccatgctgccactccctggcattttcaacccagacttcgtcgccgcaaaccaaggtgcccgtgctgacaatgtcatcaagggcaccaagaaagagcaggtggagcagatcaagaaggacatcaaggagttcaaggaaaaaaacaaggtggacaaggtagtcgtgctgtggacggcgaacaccgagaggtacagcaacgtggttgcagggcttaacgacaccatggacaagctcctggcttcgttggacaagaacgaagcagagatctcgccatccaccttgtatgcgatagcctgtgtcctcgagggtgtcccgttcgtcaatggaagccctcagaacaccttcgtgcctgggctgatggagcttgccataaaaaagaattcggtgataggaggcgacgacttcaagagtgggcagaccaagatgaagtctgtgttggtcgatttcctcgtcggcgctgggattaagcccacctcaattgcaagctacaaccatctgggaaacaacgacggcatgaatctctctgccccacaagtcttccggtccaaagagatctccaagagcagcgtggtggacgacatggtcgctagcaatcccatcctctacaagcccggcgaacatccggatcacgtaatcgtgatcaagtacatcccctacgtgggtgacagcaagagggctatggacgagtatacctctgagatcttcatgggtggcaagaacaccatcgcgctgcacaacacctgcgaggactcgcttctcgccgcgcccatcatccttgacttggtgctcctagctgagctcagcactcggattcagctcaaggccgaagggcaggataagttccactccttccatcctgtcgccactattctgagctacctcagcaaggctcctcttgtacctcctggcacaccagtggtgaatgctctagccaagcagagggccatgctggaaaacatcttgcgggcctgcattggccttgcccctgagaacaacatgatgcttgagcacaagtgaagagtttcacgtcccttaattaactaccacaagataggatgaatggaaaaaggagggatcaagcgaaggtgtgggaataatcagtgactcctctgagcccaacgaagaaatgtcaggaggctacaggaaggagaagtgtaaggagagaagaccaagcatggatatatcctcttttcgaaggctatctatctattctttttttgtagatttgactcgttttttgtactcatgggacgagattgtgtactggctatatgtccactgtatgcagcatgaaacctttatttgttctgttgtgtgatagaggttatatatagaagtgtccagcctagtttttgaaactcctagttgattaatattttcactaggtggttgatgaacacatttgatatgctctagagacgtcaatggagctttgatcgctgattcctaacagggagttctcgatgcggacagggccaattcttccccatgtggatggatatggttctctatcctccatccc

SEQ ID NO: 83554 - DNA, 3636 bp, Zea mays
  Clone ID: MRT4577_176215C.1
cccggccggcctagcacacgcctagccgtcaccgagccccagcaggcagcaggcaggacgagagtgctctacatgttttttcttctctctctcccagtctcccttccttctttatccgcttggttcgctgttgggcttttcctttgaatttcgatcgcatctcaatcctgttaccgttgtggactcccactcccctgtctgtctgtcgcggtgtcgcctgacaccttcttcttcctcactcccccctcaacctcatccccatcccgccctcgcacttcccacccaccccaatccatccatccatccacccgtctgaaaaccaaacccacattcaccagcgagcaagcttcccctgccctcctccggccgcctcattctcgtttccatataaatctgtaactgcaaggacaacccaccacaggacacacgaggtgaaaggagatccgtgaggaggcgcctcccccatggctgagaaggagggcaacctcgaggccgtcctcaaggaggccgtcgacctggagaacatccccctcgaggaagtgttcgagaatctgagatgcagccgcgagggtctctccaccgagcaggcgcagcagcgcctcgaaatctttggcccaaacaagctcgaggagaaggaggagagcaaattcctcaagtttctgggtttcatgtggaacccactgtcctgggtcatggaggctgcagcaatcatggccattgctcttgccaatggaggggggaagccaccagattggcaggactttgtcggtatcataactctgcttgtcatcaactcaacaatcagttttatcgaggaaaacaatgctggtaatgctgcagcagccctcatggctcgcctcgcacctaaagccaaggttcttcgtgatggccgatggaccgaggaagacgcagccattcttgtaccaggagacattgttagtattaaactcggagatattatacctgcagatgcacgcctccttgagggggatcctttgaagatcgatcagtctgctctgaccggagagtcactgccggtcactaaaggtcccggtgatggtgtctattctggttcgacggtcaagcaaggtgaaatcgaagctgttgtgattgccacaggtgtccacactttcttcggaaaggctgctcaccttgttgactccacaaaccaagttggccatttccagaaggtcctgacggctatcgggaacttctgtatttgctcaattgctgtggggatgtttgttgagatcattgtcatgtatcctatccagcacagggcttaccgccctgggatcgacaacctcctcgtccttctcattggaggcatccccatagccatgccgaccgtcttatctgtaactatggctattgggtcccatcgtttgtctcaacagggggctatcacaaaaagaatgactgcaatcgaggagatggctggcatggatgttctttgcagcgataaaacaggaaccttgaccctgaataagcttactgtggataagaaccttgttgaggtttttgaaaggggcactactcaggaccaagtgattctcatggctgccagagcgtctcgcacagaaaaccaagatgctattgatactgctatagttgggatgctagctgatcctaaagaggcacgcgctggaatccaagaagttcacttcctgccattcaatcctactgacaaaagaacagcactgacatacattgatggtgatgggaaaatgtatcgtgttagtaagggtgcacctgagcagattctccacttggctcacaataagtcagatatagagaggagagtacatgctatgattgataaatttgcagagcgtggacttagatcacttgctgtagcatatcaggaagtgcctgaggggaggaaagaaagtcctggtggtccatggcacttcgttggtctcatgccactttttgaccctccaagacatgacagtgctgaaacaattagaagggcactcaaccttggtgttaatgttaagatgatcacaggggatcagttggcaatcggaaaggaaacaggacgtcgtctaggaatgggtacaaatatgtacccctcttctgctttattaggacagaacaaggatgagtctattgctgctttaccagttgatgatctcattgagaaagccgatggttttgctggtgtattccctgaacataagtatgagatcgtgaaacgtctacaagcacggaagcatatctgtggaatgactggggatggagtaaatgatgctccagccctgaagaaagcggatatcggtattgctgttgccgatgcaactgatgcagccaggagtgcttcagatattgtcctcacagaacctggacttagtgtgatcattagtgctgtgcttactagtcgtgcaattttccagcgtatgaagaattacacgatctatgctgtctctatcaccattcgtattgtgcttggatttatgctccttgccctcatttggaaatttgatttccccccattcatggtcctaatcattgcaattctaaatgatggtaccataatgactatatccaaggatcgtgtaaagccatccccattacctgacagctggaagttggctgaaattttcacaactggagttgtccttggtggatatcaggcaatgatgactgtcatcttcttttgggctgcatacaagacaaactttttcccaaaaatatttcatgtggaaagccttgagaagacagctcaagatgatttccaaaagcttgcatctgctgtttacctgcaagttagcaccatcagccaggccctcatcttcgtgacaaggtcccggagctggtcatttgtcgagcgcccagggtttctattggtctttgctttcttggttgcgcagctgattgccacactgattgctgtgtacgccgactgggcgttcacttcgatcaaaggcattgggtggggctgggctggcattgtgtggctgtacaacatcatcttctacttccctctcgatatcatcaagttcctcatcagatatgctcttagtgggaaagcgtgggatcttgtcattgagcagaggattgcgttcacaaggaaaaaggactttggtagggaggagagggagctgaagtgggcacatgcacagaggaccctccatgggctacaggcacctgatgccaagatgttcccagagaaggctgggtacaatgagctgaaccagatggctgaagaggcgaagaggagggccgagattgcaaggctgcgggagcttcacacactcaaggggcatgtggagtctgttgtgaagctgaagggactcgacatcgagaccatccagcagtcctacacagtgtaactttgcctgcccttcccagaggaagtttcttgttctttttacccaccggcgtgtgaatttgatggtggctggcttctctttgttttatttatttatttaaccgagctgcaagcaccgacaagtagctgaaatgagacagacagacccctcgctgtaatccctgatttcttctgtcctctcctcacatggtatgccaaccagtttatgaactttgctcggctatataaataagtgcttgaagaggggagcagggttttgggccaaaaaaaaagaaaaaaaaaaaaaaaaaagcggccccccc

SEQ ID NO: 83555 - DNA, 582 bp, Zea mays
  Clone ID: MRT4577_176216C.1
gccccaacgccccaccacggtgggccgtcggcgacaaggtctgcgcgctgcttagcggcggcgggtacgccgagaaggtggtggtgccggcgggacagctgctgccggtgccggagggcgtgtcccttgcggacgcggccggcttacccgaggtggcagctgttgtgagtgcagctgctggactgcgcggcagaagcgctgctagtaaagcccagatcgtcagtgaggtggagaagaacgtgtggcccgccgtcgctgctggcaaggtgaacccggtgatctacaagacgttcccgttatccgaagcagctgatgctcatcggttgatcgaatctagcatgcacattggcaaaatactgctgctcccatgactccatgtccagtgtctgctgtcatctgtcaaactcttggagagagtcagctaaagcgagctacaaactcctgtaacgacctctaaatatactactatcatgtactggtgtggcatgcctttctatcttttgttagttcgatccgtgaaactgccgatgaaactgttctgtgaaccgtggtgcacagtaatacattatggttgtttgctac

SEQ ID NO: 83556 - DNA, 503 bp, Zea mays
  unsure (1)..(503): unsure at all n locations
  Clone ID: MRT4577_176217C.1
agacacaggaccaggaaccacccagaagcgagggcgaggggagaggaggggagcaaagcgaaaaggaccacagaggcggcaaaacccagaccaagaagggagcggacagggcaccaagaggcacgagagaggaaaaaacccgaggggaacgaaccggggacgcggncagcaccagacggcggcgcggagagaagaagaggagggggaggccaaccctgcgagcaggccccaaccgcaaggacnacagcgccagaagggcacgcagaccgccaaaagaaggaaaaggaccnacaagagcagcccgagcgggcgacaaaggggaagggcccggccaacggaggggcgacgaagaaagagcgccggggagaaccggccaaaacggcaaataagaacaccacggcccaggagaacgacaagaggacccgagaaccagagggccagccgccggaaagcgagccaaacgagccaccgcgagagaangngcnacccaagcacgaccagaa

SEQ ID NO: 83557 - DNA, 267 bp, Zea mays
  Clone ID: MRT4577_176218C.1
agctttcaagccagcaattgaagcttgtgatctattccattaattgtgcgttcatacataccgggggaaatatctcagagagtggctcttattctatacttttaaatttaaaataactaaaacacttaagaatttcaccataaagtcctcaagggctaaaccttcgtcccttgcgggaccgacttcaagagcgtttaggcccatgagcacctcgccgaagggcgcagccgcggaggctttactccaacaattatttatgtcaataga

SEQ ID NO: 83558 - DNA, 126 bp, Zea mays
  Clone ID: MRT4577_176219C.1
cggacgcatgggctgacgcgtgtgagtacagacctaacctgatcaacaaattggggggggcgttcgatgctcatctaggagacctcacgcagaggcaactactagctgccggtgccacaatcaatg

SEQ ID NO: 83559 - DNA, 984 bp, Zea mays
  Clone ID: MRT4577_17621C.1
ctggaggcatctacttcggcaaacccaggggttttggaacaaatgacaatggagatgacattgggttcaacacagaagtttattcagcttctgagattgatcgtatcgcacgagtcgcatttgaggttgctcgcaagagaagagggagactatgctcggttgacaaagcaaatgtcttggaggcatctatgctttggaggaaaagggtgactgcactagcttcggaattccctgatattgagctctcacacatgtatgttgataatgctgcgatgcagcttgttaggaatcctaagcagtttgacacaattgtcacaaacaatatttttggtgacatattatctgatgaagcatcaatgattacgggaagtattggaatgctcccatctgccagtgttggtgaatcgggacctggtctttttgaacctattcatggctctgcccctgatattgctggacaggacaaggccaatccattggctacaattcttagtgcagcgatgctattgagatatggcctaggagaagaaaatgctgcgaacagaattgaagctgcagttactgaaacactgaaccatgggttccgaactggggacatatattctcctggaacaacattggttggatgcaagcggatgggggaagaagtcctgaagacagtgaactcactgaaggaagtggctgctgtaaactgatgcatgttggtacttaatttataaccctacaggatgagatggttgaaagggacttgcattttattagaagttgagcctggtgaaagagagcactgcgtctggttttgaatcgcaactgtagcggctgaaccgacggtcttttttcatttctggtgtttgttggccttcctgtaactcaattttgtacaaggaaggataagcatatgtatgataaaatgggatagtttatgccagttgaataaaatatgttctataacttctattcattataagaatgattaacttaaaa

SEQ ID NO: 83560 - DNA, 472 bp, Zea mays
  Clone ID: MRT4577_176220C.1
ataaaaaaaaaaaaaaaaaaaaaaaaaaaaaaaaaaaaaaaaaaaaaaaaaaaaaaaaaaaaattttacctatgaacaaaaccacacttatgggggaatttttgtggatttccctcccacttgggggccccttctagcttttttttttgagggggccgctgccccctttgaggggagttcttattaccactttactgggccgcggttttacaccatccgggactggggaaaacccttttgttccccaatttattcgcttttcatcacatcccccttttttcaactggggtgttatggaaaaggcccccacccatccccttttccaaaatttgggcaccctcattgtcgattgggcgccccttttaaaggagggttaagcccggggggggtgttgggtccccccaaagtgaccgttttacttgccaccgccctataggccccctcctttcgcttttttccctttttttttccc

SEQ ID NO: 83561 - DNA, 192 bp, Zea mays
  Clone ID: MRT4577_176221C.1
agctaggacagctcctctcctgccagagctaggcaggcgctgaagtagccgcatggccccgtcagaagaccccagggactggagagccaacctcaaaggcaccatccgtgagacaggcctggagaccagctccggtgggaagctggctggcatcagaagaccgtccccacggctcacctgatctttgttatt

SEQ ID NO: 83562 - DNA, 388 bp, Zea mays
  unsure (1)..(388): unsure at all n locations
  Clone ID: MRT4577_176222C.1
ccggngtcagccagtattcnttggatcatcaccattttcaccacttcaccgcgccaggccgcagccaggacctctcannncaggcgaacccgtgcccgtccaccccacccgtcggcncnngtcgtccatcgcgcccgccacnnttccgcntnngcagtntctttcgcccntttttctttccctcctnnttcgnncccgcttgcctggtctctggtccctcgnatgntnngcaccccgcnggcgtcgctacgcgcacgtaccgccagnnggcggcagggccagcagtcatgcggctaggggtatgggcgcagtgccttattctgtctcgtctcatacaaatggcgcaccgcacgctgcacgtgcagtcagcccgcggctctcatctttc

SEQ ID NO: 83563 - DNA, 608 bp, Zea mays
  Clone ID: MRT4577_176223C.1
gccggccgggctgtgattagcagcatagccattaagtctctttttctagatctagctaaggactgctgctgcaagaaggtatacaccgcaagcatgtaggggaaggaggaggacgaccgcctgtcttccaacaagatctcggagcgtcagtccatcccaacggagttgcaagtgagatacgatcaggactacaaggagcccacctgccggtgccgctcttcgagtcgcgcgagatcgatgacgtgtgacttcatagcgaaccggcatcttcgcatgtcgttctcaccttcctcttccgtcatacatgtccgtcactcacgctgtggacgacttcaaggacacctcccacggggtcaacgacgacatcaacggcatcatctgtgccttcgaacttatgatcgtctgcctcacctactgcgccaaactgatctccgacgaggacatcgacacgatccgtgaccttcgacgctgtatcctggatgagcaagatctcctatcaccaaggtcggtgaatttacatcatgcatgcagtgacatgatgtgcatcgtgtttgaagctacgatcctctaggtgatgccagcagggtactgtacatgttgcacactga

SEQ ID NO: 83564 - DNA, 269 bp, Zea mays
  Clone ID: MRT4577_176224C.1
gaccaccacgttggcgtcgctcgaagagaaggagctgtccgcagtgcttaaaacctgagctctacctactgccagtagcctggaagatagttcagcctgcccctgcctagtacatgatatgccacacaagcacccacagaagcaatcactattgggatcggaggagaaaccgagcacaccctgtgggttcaacaggctgctagaccagacggcgtgtttccatcactgacattatctaaggtcgtggctctctccttaaacctagacac

SEQ ID NO: 83565 - DNA, 460 bp, Zea mays
  unsure (1)..(460): unsure at all n locations
  Clone ID: MRT4577_176225C.1
accctccaggcaccaaaggaagctggcatatactcacatcatggagatatggatatcgtcatttatagcagccctcaacccatagcgattctacactggtgaagagtgaccatcacttagcacaaagaactccattctccaagggcgtccgctgatatagatgctcacttgtagaacctcacaaggacatgcatacgcctcatatcnggtcgcgccctcactagccttcatgcgcgctgtcactgcatagtcctctctcgacaatattggacgtagtgcatgccctgtcatcgcacaccatgtgcagacttggcgatattgtcgatatctctttcaatgacgctcgtctggttgatgttactgatggaggactgaccataacgcaatctggggctatgctctgagttaacatctgcgaccattggctgtctgctgacagctgactctcccatgtggtgat

SEQ ID NO: 83566 - DNA, 375 bp, Zea mays
  Clone ID: MRT4577_176226C.1
cggacacgtgggaccaggctgacctcgcgcagatcacgaaccactgcctcaacaagggcgtgaccctgaaccacagccactgacatatgaatcaccagaaactgaaccgaattcgctgtatctgaactaaccaggctctattgcaactgcaatagaataccagaatgctttggcactagctattgaatcgattgattatgctccgaaagctgctaccacttttggaaatggactcactgcctgccaactggcccttgtgacagcaccaacctcacatgagaccgccgttgccccaagcacgatactggccttaactctgcacttgctgactcttgacagcctgcactactaggctaaccgtacagcgagccagcc

SEQ ID NO: 83567 - DNA, 385 bp, Zea mays
  Clone ID: MRT4577_176227C.1
ggacctttgggctgatttatgtgcttgtttatgtgcttgtttatgtgcttgacggtacttactaagaccgcaggggcgttcgcggctcctacttctgttccgtcttccgcccttggccacgcggaggtggaaactcgtgtaaggttcaacttccaccacttcggtgtacgtaggagtaacaaggatcgcgtaggtctgcgtacctagtaaaattctggtattagtgggcatcgtaagggtagcgctttttcccctaaactacgtcaccgcattcccgaacgctttacggaagatgaggtagaggagggacggtatcagctgcgagttgttactcgtacgatcaaacctaaagcactcgagcgcccacgtaaccgattcgcggaac

SEQ ID NO: 83568 - DNA, 278 bp, Zea mays
  unsure (1)..(278): unsure at all n locations
  Clone ID: MRT4577_176228C.1
cgcggcgcatctaacgcgnacgtgaacgtggggcagcacacggacaccggttcccttgccaaaccgcctatnccccgatccttaagcctatgtcggctccctgtcagagacaagtacgcggatctggagcgcaagccgtagaaggtgggcgtgctcacacatgaccagacagatccatgccctggacggcatctcgctgatggagatcctggccaggcactccttcaagaggcgtacctctgccagcgcgacaccaaagattggacgtcggacgccaa

SEQ ID NO: 83569 - DNA, 210 bp, Zea mays
  Clone ID: MRT4577_176229C.1
gggccgctttttttttttttttttggggcaataagagtctacaaatgtacttttcttattttatggggaagccacaaacatgatcccaaaaaacttcattattgaactataactcataagcaatctgaaaagaggggccaccaccaatgaaggctgggttgggagaacgcttgtggcttagacaaagcaagttggttgaatggcagcaat

SEQ ID NO: 83570 - DNA, 659 bp, Zea mays
  Clone ID: MRT4577_17622C.1
ccccctctcgagtttttttttcctttttttttttttttttttttttttttttttttttttttttaaaaaaaaaggcatgggggtttattgacttgattgtcattattaattacctgcccattacatcatcatcttggatttgaaccttttgcccgaaaggaaaaagtaaaaaaacaataaacttgaaaaggcactcatcacgctttacgtacatacatatttttactcaaaaaaaaaaaaaaaaactcacccgatttaattaaaattacccaaccaaaagtaaaggtaagcaacgaatttaatatttgaatgaccccacccaacatggatgcatgaattaaggggatgaacgtaagggaaaggcttcgtcaaaaccagcagcaattaatggccgtattatttgtcagttgacgaggttgcatttttttttgatctccccctgctgctggccggggagcacctcaatgggggacattttgaccatggagtcggcaaagtcgcgaaaaaactcgggggtaaaaaaccccggggcctggcgctggacgtaccccctgggggccgggtcggtgaacaacccggcgtcggagtggaaaaacccccggcgcctggccccaggctgtagtagctggagtcaaacctgaggaaactgccggggtcca

SEQ ID NO: 83571 - DNA, 991 bp, Zea mays
  Clone ID: MRT4577_176230C.1
gggcgccaggcgccagccgccagccgcagcccgcaggggcgctagcagacgagcagagcaggctagcagcactgcagcagtaccgcagcggcgcagcgcagtccgcagccggccagccgcagcccgcaggcaggggcggtaggcgcgccgcgcgcgtagccgccaggcgccaccgcgtcaggggcagggcacgagcagcgagcagcgggcagcggccagccggccaccggccaggccagcgacgcgcacgcgccgacgcccactccactcgaccaggcccagtgaccagccgtccagccgccagcgtgctgtactgctgtttcactgttccagttccaggcttccaggtttcaggcaagcgtgaggagagtggagatcatcccgatgatgatgcgaggtggaaggctcacgggtttgacctctcaggttctgaggtgcttcagcacggagatatttgtcagcagattatcattctatacgacagaggaagaattcaaagatattttttcaccatttggcaccgtagaggaagctcgacttatgagagaccaccaaactggaaggatgaagggatttggttttgtcaaatattcatcgcaagcagaggcagagaaagctgtcaaggcaatggatggcaggattctacgtggaagattgatctttgtggagatggcaaaaggacacgaaagcaagtaggacaccctccccacgagaggatttcactgaacatgaaacatgagagcgccatcagcttatgccagatggcaaatatcccaaattctcaattgatgttgcaacttatatacaaagcacaagttaattttagctagcttatctttgataacactgctaccttaccatctgaaaggttgccgtgtattggtatccgttgacctgtgtaagaaatgttggcagctctgtgccctacgaactagcctggttgattaaccaagatctgttcaaaattaaagccagtaaacatgaataggcc

SEQ ID NO: 83572 - DNA, 417 bp, Zea mays
  Clone ID: MRT4577_176231C.1
atctccaagacggtcgggaagccttcccagaattgccatttgagaaggagagtgaactgatgacctcgcggattctgggccgacggggcccctccggcttctcctgcagctccaccgccgaccaagccacgcacggcatctccgccgccgccctcaccgtcatcgtcactgcccaatcccatccaggggcgttcagcgacctcaacgaggacaccgcgacaccgctggcgctgcgcggccgcccacgtcaccatggacgtcacgagccttcccgatgcacagatcgacaaggacgccgttttcacccaggcgcccgcctccaacctcaacgtcatgtatctcgacctcccgcatatgcactctgcccgcgctttctcgtcacaattaatccacacgccccctcctcctcacatcctt

SEQ ID NO: 83573 - DNA, 579 bp, Zea mays
  Clone ID: MRT4577_176232C.1
cattgggtacctcgaggccggccgggagcagcctcccatatcctcaaagcctcagaccccgttcatctctccctccgccgccgctgcgcacgcaggcaacaagcgacctggacgtctactcctttagtgtgccgcaacaacgacggcgagtgcaccgccaagcatcactccggagagatcgatgattccgccggtaccccatactatctgtagcgccgactcgactgtgtcgcctccgcggacgactctgcctactggcgtaccattcgtccttctccatgtccacccccagctccgtcgagttccaagtgatgcgtcaatgctgtcgatgctgtcgcaatgatggagagcgaaagtgcagacggccaagctgctgcatctgaagctgctgctgccgatgctcccacggatgagaataatgatgaggagaaggaacagagcgactgacggacgtgggattctccctgttcgaactatagttgtgggtgacatctgaatctcaaaaaaggcggcttgatactgtggtcgaactgacttttgttgtgctgactgtaaacctgaagaactcttgttaattgt

SEQ ID NO: 83574 - DNA, 562 bp, Zea mays
  Clone ID: MRT4577_176233C.1
ccccgcgtccgccagccgccagttgcagcccgcagggcgctagcagacgagcagagcaggctagcagcactgcagcagtaccgcagcggcgcagcgcagtccgcagccggccagccgcagcccgcaggcaggggcggtaggcgcgccgcgcgcatagccgccaggcgccaccgcgccaggggcagggcacgagcagcgggcagcggccagccggccaccggccaggccagcgacgcgcacgagccgacgcccactccactcgaccactcgcccaggcccagtgaccagccgtccagccgccagcgtgctgtactgctgtttcactgttccagttccaggcttccaggtttcaggccagcgtgttcaaattcacgtgctaatgttgatgaagttattagaggcggggaaggaccaaatcgtctctaattagtctccccatcacactaccattgccatctcgccctgaggttgcgaccccctcggccgcgaccccgcctcagtgcctcaccccgggccgcatctcctgcgctcgcgctacgaggacgggcgagccgcccgtgcc

SEQ ID NO: 83575 - DNA, 164 bp, Zea mays
  Clone ID: MRT4577_176234C.1
agcttatctgtcggcgggcggccttttttttttttttttttgttacaaagatgctttatttaatctaccgaactaacgtacggtttgtctcaaggacaaaggatacaagatcagatcaacaaatgtctcagaaggggcacatccaccctttgcatggtacagat

SEQ ID NO: 83576 - DNA, 1480 bp, Zea mays
  Clone ID: MRT4577_176235C.1
tcgtgttccagtgcgtagaaccattccgccgccacaggtctagaatgcatttgatcatcctagatcatgatcgcccacgctagaatgattaaaaaatggattagaaaaatcacagataacctaacgattgttaagttattatagagtgggtgacgaatattattgctctacacacaagatgtgaatccaagatccatgtgcaacttatatgttttcttataaaaatattaaaattgtttttaattaatactctatccattcttttttatttggcgacgaacggtccaaattagtcaaataaaaatttggaggtagtgtattattaatataccaggatttattcggtaccataaagttactaaattttggtatagattcaactaaacttaaatttatttgacgaaaaacaagaattgcacttttgtttggtatagattggactagcctctttgattctggcccgatgccatcgtctcatcctaccacgaacattgccatctctccctgtggttgagaccccctcggccacgaagccccccctgtgcctgaccccgggccgcatatcatgaagtcgcgtgacgaggtcaggtgatccgcccgagccgcagcatatacagctgaagaacaagtggatggcatcataccacgtggaagaatgatctttgtggagatggcaaaggccaagaatagcattgatacctacaaaattagcatcgtcaaggtgctgaatcaggttttgggcattgtcatctcatctcctcaacaccatgtccatcatgaagctgtcacaggaggccgcctgctacaagaatcccaccacttcctgcgcttcgctctccccagggaccacctagacttaatggtttcaggaggagagtggagatcatcccgatgatgatgcgaggtggaaggctcacgggtttgacctctcaggttctgaggtgcttcagcacggagatatttgtcagcagattatcattctatacgacagaggaagaattcaaagatattttttcaccatttggcaccgtagaggaagctcgacttatgagagaccaccaaactggaaggatgaagggatttggttttgtcaaatattcatcgcaagcagaggcagagaaagctgtcaaggcaatggatggcaggattctacgtggaagattgatctttgtggagatggcaaaaggacacgaaagcaagtaggacaccctccccacgagaggatttcactgaacatgaaacatgagagcgccatcagcttatgccagatggcaaatatcccaaattctcaattgatgttgcaacttatatacaaagcacaagttaattttagctagcttatctttgataacactgctaccttgccatctgaaaggttgccgtgtattggtatccgttgacctgtgtaagaaatgttggcagctctgtgccctacgaactagcctggttgattaaccaagatctgttcaaaattaaagcc

SEQ ID NO: 83577 - DNA, 200 bp, Zea mays
  Clone ID: MRT4577_176236C.1
cacgaattggtgaaaaaggcggaaggcaccacagtcaaccttcctgagaaaggagcggggaaggcacctcgcggtgataatatacagatagatgccaaagatattctttctatattgggggggggctcttagcggcttaggaagacactatatccacagacgcgagaaagatttatatatcgcgcgccggagccccaaat

SEQ ID NO: 83578 - DNA, 251 bp, Zea mays
  unsure (1)..(251): unsure at all n locations
  Clone ID: MRT4577_176237C.1
tctttctttgggggtnncggggaggagggtcatcagggagctcaattacctgcatagggatccacccacgtcctgcgagcgcaggggctggggccgacgacatggtccactggcaagggacgatcatggggcccagggacaggccctactcggggggcgtgttcctgggcggcatccacttccctgcggactacccggtcaaggcttccaagggggggttcaagacgaaggggggccaccccaacatcaac

SEQ ID NO: 83579 - DNA, 185 bp, Zea mays
  Clone ID: MRT4577_176238C.1
gcggccgggctgtccgtcctctccggacggcgagagcaagaagagatagcattcacgtgctctaccaaattcgtttagaacttacgacaataaaaacacgccaactgatgttttgctcagaaaggggggggggagaaaaataaaggccaaagaacgcagtctccaccacgaacaaccttatacag

SEQ ID NO: 83580 - DNA, 691 bp, Zea mays
  Clone ID: MRT4577_176239C.1
ttttttttttttttttcctgtgcggctgacacggtgggacctgatcgaagggcgcccatcatggcttggaaaccagctcactcgcgtcgttgtcccgctgctgctggtgggccaccttggcagggtcgtcatcttccttgaaccgaacaccggagaaacgcaacagaataccgtattgcgcgctgagatcccgattcaccgcaacaacctcgtcgatccggccggaaccaaactgctgcttcccctacgcatataagtgaatgtctgtaaccccattgtcatgcacggtcgatagaatccgcgggaatgcgagaacctgagagcgcgtaacgaagaagagagagaagagattgggggatcactgcttggtgttccttctgcgcgcgcagacggatctgtgggcttcatcgggtccccgggaatgtactcatagcttcgggaggaaggattggacctgggtgtgccctgagatgctcatcgtcgtgagactgtcgccgccggtagctccacgccgtgggcagctccactgccccgccatgtacggtaagaccagtgatctcaagttcaccatagcctctttttcgggtagagacttctgggataaagtatcgcgctccaggaggctggtctggtggggctcatcggtcgccgccgtgggagttttggcgccgccgcctgtgctgactggggg

SEQ ID NO: 83581 - DNA, 967 bp, Zea mays
  unsure (1)..(967): unsure at all n locations
  Clone ID: MRT4577_17623C.1
gaaggttgagatgacttctgtttcaaaaatttgtgacaccagaatacttgatggggtttaaattatgtgtgtttggaatttgcttcccctcctgttattatgtgttgagtgcaggacaaggccaatccattggctacaattcttagtgcagcgatgctattgagatatggcctaggagaagaaaatgctgcgaacagaattgaagctgcagttactgaaacactgaaccatgggttccgaactggggacatatattctcctggaacagtaagatagattttcttgcagaaccattatcaatgaattatggggctgtttggtttgaggaatcacctcatccttagttgagatggtccatcatgattcatgagttcatcacatgaattttggtggaatggatccaaccttcatgctttttttagctttatatcgtacatgtttaatgccaattacttgatcctcacctagagaaggtagtattggacaaatcattcaggtagtgtaatagcattggacaaatcttttaagcatattaactnctctcgtgcggtcatgcctccgtggaagaaagtgatagctaacttccgaaggcatgtattgtatttgaattttggttgatctcattctgagaggcttatgttcccaattggcacacattggttggatgcaagcggatgggggaagaagtcttgaagacagtgaactctctgaaggaagtggctgctgtaaactgatgcatgttggtacttaatttataaccctacaggataagatggttgaaagggacttgcattttattagaagttgagcctggtgaaagagagcactgcgtctggttttgaatcgcaactgtagcggctgaaccgacggtcttttttcatttctggtgtttgttggccttcctgtaactcaattttgtccaaggaaggataagcatatgtatgataaaatgggatagtttatgccc

SEQ ID NO: 83582 - DNA, 214 bp, Zea mays
  Clone ID: MRT4577_176240C.1
tgccgagctacctgcacgctatgcctaacgctggcaccctcttacaactgcaacaattgctgccgttcaaccaacttgcttctggcaaacataactgagtagtaagaacaacccatgcattgcaggcgctctctgttacatagctcatgagttatagcacaataatgaagttttttggataatgactgaggcggcccagaaataagacagtaca

SEQ ID NO: 83583 - DNA, 262 bp, Zea mays
  unsure (1)..(262): unsure at all n locations
  Clone ID: MRT4577_176241C.1
gcggcgacaaccgaggcgagccncaccgacccggggacgacggcgaccttcgcggcggcggcggcggcgggcggcgccgacgtgctgaacgacgtcccgaggagggcgggcgccgggcgcgacgtcaggatccccgcggcggcgcgccgcggcggcgggcggaaggaccccgtgcggaccagcgggccggccacgccgaccgaaaacaccgacaaggtggcggagagcagcaaacaagcggaggagacatgcgcggacgacc

SEQ ID NO: 83584 - DNA, 855 bp, Zea mays
  Clone ID: MRT4577_176242C.1
cacgtcgggcctcatggggctcggccgcagccagctctcgctcgtgtcgcagaccgtggaccagttcggcggcgtgttctcctactgcctcccgctcagcggccagtccgacgcgtcgggctcgctggtgctgggcgacgacccgtcggcgtaccgcaactcgaccccggtcgtgtacacctcgatggtgtccaactccgacccgctgctccaggggcccttctacctggtgaacctgaccgggatcacggtcggcggccaggaggtggagtccacgggcttctcggccagggcgatcgtcgactcgggcaccgtgatcaccagcctcgtgccgtcggtctacaacgccgtcagggccgagttcatgagccagctcgcggagtacccgcaggcgccagggttctccatcctcgacacctgcttcaacatgaccgggctcaaggaagtccaggtgcccagcctgactctcgtgttcgacggcggcgcggaggtggaggtggactccggcggcgtgctctacttcgtcagcagcgactcctcacaggtgtgcctggccgtggcctccctgaaatccgaggacgagacctccatcatcggcaactaccagcagaagaacctgagggtcgtcttcgacacctcggcgtctcaggttggtttcgcgcaggagacgtgtggttatatttgactttgactcggattgggattgggattgggatgcagcgggcggccatgggctctatatatgtgaatacctttatacttacttgcagatttgtttcgagattacccctggtgattggcaaatggtaacaaggtgttcagttgttggcaaatgaacaagccctgctcccggtt

SEQ ID NO: 83585 - DNA, 680 bp, Zea mays
  Clone ID: MRT4577_176243C.1
gccggccggggaaaaaaaataaaaaaaaaaaaaaaaacagtcaccgttgcgtgggtcccaggcgtcagcccgccttctccgccagggccattgcaatggcgcccggctcgggcgtaaccacccgccgatgctggatctcgccgaggatccggcgccgcggacttcttccccctcgcatctctgtgctataagaacgccttcaccagccgccgaactaccacttctctgccttcgtgaaccaccgcgcgagagagagtcgagatccgtcgctgccgtgcggcttgagagagaagcaccgtgccgggcgaacctccaccgttgggctcaatcgattgggtcagtggggttcggcaacgctcgagagaaccggccgttgcatcaacgggcgaagtggtgatcggagcaagtggcgatttcatgccggagtcggagctccgccgcggattccgctgcgccccgcgggcagactacttcgcagctgtcgctggccgcgaccacgtcgtcatcttccctttcatggcgaagggccacatgctcccgctgctccacttcgccacggcactctcggcgcaacacgggaggctccgcgtgaccctggtcaccaccccgggcaacgtggccttcgcccggagccgtctgcccgcgtcggtgggcctcgtcgcgctcccgttcccgtcgtc

SEQ ID NO: 83586 - DNA, 441 bp, Zea mays
  Clone ID: MRT4577_176244C.1
cttcggattgaggctagaggctacaactaccacaaccgctcttatcattttaatacggctatcttagccgggcgggataagttgactctaattgcctggacatggttcactgcagagccttggacctatgcttaatggacgtgctggatcgatcgcctacttggcagaacacgagctcttccatggagccgccaatctccaatggcttgatggctgccctgaagcgggcccaggcccaccagcaccgtggctaccctgagcaacagcatcagccactcctcgcggtgaaagtggagctggaacagctaatcatattcattctcgacgaccgcagcgtgagcaaggtcatgagagaagccagtttctcaagccccgccgtaaaaggcaccatcgaacagtccctcaacgccggtccctccaccgataattccggattgggat

SEQ ID NO: 83587 - DNA, 624 bp, Zea mays
  unsure (1)..(624): unsure at all n locations
  Clone ID: MRT4577_176245C.1
gaccctcgaggccttccgggacccattgccagtcgcacaagggtcctgccatcttctacatggcaaaggtctccaacgcagccagtgcctccccctctggcctacaatggttcaaggtcgccgaggatggtcttgaaggtactacctggggagttgaccgcatgatctccaacaacggatggaccgagttcaccgtgccatcctgcattgcttcaggccagtacctcgtgcgagctgagctgattgcgctccacagcgctagctctgttggcggtgcacagttctacattggatgtgctcaagtcaacgtttcagcctcaggatcaaagactggaaccactgtcagcttccctggcgcctaccgggccgacgatgccggtatcaaggtaagcatctacaactctcaaggtcagcccactggcaacggtcaatacaagatccccggcccagccaagcttcagtgctagagaggggtagctatggcggagggcttgtagtataggaggcatcaagtcaaggcagtacaacaagggcgtttctcttctcaacacctcatttatccatactttgttagccaaatgaaacattactttgtgcacgaaaaaaaaaaaaaaaaaagcggnc

SEQ ID NO: 83588 - DNA, 713 bp, Zea mays
  Clone ID: MRT4577_176246C.1
atagttcaaaagcgcccgcaagctcggaattccgctctcgcgccttccgctcgagttcgagtctcgatatcggcaaagcagggggacctacctattgtgcggctgcggcgcccgtcgttgattcatccgctggctcgcgctcgccggtggtgccggggaacagccagctcgagctcgctttcgcttcgcatcatgggagccgctgggttctgagctgcgcggccggcctgtttcagctgagatgaaactggaaaagaatcaaagctctgcatcacctgccacttcgaattttagagtgaatagcaattgccatggggtctggatcagggacactgaagcagaagaaacgagtgaaacatgcaaaaaacaaatacttgaaacctggtgccctcgctcagattcgctatagcaggagtacaagcagggacatcgggaagaaaaggattttgttgaatgcgaaagatgagctggagttacctccacagcctgaggttctcttagaaagcaatacactagttttgtcccctgcaagactcaattttgagccatttggtagtaatacagggcaggtattgccaaagactccaaggactccaaatgcatctgtgtcctgtggtgattcagggcttgaatcacttcctcttgatttgctgatcaagatcatgtgttgcttgcaccatgacgaactgaaagttgttttccatgtttcaaaa

SEQ ID NO: 83589 - DNA, 824 bp, Zea mays
  Clone ID: MRT4577_176247C.1
cggaggtacatgccgaattgcgcagtctaggtatccagctgccttcaagaagacatcaccagtggcccgtctactctcttcagaaactcttggggcatagccatcgccgtatgaccttggagaagcagggtgttggcctgcagcaagcagaccatggccatcaagtgcagcacggacagcacctcgtaccagacatctgaaatggccgtctcctcagcattatcctcttggttactccaggtgaactgcactttgtgtctcaagacgctaccttgttgtgctagtcccagcagaacgggcaagtagtcttcgagggcctgtagaagattggctgtactagacccgtgccgtgcagccgccttccgcctgggcttgagcgccgccgccgattcttgcattgccatctcgacgacccgcgacctcagagccgacagccgctcgactatagccctggccaggcagccgccgagcgcctgggcgaagtcgacggccctcggcacccggaggcccgggaggaaaacgaccacgtcgccgacgctccccggccgtctccggcgcgccccggcgtccttgtggctcgacgccccgcaccccatgcctgtggctgtgcagcggaagcggcccgcttaggtatctatctcaacgacgtacgggcagcccgcccgctagctgctcctttctagctgccgggcgcattcagggaagagggaggaactcagctgtgttcgatgcaacttctttgttcctccatcctcctggtcctggtgagctggactgcaggaggaagccttcgaagggagggagagcaaaagaagggagaggcc

SEQ ID NO: 83590 - DNA, 323 bp, Zea mays
  Clone ID: MRT4577_176248C.1
gacgggggaaagatgaacatgtgccatgcagtactccgggtttgaacacagcattgttactgacggctagatgcgacacacgaacatcattaggggaagcatgccccgttaacttgtctattgaggaccttcatttacccacacacatttgccccaataagggcgcttaacacaggaacgcacgtggctggagaattcactggaatgaatggggtacatagatatatggctgaaatcatacatggggatggggacttgtatttaaaaaccacttagggcgaccctaatttttatgactgacatgagcggctcattaccatata

SEQ ID NO: 83591 - DNA, 657 bp, Zea mays
  Clone ID: MRT4577_176249C.1
cctcgaggccggccgggccgggtttgcattggcgctacacctgaagattatgatcttcctccctagatccactttggaacaaagaagatacacaccattaagtgtctatacagcagattggttgcttctggcaaaacattggctctggagagaaaggaggaccaagatctaccatgtcaaagattttcagcattcgaaatggaactggaatcagcctctgatcgaagtggaaacctttttttagtcgtaaacatttacattggcaccttaaaatatactctggaacaatcagtctcagctgaacagtttataatacatgaactagctaaagtacagacatgcccaaaccttaggcaccacagtacattctgaatgacttttggcagtatcaaatgtacgtgaagccagtaagccaccgccgccacccctgcgaagcctgcagcaacactagaggcaaaaggggatatagggcctgcttcttctagattactcaaaactggcaaaagattaggataaactaaaaaaatgttacttcacaaagttaccgtgctgtccctatcattacttcaaatcaatttcgctagcatcattccatacctaggttcagggctcatattaactgcctttcaggtgaacatcgctgtgcgtaggaatgcc

SEQ ID NO: 83592 - DNA, 200 bp, Zea mays
  Clone ID: MRT4577_17624C.1
ttaatgcccattcgctgtgagaatcatcttttctgtctttaaaaacactgacatgtattgcaagacataagcatacaacaacttgataatgttttagaaaagcaatgatacaacgcacttatcaatgtgttctcaaaccggatatggaaacagaagcacgacatgttaaacaacagttaatttaacaaacactaaatatg

SEQ ID NO: 83593 - DNA, 2101 bp, Zea mays
  Clone ID: MRT4577_176250C.1
cgggcggggggggggtgtgtttttttttttttttttttttttttttttttgttttttttttagctagttcatgtattataaactgctcagttgttactgatttttccagagtatattttaaggtgccaatgtaaatatttacgactaaaaaaaaaaggtttccacttcgatcagaggctgattccagttccatttcgaatgctgaaaatctgttgttgaaaaaataaaagcatcaggaatcaggatcgacaatgatcaatgaaccctttgacatatcatttcccttgtcagaagaaaattgcctgtacagagctcttcagattatcttcaagccttgcttaattttgttgacatgtaattttgtttgaaaatattttgtacacttcatttgttaccatgttcgacctttgacatggcagatcttggtcctcctttctctccagagccaattttttgccagaagcaaccaatctgctgtatagacacttaatggtgtgtatcttctttgttccaaagtggatctagtggaggaagatcataatcttcaggtgttagcgccaatgcaaaatctggtaatgggggtggtgctccaatgaccttttcttgagtatacaggtcctgtttgattcggaccttgctggaagcatctcttgggatcttgtcaaacagatattttgctgttccgaatgcattcggactcctcgatgttggaggagttgcatggaaggcttccgaaaccattttgctttctttcagaaattcttctgaagcttgtagtgcagctattgccattccatgggatttctcggtatttccctcgtcaagaatcaaaccgtggaaatagtatgctgcagccttggcttcaacatacttccactttacaaatagccggtgcttttttccccatccatcagagactggaagctctggaatgctctcttgaacttgttgccaatatttgaccatctcacaggctaagcgccttttgactgctaaagtggcctttggactatcaatagccaagccgagctgcatgtcaaccccctgacccaaggcttgcaggcttagagctttgagatttccttcagccaggtcgactggaagttgtctccttagttccagtggcatcttcggaagtacatgacgaattgcgcagtctaggtatccagctgccttcaagaagacatcaacagtggcccgtctactctcttcagaaactcttggggcgtagccatcgccgtatgaccttgggagaagcagggtgttggcctgcagcaagcagaccatggccatcaagtgcagcacggacagcacctcgtaccagacatctgaaatggctgtctcctcagcattatcctcttggttactccaggtgaactgcactttgtgtctcaagacgctaccttgttgtgctagtcccagcagaactggcaagtagtcttcgagggcctgtagaagattggctgtactagacccgtgccgtgcagccgccttccgcctgggcttgagcgccgccgccgattcttgcattgccatctcgacgacccgcgacctcagagccgacagccgctcgactatagccctggccaggcagccgccgagcgcctgggcgaagtcgacggccctcggcacccggaggcccgggaggaaaacgaccacgtcgccgacgctcccaggccgtctccggcgcgccccggcgtccttgtggctcgacgccccgcaccccatgcctgtggctgtgcagcggaagcggcccgcttaggtatctatctttgcgctcgctcccttccctccgggattctcgagaccaccagcccccgcccggaatcgaagcctcgaccagcagcagcagaggccgccactatccctcccgccccccctgctcccggccgtctccgcagtgctcaacgacgtacgggcagcccgcccgctagctgctcctttctagctgccgggcgcattcagggaagagggaggaactcagctgtgttcgatgcaacttctttctccatcctcctggtcctggtgagctggactgcaggaggaagccttgaagggagggagagcaaaagaagggagaggcctcccggccggcctcgag

SEQ ID NO: 83594 - DNA, 181 bp, Zea mays
  Clone ID: MRT4577_176251C.1
acgcgtctaaactgagtcgtagtacgcatcgatgatatggtgggcattccccttcaccagcagctggacatcgttggttggaagcagcttgaggacgtgctcacgcctgccgacttgaggctcccggaggatcagtcaccgcgtcttggtgctacgcttcaggcgatgcactggtcatcct

SEQ ID NO: 83595 - DNA, 223 bp, Zea mays
  unsure (1)..(223): unsure at all n locations
  Clone ID: MRT4577_176252C.1
ggcgtcggacgcgggagccggggcgggggcctcggcggctgcggcggacgccacgagcgcggcggccatggcggcgacggcgacgaacttcatcctgaggccggccatctgctaatctgtaataatcccnntntttattgggccgcacccgatctctcttcnagggtacgaagctctagagagatggcgcccaagcggcttgctggctggctggccccactcc

SEQ ID NO: 83596 - DNA, 379 bp, Zea mays
  Clone ID: MRT4577_176253C.1
aaaaggggcccccttttttttttttaaaatgggaccggggtttttttttttttaaaaggggcggggggaaattttttccggtttttaaaaaaaaggaatccccttttttaaaaacttaaaacttaaaaagccctttctttttgcatttgcccccaaacagagcccaaaaaaatttggggcaattccttctcttaacaacaatttgacccgatcaaatcccaaaaagggtcttccttttttgtttaaacaatttaataaatacaagtggctttttgaatttaacaggaacttttaaccacggtaaccggggctttaatagcttaaatttcaagttaacgatttttgattcttaaaaaacattaaaacaacccgttccttt

SEQ ID NO: 83597 - DNA, 773 bp, Zea mays
  Clone ID: MRT4577_176254C.1
aattcggcacgaggcgccgccccgccaaacccgaaccagatctggtacgtgccgcccctcgatttggcgcgctcgatccggcatcgtggtgctggtgatatgccagtcccgaactcaaatctgggaggttccactgaagcgagattatagtcgcgaatcgcgggcgccgagatgcaggcgcgtgtggcgtccatggaggacgtgaaggaggcgcggcaggcggccatggcggcggggcaggggagggtgctgcccacggggatgctcaaggtgttcctggggttcctactgctggccgtggggctgtccgccgtcggcatgtacatggcgcggcacgcggtggcggcggccgcgcccgcgctattccgcccgtgcctgagcggctcctccgcggaggaggaacccgaggggctggagcggtggacgcggcccccagcgcgcgtagagcacgcgatgacggatcaggagctgctctggcgcgcgtcgttcgcgccgcgggtgcgcggatacccgttccgccgcgtgcccaaggtggccttcatgtttctcacgcgaggcccgttgccgctggcgccgctctgggagcgattcttccgtgggcacgaggggcgctattccatctacgtgcacgcgttgccatcctaccatgccaacttcacctctgaatccgtcttctatcggcgccaaattccccagtaaggttgcaggatgggggtcagatgaccatgtgtgatgctgagagacgcctacttgccaacgctttgctggactat

SEQ ID NO: 83598 - DNA, 377 bp, Zea mays
  Clone ID: MRT4577_176255C.1
aaataatctaacacccgattcgctcttgactttggtggaggggttaagcgtgccatctaaggcgggggagcactaatttccggctttgcttgggaccaagggtgttgcgggccccgcctttttaagggcaaagtccttgaatgacgggtctgaaacaggcgttgttggaaacaaaaagggccagctggagcagtcacctgatctccgggccgttgaacatttggatctcgccatgtttaagcgtctgaagtattctgggccattgggatcgctgcctattgacagcttgataaagcggttgaccagtgggtgaagtccagcgggcagttaattttgcccactgggttacctactgatgatcaaatggcaatcccgga

SEQ ID NO: 83599 - DNA, 348 bp, Zea mays
  Clone ID: MRT4577_176256C.1
tatgactgcacacgcacgcgtgcctcagcattcagttcgaggcgaggactaaagccagttatccagcctccgagaagcgaacagacacgttgggaacagtcttttattcaaacaaaccaaaaagcattcacgactcacaatttctactatggaccacacccgcgagaccaaagcccgcgcctacgagaatactgtttaagtgatgtgggcgtctcaagagaaatggagggaggccaagcacaaggcgtacgacgccgccgaccgcgccatggggatgggccacgacaccagggaagccaccagtgagaaggcgcgcgcccccacggaccgaaccatggggatgggcca

SEQ ID NO: 83600 - DNA, 982 bp, Zea mays
  Clone ID: MRT4577_176257C.1
ttcgggcgtagtaagcaactctattgagaaagctctttcttgatcgaagtaaagaatcattgtagttcctctttaggcgagctacttcgttcctattctccgattctgaataggatcaggttgtaatgaaccaaaaatacttcgctaaggttcaaccgtttcgctacggttttcttccaatttcttctaaggaagtaaaataaaagaaagaaaataaaggccttataagctttctctgtatggaaaaaggaagaagatgctgcttcggcttccgtttctagctctgcttgagctgcttcgtctgtttctcttgatgtggatgtcggtgagtcagatctcttctctcactttcggagcacagttggtcctcaatttgaaaaccgacaaaggtgacttcttccttattcacgccttgatgcaccgcacctttttcgtgttcaatctcgcctgagagcagtgcatcgataccattcgtcttgaagagcctatataagccctgaccgaagagaatcctttgatatccgtcttgccttctcagtcctccttctcatcccataggtctcagggtcccctccaccgacccttgtactataggtttccgggcgtgagccaaacctagggcttggatcgaaatatagctttgcttcctttttttctttagtcagaaagagttcccagcttatagtaaaggctataatagttctagttttctttctcattagggaaggcgggctcgcaagcctagccttatttttagcggccgggagctaatgtgagaggcatcggcagcctcaaccacggttcaagcaccggctcacgacagagcttgatcatacctggacctacttcattttctactcctgtaggttaggttaccgattttcctccgacgatgactctaggtgagggacttaggcctatcaacggcattctggacctgcctttcttctcacttgataacagatcatctagccctctttta

SEQ ID NO: 83601 - DNA, 614 bp, Zea mays
  Clone ID: MRT4577_176258C.1
attgtggaacggatccttgtattgttaaatagaacacagcatagttctgcagcatctcctttcaactccactgaacaatcagaagaaagaatccggcacaaaacatccacagcattcatctcaacatctgcaactgcaagtgctcttgaaggattgtcagaaagaagcctaacaagggctgatatagctgcatgctgctccctctccatgccagtactcagaatctccacaaggggttggatagcctgcctagctgactcactgttcctcacatggtcagcaaaaaacaaactctctaatgcctttgcagcactgtaacgtgaattccttcctcctagacgaaggactgcaacaagttggttaacaacaccaagtgctgattcatgatgccttatttctggactactgaaaagaatgcccagcaattcagttgtagcttcttctgttgcatcttgtggactaagagataagtatttggtaagtgcttctagtattccagcttcagccattagcagcatgtttggggggcaatcaacagctaactgggtcagaagacccaaagccaagaaaggagcaccaggtctttcaggaatgggtttaagtagatcaacaag

SEQ ID NO: 83602 - DNA, 158 bp, Zea mays
  Clone ID: MRT4577_176259C.1
aattcggcacgaggagtcactcatttcttcctgacgcgcgagcgtacagacgaccgcgacgacggtcaggccgtcgacatggctagccgctcgccgctcgccaacgaggggctaatcccggtatcagccttcatagcggtcgccttagtcgtggagac

SEQ ID NO: 83603 - DNA, 261 bp, Zea mays
  Clone ID: MRT4577_17625C.1
ctcaagttttcttggattctttttaacctacaaaatttcccccagtggggggtctcatcagcacctgtaggaaacatgtacgccatcttatccgattgcaaaggtaataatgttccagacacactcaagagaagctgccctcaaaattaatctgcactctctctctctatgtcgttctgcatttacacgtcgttcttatcgaactcttccttaagaagggccgttccgcgctaagcgtgaccacttacaccccattctacc

SEQ ID NO: 83604 - DNA, 247 bp, Zea mays
  Clone ID: MRT4577_176260C.1
caattccctcatcgaccgactcgtcctcaactgattccaaaccttactccttcactttatcgatccatagcttccattcatagattgcattcctatcttcttagaccattgcatctcccatatagttcatcatgccaagaacaataagaaattcactgacactgtttagctttaaattagtctgaataattatgatccacattaggacatacgcttcagccactctatcaagttgcctaacattcct

SEQ ID NO: 83605 - DNA, 284 bp, Zea mays
  Clone ID: MRT4577_176261C.1
aaaaaaaaactgtttttttataaaaaaaaaggaagaaagatattatacccttgccttccaacgtaggagccgtttttttcctaccctcacaaccaaacttgttgctgaaacagggcctgcgcttggctttttacctgaaggaaaaggcagtgctcatgcgaaaccaagaggggagggggcggttctggcgcattttcttcgccagttttttcttgatccggaaggtaattagccactgttttggggcgcctgcggcggttttggggggggcggcgcgaaaaccc

SEQ ID NO: 83606 - DNA, 987 bp, Zea mays
  Clone ID: MRT4577_176262C.1
gcccacgcgtccggaaagtacttcgcaactcaaaaatccatgaatttaacataaagctagcaacccacaaaagactcattccagctcatatcaagggaaggccgccgtcatattacattgttgctggctttgtttttatggctgtgtctgttccatatcttcgatctgagtatggaaaagaatatgaatacgatgcccccgtgaagttgttggacaagcatttgcatgcaatggcacaatcatctgatgagcagcttgtggtggtgtcacaggtgcttgtggctgatataaacattggttacgaagatatagtcaacattcaggttcttgccttcaatggcacaccggttaaaaatttgaagcacctagcgaccatggtggaagagtgcaatgaagcattcttgaagtttgatctggacttcgatcaggtggttgtcctggagacgaaaactgcaaaggctgcaactcaagatattctgacaacacattgtataccttcggctgcctcagaagagctgaagagctgaggaaagctaggtgttgtctgtcggctggtacggttaatacatctccccttccgcgagaagtgctgaaagagttccattgcaggtgagattctgcatgtcgaagagtggaagctggaatgtaacctagttgtaccaaagagtgcctagcaagtatcacatacacacaaaatgcatactgatgactgaatgtcgcattgagccacccgggtcagttgtaggataggtaaaaaaacaaaacaaagttttgcccatattccattaatctagttgacatcaacgaaatcatcatgagtaactttgcgtatccctatttgccatgattggtctgatgacacttctgctttagacatctgtggtccggttgccaagagcatgccactactttgttgtggagtactctagttcatcgaagaaaacaatcgtatctggatggcttttgcatcggaaataaaaaaaaaaa

SEQ ID NO: 83607 - DNA, 343 bp, Zea mays
  Clone ID: MRT4577_176263C.1
ggggagaaagccaacgggtttaactacaagggttccggggggcagggggggcatgggctcggaacatatctaccatgaagcttacaaaaattttaaggggggtacccataaatcaacgcatgaagccctggtgaatcaaagggggggaataggccacaaagttatcccaaaagcttttggacttctccattccgattttgagccaggggttcatatttccattggagggcagaactgcaccttccttggtaggagcaagaaccacatttgggtagccaagtcccaaaacatgccattggggaaccaatgcttcaaccaagccataaaaagcaagaagtccagg

SEQ ID NO: 83608 - DNA, 660 bp, Zea mays
  Clone ID: MRT4577_176264C.1
gagcagcttgtggtggtgtcacaggtgcttgtggctgatataaacattggttacgaagatatagtcaacattcaggttcttgccttcaatggcacaccggttaaaaatttgaagcacctagcgaccatggtggaagagtgcaatgaagcattcttgaagtttgatctggacttcgatcaggtggttgtcctggagacgaaaactgcaaaggctgcaactcaagatattctgacaacacattgtataccttcggctgcctcagaagagctgaagagctgaggaaagctaggtgttgtctgtcggctggtactgccaaaagatcctactgcccttctggaactaggacggttaatacatctccccttccgcgagaagtgctgaaagagttccattgcaggtgagattctgcatgtcgaagagtggaagctggaatgtaacctagttgtaccaaagagtgcctagcaagtatcacatacacacaaaatgcatactgatgactgaatgtcgcattgagccacccgggtcagttgtaggataggtaaaaaaacaaaacaaagttttgcccatattccattaatctagttgacatcaacgaaatcatcatgagtaaaaaaaaaaaaaaatatttgccctagggccttctgatgacacttttgcttt

SEQ ID NO: 83609 - DNA, 260 bp, Zea mays
  Clone ID: MRT4577_176265C.1
gatgactgatgggagatctctctgctgatatcaaggtaggatccagatgtgaggttgaacctggggcaaaaaggggtgttgtaaaatttgttggccgggcagaatcactgggtcctggtttctgggttggtgtccaatatgacgaacccacgggcaaacatgatggcatggtcaaaggagtacgctacttcgaatgccctccatctcatggtggaatggttagaccagagaaagtgaaggtcggtgactccctgaacgag

SEQ ID NO: 83610 - DNA, 306 bp, Zea mays
  Clone ID: MRT4577_176266C.1
ctgatgaaagaaaaagtcagatattggatgtggtgaagagtctggccggagggtttgatatggatgttatcttcaccagaatggatggttttacaatgactcaagagtggttgcttctggattgcttagatctcaaccttcgacatggttggattgctgctagggatttgttgaccggacccgaagtatcatttgaaagtcttacattggcttctaatgaacctggttttccacatgcggaggagatcaagaattttctaaggggacctcaacttactcccattggcttggtttcgctgcaagaag

SEQ ID NO: 83611 - DNA, 271 bp, Zea mays
  Clone ID: MRT4577_176267C.1
tttctcttttttttttttttattttttttttttaactgtaatgtgcgtccttcatatggtcaaaaaacaacccattgaatgcccgcgagtggctctctacagatttacacatcaatttgtggggcgcaggacactgcacgtccatgaaggactcgttatcaagctccatgctatcataactgatggaaatattattgaccgcccttcaaaaatcacctttcacactgagcctcatcttaaactgttgggtcataaaaggctattcttttta

SEQ ID NO: 83612 - DNA, 799 bp, Zea mays
  Clone ID: MRT4577_176268C.1
cggtcgcgtgggcggacgcgtgggcggacgccccgtgccctgcaggtgccagcgccctgcccgcgccacccagcagcgaccgcgcctgctccctgcgcaagcagccgagccgccctgcatcgacgagtccaagcgccatgaagccgccaaccaagcccgacgaccccgcccaggcggcgaccgagcagctgcccgaccccgtcccaaggacgcgactccgaccggcgcgatgcaagcccaagaccgcgcgcgtctgttcgattacgtgcgcgattaatggtgtttaaatcctccgttactccttctcccatttctccccattatgagcagaaaaccgacgccatcaatggccagtgaaggccgtcggcgccccatgacctccctggcgtcctttcccctctcccctccctctctctataaaagggacagcagagctctctcccatcctccctacccgagctctctcccattccccgcctcgctctctagctctcctcgctcatcgctagtgccgttcgtcgccggagtttgccgctcgtcgccggagcccgtggagttcgccggagctacgccatccgccgtccgtagtcaagcccctgctcttctccatccggtcgaaacccgtcgatccatccccgtcacacgcacggacccaaggttgaagacgacccaattattttgtgtattttataaaatactttttgatgcaattcatgagttgtatattttgtttgttgtaatatgaacacgtgtgattcgcaattcatgtatatgtgcgttatggaatttttggtaacac

SEQ ID NO: 83613 - DNA, 586 bp, Zea mays
  Clone ID: MRT4577_176269C.1
gccggccgtaccggcgaagccaaccatgtagcagctactccatctaggaagagcgcaacagacatggctacttaagagcagcagcagcagctgcgcctatggtgtcctctatgatcgcctctccaggtcgggagacggccgctgacgatgagccggcactcgagcgccgagcctcctgcttgggcgccgcgtgctccgagaacaacactcagcagagacatagcgcctacgcgtattggtcgtgcggcctgcaccgtggaccgccactactacgggataaagagtatagggaaagggcttgtatcaactcaaagactgacatccagctgaacgcagatgcgatacagagcaatcgatcatcatgatgactgtcctcgcatcagaagacggatactggggaggaattcttgcggctacagatatgtcgcggagtcgtagcagtgatttcaggaggtgggggccaactcgctgaccaatatacggctcattcggtccaatgacatccaacgtgtggggattcgagcaaatggaccagaaacactatcgcgcgtgtcgacgactcaatggccgaggatatccagtcccg

SEQ ID NO: 83614 - DNA, 1625 bp, Zea mays
  Clone ID: MRT4577_17626C.1
actcgacgtgggccagcaccccccggtaagggcggcggctcttgcgagactgtacactgtagagagagacgtcgtcggcctgagcgccgtgcaagcaagcaagcggcggcaatggcggcggctcttcaagccacgccgatcaaaaccctagccacctcccgctggcgcgtcgaaggtgcggaggcgcggccgcggccgcgtccgattgcggtgagcttccgttgctccgcggcggcgaggagctacaacatcacgctcttccctggggacggcatcggcccggaggtggtcgccgtcgccaaggacgtgctatccttcgccggagccctcgaaggcgtcgagctccggtttcaggagaagctggtgggcggctcggcgctggacgccaccggcgtgccactccctgacgagacgctcgacgaggccaagggttccgacgctgttctcctcggcgccattggaggctataagtgggataccaatgagaagcacctcaagcctgagaccgggctgctgcagctacgtgccggactcggggtctttgccaatctgcgaccagctgcagttttgccgcagttggtagacgcatccactctgaagaaagaggtagctgaaggtgttgacatcatggttgtcagggagcttactggaggcatctactttggcaaacccaggggttttggaacaaatgacaagggagacgatattggcttcaacacagaagtttattcagcttctgagatcgatcgtattgcacgagttgcatttgaggtcgctcgcaagagaagagggaaactatgctcggttgataaagcaaatgtgctggaggcatccatgctttggaggaaaaaggtgactgcactagcctctgaattccctgacattgagctctcacacatgtatgttgacaatgctgcaatgcagcttgtcaggaatcctaagcagtttgatacaattgtcacaaacaatatttttggtgacatattatctgatgaagcatcaatgattacgggaagcattggaatgcttccatctgcgagtgtcggtgaatcgggacctggtctttttgaacctattcatggctctgcccctgatattgctggacaggacaaggccaatccattagctacaattcttagcgcagcgatgctattgcgatatggcctaggagaagaaaatgctgcgaggagaattgaagctgcagttacagaaacactgaaccatgggttccgaactggggacatatattctcctggaacaacactggttggatgcaagcggatgggggaggaagtcttgaagacagtggagtcactgaaggaagtggctgctgtgaactgatgcatgctggtacttgattcattgcattttattagaagtcgagccgagcgtaagagagcatggtgtctgggttattgttgatgttgaattgaaagtttagtggctgaaccgatagccacttcgcatttctgtggtttgtttgtctccctgtagttttttctttggtacaaggaaaggataggcatatgtttgctcaataaaatgggatagtttatgccgctttgaataaaagatggagttctgttttggactaaaaaaaaaacaaaaaaaaagcggcggcccgg

SEQ ID NO: 83615 - DNA, 1288 bp, Zea mays
  Clone ID: MRT4577_176270C.1
cattgggtacctcgcgggtctccgtcgttatttccgggctccctcctgtgtacaccactcccgccccgcctaccattttatccccgcctctcctggcctctgccgccccgtcgcacagaatcgcttggtgcaccctgcgagggcctcctcgaaaccctagcttgcccagcccctccgggccatgggcaagtacatgcgcaaggccaaggcttccagcgaggttgtcatcatggatgtcgccgccgctccgctcggagtccgcacccgagcgcgcgccctcgcgctgcagcgtctgcaggagcagcagacgcagtgggaggaaggtgctggcggcgagtacctggagctaaggaaccggaggctcgagaagctgccgccgccgccggcgaccacgaggaggtcgggcgggaggaaagcggcagccgaggccgccgcaactaaggaggctgaggcgtcgtacggggagaacatgctcgagttggaggccatggggaggattaccagggagacgacgccctgcagcttgattaactcccagatgatcagcactcccggatccacgagatccagccactcttgccaccgcagggtgaacgctcctcctgtgcacgccgtcccaagttcaacggagatgaatgagtacttcgctgctgaacagcgacgccaacaacaggctttcattgacaagtacaacttcgatcctgcaaacgactgccctctcccaggcaggtttgagtgggtgaagctagactgatggattcagaggacgagagagcagcaggcatggaatggaactcactccccgctccctccacaccaccccagcgttgtggcagaggcgcataccgtcgtgttagcttcgtttctgctgtaaaaaaaaacccttagtgttttatttagcatgtagccttaactggtcgtgtgttacagtacagaactgatgctgagttacaacaccctgatctgatccctcaactccaatgtaacccttaacagctcattctgtaaggaacctgtcaccctgttacctgttgctgaactaatgaagtagagctagataatgacgttttatcgtagttattattaataacttatcctctgtgattgcgcacctgaaaaaaaaaaataaggaactaccatctgaagatgacatgggcaacaaagaaagtttgtcacaatgcacttggtgactggaaaaataaaaaaacaggggggggccgctttaaaggatccaagcttacctccgcgtgcatgcaacgtaatagtttttttatagtgccacctaaat

SEQ ID NO: 83616 - DNA, 653 bp, Zea mays
  Clone ID: MRT4577_176271C.1
ttgggaccctcgaggccggccggggctgcggctgcggacacccaaatcttccccgaaaccactcctcagcccggtgagcgctcgaccatcagaaatgggcgccggcgacggcaatggcacgcgccccaaggcgaacgaggtgacgatctcgtgcgacgagggtcccgggcacgcgtttccgttccccaagccgcacgcccccgaccccgacccaccgcaggcgtccgacccggcgaactacgccgtcgctggcaagatactcctcgccgcggcgggggcgttcgcgggcgtgctcctggcgctcgtcgcgctgcacctctacagcagcacccggcgccggcgcctcggcgccggccagccgcggctgctccggagcttggccatcgccggtggcgacgaggaccgccgcgacggcgacggcgacggcgcgggggcgccttccccccgcggtctcgactacgcagtccttgccgcgataccagtagtgtcgatcgaagcaggcgcgggggcaggggactgcgcggtctgcctcgcggagctcgagtcgggggagaaggcccgcgcgctgccgcggtgcggccaccgcttccacgtcgagtgcatcgacgcctggttccgtgggaacgccacatgcccgctctgccgcgccgacg

SEQ ID NO: 83617 - DNA, 501 bp, Zea mays
  Clone ID: MRT4577_176272C.1
aaaacggagatactcgattcacaacacggacgaaaaataaagccgaggatgccgctctttccatttatactcaacccaccaacattacaacgcacgcacaccacgccggtgtgatataaataaatatcaaaacaaacccggaatcccaaagcaaaacaaccgcagaaaccgctcaatagattggcaataaaaaccactgctttcgattcgggagcccaccaacggcacaaagcatccggccggacaaacgccccaacgcccaggcagattacgggtataaccaaaagcgccccttatggtgcgcggtactttgatgaccataaatcccatcttgaagggggacgagcccttaaccttgtataggcccccgatcattagccaaatggggcttcgatctgacgcaagaaccagaactttgggccaaatatcccatcacttgaacatgacccagtaaataaacaacggaacgagcaggcacccaaggtaagattacctggaggc

SEQ ID NO: 83618 - DNA, 306 bp, Zea mays
  Clone ID: MRT4577_176273C.1
ggggggtcaaacaaaccgggtttattgaagcgaacactgatacaatttttcctgatccaaattgggtaggggcgtctttgacaccaatgcaattttgggtaaaatcagaacgatttcctacatgccccaagggggtgggtcaatggatcactcggaggcacgggcgttgaaccatttttacttgaaccggtcaaaaaacttggggaaaaactcccccccctgcatgttgatggggggtgggcaactggtgtcacacggattgccacccttaggacccttttcctgggcgctgaccatttggggcaa

SEQ ID NO: 83619 - DNA, 328 bp, Zea mays
  Clone ID: MRT4577_176274C.1
gcccgacgtacaccatgacgaaattgcttggaactggagatgcgctgatacactgagattgctgagaacttgctaactgagagcctactatcagctgatatgtgtctctccacttgtgcgtgcataaactgcgttcttccattgtccatattttgctcgaacctacactgatgaatatacctaacgatgtatacttagcttacgtaccttgacctcggacgcgtcgctctaatgggcgaattgtaggcgatattcataacactggctaggcgatctagcatgcatgtataagggccgcaattcaccctatagtgcagtggtattacat

SEQ ID NO: 83620 - DNA, 409 bp, Zea mays
  Clone ID: MRT4577_176275C.1
ataattcacctaattccccttcattcggaaaaaaaaaggttaaaaaaccaatccgacagcaagccgttcctaatgtgcttgatacaaaaaacacctggagcgcttcggagacaaacaagcaagaaatgtgggggaacccaaaaaacacagcccggttgagctggcggaggtggccaagcattccgaatttcaaaaaaagcaatcgcaatacaagtgggccaggggggccaacagagaatgctgcaaccaggaaaccaaaacagataaaaaccaaaacctgcacgagcataagcatcccaccctgaaccccatgcaactaaaaacaaaaacccctctgatttggacttgttagacttggagtcagcaaattgaagggcatccaaaggttgcttggaaggaaggaacttta

SEQ ID NO: 83621 - DNA, 462 bp, Zea mays
  Clone ID: MRT4577_176276C.1
gggtacccgggcgccccccctcgagtttttttttttttttttttttttttttttttttttttttttttttttttttttttttttttttttttttttttttttttttttgggggggcgggctttaaggggacccattttaaacatgccgaatacaaaatctggaaaaaagggcgggccccttttataacacccctccccccaaaaatattgggggggaaaagaaaacataacccccccgggggggggaaaaaaaccccaataaaagaccccaccctggccaaaaaaaaaaggttaaggccccaaagaaaaaacaaaacccgagggtttttgggctggatttgggaaccggagccctgggggggcccccttagggccccccatcggggaataatacccatcccggggagaaaactttttgccccaccccttttaaaacccggtttttataagagggtggggatt

SEQ ID NO: 83622 - DNA, 272 bp, Zea mays
  Clone ID: MRT4577_176277C.1
gcggggaagatgaatgcatttctcggatcgttcatccggaacaataattaacaaatagacgcttggcaaggccttcagttttgcccttctttaagtggagctattaggggggcattggaagtggtgtctatcaaggcggacgtgtcatggggggggggcgtgcttctgggggacgatgcctatcacatgcggctgcggcttatcttgcaggtcccggcggtttacccctccgaggatgatgactagttctattttattgcaggattgcttgt

SEQ ID NO: 83623 - DNA, 275 bp, Zea mays
  Clone ID: MRT4577_176278C.1
gctgtcttttttttcccctcttaccatatctttttttggttagggttacttatggtggggtggattttcaatagcggcggctgatgtataataccattgctttatcattggacttttcctaggccacaagcaacgagtcactgtagaatgccttttccttctacagcgagatcctctacttttaggacatcacctatcggtagacagagatgtctctctgcttttacttcataaccttttcctccgagaactccatgctctacgctatcgagaac

SEQ ID NO: 83624 - DNA, 780 bp, Zea mays
  Clone ID: MRT4577_176279C.1
agaattcggcacgagcgacactccatctctccctgcatccacactccatcccttgtctctccccacgtttcttccctctggctcatggagtcatggacactttatcctcagacctcagctgaggcagcttcaggcttcagcaggtctgcaggtgtatatatattcctctgctccgggactggtgcacagcaaagcgtcttccatttctcagaagagtgtgtgacaacagcggcaaccgacagacatgtcttcgccgacatcgccttggtttgcggatctcttcgcagatgacagggtgaggaccctatcgcaccaggtctccacacttggggacagggtgtgggaactggagcacaaaattacccagctgatgggcgagaaggccaagctggagaagcaactggaggaggcaaaggcgatctcaagccacaaggaagaggtggggagaagcttgaaggctgaaaatgataagcttcagtcggaggttttggttgcggaggaaaagtgtagcaagtctgcagcggaggttgagaggctgacgaaggaattaggcgcgctggcggaggcaaaagaggcagctgccaaggaattcaacgacgagaaaaaaaaaaaaacgctagaatcggaggatctcaagatgaggctggaggaaatgctggccatcaaggatttgacagagagcgagaatgacaagcttcggtccgaggctttgatcgcagctgaaaagcaaaacatgtctgaagcagagattgagagcctcaagaaggaactgagtgggtt

SEQ ID NO: 83625 - DNA, 1134 bp, Zea mays
  Clone ID: MRT4577_17627C.1
aactggcgaagaaaacatctgctggtggggtttttcttctccgcgggttgggcccagcaagcctacgccggcagctcctcttaccctcgtcaaactccgcgagtgggtgaaatctactacactgctggcagaagcgctgcgcctggttggcgacgacggccctgatggtcttgctgtgggtctcgcagaccttgtgcctcctgtggtaatccttggcgccggtcagatccgctcggcagtcatccacctggcacatcgggtagcccgcgcctccgttggcagccccgccaccgtcaccgcccgcgctgcccggcgatcctgaccgcacccgcttgctcggcctgaccaccgggtcctgccccgatgcaggcggggacggcgacagcgacgccgcgggaggcgtcgggctggcgtccatcggggtcgtggagtcttcccgcaggccgagctggaggttcagcgcgccgggccccctggcgctgcgcctcagcagccggctggggctggccaccggcgaggcggagcgcatcggaggacggcctggcggtgagcgcgcggctgtcccagtcccacagcctggggttccagttcccagcgccggcctccgcggcgccggccgcgggccacgggtggccgcgcttcttcgcggcggcggcggcgtggggaggcatcggctggatctggtgaaggaagagcggaggggccacctgcggccccacctccctctgcatcgctcctcaaggtctccgggcctcccaactcagccgcggcaaccgatcagggatctctcacgcaagtcttcggcgccagtccacgtcacctcgccgcctccccagccgtccagaaatagggccagagcagaaaatatcccttccctgcccacctgcgtagtgctggaatcggcggaggatgaagaagtgggagtgggagagagagaggaatgtgctgcccgccctgatggtgtggtgcggcgctgggaggaaggcgtgtgtagagagactagagagagaggcagcggggaatcgagcggagaggaggcagcagcgcaaagcgggcgaggaagaggacctcccgcgtgggtaagcgtcctggcgcggcgacggacgggggcctggtggcgcctcgtgccgaatt

SEQ ID NO: 83626 - DNA, 246 bp, Zea mays
  unsure (1)..(246): unsure at all n locations
  Clone ID: MRT4577_176280C.1
aaaaacccctctcggtgggtctgaacaaacctaccccttattatcacaacttatccttctncttntttattcattcaacatgttttacatcaatttatcctttcctttctctattcaacatcccnanatctttgtggggggggggggctcatactncncacccccccctacaaccacaaaaaaaaacaaaatttattttatnccctcccccacccccttnntttccaancacactccancatnctt

SEQ ID NO: 83627 - DNA, 215 bp, Zea mays
  Clone ID: MRT4577_176281C.1
ctgccgcagagttgacaaggtccgaatgggagttagtctgtctgtctttgcagctctgtttcttctgcacttgggtaaaaacgctgtgaaccccaaaattaggaagattcagttcagaggtgaggattaagggtgggtgtccggtctgaaatagcagtggacctttgatgcctctgtttgtcttggtctggttccagtgatagctgtatcttgtg

SEQ ID NO: 83628 - DNA, 713 bp, Zea mays
  Clone ID: MRT4577_176282C.1
cccttgttcgacccacgcgtttgtgattatgaaattgcagaggactacctcgactgggaggttggaaagcatggtttaattattgaatttacagctccagactccaacacaaaacacagtgcgacctatttgcctgaagttgcgggccatgaaggtgaaaatttcctttttcatcgatgcgatgtacacttatcgtttctacagaggtctttagtttctagaattattgcaggggataataagaagaaatgagttaagaaaatatgtaatttcatctttctaaatcatcatggaccaaatgcattataatgagcaataacggttggacacatgtagaaactattgattcactcgtgaggaaggcaggttaccagagaatcatcactgagtccttgaggaagaaaatcaaagtcactcgctaccagagcaccctgtacacgatgcactatggtgaatatgttgcgtacctcaagaagaacagaggtgcagccccgtcaattagtggggctcctcctgtagttaatggcttcaagccaagccattgatttatcagtataaaaaaaagctcaaagaacatattactataatttatctgcgagcaattggggggtgttagtgtaaccaccccccacagttcattgatctagcatcattccctttcaaggaaaggccaaataggggcgtcatgacaagcgcccagaataataatgcct

SEQ ID NO: 83629 - DNA, 412 bp, Zea mays
  Clone ID: MRT4577_176283C.1
ggccgggggaaaatcattccaccgagatttttaaaaaataaaagggtccgcaacttccgctcaaaatttaaaccacataatttcgcatactagcgggggtttcaggattccccaaacccacgagaaaattttttgctgaaacaaattttaagggccttgaacattggggaagacgcctatttcgcctagttcttgggggccttatccttggtctttgggatcttaaaaaccttttggacgatcttctgctcctcgaccaaaaaggcccggatgatcctttttttcactggggtcccagacagaacacccccatttggccggttcacagtcctggggttccttggcaacctggaccttttgtactaaccaggtctgagggggggaattccttggatctttttcccggggaccg

SEQ ID NO: 83630 - DNA, 1442 bp, Zea mays
  Clone ID: MRT4577_176284C.1
cctcgaggccggccgggccggggctgcagaacgagtgtggagtctgctgaagaacgagttggagtctgggagacgtttagacaaacacaagcaaattttttttcaatcccgcagagggcaaaaccgtccaacgagacaaccccgcgcagaggcaaaagccccacgcttgagagggcgaagaaacagacgcatcgcttccttgtccatcctacctccccttccccccgcccaaatcccgtgacggtcgccgcccccgccgtgctctcgcccgcgcgggagacgacgcagcacccccccgcgtaggatccgcggcggtcggcaggatggtggtggccacggaggaaatggtggtctactgctttgacaccctcgtcgcctatttcaccggcgagcggccgccgcctcccgccttcgaggatggaaaccacccattgtttgtgacctggaagaaggctgccaatggttcagaaccacgcctccggggatgcataggaactctggagtcccgtcagattgtcagcggctttagggactacgccctaactagtgcgctgagggaccgacgctttcccccaatacaatcaaaggaactcccaaccttggagtgcacggtatctatactcactgattatgaaattgcagaggactacctcgactgggaggttggaaagcatggtttaattattgaatttacagctccagactccaacacaaaacacagtgcgacctatttgcctgaagttgcgggccatgaaggttggacacatgtagaaactattgattcactcgtgaggaaggcaggttaccagagaatcatcactgagtccttgaggaagaaaatcaaagtcactcgctaccagagcaccctgtacacgatgcactatggtgaatatgttgcgtacctcaagaagaacagaggtgcagccccgtcaattagtggggctcctcctgtagttaatggcttcaagccaagccattgatttatcagtataaaaaaaagctcaaagaacatattactataatttatctgcgagcaatttggggggtgtagtgtaaccaccccccacagttcattgatctagcatcattcccttccaaggaaaaggccaaataggggcgtcatgacaagcgcccagaataataatgccttcctggatggatcatggatgatgcttatgtatcttgaaaacacatgtgcttcaagaagttcaaattgtgtggtgaagttaattgattcgagttggccccccccttcagttcattgatctagcatcattcccttccaaggaaaaggccaaataggggcgtcatgacaagcgcccagaataataatgccttcctggatggatcatggatgatgcttatgtatcttgaaaacacatgtgcttcaagaagttcaaattgtgtggtgaagttaattgattcgagttggccggccccta

SEQ ID NO: 83631 - DNA, 1663 bp, Zea mays
  Clone ID: MRT4577_176285C.1
ggcggtccaaagcgaaggggggcatttttgcctcgtatgaaaattttcaaacttgcaaagattgacaagaatcaatacaagtagtgccaggcatataaaacaagggtgtggacgtgtggtgctgcgtcaatctggaaggccaatctcaaccgaatatagagtggaccgtccgccggccgggattatgatttaagtaggacagtcagtttaatcctaaggcattcagattctttgggaagttgggaggttaaacaggatgagctttcgtgttctgactgtgacgcactgatgtttcttattcatactccaggattcagacttttaattgagatcctttcaaccgtgtagtccacattaatttgtatggcttgtaaggcatcattgttctagcgtacatgtttttaactcattgggtcaatttttttgtaactttagcccattgtttgtgacctggaagaaggctgccaatggttcagaaccacgcctccggggatgcataggaactctggagtcccgtcagattgtcagcggctttagggactacgccctaactaggtgactattgtttcagtattgaaattatgtctgatccaatgctgaaatatctggtcggtactcaaaatgttgatgggcttatgctgtaataagtagaaaagcaatcgtgcactttgtattggataatgtttagatatacggtaatcttgatatcctcttgcagtgcgctgagggaccgacgctttcccccaatacaatcaaaggaactcccaaccttggagtgcacggtatctatactcactgattatgaaattgcagaggactacctcgactgggaggttggaaagcatggtttaattattgaatttacagctccagactccaacacaaaacacagtgcgacctatttgcctgaagttgcgggccatgaaggtgaaaatttcctttttcatcgatgcgatgtacacttatcgtttctacagagttctttagtttctagaattattgcaggggataataagaagaaatgagttaagaaaatatgtaatttcatctttctaaatcatcatggaccaaatgcattataatgagcaataacggtaaaataaagagtcaactgatcagtacattccaaatctgtattgaatagtttgtaacttaggcttaatcttttggcaggttggacacatgtagaaactattgattcactcgtgaggaaggcaggttaccagagaatcatcactgagtccttgaggaagaaaatcaaagtcactcgctaccagagcaccctgtacacgatgcactatggtgaatatgttgcgtacctcaagaagaacagaggtgcagccccgtcaattagtggggctcctcctgtagttaatggcttcaagccaagccattgatttatcagtataaaaaaaagctcaaagaacatattactataatttatctgcgagcaatttggggggtgtagtgtaaccaccccccacagttcattgatctagcatcattcccttccaaggaaaaggccaaataggggcgtcatgacaagcgcccagaataataatgccttcctggatggatcatggatgatgcttatgtatcttgaaaacacatgtgcttcaagaagttcaaattgtgtggtgaagttaattgattcgagttggcc

SEQ ID NO: 83632 - DNA, 760 bp, Zea mays
  Clone ID: MRT4577_176286C.1
ttgggtacctcgaggccggccgggaaaaagatgcggctccgcacacgtgggtttccaacgcccaactgcagccgcctaccaaatgtgcagcggctacgcactcccatccctggactactcttggtgggtggagactggagagagccacagaaggcaactggaggttagagggcggcgcgataggcgagccggcgagttcgggtgcttttcctggggtcggagatgcgaccgttgggacccgggaaacagcgcacttcgagttcgggggcggctcccgcgacggcggcagccacctgagcaggatgtttaattggaacgacgagcagcagcaggtccccgtctacccatcccgtcatcgtctagaatcttgcgttacacttgctcacttggctggatctgctcggtttctgtaattcgtttcgtcgttccgtgcttcacgtgctctaattcactaggttttagtttggatgtggttgttccggatgggaattttgatattatcccattccgttgagggagttggagatgcaagggactgcggggggaagcgtgcaattcttgctacgtaggtcgactgcatcactgcaggttgcagcagtgcaagcatggctagggaaaaattctgcttggattgcctctacttctgaagcttgtaagattgtctaatgtcatgagcagtgctggaaatattgggacttgtatgttctattggaagaaagctaagggggtctttataaaaaaaaaaaaaaaaaaagcggcc

SEQ ID NO: 83633 - DNA, 746 bp, Zea mays
  Clone ID: MRT4577_176287C.1
atttcttatctatggcgcctctacctttcttctctctctcgctcctccatcgccgcctgatcactacgacatccggatgaccatcgccgcctatgtccgactaccactccaaaactgcgacctacactgggagcgctacgagctcccccgccgcactggtgacctctatattatatagccttgatcagacccgagacccgcttctgctgggcggcggaggcatctacctccttgactagatccacaatgacactatcctgaagccacgtcttaggccctatgacctaagcgatgtcctcaagcttgcacataacgctgctgcccctgacattggtgacatgcacactgctgacacattcgccaatcagctgattgccttccttctgatgatgcacgccttgcatacccctaatgacccataggactgataatcgatgcccttagagcatcccgctgttgaaaatcttcgccaccatcgaatatctgaagatactcgactcccctatgcgatatgttgatgaatgtccttcccgccaataacaaaggaaaacatatgattggttgactgtgtctggctgctcgacctaacgtgcctccggatgacgcgacactactgtttctcgactcaagtgggacatcatgtgtatatcctttcttctactacacccacattcacctgaatagctgtaggaataacagatctggttgcacctgactatggcgcggatgcacaatacactgcacca

SEQ ID NO: 83634 - DNA, 322 bp, Zea mays
  Clone ID: MRT4577_176288C.1
ggaagacgaggagggcattggctgtgcagcccgtggtatgggccacccctctgtcctaccccagccctggccctcagcctccaggtcccagctggacagccatctttgacgcagtgcctacagatgccccgaccaggccccgagtctccggggaggaagagctgcacactgggcctccagccccacaggggcccctcagtgtgccccagggcctcgccactcagagcctggcgagccctcctgcccgtgacgccctgcagctcaggtctcaggaccccacgaccccctcagcacctcaggaagccacagaaggcagcaaagt

SEQ ID NO: 83635 - DNA, 369 bp, Zea mays
  Clone ID: MRT4577_176289C.1
aggatatatatataggatcaaatcatatcatcggggaccaattaatatatgggtacaggagacccaatcggatcaaccaacatgcatgtagacacccgttcatgagcccaaagactgacgccaaacatgcaggggggggtagcaaactgaagaactttgttttttttttttttacacacacaccacacaatacctatgtatggcagcccgctcggcctcgcttattattgttcaaccaccaccacaagctagatagataataattatatccatgggcgtcgatcgatgggatcagcaattgcagggggcggacttgcagccccttcccgaattgcaaccgggggcgggcttccggaatccccgggggct

SEQ ID NO: 83636 - DNA, 534 bp, Zea mays
  Clone ID: MRT4577_17628C.1
gggaagatggcggacattcagactgagcgtgcctaccaaaagcagccgaccatctttcaaaacaagaagagggtcctgctgggagaaactggcaaggagaagctcccgcggtactacaagaacatcggtctgggcttcaagacacccaaggaggctattgagggcacctacattgacaagaaatgccccttcactggtaatgtgtccattcgagggcggatcctctctggcgtggtgaccaagatgaagatgcagaggaccattgtcatccgccgagactatctgcactacatccgcaagtacaaccgcttcgagaagcgccacaagaacatgtctgtacacctgtccccctgcttcagggacgtccagatcggtgacatcgtcacagtgggcgagtgccggcctctgagcaagacagtgcgcttcaacgtgctcaaggtcaccaaggctgccggcaccaagaagcagttccagaagttctgaggctggacatcggcccgctccccacaatgaaataaagttattttctcattc

SEQ ID NO: 83637 - DNA, 278 bp, Zea mays
  Clone ID: MRT4577_176290C.1
acggtgaatgggatagaggtgagagtctgctggatctaacggtccgggggaggaggcaacgttagatcttcaaatcttggcggaagatgcacaaagaaagtggtctagacggctgcgagtgccaggacgacgatgatcaagttggatttgatgtggaaattggtcaccagcaactagagacccaccgagtggtcctgtctattaacaactatctatgaatggaagcaccagctagaaaccaagctgttctaataacacctaccctattgattgcgagt

SEQ ID NO: 83638 - DNA, 637 bp, Zea mays
  Clone ID: MRT4577_176291C.1
gcccggcgtccggttattatgtatattataaaaagaaaacattatcgaatttggtggtgaagtcacaattacattttttgttttgtatcagtaccgaggttttggctttgtattttcaaaacaaacacatacctattatacctactaacattagttgctacctattagtgtttctctattaaataagttcgatcactaagtttggtcaatcggttgtataaatttctttattaatataacaccagacaatgaaaggagcctatctaggagtgattctcctgataggtcaccaaaacacacaagtcgtagacgtgattttactccgggatactcatttgcaagataatatcattcaccttttattgatcgcttgcattttggtggaagaaatcaccgtgacaggtacatggtttaccagggttcccgatatcgatcaccgtcggagccccgccagagacagtatcaacaccaatgaaaataaattattattatttatatgctatagttaaatattttttgtatggttatcaacttttattatttctgataacacgccatcgagccaattctgaatagacagtcatttttgtttgttacttactccctccgttccaaattataattcttttgacttttt

SEQ ID NO: 83639 - DNA, 509 bp, Zea mays
  Clone ID: MRT4577_176292C.1
ccgtccataccaaataataagtcgctttcactttttttacatagattttgctatgtatctagacatacattatatttagatacatagtaaattgatgtaccaaaaagtcaaaagaacttataatttggaacggagggagtaagtaacaaacaaaaatgactgcctattcagaattggctcgatggcgtgttatcagaaataataaatgttgataaccatacaaaaaatatttaactatagcatttaaataataataatttattttcattggtgttgatactgtctctggcggggctccgacggtgatcgatatcgggaaccctggtaaaccatgtacctatataagagggaaacataatttaaaactctaaatcaatgaaaacaatatatgaaactttgattcaattacctgtcacggtgatttcttccaccataatgcaagcgatcaataaaaggtgaatgatattatcttgcaaatgagtatcccggagtaaaatcacgtctacgac

SEQ ID NO: 83640 - DNA, 567 bp, Zea mays
  Clone ID: MRT4577_176293C.1
ccaagctttttctttattttattttatttttttactatatttttttttttttttttttttttttttttcttttttttttttttttttttttttttttttttttttttttttttaaaaaaaaaaccccttcccattaaagggggcaatcaggggaagggccaacccggccccccagggggggggggaacccccggtaaccaacggccgtaaaagggggaaccaaccaaagggaggcaggccgggggccccataacataaaaaaaaaagacccgcccgggggggccgctaaaagggggaaatcccaccacccggggggccgtaacaaggggacccaacccgggacccaaccggggggaaacaagggcaaaaggggtccccgggggaaaagggtaacccgccaaaaatccccccaaaaaaaaaaccggaaaccaaaaggggaaaacccggggggcccaaagggggggccaaccccaaataaagggggggggcccaacggcccgcttcccagggggaaaaccggtggggccagcggtttaaaaaaaccgccaaaccccgggggaaggggga

SEQ ID NO: 83641 - DNA, 448 bp, Zea mays
  Clone ID: MRT4577_176294C.1
atatttttttttttttttttttttttttttggggtaaatttattcttgttggcgtaataaaacatattatattatccatgaagcatcaagactcccaaaagttgccccatgatgataaacacgcaaacagggaccaggaagaaaaggcacttttacaacggaaaagggtatttggtaaagccaaaaagcaacctttattacaaccactctgggggactttacggggacctgtcaaagacagaaggcagactgaggagtcagctccctgctttttctgaaggacaactctaataatatatggtaaaaatccataggagtaaacggcactccagggtattctcctggattttggggaagactcaatccagcgtcaacggttgggccatgcaacaacggaaccgagcctttcggacgggggaaagaactctccatctcacctgttccagca

SEQ ID NO: 83642 - DNA, 461 bp, Zea mays
  Clone ID: MRT4577_176295C.1
aaacaaaaagggcccctggggggaaaacaaaaccaaaagggggccaaaccccggggaagggaacgagggggaccccaaaccccaaaacccggggttccccaaaaaccaggccccccccaaagaaccaggggccccaaggccccccttaaaagagccccattttgggggccccaacaaaaaccccaaaggcgggaggcaacttcacgaaagccctttttttcccaaaaggcccgaacaagggggggaccctctttgcccggaaggaaaacaacttttggacgggagccctgaacttcttcttggccgcccggggggcaacaaagaaaaccaaagggggggtaacttaaaacttcttcaacgctgattctgggggaaggggggccctgaaaaattgggaccgaacaaacttggtccctccgggagggccgaatccggggaaccggggggcccccaaccctttt

SEQ ID NO: 83643 - DNA, 325 bp, Zea mays
  Clone ID: MRT4577_176296C.1
ataacttatctcagcgcgcgcagattaggaccccgccggaaggcatatcccagccgactctaacatgtagcggaacctcagaaaccgccttttaatcaaccaaacactcggtctaggatctgaggggcattatttgaactaagagactaaaagcatattaattgagattttcaatgaccaagctacgaagagtgccctggctggatacatcccaaatttttacaagaaaccttaagaaggacccattcgttctaaatttcaaaagttggtctagtacaggtttttaaagaaacaattaaagctgctgttgaaagaagatgatctt

SEQ ID NO: 83644 - DNA, 168 bp, Zea mays
  Clone ID: MRT4577_176297C.1
gtttgcttaggcgcagacggggaagcggagtcaacatgctagtggcccggagctgagcttgtagcaaaacctatgtgagtccgcggagacccttcgagaaatctcgtctcgagtaagaggtgaagctgatcggggagtatgggctccggaacaaccgtgatgtctcga

SEQ ID NO: 83645 - DNA, 606 bp, Zea mays
  Clone ID: MRT4577_176298C.1
cgaaattaaaaaaaaaaaaaaaaaaaagggaaggttggaaaaaaaaaaaaaaaaaaaaaaaggaacgaccactataaaaaatacaaagcttacctactcttacatacaaaaataataccttctttatatatggggggggcccccttttataatggtcccagttttacttccccttcttttcaagggttgtttttttttttagggcccccaaatttcaatcccctcgccctttttttaaaaccggtaatactgaaaaacccttggctttcccaacttaaaaccctttgcacaaactccctttttaacaggttgggaaattaaaaaaaggcccccacccgttcccttttcaaaaattttcccaaccttaattgtaaatttgcccccccctttaccccccctttttaacccccggggttttggtttttccccccatggtcccctttttttttccaagcccttaagcccccgcttttttagttttttccctttctttttttccccttttcgcgcttttttccccttaaattttaaaaaggggcccccttttagggccccccttttatgtttttccgcccctcccccccaaaaaactttttttgggttttt

SEQ ID NO: 83646 - DNA, 521 bp, Zea mays
  Clone ID: MRT4577_176299C.1
ggggggggaaagggggaggggggggggaagaaggggggggtagaaacggggcgggccggaaggaaaaaggagggggggggggacaagaaggcccaccaggagaagggggggggaaaggaggggaggaggggggggggcggggaggggagggaggggggaaaacaggggaacaagggggggaaggccggaaacaaccgaagggggggaaaaaacaaggaagggggggggggaaggaaggcgcgggggaggggggcaaaggagggaggggggggggcgcaaagggaagggggaaggggacaaaaaaggagggagggggggtaacaaccgagggagaaaaaggcccaagggaaggaaggcctgcagcgccccaagcggggccagcaagctcaggagccgggggggaaagccccagggccccgaggggaagggccaggcccggcctgtagggttccatgaggccccccggggcatacaagggggccacgggtggcaagggggggacacaaagggggagggcgggc

SEQ ID NO: 83647 - DNA, 1297 bp, Zea mays
  Clone ID: MRT4577_17629C.1
cctcgccgcctcgaggccggccgggattggcatctccatccgtcctcgtcggcatcccagccacacacacacacacaccgcacctagccacctaccctgctgtcccccgtgccgtcgccgatggagtccttgggcgtgctgctgctccaccccttcaacgcgtacctggagcaggagctggaccgccgcttccgcctgtaccgcttctgggagacgccccgcgaggagttcctccgcgcgcacgcgggcgccgtgcgcgccgtcgtcggcaacgccagctacggcgccgacgccgcgctcatcgacgcgctcccggcgctcgagatcgttgcctccttctccgtcggcatcgaccgcgtcgacctcgccaagtgccgcgaccgcgggatccgggtcaccaacacccccgacgtcctcaccgacgacgtcgccgacctcgccgtagggctcgccatcgccgtgctccgcaggatcccgcaggccgaccgatacgtccgcgcggggctctggaagtccaggggagactacaccctaaccacgcggttcagcggcaagcgggtgggcatcatcgggctgggcaggatagggcaggcggtggcgaagcgagtggaggcgttcgactgcccggtgagctaccaccagcggacggagcagcgggcgacgtacccgagctacacctactacccgtcggtggtggagctggcggcgaacagcgacgtgctggtggtggcgtgcccgctgaacgcgcagacgcgccacatcgtgagccgcgaggtgatggaagcgctaggccccagcggcgtgctgatcaacgtcggccgtgggccacacgtggacgagcgcgagatggtggcggcgctggcggacgggcggctcggcggcgccgggctggacgtgttcgaggacgagcctaacgtgcccgaggcgcttctggggatggacaacgtcgtgctgctgccccacgtcggcagcggcaccaacgagacgcgcaaggccatggccgacctcgtgctcgggaacctggaggcgcacgtgctcagcaagccgctgctgactccggttgtctgacgtttccttgtttctattacgaaataacaagcgcctgcgcctgacagcgagtggggattaaattcaaaatgttttgttttgatttgatcgccgctggtgaatggaactgaaatgtgctgtcaattctcagtccagtgcacacgacacgcttgcacgaatgtcgagcaaattatggcatcttcttttgcgaagccgcctcctcgacaaaaaaaaaaaaaaaaaagcggcc

SEQ ID NO: 83648 - DNA, 144 bp, Zea mays
  Clone ID: MRT4577_176300C.1
gaatatccgggtctacccacgcgcctggtagaaacatgtctaccgagctccagcgcccgacccccggtacggaccagtgcttcggtttcaagaagacggctgtggccgacgcctacaccaagccggggacgcggacgatcaagg

SEQ ID NO: 83649 - DNA, 592 bp, Zea mays
  Clone ID: MRT4577_176301C.1
aagcaacactctggagacacaacgaaggtgacaccaaaatattgcaggttggcatcatgctgcatctcgggcccagtggacgatgctgttacgcggactcattttctctactgtgctaacaagctcatgagtagatctctttgttctgatatacgtctaagcagcggagtatttaacggggaaaagaccgactgcatctaccctacacgatccaatgcgcttgcaaagcaggtgtcttacgtgtataatactggtgaatccatcaactgtaagaacttattacatggagcaccttagtatgcatctgggtcgcaaaacatctagtacaacaactacaacaacttgtggtaagaaatcttgctggctactctcaggagcagcggcctgtttcattcaaccaactggatgcgtagaactctgctgcttatttgcgacagcaactccgattcagtcagctagctgctggctacccgcatcaatatgttccattctaccaactggcaggattgaactctgctgcttattttcaacagcaacagctaccatcatttagccagctagctgatgtgagccctgttggcttcttgacaca

SEQ ID NO: 83650 - DNA, 230 bp, Zea mays
  Clone ID: MRT4577_176302C.1
gccgacgacgtgcacgaccaggactggcactccgtcaccagcgaggagaaggcccctaccaaagccatcgactgtatggctgattgaatcaaaggcatcggacgatgagaccacggaggataaggagctcgacctctcctccaacgacgttgtcaccaagtacaaggctgccgccgaaatcctcaacaacgctctgaagattgttgtgtctcagtgcaagccaaaagtca

SEQ ID NO: 83651 - DNA, 352 bp, Zea mays
  Clone ID: MRT4577_176303C.1
cgaagctcggaattcggctcgaggttcaaacgagtccgttcttaaggggaagacagccggggcacgacgaggacggaatgcccgggaagacagagcggatctagcgggatccagccgaagaaagggaaaggggccacccgagaaccaagagggccccaccggccccgaacctattcgggacggggaccggccggggaacacgctcctgctaaagcccgtcgaattcaagctggccgaaatcaacgacaaaggccgacaccgccagaaactgcaagacccccacaacaccatacaacagaccagccgcaaccagaaagcggacagcctggggggccctatgggcgagcgcacc

SEQ ID NO: 83652 - DNA, 279 bp, Zea mays
  Clone ID: MRT4577_176304C.1
tatcggtcgtagcggaagtcaactcgacgcccacttgtgtacctgtagactgaagttctgttactccccactcactcctgcgctgcctcgacgcgcgggtccttctccctgatcctcctttggctccacgagacatggcgatgcggacggccgccgctttgtcaggtgggggaccgggccctcggctcaggggccgcgcacacgtatacaggcaacaaaaagactagcccggggtgtcctacaaggccggggacgatggcctacaagaaccccaacttc

SEQ ID NO: 83653 - DNA, 457 bp, Zea mays
  Clone ID: MRT4577_176305C.1
gtcacactgttctccattagggggggggggggggcggagccaaacttctgccctccccggcgtatctctctgctcctgctccgacctcaagatggctgccggcttaaggggactacatatggacatgccctttctggcttcacccccagaagcccagagctcctttaggaggaggcgggggggacaaaactttatctacactgctatttatgtcttcatttgtatggcgtgcaaacacctcccattctatcgcatttattcgaccactggagccaaacctctatacgtatgcgactatcctatcattaaacccaaccactgggcttaacttgaacaatactccaatctaaacctatatggtgtgactgcacctacttgacccatctaaaatcattgaaatggacacagatgcgagagacgatcttgctcttctatctggggcacaaaaactgctccc

SEQ ID NO: 83654 - DNA, 620 bp, Zea mays
  unsure (1)..(620): unsure at all n locations
  Clone ID: MRT4577_176306C.1
ggccgatcgacttctttccccctggctcgcatgctcggggccggggctccagcggagaggaaagctgcagccatcagctggaccaaataatccaccggaatcaatcaatccaagccgatgccatctcttatcgactacagcccggccgcgctacggtcgctgctccggccgccgcccagcgacgagcgtcgggcgaagcagtccggggcggcggcgggggccggcggcgccttggggctgttcaagatgttcaagctcctgcccgtgctcaccacgggctgcaaggtggccgcgatgctggggcggcacaacaaccaccgggccctcctggccgaccacgcgccgacggtgacgctgttcgggcaaccggcgcgggcggctgagcctggncatccacgaggacacgcgcgccccgcccgcgttcctcatcgagctgcccatgctggcgcccgcgctgcaccgggagatggccacgggcagcgggcgcctggcgactcgaggcgacacgcgcgcgtcgccgaggtcaaggaccagggcagctgcgggagctgttgagctttctcaacaatagcagctgtggaaggcatcaaccagattgttacaggcgacttgatctcctt

SEQ ID NO: 83655 - DNA, 764 bp, Zea mays
  Clone ID: MRT4577_176307C.1
tttggccgggagtttttagctgtccttaataatatttttttggtggaaatagtttagtatccttttagagttgctctaaactacttagttctcaatttcatacatagaacacacaaaagttaaactgaccacagacctgtactgtcagagtgcataacaactaagggggtgtttggttgctcctgctaaagtttagcccgggtcacatcaaacgtttgacttttaaataggagtatgaaatatagacccaaccaactggactagattcgtctcgtcttttaatcttcggctgacaaattagttttataatccgactacatttaatacccggaacggaggttcaaacattcgatgggacaggggctaaattttagcggggtgtaaccaaacaccccctaatgatgacatgcaagaaaaaaacattgaaaaagacgccaatttatctgcaaccttaccaaagcaaagcgtcctgagccaaggtatttactgccataatgaaataaaccagcctgtactcaagaaagacgcacaaatcgcattattgcagaaaatgcgcaagtagctcaacacggtcattggcaaaaaaaaaaggcctctacctgtgttggttagatggtccgagtagcactttttaggtgttaagtttgactttccgtatgagcaaattttaggccacgcgagagagttcgactcctcgtgggagtgaattttaggctggggttaaaaaacattttcatttgtcccacgtcaaagcacatggcctg

SEQ ID NO: 83656 - DNA, 494 bp, Zea mays
  Clone ID: MRT4577_176308C.1
ttttggcaacggcgttcttttctttttagaaacaaacgaatgctaaattagggcagggaagtttatagagttctaattaggccactaaagtaaagtttccatctttctgatggatgatgtacaacaccacacccacgtgataaacgaccgcatcgtcgtctcggctgccactggcaggggcagcaacacacacacaccaacaccactgccaaaagctcctccttttcagttttcccaccccggccaagctcttcttttaccagcaggtcattcccgactaaccgtcgccgtcgtctttccggttacgtgaccctgatggtgcccagaaagggcgtactcggcggcgagcccgtctggacctggagctcgctctgccggccggtcgagatctttagctacaggtctggtgcctggccactactactagcctttgccgccctcagggactaacgcgaagggtgcttgtgtttcggtcccgccagcgccagtgccag

SEQ ID NO: 83657 - DNA, 440 bp, Zea mays
  unsure (1)..(440): unsure at all n locations
  Clone ID: MRT4577_176309C.1
ctagttctagnacgcgagcggcgcccttttttttttttttttttttttttttttttttttttttttttttttttttttttttttttttttttttttttttttttttttttttttttggcaaacaaaaaggggggggggtttcataaggaacatgcctccctgggccaaatttaaagggggtttcccaggaacccgcctccatggaaataaataaagcccccttgaccccaaaaataaaccaaaccgcccaaagggcatggccggctctccatctcctttttttttcacacacccaaacccaaggcccacgtgcccggaggggtttttttattcaatagtagtagtaaacatccaagtcgggaccatgcctagggagatatgggcatgacgggcccatccccgggcccccacaacggggggataaatatggatcgttttca

SEQ ID NO: 83658 - DNA, 493 bp, Zea mays
  unsure (1)..(493): unsure at all n locations
  Clone ID: MRT4577_17630C.1
ttttactcagaaaatctaaaatttgactcaataagaaaaacaactctttgagttggtcttaaacttagcccgtataaatgcgttgtgtgggataaggactactatatgagagcacctgtataatctaatctcaatacattctcggctcaacaatagcgttacccaatcctgtgccttccagaagtacaaaaatgtaatgaacaccattgtggtgaacattttaaaagagttaagggtaaaaggcatgtttctcattctgaactccgcgaccttttctttcgtggtctcaactttggtttcttctcaccaccagctctccctgttgccatgtgcttccgctttgctgttgttgcatcagcatccccaaccattaggtgctcacctcgatccaggcttgcaaatggagacaacccactcttcttccctgccctccttttctttgtgtaagagacaccgccccttaccagcatcaaccatctngtcatcacttaag

SEQ ID NO: 83659 - DNA, 461 bp, Zea mays
  Clone ID: MRT4577_176310C.1
ggacccccgggctggccggacgacgctactcccactccgggaacttgtcttcgtcccaagaatcttcggtccacgggcacgggcacttcttcatcagtgaacaactgctcggttggggatcacaggctccagctcctcgctcatgccgagccactgatccaggaagagccactcaaaccctggctcacgctcaagagaaacatgaacaacatcaagtacctcccggccctggccgatatagcttcaaacgccggtgttcgccattgaagctgacccggcgttccactctgagtacgcgacaaagaagggtgtcacattgcttccctatgcagcctgggtcaagaatgagacactggtattcgagatcaatggtgatcctggaaagaggacgaagccaaggccaatggtcgtggcatggggcgcatccgccccaccaccgggaagaagatgtccggcgaggc

SEQ ID NO: 83660 - DNA, 329 bp, Zea mays
  Clone ID: MRT4577_176311C.1
cgtgcgcgtgaacactgtttgactgcagttttctgaacgctaccttcggggaactttggcgctgatatagagccgaaagagtcagaagagcactactctgatgctcaggaagctgtcctctcacaggctctgtcacggaaatccgcacagcactccaaaaccgatgcacgccatcacaaccatccggtgctgagccctccaggatgcatgatgaacataccttgctggcctgtctgatgacaccaacctgtacgcactgcatgctaatcatgttaccatcttgcccaaggacattcacgtggaaacgataatcccactacacacaggct

SEQ ID NO: 83661 - DNA, 125 bp, Zea mays
  Clone ID: MRT4577_176312C.1
ggggggggtgtgggaaatccaaatatacgaaatttttttatttgcttccaaaagtattattttgatgggacactgcctttgcttcacaatccttgttagactggaaaattattttcccaaagctt

SEQ ID NO: 83662 - DNA, 320 bp, Zea mays
  Clone ID: MRT4577_176313C.1
cagatctggagggcacatgataataaggcggcggcggacgtgtatcggtagctatgcggtgcttctgcgaaggacttgagccggcctgagaaggtgatcctggaggaggttgcggccgttgcaacggcggtgggaacgcttgaggatttcttatgggtcgtcgcgccgctcgcggctccgcctgcgccgacgtttagccccgctgccgcggacctcactctgatcgccgtggtggtcgtgggacccatggagggggtctgcctgcccccgggcatgacctccttctaatgcgacgacgactcgctcgcgcctgaagggga

SEQ ID NO: 83663 - DNA, 311 bp, Zea mays
  unsure (1)..(311): unsure at all n locations
  Clone ID: MRT4577_176314C.1
ctaactcgtcatctagttctagatcgctatttgcagncctttgcaatgaaccttgcaatgaacctgactcgtctgctgaacgaactagacaacgttactcagaacaggactcatatcgggacgcacctcttcacaacacacttgctgtgacgcactctccgctgaacacgagaagctactgctgggggacttatcgtgaacctgcatctcactgacggcgagtctagatgtccgcgctttactcgttgcttcgcttagggctagtcttcatcggcctctaccctggcgtccatacggccgcggagactctc

SEQ ID NO: 83664 - DNA, 583 bp, Zea mays
  unsure (1)..(583): unsure at all n locations
  Clone ID: MRT4577_176315C.1
tcgtccgncacaacagtaacctcttcttgggggggggctagcatctccctttagtgctcgtctacttctacaacttgacttcaacacacgtcacaattcttcctcaactattaccctcttctaaaccccccacaataccgcaaagatgagtgcgcagaagacctcggccatcgctgaccaggggcggggggacgttctcttcgccattcacgaaaagttcgatcttctggactttgccggcgcgctcgaggtctttactactgcttcacacgatttcaaggatcctgacaacaacaaggccttcgaggtcaccatcgtcggtcctgagcccaaggtcatctccgaccagggcgtcgtcgttggctcccagatttcttacaaggaggctcacgagcgtcttgaagactttgacatcctttttgtcgtcggcggtaattccaaggaggtcgtcgccaaagagctccagcccctctctctcatcaccgacttctcagaacttcagaagcgtgaccctgcccgcgagcgtaccatcctatctatctgcacaggtgccctcttccttggtaagcagggtatcctttct

SEQ ID NO: 83665 - DNA, 732 bp, Zea mays
  Clone ID: MRT4577_176316C.1
ctcgagccggccgggaggggatgtgtcaaaatccagcacaagctcacatcacaagctctctgctgccccccaccagcaaagcaaggccctcgagtgaccggggcagcgatcgagcggcttcccaaccaggcaacaagggcgacgaaggatatggacaggctgaacgcgaagctgtacctgcacaactgcttcatcatgaaggagaacgagcggctgcgcaacaaggctctgctgctcaaccaggagaacaaggccttgctcaccgagctcaagcagcgcgtcgccagaacggcggcgacggccaacggcaacggcaacgccaaggccaacgggaatgtggcggcggcggcaggcaaacgcgcgccaacgatcccggacctcaatgccgccgctcctgcaggggcgcacgagaagccggcggcgtcgcccaagccaaagaaggcggtcgcaaactgacgcgcgcggcttaattaactagttctagcaccagctatatatatataagtttgtagttatcatgcattattaccggtcttctggatgcgtgtcaaggacgtctgcgcctagttttagctaatgctggctaatggaaaattgcattgcatgcctgagcgagtgctgatctctgcagggatagctagatcatgtatagtgtaggttgtctaagcgcatgcagtgcgaaaatatcagatagcccagcgacaaagcaaaaaaaaaaaaaaaaaagcggcc

SEQ ID NO: 83666 - DNA, 688 bp, Zea mays
  Clone ID: MRT4577_176317C.1
cctcgaggccggccgggccggggtcaaaatccagcacaagctcatcacaagctctctgctgccgcccccaccagcaaagcaaggccctcgagtgaccggggcagcgatcgagcggcttccaaccaggcaacaagggcgacgaaggacgatatggacaggctgaacgcgaagctgtacctgcacaactgcttcatcatgaaggagaacgagcggctgcgcaacaaggctctgctgctcaaccaggagaacaaggccttgctcaccgagctcaagcagcgcgtcgccagaacggcggcggcggcggcagcggcaggcaaccacgcgccaacgatcccggacctcaatgccgccgctcctgcaggggcgcacgagaagccggcggcgtcgcccaagccaaagaaggcggtcgcaaactgacgcgcgcggcttaattaattagttctaggcaccagctatatatataagtttgtagttatcatgcattattaccggtcttctggatgcgtgtcaaggacgtctgcgcctagttttagctaatgctggctaatggaaaaattgcattgcatgcctgagcgagtgctgatctctgcagggatagctagatcatgtagtgtaggttgtctaagcgcatgcagtgcgaaaatatcaaatagcccagcgacaaaacaatggaacagggcaatcagac

SEQ ID NO: 83667 - DNA, 1744 bp, Zea mays
  unsure (1)..(1744): unsure at all n locations
  Clone ID: MRT4577_176318C.1
cgcagaacgagcacgtgttgcaggaccggacactgagcaacgctcgtccggctcctgagaaaaggcagcgggttccgtcggcgtataacagattcatcaagtgagctcgccctatgatcgncgtcctcagatcagcagcttacgtacgtttggttcatttcggcccaataattatgggcctcgaggccggccgggacaacaaataaacgcactgctgcttgccagtattgctttgctttgctttgccttgcttgcccccacacgccctctctctcctctctctctctcaaaccgaaaagaaaagaggaaagtgggatagctcaatctcttcttccttcgtcattcctctcccgtaggttctctctccctccctccctccctccctcagcacacataaactcgagatacacatatatatcagtaggagaggatggatgtgcaaacctagcctgctgcctttgtagctgcaaattaaattgagctgtacctgttggtcttcctcctcgctcttcttggttctcgctggttgccgggagctgggatcgaaagtactgctgttgttcgcacggcgaggcggcggcggagaccggtcagaaggaatgtcttcggcccaaatcgcgccggcagatcatgtgtgctatgtgcactgcagcttctgcaacacagttctcgcggtgagtgtcccggggaatagcatgctcaacatcgtgacagttcggtgtggacactgcgcaaatctactgtcagtgaacctgagagcactgatgcactcactcccagaacaagatcatcagctccaggagaacatcaaggtccatggcatcaacggcactttgcatgatgatcatcagtactgcggccatttggatcagctcggttcttcttcgtcgtcaaggttccggcggcttccagtgatgtgttcgccacagaacgagcagcacctgctgcaggagcaaacacttaacaacaatgctcgtcctccagagaagaggcagcgggttccgtcggcgtataacagattcatcaaggaagagatacgcaggatcaaagcgaacaaccccgacattaaccacagggaagccttcagcacggcagccaagaattgggcacattatccaaacatccatttcggtttagacgactccgggcgagagggcaagaagaagctcgtggatcatgaggcggcggcgtctgtcgtcgcagtcgcagcagcaccgactgctgctaaaaagatccagggtttctactgatggtagcagatagatgtgtagattgattgatacatcatcgaccgggtggaagaattgataccacaaaaactgctttatatatatgtactgtgagtaaacagttaaaattaaacttgtgagatgtaccgtacatatgaagagctagctagtagtgagtcataaagtgggaaagtgaagcatatatagtcgtaaaaacaatcacatgaattgctattaggcaccatatatatgcacttaattatattggttgaggagacctaataaatcatttgacctaccatacaaaaaaaaaaaaaaaaaacccgcggccctttgagacaatgcaggcagaaaaaagtgaggttagtacgcagcttcagctgatgagctataagagttaaaggggggaatgaaggagagagagattttttacgtttttaccttacnnnnnnnnnnnnnnnnnnnnnnnnnnnnnnnnnnnnnnnnnnnnnnnnnnnnnnnnnnnnnnnnnnnnn

SEQ ID NO: 83668 - DNA, 1121 bp, Zea mays
  Clone ID: MRT4577_176319C.1
tcgggctcttcttttttaccctcgctggcgggtcgcctcacccgttcactccgtccatgacgaaacggcaagcgtcgccctctccaccgccaccagtccacctcctcgtcctcctccggtcacgcacgcagctagcttacccgccccgccactataaaaatccacctccaccccaccgcgcgtctacagttccacacacgcgtgcacgggcgggcaagcaccagaaaggaaaggcggaggccgcgcggcgggcgccagctgcagccaagagcccactagtagtagtagtagctagttcaccaccgcctgcttgcctcctttactttgccatatttgctagcgtttcctggattggggacgcttccgtttcgggaagccgtgaagggatcggccacgacgatggtgcgggggaagacggagctgaagcggatagagaacgcgacgagccggcaggtgaccttctcgaagcgccgcaacgggctgctcaagaaggccttcgagctctccgtgctctgcgatgctgaggtcgggctcgtcgtcttctccccgcgcggcaagctctacgagttcgccagcgccgccaggaccaaaagcctgaagaaaccgatgacagcatcgtacatgggggcaacgcggaggtcctgaattaatgcgcggccaatcggaggaagagtgagtggaaagaggcaggcgtgcccagtaactgtgggtggaaggattgctgctcatgggccatggctacaaacggagaagcgtcgtcatgtgacttctggtcgcttggcttgttcctccggcctgccaaagccacttttttcttggtttgtatttcggaaacaatcctttcttgtagtggtggtgccgattgacttttcttgcttgcgttatccaatcacatcatcagttccggacgagaaaaaaattgcgcggttgcgcctcgccgtcgctgctcatgcgttttgctgtgacgttggctacagtttgtagtagcatattaataattctttggttgggttgcctgcttttggtctgggaatatagtacatgcgatattgcgacactgtagtttcagcaagatctctataccttcgattttatgacgacaaaaaagtctgaatgtctag

SEQ ID NO: 83669 - DNA, 857 bp, Zea mays
  Clone ID: MRT4577_17631C.1
gccggcccctaaaagcggccgacacacacacaccgcacctagcccctaccctgctgtcccccgtgccgtcgccgatggagtccctgggcgtgctgctgctccaccccttcaacgcgtacctggagcaggagctggaccgccgcttccgcctgtaccgcttctgggagacgccccgcgaggagttcctccgcgcgcacgcgggcgccgtgcgcgccgtcgtcggcaacgccagctacggcgccgacgccgcgctcatcgacgcgctcccggcgctcgagatcgtcgcctccttctccgtcggcatcgaccgcgtcgacctcgccaagtgccgcgaccgcgggatccgggtcaccaacacccccgacgtcctcaccgacgacgtcgccgacctcgccgtcgggctcgccatcgccgtgctccgcaggatcccgcaggccgaccgatacgtccgcgcggggctctggaagtccaggggagactacaccctaaccacgcggctgagtggcaagagagttggtatcctggggcttggcaggatagggtcagcgatagcgaaaagagccgaggcattcggttgttccataagctacagctcaagatcagagaagcctttcccagactacaaattccacgcgagcgctgtcgacctggcagccaactgcgacgtgctcatcgtggcgtgctcgcttaccgccgagacccaccacgtcgtgagccgcgaggtcatcgacgtgctgggtccagagggcgtgctcgtaaacgttggccgcggagcacacgtggatgagcctgagctcgtcgccgcgctcctcgagggtcgcctgggaggagcggggcttgacgtgtatgagcacgag

SEQ ID NO: 83670 - DNA, 841 bp, Zea mays
  Clone ID: MRT4577_176320C.1
gcaggttactcgtgccggtagcttcactcttccacgtctcttctccccccaccccctccccctctccgatccatcgatccccaggtcctcgcggccgggtcagccatggcggggtcgatccgcgtcaccatggaggtgggcgcagacggcgtcgcgctcatcaccatctgcaacccgccagtcaatgccctgcaccccatcatcatccaggggctcaaggagaagtacgcggaggccgctgatcgcgacgacgtcaaggccatcgtgctcaccggtgctgcggggaaattctgtggaggcttcgatatcaatgtcttcacaaaagttcatgagactggagatgtgtcacttatgcctgatgtatctgttgatcttgtatcaaacatgatggaagatggcaaaaagccttctgttgctgcaattcaaggccttgctcttggtggtggtctagagttgattatgggttgtcatgctcggatatctacccctgaagctcaacttggattaccagagctaactcttggcgtgattcctggatttggaggaactcagcgtctaccgaggcttgtaggtctgcccaaagcaatagaaatgatgctgcaatcgaagttcattacggcgaaggaaggaaaagaacgtggtcttattgacgctctttgctcccctgatgagttgataaaaatgtcacgtttttgggctctggagattgcaaattaccgcaaaccttggataaaatctcttggcagaacagataggcttggttcactgtctgaagctcgtgctgtattaagtatggcaagacaacaagcaaagaaggttgcaccaaacatgccacagcaca

SEQ ID NO: 83671 - DNA, 1635 bp, Zea mays
  Clone ID: MRT4577_176321C.1
tgggacctcgaggcggcgggccgggactccaaaataagagactgctgcttgccatgtattgctttgctttgccttgcttgcccccacacgccctctctctcctctctctctctcaaaccgaaaaagaaaagaggaaagtgggatagctcaatctcttcttccttcgtcattcctctcccctgcaaattaaattgagctgtacctgttggtcttcctcctcgctcttcttggttctcgctggttgccgggagctgggatcgaaagtactgctgttgttcgcacggcgaggcggcggcggagaccggtcagaaggaatgtcttcggcccaaatcgcgccggcagatcatgtgtgctatgtgcactgcagcttctgcaacacagttctcgcggtgagtgtcccggggaatagcatgctcaacatcgtgacagttcggcgtggacactgcgcaaatctactgtcagtgaacctgagagcactgacgtactcactcccagaacaagatcatcagctccagcaaactactgaacagatgagtgcttacaggccgtacgtgcatggttagtcgttgcttaaaacttcattcattcatgccggctcatgttaggtacgcggagtagattgcaatgtctctgtactgtctcaaaaattaaagaccagtctgataaagagggcagggggggttctatatatgtgttgaccggcttaattcccctgatcacgattgatccatgttgtcgtctgcgctagtgacgacaacatggatcataaacagtggttagcagatcgaaacgacgacgcatgcacgagtcacttccatgtccgcgtttccagcacgtactgctacgacgacgtagaaataatcaggccgtacgtacgagcatttgcttgctatacgtttcgtaagtgcgttctgtgtgtgtgaagaagacgagtttacagcatcctcatcgtttggagttttaattagtgacgttgttttagctaactacgtactcactaccgaaaacagcttctttgccgccgagtgttaacgcacgacgctcggcaaagataacgaccgtcagctatagagacggtccttttgtcgagtgtcgccgttcgccgagggtttgacactcggcaaagaggtatttgctgagtgtctgtctatgccgagtgtcctactctagataaacgtggtcgttattggtgtggcgcttagcaaaacatttatttgtggattgtccgacaaaaaacgcttgacaaaaagccggattccagtagttactgcaccaatgcaagtatgatgataatcttgtgtgcaccaataattaagtacttactactagataatcctttgtgtgatcagttagtttttcgaccggtttgttgctagcaggagaacatcaaggtccatggcatcaacggcactttgcatgatgatcatcagtgcggccacttggatcagctcggtttctcttcgtcgtcaaggttccggcggcttccagtgatgtgttcgccacagaacgggcagcacctgctgcaggagaaacacttaacaacaatgctcgtcgtaagggctccttccacgtacacgccgacgaccatgcatatgcatgcctcaatttgcataatcttctttttttagcttatta

SEQ ID NO: 83672 - DNA, 775 bp, Zea mays
  unsure (1)..(775): unsure at all n locations
  Clone ID: MRT4577_176322C.1
tgtgtgtatatatatatatatcgatccattcctcctcctctccttcccattaacagcttcttgttaagcatacattgctagtatgatgatgatattcatttgaataataagctgctgagcgcaaaatataaattaataatataataataaaaaaaaaaaaaaaaaaaaaaaaaaaaaaaaaaaaaaacttcgtcattcctctcccgtaggttctctctccctccctccctccctccctcagcacacataaactcgagatacacatatatatcagtaggagaggatggatgtgcaaacctagcctgctgcctttgtagctgcaaattaaattgagctgtacctgttggtcttcctcctcgctcttcttggttctcgctggttgccgggagctgggatcgaaagtactgctattgttcgcacggcgaggcggcggcggagaccggtcagaaggaatgtcttcggcccaaatcgcgccggcagatcatgtgtgctatgtgcactgcagcttctgcaacacagttctcgcggtgagtgtcccggggaatagcatgctcaacatcgtgacagttcggtgtggacactgcgcaaatctactgtcagtgaacctgagagcactgacgcactcactcccagaacaagatcatcagctccaggagaacatcaaggtccatggcatcaacggcactttgcatgatgatcatcagctcggccatcttcgtcgtcggttccgtcggcgtccagttatgtngtcgccacagaacgagcagcacctgct

SEQ ID NO: 83673 - DNA, 1362 bp, Zea mays
  Clone ID: MRT4577_176323C.1
aaaccgaaaagaaaagaggaaagtgggtcagctcaatctcttcttcgtcattcctctcctgtaggttctctctctctccctccctccctcccgcagcacacataaactcgagatacatatatatcagtaggatggatgtgcaaacctagcctgctgcctttgtagctgcaaattaaactgagctgtacctgttggccttcctcctcgctcctcttggttctcgctggttgccgggagctggggtcgagagtacttctgttgttcgcacggcgaggcggcggcggagaccggtcagaaggaatgtcttcgtcccaaatcgcgccggcagatcatgtgtgctatgtgcactgcagcttctgcaacacagttctcgcggtgagtgtcccggggaatagcatgctcaacatcgtgacagttcggtgtggacactgcgcaaatctactgtcagtgaacctgagagcactgacgcactcactcccagaacaagatcatcagctccaggagaacatcaaggtccatggcatcaacggcactttgcatgatgatcatcagtgcggccatttggatcagctcggttcttcttcgtcgtcaaggttccggcggcttccagtgatgtgttcgccacagaacgggcagcacctgctgcaggagaaaacacttaacaacaatgctcgtcgtaaggctcccttccacgtacacgccgacgaccatgcatatgcatgcctcaatttgcataatcttctttttttagcttaattagcatatccacatgcatgcaatcatacgccaaataatgataattaactgtactacgtcggtcgaccttgcttcgaactaaatgcgccgcgcgcagctccagagaagaggcagcgggttccgtcggcgtataacagattcatcaaggaagagatacgcaggatcaaagcgaacaactcccgacattaaccacagggaagccttcagcacggcagccaagaatgtaagtaaagcctttttctagctagctggctaattgctatagtacgtacttgtcgtcgtgggcgcctgaattggttgttttacatatatatacactacgtacgaccgttgttgcatgcagtgggcacattatccaaacatccatttcggtttagacgactccgggcgagagggcaagaagaagctcgtggatcatgaggcggcggcgtctgtcgtcgcagtcgcagcagcaccgacagctgctaaaaagatccagggtttctactgatggtagcagatagatgtgtagattgattgatacatcatcggccgggtggaagaattgataccaaaaaaaaaaaaaaaaaaaaaaaaaaaaaagtactctgcgttgttaccactgct

SEQ ID NO: 83674 - DNA, 706 bp, Zea mays
  unsure (1)..(706): unsure at all n locations
  Clone ID: MRT4577_176324C.1
ttgggaccctcgaggccggccgggactcccttccccggccgtgcagacacacctcactcctcttctccttgctagcactcttctcaggtctcagcaagctactagctcatccacatgctgaacctggtatcatttgagacgccgcctcttggaaggcaggaaatatcagctaataatcctaccgtcgccgccgtcaggggaaacgaagaaagctccagcaacacttgcttgcatggacatctggacctcagcctcggcatctccttgtctcatggcggctgcggctgcgcctgcgacgcatccagctgtggaggaaacaagcaggagagctacggtggtcgacagggcagcagccgtgacgacaaggcggccgtcggtcgctgcatgaccagcggcaccaccaccactgcaagtgtaggacacgacgcccatgtcggagatttgacagcaggaggaggtggctggacagcaccgttcgtgctgagcccgaccgccttcatgcatccatggagcctcgccgcgcggcagcagaaggctgctgccgagcaagaccggaagcctccgcctcctactacctacatgtcgagcgacggcgaccgtgcgntcacatcgccgtcggccgtcggctggccgccagtgcacacatcccggcgcaacatcatcgtcaccgccatgcacgtgagcaggactgctgctggcgccaccg

SEQ ID NO: 83675 - DNA, 250 bp, Zea mays
  Clone ID: MRT4577_176325C.1
cggatgtttgggcggacgcgtgcgagctcactggggcggctctctcagacgaacggggagaagaacatgggggactgctgcgggggcaaagcactgacggtgttgaacagagtacatggaccgtggccagagggcaggatgaccattcgtttcgcacggtgccgcaccaggcaggggccaacccgattaagacagtactacgagcacctctcggtctagagtgactgaccatgcggggccagatcccgcg

SEQ ID NO: 83676 - DNA, 969 bp, Zea mays
  unsure (1)..(969): unsure at all n locations
  Clone ID: MRT4577_176326C.1
aactcctcacctggccgctttcctgccccggtgcccacccctaatccggcaataaacaacaacaaagttcatcacggtgccgcctataacaccctcctccctccctccatcgcttgaccatgccgggtcttgtcccctccacctccacctcccacctcttctgccgcagcctcgccgccgccaggacgctctccgccgccgcaggacactcctcctcgtccacctcctcctcctccgtcaagatggcgcgctcggcgctggacgaggtgaccgacaccggcgccttcgaccggacgccgtccaccttccggagcttcgtgtcgagggacgcctccgcccgcttccccgcggtggcgggcaggtaccacctctacgtctcctacgcctgcccctgggcgtcccgctgcctcgcctacctcaagctcaagggcctcgaccacgccatcagcttctcgtctgtgaagcccatcttcgagcggaccagggagtccgacgaccacctggggtgggtgttcccggccagcgccggcgaggtgcccggcgccgaccccgaccccttcaacggcgccaagagcgtcagggacctgtacgagatcgcgagcaccaactacaccggcaaacccactgttcccgtgctgtgggacaagcagctgatgacggtggtgaacaacgagagcagcgagatcatccgcatgctcaactcggagttcaacggcatcgccgagaaccccgggctggacctcaacccggcgcacctccaggcctccatcgacgaggtcaacggcctcgtctacgacgccatcaacaacggcgtctacaagtgcggcttcgccaagaagcaggggccatacgacgaggccgtcacgacgctgtacgaggctctggacaagtgcgaggagatcctggngcagcagcggtacatgtgcgggaacagctcacccgagggcgacgtcgcctcttcgtcacgct

SEQ ID NO: 83677 - DNA, 213 bp, Zea mays
  Clone ID: MRT4577_176327C.1
gaaaaaaaataagaatgaaaccgggccatttctctacgttcctcaaccaaacacaccaccagctatgaattcagctccggcgaaagtggatcaccactgaattgaccccgaagcggggccacgcatattcacaaggctgagagaagaacaagatacccctcataaagcgtcctccctctctgtcaggaaggaaccaatatttgttacacccaa

SEQ ID NO: 83678 - DNA, 575 bp, Zea mays
  Clone ID: MRT4577_176328C.1
agtcgatcgtggcaaaaattcccaaactttctacgtcattaaggcatgcaagcttgcgaacgagttgttggcgatcacggaaaatgctgatcgctggaaggtgatgtacagggtgtggatgggcatgctctgctactccgccagcatgtgcaggggatacctgcacgccaagagcctgggtgaaggcggagagttcctttccttcgtctggcttgtcggacgcgtggggggggccaagactttggccgacaagcttcagatgccacccgagacgacgaagccgccccctctcgatcggtgacctgattattcggctgcctgtacgtgtggtgtggttcgttcattgtattcttacctgcttctgtgtgctaatcaggtgtgctgcgacctgcgagagctgttttttttttcttctcttttgtcgtgcgccagcggagaattttcgtggcttaataagctgagccctggctctcatgtgctcagtgctcagccggtgtgtttaatatctcgttgtaacaatatattggcctttccttaaagcaggattgtgttgaaataaaccttacactaaacac

SEQ ID NO: 83679 - DNA, 389 bp, Zea mays
  Clone ID: MRT4577_176329C.1
ggctctcgggccaacttgcactctcaggttcagcatcaagccagacatggccacgcggggctaccagccggcagctgctcccgctaggagctgacgtcttgcatcaactgggactccctcaatttgttactgcgacgcacatcacttaggtgattaaggcggactggattactaccgatgaagtgaagatccatctccacaagcaccggatgcacagcataagatccacatgcttacctgctacattcagccagacagttatgctggctcaacggcctttcgatctgctgctgcatcaggagcacagcatttggcagagcgtacactccgagagcccgctatacgtctgtcgatccggtggatcggccaccgtcactggatatagctga

SEQ ID NO: 83680 - DNA, 436 bp, Zea mays
  Clone ID: MRT4577_17632C.1
agcagtggtaacaacgcagagtacttttttttttttttttttttttttttggaaacccatagaaaattctataaaaatgataaaaatgtgagaccaattttgttggactgctaagtaactatatgttttaataaaaaagggactaagattcttagtccaaaccaagcagtatgaagcattcaaaacagccaaaacctagtctcttggaatctgaggaatcatttgaagattccaaaccatcaccaaactttgtggcataagcctaatatggcatttagaacacatgagtgaagttagcacatgacttggacaatggttgatacctaaacccccaaaccataatcttctaagtactgtctgccccatgaaataaaattcgtaactccaaaaacctaaggtttactaaagaacacgcgaaaggaaactttattcaaga

SEQ ID NO: 83681 - DNA, 138 bp, Zea mays
  Clone ID: MRT4577_176330C.1
ccctgttacccgcccggccccaccgactcccgaagggggcgcgcttcaaaggcaccacccggacaaggccgccacgcaacggaggaacaagccgcggcaggagcacacgcagacagagcgaaccgcaaacccccagac

SEQ ID NO: 83682 - DNA, 400 bp, Zea mays
  unsure (1)..(400): unsure at all n locations
  Clone ID: MRT4577_176331C.1
gagctcgcacgcttggggcccggcggccgtgccgctggaggcacctggcgcggcggtgctggacgcgaacgacttccgcaagtaccgcggcgtgcggcagcggccctggggcaagttcgcggcggagatccgcgaccccaagaagcgggggtcccgcgtgtggctcggcacctacgacaccgccatcgaggccgcgcgcgcctacgaccgcgccgcgttccgcatgcgcggcgccaaggccatcctgaacttccccaacgaggtgggcacccgcggcgcggacttcctcgcgccgccgccgccgccgccgcatgccgcggcaacgtcccagaacaaacggaagctgatgcacgacgccgaggccacggncacggccggggccggagccggagccgagcca

SEQ ID NO: 83683 - DNA, 238 bp, Zea mays
  Clone ID: MRT4577_176332C.1
attcccaactcgacgccacccttcctcctacacgaattattcactacattttgttttccacaatttatatatcttattatatatggctattatttcaaccgcttcaggcaatacaactttatcattaaatccaataatattttgcataccaatcctcacttctaacaactaatgtcatagctaaactttgttccactatcaactatactcatcatacaaaacataacgtaacttctac

SEQ ID NO: 83684 - DNA, 639 bp, Zea mays
  Clone ID: MRT4577_176333C.1
ctggccgggagtctgttgggggtggaaaatatacgggacagcacacgcgaagggcaacacagcggagggcaaagcggcggcggacacacgcaaagggaagcgacggtggtggcacggacgcaagattctctctagcgtcgatattctccggccgccttctcaccgacagggtggctctccaagatgtagcggacggaggtggtggcagagacctgcagacgaaggcgaatggagtatctgggtctattgccatggctgaagacgctagtgagaggaattccgaaggtagctgcaatgaagcacaccgtcggccgatcgactccctatgtggatcctgttcatacagtctacagatcatgttcatgcagtccatccccgtgtggtatagataatgggtagcagccattatattggtgatgtcacgttttgtgctagctccagccattatgcaggtctctgtcaaacgattcttgatgaggattcttgaagtacttgaagtcctactcgtctctagacattttttatctgttggtgaagattcttgaagtccttgataaaagttgtctgtgtagaacatacaatttgtctatatatgtactccacatgaagttcttgaaaaaaaaaaaaaaaaaagcggcc

SEQ ID NO: 83685 - DNA, 362 bp, Zea mays
  Clone ID: MRT4577_176334C.1
tttgtcttggcgtgcaaaacgttcgatcgcccgtggcgttgttcacgttctccgtctaccatcgacaccaccttgtcaggcagcgcgcaaaaccggtcccatccgatcctgctttcagctgtcttctcgactgtacgaggtactaccaccatccaatgctgatgcatgcgtagggcatggctcgtgtgctgacacggcgcagcgcgtgcgtggaccagcgcccaccggagcgcaatgtgaagcgcgtgagggaggaggagatccatgccgcgcccgagcagccggacttccccttcgcggaggaggaggaggaggaggaggccacggctgtggcggtcgaggcgtattggtggccaccgggg

SEQ ID NO: 83686 - DNA, 680 bp, Zea mays
  Clone ID: MRT4577_176335C.1
cattgggtacctcgaggccggccgggacgaggtccgaaacgacacaatttaactcactcacgatcaccgacaacgccaagacagatgaaacgagaaggacaatcgcgcgccaccgacaactgcacaagaggaggaagaagctcccgaggccgaggtctacatgatgtactacatgatgaacgaggctgagatactggcatcgagaacctcgagccggagtcccgtcgcgaggctcagcttggataccgcatcctctccgactacagaaaaacacaccaggagcacgatagaactgcatcacatctacttccacctgtcaatagggaggaggtccatacagtagctagatatgaggaagaaggacgactgcaactgctccaaggccgcatgcatctctcgatgaagaatcgagatctccccgaggaactcacaacatctacattcaccacttccgaggaatattctgcacgctgcacatgatgtcctctgcagaaaaagagacagcaggtgactcgtgaatcattgactaccccttccactcataccgaagagcgtttcgctatcacgcttgatactcatgttctggagccttctctttacggcttgatcataatgctctggacatcatgcaacgggtgttgtattgtttgaatacagacacatgtaccatgtaattatac

SEQ ID NO: 83687 - DNA, 342 bp, Zea mays
  Clone ID: MRT4577_176336C.1
ctcaagcctacgtagaccaacacgcaccttaatacgtggactccaatttcaacaaccagacggcactttataccggtgcgtattctatcctcatgctcctcactctttctgcatgtgttgctaactcgacaatatcctatcaatgctcacattcttctatagctcccattatctctgcataccttacatcaatgatagcttcactttatgcaaacccttctcttcatacctatagcatgcatcaagccatctctacaagcaacataccttcatcactcttgctgtttaaacaatctgcaaccctatctattattcagtcatttattcaaaccatcacgactc

SEQ ID NO: 83688 - DNA, 403 bp, Zea mays
  Clone ID: MRT4577_176337C.1
tcaaagccaataaggatatttaagaacctccgtgtatgcgttgattgtcattcagcactcaagtatgtctccaaggccaccggtagggagataatattgagagatagcaacagattccacaggatgaaggatggggaatgctcgtgcggagaatactggtaacaagcaagctagctagctcacgtagtcacgtttagctgaagagccatgtacagagttctggcgcaccacaacattattgacagtgagtgtccatgttcatattttctgtaggaccttcacaaaatcatagtttatacaaagcatgagttgttgtgatagtttatactttatactagggtcagagtttgtacagttgtatgcactctcctatcaccataaatgcaaattgttttgagtggtc

SEQ ID NO: 83689 - DNA, 412 bp, Zea mays
  Clone ID: MRT4577_176338C.1
gttctccgcacgcgcatgatcggcatgcacgatgacgacctgctactaagggctcttagggatcgcaagctctggctcaatcaatacggatgcaagcttaccaatgtcatctactgctccgttgtagagccatcttactaatcgagatcgattttctaggacacctgcacatggtaaatacctcataggctgtacatagctggaccacctgcttttaccgtcgctccagcgattcatgcgatgccgacagcagatgcacatgctaaacggcaggcatgtacatgtatgactaagaaatccggctgtgcaatcagcggatcaacagggaagatgccgtgcactacgaccgtgactttgacagtgatcccatacttgtatgtggcactgccaaagatttggatagatgctacgt

SEQ ID NO: 83690 - DNA, 445 bp, Zea mays
  unsure (1)..(445): unsure at all n locations
  Clone ID: MRT4577_176339C.1
cccacgcgtccgcagacaaaagatggcactataccagtatctttacaaggatagcagggtcgcatatccatgtaaagatactggtatagtgcagacaaaagatggcactttctgctcgtgcatgcttcgaaattctattgtctgtacgccacataatggcatgttttatgctgtttgtggctttcttgacttgaatgctaattcgcttctacatagaagtgatggcagtttccttagctacaaaacctattttaaggaaaggtacaaccttgatttaagatgtgaagatcaagctctcttggaagctcgtaaacttgtggaagtgcggaactttctccacaagtgtaactattaaaaagaaaaagaaaggagtggtaagagtgtggttgaattgccacccgaactgtgcatangtgtcatgtcaccaatgtccgcaattactttg

SEQ ID NO: 83691 - DNA, 399 bp, Zea mays
  Clone ID: MRT4577_17633C.1
catagaaagcacaatagtgtaccaacaatggctgccaaaatattttgcttccttatggtccgggatctttatgcaagtgttgctaccgcaaccattttcccacaatgctcacaagctcctatagcttcccttctttcctcatacctctcaccatccgcgtcttcaatgtgtgataccaccattctccaaccctacacgatccaatatgcaatcacaacatgcatattaccattatcacccttgatcctgcaacatccgtcaatcctattacagtaactacctctgctccatttatgtggcacaaaacatcaggtgcacaacatctacaacaacttgtgctagcacacctagctgcatactcataccaacatctacatcttccattcaaccaactggctg

SEQ ID NO: 83692 - DNA, 628 bp, Zea mays
  unsure (1)..(628): unsure at all n locations
  Clone ID: MRT4577_176340C.1
gggtcgcccaactccgggacgatcctacgcgtccgcgcttcctccacgaccttttgaagaggttcgtgaaacgatagagaaagaacttggagaacctatgagtgatctatttgctgattttgtcctagatcctctcgcaaccgcatcaatagcacaagttcatcgtgcaactctggcagatggcagagaagtagttgtcaaaattcagcatgatggtgtgaaggagatcatattagaggatctgaagaatgcaaaatcattgattgaatggatagcgtgggcagagcctcagtatgattttaatccgatgattgatgaatggggcaaggaggctccaaaggaacttgatttcaaccatgaagcagagaatactagggctgtctccaggaatcttagtcgcaaaagtgactgtgggagtggcagtgtttccagtactgttgatgtactcattccagaagttattcagtcaactgggaaggtgctaattttggaatatatgggtgggattcgtttaaatgataatgattcattgggaagcgtatggtgttgacaagcaaaaactgggcgaagagataacccgtgcgtacgctcatcaaatatacattgatgggttntttaacggggaccc

SEQ ID NO: 83693 - DNA, 348 bp, Zea mays
  Clone ID: MRT4577_176341C.1
ataacacatggtgggagtggggtaccagatgcattactgaaccagatgtttggaaacaacgggctagaatccgaggagggtattagcctactgatcagcagaaagctgctgaagctgatgaatggagatgttcgctatctaagggaagcaggcaaatcagcttttatcctctctgctgaacttgcagcagcccataatttgaacagttaaaagtgttggaaaaaagaatataagatgatgcaaccagcaaaacacaatctgttttgtacatcataaagagaacggagctagacattaattgcatccaatgtaactctaatgtgttcccacgtttcttattaactgctc

SEQ ID NO: 83694 - DNA, 529 bp, Zea mays
  Clone ID: MRT4577_176342C.1
gggggggtgggtggttatttttttttttttttcttaaaagggggggacagaacgcccctaattagttccacacgcccggaaaaaaaaaacggagggagaagggggggaatggggagtccctgggatgatattacaaactcaatgaaatcccgattaggcggggggcattccatcgggcaggaggggggggtggaacaggagcaggctaatggaaggcaccttccttggggacccggggatgaggaaaacgaggaggccggggacgccaaaaggacccccccggaaagggcgcccacaacaaacccgcaaaaagagcaagcaaagaccccggcgccctcgttgaagaccggctgggaaactgccgccccgacgaaggcctccacggggaaccccccaacccccgccaggagggtgggggtggcctcgaggatggccaaaacctcgggccggggggggaacccgtcccaccccaggttgaccgcgcgcgtgaagaaaaccctccccgcctccccgcccggggggggcacaa

SEQ ID NO: 83695 - DNA, 421 bp, Zea mays
  Clone ID: MRT4577_176343C.1
aaaataaaaggggggcaggaacttaaaaacaaaaccttggggagaaaaagggccttgccatcatacaggaaccccaacttaaggtccatttttagcaaaaccccagggcctaaagggggaacggggctaaaaacaggggaaacaaagccaggctttccttcctacccctaaggttaagcccaaccactttttttggggcccttcctaaaaaaccccagggtcccaaggaactggggggccacccccttgggggagggctggcgggggcccttgggttttttaaagccgttcttgggccccttgaacaaatgggtgggccccggggggttttttaacttggccattttttccggatgccaaaacgaaggctcgggaaaaacaaaacggacccgggggcggacccgggggcggacccgtgggt

SEQ ID NO: 83696 - DNA, 212 bp, Zea mays
  Clone ID: MRT4577_176344C.1
cgccacgcgaacaacgcaggcaaccaccaccacccaggagagccaccgccgccagaagagacaagcagacgcccgaagcaacccggcggcagggcccacagccgggcgggcccacgacagaaaggaccccgagaggcagggcaccaacaacggaccgcccgacacccaacacgagggaggcaacagcacagcaacaacgagcaccccacaaa

SEQ ID NO: 83697 - DNA, 448 bp, Zea mays
  Clone ID: MRT4577_176345C.1
gggccaccgattaatttgcagcgaactgggggcatgtgggggatagacaataaactacacatccctaatacataggggatcgtctttaaaaagaagagagggctctccacactcatgcaaattccgggaagccaatcctgtcgttgccaaagtcaaacaccggggggaaagctcccatgaaaacgtccccaaaaatccaaagaggaccacgcggggggggcacgtaataccccataaacccactgatgcaaacggttgggcctccttgctccagcttaaaaatgaactgctcgggtgttaggggaaaggtcttgtttgcaatgggaaacccaaggctgggcattttggaaatctcctggcagctgactgttgactctccgtgggggctcggaaaaccctcacacagttggttagcgaactgaagaataagctccttggtcttgttttc

SEQ ID NO: 83698 - DNA, 2691 bp, Zea mays
  unsure (1)..(2691): unsure at all n locations
  Clone ID: MRT4577_176346C.1
acgaatggggttcgtatagcaggcgccgggtgatggcgttgggcactgttccgaaggagagctcaggatctcagggaacaacttgaggcacatgttgtgacaattgagactttgagggctgaaataaaaacagcccaagtgcagcatggaaaggaacttgaggagctaagagaaactatatcgagctcttatcttgatcaaactaaatctcttcggtccacacttgaggagaaacagaagcaaatagattcactcagtacatcaaatacagagttacagaactctataaaagatctggatgaaaggcttaatgcatctaaacaatcacgtgcggatgctgatgagataatttcaagccagaaaggaatgatatgtgagcttgagggacagctaaatgaggagcgaaatttaagaagagaagagcgtgataaggctgcacatgacatgaaatctgcattgcataaagtgcaagccgaggctcaagaagaaattaagaaacaagcggagtcttaccttagacaacaaagggagcagaaagaagttattagcaagcttcaggaatcagaaaaagaaacacgtttgtttgtggaaactttgaggtccaagttggaagatgctcgagataatcttgtaacatctgagaaaaaagtaagagagctggaagctcagtttcaggacgagcagctagtatcagccaacaatcgaaagaaatcagaaaatctggaaactgaattgagaaaactgaagaaggaacttgagaatgagaaggctgctcgagaagaagcatgggcaaaggtctcagctcttgagcttgaaatagctgcaacgattagagatctatcaattgagaaacagaggtatcaaggggctagagaacggattattctacgggagactcagctgcgtgctttctattcaactacagaagaaatctcttctctgtttgcgaagcagcaggaacagctgaaagctatgcagagaactttggaggatgaggagaactatgagagcaccttaatgagtgtggatctcaataaagagcatctagccattgataatgctggtatgaagccagtaaactgctcaaaaaatacactgggagcttcaattgcttcaccagaaaatactcaggtaagtgaacatagttccagtgacgaagatgccaacatgactgagcagcaagatgatgatgttactgccaatggtggcaacactcaagatctagaatgcaccagtccagaaaggtcagtggagaggaggccgggttttcatggcaatcctgttcctacagctcctgagagggaagtaacagatactgagcaagttcctgagacagaaagcgaagctggtaatgttggttgcgatgaccaaagatgtgacaatatcggaggagagactatgccgctagaggacgaagtgctgcttccagagaacgaggagcctactgcattgctcaaagatgcagggcagccacaatcaaatatggttcctattccaattctcgatgatggcggcggccactgttcagaagaaaaacatgagggtgcttgctctgagagcaaacgggatgacacacatgttggagctatcagaacgggtgatctgttggcctcagaagttgctggcagctgggcagtggaaacagctccatctgtcaatggggagaacgaatctccaaggagcttgggagatgctacagagcgagatgaagatggaggtagcgtggcagctgatgctttgctaactttggtgaactcagagggccaggcggctgggagccagaataatgttgagcaggccagttccaaaataaccgatgatcgtcgtgttcttagtgccatgattgggattgttgatcctgaattcaggaagcaaatgtccaggagtggagctggaaacgaggagccgatgtctgacgctgagacggatgaaggcgtcgaggaaggtgattcagattcaggttcagatggcagcgacagcgacagcgaggaggctatggttgaggattctgttgggtagcttaaacggaattgactgctcactgtaaatatctcaattcgttcgtgcaccattcgctgtatgagcttgtattatgcgtagtgtagcagtatttgttttttattctttaaatgtttttagcagctcgtggtgttgtacgaaatggatgccgtttggtcttcaacacaaaataaagacattcaaactataaaaggatttggctttttataagaaaggcctcagtnccaggaacacggccagcgccgtgatgcagggcagcgtgccgccctggagccccagccgcgcggccttgcagatgatgaaggacaaagcgatcgccgcgccaccgttcagcaccgacagccgctcgccgtccttctgcggactcgccgtcgccgtcttgggctctgctgggatgtttgacgccagtgagaagagcgccatgaagtagagcgccgagatgaggttgtccgctgcgacgtcggcggcaaggacggacggcgtgaggcctagaggacgtggcggaggtcggcgccgaggagcagcagcgggacggcagccggcaggaggtactccatgacggcgtcgtgcgcgggcgccccgggggtgacgaggccgacggccgtggcagccaggccggccatgatgctgaccagaggagagtagacagagacgcagcaccgggaatgagga

SEQ ID NO: 83699 - DNA, 534 bp, Zea mays
  Clone ID: MRT4577_176347C.1
ccgggggccaaaaaaaattattacgttttttttttcagggaaccctataaaaaacagaaaatttccaagctttggaaattccggggggggacatacgtaaacgcccccgttttaccatttcctacactatccttttacaaataaaacgtcctaccagtttatcaaagttgaccgtgggggttggtttgtttttaacccgttgacaaagggccccccggtaaggtcctcggggccggggagcgcaacggggcccaccatggggagggggccgttccaaagctgggggtggggggtaaaaaaccggccgctcctgccctgggggctttccccctggagcaggggccccagggacccgggggacaggacggggggggtgtccccaaaccacgcgaggccggccccgttgccggcctgggaaaggatgccccccccggggggggcctcgacggggagcgcggacacaaagcccaccttgccagccccccgttgatccgttccggggggggcccgttgaacgccagcgggtcccaaaac

SEQ ID NO: 83700 - DNA, 289 bp, Zea mays
  unsure (1)..(289): unsure at all n locations
  Clone ID: MRT4577_176348C.1
ccacgnacaaccggcgggcgtcgcaacaacccctggcgnnggcgtgtntngctcggcgatgctctncnngtcggcgcttgcatgggnatcgtggcatgtcgtgtggccccgtggccgtccatcccacttgtctgcgggggaggggcgaggcgacccgcggtctttgccgtgccatgcatgcatgcagaaggcgcggtgggcgagagcgatcgacatggagcatgcatgcaacacccaagggcgtttgcgagggatgcccgcggcggcccggtgaccatgtcatggcggg

SEQ ID NO: 83701 - DNA, 597 bp, Zea mays
  Clone ID: MRT4577_176349C.1
gggcgcggcccctggcgtcgcaactccgcgtgggcgcggcctccggcggctctgccaggcgtccatcgacaagggcgggcggccagggcgggcgcgggccccagcacgcgagccaggcggccctcggccagggcgggcggccatggcagcgcggcgaccctcgtccccggctccggcgcgcgcggagcgcggctccgaacatgtgccggcgtggcctcgccacggcctggcggctcgcaggcgcggcccctgcctcggccccatggcggacgcggctcccagccccggccccggcggcgacggcctctagccgcggccccggcggcccctggcagcgggactgcccggcgcgggcgcgtcccctagcagcgcgggcgcatcccccggttgcctaggcgcgaccctctacggcgagcggtaacggcggctgcggggcagtagccagtacgtgcgggcaccggcaacgcgggcacggtggcccggccacggctgcgcgggcgcgttcaccggcgcgcacgagcgcgggctcggctgcccgggcagtgcggcggttgtgcaggcgctccctttggcggtgggtagctcgggcgtgccccc

SEQ ID NO: 83702 - DNA, 252 bp, Zea mays
  Clone ID: MRT4577_17634C.1
ggggggcttaaacaatgttcggggctaaaaccccacattatttgcaatatttcttttcacaaaaattgctaaattacatccagggaaaactaaactcatttccaaagggccccaaaccaaaacagaaattccaaatatttacgactaccgcccacttaaatccaggttttaaaaatgacccattcccccaaaaaggaaaccaatgtaaaaacaccactggccgggaggccccttcatggaatctaaaagggg

SEQ ID NO: 83703 - DNA, 510 bp, Zea mays
  Clone ID: MRT4577_176350C.1
tgttttggttttttttttttttttttttttttttttttttttttttttttttttttttttttggagggctccattttgggcaggtaaaaaaacggcccgaagccggggccctgtttttttttgaaggcagcggggttttggaaggggggggggggggtttttttttggcagccaatggccggctcgccggcgaagaggaagggcgcctcggggaccccccccccccggggccggacaaaaagcttggcggttcggccgttgagctcgtacgtccgcccgcaccccacgtgggggaagctgatggtgccagccacggcgtcccgaaggttcacctgcccgggcatcaggttctcccacgggggggacagggcgtcctcgaagtcagccctgaagaccttggggccggagttgagcgcgtggatgaccatcttccgcggctcgggggggcccgggatctccagggtgcgggcggccacggccggcggcacgggcgcgcaccttcagtccccc

SEQ ID NO: 83704 - DNA, 153 bp, Zea mays
  Clone ID: MRT4577_176351C.1
tacagaactaggctggcctttgggttgctgcggaatttcatccaaacttttgtccacccaatgatttggtctgaactctgaacccgatcgctgctgaattgacatgtgtatgctttacaaaaaaaaaaaaaaaaaaaaaacaaaagggaaagg

SEQ ID NO: 83705 - DNA, 653 bp, Zea mays
  Clone ID: MRT4577_176352C.1
tacccttccttcccccacatgttaatttcctatccgagcaagtactgtccagaaagaacagcaagcacaaaccgtcaagagatcactagctcaaggagctagaaacggtggtacaaatccaaacatgaaaaatgcttatcaacattgagaattttacttgacagtcctgctactgatcttggtcatggcctcatgggtagtccaatacgtcttgacaaccaggaggatcttctccctgttcctgtacagggtgaataccgagtccgcatggatgagatcgtaggtcctcgggtaggtagacatgccctcgcacctcgagctgggcgacgagcgccgtgcactccctccatggatccagccctacaaagagaatccaaccctccacggatccagcttttgtggatccagccctgcatggatccgccggcatggcgtcgttcgcccttcgccgacgacccggtagtcaaccacagggagagggagagggagagggagaaggagaggaagagggtagtcctcaccggcgatgagcatggtggcggaggaagatggagcggacacagcacggtgcgggatcaccaggaggagcggacatagcttttgctccgagaggcgagagccgcggcgcccggccggcctcgaggtacccaatg

SEQ ID NO: 83706 - DNA, 1127 bp, Zea mays
  unsure (1)..(1127): unsure at all n locations
  Clone ID: MRT4577_176353C.1
ggtncgcctggggtacctcgagtccggccgggcggccagtcccagtctcccaccgtcccacgaaacacactcaactctgccccgaagcggagaaccgccagccagacatgaagagaaccagagcgcagcagcccaaggtcgaggagccgcaggacctcgccgccaacctaaagccgcagcgccgggacaaacagccgaggcagcccaagtcaggcgccaaagcgaagcccgcggcgggcccgcgcgtcgcggcggccacgaccctcgccgccgccgccgccgcagcagcagcagcagcaaatgccgcctcggccgcgtcgtcgcccgggccggaaacggctccgaccgtgccggacgtgtgcgtcggcggggacaaggacggggacgcggacgcggacgcgagcgccgtggactgggacctcgacgccgggctgagcgcggcggcgtggtggacgtggggcgtggacgaggagaagctgctcggctggttccccttcgtggaggaggacttccggtgcgccggcggcggcgccgccgaggtggccgccttcgaccacgacatttggagcatctggtgaacgaacctttgagagacagacaaccgagccggtggcgatgcttctttcgctggtcttgctctgccctgccccaggggttggaggtagtgtcttggtacagtgacgggggaatgcgggcggaggatgtgtaggcgaggtttgctagtcgactagataatgccgcgtgtctgcaatggcgcaattccaagcgcgctcttcgttgctccatcgatcgcgcagtgtctgcccggaagacgttctcgattcatacataagaacaacggcagcaatttcaatcaagcgcatcagcacccaaaaacttgtttagcgaagtactgtatgcaggatttgatagctatgtagaattgtgcaggcggtgtgtgctactacgggattgcgatttcaagttcactagagcttgggcatgtgggcaaaacgttgcgaggccgaaatgtcgtccatgtttcttcgccggttacttgggtgtataatgcaactgcccacacatattggaactgcgctctccgactctaaaanaaagaaggacgccactctaaggatcaagctacg

SEQ ID NO: 83707 - DNA, 481 bp, Zea mays
  Clone ID: MRT4577_176354C.1
agctaaatctccgcatcccacaccccccgagctcaggttagctccactccctctccaatcgcacccgcgaccacagcgagagccagctagctagagggccgtgaaaatgacgatccttaggatcgccctggagagccaccagacaggtgtaccacccgggagccctcaaggcgcggttcgatgagttcatctccaccctcatcttcttgttcaccggccaaggctccggcatggccttcagcaagctgaccagagatcgaccgcactaccccgacctgtctgtatctacagaggaggaggagtacgcgttcgcgctgatcaaggaggagtcagagaacgcaaacatcgtacggtggtcacgacaacccggacgtgcaccttcggaggaccttcgcggacgacaacatcaccctgatgcgaaggctcctgtactgcgaggcagcagctgctgatgtccaccacggcgagcttcctgatcctg

SEQ ID NO: 83708 - DNA, 131 bp, Zea mays
  Clone ID: MRT4577_176355C.1
taaacccgggaccgggcccgccactaaatcccttgatctaccaactcaccacctatcttttctccaccagatgaccttcccttggggccggggaaatttaaaatacttaaggtcacaaaaacataccctca

SEQ ID NO: 83709 - DNA, 1306 bp, Zea mays
  Clone ID: MRT4577_176356C.1
aaccccccaccccccggggttttaagcgcgggtaaagggggggtcccatttcccattaggggggggcaatgttgggaaaggggataggggggggccctttttttttttaccccccttgggaaaaaggggtttttttccaagggatttaaattggggaaccccggggttttcccagccccgcggttttaaaaaccgggcccgtgattttattttgggggccccaaaaaaaaaattttaatttgcaaagaccggggaaaaaaaattggttccttaaaaggggcccccccctttttttttttttttttttttttttttttttttttttttttttttttttttttttttttttttttttttttttttttttttttttttttttttttttttttttttttttttttttttttttttttttttttttttttttttgaagaaaactttgcaggggccaggggtcttactacctacccttccttccccccacatgttaaatttcctatccgagcaagtactgtccagaaagaacagcaagcagaaaccgtcaagagatcactagctcaaggagctagaagcggtggtacaaatccaaacactaaaatgcttatcaacattgagaattttacttgacagtcctgctactgatcccgtccgccaggctcttgaccttcaccagcaagtccacatcttccatgatgatcgccgtgcccctgggcctcaggatcctgtccatctcatgaaggatgcggtccactcgcacctgttcctgtgcagggtgaacaccgagtccgcatggatgagatcgtaggtcctcgggtaggtagacatgccctcgcacctgcagtgaatgtagtagtgagatcacgaaaccttaaccgacaagcgcggtggtggacgtggacctcgagttgggcgatgagcgccgtgcactccctccacagatccagccctacaaagagatccaaccctccgcggatccagcttttgtggatccagccctgcacggatccgccggcatggcgtcgttcgcccttcgccgacgacccggtagtgaaccacagggagagggagagggagaaggagaggaagagggtagtcctcaccggcgatgagcgtggcggcggaggaagatggagtggacacagcacggtgcgggatcaccaggaggagaggaacaccaggaggagcggacacagcgcggtgcggcgagtactggctccgggatcaccaggaggagaggacacagcttttgctctgagaggcgagagcgagtcgagaggcgagagctgcggcggcggctcccggccag

SEQ ID NO: 83710 - DNA, 779 bp, Zea mays
  unsure (1)..(779): unsure at all n locations
  Clone ID: MRT4577_176357C.1
acatctccaccagcgcaggagctccccagcccgacccctcgcgctgggtgcacatctgtcgcttctcctagtgttcagctcctaggcgcaggtccctccatggccatcgacagcgcccgagctccattccttggtcttcctgctcggcgctagaccctaagacgagctcatgttctccgtccattgcgcccaggcgagtagctccccttctccagataaatggcgcccaacaccttgagcgcccctgcctctgctcctccaccgggatctcctcctccagacgcccaagtctccgatggagctcggccagccatgcaccaggtcgtggctctgtgtttgtgcctgacagcgtgtccagccgaccacgcccttcctgttccactccggccttcgacgctcaagagtcgtggacgagcagtagcccggatctcctcgtgtcgcgtgcgtcgattcatctgtgcagccctaacccgcgacgtcacaatacccttggtacgctagtggaccacgtgatgcagaggaccaaagatgagtcgaccacatgatgctgttaagcgtgggctactccacaaggtgatgctgatgataaacctgaaggtggatgatctgatcaagtgccaagatggaagatgatcgccaagcaagtataacanacactaacgtagtgtttatcccaagcaagccccgggtgcatttggccacctccttgttggttttaaattttttatcacttatatgctacacagtcgataagagttgagtgatgaaacatttgatgc

SEQ ID NO: 83711 - DNA, 632 bp, Zea mays
  Clone ID: MRT4577_176358C.1
ggccgcttttttttttttttttttctttttttttttttttttttttttatttgttttcttgattattattgtctttttatttttttagcttccccactattgttttgttagcaaggcgttccaataggagagaagaccacagagaggggagcctcccccgagaggggggggggagcatggcacatgcccgggaaaaattctgggggaaggggaacagtttccttaaaggggaagccgaaggggccaaaggccccctcaaaagtggggggaaaaaaaacaaggttgttaatgggagaatcctacggttgactacagtagcctaaaaatgcacaagcactgaaataggggggagataataacaccatccccattacggacagctttagggcacaacaaacgcaatgaattctgttgttagtaaaaaaagatggaccattccgaactgacacaatgcccggtagaaaacatgatttgggatgtgaccataaaggaggacccgccttcaaaagggcaaatgcctcctccaaaacaaaggaatgcaactgtggacgaaaacttaatgatcccaaaaagaggtaaattccatctgctcttaaggggcttcctgcagttagaaggatttaaaggcccca

SEQ ID NO: 83712 - DNA, 959 bp, Zea mays
  Clone ID: MRT4577_176359C.1
ccggccgggatccattcttcgatcaacccattccattcgttccacagagctagtctcacttcattctttcttatcaacttactatcgttattttcatcgcttgcgatcaactatcattcacttctctcactccaactccatcaaaatgaagaccaccagctacgtttctgctcttctcggcctggcctccgctgtcagcgcccactacaccttcgacaagctcaccctcagcggccagcaagagggaaccgacaaccagtacatccgcaagcaccaaaacggttacatgcccaccaagttcaagggtattcccgacggttccatctcgcccaacgacaaggacttcacttgcaacaagggcagcaccgcctcccccgacgtcttcaaggttaaggctggtgatgagatcggtctcaagcaggctttcggcggtactggtatgcagcaccctggtcctatccaggtctacgctgccaaggtcgacgatgctaccaaggctgacccctccaacctcgactggtacaagatccatcaggctcttgtctgcaaggctggtactcctgagcagctccgcggcccctcttggtgctcctgggacgaggactctgttcacttcaagattccttctactctccctgatggtcagtacctcgtccgtggtgagcacattgcccttcacggcgcccacggtggtgaggctgagttctactacgcctgcgcccagcttgagatctctggcaacagcgcctccagcatccctggtacctctgtcaagatgcctggtgtctataagcaggatgaccctgccgtcaacttctctctctgaggctcttccactgcctacgacgttatccctgggcccgatgtcattcccggaggtaccatccgtggtactgctgacggtgcctctggtgacgtccagaagggtgtctgagggcggagcttcttcttccactccc

SEQ ID NO: 83713 - DNA, 310 bp, Zea mays
  unsure (1)..(310): unsure at all n locations
  Clone ID: MRT4577_17635C.1
acctctacagcccccaccctttttaaactttttttaatatccccccccacaaaancaaaccggggcccgtctaatttaaaaaaaccaacccccaccaaaaacaaacctaaaatacataaaactatactacaatgtaacaacaactgagtgtgacaactaaccttacattccaagagactaccatgaaacaacgctatgaacgcacatccccccactccatgaccatggcccataaacccaaaaccccccctaacaatgatcccaaaccctacatcggatcaacgccccagaacaataacaagtacccccc

SEQ ID NO: 83714 - DNA, 494 bp, Zea mays
  unsure (1)..(494): unsure at all n locations
  Clone ID: MRT4577_176360C.1
caccccaatctgacgtggggtttggtctgggttatgaagtcagtttgccttggggttctctggttcataatcctatgtttgggtctggatctgggcatgcaaacttgttttgccaggtttgttaaagactggggtggcccaagcggtttatggcggccatacggtggcctgggtaagatccggcaacaacttgtgggtttgtgttcaagataggtagcaagggcttcacaaccagcctagcttggctggaatggtaagtaagttggttgcttgcttgtaaaataagcaagggaagatgtttcaaatggcttggctataggtttggtttgaaatgggaaagaaaaattggcttggnggggtaagggcaagcaagggtaagcttggcttgaatgggtaagtttgtttggttgttgcaaataagaaancaaaagttcaatgaaccttaattggttgaatggaaaaaactgctgttgcttgaagtagcagcaaggttt

SEQ ID NO: 83715 - DNA, 563 bp, Zea mays
  Clone ID: MRT4577_176361C.1
tggtcatcagagcccgcttgcaggttttacttttgaaactttctaagttttcatgtccatacttattttttaattttaatctcttctgagttttgattatttataactcttatgtgtggttttccagcaacggcctggcactgatggtactccaaagtactcaaatagctggcatgtagtgaaggaaactgcaaagtatgaaggcgtccgtggattttacaggggcatcacgtccaatctactgaaaaaccttccagctgcgtccctcacgttcgtggtgtatgaaaatgttatcaaactattcaaagcaaccaaggagaagacgtagctactcattaaatccaggagtactatgcatggtctgacatttctgagttcaaacgatgcctataatttccattccacgtcaagcccatattttatccatttaacatcgtatatgacaaatatgtaacagtacaggttgtgaccaacctgggtcgtggaattttttttgtacttgcattttgtagagagaaaatacacattttgtttcttcccaaagaaatatgtctttgttatat

SEQ ID NO: 83716 - DNA, 260 bp, Zea mays
  Clone ID: MRT4577_176362C.1
atacaggaaaggaggggctcttagtctttgatttcatggacaggccaaggaacacacaagtgtgctcaaacaggcctggcctaaccaagcttttacttaagggtgcatccattcctctaaaaaaaattacttttttgcacctaaggagaggggctttcactcttctggcgcctttgaaccacctttgtaccggcctgtccttgcaaaaaataacttgccctctgaaaccgtggccgtaaagagctggtgcttgccgccct

SEQ ID NO: 83717 - DNA, 662 bp, Zea mays
  Clone ID: MRT4577_176363C.1
ccgcttttttttttttttttttacatataagcaactataagctatttaaacaaggagaatattcaatttattggtttaaaacaatgaacataatgacaaaaacaagtacctcatggtagaaccaactttacaatttagtatatgccacatgactcaatgtagagcaaaaaaaacttgccaacgatttgaaaatttcaggctccatcttgaacgctacccgacagttgttcaaatgaccttaaagcaactcctgaacatgttcttcaccacttaactttgatgtatgccttcgcttcttttccgttgctatgtttgaactagagcccaatatatgtagcataggggaaaacagtatcatatcatcatcatcctcatctcttctctttctaaggtgatctcttagtgccacatcaattggtaactaaaagagagagtatagggtcccaagacagtggaagttcgtcttctccaactcgaactggtgcagggataatctgcatggcggcacgagtagacgtcgatctggcggcgcaacgagcagctccagggaggcgagggcgagcaacacgatgctgatctagggcgtcatggatggttgggcgagtgattttggtgagggagaggtgacgtgggcatcccggccggacccgggggtaccccaa

SEQ ID NO: 83718 - DNA, 440 bp, Zea mays
  Clone ID: MRT4577_176364C.1
catgcagccagagatggtggacgcgcggtgatgtcctgctcgcgagtagagctgaacgtgcgagcatagcgtcgatttcacatacccgcgtccactatctatggattgttgtccttccatcgtcatatccattcctgtcttgatatttgtttagaagcacttgtcggaacccttgtacctatcacgcattgcataaagatatggctcctccttaccgaactaggaaagggtgactttcacaaatcatgtttatgccatgtaaggtgattgcagctatcatcagattggcttacagaggggtaagtggaacctacccatgtggcggacattgtgatggaagctgccttgacattaaatcccataatgatgacttgtgacagtcatgctttacaagttttattctactgaccctcatcctatgactcgattattatactata

SEQ ID NO: 83719 - DNA, 275 bp, Zea mays
  Clone ID: MRT4577_176365C.1
atgatccagagactacgctgttgcgagtttattttctgtaactacaaaaaaaacagggtggtattatgcattgcgcccgaaaaaaatggtttgcggttaaaattgtgcaaccctataaaatactgggggggctatgtaacccgccatgatattctttttatactagccggtgtaatggaccatatttttagaggactaccccaagatttccaacctgggaataatttacaaaagttcgactacatttgggtgggggattgaaccaatgcattttt

SEQ ID NO: 83720 - DNA, 136 bp, Zea mays
  Clone ID: MRT4577_176366C.1
ggggatacaggaaccggagaaagcaactttacattatgtaccctcgtactacacaacactacatacgcgtttcacatgtcttacataccaaatccaacggtagatggctacgaattgtattgcaggtgcttgcaag

SEQ ID NO: 83721 - DNA, 827 bp, Zea mays
  Clone ID: MRT4577_176367C.1
cattgggtacctcgaggccggccaaggctgcacatttgattctaaacgaaatccacacagagcgtccacaccttctccccttgagacatagccgcgaccacggagtcacggaccaaccatggccactcggcggctcacgcccgactgctttccttccctcctcgccggagttctggcagcctttctccacgccgccctccacgcgcctctcgccgttgctcaagagcgacagccgccgtggctgctctgcagcccccctccagacagcggcatcgccggcaactacacggagaacagcccgtaccaaggcaacatcaacctgatctcagccaccctccccaagaacacctcgtcgagcccggtgctgtacgccaaggaccgcgtcggctccgtcccggacatcgtgtacgcgcacgcgctctgccgcggcgacgccaacgcctccgcctgcgagagctgcgtcgccaccgccttcaagggcgcgcagcaagggtgcccgctcgtcaaggacgtgctcgccttctacgacctctgccagctccgcttctccaaccgcaacttcttcctggacaacgacaacttcatcaccgcgtactacctccagggctccaagctcgccgcgggcacgggcacgggcacgccgatgggggcgttcgacgccgccgtcctactgcttgtcaacgcgaccgccaactacgccgccgggaactcttccaggagattcggcaccggagagatgggcttgggcgatgacaaccgcaccaggatctacgcgctggcgcagtgcacgccggacaccgcgccggacatctgccagacctatctac

SEQ ID NO: 83722 - DNA, 691 bp, Zea mays
  unsure (1)..(691): unsure at all n locations
  Clone ID: MRT4577_176368C.1
tggcgaaccttttggtgccaccgggagactttgcccgtggcgctccgggcgcaagagggggacatcttcctttaaaaagggtcgaccccctgggtagaagtcatgctttgctcctcttgcatccttcgcgccctcctgccttctgggcctctagatggggtgcgccgatgttcactggagggggacgcgtcggagccatcccctccggtggtcctatcgtcagagagcttgtgaccgcagttgggctaccaattttgtcttccttttgctgtcgttagaggagtgcaacctcgtgagggtcagtgctcttccgtcatcactcggcttcaaggattttcatcatgcagcccggctgcagtcccccaccagtggccatccagaaggatgaccaccagcctcgcggtggggagaagcaagccgggttgtggcttccccctcaccctcagcttcaaggatgttcatcatccttgctggggcgggggcgagccaagtcggggccctgccctccgcttgggctggcgacccgcttcttcctccagcattcgaaggagaagggtgtttaccagccttgcggaggacgcgaacctcgactacgcggngccggctggctgcaggccgtcagctgcagagtgtctggccctttgggctggacggccttggcaccggctccgatgctgcctcctgccgctct

SEQ ID NO: 83723 - DNA, 158 bp, Zea mays
  Clone ID: MRT4577_176369C.1
ttggagtatgtcgagccggaagagtgtgggcagacattgagggaatacatgctgaagaggtgcccggtcttatttttcgaacaggtcctcggggtgttacaccaaggatctcagtgaatcgccaaaaactgattttgcataatttgatcatgattcat

SEQ ID NO: 83724 - DNA, 262 bp, Zea mays
  Clone ID: MRT4577_17636C.1
cacttcttccccggacccacggggggttttttattaaaccggggatcccaaggctacgacaggagcacttacattactacaagagaatgctccacctcatatgaccccccctcatcacttgatgagaagcccacatgcacttgcttcagacaggaccccactctacagtagggtaaaaccgctcgaccgtggttaacaacgcgcacccgatggcacatgagtcattgcgctctatgcaactccggatccatggtacacccag

SEQ ID NO: 83725 - DNA, 433 bp, Zea mays
  Clone ID: MRT4577_176370C.1
gcattttctcgaggaccatgatacacaatttgcccctcacataaaagtataatgtcatcaaataattccaatgtctcaggaggtggttgcagcaaggaaataaccattgtgagatccatcaaatgggccatctgttggagaaacttcatgatctcaaatgtcgtggagctatctagacctgttgatatatcatccataaagaagcatcttgctagaccaaccagcatctcccctgcattaaacaacatcacgttaatgtatgccaacttaggttaggttccagttaagtatatctttactctgttccttattctaatattctggttagttaggcattcaattttagagctagtcattattcgttatcatgaagattcctgccctggtaagaaccttttgcgttcttgaggtggtggaatgtcagttaatgtgg

SEQ ID NO: 83726 - DNA, 380 bp, Zea mays
  Clone ID: MRT4577_176371C.1
ggagacccgggagtatatgacaaaagtttattcggtcaggaaaagtttaacatgcaagccctttatttttttaaaggcaagccaacaaacggctatcgagcggacccctcactttattcaatcataaaccctcggatcattcggaggccatcttcctcggggggggccgggactggctgaaaacaaaaaaaaacaaccaccctgaacctccctcggggggaaacttgcaaaggaaggaaaaaatttccaaaataactggcccggccttttcctgccggacaaaaaggggccccccgaagatccaaacctgaaggattggaaccatttccttcaaagacccaatgatgagagacttccagaggaccaaggaccgcaggtcg

SEQ ID NO: 83727 - DNA, 269 bp, Zea mays
  Clone ID: MRT4577_176372C.1
ccacccccaacacattcaaaaaaacggtggggccaagtaaagggaagcattttggcggggttcccagggccagttttttttggagccaaaagggctgggggggaaaaatctgaaaacgggtttaaaaaaaggaaaaaccctagcagggggaccttgtgtacttccaaaacttttactggtggggtaacttcaaaaactttgggcattttttacttcaaaaacgctttggcacttaaagtggggccctgaatgaaaagctttccgaaaaa

SEQ ID NO: 83728 - DNA, 413 bp, Zea mays
  Clone ID: MRT4577_176373C.1
cgctgtacacagagctatagatcgtccgcatgcgacgcgtagcgtacgcttgcaccctgtcgagcgcccgacctggcggtggaagccgcggcggtgcgacgcgccgaggttcaccgcccgcgccgcgctggagcggctgcgcgggaagcgggtcgtgttcgtgggggactccatgagccgcacgcagtgggagtccttcatctgcatgctcatggccggcgtggacgaccccaagacggtgtacgaggtgaacgggaacgagatcaccaagacgatacggtccttggcggtgaggttcgcgtccttcgacctcaccggggagttcttccgctcggtgttactcgtccaacagcgcccgccggcgaggtacgcccctaagaggggcaagtctaccttggggtttggacaggttg

SEQ ID NO: 83729 - DNA, 265 bp, Zea mays
  Clone ID: MRT4577_176374C.1
atccggaacccgtgccccacccctaaaacccagacccgtaccatccagactcaaaatttttccaataataaaccaaaaaaaaagcgggcaccaccatgggcaaaacctgctacacagcaaaataatttaaccgtaaaaaactaaaaaaaaaaaaaaacccgaaaaaaaaattttaaagcccggggtcccataaggggggacaaaccaaaaataattggctcacccccccctccccattaaaaaaaaaaaaacccatagtgccatt

SEQ ID NO: 83730 - DNA, 1439 bp, Zea mays
  Clone ID: MRT4577_176375C.1
atttcgcacaggaagaggggatggggggggcaccccaaccaggggcaccacgcacgaccaaggcaccacttcgccatcgcccggctccacccacgtctcggcttttgcttgcttgcttcctcctctcccgtcgggcactcgggctcgtcagactgcgcccgggcgccgaatctccagacgggatcgcgccccccatctgacgccaccggcgccggagcccacggcgaccgcccgcctctgcctccgatctaaaagaaacattggagaaccgtactgaacaaaataagtactggtatttcatcgtttgtctcggtattccaataatgtggaaactcaatccctttggaggtaaagcacagagtgggttggatggtcgtactattgatgttggaaatttgaagatcacagtacaaaatgccattgcacaaggaggtttctcttgtgtatatctggcatgtgacacagtacatccatcaaagatgtatgcactaaagcacattatttgcaatgactcagaatcgcttgatcttgtcatgaaggagatccaggttatgaacctcctcaaagggcatcctaatgtggtcacacttgttgcccatgatgtttttgacatgggtcgtacaaaagaggcacttcttgtaatggagttctgtgagaagtctttggttagtgcaatggagagcagaggtagtggttactatgaggagaagaaggtgcttttgattttcagagatgtctgcaatgctgcctttgctatgcatggacaatcaccgccaattgcacatagggatctgaaagctgaaaatgttcttcttggttgtgacggtgtatggaaaatatgtgattttggaagcacatcaactaatcacaaatgctttaacaaaccagaagagatgggcattgaggaagatgtcatcaggaagcatacaaccccagcctacaggcccccagagatgtgggatctctacagaagagaagttattagcgaaaaagttgacatttgggctttggggtgccttctatatagaatatgctacttcaagtctgcatttgatggagaatccaagttgcagatactcaatggcaattatcgtatccctgagcaacccaagtatagcactgctgtcacagggttgatcaaagatatgctggaagcctctccaaattccagaccagacatcacacaggtctggtttcgtgttaatgagctgctgccgcttgagttacaaaaaagtttacctgacggaccttcgccagccgtttccttgagtttgcaagatgaaggtgctcataaaagggcacatgtgatgcctagaaggaaccctccttcaccttcaagagagcaatctaatagttctctatcgcatggaagctcaaaggcaggagatgcacccttaggtgcattttgggcaacacagcatgcacaaggtgctcaagct

SEQ ID NO: 83731 - DNA, 270 bp, Zea mays
  unsure (1)..(270): unsure at all n locations
  Clone ID: MRT4577_176376C.1
agcgcattcacaaacacacctttcttagcgcactaactacaacctaacagcggtggctaccaagatatcatccctccctgcgctctttgcgcattttgcgagcgcaacaaatgcgtccatcannacacaaagctcactagatcctagttccattattccacagcccctcccaccagatactttaatggcctgagaacacccatctgtgcatgtctataggttacaacaatcgattgcggcgagcctctcacaacaaccaattgcccaatt

SEQ ID NO: 83732 - DNA, 542 bp, Zea mays
  Clone ID: MRT4577_176377C.1
cggttgaatacctagatttcacttttttactgggccgagttgaggtatggcgcgggccatacttggccataacgggccctccgcccctgctcatcagaacggtgcagaatcattatcagaaacatttggagaaccatacccaacaaaataagcaccagcatttcatcctttgtctcggcattccaataataataatgtggaaacgtaatccctttgggggtaaagcacatagtggactggatgggcgcactattgttgttagaagtctgaagatctcagtacgaaatgtcattgcacaaggaggcttctcttgtgtatatctggcatgtgacacagtacatccatcaaagatgtatgcattgaagcacattatttgcaatgactcagaatcacttgatcttgtcatgaaggagatccaggttatgaacctccttaaagggcatcctaatgtggtcacacttgttgcccatgatgttgttgacatgggccgtacaaaggaggcacttcttgtaatggagttatgtgagaagtccttgtgagtg

SEQ ID NO: 83733 - DNA, 639 bp, Zea mays
  unsure (1)..(639): unsure at all n locations
  Clone ID: MRT4577_176378C.1
atcaactaatcacaaatgctttaacaaaccagaagagatgggcattgaggaagatgtcatcaggaagcatacaaccccagcctacaggcccccagagatgtgggatctctacagaagagaagttattagcgaaaaagttgacatttgggctttggggtgccttctatatagaatatgctacttcaagtctgcatttgatggagaatccaagttgcagatactcaatggcaattatcgtatccctgagcaacccaagtatagcactgctgtcacagggttgatcaaagatatgctggaagcctctccaaattccagaccagacatcacacaggcaagagtttgattgattggccattcatctccatgatactaggtctggtttcgtgttaatgagctgctgccgcttgagttacaaaaaagtttacctgacggaccttcgccagccgtttccttgagtttgcaagatgaaggtgctcataaaagggcacatgtgatgcctagaaggaaccctcctccacctncaagagagcaatctaatagttctctatcgcatggaagctcaaaggcaggagatgcacccttaggtgcattttgggcaacacagcatgcacaaggtgctcaagctgcagataataggaa

SEQ ID NO: 83734 - DNA, 737 bp, Zea mays
  Clone ID: MRT4577_176379C.1
gggaaatctctgctgcggccttcaccccccctcgcttcagatctgccggcaatggcggagtcgccggagcagttcaggggccggtcccgcctcccccgcttcgccgagcccctccgctacgacctcgtcctccgccccgacctcgccgcctgcaccttctccggctccgcgtccgccgccgtcgccgtgtccgcgcccacccgcttcctcgtcctcaacgccgccgagctcgccgtcgaccgctcctccatccgcttccaggactgggcgccgacggaggtggtgcagttcgaggaggatgagatcctggtcctcgggttcgaccgggagctgcccctcggcgagggcgtgctcgccatggatttcaccgggaccctcaacgaccagatgaggggcttctacaggagcaagtatgagtacaagggggaggcaagaaacatggcggttacacagtttgaagctgctgatgcacggcggtgctttccatgctgggatgagcctgcatttaaggccaagttcaagataacattggaggttccagctgaactggtagcattgtccaacatgccggtagttaaggagacagtctgcgggcctctgaagactgtctattatgaggaatctccacttatgtcaacatatctagtcgcaatagttggttggtttgtttgattacatagagagctcaacattagaaggcaccaaagttcgtgtgtatacccaagttggcaagacta

SEQ ID NO: 83735 - DNA, 350 bp, Zea mays
  Clone ID: MRT4577_17637C.1
ttgtcgcgtgggcggacgcgtgggtaaagatgttatttctccgaataaaatacacactaaattacaacaaggtatgctactgtttggagtggtgcgcgttactgattttattcgattggtacccgtagagctgcctgttgtagttttgggtgctgggttctggcagatccacgaggctgttattgatcttgatgctgttgttgacgcgagctacggcgtagcattgcattggtcctggccatctataggatcttggagtgttacgtgtctacgttcggttacttgggtgtctggctgtgcttgtgcaggatatccggttactttatcatgttcacggagtgcctgataca

SEQ ID NO: 83736 - DNA, 460 bp, Zea mays
  Clone ID: MRT4577_176380C.1
agaagagaatacgacctacaccgatagcaccatgatgagtgtacaacaacagccagctcaggcaaactggaataacggtggaggatgaaaactgtgctcacttgtgcgacaccagatactgccttttacggcctgtatttcgtgaactgtgtcccctaacggcacccgatcgtcaaggccttcttatacacgaagacctgtacggagtattgactcatggcatgattagggctctgctatagtgataaaattatgagcatccattaatgcgcctgatgtacatattgctcaaaggaagtttggaaaatgctgatattttgatggagccggcttaaccgtacaactcgttgcattgcctaaaagtgctcattatggcgcacttagtaacgaaactggaagccacactgtttctaagcttctatcaaaagtgacatgtgcacaggccttagaatgatggtct

SEQ ID NO: 83737 - DNA, 348 bp, Zea mays
  Clone ID: MRT4577_176381C.1
atcaaaatcacttctattgaaaaaagcaaaccctaccccctcttctccccttctctcgacggcgccaccatgccgcctccgccctcaaccctagccgccagggcaacaacagtagcaccgcagggcgtaggtggcagagcagggacgcggattccgactgacacttcgtcgtcaagctctcgccatttgtaactccttgctccgccgacctcgacgcaaactacaacttctcgctcgcgcctatccaggatccgctctcgccatggtaccgccctttttctcggtctgtgaatccacccccatctccctgctccctcctgcatttgttgtggttcttggaagcaggtt

SEQ ID NO: 83738 - DNA, 408 bp, Zea mays
  Clone ID: MRT4577_176382C.1
ttctatcctctataaccaccacccttttttttttttttttttttttttttttaaagagtttttttatttaagatttttacccacataaacaaataaaccaccccccaataataaaacttaacaattcacaatgtaacaactatttactcaaccacattattcaaaatttatcccaaaattaaacatctaatttccttttttaaaaaacaaacccttaattaacaacaagtcttataatttcttcttatcaccacccttactaacctttacacctatcctttccttcttctccacactctttataactccaacaacaacccttttttttatttcacacacaataaacctacccattaaaagatcctctcaaaatacctccaccaccaattaccttattaaaaataattt

SEQ ID NO: 83739 - DNA, 122 bp, Zea mays
  Clone ID: MRT4577_176383C.1
ctcgagtcgagcagcctgatatagctgagaggattgctcgctctccgcgctacatacgagcgggcctgaagattgctggccgctgcttatgcgatggtgagtgagttgtcgctctgcgatgt

SEQ ID NO: 83740 - DNA, 304 bp, Zea mays
  Clone ID: MRT4577_176384C.1
tctttcacgcgtagggtgacgctctggtcgtcgcgcgatgcgtattatgcttagcgggctggctgtaatgctctgggacacaccccagcgttattattggtgtatacaccagcgagtcataggactgcgtgcgtggactgcaccctgataaagaactacaactgccataaagccatgaactcgagaaacgcccacttgctcgacccatttgggtgaccttctacgtaaccgggatgagcaatcacagctcgtgaaaagttctcgcaaagtcgggtactttccaatattagccaacaaaaggttg

SEQ ID NO: 83741 - DNA, 314 bp, Zea mays
  Clone ID: MRT4577_176385C.1
gacccacgcgtgcgcgcgcaggccagtgccgcacccataccttatctccgccacatatcagtcgtgggtccggctaactgcactggacgggactgcacccaatggccaccacggcgaccgaggccgacaaggctccaccgcctcatgaccagcacgccaccggcaacggccacggctagcagaacacgcgccactgcgcggtcggccacaacagcctgctcaagagcgacgacctgtaccaggtaaacaagctgagcgcaatgagtggatgaatctgacccgcatctcagcctctgaccgccgggcaagaatga

SEQ ID NO: 83742 - DNA, 420 bp, Zea mays
  Clone ID: MRT4577_176386C.1
ccgtaggacgaagcagaatcctaccgacgtcaagtcttggaacaagcgggcctaacacggtatagaggggggagccgagacaatactaatagacagagagagagagaaagaatccccgggacgcaacagtgctgtgttgtctgtctacgtgtatacgcacgccatgtgtatcgagcggagcatttacgatgtaaaaaccatatccgtagtcggtacggtactccccattatttatcgactatttgacgttccatgctgttttcgtacaacatttgaaacatatgtatagtattaacggaccgctgtttacttgcaccgggggaaacaaaattctacatactatttagctgcattcacctctgctgtcgctaggtactgatgaacaataaaacgatactagagatcagttatatgattcat

SEQ ID NO: 83743 - DNA, 241 bp, Zea mays
  Clone ID: MRT4577_176387C.1
cttcagagcgtgagcgctacacgctctcactggcagcaaggacaggctcctcaacgacattctacaggtgctgccgtcgaatcagacgctcacgccgctacccgacctcctcctccccacgcgcacacccacatcacgtctgccatacccaacaacgcaactacacaaatctctacccaaagacaataatacccatgactagtttcacaacttctgttgataaagcacactgcccataaaa

SEQ ID NO: 83744 - DNA, 439 bp, Zea mays
  Clone ID: MRT4577_176388C.1
ggccgctcgaggggccggccgggccgtgcctaaaaaaaaaaaaaaaaaaaaaaaaaaaaaaaaaaaaaaaaaaaaaaaaaaaaaaaaaaaaaaaaaaaaaaaaaaagatcggcccctaccgggcgccccccgatataaaaaaaatcgctacccccgggaatgcatacaataaaaactcaatgcgatggctccggacctaatgggggggggggccgggcaccccacccgccctaaatgggggggaatttccgcgcgctgacggggggaaaactttgaacgttaccgcctggaaaccccctggagcaaccccacttaattggcttggggtacatcccccttacgccggctgccttcggacttgccaggcccggaccggccttcgtgaccaatgggggttccgaatgaaagaagattggaaaaattcccccctaaatttttg

SEQ ID NO: 83745 - DNA, 897 bp, Zea mays
  Clone ID: MRT4577_17638C.1
atgttgaagcctgaacggcccttgctggggaaggttttcagacaaggattttactggccaaaggcagcttcggatgcagcagacctggttcaaaaatgtgaaaattgccaaagatgtgcaaaggaccagaaacaaccttcgtctctaacccagttaatacagccaagttggccactgcaaaggtggggtttggatttgttaggtccgcttccacctgcacaaagaaatttgaaatatgtcattgtagcagtggaatatttctctaagtggatcgaagcaaagcccttagccacaataacttcggccacaatacagaaattcttttggcaaaacattgtttgtcgcttcggcgtactgaaggcaataaatgtggacaatggaacccaatttgatgccgaaacattcaaagatttatgtgaccgaattggtacaaaaattcattttgcattagtaaggcatccagaatcaaatggattagtagaaagagcaaatggaattataatgacaggaataatgaagttaatcttcaaccagcccagaggaaagtggccagatgagttgattaaagtggtgtggagccacaacacaactgtgtcaaggtcaacaggttttacacctttcaagcttctgttcggtgacgaagcaataacaccagaagaagcaaagacaagatcaataagaacaacagcttcggtggaggacgaagctgattatcaaacaacaaaagatactatagaagggaccagacttcaggccatagaacacgtcaataaatatcagcccgaaacaataaaatggcatgataggaaagttcaattgaaaaacatcaagccaggacatttggtgcttcggagagtggccaacccagatacagtgggcaaattacaactgaagtga

SEQ ID NO: 83746 - DNA, 433 bp, Zea mays
  Clone ID: MRT4577_176390C.1
ccggcccggatctctatcaaatttcacattctttccaataaatctctcaaacaacacccacaactcaaaatgaagctgaacttcctccttaccgcggctctcgttgctgctcctgtcatggccgcctcaagcactacaacatcgactgagaccgccaaggcgaccaagaccagtgccgcctccaagacctccaaagccgctgctgctcctactatgggtgtcgatatgttgggtgttgcaggtgtcgctggtgtcattgctgctatggctctttaattgactgcctgacgcgtgtgctatgagcttagcgagaatatttttctgcgactcctgcatagttactttcttgactttattacaatcaatttacaaacgcactattaaaaaaaaaaaaaaaaaaaaacggaaaaaaaaaaaaaaaaaacccgcggcc

SEQ ID NO: 83747 - DNA, 464 bp, Zea mays
  Clone ID: MRT4577_176391C.1
gggaaaccaagatttcctatcctaattactcgaggtcgcacatcgtcgtggctgacccgtgtcattgcctagcgggatctgcggcattctcaagtggtgcggcattctcaagtggaagggacacgccatggccgggagccctgtgccacagcgcgaatgccgggaagggagctccgccatgctatcgcgcatgccgtgggcagcttccctggcgtcgtttctgtctctgcgcgaggtcacgagtcatctgaaaaagcaagttggtacctggaatctcaagtcccaggtcaagaacaggtaccgcaggatgaggcgcatggaggatgctacgatgtgttcgtgagaggtctaggtcatcgtctcccagtcaactttgggttgctggaccgtagtctccttataatgtaattatttatttattttgtatagaattcctattatatattaaagttgtgacattcgat

SEQ ID NO: 83748 - DNA, 380 bp, Zea mays
  Clone ID: MRT4577_176392C.1
ggactggcccggtcgacccaggcgttcgcggacgcgtttttctctgattccgccacgaccaaacagctcgtagtgctcgggagctagcccgtcaggtagctagacatggcgcccaacaaggtcgtggtggcacaccttgcggtgctcttagtgcccatgggtctacctgatgtcctctgattaccacgctctgacccaggacttatgcggcgtgaacatgtttctgcacgaaacgccgtacggctacccgtgcaagcccaaagggattagggagctccgacgacttatactgcgacgccttggccaggcctggcccgctcatcgaccccttcaacaccagactggcctccgtcaccggttaacagcttcccgggctgaat

SEQ ID NO: 83749 - DNA, 172 bp, Zea mays
  Clone ID: MRT4577_176393C.1
ggcacacatcagactcgtgacagcagaaatgcacacgccctgtgtgagactcctgtcgaactgcgactcctgaagaactgctccgcagtacactatgtcactagcgatccacgtgagcaaaccctgtctccaaccaagtgagttgggaggacagacagagctctgctgcttc

SEQ ID NO: 83750 - DNA, 994 bp, Zea mays
  unsure (1)..(994): unsure at all n locations
  Clone ID: MRT4577_176394C.1
gaattcaggagctctttgatgcagcagatggtgtggagtagtagtggcggcggtacagacagcaagaatatgatgagtagtagtttgatgccttgtgccgaggagcaagaagaagagggctccaacaagatgccccctttatcttctccttccatgctcctcctcccgcagcaccacctccaaatcttctcgggcctgcctctgcctctgcctcctgaggtgctgaacgacagctctgctacttctgatctgcatgatggccgggaaagcagcatgccggagtcatggagccagctgcttcttgggggattagtcggagatcacgagagatacaacgctgccacagctttactgtcaaaaggattagaggagcgacctgcagcttacaattgctatgaccctggacatggtggtggtgaggagatccagacaccggggaccaacattaggtctcatcaggtgagccagacgctcttagcgtcgtcctctcctaggtcctgcatcaccacaagcctcggcagcaacatgctggtgtcaacagacaccaccgtgccgccggcaccggatctgaagaatcatcactccgataactcttctgagggtaacagcgctggaagtggttcggctccaaagaaggctagggttcagacctcttcttcagcacagtctaccctaaaggtaagaaaggagaggcttggggatagaatcactgcacttcaccagatagtgtccccatttggcaagactgacactgcctccgtcctacaggagactattggctacattagattcctcctgagtcaaatcgaggctctcagcttcccttacttgggccatgacaacggggactccatgcaacaacataatactaataacttgctgctaaaccatagcactagcgatgccatggtacaagttcaaggtcctccgatgaccatcanggaggnggaggtctatggcaatggcattgangagggcagcaggaaggatttga

SEQ ID NO: 83751 - DNA, 211 bp, Zea mays
  Clone ID: MRT4577_176395C.1
caacgaggctgtcctaaattatgcacaattatctttataagccagtcattcataatggccgtagggtcatactcgtccagatagcgaccaaatagactgatctaccagttcgagatactatatttctcctcatagatgcaactcaaacctactttgtacgatctacagcaaggcttactcagtactatgacgcatactatgaatccatcta

SEQ ID NO: 83752 - DNA, 313 bp, Zea mays
  unsure (1)..(313): unsure at all n locations
  Clone ID: MRT4577_176396C.1
tggtcgcgtggttccaccagaatggtggaagactacgcttgattggatgtttagactgaggtcagagcagacatgcatgctagctgcgtcagccgcttcgatctagctcaccgtcctatatgagccggggtactgtgtngtgtgtttgcattttattgtccgaaactcagtatgggctaaaggggggaataatcaggagtcaaatacaccggtggtgttgagtgaaggcacttcggtcctgctccaggtgtgcctgtctgtgccgccgggccttatgttcgctcggagggtcggacgtttgagacggcgagag

SEQ ID NO: 83753 - DNA, 286 bp, Zea mays
  unsure (1)..(286): unsure at all n locations
  Clone ID: MRT4577_176397C.1
aaaacccacgcgggcgnncacgcgnncgcccacgcgtccgcagacgcangggnncgacatttttttacagaacgacccgcgcgcgcaggggcagcccgacaagggcacccgcccgcaccgcgacaggnacggcgccgaggagcagaacgagaaccacgacacgggcatctacgacgccgaggagcaccccaagcacatccacggctaccactgcgacgtgcaggccacggggtacggcaactacgaacccgcgccgcgacgccgacaggtaaaacgtgggggaccc

SEQ ID NO: 83754 - DNA, 490 bp, Zea mays
  Clone ID: MRT4577_176398C.1
gggtcaaaaaagaaaaattttttttttttgacttaataaaaaccccagccaaaaataaatttttaatgaaaaacccacccttttcaaatttggaaacttcaagcaccaaaagtaaataccggttttaaaaaaccctttttttttcaaaatgtttaagtaaatttgatactaccggttttaaaaaaaattttggttgaaattcctaatgctaaaaaaaaattgtgccttatttttgaaaaaaaaaccctttttaaataaaaaaaattaaattcggtgggggcaccgtttaaattatttcaacccttaaataataaccgattttgaattccagcttttaaaaaattttggaattttcccctttttcattaccgtaagcaaaagttgaacccacctttttaaaaaaaaaaaaaacatttttttttgggtataaaaaagaaaaaaaaaaccttgcattccttttttttggtgaaaaaacaaacttttttaaaaa

SEQ ID NO: 83755 - DNA, 346 bp, Zea mays
  unsure (1)..(346): unsure at all n locations
  Clone ID: MRT4577_176399C.1
ttctctttnttttctttttatttcttcttttcttttattctattattatttttatttatttgtaacttattaacttctttttcaaatcaaaaaaaagacaccaacaatggagcgatgcctgaaaaaacactcgaaaagagggccccaccaaggaggggttaggggaaaaaacactgcaggttttttttttatccggcggtagaagggccgcactggtagaacgggaaaaagggtgccaacgtcacgcccagagggcaggtaaaaccagaacaaaggttgcttggtaaaaaaggcagctggcctcacaacacctaacaggctgaagggaaccagttggggtggttga

SEQ ID NO: 83756 - DNA, 402 bp, Zea mays
  Clone ID: MRT4577_17639C.1
aaaaaaaaaaaaaaaaaaaaaaaaaaaaaaaaaaaaaaaaaaaagggcaaccaatctggagtagccatgtttacggaggcgttcatccacccttatatctcttctatagggtcacctatattgaatccactggccaatttattacaccgtctttactagcaaaacccttgggtaacccaacttattccccttctaaaacatctccctttacacacctgttttaatagctaagaggcccgcacagatggcccttcccatcagtttctcaaactgaatggcaaatgggacgccccctgggacgcccccttaagcgcggcattaatggcggtgtctctcatggttacccgtacacttgccagttccctagcccccgctcttttcccttcttttctttcttttttc

SEQ ID NO: 83757 - DNA, 800 bp, Zea mays
  Clone ID: MRT4577_1763C.1
acctcgagcaggcacgcaaatacaagtagccgccgccgtgctcgtgctccagcgacctcgatggccatgcatcccgttgccggcgccggcgccggccccccgcgtcgtcggtccacggcaacgttgagtacgacgacttccactgggacgacgcagccgaggcggagcttcaggccttcgaggccgcctacgcctcggcttccgcctccgcaaagcgccgccgcttacccgactggacctctccatccccttccccctcctaccacctccatcgcagccaaaacccggtgtccagtggatccacgccatcgtggaccctcacgccccacacaccccaagacaatgtgagggcaagacgccaacaaatatcattcagcggtaagatagtttactgcaggacacctacagaggcggagaaagctgcaactgacatcttactcaaaattgagaggatgagaaccccaggccaggtttctcttggatttgatctcgagtggaggccctttccaagaagaggagaaccaccttgtaaggttgctgtaatgcaactatgcatggagaaaactctgtgctatgtcctgcatattgctcactctggggtaccgcctatactgaaaactcttttggaggatagttcgtccattaaagttggaatatgcatagacaatgatgcaaggaaaatgttgaatgactataatgtctgtgtacaaccactgatggatttgtcgaccttggcaaatgtcaagttagcttctcccaaaagatggagccttgcttctttaaccgaaatgatcacatgc

SEQ ID NO: 83758 - DNA, 1871 bp, Zea mays
  Clone ID: MRT4577_176400C.1
cattgggtacctcgaggccggccggggacacccatactgcgctcaccgagacaccgacccgcgatcccgacggcagctcccctccccctctccaggtctccactgtacgtctgaactgcatatcgcgcacgccgctccggtgctctgcaaccggctccaccccgcgctgctactcctcatcggcgccggcgcgtgcctgctcgggtacggcaccgcgtggctcctcgtctccggcgtcgcgcccgcgctgccttactggctgatttggtttgcgttatgtcttgctacaaatggtggtgcatggttggcgactgccgttctagtgaccaacatgaggaacttcccgctcagcagaggtgacgttgctggcattctgaaagggtactcgggtttaagtgctgctctattcagtgccctatacaccggagtgctccgtgattgacccatcaagctcttgctctctctcgctctgggaattcctgccgtgtgcctcctgggaatgtactttgttcagccctgtgaaccctctctggtggagacgaacgcagagcaagtccattttatgtttgcacaagtggcaagcgttcttcttggggtttatctggttggggctacaatattggatcacgtcgtggctgtcaatgacattatgaactatcctctgcttgtcgttatggttcttctcattttcgctcccctggcaataccattgaagatgacgctattcccgaagaaaaagcccccatcggagtcacactcttcaacagtttataatgatcagacatagctgcctttaccttcttcctccgaatgaaacctcgttcatcttgaagaacatgattccacagacatcgatgtcctcttagcagagggtgaaggggccataaagccgaagagaagaagaccaagaaggggagaggatttcaggtttcgcgaagcgatactgaaggccgatttctggcttctctttgcaatatgctttgttgggattggatctggaatcaccgttcttaataatctggcacagataggaatcgccgcaggtgctgtcgacacaaccatctcactctcagtcttcagtttctgcaacttctttggccggctgggaggtggtgctgtttccgagtatcttgtcaggtcaaggacactcccacgaagcgtcctggtcatatgcacccaggtagtgatgataatcacgtacctgctcttcgcgttgggccggctcgccacgctctacgtctccgtcgccttactcggcttatgctacggggtcctgctctccgtggtgatctcgacctcgtcggagctcttcgggctgaagcacttcggaaagatatacaacttcatcacgctggcgaaccccctgagccccccggccccgtgatacaaagccttgttgttttctgctgctagaataaaaatccggtatggcctctctgaatagcttcgttaatggcctgctgtagttcatgagcatgcacgctagtcttgtgctctgtggcctgtattttttggggtccttcttggcctaataggaggagggagcgatggcctcgtgcagcagcagatgcttgctcccggtttagccgccgacgccgaggcccgagttttagggggtgtataattgaaatccctacttattatgtagaacaatgttgcttgtatacgacacgggtttaccggacattttggcagatcgcatatggtacggagacgaatttgcattttttatctcgtaaaaaaaaaaagcaaggggacatggatgtatattcacttgcagttaaagctgaaacaacattgtctgttgatcacccaccagaaggggatgaccaaaagaatgataacttctaactcacagaatcaaccaaggc

SEQ ID NO: 83759 - DNA, 749 bp, Zea mays
  unsure (1)..(749): unsure at all n locations
  Clone ID: MRT4577_176401C.1
taccctcgggctttccgggnaacccactttccccgcaccttttcccaccgccagtcctccacccacgcgtccgcgcgcacacggaccccaacccaaaccggcaaaccccagctccacgttcgcgctctactcgcacgcgctcaaggtcgccctcggcgccgaccagagccgcctggcgctgctcggggtcgcctgcgacgtcggcgagaacctcggcctgctcccgggggtgctctgcaaccggctccaccccgcgctgctactcctcatcggcgccggcgcgtgccttctcgggtacggcaccgcgtggctcctcgtctccggcgtcgcgcccgcgctgccttactggctgatttggtttgcgttatgtcttgctacaaatggtggtgcatggttggcgactgccgttctagtgaccaacatgaggaacttcccgctcagcagaggtgccgttgctggcattctgaaagggtactcgggtttaagtgttgctgtttacactgaaatatacaccggagtgctccgtgattcacccatcaaccttttgctctctctcgctctgggaattcctgccgtgtgcctcctgngaatgtactttgttcagccctgtgaaccctctctggtggagacgaacgcagagcaagtccattttatgtttgcgcaagtggcaagcgttcttcttggggtttatctggttggggctacaatattggatcacgtcgtggctctcatgacattatgaactattc

SEQ ID NO: 83760 - DNA, 1261 bp, Zea mays
  unsure (1)..(1261): unsure at all n locations
  Clone ID: MRT4577_176402C.1
gtcgacccagcgtctgcccagcgtccgnttcacactcccgagcgagggggggtggtcacacaaaaccactttgggcttcttcctccgaatcaaaccttggtaatcttgaagatgataccacagacatcgatattctcttagctgagggtgaaggggctataaagccaaagagaagaagaccaagaagggggaatgttggggtttcgtgaagcaatactgaaggccgatttctggcttctctttgcaatatgctttgccggcgtttggatctggaatcaccgttcttaataatctggcacagataggaatcgccgcaggtgctgtcgacacaaccatctcactctctgtcttcagtttctgcaacttctttggccggctgggaggtggtgctgtttccgagtatcttgtcaggtcaaggacactcccacgaagcgtcctggtcatatgcacccaggtagtgatgataatcacgtacctgctcttcgcgttgggccggctcgccacgctctacgtctccgtcgccttactcggcttatgctacggggtcctgctctccgtggtgatctcgacctcgtcggagctcttcgggctgaagcacttcggaaagatatacaacttcatcacgctggcgaacccggtcggcgcgtacctgttcaacaccctcgcggggtacgtctacgacctcgaggtggagaggcagcacgccgccgcggcggcggcagggtcggacgtcgtcgcgtgccacggccctagctgcttcaggctcacgttctgcgtcctcgccggcgcggcctgcctgggcacgctgctgagcacggtcctcaccgtgagggtccggcccgtgtaccagatgctctacgcaggggggtccttcagccagcccaggaactctgcgcattgaccggcggtgatacaaagccttgttgttttctgctgctagaataaaaatccggtatggcctctctgaatagcttcgttaatggcctgctgtagttcatgagcatgcacgctagtcttgtgctctgtggctgtattttttgggtccttcttggcctaataggaggagggagcgatggcctcgtgcagcagcagatgcttgctcccggtttagccgccgacgccgaggcccgagttttagggggtgtataattgaaatccctacttattatgtagaacaatgttgcttgtatacgacacgggtttaccggacattttggcagatcgcatatggtaccggaaccaatttgcattttttttctcg

SEQ ID NO: 83761 - DNA, 305 bp, Zea mays
  Clone ID: MRT4577_176403C.1
gcaacacgaaccctatcgccgtcgtatctgaagccatgggtatcgaactcgatgccagtgggaggaacaagatgaccaagcacacatcgccaaaaatcgaccatgtttatgtgaagcttccagtcaagctctaccgattgttggtcaggaggaccaagagcatacattaatgctggagttgtcaacaggctattcatgagctaaaccaatactccaccaatacctatgcgccgtcttgtcaagctcatggaacgaaaggagataaacattgctgtgattgactggacaatcacagatgacaagag

SEQ ID NO: 83762 - DNA, 258 bp, Zea mays
  Clone ID: MRT4577_176404C.1
caaaagccagtcaaaaccacatgattttatccacacatttgcctgcccgacacttatttactttatttttttcctctaagggtcatggaccctgattaaaaagaccacagttcccatggctacctttgtttgtgttcataagagctaacacatgtatagcttggcttgttatgctgtaaaattgtttaacaaagacctataaagcttctttacaatgggcggggcccctgttggatttatgtttttgcaggggttgtt

SEQ ID NO: 83763 - DNA, 777 bp, Zea mays
  Clone ID: MRT4577_176405C.1
cgcattcccctgcctcgcccttccccctcctatttaccgcccgcgtcgccccccgccgcacgccttcccacccccgcgcctcactcttccggcctgctccccgacgccggggggccccacaacgatccggccccggccccgcgcggtcacagcaagccgggacatggcgcgcggcggcatcgcccgcctactcgccacgctcctcctcttcctcctgctcgccacgcccctcgcagacggagcttccgaggcagaggcggcgggcctcgcgcagggcgcgtccgaggcggcggcgccggacgcgggcgcggacgcgcagcagcagcacctcctgccgcggcccctcgtcatcgagctcccgtcgtcgcgggccgaggacgaggacgagcccggcgccgacgccgtgccgccggacgtgcgctgcgccagctggcggctggcggcggaggccaacaacctcgcgccgtggagggcggtgccgccggagtgcgcgccgcacgtgcgggactacgtcaccggcgtcgcctaccgctccgacctcgacctcgtggcgcgggagtccgccgcctacgcgcgcgccgctgcgccgctcggcgccgacgggcgcgacgcctgggtcttcgacgtcgacgagaccctgctctccaacctcccgtactacgccgagcacggctacggggctgagttgttcgaccaccacaagtttgacgagtgggtggagaggggcgaggcggccgccatcccctcgagcttgaagctgtacaatgaggttcgcga

SEQ ID NO: 83764 - DNA, 185 bp, Zea mays
  Clone ID: MRT4577_176406C.1
attttctcaatctgatctagtcattcccactaaacaccaactccctactctatccatttacctattcaccatcctcatcatcactctcctcaccctcttcttcacctccatttccactacacaatccacttcctattatcccaatcacactccaacaccaacaccacccattacttatctttctc

SEQ ID NO: 83765 - DNA, 362 bp, Zea mays
  Clone ID: MRT4577_176407C.1
tgcaaatcggcgacacaatctttgcatacggcggttccgggtttgtcatttcaaaccctgccatgcgcaaaatcgtgcagtatctggacgaacagcctcaaaacgagatcgatgactacaccgcgacgcaatgggcgggcgactgtgtgctgggtaaagtgtttgctgatgccggcgtgggtttaaattggtcttggcctatgttgcaggacaacaggccgtgggaagtagattattttgcaactgtgggcgataaacgtgcgtggtgctttccggctgtgtcgtatcatcatatgcagcctgatggtattcgggcgttatatgggtttgatcgggagtggtttaactcggataattcaagc

SEQ ID NO: 83766 - DNA, 437 bp, Zea mays
  Clone ID: MRT4577_176408C.1
ataggaagaaaggaaaattactttcccctgagtttgataactgggaacgtgttgacacatttatagctgcactaaagaagatcgaatcatggatattttctcgaattgttgaaaccctttggtggcagacattcacaccacatatgcaatctgctgatataactggtggtttgagaagtactccaaatccaaaaaaaggctatggaaggattcctgttgtgggcaaccagcatacaagcaaccatatcaatggacatatggaagaaagcctttaaggaagcgtcagaactgctttgcctagtaagggcagctggtcatgagtgtggatgtttgcctatgttaaccaagtttgtcatgtagcagtgcatagctaggttggatgtcgcaatgttcaatgctatctagcgcgtatcagatgatgcaattctaacagatcc

SEQ ID NO: 83767 - DNA, 296 bp, Zea mays
  Clone ID: MRT4577_176409C.1
aaaaaaacaagccactgtcactcgtattaaccatctagagttcttcgaatgtccgaactgacagaattctcagtgcaaaaaaaaaaaaaaatattgtttgataaaggcgatccaccagctataacagactaagtggcctcttacaattaatattctgacatctactgtaaggtgacctgttgctgggttgttggttatctgaatactaattgcaagaggccacttcgtctgttgtagctggtggttcgcctctatcaccagagctcttgttaggtccggcgctaactatgcagaca

SEQ ID NO: 83768 - DNA, 356 bp, Zea mays
  Clone ID: MRT4577_17640C.1
ttgatatgtactctactgcatttatcgagcctatccctgcgatcgattttgatgctgagcgtcctaacagagctatctcagttcggccattggctgattctgctcgcgtgaagacttaaatagcgctacaaggtgctaaggttgcggcgactcacaagctaaacatgcgcagaaaatatcccatttctcgcctcacctcacaagcgacaagagagctatcattccctgctgacgatcgcgtttctgcaaagactgtggtgcaatcctccaaggaggactatggttttaagcatccagacaccactttaccatgcttgcatgtgggtaatcaacacctaccaacttatatgactatg

SEQ ID NO: 83769 - DNA, 529 bp, Zea mays
  Clone ID: MRT4577_176410C.1
ctgcttcttagccaccgcctgcctgtctatggaacatctaccagggtcccggcctcagtctccctgctgcatgagaacagacttactggagcaattctgactggcgctggtgacatttttgctggctggccatcaatggggacctgccttgctgaggtgaacacctaccagctatcttctgacctcatttagtacgtgacaagcgcgacacactcatactgcaatgacacaaactgatgcttgacaggccatcaaagcggagcagttaagtatggaaaatgtcgactgctcctttgagatacattgaatagcaagagctaattacctgcggtatcccatggagggcttagactgaacaggcaaccaccaaacaataggctactccagcagaatgcgctcaactgacacaaacacacctgtcactaccctgtgtataccaccgcacttgaaccatcttctgagaggagatgtcagaagtcacttgctctcatggccattgaaagacgacaggtcccagggctcatacctc

SEQ ID NO: 83770 - DNA, 104 bp, Zea mays
  Clone ID: MRT4577_176411C.1
gaggaacctgtcctacgggtaactagctcgtcgctctgatgatgattaaccatccgacccggcgtgcttaattaattaactcgcagtgaaactaaaattaatta

SEQ ID NO: 83771 - DNA, 375 bp, Zea mays
  Clone ID: MRT4577_176412C.1
attcggctcgagctggttcaaccagcttactttacgggcgacgcagtttctttttagagaggggattagtgctacaataaacctcttggggtgcactctcatgctccatcggtcggccataagaccacaagtctaatctgagaatgatgaacaactggtgtataatccttctgaaggaatattaattgtgtataatggggagaaacactttcaatgcgagcggtgctagagttgaactcctgtccggcacactgagcgacgcgagcaaagcgatgataaccctctagcaggcaatgtttttcaacaaacgaggcacgggtatcttactcactagcaaaatgacgtgccccgagcgcactagcctttccattgatg

SEQ ID NO: 83772 - DNA, 606 bp, Zea mays
  Clone ID: MRT4577_176413C.1
ccggccgggatcgacatatcatcagtctccgacagaagaggacaccgatccccagaacatagctcgcgatctcggctgcgggacccctccactccttacttcgacctgtactgccggtagctccccgggggggcgaatggtgatggacttgcccgctgacgacgagccgatagcgcgcataacttccgcgagctgcgtgctctccagaacgatgcggggaaggccgataagcctgtccactagaaggcgatccaccttcaacggcagcgttacctatctcatgcggcaatggggctgcttcactcgcgcctccgcgaccggcggggagtccatctacggggatgatgtccccgacagataggttgctgtgcaagtacatcgtccccgtggtgctctccatggtcaatgtcgtctgctacaccgacgtctcccacgtcttcatctgcaccgtcgcgaccccttgcgtctacggccaggacgacgacgtcgaccagctcgtcgagtacatggactgcgtgcaggacatcgagaaggagaccacccactgcgactgcatctcgaaggtgctccaggactctgactgctgacagatctcgtagatctcta

SEQ ID NO: 83773 - DNA, 405 bp, Zea mays
  Clone ID: MRT4577_176414C.1
caaccacccaaaaaacttttttttggaatacccttaaaaaagcaatctaaaagggggcccccccaatgatgggttgtgggaaggaggctgcggggtttgaaaaaacaggtgggacaaagggcaacatttgtggaatttgaaaaagggggggggggttaccccaaaccggggggtaaaacggcacaaccggtggttgggaaaaaaaggaaccccggttggctgaacctagcgggctaaaggggagaagttttggcggcggaaaaaaaccgggggggttcaggggggccaatgggtaaaagggaaaaatttgttgttgttaaaaaaaggcataccctaccgggctaaagggaaatagggggggcggaaaaaaagcagcggggttcagggaaaacagtgggttaaagg

SEQ ID NO: 83774 - DNA, 188 bp, Zea mays
  Clone ID: MRT4577_176415C.1
aagccctcctttttttttttttgggggggtggtttttcacgtaacgcaaatggtccctatgggaggagtttttttttttggcgcccccccgaattgaatcctttcatttttcccaaaaggggacgcggtgccccgggatttttcttttgtcccgggatttggaccgggcgccacaaaggggccctttt

SEQ ID NO: 83775 - DNA, 688 bp, Zea mays
  Clone ID: MRT4577_176416C.1
actggcaaccgaaaagacaggcgcgtaagcactcgcctatctgcgcgacgcacagaggcaccccttctgccttctctctgtatgtcgtaccaccgacggcgctacccgcttttgacaacaccatgagggcagtgcatctccgatccacatgcaccagaccgacatccatgccccaaacccgtgctgggagctggactggctcaagcatgtcattcaggcctgactggccaggatgcccagatgacaagaccattggaggaggtgatgatgctgtcaacatgcttcttcagcgctactggcgctgggaagcacgtgctcccaagctgcgtttatgttacaccattggcgcccacatgagcatacgagtgaagggagagagacgtggccactcgtatgcgccagcgtcttaccatccctggaggcaggctccatcaggtgggccaaggcagtgatggcatgacagaccacctctagctcagaggtcactacaccattgcaagaggacattgctgacctgtgccttgaccgtattaggaagctggccgatgatagtactggctctccagagcttactaccgttcaacgctgatgagggaggaacgagctctgcacttggctctctactcctggagcgcctgtctgctgactatggcaagaagtccaagctaggaattcaccgagtacccat

SEQ ID NO: 83776 - DNA, 342 bp, Zea mays
  Clone ID: MRT4577_176417C.1
cagctccccgagaagaagtccacaaatcaattgacacatgttatggttgcaacaagagacaacaaagaaacaacagaggccatttgccgtaagattggggttttcagccctatgaaggtcaaactggcatggtccggcatggatcctgccttgcccacctaggaggatgctacagctttgaaggaacgctccctgcacgcgtcggcttggggacaagccgcatttgaagacccggggaatgtcagcactgatgatccacaagagaaggagacgatggagctgaagactgacaaatgcgacgtggcgtgactccagcgtttgaggcgcgacaatatttgtgtg

SEQ ID NO: 83777 - DNA, 687 bp, Zea mays
  Clone ID: MRT4577_176418C.1
ggccgcttttttttttttttttttgtgcttcatttgaagctttatttctttttgtttactgattgtggaggccactcaccaggccagaacaggaaggtcacatcgatccgatccaaaaggtcgtgctgttctatatggataccctatagtactgcatgtggttacatctgtaggtcgtgcgatcacatctatataattgcttctctagtgattttctgcttcgccacagttctgcgtggctgccaccatctccatcaggtccatctcctccttcacatgcacggtctcgacatgagctgttccagcagcaggtccagcagtacacgcgagggcgtcgtcatcccacatcatcatcatctccatgtctatctcaggatcgaccttgatcgcatggtcgaagatgtagctcacgtcgatgtcatcgtccacagcgcagaaacggaagaaggcgtcctcgttcgtgccgtcgaaaagaccgccacacattccaactggaagttcgtcgcagattggtgcaagaagctcttcgctgggaagaagaacgccttgggaatccagcatgttggacggcgggctgtattcttccggtagcgttgttccaccggtctttgccgactttgctccgggagcttcaggcgacggtgtaggttcaggaagcggcgcagcgctcttgtcgctcgggccaac

SEQ ID NO: 83778 - DNA, 291 bp, Zea mays
  Clone ID: MRT4577_176419C.1
aaacccccaaacttcgcaggggcgagctcgatatatatgatgactagcatcaggacaaatagttttgtatcagggacacacgtacgggattgaccaggtgagcaccatgcatgggccatggatcatatcatcattatcagggcttcatgtgatgggaatggatcggagtacctgcttaaccacgatcagtacacacgtatttttcgggggggcggcggtttcccgggtgatggccgggccattaattaatagctcgagtttttgacgaacattccctccttgggctcgggg

SEQ ID NO: 83779 - DNA, 143 bp, Zea mays
  Clone ID: MRT4577_17641C.1
tttttttttttttggcagcaatgctggtttattccccatggccaccggggccgaactggtgcccactcatgcaaccattccggccaaacccaggccgtgggcagccaccctccgagacacctgggccgggggcagggtctcag

SEQ ID NO: 83780 - DNA, 453 bp, Zea mays
  Clone ID: MRT4577_176420C.1
acgtaagctaggatcctctatactcgacccaagcgggcgggcccgatcgctcctctacactttccacattacagttacacctacgcctacgctgccggtcgccgactacgaaactccgacagtccgaccacaagaaggatgactgaagaggataagactgctgcttcgctgagcatctttttggcccctaagctcaatgaaaggatcctctcttctctgtccattatggccctagccgctcatccgtggcctgatcttaagatcggtcctgatgctgctgctgctctcaatgttgtaagtaccagcattaccttagaaccgttagatgtgttatatgtttggtgctgtggggagaggggactcaagtggtctggaaccatccacgggaaggccgctgagatcacaaagggaagcaaagttaactctgagcttgacaagaaaactggactgatc

SEQ ID NO: 83781 - DNA, 224 bp, Zea mays
  unsure (1)..(224): unsure at all n locations
  Clone ID: MRT4577_176421C.1
ggagcctcggcgcggcacaaaaaaacctnatcttctgttccttatgctcggaacgcacacacagtcctggtgctccgatctaccgatacccacgcgttggcatccatagacgcagaaccattgtatagactctactggtaagactccacccatggagtgccgtcgtatcatgcattgacaatgcctaggtgaagcttcaggactagggaaggcactctaccact

SEQ ID NO: 83782 - DNA, 399 bp, Zea mays
  Clone ID: MRT4577_176422C.1
cgctatctctatctcacgcaggttcacaggcttaggaggcgagtggtagtcaccagccgctccggcacggacgcatctgacgcgccatgcgcggcggggatccagcgcaggtaccgctcgcacctccatctatgtggatccagcgcaggtaccgctcgcacctccatttatggtgcctggcccgggctccgtcgtggaggccacgccgccgaggagcaaggctggggccgcgcccgcgcccgcgcccacgccatgtcagggtcgtacccacgccggtggggagcagctggccatggcgtcagcggacgtcttcgagacaagtgggagatccaatgtcgcatgaccgacgaggcaccagcaaggcagcgatgcagcctggatattcgacctgtatcctgg

SEQ ID NO: 83783 - DNA, 180 bp, Zea mays
  unsure (1)..(180): unsure at all n locations
  Clone ID: MRT4577_176423C.1
acacgacgacaacggtccgggacctgcgacggtntgttttttttgtatgagaataactgcgtgtccaggggggaggatcagagcgcttgtattgaccatatgcgataacaacaccaccgtgaccaccaatcgataacattcccccgtcttcattcgaattttgtatgaacacacattcca

SEQ ID NO: 83784 - DNA, 219 bp, Zea mays
  Clone ID: MRT4577_176424C.1
ttctgacataagttgacggccaggggtaaactgtggaattaggagggctagatgaccaggttcatacaaattgagaacaccgtgtgttcgcacctggcggggatcttctgcctcaggaacacaccatattgtgcaggccgcccgagagggacttaaatgctttcggggcttatccagatgtggctgtacgacggtccccagcaaggacagagtacgggg

SEQ ID NO: 83785 - DNA, 252 bp, Zea mays
  Clone ID: MRT4577_176425C.1
gacgctccctgtaaccgcgcattaagcacgcgtggtgtggtgaatacgcccatggcgaccggtacagttgatagcacgctaacgcccgatgctttagctatcttacgttcctttataacaacatatgtcgggtttacgaacggagctgtaaaaagctggctggctttagggttctgatctactgctgtacggatgctgataccacactacacttgcttagagagaatgctgacggatggggccatcactgct

SEQ ID NO: 83786 - DNA, 1342 bp, Zea mays
  Clone ID: MRT4577_176426C.1
atcaccagtgagccgttcctagctctcacgcgtcctcgtcctagtccaggcctcggatccttgttaacctcgatctcgtgcagtcgtgcagcgagtcagtcatcaggctgcaatggagcgtccgtgcccgcggccggagccggcggcgatcgacatcacctgggtgtcgtgccgcggcgtcaggtcgtcgctcccgttccacacgccgtgcctctacgcgtccgtctccgtcaccccgtcgtcgtccgccaagaacgcgcacggccaccgccggccccaccgcgtgaagacgcccaccgaccgtgccggcggcgagaaccccgagtgggacgcaccgctgcggctctacctccccgagcccgaggcctcgccaacggcggcggagctggaaccggaagcgggcaagaacaagaacagaggcgacggcgtccttctggtgcggttcgagctcaaggcagaggtggccgtgctcggcgacgtgctcgccgcgtccgccgccgtgccggtgcccgacctcgtcgccgacgggcggacgcgccgcgtgtcctaccagctggcgggccccgacggcaggcagcccaatggcgtcatctccttctcctacgccttccaccaacggaacgccgacgccgacgaccaccaccaccaccagagcggcggcgatgccaagcttctcgtcgcgcccccctgccccacctccactgtgtccagtcccgtcgcgcagccaccgcccacgaccgcggcgccgcggctgtacccggcgatagagtggccgctgacggaggaaataccaatttaccatacaccgctactaccagtaccagctggggctgcggcggtcacgctcgctagctcgcggtactaccctcctccaccgtcgtcggcggctccagtgcagatggagccggttgcggtgtacccgccgccgttgccagagacgtcgtcctgcagcgtgtacccatcggtattgccggccagcgcgatgtaccccccggtagaccttgctccagtgagctgctatccgccggcatcaacatggaacgatcggtgtttgtacggctgaagtcatcgttcgtggttttggttttgtttatgatagattgatagtttaattgatttaccgttccttcatggctcgtgctgtccgcccgcccgcccgcccgcctcggcgttttagcggagccggcgcgcggcgtgtatagtttactgtaagcctggaggtttccatctatctttgcatgttagacagttagaggcgtgctcgttttataaatttgctccattttgttgctgggaacacaaagttgatttatctcttgtggttcgaacacaaggttgattt

SEQ ID NO: 83787 - DNA, 1578 bp, Zea mays
  Clone ID: MRT4577_176427C.1
cattgggaccctcgaggccggccgggccggagaatcctctccagtctccacccccactccacgaacacgattgctgcttgcctgctgctgctgcggctcgcggccatcagatccagcgccaccgatgccgccgcagccgaacgggggcaaggtgaccccgaacctggcgatggacgcggaggccacgcgcctgctcaacctcacggtgctccagcgcttggaccccgccgtcgaggacatccttatcaccgccgcgcacgtcacactctacgatttcaacatcgacctcaaccagtggagccggaaggacgtcgaggggtcgctgtttgtcgtcaagaggaactctcagccccgattccagttcatcgtcatgaaccggcgcaacactgataatctggtggaggatctcttaagtgattttgaatacgagcttcaacctccatatttgttgtaccggaacgcttcacaagaagtcaatggaatttggttttacaaccaacaggactgtgaagctgttgcaagtctatttggaaggatactgaatgcttacgccaaagtacctccaaaacctaaagtgccttccacaaaaagtgagtttgaggaactggaggctgttcctacatctgctgctatagacggcccccttgaacctccgccagcgtctgccgctgtagtccttgatacccctgatgaatcattaatcagttacttcagtggcgctgctagcattggaagtgtatcaaacgcacaaccgtctggaagagtgcacccatctactgagagcatcccatcttcccatgtgccattgatcgttccatctgctgcttcaacacatcaactgcccccttcagtagcttcaacagcttcaccattgcccgtccatggaactaatgcccacactagccggccaacaaatcttgtgacaccagatttctttgcgcctccaccatcctcttcagctccactggctccgccgggtgcatctgtggttcctactgcgccacctcttcatcccacttcggcggcatctattcaacgttctcagtatggcaccccactgctccagccctttccaccgcccactccacctccttcccttaacccctcacacagtgatagacttactgttacaagggatagagtcaaagacgctctacagagacttgttcagagcgacgagttcgttgatctggtgtgccgggaattgcagagatcacttgtataggctgcttgcttagtcttgtcgggagttttctggctcgtggcaagaatgtgcctgtaattttcctttgacttttttgcatgcttcccttcccgtactattgtataggtttgtgttagtgtattggtgtagagtactataggaatggttggtagtatctgtggggtcccttggttccaaatatccgtgttggcagtgtgagaagcggaagtaaaactagcctgttcaagaacgttggaatttgatgtgctttggcgtggacaaattacagcactgagattctagaaaaatttttttaattcttattaaaaaaaaaaaaagaaaaaaaaaaaaaaaaaaaaaaaaaaaaagcggcc

SEQ ID NO: 83788 - DNA, 387 bp, Zea mays
  Clone ID: MRT4577_176428C.1
aaaccagccggaacggatttattgataattaacactaaacagccaggccataaaaacataaaaaatacagggcccaaactgtaaccacataatgcaaacacggggcaacacccaccgatccctgcacttgtgttacacatatacaaaagccagctcaagccagatagacatactatgcagcaatccactgatacactcttttttctcactaaagttttaagatacagcattccaaggcaaacaagttacttgaggccaacatcctctagcacgcacatctgatactgccacatatcagactggacagtcacaacaagatcctcgccgctttcaaaccctcacttgatctacgccacaagagtctaatcagatgcgaagctaagatca

SEQ ID NO: 83789 - DNA, 644 bp, Zea mays
  unsure (1)..(644): unsure at all n locations
  Clone ID: MRT4577_176429C.1
aattcggcacgaggcgccgttgcctccaactccaaccagggtttcgctccttccgcagccgtcgggtgtgatccatggagaacagcggtggcgtcggtgaagggcgctcggagaatcgggcgggcgagaacggcggagtcgccgaggcagccactgcggcggatgagggagattgtgatgtggtggtggagggcggagatgaaggggacatgtcgcccggtgcggtggcggcgggcgatcaccagccaatggtgacgccgaacaccagagcggtgctggaaaccggacagcttgcggcagacaagtgggacgaggacgatactccccgtttcattgacgtggaggaaagctttgccgatgatgtgaatcaagatcacgtggaggagaatgccatggggcaatcgatcagggaatacgtgaccgcagctgttttggcttgatcgtaaaaggaagaggttagacaaggaccataacttttttgcaactcgtgataacaagctgaggtcgctgcacaatctgggagcgagtatgaagatgtaaaagatggacttttgggtgtatcaaagcanagagcagccagggaagagcacggaagatattgcttcctcacatagcaggccagggacagtcacacattctgcagc

SEQ ID NO: 83790 - DNA, 812 bp, Zea mays
  Clone ID: MRT4577_17642C.1
aacactccgtcactttgtttgcaaagctcctcctcgatcgatccatcgatcactgcaccggccggcggcaccgcgctcgcaggggctagccaacaagacggcagcaatggcggaccgtgaccgcagcggcatctacggcggcgcccacgccacctacgggcagcagcagcagcagggaggaggcgggcgcccgatgggtgagcaggtgaagggcatgctccacgacaaggggccgacggcgtcgcaggcgctgacggtggtgacgctgttcccgctgggcgggctgctgctggtgctgtcggggctggcgctgacggcctccgtggtggggctggccgtggccacgccggtgttcctgatcttcagccccgtgctggtccccgccgcgctgctcatcgggacggccgtcatggggttcctcacgtcgggcgcgctggggctcgggggcctgtcctcgctcacgtgcctcgccaacacggcgccgcaggcagggcttcctcgtaagcaagtcatccatgcatggatggatgcgcgcgtgcgtgtctgtcagtatcagcagggtcgtcgtggaatgctgtgttcctgtacgtgtgggtgaccgtcctctttggtcgtctttctccccccccccccgagtgtgttacgtatgtcctggtgttcgtcgtgtgtgtgcatcgccgctccagttgaattccggtgtgtgttcatcgccgctccaggtcggagatgtgaatatactttgctaggggaataagtcataagtctgtctggaagggtaaagtttgagctttgctagtgtagctgggcactct

SEQ ID NO: 83791 - DNA, 360 bp, Zea mays
  Clone ID: MRT4577_176430C.1
acccacgcgtccggaccaaggagatgaaaagatagaatcacgaggcctgcgcagagtcctgagccgctgcgaccgtacgtgactgtactacggtcttgcatcggacggagctggcatgcactggctgcctatactactctggaccgctaacgtcccacggttacaatcgatttttcgtttggatacgtggatgcatccgtcagagtctctaactacttagacgtatgaacctactgacgaggctactgagcacactcattaccgcaggcatttcaggtacgcatgtactacatactgcatgtacttagacacatatgacagtcactatcttgagagcgagggctatactgtgctgacata

SEQ ID NO: 83792 - DNA, 284 bp, Zea mays
  Clone ID: MRT4577_176431C.1
ctccaggggaccatggcgaaaaactacccaccgtagcgcctagtacagcgaggccgtcgagaaggccaggcgcaagctccgcgccctcatcgtcgagaagagctgcgcacccctcatgctccgcctcgcgtggcactccgctgggacgttcgacgtgtcatccaggaccggctgtccctttggtaccatgaattgcccggttgaactggctcacggcgccaactcggtgctggacatcttggtacggctgttctagcccatcaaggatgatttccccacccttt

SEQ ID NO: 83793 - DNA, 2559 bp, Zea mays
  Clone ID: MRT4577_176432C.1
atcggtacgcattcgccgcgaagatgatgggagtctcttggatggactgactgagtaacccaccaaatgagtactgcgcatttggctcaggctgttagaccaacgccagcagcgacccgcaaacggctccggctgcccaacaaatttttttcccaatctccgcgctcgcgtcaactgtagagtgttgtcatctccatctccagctccagcgccgccttgctctgtgtgcttccgcccgctctgtgttgctattgctaaactagtgtgttctgtcgctatgggctccctggccaccgcggacgggccgttgccgccgctcaagtaccctcaggctcgccgggacgaagacatcgtcgacgactaccacggcgtcctcgtgccggacccttacagatggatggagcaggtggattcgaaggaggtgaaggagttcgtggacgcgcaggcggccgtgaccagcgccgtgctgtccagctgcgaccaccgcgggcgcctgcgcgggcagctcaccgcgctcttcgaccacccgcgcttccgcgcgcccttcaagcgccggggcagctacttctacttccacaacccgggcctccgcccgcacagcgcgctctacgtgcagcacgggctgggcggcgagcccgacgtgctgctggaccccagcacgttcagcgaggacggcacggtgtcgctcggcgtggtcggcgtgagcgacgacggcgagcacctggcctacggcaccagcggcagcggcagcgactgggtcaccatcagggtcatgcgcgtgcgcgacaaggagcacctgcccgatacgctgtcctgggtgaaattctcgcgcatcgcgtggactcgtgacggccaagggttcttctactcgcgttttccggctccaagggatgcgctggattctgggatgaagactggcgtcaatctcaaccacgaagtctactatcatttccttggaacagagcagtcacaggacgtgttgtgctggagagaccctgatcatcccaagtacatatacatccctcaagtcacagaagacggcaagtacgtgatcctttcggtctcagaaacgtcagagccggtgaacaagctgtactactgcgacctgtcggctctcgctcacgggctgggcggcgtgaagagcgcccatggcaacggcatgctccccttcgtcaagctcgtggacaggttcgaggcctactacgggctcatcgctaacgacggcacccagttcacgttcctcacgaacaaagacgctccaaggtacaagctggcgagggtggacgtcgacgacgacgagcccgggtcgccgtggtggaccgacgtggttcccgaggacgaggacgggaaggcggtcctggagtcggcgtgcgccgtccacggccacaagctgctggtgagctacctgtcggatgtcaggtgcgtcctgcagatgaggagcctggtcactggggagctgcttcacgacatacccgtcgacatcggcactgtcagcgggatctccggcagacgatgcgacgccgaggtgttcgtcgagttcgcgagcttccttacccccgggatcatctacaggtgcgatgtcggctctgcggtcccggagatggacgtgtacagagagatctcggttccaggcttcgatcgaaacgagtttgaagcgaagcaggtgttttatccgagtaaggatgggaccaagatcccaatgttcatcgtatccaagaaggagatcagcctggacggatcgcacccggcactactgttcggctacggcggcttcggcgtgagcgtgacgccgcagttcagcgtcgcccgcgtggtcctgatgaggaacctggggttcgtggcgtgcgtcgccaacctcaggggcggcggggagtacggcgagggctggcacagggccgggtcgctcgccaacaagcagaactgcttcgacgacttcgtcgccgccggcgagttcctcgtgtccgctggctacaccagcccggcgaggctgtgcgtcgagggcggcagcaacgggggcctcctggtagctgcctgcaacaaatttttttcccaatctccgcgctcgcgtcaactgtagacgtctccagcagctcccgcatcgcgcccccatcctccgcgccccctctcgccaacgcccattccggcgcgcgctgctcgcgccccgcatctcgcactcgccaaccgagacgcgccgcgtgtccgccgcgcggggcccacagacgacgctccacaggcgagatgcgccgtcgctgcccggatgcgtgccgctgctggagatggtggccgcgcatctgtgggccccgtcctccacaacgcgcagaaagggggtcgggagcggggacgttgctggagatggtcttaggttacaatgtatcggtgctgtattgtaagcggccaggctggcaacttggcgtgacacatgtttggttctgcttctggtttggaaaattagaagctgaactaaaagggcttcttttctgcgactactttaaaaaaaacagcttttctttagtgtaaatttgagaccttgttattgatacttacgaagtttgttatatt

SEQ ID NO: 83794 - DNA, 279 bp, Zea mays
  Clone ID: MRT4577_176433C.1
agagaaaggactacagagccccgaattaataccaatagaagggcaatgcttttagattaaaatgaaggtgacttaaacagcttaaagtttagtttaaaagttgtaggtgattaaaataatttgaaggcgatcttttaaaaagagattaaaccgaagtgattaaaagaccttgaaatccatgacgcagggagaattgcgtcatttaaagcctagttaacgcatttactaaacgcagacgaaaatggaaagattaattgggagtggtaggatgaaacaatt

SEQ ID NO: 83795 - DNA, 384 bp, Zea mays
  Clone ID: MRT4577_176434C.1
ataaaacctaacatccagaatagaaacacacgttctcaagtccaacccttgtgtacaaacgaacaatactagttttcgtgccacataacctatcggatacacccagcatctgattctagaaatctgtagatagatgacttactggccttccaatttatagacataatagcctatcattcattgataatagcgggtagctcactagcttgggaggttgggctttagctggtgggccactttgcagataacctgcatcccctctgcaacctctggtcttgatagcttgaggggactccagcaagtggaggaccgcggtctgatccatctgcaaaagcattcgcaggaacctttgcaggtcggtcaggctccattgctgaaccagtg

SEQ ID NO: 83796 - DNA, 147 bp, Zea mays
  Clone ID: MRT4577_176435C.1
ctcttgaaagattgtatcattaggcggttcgttctaggagtatgccctttttaggttctcgctcctgccacagaatatgtgttttttagtggtttagcctaactatcaattacttggtgcagtcgattttcaaaaatggttattggc

SEQ ID NO: 83797 - DNA, 1062 bp, Zea mays
  Clone ID: MRT4577_176436C.1
ggccggcacgcacattcccgacgcggactgtgccgccgcggcacagatggcgttcagcggcaacgccgttgccggggagatgcagatgggcggcagcatgagcccggggcggctgccggcggcgacggcgacggaggcgtcgagcctggaggacgccaacttcaagagcgcccgcatcaccgtggaggagaggcgggagaagatcatcaggtacatcaagaagcggaacaaacgcaacttcagaaagaagatcaagtacgcttgcagaaagaccctggcggacagcaggccccgcgtccgcggcaggttcgccaagaatgacgactacggcgagccgtcgtcaagggtgatgcagaaccacgaggagtacgaccaaatggcggccagcatgaaggcagaagacattctcgatcccgacgccgcgcacttcaacgggatgaattcctacttgttcaaccacaccgtcgaatcctggctgtgacgcgaacgaacgccggctaaaccaccctgaattttccggatccttcggcttcctgatcctgtgcagagttctcagcagcgcctttaatttttcgttgtttcggccccatggaataactggtcacgtgtaggttattatataaatcacgcgcgcagctccatcgggcgctagataaatggctcgtcaagctaaagtttagctactaaacagaaaaatagaaaaataactcttcaacagactaactatttaactcgtcagttatccgactcttaaattggcttcaccaccagcggaacttacactctgacgagccaaactagatagatagtctgttggagtaagatgctatatatatagtgcaatctttatgtaaaagtaaaatagaaggttaaatagagagagaaaaaaataaaagtcacttggagatgctctatgtagtctcttgtcactgtatatgcaaatctgatttcaccagcttgcggtagaacctgtgggtatatagttgagagttttgaagaaaataaagcttggatatacaaatttgtacttgatttcttaatagaaacaaagcttgtgggatc

SEQ ID NO: 83798 - DNA, 354 bp, Zea mays
  Clone ID: MRT4577_176437C.1
atgcatggatcgacaacacgagcacatgcacgacagctaaatctccaggttcgttctcacctagtcaattgtattttagaccttacgctttatgtcgtggatgttttaatgattaagaaccttggagagaaccatcaaggacttggaaaatgccaagatgtcaaggaggagaagctaggacattcacaacaagagaaagccaagtctgactcaacttcgtctccacctcggagtccagaaccagtctgcgctaaaatggacgcacatgatgcatccgaacttcgattagggataaaccttcatggcgaggtcactcgtgtgtcatgggtgagaaccaacggagcagtggtgtag

SEQ ID NO: 83799 - DNA, 342 bp, Zea mays
  Clone ID: MRT4577_176438C.1
aacaatacacatagtactgtgttgttgcactcggcttgaacatacaaacggccggtacacacgatggggcatgcggggagaacgacacatgaacaccgccataatattggttatttcaaggctgacacgcacgagttatctctctccaatgtattagcgccacaccaatgactactacgggcacacgggagctaaaatatgtacacttaatggcatgcgaacgacggcagtctgctttgatttaaatacgactcccaaggatatgtgttcgggtccacaggcacaataccggactgggggtgaagataacgaaagaagctgtccttgaaatcctattggtgg

SEQ ID NO: 83800 - DNA, 516 bp, Zea mays
  Clone ID: MRT4577_176439C.1
gggggttgggattaccacatgatgctgatgcacagtatgcactgcatgaagaactttgtctcgagtacgacgaagatgttgatgtgaacttgcagccttactctgacatgctagcaagtctcaataaaaggctaaaattttgccgctgatgatgtggcataagagcatctcaagttgaaagtaggatacaaccgtttcgctgtttcaccagctatgcattcgtggttctactggttcttacggtctctgtagctgagatgttccagatagataatcttgtcttctgttaatatttattggcttatgagtattttataatcggtggcttcagaccttagtgggttagtttacccaggcagcagtgagtttaatactctatatgttccaaaatatagttctttctattcctcttttttctgtagatatgtatacaaactatatttataggttatttaataaataaatgtttagtctaaaatgaattatattttgggatgaagtataagaaaacgtggg

SEQ ID NO: 83801 - DNA, 721 bp, Zea mays
  Clone ID: MRT4577_17643C.1
ccagtttagagaagagtgaatcatatgaagtctaaaaatgaagttacatacttcaagataatagttcttggagatattgatgtgggcaaaacgtcgttattagttcgttatgttgataaaacttttgatagtaaaacgattagtactgtatcatttgattataaagaacctgatgtgcaaattaataatgctcccgtgaaagttcgcctttgggatacagctggacaagaaagatttcgaacaattactacaagtttttatcgtggtgctcatggtgtggttttagcctatgatgtaactaataggcaatcctttgaaaacctatcttcttgggctctggatattgacaaatatgcacaaaatggagccaagaagttattaatcggatgtaaaatagacaatgttgcaaagagaaaagtgtctttcgaagaagcgaaaagttttgcaaatgaaaacgatttagaatatgaagaaacgagtgcaaaggagggaaccaacgttgacaatgcatttatgaaattgatacaaaaaatatatgagtgtccagaaacaaacccaaattatgcaaataacaataacaacaacatagcaaaggtgggagctcattcattcgagaaaagttcatcgaataagtgtgcctgttaattatttatttcttgattatcatcaattcaaacatgttatataaaaaaagttcaataaaacctccttgtttatactt

SEQ ID NO: 83802 - DNA, 840 bp, Zea mays
  Clone ID: MRT4577_176440C.1
caaaagcgaacccgactagttctagatccgcttcttcgactcgtctaaccaccaccacgagggagagttaaagtcgccagtacagaagagtgaaggggagagggttgctgggtccgattcggtgggctcatcgccgtcgggtccacgaattggtgcctaggagtctcgcgtgcttcggggacataatcgatggtctcgctgcggtgggttggtggctggagacctcagaattcgtcgtcatagtgcgagctcctccgcgtgtgcaccgtgcgccgtggccaggggtgtctgcgctgcaattgccaggcatacaagatgacgatggtatgaagactatctcatttccaaaaagctttgtgcagagcaactagtgcaatgcaagtgtttggtgcttttggttgatagaagctgctggatgcttttggtatttttgaaagatgcaagtcgtgcttctggttgatacttagaagttggtggttcaaaactgaaaaacctgtcaggctgtcacttgcttttggtttcttgtcaaactgctgggcgcctgaacactgctgtgcaccgtacgtcaggctgtcctcatgcatctgttaacagatcttttgtcctctgctgcttagactgctttatgaaatttgaaatgtgatgagacttatgccttatggtgactggtgatagcttattagattagagtatcatacttttggtcatggtcttatggaatatggaatgtgatgggatcattggaccgcatggtatgggtcatggatgtgtaaataaattataatttcattatttcatctctcgtctattaagtattaacagtttattactgtgttgtct

SEQ ID NO: 83803 - DNA, 777 bp, Zea mays
  unsure (1)..(777): unsure at all n locations
  Clone ID: MRT4577_176441C.1
attcgtgctggaggactttttctagatccgcctcgtctaaccaccaccacgagggagagttaaagtcgccagtacagaagagtgaaggggagagggttgctgggtccgattcggtgggctcatcgccgtcgggtccacgaattggtgcctaggagtctcgcgtgcttcggggacataatcgatggtctcgctgcggtgggttggtggctggagacctcagaattcgtcgtcatagtgcgagctcctccgcgtgtgcaccgtgcgccgtggccaggggtgtctgcgctgcaattgccaggcatacaagatgacgatggtgcaatgcaagtgtttggtgcttttggttgatagaagctgctggatgcttttggtatttttgaaagatgcaagtcgtgcttctggttgatacttagaagttggtggttcaaaactgaaaaacctgtcaggctgtcacttgcttttggtattgttatgcttatatatgatgttatgcacttatgcagttcagcatgtttgctgcctgcctgcttgctgctcagctgcagcctggaggctggtgcttatctgagagtactaagttatctgatgtgatctgtaaaacttactcagttcttgtcaaacttaatctgttaacaggtttcttgtcaaactgctgcgcgcctgaacactgctgtgcaccgtacgtcaggctgtcctcatgcatctgttaacagatcttttgtcctctgctgcttagactgctttatgnaatctgaatgtgatgagacttatgcccac

SEQ ID NO: 83804 - DNA, 863 bp, Zea mays
  Clone ID: MRT4577_176442C.1
cattgggtacctcgaggccggccgggatccgcctcgtctaacaccaccacgagggagagttaaagtcgccagtacagaagagtgaaggggagagggttgctgggtccgattcggtgggctcatcgccgtcgggtccacgaattggtgcctaggagtctcgcgtgcttcggggacataatcgatggtctcgctgcggtgggttggtggctggagacctcagaattcgtcgtcatagtgcgagctcctccgcgtgtgcaccgtgcgccgtggccaggggtgtctgcgctgcaattgccaggcatacaagatgacgatggtatgaagactatctcatttccaaaaagctttgtgcagagcaactagtgcaatgcaagtgtttggtgcttttggttgatagaagctgctggatgcttttggtatttttgaaagatgcaagtcgtgcttctggttgatacttagaagttggtggttcaaaactgaaaaacctgtcaggctgtcacttgcttttggtattgttatgcttatatatgatgttatgcacttatgcagttcagcatgtttgctgcctgcctgcttgctgctcagctgcagcctggaggctggtgcttatctgagagtactaagttatctgatgtgatctgtaaaacttactcagttcttgtcaaacttaatctgttaacaggtttcttgtcaaactgctgggcgcctgaacactgctgtgcaccgtacgtcaggctgtcctcatgcatctgttaacagatcttttgtcctctgctgcttagactgctttatgaaatttgaaatgtgatgagacttatgccttatggtgactggtgatagcttattagattagagtatcatac

SEQ ID NO: 83805 - DNA, 192 bp, Zea mays
  unsure (1)..(192): unsure at all n locations
  Clone ID: MRT4577_176443C.1
ccgggttcgaccctcgcgnnccgctctagtttacangggaatgataaccagcctctaccgatggaatngcaccggatcttgaccaagaccttcacgtntgatttccctcatggggagaggtatttntggaccatggttaaccagcctaacttnaagaaggnnattggngaggggaagnaggtttagtttttt

SEQ ID NO: 83806 - DNA, 609 bp, Zea mays
  Clone ID: MRT4577_176444C.1
ccaacctcccttggcggtggccatacgtacgcaggctcatcggcctcaaccacgcactggatgtgaggcgtgcctcgaatatacacgcacctttgacctgtcgcatttcgatggcctgttcacagcagagcgtaacaggcgcaagatgtaatccgtactccttgaacatggaccgtatacttcgtcccacctgctatgccttaattacggagagcacctacttgctggattcttttgcacccattgccaaagggtttcgatggacctgtgataagtacagatgtaacaacaaggcccatacggacaagatcctgctttgatagaaaaagctttgggcaagatagcagcgacgagagaggatcatcacttcttccttcctagtgtaaaaaagtctgcttccagatcggccaactaggcaagaggtactaaaatacacatgcgaagatgaccgactacttgtcattcaaagagtagctctcagttattatcaaaataaataaggccagtaaaactgctatctgatccaacagctaccatctgctattcatcatattttaattctttatctgtaccaacattttgttcgcacagattccgttaattcatata

SEQ ID NO: 83807 - DNA, 167 bp, Zea mays
  Clone ID: MRT4577_176445C.1
aatggcccccacgatcgaccccaacgagatcaagttcatctaccttcgaaccaccaaacgtgaggtcagagcttctcccgctttggccctcaagatcggacctttgggtctttcgcccaataaagacggcgaagacattggcaaggccaccggtgactggaaaggtc

SEQ ID NO: 83808 - DNA, 585 bp, Zea mays
  Clone ID: MRT4577_176446C.1
atggtggacgaggaggagctgacggtggtggaggtgaccgtcgtggtcgagtacgagagcatggagagccacgcctcgaccttgtggcaggcgctcttccactgggccatgtggcgggcccttctagggcatggaaaacagccctctcggatcttcctcctcccacgggggcggaggctcctgcttcgtcgtctcctcgtcctcctgggagccgactgtgccgagatcctcagctggagcgccgcgtccaccgcagaatcttgctgtatcgcggaagattacagcatacagatctacaatttgtttgacgacgctgagatttctgagaaatttggtggcagatggatctgtttaagaatcaaaagtcacacaagttggacgccaccatctaacccgagaatgaggagactcagagccgagcttcttaacttgcagactgagctggaaagaaagagagcaaaagcactagaagaatacaaccaggacatgacaaggatcaacaaaatcgctagaggagcaaggtcaatggcagaggttatacaagtaatgagtttaaaggttcttaaaggcaagcccatacaatag

SEQ ID NO: 83809 - DNA, 377 bp, Zea mays
  Clone ID: MRT4577_176447C.1
tttgcaggatttccaactttgtccttctggcatgcagccatccgacccatgcatcaataacacatatggtgataaatcctgaagtgcccaattctaacttctaagaatatgcagtcgcagcagaatatgtgtgaattcaatcatccgagttattttcacatgataatgtctgaacaagcccttaggggtcaggtattttatgtaaggatgtgccagcagtgagctcagggctcaaatgcccacacctcgtgccttgaacacatttagcttaggcaagcattaacatggcaaagagtgcatgaccaagtcgtgcttttacttaagtgctatgactcgcattaccctctcaggttgtcactgcagagaaggcaagcagt

SEQ ID NO: 83810 - DNA, 177 bp, Zea mays
  Clone ID: MRT4577_176448C.1
atggccctagaaaaggcagggctagaaaaccaatacaggatagcggggcagcagttttcaaaagtggagcgatactctgcgctcatttatacgggatctggagggcacacacaataactttctgagctgatcgctatatctggcatgggtggcatactcagaccactgataagagtg

SEQ ID NO: 83811 - DNA, 312 bp, Zea mays
  Clone ID: MRT4577_176449C.1
ttcctcgtttcttctgtgtgctttctcttttttgtatttgatgttttcaaattaacttcgttggacatacacactggacaggaaaaggggggattacgatgggctgacggtgggcaagtgaacaaggccagcctgggaaacatgcccaagagaccggagcaaactaaatctatggggcgtgcctacggtggcatagaatgaaatgaggccaccctcttggggggagccgcacacgggatgagcctcggttctagggaccgagcctgccgaggccgccggccataatcatgcttgaactcgtctaaggacacg

SEQ ID NO: 83812 - DNA, 527 bp, Zea mays
  Clone ID: MRT4577_17644C.1
aactactccgtcactttgtttgcaaagctcctcctcgatccatcgatcactgcaccggccggcggcaccgcgcgcgctcgcaggggctagccaacgagacggcagcaatggcggaccgtgaccgcagcggcatctacggcggcgcccacgccacctacgggcagcagcagcagcagggaggaggcgggcgcccgatgggtgagcaggtgaagggcatgctccacgacaaggggccgacggcgtcgcaggcgctgacggtggtgacgctgttcccgctgggcgggctgctgctggtgctgtcggggctggcgctgacggcctccgtggtggggctggccgtggccacgccggtgttcctgatcttcagccccgtgctggtccccgccgcgctgctcatcgggacggccgtcatggggttcctcacgtcgggcgcgctgggcactctggtcactggatgtgttgtgcatgcatcagctgtatgctcgtcgtctgttatggaaaatattggtcaaatgtattctcttgct

SEQ ID NO: 83813 - DNA, 315 bp, Zea mays
  Clone ID: MRT4577_176450C.1
tagaacacctccatcaaaaaccacacggggggcgcgtaccatttattgtttctaccactattcaccttcaaagaaaacaaaccggtagccaagtggcccgacaaccggttcatgaaaccgggagctgaggctgatgcccttcttactcaccctgttacgaattacctagcggaaggtcttagtatgcctcaccaccgtagacgccatgatgctccctttattcaacgacttcttatggctgttcggagccgtatacttctagccgctcatagtttactaacacgtccaaatgtacaaaacacaacgtaacgtgcg

SEQ ID NO: 83814 - DNA, 203 bp, Zea mays
  Clone ID: MRT4577_176451C.1
cccacgcgtccgtgcttccaagacgaagcgcgtctgcaccgaaggtcgagcagacggagccatgatgccaccccgacgaacgacgtccctgaaccacccaccaagcacagaaagatgcctcccaggacaatgaatctggtaccagttgtaatgcccctggccgccgaggagagttcctcgcagacgtgagccgcatacatgag

SEQ ID NO: 83815 - DNA, 115 bp, Zea mays
  Clone ID: MRT4577_176452C.1
tgtgagagagatatctcctgggcccttagcgtgattggatgaagaaagcatgaccgagctagggtcaagagttaaccaaggaaaggatcccaatcgaccgtatagaaaaagagag

SEQ ID NO: 83816 - DNA, 543 bp, Zea mays
  Clone ID: MRT4577_176453C.1
cccacgcgtccgcggcgatcggccttgccacgcccccgctctccccacgccgccacgcgcttattgctttcgccgacgagtgacggccgtaccatcagcgttgcccagctcctccacggggcgcgccgtattggacggacctatggaatcgagggaagcccatacctgcaatggtaacaaagaaaaggaagtgaggatgctgtgctatactgggtgggaaatgtgacagttgtgtggacttactggccatctgctagcctgtgagagctcagttacccctctctctgcctcctcaaaaaacatcctggcctctttgatctgcctctcatgaagtttctcaacggggtcgtgacgaccccttgaaagatgtcctcatcagagagccctgcctgtgcaagctattcttgtgagagaaatataatgttacttactcctctccaacataccgaggtatgttcgtgagttgggttcgcaattcccagagccaaggcagcactgtatacgctgtcagttgtggctttagactcggttgcgatgcccatc

SEQ ID NO: 83817 - DNA, 397 bp, Zea mays
  Clone ID: MRT4577_176454C.1
tgcacgcctacctatagctcggaattcggctcgaggccaatccaacaaatggagatttctatttgcgcccaagatgcacagcccaaacaggagcccatctggctcacgctctgctgatgcgagacctgaatgaaattgctatgctgataaaggattgcatatgggggccggagctcttcttttcttagcagccgccctgtgtattagtgccatgagagtcttagcgagtccgagattggatgatgttaactatctgaatgagatcggatcgacggactgcaagcgatgtcactcttgttgtgtagtgtggtggcagacccatttacttatgcttcggaattatttgggttaatattagggctattctgaagccaaaggaaatgagatcggattttcc

SEQ ID NO: 83818 - DNA, 472 bp, Zea mays
  Clone ID: MRT4577_176455C.1
tgaggcacgtgaggcccgggacagatattatatctgtacagagaactggcaatcaaggtcatatgcgacacttgagaattgtgacacttagaatatgtcacctgaggatacacccattgctgtactgagggtgtttttccagcgctctaattgcgatcgaactgaaagcactacgcaattcgatgatgagcaataaaatgcctgtcgacatttctacgcaaaaggcttgccatatccttgatgatgagactgcgaaccaatggagctgaccagcgtatatacaggatgttgcactaaccaattgctggctatgagtgcgctgtgacgggatatatcagatctaaggcttgcttcttacggggcccttgagcccattctttacattcttgggaccatacccaattctttattgcaagtggtggccacaagcatgacgctacccgtgcatcagctgcaatgatgtcaaaagtaa

SEQ ID NO: 83819 - DNA, 247 bp, Zea mays
  Clone ID: MRT4577_176456C.1
gccggccgggtcgggcttaccattcaactgagcacacccctcatcctattctcgcgcccgaggcctcccttcgccaacctccgatcctaatctgcgctgatgattcctctccctgtcccacgtctcccgctgagatgaacagtactactgtcaaatcaacgaatatcctgtagatgatgccccagcgcctgtccacccatgtccgcaaggaggccaccaagaaggcccttctcggataccagctcct

SEQ ID NO: 83820 - DNA, 585 bp, Zea mays
  unsure (1)..(585): unsure at all n locations
  Clone ID: MRT4577_176457C.1
gtgctgtggtctgacccttcctcgcagatgggtctttctctgaataaagaacaagacaatggattgctttggggtcctgatattacccagcaatttctgaggacaaatcatttgaagcgacgcacaggcgaattgatcatgtggaggtctggaagtgtaatggtggtttatcaagggagcatttacaaaaggcctctaaaatctcaagctctaaatggtgcctcatcatcggtttaaggcgaatatggtgcattgttcatcccaaatgcctcgaacgctgttgagaatgatattcagggggatatatttgtctgcaaaacatgcaactgtgtccctattgaatgtgtagaatattgagcacatgaatgaggaagggctggagttcaattagataattgatgagctgggtcctcattttgtggattggtgggaacagagctgactagccaaatttagtgaggaaccttccatgccattttgctctagaaaccagaactatcaagtttagcaacagtaatataataaggagcatgctgcaactgccctagcgcggtgacgacnatgaatatggacatcgagcgtgtg

SEQ ID NO: 83821 - DNA, 537 bp, Zea mays
  Clone ID: MRT4577_176458C.1
acgactctctataggacgaatagggtcccctgcacgccgcgcgggatagtatgctctacagcggcacggcattgctcattgttcctgcttgattgtcattgctttcgatgtgtatacgcacagacaccacatctcgaatctggctgctctcggagccaattgcatcacacaggtggtaatcttcgtgacctaataggaccctatggtgcatacagggatgctccacactaggatgctcctatgcgcactgtacattcctcggctgagatatagagcactgacttacatgtgctaaaggctgttgttagggttttacttatacaagactcccagtaaggtattggcaaacctgtaaaaccctggtggttaggcagccgctgaaacacctgctagtgattcacatgctgtgtagagagttgagcgatcaatcgattgtcacgaccctgaccagaattaaacatttcattatggtttacctgccccaggctcaagcctgtggactagtatgactgaccgtgtataggaccttgcattcac

SEQ ID NO: 83822 - DNA, 430 bp, Zea mays
  Clone ID: MRT4577_176459C.1
cgggggaaaatatttaatttttaaaaaaaataaaatgggccaaggctcttaaaaaaaaaaaaaattccctaaaggcccccaaatcccagggggataaaaaatctccctttttttcaaaacaaaaaagggaattgaaaatatgcaacggatttctggggaaaaaaagaattaaggttttaaaattttctttccctttatttaaactaaagctaagcccagttaaaacctatgcttttggaaaggagccaaatcaagtctttcataattcaaagatgatgaaataaaaggctaaagggggaggctgaaaaaaattggaaattagctggtccacagggatataaatttgctgcagaaaaacaaagtctgatttaaatacaacaaacaggttttagataaaatagaaaaaaatttaagaacatcaactatttcc

SEQ ID NO: 83823 - DNA, 2097 bp, Zea mays
  unsure (1)..(2097): unsure at all n locations
  Clone ID: MRT4577_17645C.1
cctcgaggcctggccgggaactactccgtcactttgtttgcaaagctcctcctcgatcgatccatcgatcactgcaccggccggcggcaccgcgctcgcaggggctagccaacaagacggcagcaatggcggaccgtgaccgcagcggcatctacggcggcgcccacgccacctacgggcagcagcagcagcagggaggaggcgggcgcccgatgggtgagcaggtgaagggcatgctccacgacaaggggccgacggcgtcgcaggcgctgacggtggtgacgctgttcccgctgggcgggctgctgctggtgctgtcggggctggcgctgacggcctccgtggtggggctggccgtggccacgccggtgttcctgatcttcagccccgtgctggtccccgccgcgctgctcatcgggacggccgtcatggggttcctcacgtcgggcgcgctggggctcgggggcctgtcctcgctcacgtgcctcgccaacacggcgccgcaggcgttccagcgcaccccggactacgtggaggaggcgcgccgcaggatggcggaggccgcggcgcacgcgggccacaagaccgcgcaggcaggccaggccatccagggcagggcgcaggaggccggcgccgggggaggagcaggtgccggcgctggcggcggcggcagggcttcctcgtaagcaagtcatccatgcatggatggatgcgcgcgtgcgtgtctgtcagtatcagcagggtcgtcgaggaatgctgtgttcctgtacgtgtgggtgaccgtcctttggtcgtctttctccgccgagtgtgtgttacgtatgtcctggtgttcgtcgtgtgtgttcatcgccgctccagttgaattccggtgtctgttcatcgccgctccaggtcggagatgtgaatatactttgctaggggaataagtgtctaagtgataagtctgtctggaaggtaaagtttgagctttgctagtgtggctgggcactctggtcactggatgtgttgtgctgtgaatgcatcagctgtatgctcgtctgttgtggaaaattggtcaatgtattctcttgctgaataatttgtgacatctaattgttatgtatcgtctctttgctgaataatcggtttctgatttatcttgcattatttgagaacgaaaggatgatggtggccacccagttacttacgtttannnnntatttctttagagggactaaagattagtctctagnnnnnannnnnnnnnnnnnnnnnnnnnnnnnnncactaggactaaaatatggactaaaatgatttagtctttagtccttcacataggtgctaaaagagactaaaagctcacatgagtatattctaagggtatttgagtctttggacaatgtatttaatgactttagaatctatttagtccctaaaaccaaacatatagggactaaagtttagtcctaggactaaaatttagtcctagaactaattgaaaccaaacatgcccttagacgctgctattaattatatttatacgcctcgtcgtcgtcgtcctctcgactctcgtgcgccatcgccgggccgggcgggccggctcagttgcagctgcagcaggagcagccgcagctggtgccgcagttgcaggtgttgcagtcgcagccgccgccctcggtggccgcctcgaagccgccggcgctggccttggtggtcggcgcagcgaggaccatggtcttgatgctgctggcggcggcggtctccacgtcaggggacatgcagttgcatgagctgccgcaggagcagctggagccgcagttgcacttgccgctgctgcaagacatgatcacagacgaaggggagcaggcgctagctgtgctaggaggaggaagaggaggaagaggtgtggtgccttgttgcctgtgatgagcgtgacgcccaggcagacgtgccctccgccagaaggcttcgggcgcaacttgcgttcaaaaactcgatggttcgcgggattctgcaattcacaccaggtatcgcattttgctacgttcttcatcgatgcgagagccgagatatccgttgccgagagtcgttcgcccggccggcctcgagggtccc

SEQ ID NO: 83824 - DNA, 415 bp, Zea mays
  Clone ID: MRT4577_176460C.1
aaggtgaccatatatggttaggtcgaattggcatcatgagttgctgatacaggacttgaaaaaggcattgacattttttagccatgaaaggtcagataggaccaaattgcttcctcttatttggttggcgaaagtagctaagtacctacaaagtagatagcccacaggatgccatgaaagatcatagacactactgtcatgtgtgttacttgtttcaatatgtggagcttcatggctgccaaataaatggaaccgctagttcatcaaattgacactcgagacatcattttcagacaacaaaatacgtaacagttgtgtgttgattttggacggtgaaaagaattgaagaacttatcacaaagtagcaaagtcctagtctaaccaagatgagtaatttcaattatgctacatatat

SEQ ID NO: 83825 - DNA, 1363 bp, Zea mays
  Clone ID: MRT4577_176461C.1
gcgagcagtctgacagctacacacacaggcagacgccgttccgcgggggaaaggtgcggacgcctgaatcctctccaactccggcaccgcattcgcacgcccgcgaagccccgaatcggagaggacagaggagtcatggacgcggcggcggcggcggctgcggctgcgagccccacgagcaagaggatcgcgctggtgacgggagggaacaagggcatcgggctcgagacgtgccggcagctggcgtccaggggcgtcagggtcgtcctgacggcgaggaacgaggcgaggggtttggaagcggtcgagcgcgtcaggtgcgcccgcggcgacgccgaggtttacttccaccagctcgacgtcaccgacccctgcagcgccgcccggctcgcggatttcgtcagggatcagttcggtaggctggacatcctgatcaacaatgcaggaatttcaggcgttcaccgtgatccagttttgtctgctgcggtcaaggataaggtcgatggcatggatgtaaatcagagagtcgaatggatgaaagaaaattcgaaagaaacatacgaggaggctgtacaatgtatgaaaacaaactattatggtgccaaacttgtcacagaggcactacttcctcttcttcagttatcctcctctggaagaattgtcaacgtttcgtcaggctttggactactgagaaatttcaacagcgaagaccttaggaaggagtttgaagacatcgacaatcttactgaaagtagactggaggaactgatggataagtttctagaggattttaaggccaacttagtagaggcgcatgggtggccgacaggtggatcttcagcctacaaagtcgtcaaagcggcgctcaatgcgtacacgaggattcttgccaagaagtatcctacgctgcgtatcaattgtttgacgcctggttatgtcaagaccgacatgtctatgcacatgggggtactgacacttgaggaaggcgctcgcaaccccgtgaaggttgctctcttgcctgacgacggaccgactggtgcttattttgatctgaatggcgaggcgtcctttgtgtgatggtatttctcccttttcagcttcagaataaaagaaagagctatgaagtagttagtgccaatcagtattgtagttcgacttgaatacttaaactagcacgttgagcaaaccgtagagctcaacaccagggatttcctcgtcttctgtataatatctctggtgatgattgtatatttgcaatgaaccatgcagatttggtcgcgccaaggtagtgtttggttggcacaatggtaatggcaacaggaatgaaaatggactgcgaggggaacgatggtggggttcgttt

SEQ ID NO: 83826 - DNA, 236 bp, Zea mays
  Clone ID: MRT4577_176462C.1
gccggacgtttggctgacagtcacagctgcaagagaagcatgcaggtgcaggggcaggggcagggctatagcgtgaccaagattggactatggggtggaccgggagggtcggaacacgacatcacggaggagggtgcaccgcagcttgtgcacagcgtcaccgctcgtgctggcgtcgccggtgactaaatccaagtgaactatgccgacagaacgtggaaggaggcccgccgcgt

SEQ ID NO: 83827 - DNA, 403 bp, Zea mays
  Clone ID: MRT4577_176463C.1
aattcccccctcggtcggacccattcaggtcaagaatttccaactccaggttaaacctaacccccccctccagcgggaaaaaaaggcgaagagaaaaaacgggggatccttcacccagcgccgtcgtcgcgctgggggggccttaattgttccggttcacggggccggggtgggttccaacccggggcattttgggctcacagtccccgaaaccgccgtcgccgtccacgggggcctcctcctcctcgggcccctcggccgacccgccggagcccgggggggccccgagctccacaaccgaacggttggcacccgggggggccagaaaggtcggcctttcctcgccggccatgatgaccaccacgggctcctggaaccccgccgccggcctggccggcccggc

SEQ ID NO: 83828 - DNA, 441 bp, Zea mays
  Clone ID: MRT4577_176464C.1
ttcttgggttgacccacccgtccgcgccttcttccccgtccgcttggaactaacgcgccggaaccgcttcattacccaggggctcgtgcactaccacggccaggacccttgaggggtagcccccagactgacgccgcggtctccacacccagcgttgcagcccgtggccactgtcaatcttaattgacgacaccgactgatgaacacgtcgcgctacatacgtaaatgtggaggaggcgacagctgccgtctacgtttattattcaaaggctaataaggtgcgctctccacaggcgtgcaatgccgcgaccaatcacactgggtattgaaccgatgatattacctgcgtcgagtatgcggaatctatcgacgtgcgctactgccactgaatatgctgacacctgcacctaaaccacgctgacggtgaatgcgaaaaataag

SEQ ID NO: 83829 - DNA, 204 bp, Zea mays
  unsure (1)..(204): unsure at all n locations
  Clone ID: MRT4577_176465C.1
ttatcatttccccgccaagacaaaacaggggggcgagacctatattattcatatctgcacancacaaggcgcctcaagccactaaaacagagcaagccaccgcccttccaaccggacaaccgactccgaagctgctcaccctgctcctcgatcaactgaggaaaggataggataccagcctcctcgcttgtaggctgcacctca

SEQ ID NO: 83830 - DNA, 966 bp, Zea mays
  Clone ID: MRT4577_176466C.1
atcctccctctcctcatcggagaatgaggaatccagatgcgccagcgccctcagtgttgggggattcaactttgacggagttgaggtccgtccagagtccgatctgaacacctcggctgcgctcaatcaaggcaggagacggcatcgggaccacggatggtggtggtggaacagcctcgtcatcgttgaagaagggtggacacccagttcttgccgccctggttggacgacggctgaaacctggcggtgccggtgttggtggtctccaacgcggtgcagtaggttccacctccggtgtcggtgagtaaaggtttggagccgcgactgtggcgagcatctcctccatgggaactgcatcaggttgcgcttgagagttgtagtactggcgggcagcggtgagagtagcctccagcacgccggcgtcgcgcagagcacatggtccgaatccgtgaaatggacagtaaccgtgcgggtaagtctctcccatttgaaacactgatgcaggtacttgtgtggacgttgctgtcgccggcggtggagggggaaccaccactggtggtgctcgacgacggcgagatgaactgcgattatggctgcggcgatttggaatccagactctggtggcaccggtgttaaccaaattcaccattaccctgtgaatggcaaagccaatccgattgtcgtcgaggattccttcacggtatgcgcggaggaactccctgatgacggcacggcggatcgcctgaacgacgcgtcgaagagtaatcggtggcattgtacttacagttttcttcgcgttcttctgttcttgtattctgcgatgtttttcctttcttcgcgttcttctgttcttctattccacgatgtttcctctgtccaaaactcagtgtctgagtctatgtgctgataacgtgttaattgtaaacggttgtgtgaacagcgactgagaactcgtagtccctttcc

SEQ ID NO: 83831 - DNA, 228 bp, Zea mays
  unsure (1)..(228): unsure at all n locations
  Clone ID: MRT4577_176467C.1
taacgttacgagagtcgatcgctcgtcaaacaggtcatgtctgctctaatgcggcgnacgagcagctgagcgtaccattcgtcacactgcacgagtcgatcgagccctctcacgcagcagagtaagcgtggagagacgcgcgtgatactccgcgtagactacggataggtcctctctcgtcgatacgctctatcagtgcataggtgaaagtcacaagagcatcgatct

SEQ ID NO: 83832 - DNA, 441 bp, Zea mays
  Clone ID: MRT4577_176468C.1
aggcgacatcataccactttttttatacaaaaggccgctcaagggagctagatggaacacaacggtataatgatggtcacgaaccattgtgccatgaggcatttagggcaacggcggtcctataccataccaagatttttaattggccccaaagttgaagattgcttaatattcaactcacttcagaaggtgatgcaaattcaaagctaccaccacaaaagaagagttcgcgctctcgcccacacatacacacattaatagccctttgacagggagtcggtctgtggagcccttgaaaacaatttgggaaatcaaatcctttggatgggggagagcgacttggcccccgggaacccgagatccactgtgactatcaccgtccttgtgtacttgtgctcccaatgttcaaaagggggcacccacgatctggaactaatgcgg

SEQ ID NO: 83833 - DNA, 297 bp, Zea mays
  Clone ID: MRT4577_176469C.1
gttctagatcgcgagctgccgccctttttttttttttttttcttttttctttgttgtttttctgttttttcatttttaagacccccggcccaagatcttagatttgcgggtacccaactttcgaaaaactgctcgcggtttaaccaaaaaacttctcatgaaactcacggtgacacccctggggggcgtatcccagaaggtgggggggctgaaaattcaacgggggggaaaaagaatgctctggggggcgatccaaaaggggttggtgtgggattggacccgcccgagttggggggg

SEQ ID NO: 83834 - DNA, 364 bp, Zea mays
  Clone ID: MRT4577_17646C.1
gtgccggaatcccggctcggccacgcctgcgtgcacctcaaagaagcaagaggcgctttggctgctatacgtgcggatcatcatatgtaaaggctacacgttgagctagatgacaagtgaggaagggcatagaactgcatatgctacaccatcgagcgtacatatgatgaggagatatgatatgctaataccaatattgttctgtaggcgtacaaaaattacctattcttatgacagatgataaaatacttgttcacagatctcttgttagcatacatccaaggacccaccaagcagattcaactgatcgcgtgacatatgtaaccatgggcaaagaatccataactggatgctgagcaggaaa

SEQ ID NO: 83835 - DNA, 252 bp, Zea mays
  Clone ID: MRT4577_176470C.1
cttctgttgaggccacgacgagcgacattcggtactcgcgtccgtcctacgccaggtgccccaggtcttcttcggttccttcggcggcgacgaacgtctccagacatgtcaatggctgcccactgcactactgcttgattggctggttgctgctctctgcaatatgagctgctccctgattgattcccccttgtagattgcttgagtacccaatgtttgttttctaattttgccgatgagacttttgcaaaa

SEQ ID NO: 83836 - DNA, 819 bp, Zea mays
  Clone ID: MRT4577_176471C.1
actcctaagggcgattgggatcctcgaggccggccgggctacattgccgaatgatcatgacattggtgtagggtttagtgtacttaccatataggggagccgatgatcctcttggccataatcgtggcgccatctttcttcgccactcccaccaagcgaggaagtagtatgcttcctggggttggggcttcttcaacggatctccgcctcctctgatcgccgctatgtgtaccggccaccgtcgccagcgatgaagtcgaggagatgggcaacagaggaggaaatctttaatccgcaactgggacgcacccaggacctgcactggatgcgcgatttcgggggcggctgcaactggcgcagcgcttcacttcgttgctgcgaatctcaagcagcgactgcggcgggaggtcgcggccgtgggcgacgtgtggcggcgcctggcggctggtcagagtttggtgctttaaactcgcgcggcgtcagtaatcctccaatgccaagcatgacgatgttgggggcacggacagatttgaggtacagagatcgaatgcgcgttgcctgcctttctcccgtcattgtccaacatgacacctctgcataaacagcaaaactaaagtcaaagttgaactctgcgctatgtcaactagtgttggcgcaagctgcggcatccatgccagtttgtggtgcagattgcaagcgaatgtgaagattgaaaaagttaacagagtcttcttagagagagtacttacgaagaaaggaaacaaccgctgttgcaatgcctaggatccggatagaaatctgagcagaaaatatactttt

SEQ ID NO: 83837 - DNA, 446 bp, Zea mays
  Clone ID: MRT4577_176472C.1
cccacgcgtccgcaccgtcgcaggcccgcgcccggacaccgggctcggccgcctacgcaagcagactgtggcgtgccgcctgctcgtaaagatcagtgtatccggccggggacgctgaggcgttcgtgccgccctagccggctttaggtagagaggagacgccggtgaatgagacgcgcaggatcttgaaaaaccgcgccgtggcgtacctgaagtggctggggagcgaggcaagtacgccgacgggctggacactggagactacgccgaccatctcgccgtttgcacggggccggtggtcggtttagaaagaaatcactcgccctcgcatacgacatgacgaccccaccaggtacgaccatccaccctcctgccttctacgtttgaactgaccgtaccctcgcacttgcttttgctccttgacaagcatcatcgacggttgacag

SEQ ID NO: 83838 - DNA, 240 bp, Zea mays
  Clone ID: MRT4577_176473C.1
gcgggacaccgggtgtagaaggcggtcgcggcgggcagtggcggcagaatgttggctaccagggtatttagcctagttggcaagcgagcaatttccacctctgtgtgtataaaagctcatggacaagttgtgcagagcgaagacttttcgctcccagattatatggatcggcgtgacaaccccttgccggaggctgcccatgtcaagcacctgtctgccaaccagaaggcactgaaagag

SEQ ID NO: 83839 - DNA, 589 bp, Zea mays
  unsure (1)..(589): unsure at all n locations
  Clone ID: MRT4577_176474C.1
cnctcccaagagtgcgccagccgcgctagggtttcctccccggcacccctcctccatcgacgatcggcggcttcgtcggagtccacgagcgcggtcccgacgcccccatccggccggccgaagcagtcctccgcgccgcctcctccgacccccatcccgccggcccctgaggtcctctgccccgcgggctccgaccgccctgaccgccgtccgctgccgtcctccgccggccccgacgagcccatccagcgggccgctgccgtcctcgaacctctgcctcggaaacctagagtaggtggtgttatctggctttgatttgctgtctaaacatttcttgatcttcactcatcatcactgggaggttaagaaacttaaaccatgagctctcatcgcgtgaagtggaatgaggataatctgtatgagattgaatcaaacaagccagtgcggcagaagataacagagcccaagacaccgtatcaccctatgatggatgatgatgggtccctatcaccaacacgccctttcgacaagtgtctagatgagactgctagtgctgaaactatattaactgctttaaatggtgtggact

SEQ ID NO: 83840 - DNA, 426 bp, Zea mays
  Clone ID: MRT4577_176475C.1
ggggggggggtttttttttttttttttttttttttttttttttttttttttttttttttttttttttgttgggtagtattgaaattgtttggttttgtcaaattttattaattaaatattttttttaaggggaaaaaaacggttaaataagggggggggggggggctcaaaaacccatttttaaaacaccaacaaaacgggggagggggctaaaatttaaacaatagaaaaggacgggggggcaactgctagggctagaaaacggcctaggggccattcatttataaaacggggaaagaaacgggggggcggcctccccccctatatggaaaagggaatccgggaacaaaacaaaagggcctgttttcatgccctcggaaagtttttggggggggtgaagaggtttgctggggggttccttggggg

SEQ ID NO: 83841 - DNA, 184 bp, Zea mays
  Clone ID: MRT4577_176476C.1
attatttttttttttttcgccaaaaaaatagtggtgtatacacttaaaagtggttattttacataacccaacagcctctaggacatgacccgctcaccatcgaccctcactctttctctgtttcacacgccactcacacatacataggacaattgtcaaacgtacactgctaccattgcacatg

SEQ ID NO: 83842 - DNA, 149 bp, Zea mays
  Clone ID: MRT4577_176477C.1
gctctccaaggttttccatggtatacataacgccttcccaagatccttgccgggggggggacccctatcacttagagactaaaatcactctggctgagcgtcccagacccggtggattttgacatccttgggcgccttgggcccaaggt

SEQ ID NO: 83843 - DNA, 290 bp, Zea mays
  Clone ID: MRT4577_176478C.1
gagctcactagtcggtggccgccctttttttttttttttgggatggttagagatatccgggcttaccatacctaagtgtaatctacatttacacacgggtgtaccaggatccatattattggttggacacacttgttcatagcacaagcattgattcatacacatttactggggatccttttggcttggttggttcaggaaggctaggaatgaacatcttgattgtgcagacctagactatgggctttgtttgcttccagctggtagactacaggcagattgctaagggg

SEQ ID NO: 83844 - DNA, 220 bp, Zea mays
  Clone ID: MRT4577_17647C.1
atacaatcacccatcctccttttttacgacagccccaccactaccgcagaactacacaagtccacctccccaccaaccttgtcacactcgcttcagaatcccacacccaacccaaacccaccgagcgctaccaccaccaccatgaccatcaacgtcgaactctacaacttgtacaagctcgggcgcaatctctcccataaaaagaccaccacttctgtcc

SEQ ID NO: 83845 - DNA, 222 bp, Zea mays
  unsure (1)..(222): unsure at all n locations
  Clone ID: MRT4577_176480C.1
gcgtcttggcgccggtcttttgtgtccccttctgntctcttgcgccggcgctttttggtcgccctgctttgtgggggggggttcttttcctnggccgtccttgcgctccgggcgctcttgtcccctttggtttcctggtgtttgtcgtgggcttcctttgctgtttttcgtgggtcctggctttgcgctctttggtgttctgttgtctgtttgctctgccgt

SEQ ID NO: 83846 - DNA, 649 bp, Zea mays
  Clone ID: MRT4577_176481C.1
gacacaatagtttgtctttagctctaaataggtcagatgaggcccccaaagtcttttggaacagttcacactactgcggaaatcggcccaaataacattccattccgcgtgtagtagtccagcacaaatacatatctgtaattatagccctaaagttacaggtacacgaagtcaccatttcaccgaaatcagatacaacagatggggaaatagatgtatcttcgtccaatttctgctctgaataataaattcccctgtattagctgaacggcgtcccacttctcaccatcaattttgcgtagttcatgaaatgttggaacagcaccggacaacgcaccgtgtgtttggttgcctgtatttgctggtgcttgcatcgcgggatgcaatgagctggtgtttggttgttgtcaaccaggctctgcgggtgcgaggtgtgtttggttgcctgtcaaaagggtagaactctgtggaagtaaaccccctagtgctcagaacgagttcatttaaagacaatatgcccttctcttgagaagcacctttgccgcagtccgatatggctcctcaaaggcctctgaaatccaacatgtaccaacaggacctgcaacccccaccccttggccctccctaaggcatcttcgcttggtttgat

SEQ ID NO: 83847 - DNA, 309 bp, Zea mays
  Clone ID: MRT4577_176482C.1
cggacgcgtgggaccggatgcatgagaaatggatagcgggtaaggaaaagagcgctctaaggaaaatagggggtaagttgccaagtttttcttggagctctcaaggtctcaccacaactgagaggtgcacgtgcacaagaaaaaggtaactaataattatcacggtaaagttctaacaatttgaataggctttattagcattaagcacaataaattccttaaaagaccatcttgcatgactgacctggcataataccagcaactaaaattttcttttgtaggagctggatgagtttttttgggtctttg

SEQ ID NO: 83848 - DNA, 1896 bp, Zea mays
  Clone ID: MRT4577_176483C.1
aattcggcacgaggcagtacagccgtgagctttgtgccgtccccgtccccgtgcagaacaaccaagcgagcgatccaccgcaaggggccgggaacaaatcccccagcaagtcagccccgccccgccccgcgccgacgcctctccccgatcccgatctgtgtgcctggctgcctgcaacctccgtgggatggaggcggcgcggcagcagcaggaggagtgcccgtgcggcggggccgaggccgctgaccagttcgagcggctgcacgacgcggtgctgctcgacgtcctcaatcgcatcggcgacgtcaaggcgctcggccgctgcgccctcgtctcgcgccgcttccacgcgctcgtgccgctcgtcgactccgtcttcgtccgcgtcgactgcgtcatccctgacgacccgccgccctcgtcctcctcctcctcctcctcctcttccgccgcaccaggcaccccgccgcggcaggcgccagccccaaccgcgcgcgggcgcggcgcgctcgcgcacatcgcgcgcgtcctgctcggcggcatcgccaggcccatccacgcgctcggccagatcctctcccccgccgccgcggccgtctcccggcgctccgaggcactgcccgcttccccgcgcgcgcccgtcgcggacgtctctcaccactccccctccgaggtgctccgctccttcaaggagctgcggcgccttcacatcgagctgcccacgggcgagctcggcattgacgacggtgtgctccttaagtggaaggccgacttcggctccaccctcgtcagctgcgtcatcctcggcgcctcgtcgatctcgtccaagccgccgacagggtacactcaggcggaatcggaaactgctacggccgccactcccgataccagtcgggagactgaagagccggggagcctacctgattctctttatacaaatggagggctcaagcttcgcgttgtctggaccatcagctccctgattgccgcgtcggcgaggcattacttgctgcagccgattatctggaatcacgaattgctggagagcttggacctgacagatgctgacgggcaaggggtgctcaccatggacaagaggcagctgcaggaactgcgggtgcggcccgtctttccgtcagggagctcgcaccgcaccctcatgccggctctcagtatgcgtctgcactacgcaccactcattgaactgcctgggggaacgctgctgaaaggtgcaacactagtggcgatcaaaccaagcgaggatgccttgagggagggccaaggggttggggctgcaggtcctgctggtacatgctggatttcagaggcctttgaggagccatatcggactgcggcaaaggtgctcctcaagagaagggcatattgccttgaaatgaactcgttctgagcaccagggattcacttccacagagttctacccatctgacaggatgtgggaagtgggatgcccttcggttaatatatgggaattcatcattcagtgcaaaaattggaccaactccccccatcattaatttatctgatctcggtgaagagatgacttcgtgtacctgtaactttagggttgtaattacagatacgtatttgtgctggactactacacgcggaacggaatgctatttgggccgattcccacagagtgtcccatgaagagaagccatatcacttgagcgtttgagcgtggtgctcctgggccaagctggcattatacttctttcctcaaaggaagcaccagagatttcgtttttagcagggcctttttgcttaaatcttgccgagtcatgcatcaatttatactcattgttataaaaaaaattatagactcgaatatactgtcccttttaagaaaataaaaaaaaaaaaaaaaaagcggcc

SEQ ID NO: 83849 - DNA, 723 bp, Zea mays
  Clone ID: MRT4577_176484C.1
tcatgtttcactggaaacccggccggcggcgaggccacgcgcaaccgcggggactcctcacgttgaggagcggctgcatctccctgtgtattcatggctggccagcactcacttaactactcaagctggagtgccggaagcagctttgccaacactgctgttcagcaggcgcttgtgtacccaagcccagccaccagtgcggcaagcagcctcgttagcgctgctcgtgttcagcaggcacggtactactcagccggtgctgtggtgatcgacgaggagactgtccaagtgctaatcaccggggtggccaagtgtaattcagtggcaagcaaatgccttgcggagatccatacggtgcaggatctgcaaatcatcaccctcattgtcattttgtctggtattgcgggggcctggtatgttggacagcaagtaattgatcgagggtctgagatcctgggccaggtgcaaaagcatgccccggaaatcttgggcgccgtctgcgacgagatggtgtaccagctgaagatacccttccttggcagcgggaggcgcctcgtcttgcaagaccattggttcaatgacccggagaagtcgctgacgaggtatgagcagaggatgaggcgtgaggctgcgaggcaagagatggaccggcttcgactcgaggaattcaatcgcgcccagggaggagaagaaacgccgagctgcgcaaatgtacgagcagtc

SEQ ID NO: 83850 - DNA, 327 bp, Zea mays
  Clone ID: MRT4577_176485C.1
gttgaacgttaccctcgcctgtcttggccgtatgggggccaccattgtgctgcagatggtctgcctggtgaacgctgagctgtaccctacattcatcaggaatcttgggatgatggtatgctctgccctgtgtgacctgggtgggatcttcacccccttcatggtgttcaggctgatggaagtttggcaagccctgcccctcattttgtttggggttttgggcctgactgctggggccatgactcttcttctcccagagaccaagggtgtggctttgcctgagactattgaagaagcagagaacctggggaggaggactcaaaggcc

SEQ ID NO: 83851 - DNA, 295 bp, Zea mays
  Clone ID: MRT4577_176486C.1
ggcccactcctggcttccaccactcctgtcacctcttcccgcgccgacgcagccgccatggaccccgtctccacatgggggctaacccgctcgcaggcgccgacccggagatttacgacctcctggagcgcgagaagcggggccacgtcgcggcaatgaagtcatcggcttcgggaaatttaacttctttggcggaaatgaaggcgtagggttcggggctcataaaaagtaactccgagggaatgccgggcgcccgtaattaggggggaaaggagttaattgacgatttcgaaaa

SEQ ID NO: 83852 - DNA, 382 bp, Zea mays
  Clone ID: MRT4577_176487C.1
gtcgcggcctctggcgcgggcaagatcgcctgcacctatgacctcgtcgagccgatgcggttcctctacgtgcacgtcgtcaaggcgcgagacctccccgcggtgtccgccacgggcgccatcgaccccttcgtcgaggtcaagctcggcaacttcaagggcaccacgcccgtcagggcggccagccacaacccgtcctggcagcaggtcttcgccttctctgccacgcaccttcagttccatctgctcgaggttgccctcaaggccaaggatctcgccggcgacgacctcgtcggccgcgtcgtcttcgacatcgcggaggtgccggtccttgtgcccccggactcgccgctcgtgcaggagtggtaccgtcttgagacca

SEQ ID NO: 83853 - DNA, 436 bp, Zea mays
  Clone ID: MRT4577_176488C.1
ccccccccaaaacaggaatttataagggggggaaaacaaaaatggggaaaaaacccggggcggccaaagtccgggggaaaaaaataaaaaacaagtcaaatcccgggaaaagttcaaaaagtagggggggggggagttcaccgccccaggggaacagggtccccacccccaaaaatatcaaccaccgggtttgggggtcccaacccgccgccccaaaggggaagtttgcccccagggaaaaaattccttttccccccccccccatttattggaacgggacggaaaacccctccaataaaaccataaggggccaaagaaggggaaacccccttcaccaaaaattttttggccttttccggaccaaatccctttttcctttcgggaaaaaaaaaagcttttgggaacgggaacctgaacccccaaatgaaaagggggg

SEQ ID NO: 83854 - DNA, 313 bp, Zea mays
  Clone ID: MRT4577_176489C.1
attcgccgcaactgatggcccctgcgatgccgtcctcagcgtacgtgactcaaggcatgggcgtgtccatatccgacgacgacgaggccgccgtcaaggtgcagcgtacagatccggcgcaagcgctcgcgcggccgcgatatgcgcttcggggcgcctaccggcggattgtatgtccggccgcacgtgtgggcgtgccactcctactaggcggagtcggcggatctctacccctgtacgagtcctaccgactaacgccttcgcgctaatccacactgcctcagatttgataacctgaaattagacgtgtatg

SEQ ID NO: 83855 - DNA, 808 bp, Zea mays
  unsure (1)..(808): unsure at all n locations
  Clone ID: MRT4577_17648C.1
ccgggaaaaaaaaactactccgtcactttgtttgcaaagctcctcctcgatccatcgatcactgcaccggccggcggcaccgcgcgcgctcgcaggggctagccaacgagacggcagcaatggcggaccgtgaccgcagcggcatctacggcggcgcccacgccacctacgggcagcagcagcagcagggaggaggcgggcgcccgatgggtgagcaggtgaagggcatgctccacgacaaggggccgacggcgtcgcaggcgctgacggtggtgacgctgttcccgctgggcgggctgctgctggtgctgtcggggctggcgctgacggcctccgtggtggggctggccgtggccacgccggtgtccctgatcttcagccccgtgctggtccccgccgcgctgctcatcgggacggccgtcatggggttcctcacgtcgggcgcgctggggctcgggggcctgtcctcgctcacgtgcctcgccaacacggcngcggcaggcgttccagcgcaccccggactacgttggagggaaggcgcgccgcaggaatggcggagaccgcggcgcaagcgggccacaagaccgcgcaggcaggccaggccatccagggcagggcgctggcggcggcggcagggcttcctcgtaagcaagtcatccatgcatggatggatgcccgggtgcgtgtctgtcagtatcagcagggtcgtctcggaatgctgtgttccctgtacgtgtgggtgaccgtcctttggtcgtctttctcccccgagtgtgtgttacgtatgtcctggtgttcgtcgtgtgtg

SEQ ID NO: 83856 - DNA, 490 bp, Zea mays
  Clone ID: MRT4577_176490C.1
ctcccttctttcttttgataccattttgtatcttttaaagcacattttttgttctcaataatggcagccaaaatattttgccttattatgctccttggtcttttcagaaaaagctgcttttgagagcattgtcccgcaatgctcacaagcaccaatagcttcccttataaccccatacctttcaccagctatgtgttgagcccgtgaaaatgcgggccttctaccctacaggatccaacaggcaaaagcagcgggcatcttacctttatcacccttgttcctccaacaatgatcagccctattacagcagttacctttggagcatttattggtacaaaacatcaaggggcagcagctacaacaactagggctagcaaacaatgctgcctactgttaggaacaacaattaccttggggagcaattgttggcacaaaacataagggcacaaaacctacagaacaaaaaactaccaaaccttgttgactactc

SEQ ID NO: 83857 - DNA, 402 bp, Zea mays
  Clone ID: MRT4577_176491C.1
ggaagttccttccggttccagagagatcgcggaggagaatgatgggagggcgcgcggtgctcctgctgccgctgctggtgatcacggcgctgttcgcgcagatccgcgcgtcggatccgttgttccacgagtccttcaacgagagcttcgacgggagctggatcgtgtccggcaaggaggagtacaaaggtgtatggaagcacgcgaagagtgatggccatgaagactatggtctccttgttagcgagccagccaggaaatatgccataatcaaagaacttgattacccagttactatgaaggatgagacagttgtcctgcagtttgaagtgaggcttcagaatggccttgagtgtggaggtgcttatatcaagtacatccgccctcaggctaccggatgga

SEQ ID NO: 83858 - DNA, 314 bp, Zea mays
  Clone ID: MRT4577_176492C.1
ccgggtcggcccccgcggcttcctcccgcgctgtccgcgcttctgctgggggtggggggggttgttgctcctccgggggtgcgccgggggggtgggcgggggcttcggcgttcctcctgcgcgggggcggcttgctcggtggggcgctgctgctgcgggtgctgggcgccttgttggcggcgctccgggccgcggcggtcgcggccttcggggggtcgctgctggtgctgtccgggctgttcctggccggcgccgtggtcgcgctctcggtggcctcccccgtgctggtggtcttctgtccggtgctggtgccg

SEQ ID NO: 83859 - DNA, 394 bp, Zea mays
  unsure (1)..(394): unsure at all n locations
  Clone ID: MRT4577_176493C.1
cccgggcgggggccgcggcagganggcggaancaacggcgaggacggngaaggangncaacccgcangagnncgncaaggccgacnccgcccaccncaagcgcgccggcaagaaggagcncccngagnggggngacanngngaagacngcgaggnncaaggagcggggggggggnganccngacnggnacnacancagggcngcanccanggcaaggaagaacnaccnaaggcaaggcancgggggggggggcnnncagaagaacnacggnggccgccagaggaagggnncccgcccaccacaccccngcaagagcagnggngcngnngcacgcaacanccngcagcagcggcagaagaggggcancaacgaaggcgagcccaaggggggacgc

SEQ ID NO: 83860 - DNA, 261 bp, Zea mays
  Clone ID: MRT4577_176494C.1
gaaaagacttccacatcgtgaccttgttaaaagcctacactcgctggcgccgggtgctcccccacgacctgtaaatatgcaaaactgcatgtcctccgttaccgactaccggaggctggggatcaatttgagaataaaatctatcaacgcggatggactctgtgtatagtcctgctgctaaccaccctgtgtgggctgtggagaggattgacctgccatgcatatatgaatatagtgaacgtgtgaagcaacaactgggtc

SEQ ID NO: 83861 - DNA, 484 bp, Zea mays
  Clone ID: MRT4577_176495C.1
tttttctctttcttttttttttttcctctcccaccccctaagggggggggtaataactttaaccacccaatctcttccaaaaaaaaaaaacaacccagcttgtttttggtacactcgaaaaaaaaccttggtttttaatgaaggccctttctcaaaacctaatcgaaaaaaacaaaaaagtcataaaaaaaaagatttccattttttcaaaacccaaaataaaaaaaactttcccacacacccaatgatccaaccccctccaaaagctcaagctttaatcactgcactagaagggattccctatctgcccaaggcccttaccctttttaaggaaaagtaggccaaaacccggtaccccaaaaccaaaggtaccaaagctttcccctttgaccacccctttccatttgccttgaggggtgtaagaaattccgatcggggttcttcttcacttttaaaaagaccctttccctttggtaattaaaaa

SEQ ID NO: 83862 - DNA, 2104 bp, Zea mays
  Clone ID: MRT4577_176496C.1
cattgggtacctcgaggccggccgcattgggggcctcgaggccggccgggaggcgtcgccaactccacttgtcagatcttgcccgtatggtatggagctcgccggagcagcctcccctcacccgccgccggaatcccacgtggcgccgccccgcccacctccgcagccgccggaagaggatgtatgtgaagatagaggggacatgagtgtcaccggcgaaaagccatgcacacatcgggaatcagatgttggtcagacaaatagttgtagccttaacaattccagtgagtgtgagaatcatacacccagcaacgacgaaatatcggaaccagagtccaatttggagatggccaagactgatcagggcggcgatgtgccgagcggagagaaggtcctgaagaagccagacaagatcctgccgtgccctcgctgcaacagcatggacacgaagttctgctactacaacaactacaacatcaagcagccaaggcatttctgcaagagctgtcagaggtactggaccgcaggcggaagcatgagaaacatccccgttggtgctgggaggcgcaagagcaagagctccagcgcgagttgccgcagcgtgttgattcccgttccaggcagcagcagtgtagctaatcctggcggagaggcttccctgtttccgttgtccgtaaaagcaaaccaagcagcagttagcttcgggcctgattccccgctctgcacctccatggcctccgtgctgaagatcggaggaggaggagagcaggttaagagctgcagccctgcctcagcagcagcacagcccaggaacggagaaacccagacccagacgtgcgcaccttcttctgctgctacaacaccatcagatggtccagggaatggattgcagaaaggagcagagagcgcacaccaaaaccaaaaccaaaaccaaaacggaatcattgggcacagcaacggagtcactccagtgcatcctataccgttcttccccggaccgcctttcgtgtacccctggagtccagcatggaacggcattcccgccatgggcagcggcggggtgcgcagccccagcgacaaacggcgcagcgatttcatcagaacacggcaccgcgagcagcaccgtccagtggaacgtgccaccagcgatcgtgcccgtgctgccaccgggattctgcggcccgatcccagtcccggtaatcccgccgccttccgtctggccactgatcactccctggcccaacgcagcatggagcgcgccgtggctcgggcctagcgctagcgtgccgccggggtcatctcggagcagcggcagcagcacgtgctccgacagcggctgcggctccggctcccccgtcctgggaaagcactcgagggagtcgaggccgcagggcgacgagaaggcggaacgacggtgcctgtggatccccaagacgctccggatcgacgaccctgtcgaggccgccaagagctcgatctggacgacgctcgggatcgagcctggcgaccggggcatgttcaggccgttccagtcgaagcatggacggcagcaggagctgcaagcgtccggcgccgctcgcgccctgcaggccaacccggcggctctgtcgcgctcgcagtcttttcaggagacgacgtgattactacactacagagcagagcgttgctgaaacctgtgtggcattactattcagagacgattgtatttcaacttcaaggggggaaatgagagagagagcgcgagagagagattggcctgtttggttcactacctcagttgccacactttgcctaacttttctgactaaggttagttattcaattcgaacgactaacattaggcaaagtgtggcatatttagtcataaaccaaacatgccatatatgttctgtacaatatgattggcaacataggtgctgctgctgtacaaggcagcggacaccgttactgtaactgtaaccattggaagagtgcatcctcaaacagtgtgttgtttccatgtagagcgtgcccccaacatgttgggttggaggtgatcaggtttccagcgcgtgcgtgcttggttgtacaagaataactgtcaatagcttcccttcgcttccct

SEQ ID NO: 83863 - DNA, 380 bp, Zea mays
  Clone ID: MRT4577_176497C.1
aatgaaaatgatagttataaacgagataaaaagatctgtttcataaaatatctggagattctacagaaattgtagctaagacacatgaagagaaactcaaatacggaagcaacaactgcaaaacactgggaagatagaactaatagcctcccttgagatctgttgacgacatcgtacgggattggagtgacagtctccaaggtcattccttcgaccatgaatcctgggttgggtcctttaagctgtctcttggtgctgatgggctcaccattggctttggctgcagccttgaactcatcattcttcttttttctcagcttgaactcctcagcacatcttgattggtggacatgctccacccgcacatgaatcctcttcct

SEQ ID NO: 83864 - DNA, 289 bp, Zea mays
  Clone ID: MRT4577_176498C.1
cgggaagaacttcgtcctgagcgacttggcggccgccgtcatcgccagctcgtatgccatcttcatggaggaagctgcagagctcaagaaccgttggaagcatgagcttgctttgcttacttcttcttgcaatggcaactaccaacaaggtcaagctggcaacgcccaacaataggcacaaccttaaagggatcctgccgaattaggacctgtagaccggaataattaaacaaaacttgctcattggttaaaaaaaaaaaaaaaaaaaaaaggggcgggcggttttaaa

SEQ ID NO: 83865 - DNA, 468 bp, Zea mays
  Clone ID: MRT4577_176499C.1
agcacacgaaatacgttatttttttgatgacaaataatgttaatgcaaaaatgaccttgcaaagagttagtacatgcacacacacaacgaaaaaattaatcacacggaactttgagccgttaccaaaactaaggcgccttgatgaagaaagcaatttattgaagtaacactatgaccatcagggcttatacggtgaccttcactttggactggaaggaggaagggggacagggaactcggtggactgggcgcccggattgacgtacttggccaggtactcccactggttgctggccagcttgccaattaagcatgtgttgggctcattagagctacgcaaaccataggcatgactcgtggctcgacgcaaattgatatccggctcacatgccgcgaaatcctaccaacatggcggatagaatggaaagcatctggcgcctaacgagcgaggtaaattacaataatcgc

SEQ ID NO: 83866 - DNA, 1124 bp, Zea mays
  Clone ID: MRT4577_17649C.1
cccacgcgtccgctttgtttgcaaagctcctcctcgatcgatccatcgatcactgcaccggccggcggcaccgcgctcgcaggggctagccaacgagacggcagcaatggcggaccgtgaccgcagcggcatctacggcggcgcccacgccacctacgggcagcagcagcagcagggaggaggcgggcgcccgatgggtgagcaggtgaaaaagggcatgctccacgacaaggggccgacggcgtcgcaagcgctgacggtggcgacgctgttcccgctgggcgggctgctgctggtgctgtcggggctggcgctgacggcctccgtggtggggctggccgtggccacgccggtgttcctgatcttcagccccgtgctggtccccgccgcgctgctcatcgggacggccgtcatggggttcctcacgtcgggcgcgctggggctcgggggcctgtcctcgctcacgtgcctcgccaacacggcgcggcaggcgttccagcgcaccccggactacgtggaggaggcgcaccgcaggatggcgtaggccgcggcgcacgcgggccacaagaccgcgcaggcaggccaggccatccagggcagggcgcaggaggccggcgccgggggaggtgcaggtgccggcgctggcggcggcggcagggcttcctcgtaagcaagtcatccatgcatggattatggatagatgcgcgcgtgcgtgtctatcagtatcagcagccagcagggtcgtcgcggaatgctgtgttcctgtacgtgtgggtgaccgtccttccgtccttcgtctttctccccccgagtgtgtgttacgtatgtcctggtgttcgtcgtgtgtgttcatcgccgctccagttgaattccggtgtctgttcatcgccgctccaggtcgtagatgtgaatatactttgctaggggaataagtgataagtctgtctggaaggtaatgtttgagctttgctagtgtggctgggcactctggtcactggttgtgttgtgcatgcatcagctgtatgatcgtcgtctgttgtggaaaattggtcaatgtattctcttgctgaataatttgtgacatctaattgttaaaaaaaaaaaaaagaatagaaatgaaaatg

SEQ ID NO: 83867 - DNA, 2537 bp, Zea mays
  unsure (1)..(2537): unsure at all n locations
  Clone ID: MRT4577_1764C.1
taatacagaaaagacaaagtttactcttttctggatcatatgttttgtgctacttattgccattcacgggttcaacctgacaagcgctggctgcagcagcgaggtgtttgtaggtttcgcggtgattcgtctacccaaatctggaaccgtactgatactgaagaccgtactgatactgaaagcattatccggcgtagactgttaattcaaacattattacacgaatgcataaggctgagcacggcttttgggcttgaactcgttagactgccagcaaatagcaaatcgcatgaatcaacggtttgtactttacatagtggacttcggcttgatcgaaggtgataagtaaaaaaaaaaaagaaaaaaaaaaaaaaaaaaaaaatagcctaaaggtaccctccttctgtgtccgggcgggctgtccgatcctagggaacgtccttatccggctacaactttcgcgacgtctgcgacatcagaaaactgagctcgccccctcttgccttccctcctccgccggaccgctgctgtccgcctccaaccctccagttcgacgcaggcggcgacggcggcgcgccgagatgaaggtctccgtgaagacgctcaagggatctagcttccagatcgaagtggagcccaccgacaaggttgctgctgtgaaaaaggtcatagagaatatgcaagagcaggcttcctatccagctgaccaacaagtccttatacatcaaggaaaggtgctcagcgatgacaccacattagaggaaaatcaagtgactgagaataatttccttgttataatgctcagacagaacaagggatcatcaagtgcagcaccggctaagacaactgcgaatcaggcacctcctactcagacagtgcctgttgttccacctcaaacgtcagcagccccagctgcaccagcacctattgtacctgtcagtgcactggctgcaactgctacagcctcagcagctcctgctgttgctgtatccaccgaggcagatagttatggtcaggctgcctcaaacctagttgctggcagcaacttggaaggaacaattcaatccattcttgaaatgggtggcgggatatgggacagagacactgtactacgtgccctgcgggttgcgtataacaacccagagcgcgctgttgagtacttatattctgggattcctgaacaaatggatgttcctacatcacctccgagtatccagccagtcaatcctgtccaggctgcacaagcagctcaaactgcagctccatctggaccaaatgctaaccctctagacctctttccccaatctcttccgaatgcttccgccaatgctggcacaggaaaccttgatgttttgcgcaataacgtacaattccaaaacctgcttggtttggtgcaggctaatcctcagattttgcagccattgcttcaagaattgggtaaacaaaatccccaggttatgcagctaatccaggaaaaccaagcagagttcatgcggatgatcaatgaaccacttgagggagacgaagagaatgaaatgatgctggaccagatggcggatgcagctgagaccattgcagtgactccagaggagaacgaagctatacttcgtcttgaagggatgggctttgaccgggcactggtcctggaagtgttcttcgcgtgcaacaagaatgagcagctgaccgccaactacctcttggatcacatgcacgagttcgacaacgatgacgggctcggagggccaccgctatgagggcgctctcgatccctacatcatgcgaacgaaggctgtagggcagtagtaggaaaacgttttgggattcgtcccgtctgttcgctcactctacatattcgtttggctttgctgtttagtacagaatttctagatttacagacttactacttgatatcctgatatagaggtcacggccaagcttactttttttaaaaaaaaaaaaaaaaaaaaaaaaaaaaaaaaaaaaaaaaaaaaaaaccagattaccccctggatctagcttactacaaaaaaaaaaaaaaaaacaatcatgggttgcgctcccgatctgtcgctatgtttctagttgataatgtattggcggggctgcttcgctaaatttggctcctttttaggtttgtttggggtcaagaatttggttggttcccctgtggagaaaataaaagtattggaacccccgggcgaagctcccgtggatccaatctgtaggttgctaatttggttccggtggggcgtgtggaacaggcggaacggaaagctgttccaaacttcccctgtggattttcgggttccaaattgggttttttcttggaaacatgaaccaaatgccaaggtgaagttaccaggcattgtagttggtaaaaaaagcaaaggttccagccaatcaatggtcgctgtccaacatctcttcaggttgtgtgtttaattgaaaaaaaagtaaggcaacccgaaacttcattaaaaaaaaaaaaaaaaaaaaaaaaaaaaaaaaaaaaaaaaannnnnnnnnnnnnnnnnnnn

SEQ ID NO: 83868 - DNA, 656 bp, Zea mays
  unsure (1)..(656): unsure at all n locations
  Clone ID: MRT4577_176500C.1
tccgcccacgccgtccgccggcgactgtgcggagggcggctaaannctctagctaaacccactaccgctcccccngaaagcgagtcgccgccggtggccagcnagttaggagcccggcggcaggatgaaggaagaaggggtggacgagcgcnnatccgcactgatgatcgagnaacgnngcgtgcggcagcgggcgagcggctccatnngttcgtcatcgtcgggcgacaagtgcgcgccgatcaagaaaacgtcaatctcaaactacatgcgtcaccaagtcccgcngtcaagtgcgcgccccctttccgtccctctgggtgctttaccgcgacaaggctnncgaaatcagcagtcaccaagaagaaagcgcggcaagcagatcaaagaagctnncatgcagcggggtcttcctggacctctgagaaggccngacccgtntctcttctcttcatggagacnnctcggacattacatactgcctctacaggnngactctgagcgggntccttggcaacacgtntcggcatgtngcatacctgcnnaggactttgaggcnnactgacgcctaacnncttcttgcacggnacctattnagaacagtntgagggggtggcggtttgataaaatcttgctgctccgcttcgcttgtcctc

SEQ ID NO: 83869 - DNA, 734 bp, Zea mays
  unsure (1)..(734): unsure at all n locations
  Clone ID: MRT4577_176501C.1
ctattggntgggctgatacgcacaaacaaccttcctcgggcaatggacttgcttaaccagatgcttgatcaactgtgtgatccagacacagtaacatgcaacattttcttgcgggagattggggtcgtagaggggaaagggagataatttttagagggattggtcgtgaggctatgctgtagagacagatatagggcagcaggagatgttgtgatggccatgctggctaagtacattgtgccagaggctgccatttggtaatactgtagtgaaaggagtttgtcagacaaatagaattcagaaagtggttgacaattgttggactgagatttggaggccttgaaggttatttatatttgttcaatacatcgatgggcacatgttggagtcatttttatactcgatctgttggaaatttggatgttgttgggaccatgcttcgtcgccgaaggtcctgcaggaggaaatagcttcggctaaagctgcttatacatgatgaccgaagctaccactcgtgaagcttcggcgttataacatatccgaagatgaagtatcgaaccgacttaaagatagaatgaccttttagtccataagggtctgagtcattgttgtaaacttttataaggggtatgattgtattttttacgggatgtgtcctgtgcttataaatagttaacagtattcctttactgttcacggattcctgtaattgcaaacacattgtgtgatgtacg

SEQ ID NO: 83870 - DNA, 1793 bp, Zea mays
  Clone ID: MRT4577_176502C.1
caagccaaagttgcaaagatggcttgatgagtttggggagtactatagcagagttgtggtagccctttctttggttgttgcacttttgggaccattaccccgtccgcccgtccgctttttaagtggcctttttttggtaactcagtctgtaggggttcaatttaccgtggattaggacttatggtggctgcatctccctgtgcattggctgtagctccattggcatatgcaactgcaatcagttctcttgctagtaagggaattttgttgaaaggtggccatgtcttggatgctctttcgtcttgtcagtctattgcttttgataagacaggcacactaacaactgggaagcttatgtgcaaagcaattgagcctatccatggacatttgggtgtgaaaagtggtcgtagtaatccttcttgctgcactccaaactgtgaaagtgaggcattagctgttgctgcagccatggagaaaggaacaacccatcctattggaagggctgttttagaccactctgttggaaaggagcttccagttgtcgctgtagaaagttttgaatgcctacctggtaggggagttgttgctactttgagtggtgtaaaggtaagggaaaatgaaaatgagctatccgaggcatctatcggttctgtggattatatttcttcactatatagatccaatggtgaatcagagcaaataagagcagcagcaaaaagttctgcatatgggcctgaatttgttcaagctgctctatctgttgacaaaaaagttactcttttccactttgaggatgaaccccgctctggtgtttgtgaagttatatccaccttaagagagaaagctaaacttcgcattatgatgctaactggagaccatgaatcaagtgcccagagagttgctaaagctgtttgtattgaagaagtccacttctctttaaagccagaggataaattaaataaagtgaaagcagtttcaagggaaggaggtggaggtttaataatggtcggtgatggtataaatgatgcaccagcccttgcagccgcaacagttggaatggttctagcccaacgtgccagtgcaactgcagtggctgttgcagatgttctgctgttgcaggataatatttgtggggtgccattctgcattgctaaggctcgtcaaacaacttcattggtcaaacaaagtgtagctctggccttaacttgtattgtttttgctgcgcttccttctgtcctgggatttcttcctctttggttgactgtacttcttcacgaaggaggaacccttctagtgtgcttgaactcgatacgagccctgaacactccgacatggtccttggtagatgacatccggaagctcgtcgatagcttaaggaattatttcccatccaagttcaacagctctccctcaagctacaccgcaaacactgctcccttgtagattaccatgtccagcaacggccgtctttggttaaccttgttgtttctgtggcaccgtttgaatttaggcgaggggttctaacctaattttgtaggcgcccgctgtactcttttcaccaccatgtaaagaaagaaacttggcttgaggttgagctgaaggtcaaaggacagtgatgaaacatccagttacgacgtggcgcagaatcaacgtctgtgtctgttgggcccgttcgttatgtggaatacaatacatacaggtgctatacgactgttgagatcagggaagtctaatcgcctgtttcttgcttgcagaagctaggctctgctgctgagattgattgattggtttat

SEQ ID NO: 83871 - DNA, 462 bp, Zea mays
  Clone ID: MRT4577_176503C.1
gaaacggaaaaaaaaaaccttctttacataatggaaaaaacccaaggggtcccaaaaccaagggctgctcaaaaacccccaaaccaaccaaaacggaggggtttaacaaggggcaaaaaacatagcggaaaacctctacaacctttccaaaaaataaattttaaactggggggacggggcggccctaaaggatggaataaaccaggacaaaaacccgggggcggggccaggaacccattttttccattggattaatggggaagattttcaaaaagggaaacttttcccatgaccaaaagccttttttgcaaaaaaaggcgggggggcccccctttaatcaattttaacaaacaaaaaaaggggggggccaaagttaaaggaaaccggaaacccatgggcccccgggaaaaacatgattgcaggggccttgaccggggaaaacccaaggtaaaggggaccaaa

SEQ ID NO: 83872 - DNA, 209 bp, Zea mays
  Clone ID: MRT4577_176504C.1
tccgcccacgcgtcctcccactcgttcggaacctaatttggatcgacaaacgatcgaacacaaggggggatttgtatcaaacctaccgacttatgttccacatctagattgtcacctacctaatgcaaggtcatttcaacacctgagcttgaataatcacctcatctgtgatctatattttgtccaccccactattaatgaccatacta

SEQ ID NO: 83873 - DNA, 479 bp, Zea mays
  unsure (1)..(479): unsure at all n locations
  Clone ID: MRT4577_176505C.1
accagctccagtgaggctgtatgtttatgagatggagatccttttttgctctgtccatccataagattgagatttttttgcttgtatacgaggtgtatgatggagccgaccctatggagctgcatgtttatgattttaaaggacctggtgtggccttatcgatgtacaatagcgatgagtttattaggcctttcgctgaatcctccatggatatggctctttcaaaaaagttgtctctttatctcagcaccaagaatacaatcctcaagaagtatgacgacaggtcacaactgtgatatgtgcagcgaagcgatggcgantggtgttttttgatgttcaggacagaatcaatggccgaccttatgtgattgtgatagcatagttgctggcgagtgcaaatttctcctgaagttactctcagctcgaattgcagacttatgtcatcatatttaataagtgtagggcgccgagggtgcatg

SEQ ID NO: 83874 - DNA, 987 bp, Zea mays
  Clone ID: MRT4577_176506C.1
ctcaaccggagatggcgagctctggcggaatctccgaccagctcttcgtctccgtcaagttagagagcccgcacctggcggagctcgacctcgccccccacctcttcggctcccaccctgtggctggctcgtgggacccctgcaaggccctgcctttggagcgggcggccaccgccgtgtgggagttcagctgcgtcgtgccttcgcagcacgggtatgccagcagcagaaggggctgttgcagcagctgctgtagctgatcagatgtatggaccaaaagaggaccgcaagttggccatcgtattggttgggctaccagctcgaggtaagacctttacagcagctaaacttacaagatatctccgatggttaggtcatgaaacaaaacacttcaatgttggaaagtaccgccggctcaagcatggaactaatcagactgctgatttctttcgtggagataacagggagggtgtggaggcacgtaacgaggtggctgcattagcaatggaagatatgctatcttggatgcaggagggtggtcaggttggtattttcgatgccacaaacagcacaagaatacggaggaacatgctgatgaaaatggctgaaggaaaatgtaaggtatgtttaaatcattgtgtgcatcttggacatccttttggtttgaattttttttgtctcctgccaattggcaatagtatttttatatctctaactaagcaggagttgcacatgtcatttcattaagtgccaatagtattgtttggcagttgtcagctatgcatgttgatttgatcgtggagtttaataacttcgcaggccgcagaggtccttgttcctccatagtgaggtttgggataggaagagcgcaatccgtgctatgatgttgggaagcgcatgcactgatatttcaagaattgcgctgtgctacttctaatcggaatgaatgaattcagtgtgtgagggaaaaatgtactatgtgaagag

SEQ ID NO: 83875 - DNA, 171 bp, Zea mays
  Clone ID: MRT4577_176507C.1
caccgtcttattctataccacattcagactgtcatttaaaaaaaaccggaactgtaaatactacatctaaacaccaactactaccatcatccactataactttctatacgaaataaatttaatcacttcctcctttacaacgcaaactataaaaccctactaacccaactt

SEQ ID NO: 83876 - DNA, 865 bp, Zea mays
  Clone ID: MRT4577_176508C.1
ccccgcgtccgccccgcgtccgccccgcgtccggtcacgagaaaggtttcgcttcgaaactcaaccggagatggcgagctctggcggaatctccgaccagctcttcgtctccgtcaagttagagagcccgcacctcgcggagctcgacctcgccccccacctcttcggctcccaccctgtggctggctcgtgggacccctgcaaggccctgcctttggagcgggcggccaccgccgtgtgggagttcagctgcgtcgtgccttcgcagcacgaatcgctggatttcaagtttgttttgaagcgaaaaggtgataatcctcaatacattattgaggagggacctaaccgaccattgggttgccagagaaatgaatttgagatggggaatgcgttgtttaaactcaacgaagggaaggaggtacttgagtgcaaggttcaggttgagacagaaatgttatccccatttgacttggcggctagttggagagctcatcaggagtattttcagccttcaagggtgcgagggactcacgatgtcactatcaaccctgggttagaaggcagggccaagaatggcttcgcttctggtttggagcttgatttagacaagtatgtagttccaacaccaaacatgggctcaggtgttgtttatgcagctagtttgactgaaaatccacgctcattattgcaaactgggagttcctcaaacaatgataccacaaaggacattttgcacaactcaactaaaggcgattcatccttgaatcactatgttaacactatgaagctaaggcattttagctatgcaactttactaaaggtagttgtattatttgctgaaatatgtaaaattttgggagcttag

SEQ ID NO: 83877 - DNA, 247 bp, Zea mays
  unsure (1)..(247): unsure at all n locations
  Clone ID: MRT4577_176509C.1
cgacgggctaccggagccccaagacccnaaagaagggggggggtcataggaggtcgggcgggccaacactacccaccnaggacgagtggtgcgcgcaaccggagtcatcgccgccgacgacggcggcgtgccagcaccatcaccaccacctgcccccgagcaacgaggtgccgacgccgcgccactaacacgaccacggctggtgcacaccggagaagccccagccggcgacagcgcattgcacgcc

SEQ ID NO: 83878 - DNA, 1101 bp, Zea mays
  Clone ID: MRT4577_17650C.1
cctcgagccggcgggaaaaaaaaactactccgtcactttgtttgcaaagctcctcctcgatccatcgatcactgcaccggccggcggcaccgcgcgcgctcgcaggggctagccaacgagacggcagcaatggcggaccgtgaccgcagcggcatctacggcggcgcccacgccacctacgggcagcagcagcagcagggaggaggcgggcgcccgatgggtgagcaggtgaagggcatgctccacgacaaggggccgacggcgtcgcaggcgctgacggtggtgacgctgttcccgctgggcgggctgctgctggtgctgtcggggctggcgctgacggcctccgtggtggggctggccgtggccacgccggtgttcctgatcttcagccccgtgctggtccccgccgcgctgctcatcgggacggccgtcatggggttcctcacgtcgggcgcgctggggctcgggggcctgtcctcgctcacgtgcctcgccaacacggcgcggcaggcgttccagcgcaccccggactacgtggaggaggcgcgccgcaggatggcggagaccgcggcgcaagcgggccacaagaccgcgcaggcaggccaggccatccagggcagggcgcaggaggccggcgccggcggaggtgcaggtgccggcgctggcggcggcggcagggcttcctcgtaagcaagtcatccatgcatggatggatgcccgggtgcgtgtctgtcagtatcagcagggtcgtctcggaatgctgtgttcctgtacgtgtgggtgaccgtcctttggtcgtctttcactctttctcccccgagtgcgtgttacgtagtatgtcctggtgttcgttgtgactcgtgtgtgttcatcgccgctccagttgaattccggtgtctgttcatcgccgctccaggtcggagatgtgaatatactttgctaggggaataagtgataagtctgtctggaagggtaaagtttgagctttgctagtgtggctctggcctctgggcactctggtcactggatgtgttgtgcatgcatcagctgtatgctcgtcgtctgttatggaaaatattggtcaaatgtattctcttgccc

SEQ ID NO: 83879 - DNA, 433 bp, Zea mays
  Clone ID: MRT4577_176510C.1
agggtttatgtcagttctgttgaggaaataggatttcatttgagcagatacatgatgtcaagctgacttagcagaacccttctgtggttggatgcagaacccttctgtggttggatgctggttgctggtgttgcgatctgttgccaccttgtttattgttatagtagtggccataaaattagctggttcatgtgtgtattccagtttcatagagaaaggacatgttggtcgtagtagggctaatttgacattatggttactaattattctttaaactatttgagtacacgtgtgttacaactgggacatataattacataataacttatattctaaatgtgtcttatattgttataagaaaatggttcataatccatttggtatccttgccatacattaaatttggtttttaaatttagttgtttcacttcct

SEQ ID NO: 83880 - DNA, 202 bp, Zea mays
  unsure (1)..(202): unsure at all n locations
  Clone ID: MRT4577_176511C.1
gttctcaaatcaagctaggtgattcgccgcagcctctcaccctcgcgatgtcccgacctcccgcagccgccgcacagatggcacccaaggcgaataagaagccggggcgccacactccaccctcaccaatgcacgaccccacctataccgagaatgcaacanancaaaacgccgccacgaccgtacgccggcaccccccgat

SEQ ID NO: 83881 - DNA, 388 bp, Zea mays
  unsure (1)..(388): unsure at all n locations
  Clone ID: MRT4577_176512C.1
cacaaatccacccacttgttcgatacacaaaaacacttatgtcatctctgaagggacacttcaaaactttgaagccaaaatgggccttttttacccgccctatccatcctaggattctattggcttaacagtggtgtggcttttgaaaatttctagcatccgaaacaacgcaaacattacttcaagtaccacacggtaccaagggcacggataaatggggcgggtcccataaacaccttttattagaaagccttgcaaaaccaagtacgttaaaaatgctatcaatccaaagaaaagctcaaattcccccctacacaaaaacaaggtgaaccgggtgttgccagggacccccctgcaggactttggnntgtttttttttttttttttt

SEQ ID NO: 83882 - DNA, 568 bp, Zea mays
  Clone ID: MRT4577_176513C.1
cctccacgaaagacggacagcatagagaaagagagagccggccggccggcgcacagcaacaagataaaaatggaggcgcctcgccgtccctgctcctcgctggtacttctgctgcgtttcttggcgatcttggcagcggcggcgttcttcatcgttctcgccgtgcacgttgagcctgtgcaaggagggaggcagccgaacccaccgccatctccggaggcacatccaaccccgcaatcacattgctgcaaccgtaggtgaaacaaattaagagaggccgcgctatacgattgggatgtgcgtctcttatttggtgggagccagcagtgtccaatttaaaccttgtgatcttattagaccatcttaatttaaaagtttttttcttctaaagctcgctctctaaattattgtttacaatgtcattatataaaaaatcgttctctatagttttttatgtttaactggagtggttacagcatatgttgacaggttttaagaaataatatttgcacatcattcatgagatgtgttctaatcccgaaaaaaaaaaaaaaaaaaatttgcggcc

SEQ ID NO: 83883 - DNA, 520 bp, Zea mays
  Clone ID: MRT4577_176514C.1
gtcgcgccgccggttctctgccaaccagtcggataaaaccctagagctctatgcctgctcgcctgcgccgctcggagcgagctccccatctttcattctgtcatccatggggacccaaatcagcaagaagaagaagttcgtagcgacggtggtctctacgccgagctcaactgagtatgctgacgcagtgagctggcggaggacggctactatgacgtggaggagcacgccacgccgatgcagcacggagatcatcatgcgcgccgcgcgcacgcggaacgtgctcggtgagaagggccgtaagatcagggggctgaccttcgactgtcagaagagggtacactgctgtgcaagtggggtatagctgtacgccgagaaggttgtaaaccgtggcctatgggccatcgcgcaggccgagtgcctacgttacaagctcctcggaggccttgccgaccgcagggcttgatatggtgttcttcggtatgccatgagagacggagccaagggcttgtgaggtgtt

SEQ ID NO: 83884 - DNA, 329 bp, Zea mays
  unsure (1)..(329): unsure at all n locations
  Clone ID: MRT4577_176515C.1
ggaggggnngatttattagataaaagggtgangngggntntgnnngnngatnngatgattnatgataanttganggatngnanggtttttgtgtnggngangnatnattnaaatttgtggggtatnaantttngatggtaggataggggnntannatggtggtgaagggtgatgtagatttagggttngattnnggagagggagnntgagaaanggntannanatnnaaggaagggagnaggngngnaaattaattaattttggaanggggaggtagtganaataaataaaaatanggggggggttagtgtttggtaattggaatgagt

SEQ ID NO: 83885 - DNA, 933 bp, Zea mays
  Clone ID: MRT4577_176516C.1
ctcgagatggagctccacttccaagcgcagccaccagtgttccagctcgagaactacagcagcagcagcagctactactactaccagcagcaagaggcggcggctcaggccaagccgtccaagccacggggccggaagaagggcagcaacaaccacagcaagttcgtcggcgtccggcagcgcccgtcgggccggtgggtggcggagatcaaggacaccacgcagaagatccgcatgtggctcggcaccttcgagaccgccgaggccgcggccaaggcctacgacgaggccgcccgcctcctccgcggcaccgacgcccgcaccaacttcgcgccgcgcatctctcccgactgcccgctcgccgtccgcatccgcggactcctccaccacaagaagatcaagaaggccaaggccgccgccgcagccgccaagcagcaggcgtcgtcgagctcccctgcatccaccacaagcaacagcaacagcaatagtcatagcacgaatagtgctcgtggtggtggctctagcatcaccaccaccaccaccagcagcagcagcagctccagctccagcagcgcagtcagctgcgacgacgacatggccacgcagggcggcggcaccggcgcactggacgccggcgaggtgtaccggccggggttcgccaccgcgggcaccgaggaggagttcgactcttggatgttcgactcggcgttcccggcgctggacagcttcgcggccgtcgacagcgccgtcccagctgctggcaccacggaggaaccgggcgccgagatggccgagttcgagcggatcaaggtggagcggcgcatctcggcgtcgctgtacgccatgaacggcctgcaggagtacttcgaccgggtgctcgacgcctccgcctgcgactcgctctgggacctgtctccgctctgccaccattag

SEQ ID NO: 83886 - DNA, 240 bp, Zea mays
  Clone ID: MRT4577_176517C.1
tggagtactgttgctcctcatctcattgggaagggtgtccaccttgtgatagagagagagaaagagagaaagagagagagagcgcgagagagagagagagagagagcgcgatagccagcctccaagtcacttctacttcggggttcactgagtggaacgaactgaagttcgaaggcctgtacttgttacacacgcccataggcttctggcccaaccaagctcaggtcatagacaacaaca

SEQ ID NO: 83887 - DNA, 1514 bp, Zea mays
  Clone ID: MRT4577_176518C.1
cggccgctcgagccggcgggaaggaccaaggcttcgagcgtgtgctgtgcctatacgtgagcttcagtgccgagtgagccatagtagcctagcctagctgactcccgcgatgagctggtggtgggcgggcgcggtgggcgccgtcaagaagagccaggaggagcgcaccgagctctccttccagagcgtcgccctcgtcatcggatccaccggcatcgtcggcacatcgctcgtcgacatactcccgcgcgacgacacccccggcgggccctggaaggtgtacgccgtctcccgtcgcccgctccctccctggtccccgcagccctcccccgccgtcacgcatctgctcctggacctggccgaccctgtcgccgtggcggaggccctcaagccgctcaccgacatcacccacgtcttctacgctgcgtggtccagccacccgacggaggctcagaaccgggaggccaactccgccatgctccggaacgtgctctccgtcgtcgtcccgggctgccccgcgctcgcccacgtctgcctccagaccggccgcaagcactacatcggcccgtacgaggccatcggcaagatccccgtcccagacccgccctacaccgaggatatgccccgcctcgattaccccaacttctactacgaccaggaggacgtcctctttgacgaggtctcccgccgcgacggcgccgtcagctggtccgtgcaccgccccaccaccgtcttcggatactcccctcgcagcgccatgaacctcgtcggcagcctctgcgtctacgccgccatctgccggaaggagggcacgacgctccggtggcccggctctcgggtcacttgggagggcttcagcgacgcctccgacgccgaccttatcgccgagcacgagatctgggccgccgtggatccgttcgccaagaacgaggccttcaattgcagcaacggggatctcttcaagtggaagcagctgtggccgatactcgccgaccatttcggcctggaatgggctggctacgaaggtgaggagaacaggttcaagctcgaggaggtcatggccgggaaggaagctgtctgggcggagattgtcagggagaacgaccttatagccacggagcttgacgagatcacgaattggtggttcgtcgatgccatgtttgctgtggagacccagcttctggacagcatgaacaaaagcaaggagcatggcttcctcggcttcaggaacactgtcagctctttcaacacatggatcgagaagctgaaggtcttcaagattgttccctaataataattcatccttgctattcacttctatactgttgttctgcatccttattatcctgctcatttatcagcaccagttctcctgtaattcaaacatcttgctatctgtgccaggtttgcatgttatatactagggaccaataaagatcaacacattgcaaaataggttattcttgtccagcatgggtttgattgaaattgtttgtgtattgaattactagctg

SEQ ID NO: 83888 - DNA, 222 bp, Zea mays
  Clone ID: MRT4577_176519C.1
gccacgcgtcgtcctcggccatcgcttctcagctaactgggagcactgggggaggacatcgagccggctcgctgaccccggcgtgaccgacccgtcggtgcgcgaggcggcgcggatcctccgcctgaccccgggtcgcggctggtccgctcgagtgctccgggggcgactggcggcatcgcacccgcatttggccaacaccaagtcctggcgtatcgtacc

SEQ ID NO: 83889 - DNA, 377 bp, Zea mays
  Clone ID: MRT4577_17651C.1
actaccattcctgcacgtctactctagcagatcccctcgctgaattccaattcctcattttcaagaaataaggaggcaaaaatattcatatttgaatcggaatgatttcttttcttattaagcctatcctgaagccaaaataaacgacatcggaattcctcggggaattccaattccacattttcaagaaataatgaggcacaaatgttcatatatgaattgcaattatttattctcttattaggcctatcctgaacccaaaggaaattatatcaaaattcctcgctgaattccaacttcacattttcaagaaataatgacgcacaaatgttcatatttgaattacaatcatctgatttcttattactccctattct

SEQ ID NO: 83890 - DNA, 433 bp, Zea mays
  Clone ID: MRT4577_176520C.1
aacacgaaacgaaacatacgggcccgagacgaccccagacgaagataaaccccctttagactagggggaacacgggagcaaaagcgaacaaaaaaactagggcttagggggcccccacggttagtttcttcaattccccgtgtttgtgcccgaacccccccccggggttgcaccaccgtatccccccaccgccggcgaaacctcaaaaaccaccggcgaagcctccaccggcacccgccggagccgtctccataaagggggcccgccaccgtatccgccaccgccgcctccacgggcggcgggggactgggcctcgttaacggggatgttggggccgtagagctccttgccgttcatgcccttgatggggctgcgcaatgggtcctccgtgaagaaggggacaaaaccgaagccgggggacctttgggtttcc

SEQ ID NO: 83891 - DNA, 579 bp, Zea mays
  Clone ID: MRT4577_176521C.1
gggggggggggggttccccgcccgttctctcgacccggctcttaccatagcatggttctcccctgagccacgtaaccacggaagcaggacaatgaaccgaaccgaaacgatccaactattggaggcactcaaaccctcctacatcagcacttcatcaccctaccaactagcaacaccagcagcaccgcatccacacttccttactaacccagctgcaacactcgaatctcacaagttcacttaccggcaaacacaagccaagctaataatcctaacgctctctttattaaagttatgggtctttatgcacatcatgaacgctattttcattggggtatcatttatgtagaatgtgcttgacactatgatattcgtcacggagatctccctcgaggtctacataatatttgagaagatgctcgactaaattctcgtataggacataacaaaagaagataactaagaattcgataattaggatttcgaaaagttcgtggttatatactacaaggaattttcataggatataataaaggaaatctaaaaggtaataaaggtaaaagtaagtcacgagaataa

SEQ ID NO: 83892 - DNA, 300 bp, Zea mays
  unsure (1)..(300): unsure at all n locations
  Clone ID: MRT4577_176522C.1
atgatgagagccctggcggtggtggtggncatgctggncancgncttcttcgctgtgcccgctcgcgccgagaagtgcggatcaaaggacggaggcgcgctgtgccccaactgcctgtgctgcaaccactacagaaggagcggatgcacctccaactacagaggcagcgcacgctatagccaatgcagcagaaactgcggaagcacccgctaacccgcaaagcaccggcgaggaggactccttcatcaccaagcccatccacaaccagatgccgccgcagagcaaccatcattttttttt

SEQ ID NO: 83893 - DNA, 297 bp, Zea mays
  Clone ID: MRT4577_176523C.1
cggccgcccttggttttttttttttttcttttgggttttttcttggtaagtcccaaatttccgaatttccagttgcttaacccccagaggggaggaagtaaaagctaattcaacgattcatcttgaaaagcacgatggcaagcctttccccaaaagtttttggggggaggagtaaaccttaaccttgcggcgttccaccagggtccgaaacaggatgatacccaaagctggcaaaacctgagtagcagcaccagctcaatccgcggatctaggcgttatgaagggcaagaacaccac

SEQ ID NO: 83894 - DNA, 436 bp, Zea mays
  Clone ID: MRT4577_176524C.1
aataaaaattgtgttcaattactacgcgtgaaaaatggtatgttcaccttgttacaactgcatggtttgtggaagtgccgtcttgtctgtattgaaatacacctgctgtaatgcgcacagctctatgcatgtgtatatcacaaactttaatcacaacttcacaaatgctacggtgatctaaacatatgttgcatgatgatgcgctcactggttcatggcgaacgtgaagctgccacaatacctaatgacttcaccgccacaattcctgcagcgctacctccagagcccaatacctaatcatgggcccagcttcttcgtcgttgaaactcgtaatcctctacaatatggacccaaccaatcacccttgaattatacttcgtaacccctgacgtgactaatgagccgagttaactaacattacatgccctggcgctcc

SEQ ID NO: 83895 - DNA, 1624 bp, Zea mays
  Clone ID: MRT4577_176525C.1
aattcggcacgaggaaactccgcccccatgaatatgatcgggagaagctgctagcatcatctctcgcctccacttcgtcacctcctcgccattctattctatccttcccgccagctgcatatatccccgcgcccaattcggtccccggtgtgtgaggccagctgttttagctcagcgcgcggcgtggcagcaaaaaaaaaaaaggagagcaaggagagcgccggcgccggcgaagcatgcggcggtgagagagagagagaggaggaggaagggaacggagaaacgagagccggaggacgatgcagctgccgcagcatcatcagaagccctccgcccactcctgctgctcgtcgtggatccggaggtccccgccgccgtcgccgccgccgcacaagagagcgggcggcgtcgggaggagccggtatgcctgccgcctcgtgcccctgctggtgctcaccgtgtacagcgtcgtcaccgtgcttcgcatccccagctcctccctcgtcgtgtccaccgccgattcagagcgcgtggaaaggcgggaggacctggaggcgctcaagacccacctgccgtcgaaccagaacggcctcgaggcccgcgaggagacgcggtcggtcgcctccctcccctgctccgccttcatcagcggtgaggcggggcacggcgcggccgcggacgcggagggcgtgctgtgctgcgaccggagccactaccgcagcgacgtgtgctacctccgtggcgacgtgcgcacggacccgtccaccacgtctgtgctcctctacaacgcgccccgcgggagcgccccggagaaggtgcggccgtacacgcgcaagttcgagggcagcgtcatgagcagcatcgacgaggtgaccatcgtgcccgtgccggccggcggcgtcggcggcgcccacagcaacatgagcgtcggcgtcggcggtggtgggcggcggtgcgacgtccggcacccgcgcggcgtggcggcggtggtgttctcgacgggcgggtacacgggcaacgtgtaccacgagttcagcgacgggctggtcccgctgttcgtgacggcgcagcggttcgcgggggaggtggtgttcgtggtgctggagtaccactactggtggctgggccgctacggcgccgtcctggagcagctgaccaactacagggtggtggacttccggcacgaccgccgcgtccactgcttcgacgagatggtcgtcggcctccgcatccacggcgagctcgtcgtggaccccaagctcatgcccgacggcaagagcatcaaggacttccaggcgctgctacaccagggctacagccggacgacgacgacggcgtcggcgtcggcgtcgtcgcccacgccactactccctcttgcgccgccaacccggccgtgcccgcgctcggccaacaagccgaagatgctcatcttcatccgcaagcagaaccgggtgctgctgaacctgccgcaggtggtgacggcgtgccggcgggcggggttcgcgccgcacgtgatgaacctgcggcggcagaccccgctggccgcgatccacgcggcgctggcgtcggcggacgccatggtggcggtgcacggcgcggccgtcacccacttcctcttcatgcg

SEQ ID NO: 83896 - DNA, 607 bp, Zea mays
  Clone ID: MRT4577_176526C.1
gtaacttaaaattttgacatgtatcagccactatctcatgttccattgtataatcattttgtttccagtgtgtttaaacacttaacaagttactggctcctttaagtatatcttcttcccaacagcaacttcagtactgcccatagtcctgaagcaagagtgctgtaaatcgatgatctattgatatggagtcctttgacattcaactcaactcattctaacctattctgagcccattaattcaggacttggctcattttagaactatagtattaagaaacaatgtttagtctgctttgaatttattcaatatattttgtagcaaaatagcctataaactatgagcatctcattcactcaagtctttttaagattaaaaacctgccaatgatcaatagatttcatataaactttggaaatgaattattttctggactaatttattgagtaacttaaacaatgatattttaaaaagataactctaatgaacacaaaaatatcaatatgtttggaaatctcaatctgtataatctggtaaaaagtgcaaactgagcaagattttggcaaaaaaaaaaaaaatgaaaaaagtatctctaaaaagaaacta

SEQ ID NO: 83897 - DNA, 393 bp, Zea mays
  Clone ID: MRT4577_176527C.1
cttattcatcgattgtataagatgtttacagaacagtgcattgatccattaaatttatattgattgatatttttatagtggtaaaaaaaaaaaaaaaaaaaaaaaaaaaaaaaaaaaaaaaaaaaaaaaaaaaaaaaaaaaaaaaaaaaaaaaaaaaaaccaaaaattacaaacaaaaaaaaacaaaaaaataacaaaaaatattaaggcaccaaaattaaattaaacaagccccaattttaaaaaaatccaaacttgtaaaaaccttaatatacccaacttaaaagccttttaacaaaaccccctttttccaactggggttattaccaaaaagcccttaccaaatcacctttccaacaattgcacatccttaattgctaattgcaccccccc

SEQ ID NO: 83898 - DNA, 623 bp, Zea mays
  unsure (1)..(623): unsure at all n locations
  Clone ID: MRT4577_176528C.1
gggtaaattgtagcacaattctactangctctctaaaaagtttaggatcacctgattcggatggctgaaactccagttatggatttttaaagtgattagtcaaattctgtccaaatctggacagaatttatgtttagttctgttggacctttctacaggtcgaatcatgttgtgatgataatatgaaagttatagaggactttataagatttctaaaaagtcttaggtcaatatttttggattaagatcttgtaagttatgagcaaaacaattgactgctgagtgctgtcaaaaaaatctgtaattagttagttttcgattcttgattgatgttggtaagatgaattgttatttcctactattgacttggcgagtaaattaaatagataaattagtggtagtgattctttgtccttagtaaatgtgctctgggataacctcatgatccgtagcagtgcttgcgtactagtccattgagttatacagggaaggattctttcctctcttttcattgtagataattgggtggtattaagtatttatggggcttatattagatgatctttgaagtgcctcgccataaagtgtttgtttagtggtcccattttttataataacacgac

SEQ ID NO: 83899 - DNA, 117 bp, Zea mays
  Clone ID: MRT4577_176529C.1
gtcagatcagaatgcactaggccactgcgcgtctgaggctcagaccctgctgtggttagctttgggtggccaatgggctgggaccctccatgatagttttggacacttcgatcacct

SEQ ID NO: 83900 - DNA, 2261 bp, Zea mays
  Clone ID: MRT4577_17652C.1
gaaaaaaacgaaaagagcgggccctaaggcccttgcaaatgtaacggttcccctgcggggtaaccccccacaccccccgggcttaatgggcccctaaagggggggttccatttcccatttagggtgggcaaatttttggaaaggcgattggtgcgggcctttttgctttttccccaactggggaaaaggggatttttttcaaagcgatttaatttgggaaccccaaggtttttccagtcccgacgtttttaaaccccggccagttaatttaattttgggggccctaaaaaaaaacttttacgttgcaagcacggggaagtaaactttgatccttttaaaaggggccccccccttttttttttttttttttttttttttttttttttttttttttttttttttttttttttttttttttttttttttttttttttttttttttttttttttttttttgttttaacacaaatacatgcatataaatattaaatccggcacgagacggacatgaccgcgagcacgttacagatgaacatgcatgtattttttttaacacaaatacatgcatataaatattaaatccggcacgagacggacatgaccgcgagcacgttacagatgaacatgaaccccaggagcgaccatggatcgataatggcgggtgcagttgacaggatcttatttagacgccgctattatatttatacgactcgtcgtcgtcctctcgactctcgtgcgccatcgcctgaccggctcagttgcagctgcagcaggagcagccgcagctggtgccgcagttgcaggtgttgcagtcgcagccgccgccctcggtggccgcctcgaagccgccggcaccgccggcgctggccttggtggtcgaagccgccggcgctggccttggtggtcggcgcggcgaggaccgtggtcttgatgctgctggcggcggcggtctccacgttaggggacatgcagttgcatgagctgccgcaggagcagctggagccacagtcgcacttgccgctgctgcaagacatgatcacaggcgaaggggagcaggcgctagctgtgctaggaggaggaggaagaagaagaagaggtgtggtgccttgttgcctcccacgcgtccgcccacgcgtccgcccacgcgtccgcccacgcgtccgtgtttgcaaagctcctcctcgatcgatccatcgatcactgcaccggccggcggcaccgcgctcgcaggggctagccaacgagacggcagcaatggcggaccgtgaccgcagcggcatctacggcggcgcccacgccacctacgggcagcagcagcagcagggaggaggcgggcgcccgatgggtgagcaggtgaaaaagggcatgctccacgacaaggggccgacggcgtcgcaggcgctgacggtggcgacgctgttcccgctgggcgggctgctgctggtgctgtcggggctggcgctgacggcctccgtggtggggctggccgtggccacgccggtgttcctgatcttcagccccgtgctggtccccgccgcgctgctcatcgggacggccgtcatggggttcctcacgtcgggcgcgctggggctcgggggcctgtcctcgctcacgtgcctcgccaacacggcgcggcaggcgttccagcgcaccccggactacgtggaggaggccgcgccgcaggatggcggaggccgcggcgcaagcgggccacaagaccgcgcaggcaggccaggccatccagggcagggcgcaggaggccggcgccgggggaggtgcaggtgccggcgctggcggcggcggcagggcttcctcgtaagcaagtcatccatgcatggatggatgcgcccttgcgtgtctgtcagtatcagcagggtcgtcgcggaatgctgtgttcctgtacgtgtgggtgaccgtcctttggtcgtctttctccctcgagtgtgtgttacgtatgtcctggtgttcgtcgtgtgtgtgcatcgccgctccagttgaattccggtgtgtgttcatcgccgctccaggtcggagatgtgaatatactttgctaggggaataagtcataagtctgtctggaagggtaaagtttgagctttgctagtgtggctgggcactctagtcactggatgtgttgtgcatgcatcagctgtatgcccgtcgtctgttatggaaaatattggtcaaatgtattctcttgctgaataatttgtgacatctaattgttatgtatcgtctctttgctgaataatcagcttctg

SEQ ID NO: 83901 - DNA, 169 bp, Zea mays
  Clone ID: MRT4577_176530C.1
tcggcatcatataatgaacacgtatttttttcctaacacaaccaaactaggtggggggcttattcttcaaagtactctctgcaattgctcataaccgtgagccataatgtccgcaatggcccactatgctgctatagtctgcccttctacccgcccgtaccttctcacc

SEQ ID NO: 83902 - DNA, 344 bp, Zea mays
  Clone ID: MRT4577_176531C.1
tcggaactcggctccgagcatgatgtgcaggctaagttttcttctatctcttccagagcacaggtgcctgctgaagctcaaaatgagcccaaagttaggccatccttgggtcctaagaccgtgtcgacagaggctgctggacccgttactaatgccgtagcctaccaggttcaacagccattaatgcatccatcggtggaggagaagctgttgccctgcaacttattctacaaatctgtttgccaagggaccattgttgctccaagtcagggaaaaactgccacgtcttgaggcatccaacctgcatcctgactacttgttcccacttcatgcctcacccttca

SEQ ID NO: 83903 - DNA, 473 bp, Zea mays
  unsure (1)..(473): unsure at all n locations
  Clone ID: MRT4577_176532C.1
tgcgcgacgaggcgaaccngtcccttgcaagttcaatctcacctacaaccatgggtaaagagaagtgccacatcaacattaggggctattggccatgtcgactctggcaagtcgaccaccacaggacaccttatctacaagctnggaggcatcgactcttttgtgagagagaggnaagagaaggaggctgctgaaatgaacaagcggtccttcaagtacgcgtgggtgctcgacaagctcaaggctgagcgtgagagaggtatcaccatagatattgctctgcggaaagtggagaccaccaagtactactgcacggccattgatgcccctggacaccgtgacttgatcaagaacatgatcactggcgcctgccaggctgactgagctcgccttatcattgactccaccactggcgcgcttggaggtggtatctccaaggatgggccacaccgggaacatgctctccttgcgtt

SEQ ID NO: 83904 - DNA, 449 bp, Zea mays
  Clone ID: MRT4577_176533C.1
ccgggccgacctacgcgttcggtggcatttaaggtatgtttgattggttattttttatggcaagacttgcttgaccggggtaagttttagtccctccattggatgttattttagtccttaaatttttaaatatgaaaactaaaactttattttaattttcgtatttgataatttaaagactaaaatggaataaaattgatggactaaaaattagtccctacaaaccaaataccccttattttacagtgtaattggtagatgagataagctacagtagtgggtgttagacaccatacctgggcaggtatacaactgctccctagcttgtatacgtatgtatgcaatgtgcaatgcatagaacagcttaacagctctcaattcctggtgtgttcaaagctttattgcattattgccaacactgtttacacttgatctcaatgtaaacaaac

SEQ ID NO: 83905 - DNA, 284 bp, Zea mays
  Clone ID: MRT4577_176534C.1
cccacgcgtccggagagtctgacatgatttttagtactacgagcaggactaatactaggcggtgctgatgaactggagcgaagggatctcataacttgctgttgctcggctccgccattcgctcgctggctgtgtccgctgcctcagccttcactctccgttctagcttgaatggacaattgtaagataacccgactaactcgacgcttttaagatctcttctaggtaagctatcgccagcgattccctgcgggaagaagaacagataaggaacctgtcttgat

SEQ ID NO: 83906 - DNA, 206 bp, Zea mays
  Clone ID: MRT4577_176535C.1
cccaacccaacttatggatattaaaacctaaaagggggggggccttgaaggcttaaaaaatccggggcccaaatggtacccacagttaaggttaggtcggggggggccaacccccagaaccccttggcccgttttaaaaaaagccagctaaagccaggtaaatgtctgggaagcaacccttgggggaaacactttttttccgatta

SEQ ID NO: 83907 - DNA, 588 bp, Zea mays
  Clone ID: MRT4577_176536C.1
gttcaagcacgagagggcatttggcttcccgaacttggaatactggatgcacatacttatgctttttgacaaatcctcgtatacggtaaaatcacacgtgggctgtgtaggagcattcgtctgtgatagttgtaggtcgtctctgagccggacaacaattagcgcttcgaaatgagatgcatattcatggctacaccctatgactagcgtacggttggtaaatgaagatgcttgaacaaacttaaggttgtcaacaaaccaatctgcttatgttaactgcgggacttaattacagcaacaagtggtgcttacgaagttaacaaccttatggctggtcaaacgcatgaactgagctgtaccacacgtattctgcttgatattctgacatggaaattatgaagaacaaagcccagggaccttgttaaggcccatcttgctaataatgttgctcgggatgcatgaaggaactgccagacccatgctatgactgaactgttctgcaaggtgaacaaatatggacttatctagaccaatggacttgttcgagttgtagctccctaaccatgcttgatacgcacattctctgct

SEQ ID NO: 83908 - DNA, 1534 bp, Zea mays
  Clone ID: MRT4577_176537C.1
ttctgatacacgccgcgcatcgcaagcgagcgacacataaagagcgcccatggggtgtgcaccaccatctcgggcggtgcgggtggaggaggccccggcggggggacgtgaagggggcggggacggaggcggagaaggcggtcgcgtgggcggacgcgtgggtccggaggcgtgggttcattgaaagcccaggcacgccgcgcatcgcaagcgagcgacacaagagagcgcccatcatctgtgccctgtgcgccaccatctcgcccgccttcaatcccctccatcattcgttccaacagccccgctttctccaccatcagtgcgaaaaaatttatgcgcgctttgggaaagcgcgagctcgttttgctttgaagctgcctccgcctttttatccgtccgggccggggctgtgggctccgcctccgcctccgtgtactccggccgggcgtggtcaccgaggcagtagcggcgagagaggggaggatctgatcgatgtcgtcgggcgaggacgggtactgcagctcggattcgccgcgggcggaatcccccgaccagccgcaggcagctgcggacgcggagtcgcctcgcgccggagccgggccgaacaagcgcgagccgggccgaacaagcgcgacctccacgcctcgtcgccggcagctaagcgcagccggagatcggtggagaagcgggttgtgtcggtgccgctggccgagtgcggggaccggcccagaggggccagcggggaggggccgccgccgtcggactcgtgggcgtggcgcaagtatgggcagaagcccatcaagggctccccctacccacgtgggtactaccgctgcagcagctccaaggggtgccccgcgaggaagcaggtggagcgcagccgcgccgaccctgccgtgctgctcgtcacctacaccttcgaccacaaccacgaggcgccgcagcccaagaccagcggcggcagctgctgccaccagcaaggcaagccgtccgccgaatgagcccgtcgagcaggagtgagctgggtccggagcatgagccggaagacgagcaggagccggagcagaaggtcgtcccaggtctggccgggccggaaacggcgccggcaaccgcaacgttggcgccggtggcagaggaggacgaaagcttcgacttggggtggttcgaccagtacccgacgtggcaccgttcggcgctgtacgcgccgctgctgccgccggaggagtgggagcgggagctgcagggggaagacgccctgttcgcgggcctcggcgagctgcccgagtgcgccgtcgtgttcggccgccgccgcgagctcagcctggccgctaccgcgccgtgctcctgatggtccttaaagtcttttttacactagtagctctgatcgctgcacggggcatctgttcaaggccgtctgctgcctaagctttctgtccccgtgtccgtgttgattgggtacgcgcgttcgccgtccaaggttcgtttgtcccgtttgcaatgtggttccagccagaaagcagcgaaaggtttggct

SEQ ID NO: 83909 - DNA, 294 bp, Zea mays
  Clone ID: MRT4577_176538C.1
ctcgagccgctctactaactattaagcgtttattgtagactgtcacgcccccgcctccgctacgcccgaccttagaaaaccccgccgccgcgatcctcccaccgccgcgattctcaagcacgcaaatccctacgcgaatcgcgtcgtgcccgtttcaactgccgtgagccgcccgccgcatgcccagctgctacctctgcgaaatccctcgctcagctgctacctccgcgcaccagatccacgccaacatccgtgcctagatccagcgtacaggatgcccccgcctccctgtcc

SEQ ID NO: 83910 - DNA, 155 bp, Zea mays
  Clone ID: MRT4577_176539C.1
gacgacaactatgcgctgctggccgcgttgccggacacggcgcctgcgcggcccgacgggcgcgcatatccgatgcttgcgggcatgtcgcgcaagtcgatgctcggcgcggtgatcggcggcaagccgccgctggagcgcgtcgcggcgagcgt

SEQ ID NO: 83911 - DNA, 485 bp, Zea mays
  unsure (1)..(485): unsure at all n locations
  Clone ID: MRT4577_17653C.1
gggggggggggggcagacacgaaaaggggaaagaaaannaaagaaccggacgagaccaaacnagnnagaaagaaaaaagaccagcgcannaanccgggcggcggccacaccaaannanaccaancacnaagccggncagnggcgccgacagggggaagaagggcaaaaggtgggtggttaagccnncnncaccanacaaaaacaaaaacaactttttttgagnagagcagcagcgcctcgccaaacacacatnnaggggcggcagcagcagcagcaatccataaaaaaaaaaaaaaaagccagacgaagatgaggcgggggtccagtgaacttcccaatttattcttaagcggatgccttctttaggggcgggaccacctcccaggcgaaggcgggggggggccggccaaagtggccgcatgcgcggggccggatgaacccgttgccggccttcctgacgccgggggtgatggggatcatccctg

SEQ ID NO: 83912 - DNA, 228 bp, Zea mays
  Clone ID: MRT4577_176540C.1
atgggggcccggccgcccctgccggagccaaggccagcagtgcttgccgtcgctttgggccacgtgcgcgaggtcgaccgcccctgggaggcctgccaccagcgccgaggggctcgcccgcccctgcctgggtcgaggctgaggccggccgcgccctccgccgggccgcaccgcgcccgcccctgcgccggctggccagcagcgctcgagcccgcgtctggaggctga

SEQ ID NO: 83913 - DNA, 1585 bp, Zea mays
  Clone ID: MRT4577_176541C.1
ttcggtccctcgaggccggccggggagaagatcccagacccagacagcaaggaaccttggagcctgccggcaactctaacgacgacgatggccgaaggggacggtccaactccagcccgcggcgctcgcgtcgtgctgttcccactgccgtcccagggccacctcagcccgatgctgcacctcgccagcgcgctccacgcgcgggggctcgcagtcaccgtcctccacacggcgtacaacgcgccggaccccgcgcaccacccggggctagccttcgtcgccgtgcccgacgtcatcccggaggccgtggcggcgacgacgaatggcatcgcgaagatcctcgccctgaacgccgccatggaggcgtcggggcacgtccgcggcgcgctcgcgtcgctcctcgcggaggaggcgggcggacagcggctggcgtgcctcatcttcgactccaccctcttcgccgcgcagaaggccgcggctggcctcgggctgcccacgctcgtgctgcacaccggcagcgccgccggcttccgtctgttcaggtccgacacctacaacatgctccacgacaggggctatctgccagccacagagtccaacctacacatgccggtaaaggagctgccgcctctgcaagtgagggacctgttcgacccaagcaagctccccaacaaggaaatcgtgcagaagatcttgggtcgcgccacggagagcacgacgaactcgtccggcgcaatcctcaacacgtttgaggctctcgagtcccgcgagctcgagatgatccgggacgaacttgccgacagaggtatcccacccttcgccgtcggcccgcttcacaagctcaccgccgtctccaacgatggcgccgacgagactagtcttctcagccaggaccgcgtctgcatggagtggctagacgcacgggcccctggatccgtgctgtacgtgagcttcggcagtgttgttcatgtcaccccagacgagttggtggagatcgcgtggggcttggcgaacagcggcgtgccgttcctgttggtggtccggcgtggccttgtggtcggagtggacaagcaggagctcccggacgggttcatggcggccgtggagggcaggggcaaggtgatcgagtgggcgccgcagcaggaggtgctagctcacccggcagtcggaggcttctggactcacaacggatggaactccacgctggagagtatctatgagggggtgcctatgctgtcgaggcccatctttggagaccagttgccaacggcaaggtacgtgtgcgacgtgtggaggattggagttttgctggagggtgtgctggagcggcgggaggtggagaaggccatcaagaagctgatggaagaagacgagggagttggtatcaggggaagagccaaggatttcaaggagaaagtgcggatgtgccttgagagcaatgggtcttctcaacttgccgtcgataagttggtggatcacatactttctctttgagttttttttttatcacacaacactgttatgtctgttcatggtttgaactcaattaataactgctggtttatgatacgctggtggtttcgct

SEQ ID NO: 83914 - DNA, 154 bp, Zea mays
  Clone ID: MRT4577_176542C.1
aataactaatcaagatcgatcgagaattgcgtttcctatgcttactagtcgtctagccgctctagctgccctctctgctgccatgtctgctgcgatgatggccgccacctcctcttctcagatcactccgctagacttcgtgaacctgcacaac

SEQ ID NO: 83915 - DNA, 714 bp, Zea mays
  Clone ID: MRT4577_176543C.1
gtgcggcgctcaggcggcgggctggaatccatctccgagcgaaccgacgaaggcaaggcaccaaccagctaaccgaagcttacagtgatgtctggagtagaactcaccgacccccatgaagctgccgagctcaagagaaaaagaacattccgtaaatttcaataccggggtatcgaactcaacgcccttctcgatctatccaatgaacaactcatggaggtcgtccacgctcgtgcccgaagacgtttccaacgtggattgaaacggaaaccaatgaccttgatcaagaaattgaggaaggccaggaaagaggcgcctccaaacgaaaaacccgctgttgtcaagacccaccttcgggacatgctcgttgtccctgaaatgatcggaagtgtcatcgggatttacaacggcaaaaccttcaactccgttgaaattaagggcgagatggttggacactaccttgccgaattttctatctcttacaaacccgtgaagcatggtcgtccaggtattggagctacccactcctctcgtttcattcctctgaagtaaaacctgttgattggcaatgtaggattttatcttttgtatgcgtcagcatacttgtcttgtcctatcatggcttgccaactgtatgcccaaactgtccaatcaaagccaatttatgcttctcaatgcttcctggcgctttgggttgcccgtattggtcctcgc

SEQ ID NO: 83916 - DNA, 342 bp, Zea mays
  Clone ID: MRT4577_176544C.1
actttcgtcacagattatcgctacagagctcaatcgttcaaaccaaacaaaacacaaccgtcaacatgcgcgcctccatcttcgtctccgctgttgctttcgccgttgcatcggcccaggactcatcttccgttccctcatcttccatcgacccggccccccagactacttacctcacccaaccaactctctcggtgtcgtaactggcatgcccgcggctgacacttccatcgctactcagcctgacgctgtcaccagccagcccgctgctgtcaccactcagccagtacctgctgacatccctgccgttggccctggtgtccacaccctcactcttgctgg

SEQ ID NO: 83917 - DNA, 319 bp, Zea mays
  Clone ID: MRT4577_176545C.1
gagagtgacaagggtgcatttagcgcagaacagcgagaagctgctaagaaggagtgccttgaggctgctggtgcggcagaaaatggaaatggtaatggggatcaaatggagaatggtgatggtcaagaagatggtgaggagagtaacacacttcctgatgaacaatatggttacccaaaggcagaatcagaaaagtgggtttcctgcattagaattcttgatccgaggagcacggacacaacttggtcttctggaattgcaggacaatgaggcggctgtcagtatttgcactgtgaatttccatgataaggagcatggt

SEQ ID NO: 83918 - DNA, 203 bp, Zea mays
  Clone ID: MRT4577_176546C.1
cctctgttgttttgttttttttaggcgaagagaaaaaaatgcccattactctgagtgaatttcatcagagtacttacacccaacactgtgtgtgactcgatcacaaatcttgtccaaaattaaaaaaaaaaaagtcgagcatgattagtctggcccaaaagtgcctgtatgtacaaacgcacccgacgttgcgtacatgcaac

SEQ ID NO: 83919 - DNA, 171 bp, Zea mays
  Clone ID: MRT4577_176547C.1
tggcaccgatgctagcgtgcctgctagctctggccatggcagccatcgtggtcccgccgtgcacggtccagaactcgccgatgacctacgtggacccgccaacgcggggcgcgccgacgttagctttaggccggtgttctgggacgacaccggggccgattacgctcagag

SEQ ID NO: 83920 - DNA, 278 bp, Zea mays
  Clone ID: MRT4577_176548C.1
tttttcttttttttttttggctgcgtttatttatttgggttttttttcgatcttgtgtcggttttgccaccagaccatgggaacgcaagatgttgttctgaacagacatgcaccctttattttatatcgttgccccactcattatcgaatgggttcagagatttgtggaactagaatcatatgggcaaacgtttacaactcaatgatcgaggggctatactcctatctttcacgatggcgggaaggcaattagttttggttctgacctgaggccaagc

SEQ ID NO: 83921 - DNA, 304 bp, Zea mays
  Clone ID: MRT4577_176549C.1
cggacgcgtgggcggacgcatgggcggacttcgttggcggactcgtgggcggacgcgtgggcgagatgtgtcgttcgttgtatcatgtatgggtgtttatggctttcggtctactagatttttgtgagaaaaaaaaagcttaataaaacacaaaaaattcactcacctaatacccacccgatacaccctagacgttaaaatactatgatgtcatcaccggagggcccaaaaacactctctacccacgacaagaatgtcgacgcctgcacgacggccaaagcgcgccttgatgagatgttcaatg

SEQ ID NO: 83922 - DNA, 1092 bp, Zea mays
  Clone ID: MRT4577_17654C.1
aactactccgtcactttgtttgcaaagctcctcctcgatccatcgatcactgcaccggccggcggcaccgcgctcgcaggggctagccaacgagacggcagcaatggcggaccgtgaccgcagcggcatctacggcggcgcccacgccacctacgggcagcagcagcagcagggaggaggcgggcgcccgatgggtgagcaggtgaagggcatgctccacgacaaggggccgacggcgtcgcaggcgctgacggtggcgacgctgttcccgctgggcgggctgctgctggtgctgtcggggctggcgctgacggcctccgtggtggggctggccgtggccacgccggtgttcctgatcttcagccccgtgctggtccccgccgcgctgctcatcgggacggccgtcatggggttcctcacgtcgggcgcgctggggctcgggggcctgtcctcgctcacgtgcctcgccaacacggcgcggcaggcgttccagcgcaccccggactacgtggaggaggcgcgccgcaggatggcggaggccgcggcgcacgcgggccacaagaccgcgcaggcaggccaggccatccagggcagggcgcaggaggccggcgccgggggaggtgcaggtgccggcgctggcggcggcggcagggcttcctcgtaagcaagtcatccatgcatggatggatgcgcgcgtgcgtgtctgtcagtatcagcagggtcgtcgaggaatgctgtgttcctgtacgtgtgggtgaccgtccttccgtccttcgtctttctccccccgagtgtgtgttacgtatgtcctggtgttcgtcgtgtgtgttcatcgccgctccagttgaattccggtgtctgttcatcgccgctccaggtcggagatgtgaatatactttgctaggggaataagtgtctaagtgataagtctgtctggtggaaggtaaagtttgagctttgctagtgtggctgggcactctggtcactggatgtgttgtgctgtgaatgcatcagctgtatgctcgtctgttatggaaaattggtcaatgtattctcttgctgaataatttgtgacatctatttgttaaaaaa

SEQ ID NO: 83923 - DNA, 227 bp, Zea mays
  unsure (1)..(227): unsure at all n locations
  Clone ID: MRT4577_176550C.1
ctgtggcctctgcatttgctttggcttgctggtccgcttcttccanccgaccaagggcgatcccgcgccatggattcgcgccgaccccgcgcggggcccgccttgccgtgctctcctcccaacctccgtggtgcaggggctcgaggaggctggcggggcttggagagggtctgccggtatctcgcgccggcgcctcgggccctcgcgcacggctgcgcttgctcgtg

SEQ ID NO: 83924 - DNA, 512 bp, Zea mays
  Clone ID: MRT4577_176551C.1
ttgggtacctcgaggccggccgggcttctcctgattcgatgtccgtctcctgatttattggtggaactgctggtgactaggagcagtagcgagagggattctggatggccaagtcgaagaaccacacggcgcataaccaatcgttcaaggcgcacaagaacggcatcaagaagcccaagcgccaccgccagacctccaccaaggggatggacccgaagtttctgaggaacttgaggtactcaaggaagggcaacaagaagagtggcgaggctgagtccgaggagtaagatgatggtgattgagtttgtggcgacaaatgcatctcttgtatcgctaagagtcttagctgtgaacttagttctcacttctgtgtgactgtgatcaaaggagatccatcagttggtaccgaagtgtattttatgtcttgttggttacctggaatttaattaaaaccatcagttgtatccttttgagaattgggcaaaaaaaaaaaaaaaaaggcccctagggcc

SEQ ID NO: 83925 - DNA, 461 bp, Zea mays
  Clone ID: MRT4577_176552C.1
cgccgccgctgacctgccccctcgccccgacgccggtgactaggagcaggagcaagagagattcgggatggccaagtcgaagaaccacacggcgcataaccagtcgtacaaggcgcacaagaacggcatcaagaagcccaagcgccaccgccagacctccaccaaggggatggacccgaagtttctgaggaacttgaggtactcaaggaagggcaacaagaagagtggtgaggctgaggcagaggagtaagatgggtggtggctgagtttgtggcgacaaatgcatctcttgtatcgctagagttttagttgtgaacttatttctcacttctgtatgatcaaaggagacctacagttggtacaatagtgtttttttcgatcttgttgcctatctggaattaattaaaaccatcagttgtccttttgcgaattgggcacttgatgtgtcattttctgttctc

SEQ ID NO: 83926 - DNA, 604 bp, Zea mays
  unsure (1)..(604): unsure at all n locations
  Clone ID: MRT4577_176553C.1
ctcatgtatgggtggaagaaaagattgtcctgggttgatggcgaggtatcccggattgatggtaaaaaagcccatgttcgcacaaccaaggggaagacggtcattgcaaatatatcggatatccaccctaaagacacagaagcaccgcctgatggggtggatgacatgacaaggttatcatacttgcatgagcctggtgttttagataacctggctgtcagatatgcngaaaaatatcatttatacctatactggtaacattctgattgcaataaatccattccaaaggctacctaatctggttgatgcccgtactatgngaaaaatacaaaggtgcaaatcttggtgacctagatcctcatgtatttgcaatagctgacgtctcttacaggcaaatgataaatgaaggaaagagtaactccattttggtcagtggtgaaagtggtgctggtaagactgaaactacgaagttgttgatgggatatcttgcatatctgggtgggcgatctggaacaggagagaggacagttgaacagcaagtattagaatctaatccagttcttgaagcctttgggaatgcgaaaactgttcggaacaacaactc

SEQ ID NO: 83927 - DNA, 1015 bp, Zea mays
  unsure (1)..(1015): unsure at all n locations
  Clone ID: MRT4577_176554C.1
ggggaatttataggttgttctacccaggtttatttttsgcattctttattcncagagagtataaaaatttattwattaatggagaagtggragatttgcaaktggaattcacagatggtaaaanncttgttatttgtggggtttgtatatatgatagctcgaaagatagmaaggttggggttggatttttgatggaaaaagmaatggtacctgcaktgcctgaaggmagyttgtatatggaggaggtgmamgsgaagtttggtgaagaattttggttaamaataggggggaaamatattytttttggtgcatcacaasaggatgtbtggactgatttaggtggtctttgtggtatccatgagaagcaggtggaccaaatggtwatacaytcsgcatragaagcgaggcttcggaggactttttgtggagattatttttaaaattatttttggcgtggaattgatattttatttaatggacagacaaataggataaagaagtttgttttgaataaaaatttscctggccaytragatttmaattcatataagaaatgcaattttgttatatacgaggctgaagttgaaggtaaatgtmagcctaataatgcctmaaaaaattgmataacacctagtaaaaaatgggaacaagtmaaggagatcctgggtgattgtggsggagktgaaatccagamaaaaggctccatgaaaaatccatttggatcaakttttgtatatggttatcagaatatggytttcgaggtgatgaaaaagggatatattgcaattgtmaccttcttccaatmatgagtgtgcmattaaatgtgttgctgctctgagctytggctgaaaaaatgatggttaacctgragaaaggaagtatgcsgtatttttgtgtttcagcagaagaaatttcgagtggaagcaaattttatggggcctggtgagggtgcttggtttatggaatgggatggakggggagtggatatggatcaggacsgtgatttgtatttgtg

SEQ ID NO: 83928 - DNA, 765 bp, Zea mays
  Clone ID: MRT4577_176555C.1
gccgggctctataaagtcagcctcgaagcgtcgccgctctagaaaccctaacactcatcacgccgccactgatctgctctgttgctggtgactaggagcagtagcgagagggattctggatggccaagtcgaagaaccacacggcgcataaccagtcgttcaaggcgcacaagaacggcatcaagaagcccaagcgccaccgccagacctccaccaaggggatggacccgaagtttctgaggaacttgaggtactcaaggaagggcaacaagaagagtggcgaggctgagtccgaggagtaagatgatggtgattgagtttgtggcgacaaatgcatctcttgtatcgctaagagtcttagctgtgaacttagttctcacttctgtgtgactgtgatcaaaggacttgtgtatgatcaaaggagatccatcagttggtaccgaagtgtattttatgtcttgttggttacctggaatttaattaaaaccatcacttgtatcaagggatacacttcggtaccaactgatggatctcctttgatcatacacaagtcctttgatcacagtcacacagaagtgagaactaagttcacagctaagactcttagcgatacaagagatgcatttgtcgccacaaactcaatcaccatcatcttactcctcggactcagcctcgccactcttcttgttgcccttccttgagtaccgaagtgtattttatgtcttgttggttacctggaatttaattaagaccatcacttgtatc

SEQ ID NO: 83929 - DNA, 651 bp, Zea mays
  Clone ID: MRT4577_176556C.1
aaaaaaaaaaaaaaaaaaaaaaaaaaaaaaaaatttaggaaaccctaacactcatcacgccgccactgatctgctctgttgctggtgactaggagcagtagcgagagggattctggatggccaagtcgaagaaccacacggcgcataaccaatcgttcaaggcgcacaagaacggcatcaagaagcccaagcgccaccgccagacctccaccaaggggatggacccgaagtttctgaggaacttgaggtactcaaggaagggcaacaagaagagtggcgaggctgagtccgaggagtaagatgatggtgattgagtttgtggcgacaaatgcatctcttgtatcgctaagagtcttagctgtgaacttagttctcacttctgtgtgactgtgatcaaaggagatccatcagttggtaccgaagtgtattttatgtcttgttggttacctggaatttaattaaaaccatcagttgtatccttttgagaattgggcaattgatgtgtcgttttctgttctgccgtgatctgttatcagcattttacctgcccaatttcttgacttctttagggcttgttcggtttgcaagggattagtatggattcagagatattttgacttactaaagtttgaaacatcttcaatttccttt

SEQ ID NO: 83930 - DNA, 132 bp, Zea mays
  Clone ID: MRT4577_176557C.1
ctcttgcacacgtacctacacttgttattttctagcacgtcaggctctcattacttgttattatgatcaccctatgatcggtggccttcaatatagacatttttcgagattgactgctgatacacaaacaat

SEQ ID NO: 83931 - DNA, 600 bp, Zea mays
  Clone ID: MRT4577_176558C.1
acctcgaggggccggccgggagaaaccctaacactcatcacgccgccactgatctgctctgttgctggtactcctcgtcttcctcccgagtcctcctccggattcgatgttcgtctcctgatttattggtggaaccgcaggtgactaggagcagtagcgagagggattctggatggccaagtcgaagaaccacacggcgcataaccagtcgttcaaggcgcacaagaacggcatcaagaagcccaagcgccaccgccagacctccaccaaggggatggacccgaagtttctgaggaacttgaggtactcaaggaagggcaacaagaagagtggcgaggctgagtccgaggagtaagatgatggtgattgagtttgtggcgacaaatgcatctcttgtatcgctaagagtcttagctgtgaacttagttctcacttctgtgtgactgtgatcaaaggacttgtgtatgatcaaaggagatccatcagttggtaccgaagtgtattttatgtcttgttggttacctggaatttaattaaaaccatcacttgtatccttttgagaattggacaaaaaaaaaaaaaaaaaaggcccctagggcc

SEQ ID NO: 83932 - DNA, 197 bp, Zea mays
  unsure (1)..(197): unsure at all n locations
  Clone ID: MRT4577_176559C.1
cggtcgcccagcgtcaaattgctggtgaaaggctaccagagtcgcgcttggaaaagcctcacaacaggtcggaacacctctgactaagttcaccatgacttgttccgaacaatggaacatgttctgatccttttgctgattagatctggcttttacaggggggggggggtgnccaagaatgttattttttttcgggg

SEQ ID NO: 83933 - DNA, 685 bp, Zea mays
  Clone ID: MRT4577_17655C.1
gcacgaggagagagagagagagagaactagtctcgagtttttttttttttttttttttgcataagtaaagtgccttattttcggatgaagcaccggtttttacatgaaatttattcaaaccgacgaagcaacacacagtcacacacacacacacacgttttcactgcgccgccacctcaaccgccagtccgctattgaagggcctctggccgtcgcaatcgagattgctcccgtagccgatgcggaagacatcgcagtagcgcttgtagaagccaatccggtcggtgacccgggggtccgtcccgtgcccgcactcgatcccaccgttgatgatgttggtgatcacgccgtaccctggcgcgccccggccggccgccctgtccgcagccgtgggcgtccactgccccgtgatcacggcgtggcacgacggcttgttgtcccgcgcgttcatccagaaccacagcgctgtcttgaaggatatcacggggtccgtcgcgacgaggtccgggttgttgaggaggtccacgccgatggctcgccccgccgggccgtagttgtagttgaaggagatctggatggggccgcggccgaagtacttcttgccgggcgcgcacggccactgcggccgcggctcgcagtagtccgacggcgggttgcgctcctgcttgaagcagcgacagcaacg

SEQ ID NO: 83934 - DNA, 788 bp, Zea mays
  unsure (1)..(788): unsure at all n locations
  Clone ID: MRT4577_176560C.1
aattcggcacgaggccaccgtggggcggagatccgcaccggacctcccaccggttcctggtaaggaagcaagccctaaactttgcgtgtggactggggtggttgttgttctaggacggggtcctgccccgcgggatcttcccttttcccttgtctccgaggcaaatcaagcccgaatcttacttctcgggatcgacgggttcgcttgctgtgcatacggagggtggtcagcttgctttcgctttcgtgacaattaggggctcggcggaaacggaccaaatcgccttgcccgggcctgccctgctcgttcgaaccagtagtagcagcatggtggttcactaggaaataggaactactagatgctcagtgcttcgacaaatcacatttatttcgttgctccacagagctctacatgtaaggatcctcacagactatttattttagtgcaaaacctgtagcgtgcaattctaatcttgcagctatgtctggtgctgctaccaacctgttagcttgtttctaattccggggcaccttagggcatgtttggaagcactcagtttttaagaaactggtttatggaaattgaggtggttccaaacataacgttttatacctcagcctataggaattagattctcagtttcttaaaaaccaagaagctggtccctcctatctaaaaaataaaaattggtttcttagaaactagtttgcttccaaacgggaccttagacacccatttgcacacattgttgagcgtgtttgcttcttaatgcanatcaaaagtcccct

SEQ ID NO: 83935 - DNA, 418 bp, Zea mays
  Clone ID: MRT4577_176561C.1
ctatagcaaccggtccagcactttcacgctcactccagcatggctgcctccaccatggcgagcttcttcacggtgatggccggcaccccgatcaggtgggctccttcggcgagggccgcatgaccatgcgcaagaccgtgggcaagcccaaggtggcggcgtccggcagcccctggatacggccccgaccgcgtcaagtacctcgggcccttctgcggctagcccctcgagctaccttacctgccagttccccggcaactactgatgccacaccgtcggactgtcctgcgaccccgagaccttttccaataaccgatagctggatgtgaaccactcccgctgggccatgctcggcgcgctaggctgcatatacacccgagctgctctcccgcaacagggtcaagttcgacgaggccgc

SEQ ID NO: 83936 - DNA, 223 bp, Zea mays
  Clone ID: MRT4577_176562C.1
ggggggagggcaaaccgtcagggagttagtgaaggagcaagcgagggcaggggcaaacgtgaaatatttgtaccctggcttaggttatgcgtgtggcccgggcataagaacctgtacttatgtattgacacaaaaacaagttacggacgggggttcccatggcgccctaaatggtaaaaaagaaaacggggggggccgtattggatatataaagtaatacccg

SEQ ID NO: 83937 - DNA, 215 bp, Zea mays
  unsure (1)..(215): unsure at all n locations
  Clone ID: MRT4577_176563C.1
aattaagaacaatactttttttttttcatttcaattgttcattcanggaaaggctctcactgacactaagaagaatctttattctttacacattattactcaatcatctccaataaatgactcaactaactagctagccagtggctatactacaacacatattttcttcagtgttatacaccccctacagcacttgtacgttcatttattcatct

SEQ ID NO: 83938 - DNA, 156 bp, Zea mays
  Clone ID: MRT4577_176564C.1
tgatggatatctgcagatccccttagcgtggcgggcgaggtctcttccattccgacctaacgcgcccggattgtatttattgcctacctcccggtcggattgggtctttgcgcgcctgctgcttcttggtgtggcgccgttctcggctcctctccg

SEQ ID NO: 83939 - DNA, 152 bp, Zea mays
  Clone ID: MRT4577_176565C.1
tgtgcgtcgctctagacggccgggttcccaaaagcagaaagcacaccacgatttcgatgatgtcatagaacgacctgtcgccggtgcttaaaacctgtgactatacctactgggtggagccaggtaagatacaacgagccatgccgctgccg

SEQ ID NO: 83940 - DNA, 1066 bp, Zea mays
  unsure (1)..(1066): unsure at all n locations
  Clone ID: MRT4577_176566C.1
aattcggcacgaggaaaaactctaagaaataacatccctatgtccttcgtctcccttctctgttcttcctaaaaccccatctaccttctcctcctactactgctaacaacctggtatcagattcagtcgatcttcctccgcccatggcgccgccatctacctcagattcggcccttacccttgctctggagaaccagaccagctccctgcttgccgagctggacaagcgtatccagtccatggatagcaagtgggagtcgcgggtgtccgtcctggagaacacggcgacggatgcagccagatccgtcaccgaattttccactgccctccgcgccgatgtggaggcccatctcacagcctcggatgccgctacagaagggcgtctgcaccacttcgaggcgggaggtggcaaccgcatcgctgctctcgagtccgcgatgcagatgttcgacttttggcgtcctcgagttgactcttccatcgactcgctccagtcgaacatggactggatgcgcgccgagatcgccaagatggatgctcagtggtcccacggagcgcgcgtcggcggcgccaccatgccaggtgtccttggttcccccggttcccttgctgcgtcgcccagcatcctcggaactccgggcgcgttcgcctccactggatcgggtccggggcacccacctgctgccgtcgactacactgatggccctagattcggacacggcttcgacagctacctccgggatagtggacttcggcatccaactgccgatggccgctacccggtcacgggtatgtggcgtccccccttctccacattttcgtttgctcaccaaatgggttcggcgggggcgacgtagatctcagaggggctctaaacaaacatggtggncgggttgcccaaacttacattccccacgtttgatggctccagtcccaagttatggcaacgacgttgcgaaaaatactttgaaatgtatgccacagaggagatggtctgggtcaaagttgccaccatgtattttgaaggggcagctggccgctggctccaatcagtgggaccccgcct

SEQ ID NO: 83941 - DNA, 745 bp, Zea mays
  unsure (1)..(745): unsure at all n locations
  Clone ID: MRT4577_176567C.1
gcaccaccgacgcgccgcccaaaccctaggcgtcgacgctcgacgacgttcgccatggttcgcacgtcaacacgacccacctcctgtatcacgtcgaatggcacctcacaagggcagacactggataaaccggacgacaccaacgggcagtcggcctgtaccgcaccggtcattgccgggcgccgcacggaatccagagctccggacgatcggcgcatggctgtcacacggaccagaggcttgctagtctctcgcagacaagccggcatgcgcctacgctacgcttaagcaggggcgcgcgaccacgcagacgtgtgggcactggctgcggtacctacctcgccgtggctctgaagcacctcgtcgccgagggtgtgacccaccgagccaaccagggaaaggacaacaacatgagccgcatcatgccgcagccatgtgctcctgaagatccgaacgacgaggagctcgggaagctgatgaacgtcctcaccatcgcgcacggcggcgtgctccccaacatccactgcgtgctcctgcccaagaaggcgcgggacaaggtggacagcggcggcagcaaggagcccaagttccccaagaagggcgccaagtaccccaagaaggcttagaaagtagggtcttcatttgcgctgtgtgctgtagcatgttcgtgtctagatctgtggatgggatgtgtcatgctttagtatcgnccttgtgctctattgtatgttcgtcttcatcgaga

SEQ ID NO: 83942 - DNA, 267 bp, Zea mays
  Clone ID: MRT4577_176568C.1
cccacgcgtccgggggcaggtgaggaccgaaagagacgccaaccaagcaaggagggtgtaatcgaagatagggagcacctgacatgacctttgctggactgctgctctttttatatgaatgaggataagaggattcaatatggttagcagcactattaactttctatttgcacgctgttgtgcaatgttagaacaacttatgcctgctacacagaggtgaatagccacttatttgtaaaattggttagacaaggttcgaatgttcca

SEQ ID NO: 83943 - DNA, 266 bp, Zea mays
  Clone ID: MRT4577_176569C.1
ctcgaggccggccgggagacatttctacaagtcaagcttgcgaccgcaatgtaactcgtatctgcctcctcgtcctctaccaccgccgcaagggcgctccccagaaatggatagcgggcgtcggcctccttcctcggcgcgaagacgctgctgacacaggcagaggggatccggacgtcgttcgccgtgagcgccgcttcatcaccccaacacgccgatctggatatgcggtagtacccctccgccgaggatcgacggaagacttc

SEQ ID NO: 83944 - DNA, 227 bp, Zea mays
  Clone ID: MRT4577_17656C.1
agaaaagatgcatgcaacttaatagactatttaaaagaggaacataagggcagtcgtttggggggatcaatgcaaccgtcgggcgtgggaaaaccctgtggttctcatactgtagctacctaagatcaacttactgtttccggctgctgacggtatggcatggaaaaccgctctggtcgcccttcttaacagttgcgcagactaaacgctttttgggacgcgcccta

SEQ ID NO: 83945 - DNA, 148 bp, Zea mays
  Clone ID: MRT4577_176570C.1
gtccgttcggagaccgaggtcgttgccgttaaggagccgccgttgaaccaggcggggacttaattcaacgaagcttcgaccacccctccggcctcggctcaatgttgttagacttcttccctgacttcgacacctacggtaacgggga

SEQ ID NO: 83946 - DNA, 278 bp, Zea mays
  Clone ID: MRT4577_176571C.1
ctttttcagcagttctgtgaattaaagagcagagtgactgtggatctggaatggctggtgaccttgggaatgtactatcaggattttacagcaatgctgggaaatgacagggaaaatgacaggaatgaatctcaccagattttttatgtactcagcagagccttgagttacggtgtttattttccaatcaagtgaagatatactcctacttctcctactggaacatctcagcttctgcagtgaagaaaattcctgtgatagttcagttcttagttttt

SEQ ID NO: 83947 - DNA, 374 bp, Zea mays
  Clone ID: MRT4577_176572C.1
cccacgcgtccggtgtcatccgcatattggatgatggggaaattaaagtcctccccaatcgggaggggagcttgagcatgtcaatgttttttccttgttaatgatggattgcaaaaggtacatagcaaggacaaaaagcaatggggacagtgggtcaccttgtctaactcctctttggcagcggagacctttccgggcaccccattaagaagcacttgagatgttcccgagtccatgatcatatttatccactaatgccattttggtccaaatcctttgtgtgtaaaaatgctcctgattaccggatgctccatcttgtcaaaagatttctcgaaatctagtttgaagataaccgacccttttttactgcttac

SEQ ID NO: 83948 - DNA, 345 bp, Zea mays
  Clone ID: MRT4577_176573C.1
tgatttcggtcctagtacttgaatgataagtctggcaacaaccaaaggaagtgaaatactcaaacccagcttgagttctgaacacataccacattgtctcagcaaggcatctacatgctcagaaggattaaatcatataactaactatcgaaaaatagtatctaacagaaacatcacgattatatgaaaagcaagctcgaatgctccagcaagaaaaaaaccatctttaagacaagttcttatctgaatgtaagaaatatgctgaggcacaacaaaaatacaagtctgcataaagggatgcgaagaaagcttgcgagttggctgatgcatctcgaacagaggcta

SEQ ID NO: 83949 - DNA, 892 bp, Zea mays
  Clone ID: MRT4577_176574C.1
agccaaaacacgcccgcgcgcctgtttgttcggccggaggacgccatggccatggaggagggatcaggagcggtggagaaagggccggccgtgggcacggtggctgacgcctccgccagcgtcatcggcgaaggcgccgtgaaggaggaggccgggggcagacggcagccgtcggccggctacgcggccgtcgtgatcggcggcaccttcgaccgcctacaccagggccaccatctcttcctgaaggcggcagcggagctggcgagggagaggatcgtggtcggcgtctgcgacggccccatgctcgccaagaaacagtacgccgacctgatacaaccgatcgagaagcggatgcagaacgccaaggattatattaagtccataaagcccgaccttgatgttcatgtggagcccatcgtcgaccctttcggcccatccatcgttgacccaggccttgaggccatcattgtcagcaaggagacgttgccgggagggcacgctgtcaacaggaagagagcagagagagggctcactcagctgcagatcgaggtgatagagctggtgccagaggagtcgacgggggacaagataagttccacggcattcagaaagatggaagccgagagggcgctgcagcaacagaataaacaagaagatacagcagtaggcactccggttggggtgcaaaacatagcggttcagtcacatggagcatagtacatgaaccgaagttctgttgcctgtacctttttttaaaaaagtacatgaaaactttgaggtctctacttccatcacatacaaaggggacaatgctttctttgcccaaacatggactgatcatcaatacagaaaagttccagtttcttaacaaaaaaaaaaaaaaaaagcggcc

SEQ ID NO: 83950 - DNA, 380 bp, Zea mays
  Clone ID: MRT4577_176575C.1
gccctacatcgtgagggccgtcctttttttttttttttgaaacctatccctcatctatagtgcgcattaaaacacgtatagggccgactcattctagtaaacgaaccaattaaacacattcaggctcactcccaacccccctaggtacccattctctgcatcaataactgtagcttcttcaccagcccagctaccatgatcatgttctctaactgccacaagcttatgataaccaaccaacttcacgccaagctagctgcctcctttatcgacagaatcctgaactgaacctactcactcatggagccgcttgttgctgccaccaacactttactagctgttgcccaaatccagtcgcaaactatcaacctacaacatcc

SEQ ID NO: 83951 - DNA, 283 bp, Zea mays
  Clone ID: MRT4577_176576C.1
ggggacaggtttttgtcgctttacattgcttcctagtttacagcatgatgcaaatgattttataacttagtgttaggagaaattattttccatctttaacctcttagttgtctaagagttaaatattactgaatttcagacgttcaaattgatcatcacaaatcctttaaaacaattacctaaaagataccagaaatcctgccttctttgtgggggaggggggagagaggggaaggaaatggaacaagttgtgtttgtgttagcatgtgggtgatgtaacttc

SEQ ID NO: 83952 - DNA, 513 bp, Zea mays
  Clone ID: MRT4577_176577C.1
ggggcgcttgggcgggcgcgccgggagccttggcgcccgtgccactgtcgtctcttgacctggccgacttggaccgggtaatgtaggtcaacgcgcggttcacggtgggggtgcctcaagcacgccgggcgcgtgatggtgccccaggccgccggatgcgttctgttcacggggaagcactacgggtatgctggggagtctcatcgtgctgacctacagcctgttcaaggtcacggtgcatatccgtggtgcgggccgtcgcggacgagctgaagcggtcggaggtgcgcgttaacgccatcttggcaaacgccataggcacgccgatgatgttacgctccctcggcaggctgggcccatgcgtaccctacgagtcaggttaatgcttggtggagactggcatgagctagctacgtggtgcggagctgcaggtccatgacttagtaagggtggacgtatacctggcctacagagaggtcaagttcaagcatcggtcataatctcgaggttgac

SEQ ID NO: 83953 - DNA, 141 bp, Zea mays
  Clone ID: MRT4577_176578C.1
cgacccacctcggctcttccatcatcgctgttttagaactgttctcctgatccggttattaacaatcgcgacctctcattcgggaactacgcctgaaactctaacttagcatcatcttcatgattagaaagactacctccc

SEQ ID NO: 83954 - DNA, 503 bp, Zea mays
  Clone ID: MRT4577_176579C.1
taggggccttttttttttttttttttcttttttttttttttttttttttttttttttttttttttttttttttttttttgaaaccggctcatacatacatacagatgggatgaaatgaaatttacccattcccgcattaaacactgttttcattgggaaacacacggggagaaagatctccgtacatagggacaacaacacccaacgacgcatggagctcaaccccgcctgacgggatcgaagttaaaaattttttttttttttttttttttaacacacccaaactggtccaaaaaggaacttaagggttcaatggttggcttccaggccatatcagctccccagggagggatcgtattcccccccgacctcaaatcaaccggaaaaagcctggatgatggggttgggccatgggtcaaaaaggggctgcaacaggttgtcaaagggccccttgccggggacgttgtgctggatcaggaagcccaggaacgccagaatcccca

SEQ ID NO: 83955 - DNA, 154 bp, Zea mays
  unsure (1)..(154): unsure at all n locations
  Clone ID: MRT4577_17657C.1
cccccccctaaagggaacaaaagtttttgagctccaccgccgggtggctggcgcgcttcttagnaaacatagtggaaaattccccctcggggggaccctttggccaaggggaaaatttcccggggggcctaatcggctaggcggtttaagctag

SEQ ID NO: 83956 - DNA, 970 bp, Zea mays
  Clone ID: MRT4577_176580C.1
accctttcccttccgccgcgttcctacttggtcctagagggagagagatctcgaactccaagggcgcatgctccggttgctagctacgatgccgtgtgcgtagctgcggcagcccttgatcgatcgatcgatcgcttgtgcggaaggagccggatcgagtggagtcagctagctagatactccgtggtcgtcgttggacgtacgccagaagagggagctagagcagaataccgtacagctgcttccaacatggcagctgcctcgtctgcccacctgttcggactcggcgacgggcagatgcagatgcagatacagcagcagcagcaggcgccgcctcctcctcttgtgaacaacccggccgcgccgccgcccaagaagaagcggaaccaacccggtaacccaaaccctgacgcggaggtgatcgcgctttcccccaagacgctgatggcgacgaaccggttcgtgtgcgaggtgtgcaacaaggggttccagcgggagcagaacctgcagctgcaccggcgcgggcacaacctgccgtggaagccgaagcagaagaaccccaaggagacgcggcggcgggtgtacctgtgcccggagccgacgtgcgtgcaccacgacccgtcccgcgcgctgggcgacctcacgggcatcaagaagcactactgccgcaagcacggcgagaagaagtggaagtgcgacaagtgcaacaagcgctacgccgtgcagtccgactggaaggcgcactccaagacgtgcggaacccgcgagtaccgctgcgactgcggcaccctcttctccaggagggacagcttcatcacccaccgtgcgttctgcgatgcactagcgcaggagagcgcacgggtgccgcccatgggcgccggcatgtatggcactggcggcatggccctcggcctctccgggatggccacatcacagttgcagtcattccaagaccagacccactcctcgg

SEQ ID NO: 83957 - DNA, 271 bp, Zea mays
  Clone ID: MRT4577_176581C.1
ctgttctgttcctctttgcttttggattcacttaagcaatgctgctgctgtctatcctcaggactattaaacaataggtaattttgcttgtccacttactctttatctgttgctgtatatccactatagtcaaacggaagtttcttcgaatagtatcctgtgggaatgattgtgtattagttggtactttataggcttgcaaagtgcttggcagatatttatagttcgtcacaatgtgtggcaagcaagtaattccgtggataatttgttt

SEQ ID NO: 83958 - DNA, 614 bp, Zea mays
  Clone ID: MRT4577_176582C.1
gtgtgtgtgaggcgatagagaagctagtgctcataaccaaccaccactcagtcctccttctctaccctttcccttccgcgttcctacttggtcctagagggagagagatctcgaactcgaagggcgcgcatgctccggttgctagcttcggttcgacgataccgtgcgtagcgtagctgcggcagcccttttgatcgatcaatcgatcgcttgtgcggaaggagccggatcgagtggagtcagctagatactccgtggtcgtcgttggacgtacgccagaagagggagctagagaagaataccgtacagctgcttccaacatggcagctgcctcgtctgcccacctgttcggactcggcgacgggcagatgcagatgcagccgcagcagcagcagcaggcgccacctcctcctcttgtgaacaacccggccgcggcagcgccgccgcccaagaagaagcggaaccaacccggtaacccaaaccctgacgcggaggtgatcgcgctttccccgaagacgctgatggcgacgaaccggttcgtgtgcgaggtgtgcacaaggggttccagcgggagcagaacctgcagctgcaccggcgcgggcacaacctgccgc

SEQ ID NO: 83959 - DNA, 341 bp, Zea mays
  Clone ID: MRT4577_176583C.1
acggcgcccacgcatgctaagcaccacaagtgctggtgcttcattctttcttgatggaacaaacgtgggcgggcgcaaacagggactgaaaatcaaggcgctcgcgatcaaataattagtttggctaacgggtacattaatgacgtgcggcgactgaaccttgcacagaaccaaacggggaatgcctaccggggcccccgtgcacttgcggagaaattactatctttttattaagcagattgcagacattcctcacgataaagcacactcatctttaatatgttgtcccacaaaatcaaggaatagagtcgcgcgcttctggattcacctaagcatgatct

SEQ ID NO: 83960 - DNA, 740 bp, Zea mays
  Clone ID: MRT4577_176584C.1
tgggaccctcgaggccggccgggccgggctttcatcgagctgagctgagcatcatggggtagtgtgtgtgaggcgatagagaagctagtgctcataaccaaccacggaaccaccactcagtcctcctcctctaccggccctttcccttccgcgttcctacttggtcctagaaagagagagatctcgtcgaactcgaagggcgcatgctccggttgctagctacgataccgtgtgcgtagctgcggcagcccttgatcgatcaatcgatcgcttgtgcggaaggagccggatcgagtggagtcagctagctagatactccgtggtcgtcgttggacgtacgccagaagagggagctagagcagaataccgtacagctgcttccaacatggcagctgcctcgtctgcccacctgttcggactcggcgacgggcagatgcagatgcagcagcagcagcaggcgccgcctcctcctcttgtgaacaacccggccgcgccgccgcccaagaagaagcggaaccaacccggtaacccaagcaagtaccctggctggccttattcgttatttgctggttaattctcttggcaattcatcaaattcttcggtccagctagctctggccgatctgatgaattagtgtattaattcttcggaatcatttatatatagatagatatacatggtcctatatatgcatgggtgttgatgtttaaaaaaaaaaaaaaaaaaggcccctagggcc

SEQ ID NO: 83961 - DNA, 899 bp, Zea mays
  Clone ID: MRT4577_176585C.1
ccggccggcctgccgggatcgagctgagctgagcatatggggtagtgtgtgaggcgatagagaagctggtgctcataaccaaccaccactcagtcctcctcctctaccctttcccttccgccgcgttcctacttggtcctagagggagagagatctcgtcgaactcgaagggcgcatgctccggttgctagctacgataccgtgtgcgtagctgcggcagcccttgatcgatcgatcgatcgcttgtgcggaaggagccggatcgagtggagtcagctagatactccgtggtcgtcgttggacgtacgccagaagagggagctagagaagaataccgtgtacagctgcttccaacatggcagctgcctcgtctgcccacggcctgttcggactcggcgacgggcagatgcagatgcagatacagcagcagcagcaggcgccgcctcctcctcttgtgaacaacccggccgcgccgccgcccaagaagaagcggaaccaacccgcagaccctgacgcggaggtgatcgcgctttcccccaagacgctgatggcgacgaaccggttcgtgtgcgaggtgtgcaacaaggggttccagcgggagcagaacctgcagctgcaccggcgcgggcacaacctgccgtggaagctgaagcagaagaaccccaaggagacgcggcggcgggtgtacctgtgcccggagccgacgtgcgtgcaccacgacccgtcccgcgcgctgggcgacctcacgggcatcaagaagcactactgccgcaagcacggcgagaagaagtggaagtgcgacaagtgcaacaagcgctacgccgtgcagtccgactggaaggcgcactccaagacgtgcggaacccgcgagtaccgctgcgactgcggcaccctcttct

SEQ ID NO: 83962 - DNA, 2419 bp, Zea mays
  Clone ID: MRT4577_176586C.1
cattgggtacctcgaggccggccggggccttttttcgagctgagctgagcatcatggggtagtgtgtgtgtgaggcgatagagaagctagtgctcataaccaaccaccactcagtcctcctcctctaccctttcccttccgccgcgttcctacttggtcctagagggagagagatctcgaactccaagggcgcatgctccggttgctagctacgatgccgtgtgcgtagctgcggcagcccttgatcgatcaatcgatcgcttgtgcggaaggagccggatcgagtggagtcagctagctagatactccgtggtcgtcgtcgtcgttggacgtacgccagaagagggagctagagaagaataccgtacagctgcttccaacatggcagctgcctcgtctgcccacctgttcggactcggcgacgggcagatgcagatgcagccgcagcagcagcaggcgccgcctcctcctcttgtgaacaacccggccgcgccgccgcccaagaagaagcggaaccaacccgcagaccctgacgcggaggtgatcgcgctttcccccaagacgctgatggcgacgaaccggttcgtgtgcgaggtgtgcaacaaggggttccagcgggagcagaacctgcagctgcaccggcgcgggcacaacctgccgtggaagctgaagcagaagaaccccaaggagacgcggcggcgggtgtacctgtgcccggagccgacgtgcgtgcaccacgacccgtcccgcgcgctgggcgacctcacgggcatcaagaagcactactgccgcaagcacggcgagaagaagtggaagtgcgacaagtgcaacaagcgctacgccgtgcagtccgactggaaggcgcactccaagacgtgcggaacccgcgagtaccgctgcgactgcggcaccctcttctccaggagggacagcttcatcacccaccgtgcgttctgtgatgcactagcgcaggagagcgcacgggtgccgcccatgggcgccggcatgtatggcaccggcggcatggccctcggcctctccgggatggccacatcacagctgcagtcattccaagaccagacccactcctcggccactaccgccatcagcagcaacccggcggcgcagttcgagcacctcatgcagtcgtccaccggctcccccgttttccgcggcgcgcaaccgacatcatcgtcttcctcgccgttctacctcggcggcgccgaggacggccatcaaagcctatccggccacacctctctgctccacggcaacaagcaggcctaccacggcctgatgctgttgccggagcagcagcaccaggcggggagtaacggcctcctcaacctggggttcttctctggcgggagcagcggtcaggacgcgcgcctcgtgttcccggaccagttcaacggcgccgttggcgggaacgtccgcggcgacggcagcgagcacggccacagcggcgctaacacggaatcagcggccatcttctccgggaacctaatgggaaaccaccaaatggcaagcagcgcgggcttttcttcctccttgtacaactcgtccgagaccgttgcgccggcgcagatgtcggcgactgcgctgctgcagaaggccgctcagatgggcgcgacgacgagcagcggcaacgtgaactctctgctcagggggcttggtagcagcgccggcggcaccttgaacgggaggcctgccggagcagcagctgggttcatggccggcgagggatcctcgtcgaggagcacttcccaggccgagaacgagagccagttccgggacctgatgaacacgctcgcagcattccgagcagcggagctgctggcacagcgttcagcgggggtttcccgggcatggacgacagcaagctgagcacgagagacttcctcggcgtcggcggcagcgtcgtgcggagcatgggtggcgcggcagggctgccgctgcggcacggcggtgccgcgggcattggcatgggctcattggacacagaaatgaagtaggcgaatcgaaatccgaaacgagcattattatgctccactcttgggcagaggctcttgcattgcatgcaaggtaagtagtagcacagcctaagcaaacgacttatggaaagatgagaccatttgcgcccaaaatgacaaatgaggccgtcaaccatcatatgtttatggtgctgcatgctgcatgaatattgatccttgtttattgtagctccctcctcccagggatcatggaagaatcgatgaagaactaatagcagagaaggctggacaatttgttaaattaaatgccagtatatctagttattttctgttaaaaaaaaaaaaaaaaaaaaaaaaaaaaaaaaaaaaaaaccaaaaaaaaaaaaaaaaaaaaaaaaaaagtactctgcgttgttaccactgct

SEQ ID NO: 83963 - DNA, 599 bp, Zea mays
  Clone ID: MRT4577_176587C.1
gcttatgcctcattttggtttttaactctagcctatcctaacttgtctgggtctaaaaggctattgctgttgttctgtattttttaacgaatcggcttatctgacttctgcactagataggtacagtaaaactcaatagcagagcaattttctttacttcatataacacatcaagaaaaaaatattgaatattttcgtatgtcatcccatgataaggttatgttgcagcctgtcattcctcaacagatgaattcatgttgcaagaatatcttgacccattcttcaaacttacaagcaaacataaatataataaacataattacctgcagagaagagagctgtctcttccatgcctcttccatagatttcattttggcctcatattctgaccatttactctcatactgttccaattgctgtttcagcatcacattttcttcttccttgtccctcaatacagcctcagctttcgtaatccgaccctgaagctcagtgatgactggttcatgaggatactgcccattcattccatggcatattcttgactcagcattattcttccttgtttccacttgaactatgttgtgactggcctttaa

SEQ ID NO: 83964 - DNA, 349 bp, Zea mays
  Clone ID: MRT4577_176588C.1
aaccaatttaccttacccaaaagattcacatattcttgcgataggagcagcagaagcagagggtactggaaagccgctgtccgacatcggcgaaccccaaaccacggagggggcgcaaccaatatgtcgagcacaatttctttactggaaacaacgcacggatgcaggggtagccgtaaggaaaggtgaatcagctgatacgaaagctgattatatcgcttatggagcggttcagatgaacggacgagagctgttccaacaagagcgcgcggtgttcgacaacaacatttactgagatcgtgccgggctactggtactgcattaaacctagctccaggggagggatcat

SEQ ID NO: 83965 - DNA, 472 bp, Zea mays
  Clone ID: MRT4577_176589C.1
gccccccctcgagtttttttttttttttttttttttttttttttttttttttttttttttttttttttttttatagcccctagaaggcggatcggggccccaatagggggggtgggcccttttccttttttaataaaaggacgggcacccctccggggcgttcaaaaaaaaaaaatttgggggccttaaagggaagaagccgtccttcctcccaccgctgaaaaccctcaaaccgggccggggaaaaaaaaacccctggaatgtccctgcacccatgcagagcatggttgttgctgaaaacccggggcatccaccagaggaatttggggggctttgccggcagggcctttttccctaactcggactgctcctgcgcatgaaccgagaggaaacctgtgggggtataaagtgaaggggcttggccaccatcctgggggggtttaaacaaaccccgcccaagagccttcctggg

SEQ ID NO: 83966 - DNA, 254 bp, Zea mays
  Clone ID: MRT4577_17658C.1
ggggggagagggtttttattaaaaagtagtaaaagtagaaatagtagaaatgcaagtcgggaaaataatgcgtagggaggtagatatgggaaggggggggggatccccgggcgccgacgtacggggggataaatatggatcgttttaaggggggcgccgtcgcccgttgacgacgtttaggggtaaattaaacctggaacaatggggggaggggctgatgggggaggggaagctaacccctaaattggagggga

SEQ ID NO: 83967 - DNA, 243 bp, Zea mays
  Clone ID: MRT4577_176590C.1
acccagcactaaatcgatgcaatttgggaggttccttggacgtggattcgtgctgctagctagggctgtcgcggagacgctctgcgcgacgctgtccaacaggatgttccgtcattctggtcccaccatcatggcaacatagcagaggtgctgtcagctcagggtggccacagttcttgtaggcgatgcttatgccaaggaggtacacgcaacacttacctgcgcgtatcgcctgaacctcag

SEQ ID NO: 83968 - DNA, 1285 bp, Zea mays
  Clone ID: MRT4577_176591C.1
gggtgggcctgatgcacgtctctggtagccatgagctttgaccggagatgctatgattaggccgatacaaaggtgtttcaatgtttcacatgtcgataggaacctggggacggcttctatctgtccacagagccgttttctgtgattacagtcattgctttactataattattgttagtgctttgccttcagctcattttgttccgtatatttgttatgcatatggcaatgatgttaaaggcttgtttctcaacattcgcagtagccgcctaagagcttttgccctgccaggctagagagcttgtgctgtttaatccttccttggatgtctgagccatacttgttcttgtccagctcatgattttgccagtacgttctgtatatcttgctgttttattagctgttgtgcgttgcaagtgatgatgaagtcaaggcttgtttctctacattcgcagttgccgcctaagagctttcgccatgccaggcttgagagctagtgctgccaaatccttccttggatgtctgatgcaatgcaatacctatgtttgatacttgtatttagcttgtgctgtttaatccttccttggatgtctgagccatacctgttcttgccgagctcatgatttttttcattacattctggatatcctgctgttttattagctggtgtgcattgcaagtgatgacaaaatcaaggcttgtttctctacattcgcagttgccgcctaagagctttcgccctgccaggcttgagagcttgtgctgtttaatccttccttggatgtctgacgcaaatgcaatacctatgtttgatacttgttatttctgataatcggtgccctatgatgacaaaaatcaaggcttgtttctctacattcgcagatgccgcctaagagctttcgccctgccaggcttgagagctaatgctgcagaatccttccttggatgtctgagggccgccacaaaaattactgaactgctgtcttttgctatgcttgtaagatcatcatccagaatttcccaactgtttctagcgcacctccagtttattgcctgtgtgaagcaaaaggagcatccaaatcgtcttggtcatgggtctgtagtttatagttacggctggttgattgcaatgttgtgcaaacgctaatgtatttttgaacagtgattgatttgttttttaatggtcaatgaatcaagtctcaagaatccgtcctgatttgtataagtttcatcaatttgaagaaatgtgatgacctgacccaaaaaaaaaaaaaaaaaagcggcc

SEQ ID NO: 83969 - DNA, 374 bp, Zea mays
  Clone ID: MRT4577_176592C.1
cgcaagtaaatctatgctagaggagctcgatgcactgctggagtggcggaccctgatcctgcatagaagcagcttatcactgatccgtaggatgatccatcgtcgaccagttggtgcacatccccgatgagaactcacggtgctgtgaccatagccatcatgatcatcgatgaaggcgacgcgaagtgatgcaccgataccgttttactggcatgatcgaatgctggcaatgctgcatatctatccgtgtatcaactgggaggaactgatctgccggtgctttgccgacacctcgggccagaaaagctgtagtcgcacattattctgccctaaatgctgtccatggcgttattgacgtgggtacagtagggctg

SEQ ID NO: 83970 - DNA, 2293 bp, Zea mays
  Clone ID: MRT4577_176593C.1
aaagatgactgctttaaagtttctctgaccttggcctatgatgacatgattgtttcagaagaagcaatttttttgtctaatcttgttgatatttatcgagaactagcacggtctgaggcaaatttctgtctaaagcttgttctgtttattctttccttggatgtcttagacatacctgttttgagccagctcatgatttttttaccattctttcccgtattttttgctgtgattttagctgttgtggctgtgttggaggatgataatcaggttttgtttctctacattcgcagctgccgcctaagagctttcgccctgccaggcttgagagatagtgctgccatatatccttctatgtttttttatctgttagattctttaggtgacaatttacaattgatgcatttgactgttcccgatatttgttggtgcattgcagatgatgataaatctgaggcttgtttctctacattcgcagttgccgcctaagagctttcgccttgccaggcttgagagctagtgctgctaaatccttccttggatgtctgatgcgattcaaatccaattcttttgtgctttggttgtagagggttccgtaggtttcggtctaaaatcgtgtgctttgcaagatcagcttcttgtttggacttcgaaactgaaacctggtccaggcaatcggcaaatcatcctgccatcttgcgatactgtatccaagccagcttaaactcacctggatctgacgtcctgattttctgggccctttcggctggcacatgccttctgcttcagccatttatgcttctcttttctgctgttgcttgaactgtgtacctgaatgttttactgcttaccctagctaaaattttcttgaatggctatttgctatggcacacagcaaaagcttatgttgcaaggtcatgttttgaattgtaggcataactcttatttgagaattctgtattttcttggccccacaaatcaagctcctgtattagctttatcagtaagcgattgtttctagatatggatgtaatggagcttctcccaaatagcaaacaagtttcggctgcataactcttatttgagaaggatgatttgtttggcgtgagatactgaagtcgtggctccctacctttatcagtaatcaaaggatgcgccaaatgcttgcagactccagtgagcaggactgcagtatacacgtacattgaggcagtaatattaatgttgatagagagaattaaatacatctctttgtttttgaactaaaaaaaaaaaaaaaaaaaaaaaaaaaaaaaaaaaaaaaaaaaaaaaaaaaaaaggaaaaaaaaaaaaaaaaaaaaaaaaaaaaaaaaaaaaaaaaaaaaaaggggggggccgctcccaatttaaaacgcttccgcaaaatcaaggcttgtttctctacattcgcagttgccgcctaagagctttcgccctgccaggcttgagagctagtgctgccccatatccttccttggatgtctgacacaatgcaatacctatgtttgatacttgttatttctgataatgggtgccctatgatgacaaaaatcaaggcttgtttctttacattcgcagatgccgcctaagagctttcgccctgccaggcttgagagctaatgctgcaaaatccttccttggatgtctgagggccgccccaaaaattactgaactgctgtcttttgctatgcttgtaagatcatcatcaagaatttcccaactgtttctagcgcacctccagtttattgcctgtgtgaagcaaaaggagcatccaattcgtcttggccatgggtctgtagttagagttatggctggttgattgcaatgttgtgcaagcgctaatgtatttttgaacagtgattgatttgtttttaatgttcaatgaatcaagtctcaagaaatccatcctgatttttttaagtttcatcaatttaaagaaatgtgacgacctgactctaattctgatttgtaagtttcatagatctgaagatgctaagcatgagcgcggtacaactaaagttgcaaaggctggctgcatatttttttcttggtagaatatccttcgatctgattatgtaagaaactggaacttttctgtattgatgatcagtccatgtttgggcaaagaagcattgtccctttgtatgtaaaaaaaaaaaaaagctcaaagtttcatgtacttttttaaaaaaaggtacaggcaacagaacttcggttcatgtactatgctccatgtgactgaaccgctatgttttgcaccccaaccggagtgcct

SEQ ID NO: 83971 - DNA, 263 bp, Zea mays
  Clone ID: MRT4577_176594C.1
tgcttttttaaaacacacacaaatgggcggtgaacatttcagggcatagggaaaaagaatatactaacactgcgcgcaatatagagctttgggttacacaagagtacatcactgcaccacacccctataaaaaccaagacatacactctacatacagaaaacacaacacacacaccagcttcaatctattctaacacgcctaagaagctccacgatcacctatcaacacattacactcttccatccacataagcctcaagctg

SEQ ID NO: 83972 - DNA, 134 bp, Zea mays
  Clone ID: MRT4577_176595C.1
gtgcgagtcgacgggttcaaaaacctgaaatgcgcaaggaagctgacaagcgggaggccttgacgggccgaaccgttggccgaccttgatcttttgggaagggttcaagttggaccacccctgtcggaacccga

SEQ ID NO: 83973 - DNA, 187 bp, Zea mays
  Clone ID: MRT4577_176596C.1
ggcttacctgatctcctctcagcagaagacgtaccttctgaacgccggaacgaacagaagagagcgcattataatggatcctgtgattctaaaatcacaaaacctggcaacacccatcatgaatacaatctgccatttttgcatcgaggacttccccatcctgtgcttttacctataaatggacccc

SEQ ID NO: 83974 - DNA, 455 bp, Zea mays
  Clone ID: MRT4577_176597C.1
caagatgtcgaagcgaggacgcggaggttccgcgggagccaaattccgcatttctctcggtctccctgttggtgccgtcatcaactgcgccgataacaccggtgccaagaacttgtacgtcattgctgtccatggcgtatctggtcgtttgaaccgtctgcccgctgctgggtcaggtgacatgattgttgcaacagtcaagaaaggaaagcctgaactcagaaaaaaggtaatgcctgcagtcgtcattcgccagaggaaaccttttagaaggaaggatggtgtctttatttactttgaagataacgcaggggttatagtaaataacaaaggagaaatgaaagggagtgccatcactggccctgtggcgaaagagtgcgcagatctgtggcctaggattgcctccaacgcctctagcattgcctgatttcccctgttacgtccccctcttcaat

SEQ ID NO: 83975 - DNA, 520 bp, Zea mays
  Clone ID: MRT4577_176598C.1
cattatactgattgtttctataataaaacggacccacattacttaaagaggacagctctactttttgtgatagtgagtttccttccacaccattgtcaagcaccaacaacaataaaacctgaccccaggtatcaacaaacatatttttttttaacaacatgcgaccaaccgcaaagtgtagacaaaacaccactggatttacacatcccccctagcatggaacctgagagggaaggagagggttggccatgatcatttaaacctgtaacatgaccacccaacatgtaattctccaatggccattgtcattctgaaaaggtcacccagggacggagaagcccatcctctccacggggaggccaaacacccaagggggaggcttctcaaccggaacaaacacaaagggtgacgaacccccgctgagggtaacggcacgctcatgcgggtaatgcgaggtatactcctcccaggcctcaaagagctctagcaggcctcacttacagttatgcagctaaattgc

SEQ ID NO: 83976 - DNA, 234 bp, Zea mays
  Clone ID: MRT4577_176599C.1
gtcgacacaagcctctacactgacgtcgtgttattgcacatcactagagcgagctgtgtgtgtgtgtgttcgtcagttcctcgatcatggcaaacgcgcatgcgcaagtggctgtaaggttcatgatgtatgtgccaccgcagcaggtggtgtctgtcatgcggctgtggaacgcgccgacgagcctgagtaccatcacctatgacgacacggagatgctggttctgtgctggt

SEQ ID NO: 83977 - DNA, 1061 bp, Zea mays
  unsure (1)..(1061): unsure at all n locations
  Clone ID: MRT4577_17659C.1
cgggnccggcccgtaacaaccgcctcgacatcctcgcaacagccaagtccgcgcccgccgccacgcaacagacactccgctccgcgttgtgatgggatgagaattcctctcctcggacaaggattcccctcccccgtaccacccaccttcctcccgatctcctcgcagagttcaccgctactcgcgccctctcctaggctcctagctcccttctgaggtagaccgcgcacgggaatggaaaggcatcagcgaaggagcgatggctgcgcccacggaggaggagaggaggaggtccaggactccaggtacgcgtattccgccgacgagcagtcaaagccgccagagccgcttgccgtcgcctccgtgtggtcgccgccgcagacgcacgccgaggccaagggactgcgcagcctgcgaccaggcgtatgcggcgggggaggccgcgcggaagaagcgcagcggctccagcccagtggcggccacggcgagcgcgagcgtcgcgaagtagatggcgaggtagacctgcgccagcagcagcgcgcggtggaggagcagcaggtactggcccatgcgccgcaccagcgctgtgagcacgaagagtggcaccgccaccgccgcccaccggccgccgaggaccgagcgcacgccgtcggcgatccaagcgttcgccgccgacagatacgccttcgaagctctccaagacgaggatactgctgaacttacgaattaccagcacaagaatgaggtgattaatttcatctagagattaaccatatgtggacacgaagattgtaattgcatatgtttgtatgcaacaaaaaaatataaaaaaggggagcaggtccttgcttatggaacatacacaaacatgaaactccttgaacgctatagcatcatatgtgtttggattgttttgatttagttgtttgattgcttctgtgtttgccgctcccaagttttatgctggttaataaaactttgtaattctttaggtctagtcccctcttgctgtttttggatatgttatgnccacacacctccctgtttaaaaaaaaaaaaaa

SEQ ID NO: 83978 - DNA, 533 bp, Zea mays
  Clone ID: MRT4577_1765C.1
atccagaaaagagtaaactgatccgttacctctatatcaggttataaagtctgtctgtaaatctagaatttatgtactaaaacagcaaagccaaacagaaatgtagagggagcggacagacgagacgagacaaatcccaaaacgttttcctatttctgccctacaagccttcgcatgatgcagagattgagagctattccgcctctcatagtggtggccctccgagcccgtcatcgttgtcgaactcgtgcatgtgatccaagaggtagttggcggccagctgctcgttcttgttgcaggcgaaaaacacttccaggacaagtgcccggtcaaagcccatcccttcaagacgaagtatagcttcgttctcctctggagtgactgcaatggtctcagctgcatccgccatctggtccagcatcatttcattctcttcatctccctccagtggttcattgatcaaccgcatgaattctgcttggttttcctggattagctgcataacctggggattttgtttccccaattcttga

SEQ ID NO: 83979 - DNA, 251 bp, Zea mays
  unsure (1)..(251): unsure at all n locations
  Clone ID: MRT4577_176600C.1
tggatctcgagggccgtttttttttttttttttttnatgcagaaacgggaaggannagtntgnagaanatgtggggtattatatggnangaggatagaanagatttntaggttttnnagtnttanaggagggatggnntttgttttgttangggnttttggtagntttttttttttntttnnaggtttttgtgggggggggggnntnnntntggggggnngtgggnggtgtnngngnggggggtgggtggg

SEQ ID NO: 83980 - DNA, 651 bp, Zea mays
  Clone ID: MRT4577_176601C.1
ctttttacgatgtctggcgtgcaagtggaagagctttgaatttgcacccccctccttgagccatgagattcttgatctcaattctcaaccgggccatggttcatttcaaggaagataatggtaatgaatgcttttttaccttgttcttcaactagatttgagccggtgataaggttcttccacccccctcaatctccagcctgtgaaggatttctttagccaatgccaactgagaccttatatgtcccacttgtttatcgctccatccaactagcctttgagttgtcttctttaatttcagatagatggtttgaaagggcacgtctcattcaaaactgagtcccaagcactctgaactgtgtctgaaaaacatccaatttaggccaaggcctcaaaatggaatctttgtctgtctgatgtattatcccgaaggccagcaacagggggcaatgacccgagtcctgggaggctgagctctaaagcaggacattaggaaaagcagttcccaattaactgagcaaaaaactctatccaatttgacaagcactggatcattttgctgattggaccacgtaaaacggcgtccatgccagggggatctccttgagagcaacatcctcaattagtcgtttgaagagattcatatagccc

SEQ ID NO: 83981 - DNA, 241 bp, Zea mays
  Clone ID: MRT4577_176602C.1
tcttatttttttttttattattctaaagagaaaccaatcaacttatagaagaacacatagatcacaagcccattagtccaaacaggccaggtatagaatcaaatcaaagagcatagcaatattctatatgaagatggcaaaggcaaaggaagcaccatggctaagaattcagacgagatctaagagagcagcaccccaacataataataagcagaaagaacgaggcagagggaagaacaag

SEQ ID NO: 83982 - DNA, 167 bp, Zea mays
  Clone ID: MRT4577_176603C.1
tttaatagacatatgcttgtatcagggagtgattcctgcaggggacggtgtcaactaatcttaccattccatcttcaaattgctcattcaataaactatagactgtctgatggaactcgatactcagattaccttcataacttatgagcttattgacacgactaatc

SEQ ID NO: 83983 - DNA, 461 bp, Zea mays
  Clone ID: MRT4577_176604C.1
gctgtttgggcataagtgttaaacagataacatcatatgggccctagtgtagcaggaaagggagatggagaaaagactgatggtgctactaagagggagggagtgtcttttgttccacatgagtatggcgccaatacattggctgctgttgcaactgctgataaacaatagctacatagtacgatggtgaaacttatgacactggaggatgagggggactcggaagtacaaacactattattaattaatgcacatagctactgaatcgttgatactggtgtgctggatgtggagctgactatccttatactgcagtagcccttcacacaatgtctctggatttccaaagtttaaaggatgctataaaggatcatattaccgataataagaagaaacttggataggatgatgatgcatctggacgagagggcaaacttattactcttggatgtatggatcag

SEQ ID NO: 83984 - DNA, 638 bp, Zea mays
  unsure (1)..(638): unsure at all n locations
  Clone ID: MRT4577_176605C.1
gtagtttagtagcatttcaggatgtttgtggatcctggggtgttacaacatcttatttttttaacaggaattcgacggggacgagaggtttgatgcggccttaccgagatctcaagaagggcagcggcctcgtcagagtcgtcggagtaggcggcgcccgtagggttttgggcatgagcctcgggatgaggccacgacgtccatggcgagcggatattcgtacgttggagattggactggcgaggacagaggcttcaaggggaggctacgacgtccatggcgagcgaaagggtctcgggcgggcgggggaggaggcgccgatgatgggggcgggatccggatctggcggcggacggtggtgtgggcgctgcggatggggcatggcgaggaggcttgtgtggtggaggcagcgctggtatccgtggtgcggggcggctgcgtgatgcggcgcggctgcgggtgcgcgggagggagcgctgggatccgcgcggtggatggaaggatggcggaggatggaaggagcggctacggtgctggcgcggatgcgggcggttgcggagcggctgcgcgatgcgggcatctgcgcgcgatagaacggtggttgtggacgcctacactactaactnnagtagtagtag

SEQ ID NO: 83985 - DNA, 399 bp, Zea mays
  unsure (1)..(399): unsure at all n locations
  Clone ID: MRT4577_176606C.1
ttatatattatttttttttttatgaataaatgaaatataattttttgatttaatttctatatttggttttacgatagttttgggtannnnnaaaaaactggtccatgaaaccaggttagtcacgacttacgacacaaaccatacaaatactttgaaagagaggaccattcatggggaatgggagagacactagataacccagatacaggagcagttttaacgaatgatgggttaataaccaccgggaagacggagcaccaggtggagggggctctccttgtggatattgtagtctggaagggtgcgaacattcttcagctggttggcggggaagatcagacgctggtggtctgggggaattccctggttggcctggatcttaggcttcatgttgtcgat

SEQ ID NO: 83986 - DNA, 723 bp, Zea mays
  unsure (1)..(723): unsure at all n locations
  Clone ID: MRT4577_176607C.1
aaccggatgaaacggactcgccgccggatcctccgcaaggtcgttgtggcgctaccttgccgaaattctctcccctacgggctgcataaaccagccgcgaaccccgtgttgcccgaccaagttgctctaccgcggcggcctcccctgccgtgaactccagtcgcctccgctcgctcacggtgcacgacctcggggtccgcaagatggcgcaaccggtgattcatgtctgcagcggcgcgctacccttgggcgggttgtgagggactctgcgggaggtgccgccgtggttgattcggatgcatggcgaggtcgggattctagacgccgccgacaagcctggccatctttcacgtcgtgctcgtccatagtcgcgaatccactctcctcggccccaagctcctgctccaccgtacctctccgctcctcggcgggtcgcagcacgccatgggcggattcaagtccggcgacatcttcatctacgcccgcaccgccccgacgctgtcccccaccctcgccgtcggttggggtctgctgggtggtcagggtcgtccgattgggaatactgatcgagttcaggggagtctcctggtgcgcggngttgtgattatgcggcaatcgctcgccgtcgggatgcaatcctcacttcgncgcatctagctgagagcagntaccttcacgccgtgccatccgngcgaagacacgtgtcatctgaaaagcaagttg

SEQ ID NO: 83987 - DNA, 294 bp, Zea mays
  Clone ID: MRT4577_176608C.1
acagcgctaaaagatagatttatactttttcaggaatcagtttgcattaaagcagatactgggattccatgagcaagtcaggagaaacaacttgttgattttgccatgagacacctgtattaagccagcaaccgttttctttttacaaaacaaacacttattaccacttgggcactccacacagaaaagcaagcacgcaaacgacaaggtttttttatatttacaggaagcttatttttgggtcaagggtaggggtttttgtatacaccaattggggggagcaggggccgcttt

SEQ ID NO: 83988 - DNA, 645 bp, Zea mays
  unsure (1)..(645): unsure at all n locations
  Clone ID: MRT4577_176609C.1
ttttttttttttttttttttttaatagaaaatagtttcattagtttttttatcacagcatctgttacaatttaataggatgacataaagatgtcttaccatatcccatatacatgttggtactacctacgaattcaatcatggaaccaaaatgtacagccatatacagtaagttcaatatgattttttaaccctcacgccaaaatatgagtcatacgaattctacataattcatggcccaagagaatactgctaccgaaaacaaagaggcctctgaaagcctgaacaatcctccctcccgcgatccttcctgccacgtcacaactcagaatcctctctcgtgccgcctccctcccgcccgggcctcccgccccatgaccccctgccggcgtcccatctccattccgcaattcttccccacgccaggccgccgggcacgcgctgctgccctcggtcctccttcagcgcgtggccccgtcgccgccgccaccggtgccgcggcttccgttctctcgaaccgcgcggaccatttggcctgcacgtacgacgcgcgcctccacggcggcacgngcangcccgcgccgcggnaggccaccgccgcagcggcgcacnaaagccgcggcggggaaccaanagagcaaggagg

SEQ ID NO: 83989 - DNA, 351 bp, Zea mays
  Clone ID: MRT4577_17660C.1
cccacgcgtccgcccacgcgtccggtcctggtgctcgcctccgcccaaggccacggccgacgacgccatgctgcagcggttcgcgctggcgcccgccgacccggcgtctaactccatctccttcaacgtccgcggaaccagctgcagcggccggccgagtgcccgccagcgccgcggaagccggtgtgggcgcctccgctgccttcgacgcccgccaacaagcgcagcaggccgtctccgccctcctccgcggcgccggctcgccgggccttcttccccgtcgcgcgacctcaccaccgtgttctgctccctgccgcccaagaagcggatccgcgtggtgtgaccctggcg

SEQ ID NO: 83990 - DNA, 548 bp, Zea mays
  Clone ID: MRT4577_176610C.1
tggtcctgcgcgccggcgccccttgacgcccacgccgccgacgccacggacaccgacttccttctcgaggcggcggcgcccatgttggtggcgtacggcgtggatgcggcggcggcggcggcggcctgctgcgcgtaggcggaggacgacgagatggagaggaaggaccagaagctcttcttgcgcgggctctcggccgccagcgacgaagccgacgacgagtaggggaactgctccagctcgggcctcggcgccaccgacttgctccgcttcagcccgcctccccccgcggaggcggcggcggaggaggaggacgacgaggagagcgtcttcttccggtggaacgacatgaacttgcgcgaggcgccggacgggtggagcggcggcggcggcggtggcggctcagcggcgcggcggaaggacggcggcgacgacggggaccccgacggcggcgggtggccgccgagcgggaagaaagggctggacttggaggaggacaccaggcggccgagcttctcctgcaggcagaaggcgcatatcccgccgcc

SEQ ID NO: 83991 - DNA, 842 bp, Zea mays
  unsure (1)..(842): unsure at all n locations
  Clone ID: MRT4577_176611C.1
cattgggaccctcgaggccggccgggaatccgctccgccgtccctagaaaagaaagaaaaggatgcgctgtcgctgcgcaggttgaacccgctctgtcacctgcaaaagcccactggcccctcctctctgttgggggagtagtcaagggtccatcccactcgccgacttccttgaaaacgacgacaaccaccgcgtgacgacacgggcgcagccgtttccagaccataggcccgattcgcgacatcttgtatagcgtgcccagttcacacacaccctctataagccacagcatcccgccgcccgcagcctcaacatgagcgcaactcagaaagcagcacctgtgccccaggagcccaacccgcctgcatccgctacgacgactttgcgccaagccaaaccagccgacagcagcagcagcaacagcagcagcattctgggcaagggaaagaagctattgggactggggaaaaagaagggagacgagggagaccggccggcaatggagcagacaggaaccacggcagcgcctgcggcgtcgattacggcgacgacgactaataagactacgacgactacattggcacccacactactcccctcacccccaatgtctccaccagagcgtagggcatcgccgcgaggcagcccgcgcatgctgcctgtgggcgcgtctcctagccgtcgcattcgctctacgtcgccaaacctgcacagcccagcgtcgtcgctcattttcgagcgcaacgtgcaagagcccgaaccgtcggtcgatgtgccggcacacatcaagacggagggacatatacccnccgcactagatgcgacgtcattggccattacc

SEQ ID NO: 83992 - DNA, 715 bp, Zea mays
  Clone ID: MRT4577_176612C.1
cattggtacctcgagccggcgggttcctctccaccaacaagttagatataaaaatatagcatcgcccgcgctctcgagagtctggatcctcctgaacctccaggcagcaagcgatgaaaggagggacgcaagcaattagcctgatggtgcaccttgctgtgccatggctccgccttgcttcttgggcagctctgctaccagcgctagcatctggaaatgtgggtgcagcagctccgatactgagagcagattacataaaattgaacttcagcaccgcttcggcgacccccgacaagtacaagagcttcatcgcttctgttcgtgctggcttggtgagcaaagcggggggcaacagcagcgggatccccgtgctggtcgacgaagacgacccgctcgcgctcgaatcgtttctaaacatcactctggtgaacaaggcagggcgctccgtaagcttgaagatggatgtctccagagcctacttcgtggcttacgtagcagtactgcactgcaacagctagctggtgtgttttgtgtatatatctggcgagctaggttgttaaagcaagcattagctattttaccagtacaataatgcatgcttgctactactactagtaatgcagtctagctctgtgtaccattgcctgcacggctgcacggcccctgttggagtactctataataaatgtacccctagtaaaatctgttttcagaa

SEQ ID NO: 83993 - DNA, 256 bp, Zea mays
  Clone ID: MRT4577_176613C.1
ttcgtgttctccgaaatgttgtcaagggagattcatatttttctggcttggcaatctccagtatcgaatcatggtagcaacgtgatggctatgtgaaatcagtggctgacctgattgagaaagaggtatctgccttttccagtcctgaagaggtagtgatattcttcagtgcacatagtgtgccacttagctatgtgcaggatgctggagatccttacagagatcagatggatgattgtatttctttgatcgtggg

SEQ ID NO: 83994 - DNA, 2914 bp, Zea mays
  Clone ID: MRT4577_176614C.1
ttgggtacctcgaggccggccgatgcgaccgccctcgctgctctccctcaccctcgacgccgcgctcctccgcatcgccaatatcgccgacctctcccacctcccagaccacctcctcatcgacctcttccgtgtaggtacctcgccgcgccctccgccacctctcgaatctgtggcccgctgctgattgatcgtaccggtgccaaggctccgcgtgcttggattcggtttgggcacattttgcggcgtggatttagtagtttcggattgatcctggtggctggggctgggtttgtccgctctttcagaggttacgctgcctgatccgttcttgttacgttctgtgccgcgtgcatgtttgatagaacttgtggaattgtaggagggggcgagggttctgatcagttttctacgtgatctcacgctttactaaaagttatcaaatgtggtgatatgtcagcagttttgatcgtgtttccttgtttgatactgcattgatttagttgatcttgttaatgctacccaaaacgaatggatttatggtaaatcggtcatgattgttggcaaggtgtggggaaccagtaggggatgccttgatgatgaccatgatgaggcactccacaagcccatagctttgcaagcagtagtgtcacaattcgatctctgaacaacacatttgaaattgggggattatttatcatttttctggtatgatgatgtaggtgaaatcatatcacagtcacagccacacaggagtgtgccggcgtccgaacaagtttagatataaaaatatagcatcgcccgcgctctggagagtctggatcctcctgaacctccaagcagcaagcgatgaaaggagggacgcaagcaattagcctgatggtgcaccttgctgtgccatggctctgccttgcttcttgggcagctctgctaccagcgctagcatctggaaatgtgggtgcagcagctccgatactgagagcagattacataaaattgaacttcagcaccgcttcggcgacccccgacaagtacaagagcttcatcgcttctgttcgtgctggcttggtgagcaaagcggggggcaacagcagcgggatccccgtgctggtcgacgaagacgacccgctcgcgctcgaatcgtttctaaacatcactctggtgaacaaggcagggcgctccgtaagcttgaagatggatgtctccagagcctacttcgtggcttacgtagcagggcagcgctcgtgcctcctcaagagatcaggccgcacgttctcgtcggcgatctgttactacggtggcccgtggggaacaagttcggctcctgtcacgcgacctgctgctgctgccggcgacggcgaggatcctggggtcgcggcatggcgagcgagagatctcgacgaggccatctcgtcgctgttcctgttccccactggcaacgctaccgaagaggagctgagacggggcgtcgccgcctgcgacatgatggtggcgagcgcggcgacgttcccgtacgtcgagcggcggatgagcgccggcatgtgggacagcaacggcgtggccaacgacccgagcctgcgggggctccaggcgcgctggccgtggctctccgccgccgtccagcagtcctaccagggcgccttcgccgccccggtccctgtccagcggagcaacggcaagtggatgcgggtccgcaacgtgcgtagcgcggtccccctcgtgtccttcctggagcacggaagctgcaacaggacgcggggggcgccggccttgctcataaggtccgtcgtgcaagagccggacgaggacatgcagccgggcggcggcgctcgagccacgacggcggcgtgcggcctgccggccgagccgacggtgcgcctcgtcggcccggaagggaggtgcgtggacgtgccttacggctactactacaacggcaaccaggtgcagctgtggagctgcaagtccaccagcgccgtgaaccagctctggacgctcaagagggacggcaccatccggtccaacggcaaatgcctgaccagcagcggcgacgcggccggcgctcgcgcggtggtcgacgactgcccgcgcttccccacgggccgcgtcgtctgggaggtgcgcgtggacggtaccgtcgcgctcaagtggtcccgcggcctggtgctggccgtgacctcgtcgactctcttcgcggggctcacggtgcggcaggacgaccgcggcaccggccagtcgtggacgccgaccaacgtcaccgcgcccctggacgccgccatcgtggggttccgcgacctctgcctgcaggcggactacgcggggtccgtatccgtcgctgcctgccgcgacggcgtgcagtggtcgctctaccccgacggctccgtacgcccgcccgcgtggctcctccttcaatggcagtgcctggctgctgatgccagcgggggtgtgacggtgaaactctgcgacggggctggatcgtcttgcgagcgctgggtgttccgcaacgacggcaccatcttcaacaccggcaccgggatggtcttggacgccaggccatctgcgggggctaatgctactgctagccaagtcatcgtgtcgcccgccactgggagtcccacccagcagtggacgctcatgctgtgatctcatctacggctcatgagtcatgactgtgggggcagggcagtactgcactgcaacagctagctggtgtcttttgtgtatatatctggcgagctaggttgttaaagcaagcattagctattttaccagtacaataatgcatgcttgctactactgctatagtaatgcagtctagctctgtgtaccattgcctgcacggcccctgttggagtactctataataaatgtacccctagtaaaaaaaaaaaaaaaaaaaaaaaaaaaaaaaataaaa

SEQ ID NO: 83995 - DNA, 625 bp, Zea mays
  unsure (1)..(625): unsure at all n locations
  Clone ID: MRT4577_176615C.1
tccgtttacagnacggagttcctgntgttcacacttgggtgccttgcgcttctggcctttattcctctaagacggcttataacagcttttggaacggtacaacatcctttgagccggctaaaagaattggaagagttgggctcctcccaaatgtaaattcttcatttggctagcctctctcaatcggtgttggacggctgacagattggcccggcgaggtatggatcatcatgacaaatgcctattttgcgatcaacaggaagaaacagtccagcatattttgctctcttgtgtgttctccagaaacatttggtggcgggtgtggtgtaaagtggggatgcaacatctggcacctgggcctgaggacatgattttccaagattggtggagcaatgctgaaggccaggttcctaaagagaagagaaaaggttttaacacgttggtaatccttgtggcttggtggctgtggaaacatcgaaacacttgtgtcttcgagggagcttccccgagcactagagatatcctgcagcacatccatgaggatgctatgctgtggggtatggccggngctagagggcttaagggcttatggccttaagtctaggagggtctgctgttgtgtcat

SEQ ID NO: 83996 - DNA, 3045 bp, Zea mays
  Clone ID: MRT4577_176616C.1
gccggccgggtcaaaaagcgaccgccctcgctgctgcttctcaccctcgacgccgcgctcctccgcatcgtcaatatcgccgacctctcccacctcccagaccacctcctcatcgatctcttccgtgtaggtacctcgccgcgccctccgccacctctcgaatctgaggtccgctgctgattgatcgtaccggtgccaaggctccgcgtgcttggatttagtagtttcggattgatcctggagactggagctgtgtttgtccgctctttcagaggttacgctgcctgatccgatattgatacgttctgcgccgcggccatgtttgatatagcttgtttttttgtaggacgacggcgagggttatgatcatgttgctacacgatcacaaccttttctagctcgaatcaaatctagagatctgtctgcagaactgaggccgggccggtatacatccccgaccaaacaagtttagatataaaaatatagcatcgcccgcgctctggagagtctggatcctcctgaacctccaagcagcaagcgatgaaaggagggacgcaagcaattagcctgatggtgattgggaacctcgggccgggccgggattccatccccaaccaaacaagtttagatataaaaatatagcatcgcccgcgctctggagagtctggatcctcctgaacctccaagcagcaagcgatgaaaggagggacgcaagcaattagcctgatggtccaccttgctgtgccatggatctgccttgcttcttgggcagctctgctaccagcgctagcatctggaaatgtgggtgcagcagctccgatactgagagcagagtacatgaatttgaacttcagcaccgcttcggcgacccccgacaagtacaagagcttcatcgcttctgttcgtgctggcttggtgagcaaagcggggggcaacagcagcgggatccccgtgctggtcgacgaagacgacccgctcgcgctcgagtcgtttctaaacatcactctggtgaacaaggcagggcgctccgtaagcttgaagatggatgtctccagagcctacttcgtggcttacgtagcagggcagcgctcgtgcctcctcaagagatcaggccgcacgttctcgtcggcgatctgttactacggtggcccgtggggaacaagttcggctcctgtcacgcgaccgcggtccactcgcaggggcagtgaccgtgctgccggcgacggcgaggatcctggggtcgcggcatggcgagcgagagatctcgacgaggccatctcgtcgctgttcctgttccccactggcaacgctaccgaagaggagctgaggcggggcgtcgccgcctgcgacatgatggtcgcgagcgcggcgacgttcccgtacgtcgagcggcggatgagcgccggcatgtgggacagcaacggcgtggtcaacgacccgagcctgcgggggctccaggcgcgctggccgtggctctccgccgccgtccagcagtccttccagggcgccttcgccgccccggtccctgtccagcggagcaacggcaattggatgcgggtggacaacgtgcgtagcgcggtccccctcgtgtccttcctggagcacggaagctgcaacaggacgcggggggcgccggccttgctcataaggtccgtcgtgcaagagccggtcgaggacgaggacatgcagccgggcggtggcgctcgggccacggccacggccacggccacgacggcgacgtgcggggccgagccgacggtgcgccttgtcggcccggaagggaggtgcgtggacgtgccttacggttactactacaacggcaaccaggtgcagctgtggagctgcaagtccaccagcgccgtgaaccagctctggacgctcaagagggacggcaccatccggtccaacggcaaatgcctgaccagcagcggcgacgcggccggcgcccgcgtggtggtcgacgactgcccgcgcttccccacgggccgcgtcgtctgggagcgcgcgtggactgtaccgtcgcgcttgccgcgtccgggtgcagtggtcgctctaccccgacggctccgtacggcgcgccccgcgtggctcctccttcaatggcagtgcgtggctgccgatgccagcgggggtgtgacccctggacgccgccatcgtggggttccgcgacctctgcctgcaggcggactacgcggggtccgtatccgtcgctgcctgccgcgacggcgtgcagtggtcgctctaccccgacggctccgtacgcccgcccgcgtggctcctccttcaatggcagtgcctggctgctgatgccagcgggggtgtgacggtgaaactctgcgacggggctggatcgtcttgcgagcgctgggtgttccgcaacgacggcaccatcttcaacaccggcaccgggatggtcttggacgccaggccatctgcgggggctaatgctactgctagccaagtcatcgtgtcgcccgccactgggagtcccacccagcagtggacgctcatgctgtgatctcatctacggctcatgagtcatgactgtgggggcagggcagtactgcactgcaacagctagctggtgtgttttgtgtatatatctggcgagctaggttgttaaagcaagcattagctattttaccagtacaataatgcatgcttgctactactactagtaatgcagtctagctctgtgtaccattgcctgcacggctgacggcccctgttggagtactctataataaatgtacccctagtaaaatctgttttcagtttaccttgccgaaaaatataaacagggctagtttggaggggtgtttggtttgtcactccattcaaaaaaaaaaaaaaaaaaaaaaaaaaaaaaaaggcccctaaaaaaaaaaaaaaaaaaaaaaaaaaaaaaaaaaaaaaaaaaaaaaaaaaaaaaaaaaaaaaaaaaaaaaaaaaaaaaaaaaaaaaaaaagggggggggcccttttaaagaaccaaattttactccccggggattgaaaagaaaaattttttttttagggcccccaa

SEQ ID NO: 83997 - DNA, 433 bp, Zea mays
  Clone ID: MRT4577_176617C.1
cttggagggcttcttccgttaattcaggaacttggcaatgcagacgaaggaataagaactacttcagcatgggtgctgggcaaagccagtcaggacaatgttcttgttcaaaaccagatcaatggatatggagctttggacagattagtgaagatgggttattccagttctggaccagaagctgcaaaggcattgtacactatatcctctttgattagggacaacgaacatggtcaggagttgttcctttcagaaaatggttatgcaatgttgcaggtagaaaaaggaaatcatatattgaacatcaaggcaaaagcgaggttgaaatgtaccaacgcgttgtttgtttgcagcacatattgtcaaccacaaacactagtgttcggcttcagaaaaaggttgtgtctttactggcatatatagctgactttca

SEQ ID NO: 83998 - DNA, 406 bp, Zea mays
  Clone ID: MRT4577_176618C.1
ggaaaagaaggccgagctgcttcactcactgttacagtttcaatagatcccgttgtggggcggcgctccgctccgcagctctctctggctggccgccaggggcgctgtgccgcacatcgagtttagtgcactgcacagaggcacgcgtgggtggagtggatctaaacacctatgatggtgacagatcaaacctgatctgctggtcggaagcttaaaccgacaccatactttctctgactggaacgggatcttatggactgtgtgctaaagctagtggcgtgggggtgtcagatttgtgccgtagcaccatcagtctgtaataactgttcgaatcatgacagcatatgttatgtactagccctttacaatatgatcgccgactctctggtaaaaccgacccccttta

SEQ ID NO: 83999 - DNA, 646 bp, Zea mays
  Clone ID: MRT4577_176619C.1
gtttcttccatcccacccgtaccagccgccggtccccaatgcccaggcaggcagcccagcacggtgtggtggtctgatccgcggcggcgcgcccgtcgctccctccgcgaatggctcctccagcagggacaggggcagggacggaggggaggccggcgcggcggcgcggcaccggcaccagccccggacgcaccaaggtgtgggtcgagccgccgggcaagagccacggccaccaccaccaccaggctccgccgcccccgtccccgcccaagagggtggccgtggtctactacctctgccgcaaccgccacctcgagcacccgcacttcatcgaggtgccgctcgccgtaccggaggaaggcctctaccttcgagatgtgatgaaccgcctcaacgtgctgcgggggaagggcatggcctccatgtattcttggtcctgcaagaggagctacaagaacggcttcgtgtggcacgacctgtccgacgagagctccggagccggaatgtttcagcgggagcttggttgttgagacgaagcagcaggacgagcccgggagagggatcgcctcactcaaacgctcgtcatcttacgacgaggatagagtgtacagagcagcacatcccaaaagcacacggaaagctcctg

SEQ ID NO: 84000 - DNA, 278 bp, Zea mays
  Clone ID: MRT4577_17661C.1
cctaaaaaagatagcgcacctggatagatatggcccataacaagcaccaaatcaagcaggggagggcgcacaccaaggggggcgggggactacgagatgctgaggaccgtattcttcaacggcactccgctagacggacacaagatcgtcgactaccatagcagacaacctcttcgtcgatgcccgtcgagtagcccactccccgtactcatcgacacacgaaggaccacacgaggaggggaccaacatgaacgccgtcatcgcggagtctgagcccg

SEQ ID NO: 84001 - DNA, 595 bp, Zea mays
  Clone ID: MRT4577_176620C.1
aattcggcacgagggagatatggagatgcacaccctacatcatacactagtgactaaatacatgcacaacatatacataattacatataacacctccatttctttcttgactcctaagacaactaggaatacagcgatacttagattggaccttcccttcacaaaccaattataactcaatcttctattcttatctcaacccaaccagattaaactcaacccaactaggaatacagcataatgtttgcaaacctaagactcctaagataaacagtggttgctctggtggagaccaatacggagaagggtgtgccactgtgcctagggctgaaaacggttggtaacgtttcatctatgcggaaaaggttactgatcagtcagaattttcccatatttctcaatttgttaactattcaggtgcgacttagaatacgatacagaaagaaattaaaacatccaaattttatattatgctctttcttgcttgtccgaaccatttgagctatcttgactttcaataacctttttttaaagaaaagtagttcctgtaccaatatggtagcagtggaattacaaatgagttgagcaaatctca

SEQ ID NO: 84002 - DNA, 654 bp, Zea mays
  unsure (1)..(654): unsure at all n locations
  Clone ID: MRT4577_176621C.1
gccggccgggccgggaanaacagtagcttcgcattgccttgcccccttgtcctgctgtccctccgcccccctccggagctccccgcctgctccatttaattactgactcgtacccttccccgcattcgccttcttgtttcttccatcccacccgtaccagccgccggtccccaatgcccaggcaggcagcccagcactgtgtggtcgtctgatccgcggcggcgcgcccgtcgctccctccgcgaatggctcctccagcagggacaggggcagggacggaggggaggccggcgcggcggcgcggcaccggcaccggcaccagccccggccgcaccaaggtgtgggtcgagccgccgggcaagagccacggccaccaccaccaccaggccccggcgcccccgtccccgtccccgtccccgcccaagagggtggccgtggtctactacctctgccgcaaccgccacctggagcacccgcacttcatcgaggtgccgctcgccgtaccggaggaaggcctctaccttcgagatgtgatgaaccgcctcaacgtgctgcgggggaagggcatggcctccatgtattcttggtcctgcaagaggagctacaaagacggcttcgtgtggcacgacctgtccgacgacaacctggtgctcc

SEQ ID NO: 84003 - DNA, 2443 bp, Zea mays
  unsure (1)..(2443): unsure at all n locations
  Clone ID: MRT4577_176622C.1
tattcgcacaggccgggcaggggggggcggctccattattgcctctactccgccgatctccttcctaatcgcgcgcctcgtttcatcacctgagctctcctaatctcattcaccggggcgtgcgctttgaattgcctttgcccccatgtgcgttcctgggtcttccatcccaggcgggccanctgacggtttcttttttccatgcccagcgggcagcgccttgtgacctgagccgcgggtcgtccattcctccctccgtgaatgggtcctccagcagggtctggggcancgacggagggagggccggcacggcggcgcggcaccggcacaccggtaccagccccggccgcaccaaggtgtgggtcgagccgccgggcaagagccaccaccagaccccggcgcggtcgctgcccccgccctcgcccccggccccgtcggtggcggccaagagggtgtccgtggtgtactacctttgccgcaaccgccatctggagcacccgcacttcatcgaggtgccgctcgccgcaccggaggaaggcctctaccttcgagatgtgatgaaccgcctcaacgtgctgcgggggaagggcatggcctccatgtattcttggtcctgcaagaggagctacaagaacggcttcgtgtggcacgacctgtccgacgacgacctggtgctccccgcgcagggcagcgagtacatcctcaagggctccgagctcctcgaccgctcgccgccgccgccagatcggcagcatgacggcggcgctagcaacccgaatgtggaggagaacctcaagcaccgcaaggaagaagagtccccgcagtctcggggctcgcaggaagggtgctcgtcgtcgtcgtctccttccgcctccgccgctggcaaggagatctcgcctccgcccgccactccgcggccacagcagcaggcgcagtcggcagccctgccgccgccgccgtcgccgtcgccggcttccaccagccgcgaggacgacccgtgccggaccgcgcactcaggctcgtccggcaaccagtcccccgaacccgctgcgagaaacgctccaccgtcagaggctagctccccaggaccgtcggagtacagagtctgcagacccgtcggggctcaggacgcggccacacagacagacgacagcgagagggacgctgctgaaaaccatagtactcgcgtggccggagcgtccaccatggacacgacgtcggatgccgagatccaggaatgccaccggaggagctcgccgctgtcacccaaggtacccgagaccgttcgtgagtcaccgccggccgtgtgctcctccgatgctgcttcgcctggtggcagagtcgagacgttggagtccctgataagagcagaggccagcaggaggagtagcttcaggacattggaggagggacacatgcttggcccggtgggtgtcaaactgaagccggccaacttgctgatgcagcttatcacgtgtgggttcgtgtctgtgaaagaacaccgaggcttcgggttcatcccgacgtacaggcctcggtttacgcaggtcgagttcccttctccggtgttctccactcccgtggcgttgcggcaccttgacagaatcccttgcaatacaaaagcaactgggtcgacgagagctccggagccggaatgtttcagcgggagcttggttgttgagacgaagcagcaggacgagcccgggagagggatcgcctcactcaaacgctcgtcatcttacgacgaggatagagtgtacagagcagcacatcccaaaagcgacacggaaagctcctgtgagccaggtagtttcaggtgcctcccacagaccatcaggatcatatcgtgtaagcagtcgaggagtggaacagtactctccccccctgcctctgacgtgagaaacggctctagccaacaagaacacagtaccatgtcctcaccgctgggctcatcgaagagcgcgagcaacaggatggccgatccgtcgccgccgggcaaactgtcttgtgcgagagccgagtcgttgttccgcgaggagaaggacatgatcaagatcgaagaaaggcttccttctggagctcgggtcataatccagtccgcgccgttgtgtgaagaaagtgacgacagcagcgaatgaatcacactgtaagggtccgtgttgcatatgttttttttttcttcttttgttctttttttcatttcgttttgctgagggatgatggcatctgcgtgcgtagcttttggagtagagggttcaaaggtattgattctgtaaaccgtgtgaatgtgatagtccgggcgattttctcacacctcgaagaagagaatagtttgcctttgcttatttttttttttataaaaaaggggcccgcttttgtgtatcttaggcatacagttttacttgctttgtttttcttcaagtaaataagcatggattgtttt

SEQ ID NO: 84004 - DNA, 554 bp, Zea mays
  Clone ID: MRT4577_176623C.1
tactagctatcttatatatagagctacctaaattcaattgactggccgtcgacaaacaacggactgactagacaatccctgtacccacctaacttaattggcttgacatacatctttctttagctagctgaataaataacaggcaggccccgaccgatcttccttacaaacactcacgcagactgaatagtgaaacgcaccctccctgtagccattcatcaagcgcggtgtgtggggtacttacacgcagaccgatcgattcactagccagctacctaccgctcgtttctttctctttctttcctttctttctacggcacgtcggctgtctctgccaagctatatataaatggctggctttatggatgctatctattgattgattgaccctacctccaccacaactaacttaattagatggatgactcacggagccatccatctgactgacagacggttgttcttcctcggacgatggcatgcacttaataaataactgtctcttgaaactgactcaaacatcactcatacctatgtctatctattctattgat

SEQ ID NO: 84005 - DNA, 407 bp, Zea mays
  Clone ID: MRT4577_176624C.1
accaaaagctttcttaatcttccgtgtgagggcactgtacgggggtatggataggtactcgaggggccggctgtctctgtcaaagacgtttataccttcgagtacccggtttatcccccacaatattcccacgaggggaggttacagacagtcattaaggtaaaccctattacagacacggccctaatcagacctgacctcgcggggcccatcactatgggtcgaatcacacatgagcctcccccgacagtggggatgtgggaggcccgcagacatcatgcggggccttcatctgcgacaccagagcgagggggagcgaaggggtctcaccggtcttctaacgggtcgcgcccccgacctgctctggcatgttgtggctgtagccttcttcagagtgatgaggagac

SEQ ID NO: 84006 - DNA, 290 bp, Zea mays
  unsure (1)..(290): unsure at all n locations
  Clone ID: MRT4577_176625C.1
agcagtggtaacaacgcagagtacgcgggatgagatggcaatggtatacacaaaaaacgccaagcggtcgttatcgattcttctagatgggcaagggtaaggtatacttcgtttgtgtccgacatattatgtatttgtatcatgtatagatacgttttgttgacaacaagtgctgattataatgtaaaaaaaaaaaaaaaaaaaaaaaaaaaaagtactctgcgttgttaccactgcttaagggcgatttccggtgtattggcggncgttgctggtgggtccgggcttgg

SEQ ID NO: 84007 - DNA, 119 bp, Zea mays
  Clone ID: MRT4577_176626C.1
accttctaactaatccttaccaatccaatcctttcaccgaaatcatacataagatagagggtcaatatgactcgggacccattggtcgtcggcattgctgcgggagatattgggggccc

SEQ ID NO: 84008 - DNA, 1612 bp, Zea mays
  Clone ID: MRT4577_176627C.1
atagaagagctatgacgtcgcatgcacgcgtacgtaagctcggaattcggcctcagccgctgcgcgcggccgccccggggtgggggtgcccggcaggcaggcagctctccgttcggcttggcttgggcggctgccgcgtcgcgcacctgcgggcgggcagtggacagtggctgggcggtccgggtccggggcagccaggggcgtcgtcgcgctcgtagccactgaggccggcggcggtggcaacgtggcagtgcggtgccgagacaccgttccaccgaggaggctggggcaccggacagcgagggagaaattccgagaagctttaccgtgcaagtgccgccacctgatgtagcgggtgaggatgagagcaatagccgtggtgtcttcgtggagttcatgaccaaggtcgctcagttcaatgagcttgttgaatctggggagcgattgcttgggagatttcgtgaggagcttgagtattttcgtaggccgcagatttctaaggaagcagatgtaatgaatctgatacttaaatcaaactgcattgacagaataatgtcctctaacgaaactggctgcagggtctactgtcataacatctgcaacattaatcagctgaactcatgctgaaatggacttaaagatcatataaagaaagttaagaccttgcttgaagagcttgaatgtctggctaaggttttatatgacatcccactatcagtcagtttaagtgttctggcagtctctgactgtaaaagccttgacagcatgcttagtacgcaacgctgctccgtggagggtgtttctacacagcaggaggacagaagtgcagatcggttggacagggatgtgtcgtttgctacagtaatggtcctgcagcgtaaactactaaagcctctctatcctatatcagataagctcatgcgaagctggacttaaagatcatataaagaaagctaagactttgctcgaagaacttgaatgtctagtcgagaatgtctatggcatcacattaacatccagtttaagtgctctggaagtttcagacagtcattgcctcgacaacatgccaagcaccgattgctacgccatggaggaggataaatgtgcagatcatttggacatggacgtatcgctcgttacggtgatggtcatggttcgcaacatgctgaagcttgactacacgatgcaggagaagattgtcactgcattgtccttgaaaacaccagcatcggagctcgagggatactgcctcatgtgggatctacgcccgtacatcgatgacgacgtgatgcgtcttgcgtggaacatgtgtccttgaagcattggggctttggagttgtttctgctgggatggatgtctggtctgttcattattatgtgtttgtcgaaggtcgagagatatgttcagtgttatgtatgacgacgtggttgtgtgttcattgtcgtcttctggagacgagaaacagatatagtttgtcagattgaaccccttttgggggttctttttcagaaaaaaaattcaaaagtatttttataccatattaattactaaacatgggtgttgtttggttcacataaattggtaactaataatattagattatgtttgttt

SEQ ID NO: 84009 - DNA, 396 bp, Zea mays
  Clone ID: MRT4577_176628C.1
aagggtaccaaaaaggccctttcttgggtaggtacgaaaagtgaccttatttgctttttctgaacacgccgaacacatatagcctttatatcccatgcatgaccaccctgtgccctccaaagccctcaaaatttttccgttttaaccgatatgaataaaaaaataaaggccatgcagggcacgcataacacgctttgttaacttgccttaatcggtttttgcagatcctaaaaatcctaaaactttcaagaattacaaggaaaaggtcataccgaaccatcaaaaagattacaccgggggcatcctgggttaaaacagggaaaacctttgcgggcggaactggaggaacgcgctccatggcctccacaaaagtaacaaaggccctggacaccttga

SEQ ID NO: 84010 - DNA, 410 bp, Zea mays
  Clone ID: MRT4577_176629C.1
cagattatgatttctgtgcacatttctttctaacacactggctattccatcagggtgggttactagaaccaaccatgggattttaccgacccaatgcctttcctccactacttaacaaatttgactcaacatgctcaacaagttcacaacgcattatttaacattctttatatgcaccgctcgcatacttaacctatccactaattgtatcctaagtctcctatactattgaaacaccattcttaattgcttcaaaacttccaatgattgatgcctgatacttcagtgtctccacaatcatcaacctctactggttctttggttacacgctaagacactagatctttaacgccttctgcaaataacatactttacaatgatccgacgcacatattctacctgtcacattc

SEQ ID NO: 84011 - DNA, 1831 bp, Zea mays
  Clone ID: MRT4577_17662C.1
tttctgaagagttttggcaggtggaatggttactgtcgagggtgagcgtgagccgggcgctgcatccaccttactccctccagctctcagctctcccttcgccgccgccgggtactcggcgctccatccaggcactccagccacccccaccccttcctccgccgccgggtactcggcgctccatccaggcgtccccgccccgcggccgcctgctactcgttcgggcgctccatccagcgttctccctccagctccagtctccggcgcgatgaagatcgcggtggaggggtgcatgcatggggagctggacatagtctatgacacgctgcgaaggctcgaggaggccgagggcgtcaagattgacctcctcctctgctgcggcgatttccaggctgttaggaatgagaacgatttacagtgtgttagcgttccacaaaagtatcgtaccatgaacacattttggaagtactactcaggagaagcagttgctccgtacccaaccatctttattggtggaaaccacgaagcatccaattatctgtgggaattgtactatggaggatgggcagcacctaacatatactttttggggtttgctggtgttgttaagtttggaaacatacgaattggtggattgtcaggaatacataacaaacaccattatcatttaggacactatgagaggcctccatacaataaagatactatacggtctgtgtaccatgtaaggcattatgatgttctcaagctcatgcatttgaaggagccgctagatgtattcttgtcacatgattggcctctgggcattaccgagtatggaaactggcagaagctcattagtgtgaagaagaactttgaagatgaggttaacaatagaacactaggcagcaaacctgcagctgaattactgaacaagctaaaaccaccatactggttttcggcgcaccttcactgtaagtttcctgctgttatccagcatggcaagaatggacctacaacgaagtttcttgcacttgataagtgcattcctgggcgcaattttttgcaggttatagacattccatccaatccaggaccatatgaaatccagtatgatgaagaatggcttgcaataacacgaaaattcaacagtgttttccctttagcacggacacagtttactatgcgggatgagcagctcgacactcaagaagaccggcaatgggtcaggagcaagttgaatactagaggagctaagccttttgattttgttcagactgcaccatctttcaatccttccagtacaacatctaaacagtccataacagtttgctgcaggaatccacaaactgagtcttttcttcagcttctggaactcccatatctgctggactcatctaaatctgagatgtttggtagaaatgagtcaacctctcagacaggaaacacacttgataatgaagatatagagctaccagatgaagatgaggatgctttagaagatgacgagtgaaggacagcacttttagacaagtaccattgcacctatcatgttggttgcagggtttgcgatagatttcattgtcttttgtagattgcaatctagatatctagacgaggaactaacatgtactagattgtattgtcatagctgcttttttgttggagaacgtttgtggatctagagggtgatctgttgatcacaatgccaactctttggtgtttagttcatacagttttttgaactaactacaattaatcagtagactagatgcacccggtggaaagtgttaacaaaaatatcatctactagcaaggtagagatcagctatatatataaaacatatatttg

SEQ ID NO: 84012 - DNA, 251 bp, Zea mays
  Clone ID: MRT4577_176630C.1
agttaggaaggcctaactttgctatgtgcggataacatatgctttcaagcctcccacaacacgctactatctgcgtagagcgacatgggagacaaatgggtggaaaaaacacggattggtatgaccggcatgggttgaccccgtatacaatggaagtttaacttgatgccaaatcatctctcttgattttttcgatcccaaaaccgaacactccgcgtgtcccctggaataagagtacgcttcagcctttc

SEQ ID NO: 84013 - DNA, 447 bp, Zea mays
  unsure (1)..(447): unsure at all n locations
  Clone ID: MRT4577_176631C.1
cggaagccctacccgcgccgccgcgccgatccagccgagcgtggtgctgcgggtggcgtcgtccgccgcgatagcttattactgctgcggctgcccgcgcaggggcgccgtgtcagaggccgcattgcaatcgacctaggccatcgtcgcatacagcgcctcccccgctgccgcgctggagatgtgggaacggcgtcgcgttcacggtgctgcagcagacccacgccatggggaggtntgggagaggcgatgatgcttacaacaccttgatgactgtgactgcccttaccaagcacgtgaaccgctctgactttgttgacacttgagaccatgtcatcaatgacgtgaggactgtctcctagagtcagctgttccatcctgagcagctcatctattggaaggaggatagcagacactaacttcgctcgtgatcactacagcattgtc

SEQ ID NO: 84014 - DNA, 666 bp, Zea mays
  Clone ID: MRT4577_176632C.1
gccccccctcgagtttttttttttttttttttttttttgttttttttttttttttttttttttttttttttttttttttttttttttttttttttttttttttttttttttttttcaaaccccgggcccccaacctggaaaaacccagggtaaccggccctcccaacccatggggaaaaaaaattcccccctttttttttggccgccgttgttggtaaaggggccctttaccaaaaaaacccaaccccaggggacaaacaaccgggcccaaccgctgggggggccggaccatttttttgggccttccccacccttaaaaggtttggaaatttttggaaaaaccccggggtttttaagggcccccgggccccccctgggtttccccggaaaatatttaaccccctgtctaaaaaaggggccgaaaaaaaggttcggaaccttggggcctggaaaaatttggttcggtttttttggaaatccgcccggactaattcccccttggtaaccctggtaaattggtaaaaggcccccccaaaccccataaagaattccggggtttttggggcctgccttaagcccccccggaagggttcccagggcctggaaaaattttttaaaaaaaaatggaatggcccctttctttgggcccccttaagggaggggggg

SEQ ID NO: 84015 - DNA, 246 bp, Zea mays
  Clone ID: MRT4577_176633C.1
aaaaaaatatatcttcagaaattgacctataaaaacacaaaaattccatgcctttactatctcgggcatgcggaactaatgctggtggctgccctatattacaactacacctctacttgctctataagcttctgaaaacatgtgtagtctatctcctccatgaaattgcaagaaatgacgttgaccccctttaacacttaacctaccttttacttacagtacggactgcttctccttactcggact

SEQ ID NO: 84016 - DNA, 132 bp, Zea mays
  unsure (1)..(132): unsure at all n locations
  Clone ID: MRT4577_176634C.1
nnnntnnanattttataanatgnttcnccgcccaacactaacttttagctnccagtttaatttataancacaaacctagcccataacctatgcatgttagtcaattagttcaaatgcacgccaactcctttg

SEQ ID NO: 84017 - DNA, 340 bp, Zea mays
  Clone ID: MRT4577_176635C.1
ttttttttttttttttttttttttttttttggggttttttttttttttttttttttttttaaaagggccggcccaacaacaaaaaataaactgacccccctacatcaacaatttcgggccgttcccggattaccttcttaaaaaaacaccaaacccttcgggtccaaaaggccctccatactattttggcgaaatacctttggggcccccatttaaacaggcccccccggccttaattttgctaaacctacccgccgtacaccttcaaacaaaaaaaaccccccctggggttttttgcgggccaaaaacccaacatttataaccctttttttttttatgg

SEQ ID NO: 84018 - DNA, 753 bp, Zea mays
  Clone ID: MRT4577_176636C.1
agtagccccagctcggcaacaccctataagctccctagaaccagcgtctcgtcgagccccgccgcatgtcctatttcctgctcgcccatggaagctgcgcccagcctttgtccccatcgcgccgatccgcgctcgccaaggtcacctgccgttgcccagctcgacgcctttccctgctacaaagttcgccgtctgtccgtacgtcgcctgctgcttagatcccagccaggttgaccttgtcatggtgctggatctatccttgatccggcatgtcgtcgacttggcagctccggctagtcgcatcgtcacgctgtttactccttcgacgtgttgtccctgttggttcggtgttcggttccggttgccccgtcggatgcacacctccggagctcgccggtgtcatgttctagtcagcatcatgtcctgcgcgacgcgctccagtgtcgtttgtcgcgttttgcacgtcctcaccacctccaactttcaacgttccactgtcgtccgctacgctcaaccatgcgacaaccacgccatccatggcatgtgttcacgccaaaaattccgagaagattaggtgtagaaggaaacaaatcagcatgtagtcggaaaattcttgatgtgaatggagaaggcagtaaagtccgcgtggtgctcaccacgtgctcgacgtaatggcggaattggaactcatagctttgctcgtggccttcaagacggattccattattggtgccctgtcgtcgctctcgctct

SEQ ID NO: 84019 - DNA, 501 bp, Zea mays
  Clone ID: MRT4577_176637C.1
gaaacagcaccaggtcagagacgacacaacccccaatacaacacatagaatgactcttttccatcacttgagcatggctgttgtatctccatttgacccggtctgccgttttcacctacctttgaccttctagaaccggctgagtgctctgacgcagtaccatggctacaccgcattatgtgatgcgataactgggctggatttataccacatggttggacggctaaatttggtgctgctgtgcttaatggttggcacacatgttgagacctgggtcaatgtgcatagataggagggggcgcatgagctgcaccattgacttcgtcctatgcagggtgtgagtatagatgaatgtacaatagctgtgtaatataacatcatgctctgtaagcaaccaaacatgctgataggtacgctcatttgatggatgaagatatatgataacatagtcaacggcatctactgctactactgcgctagtaggctgtaggtctgacacga

SEQ ID NO: 84020 - DNA, 170 bp, Zea mays
  Clone ID: MRT4577_176638C.1
agaaaaaacaacgaaaacatccatatattttttcaattaccccttaacaattcatgggaataaacaacccttaaaccaataggtgttgaaacccctccccaattttacttacactaccctttatacgtacataaaaccattttttggacgcaatgggattaagggcaaca

SEQ ID NO: 84021 - DNA, 1082 bp, Zea mays
  Clone ID: MRT4577_176639C.1
ccggcgggtgtcctttttgtcttcgagcagaagcagaaaatcgcgttggcgaagcaactgaagctgaggccacggcaggtggaggtgtggttccaaaacaggcgagcaaggacgaagctgaagcagacggaggtggactgcgagctgctgaagcgctgctgcgagtcgctgagcgaggagaaccggcggctgcagcgggagctacaggagctccgcgcgctcaagctcgccggcccgcacccacaggcgccgtcgtcgtcgcccgccgccgcgacgcagggcgtgccggtgccggtgccgccgccgttgtacgtgcagatgcagatgcagctcagcagctgccgatgctgccggccgccacgctgagcctctgcccgtcctgcgagcgcctgcgcggcgggcccgccgcgcccaaggccgagcccgacaggccccaggcagccaaccaccgtttcttcaaccccttcacccactccgccgcctgctgatgatcatgatgatgttgcttgcgcgcgcctgcgctgcgcaccagcaccagcacgcgcatctaccttggcggcttggcgtacgtgcgcgtgcatgatgcaagagcaagcaacacgcagcggcggcagcgaacagatagcggcaccgcccaccaccgcagatactagctaccacgtatacactccgacgatccatccacctcgcgatcgcgtacgtcacaagtaacatgtgatcctccgatcctctggctattttcttgatccggaggggttaaagttacttgtcagtgttcccatcagctaatcgatcgatcgatcgatccaccatagattcataggcttgataggaggaggtagtagtcaaaatagccggtccgtccatccatccatgtatatttttgcgcatgcatgctgtaattctgtccctctcgatcggtcggccgatctactggaaatttttttttgctgcagcatgaggatagacccatttgcaaatcaataacacaactaaaacgttacttggtggacttgtaggtagggtctatcctcttttttatgaggggctacaaacatcctaatttagagctgggttgcaac

SEQ ID NO: 84022 - DNA, 307 bp, Zea mays
  Clone ID: MRT4577_17663C.1
ggaaaaaagccgctgaggtaccaaggaaaatatttgggttggcacaatgtaaacggagggaaaaacagcaggggaaaccccccaccaaacacccatttgtctgcaaccactggaaaacagatgtttttatttttaaatcaagcagggaactactcaaaaacccttatccagaatcaccccaacccggggcgtgaagccgaacctgcccggcaggcctcccgggcaggtccgaaaaagccagccacaagaagctgaggcaaaacttgtaaccccagcccagcattgaggtgcataaagggctgaaacc

SEQ ID NO: 84023 - DNA, 848 bp, Zea mays
  unsure (1)..(848): unsure at all n locations
  Clone ID: MRT4577_176640C.1
ccggccgggaccacaccaatttatcgagatggctggcaaggacttgggagagcatgcggtgcctcatgcatcgcccaatactgcttcttacaaacgcaaatttgttacgggtgcagtgcttggtttagcagctctagcattgcttagaaactgtaccaccacaccgacatcaacatggaactttctctcgaatccgagcaaatctagactggattcgcaatgtcaccaagctgaacctctttttccttccagaaaaacgaaagagttggatgatatggagagctatctgacctctgacgacttccgcaatgttgctatcgagcgcttatcaggcgctgtgaagatccccacccagagctacgatgatatgggcgacatcggcgcggacccccgatgggacattttctattcgtttgcagaatatctcagcaagacctatccactggcgcatgcgacacttcagctcgaaaaagtaaacacgcatggcttgctgtacacatggactggcaccaatcccagcttgaagcccaacttgctcatggcgcatcaagatgtcgtgcctgtcccggattcaactctcaagcaatggacgtacccgcctttctcaggacactacgatggaaaatttgtatggggaagaggtgcaagtgactgcaagaaccagctcatggctatcctgaatgctgttgaggcactcattgctgccgactttacgcctcaacgaacactaatcttgtcttttggctntgacgaggagatttctggtgggagaggggcaaagcatctctcagcctacctggttgagaaactgggacacaattcaatcgctgctatcgtcgacgagggcg

SEQ ID NO: 84024 - DNA, 266 bp, Zea mays
  Clone ID: MRT4577_176641C.1
gaaagacagcaacacaggtagagggacccagtgtgtgctggataagtggctgtggaaggtaagtatagacctacatctctgttggggaggtggtcagggcagaatggcctgggtgtttagcagcttctaggggtgagggtggcaggaccccaaaaccaaggccctctgcatcgttgttgtaataatcagctctggcatattcagctgcaactgtccctgtagaagaggtttctgagttttatgacccatgtaggagggtgttacct

SEQ ID NO: 84025 - DNA, 734 bp, Zea mays
  Clone ID: MRT4577_176642C.1
ggttcaaaacagatcattaccatatcaaggtggatcaagacgaactaatcgtggaagggatcctgctagctactgtagaattttacacaagtttcactatggttgaaaacggcacacctactgaaacccgccaggaggcacgaacagctgagccgcgtcgacgtcagggcggagccgcagcgcgacgcgcttcatgtcctccaagccccgctcgtaccccttgagcgcctcctccaccagccggcgctcgtgctcctcggagcccaggaactcctgcaccgccgcctccttggcgctcttcagctcggcctccgtcgtcttcttcgcctccgcgagctcggccttggccttctccagctcctcatggagcttcagtgcgtgccccaacgagaacgtcgcgtagttcgccgcctggagcgtcgcgatgtagcttgtcgcgatgacgctgaagggatccgccaccaagaacgcgcggtcccgcgccggcgtgatgacgccctgcagaagctgccgcgccgcctcccactcgaccgtgtcgccgtcatgtctgtccggtgcgtgctgcagctttcgtttttggcgcgtggagaagccgggcgggacagacgccgacccgtgaccagtggtctcccttgtgttgtcttccgccggcctcttcttcccggacaacggcgtccagcccggcgaggcgctgcagccaggttcactcttcgcggcgaccttggctgcttccg

SEQ ID NO: 84026 - DNA, 388 bp, Zea mays
  Clone ID: MRT4577_176643C.1
ggggtggaagaggcaaatatgcttatcaattctcttctttgcgctgatatacgatgtacagctggttttggatcacgaaaaaaaaatgtacagctgtttttggcacctaaagatttcctgcaatcagaacaaagttacttggacattgaccagatcacgagttttttaatgaattgagggtttagggctcaaacctttggggtcaacaagtttgacgaatacaatctgatgacttcccaaaagccggtagtgtacgtgaaagctccgtcgaaggaaataaagtggcaacgttctcttgggccttttgctttcaaaaaaccatacattctggaattcttgagacctccacatattgtgcctaagaccggcggggggggtgaattttagg

SEQ ID NO: 84027 - DNA, 196 bp, Zea mays
  Clone ID: MRT4577_176644C.1
acatggtctatctttggggcgcacctacttccttattctaaaaacaattattattgggcggtaacagcacacgggcacaacaacggagctagccataattactaagcgctcctatactaaataaaaaaaattcttgcaacctacagatttgtcaatctatttattaaaacaaaataattgtgggagcaaatcaggt

SEQ ID NO: 84028 - DNA, 589 bp, Zea mays
  Clone ID: MRT4577_176645C.1
gccggccgttccggacactgagatcagatgacataggcgccttcgtattcagctatctacgcgaccaaacggctccgctttctcccattcttctctcattactcaacaccgccgccgctaccacctttcgactagcatcatgaggcagtggatctccatcgacagtaggccaggctactattcatcgcgcaaaccggagctgaaagctgtactgccgcgagcttgggatgcaagctgatggtcagacgccctccgactaaaccattgcccgatcggatgatgcttctaacaccatgataagtgagactggcgctgggaagcacgcgacccgtgctgtttttgctgaccttgcatgcagtgtcatcgatgaggtgaggactggcacctatagccagctcttgcatcctgagcagctcatcagtgacaaggaggatgcagacaacaacttacgctcgtggtcactacaccattggcaagaagattgttgacctgaggctcgaccgaataacgaagtttgcaactaattgcactggtctccaaggattactcgaacacataaatttagccatatcaaacatacactaggcca

SEQ ID NO: 84029 - DNA, 547 bp, Zea mays
  Clone ID: MRT4577_176646C.1
gtgtggtttttttttttttttttttttttttttttttttttttttttttttttttttttttttttttttttttttttttttttgggcttccggggttttcaattaaggccttttttttttgggggtcccaaggaatagggccatcttggggggggggggggggggctttttttaacaggctccccctgggccttggggtaatttggggggttttttatccccctaggtttcacgggggccccatgcttagggggggggagggggtttggcaaagggtcagccaccttcaaatccgggggggtttggggtttttttttttccccccggctaagggattcccgggggggggggaacttccgcaggacggggttggtttttggggggggccttgggtccttaggttgggcaatagcccccttgggggcccaggggggggtcaagggggttgatggctttggaaacacccccgggtcggggggggactttttttttcaaaaacctttctttggggattcagaaggcgggaggggccggggttcgggggggg

SEQ ID NO: 84030 - DNA, 227 bp, Zea mays
  unsure (1)..(227): unsure at all n locations
  Clone ID: MRT4577_176647C.1
aggcaggcagccatcacgatggcgctggcccacctncccttcggcctcctgttggtggcgtccgtcggcggtttcggcggcggcgaccacgggcttacgcacattcacctgtacgtgcacgagacgtacaccggggcgaacgccacgggcggcggcgtgctggagtccccggttggcgccaacttgtcggtcgggagcatgggcctggtggaccaccagatacccct

SEQ ID NO: 84031 - DNA, 234 bp, Zea mays
  Clone ID: MRT4577_176648C.1
aattaattattacagggggccatttttatgcatattggggtatttttactgaataaaagggcacaaaaaatcacatgttctttttttatgggaaaccgggcacacatcccgcaccaaggttcgggggccggcataccctatattgggggcaccctaatctccctcagcctcgattatccccccccgatgcaccagcttcattggttgcctcccgggcataacggacgctgccat

SEQ ID NO: 84032 - DNA, 354 bp, Zea mays
  Clone ID: MRT4577_176649C.1
cggcgcggcgcggacttgatcccgtggacaccagatgcctgcacagcaacttccatacccccagcgcgggggtgccggagcgagcaaaatagccggtgggcctgttggatgcgccgtcgtcaagatgaatgacgccgatgattccaagtaaatgcagcaaatggtgcggagtatccgtcaggaggccgacgagaaggccaacaaagtctccgtctgcgacgaggaggaattcaacaattgagaagttgcaacttgttgaagctgagaaaaagaagatcaggcaagcagttgaacgcaaagagaaacaggttgaagtgcgcaagaaaattggagccactatgcaggtgaatgctt

SEQ ID NO: 84033 - DNA, 2846 bp, Zea mays
  unsure (1)..(2846): unsure at all n locations
  Clone ID: MRT4577_17664C.1
aaccgaggaggggggggggggagcaacaagttcatcatacacctgtgaaatgcaatgacattggcttctacatatctgtcttgtgcaagcctgttagaaatgatggagttgatggttctttagtgtcgactgaagcgattggtcctattataccatggccaccggggtggaatctcttgaactagctggctcaatgattgaagggggccgtttgacctttcatgctgtgtatacaggaggtttgcggggaagttgcatccaagaatggttcagattacatgatgatgggcacaaggacaagttgactgctgatgaatgtctagaccttgatctagctgatatcgattgccggattgaacttatgtatacacctgtacgagaagacggagtgcacgggttaccaaggagtgttacttctgatacaatcttacctggggagcccaagggtgtcaatcttattctacctgagtgttttgaggacaatgaaatttctcccatcaaaacctatttcggtggcaaggaaggcactggcaaatatacatggtttcgaaataaagagaaacttgataacttggaatttgatctggttgctgaatcatcagaagttgttggagaaaccttaaaatataagccttcattgaatgatgttagttcctatctgattctttattgggttcctacacggcgtgatggaaaggttggtgatcctttgatggctatctctgatgatccggtcatggcagcttttccatctgtttcggatgttcacttagagcagaaaagttcagatgtatattgtggactaggcatctattatggtggatatgagggattaagcttgtatagatggtacagggaatctagtgatggaactaggcttcacatagatggtgctgattcagtcacatacgaagtgacagatgctgattacagctgccgtctactgtttggttatactcctgttcgttcagatgggataagtggagaagaaaaactctctgaaccatctgatgtaattttgccagaactactcaaaatcgagacactcaatttcaaggggaatcaggttgaaagagaaacactgactgctgctgaacaaattccgtacagtgagattcaacaacatatatggaaaaattataagaaagagatgaaatatcaatggtttatttccaatggatcaggaggcgatcagtcttttgaaccattggcaacccagtgttctcgctcatacaaagtgcgctttgaggatattggtcgttgcctgaaatgcgaatgctttgtcactgatgtatttggacgatctagtgaattggtatccgctgtgactgctcctattttgccaggaaggcctaaaattgaaaagctggagattgaaggaagaggtttccacactgacctatatgccgttcagggtacctatagcggaggcaaagaaggcaagagtaaaatacaatggctcagatcgatggttggaagccctgatcttatctccatacctggcgaaactggaagaacgtatgaagctaatgttgatgatgtagggtataggcttgttgcaatttatacacctgtaagagaggatggagttgagggacaacctgtttctgtttcaacagaacagattgcagttgagcctgaactttacagggaagtgaaacagaagctcgatgatggttcagtcaaatttgaggttctgtgtgacaaggaccgaacacccaaaaaggcacaagtaatgggcccatttggagcggagggttttggaagtcaaccgaaagaggataaaagtagtacagcctggatctaagacatcattcccgagtactgaagtacgaggaacctacgctccaccgttccatgtcgagctgtatcgcaatgaccagcaccgcttcaagattgttgtcgacggtgatactgaagttgacttaatggtgcaaacacggcacatgcgagaccgcatcatcctcacgatcagaggcctcgcccagaagttcaacagcacctccctcaacacacttctcaggatcgaggcatgatgggtaggatgcccacatgatagacctgacaagtgtaaaaaccaactattacgggaagctgttccccttgttccgattggttagagtgcgtggttttagtaggattcgtgacatgccagccttttgtgtgtatgggtgtgggacgggccgagcgtgttggattacagtttttttccctgacacatctctcaaatcagagcagcatcagctggttgctctgactggtgccgtcgtgcgtcatgaaatgtacatagggtcgttagagcgagaaagagagtggtgtttcttggtgctgtatttattatgcactggttgggttgggttttttcgactgccattctcatactaagtattggttctttcttttttcggtcgttgggtttgcatatacttgtaccgacaacacagcttcggggtgattgggttcagaatgcctggtccacatttgtgtatgctgttttacggtcgcaaatgtaaattcacctggccccaaaacgagaatcaaaatgacgaaggccctcccctttcaaaggcaaccggtttgctccaatactgtgttccaaagaaacctgttggaaagtttgtttctttcaaatgcccccctgtcaaagatgatgatattgttggtgaggcaagatccttcataggaaaggccagagttcccccaggtgcttctgttttcgttttcttgaaaaaattccgcccctgaagatattattctgtcccaaaaaaaacccccccctttgtgtgcttgtatggatgccaaaaaaacatgtttngaattaagtaatgcataagcctggattatgt

SEQ ID NO: 84034 - DNA, 1568 bp, Zea mays
  Clone ID: MRT4577_176650C.1
agctaacctgctggctgctgctgatcgtcggcgcgccgggctcatgatcggaaattcggaaccagatcccctcactttttatcccatctttggctccggcgagctatgcgagcatgcggcaccaccaagcctgcagccgcgctcaccaggtgggcgctctggtcctcgtctctgccaccttcctcctcacccgcctcttcgaccgcttcctcctcgacacatattcctccgcccccataaaccccggccggcccttctcttccgctgacctccgcatctacgtctacgctgaggacgagatccagggcctccgcgccctgctccggggacgcgacggcaccatcaacgccgccacatgcctcaagggccaatggggcacccaggtcaaggtccaccaatttcttctaaagtcaaggttcagaacatttaacaaggatcatgcaaatctcttctttgttccgagctatgtcaagtgtgttcgcatgacaggggcactaagtgacaaagaaatcaatcagacctatgtcaaggttctgagtcagatgccatatttccgtagatcaggtgggcgcgaccacatttttgtcttcccaagtggtgcaggcgctcatctgtttcgttcatgggcaatatttctgaatcgatctattatccttactccagagggtgaccggactgacaaacgtggtacgagtgcatttaatacatggaaagatattattatacctgggaacgtggatgattctatggtgaagtctgatgctcctgctgtccaaccaatcccgctaacaaaaaggaagtacttagccaacttccttggacgtgcccaggggaaagcaggacgccttcaactggtggagcttgcaaagcagtatcctgacaagctggaatctccagaactcaagttatctggccccaacaaattgggaaggatcgagtacttcaagcacctgagaaatgcttcgttctgcttggctctacgtggagagtcatcttggacacttcggttctacgagtccttcttttccagatgtgtgccggtgattttgtcagatgaagttgagcttcctttccagaatgtgatcgactacagtgaaatctccttgaatcaatatcagatgaaaggatcgaggaaatgattggtcatgggcgtgagatgagatgcttgtgggtgtatgcagctgatactgagccgtgctctgccatgagcggtatcctgacggagctgcagaagaaagtgcgccggttccatcaatcgccggaaacgttctggctgcacaacagaacaattgtgaatagagatctgattgagttccacagctggaggacgcctgttccgttgccatgaaccatgtattctgatttcaggaagaggcctgttccgttgccatgaaccatgtattctgatttcaactatagccggcatctgtttctgtaccatgttagacatttttctagtgaagctgtgtttgttgttgttcttgctaatcttgagaataaacacatacatcgtgttaaggattgacaatagtacgctaaaaactagctgctgtttttactttatcggg

SEQ ID NO: 84035 - DNA, 528 bp, Zea mays
  Clone ID: MRT4577_176651C.1
ccggccgggaatttcccaaacgcaaaaccgccatcctctcatgaggttccttcccattcgtcacgagatctcgacccgtcgccacggacgacaccgacaaggcggtggataccctccgtccacttcgccaagagacagagaccggctctgcacagcgatgacacaagcccgaccgccaggagttcatctacggtgagagcagcggacggcaatctggctacggcccaagggctacaaaggcttcatccgtaagctcatgatcatgcccatgaacaacataatctcgcccgtccgagataggcttacaggagtacagcggcgactagcatgggtagcagcgcaataccgtttggagctactaggtaatgaggatgctgcgctttcgaataatactgcgaatgaaatttttcgcccgtgtcagggacagagtaactcggtgcacttgagtagacctgctggataccggaatctgaatagacctttgaatccttggtggaccagccaatctcggtcaccaagcctccgatg

SEQ ID NO: 84036 - DNA, 266 bp, Zea mays
  Clone ID: MRT4577_176652C.1
ggcagagagaacatgtctttcagttgtcttattccatgccaacacaaacttgttatgtatcaaaagtccaaacctttgtgtaaataaaagacacatcttcttaggtgcaaaaaagatatttttataacaatatatattttttgtgttttgaaaacagtttataacataaagaaaactcttaataacagcgtaaacacatctttgaaataaatttgtcctcagaaaataacacaagtttatgttggcattacacgggaaaacaaaaa

SEQ ID NO: 84037 - DNA, 664 bp, Zea mays
  Clone ID: MRT4577_176653C.1
agcaattgatcgcaacgcgttgcttcccttcgctgatggtggatagccgccgaagcgcacgcgcaagggacgacggcgcaaggctccacgcagcgacgcaggaggattacttccttccgttcaacttcagccccgtcgacaagtgcacggcgctcaccgcctgcatcgacgacggcaggtgtcaccgcgtcagcaagggcgctccggagcagaagcagatcatgaccctgcgcaagtgccaagaggatgtcacgaacaaggtgcacgccaccatcgacaagcatgctgagcgaggcctcgccgtcgccagacaggtaggtgttcagatcgatcttgaacacgcatgcatgcatgacacttgtcacggtacattaattacaggaagtgccggagaagcgcagcaaggaggacgacggcaccggcggtccgtggcagttcgtcgccccgcccctgctgccccttctcgacccgccgcctacggaggacaacggcggaagcgcacaggcgaggcccgacgtggcgacttccagcaagaagaaggaagagagacaaaatagcgcctatagcggtgccgccaacatgacacggaaacggccatgccgccatcgggtccctgacagcatcaccgccgtgcagcacgagcgcctcgaggcactcggtgcaa

SEQ ID NO: 84038 - DNA, 619 bp, Zea mays
  Clone ID: MRT4577_176654C.1
attgggacctcgagccggcgggatcctcttccgatgttggcgaaagaaaggatatcttcttcaactcactaggtaacacacaccctagcatctctgtcactatgctctgcaataatgttcgtgcgcttgtccgctcaggagctgccggcgccagggccacgctcgacaccgccactgctgctgctgcgacgggagtccgctacccagtagctttggcggtagctgcgcgaacgtgaaattgctgcgactcccgtgtctcggacacctcactggcagcgtggcgctgccctcacgggggggatgaatggtccggcgattgctcaacactgcgaggtgtcccacggcggagacggatgccaccggcaagtgtctatagaaaatgagagcgagcctccgggctgcacaccgaatgcgcgacactgcctgcatcgccggaactgcacaaggcactacatccccgactgcatgtgccatggacaaagtggagctagagctcgtgaatctgggaacgatgcgggaggcagaatcattcggagcctcctcgcttcaatgccaagacatcttcgaggctatcctggagccaagaggacgtaatgaatcatgacgaatcactatgtca

SEQ ID NO: 84039 - DNA, 250 bp, Zea mays
  Clone ID: MRT4577_176655C.1
gggggctgctgcagacaatatcatcaccacgactgtggcgaacgcggcatccatctcaggacatgttctgtctggtaggacggcccttcagatcggggacagcctgaacatcgataaagcgacactgattatcgtccacacagatgggagcatcgtggagagtatcgggctgaaaggcgcggtagctcacctcatgcaaggtcctcagtctcatccaacccctctggatctcgaccaagaaataggtggc

SEQ ID NO: 84040 - DNA, 224 bp, Zea mays
  unsure (1)..(224): unsure at all n locations
  Clone ID: MRT4577_176656C.1
gcgcgccgccttngactgttgtgctgccngcctggcccccctttggctccgactncccttctcctccggctggctctggctggccctcccttgnntcacagcgtncttcttacgtggcncncngactnctggcccccttcgctctggccaccgggggtcttgccntgccttgtcggttgggcctggctgccccngccnnnncnnncnncnnnngnnnncnggtc

SEQ ID NO: 84041 - DNA, 501 bp, Zea mays
  Clone ID: MRT4577_176657C.1
aggggaaattttacgccgaaaagggggacttttatttagcccgttgccactcccttgagtttttactccacccataaaaataaacaccccacccctgccccttttttcccgaaaaccaaaaatagaaaagaaaacccccccaaacccttgtaaaatgggaagattcaatcgttaggggagcacaccaaccccatttagattcgggccgatcacacacacccacccacaaacgcaaataatttttgattactgaccagggattattagaaaaacccccccccccccaggtaattccttaaataggaccaaagcccagggggggcctatttgcccgcggcctttgataacgtaaaaccccatttgggaggggcggggggcctgccccttgaagggaaccccgtcaaaaacccgccgaaggctttgtttaaatgtcgggaacagaattttggccttgatcctaaaccccgccgggaaccaggaaaaaaaaaaaaattttgtttt

SEQ ID NO: 84042 - DNA, 597 bp, Zea mays
  unsure (1)..(597): unsure at all n locations
  Clone ID: MRT4577_176658C.1
cggncgcgtgggcggacgcgtgggcggacgcgtgggcaatggccaatgcactgccaggccagaaaaccggcgaggtcacggcgacgcagaatccgttcgagttccatgtgtacgggccgcgacacctgtcgtcccccagctggtgggatctcctccgttcgagctgggggtgtacctgctggagctggaccggcaggacaagcgcgacgagcgcaccgcccttgcgccgcagtggtggcgccacttcatgtacaggctctcccagacactcgtcgacgagcgcgacggctccatctacggcgccgtgctcgagtgggaccgccgggccttgctggctggctacgcgccgttccgccccgccggcgccccggccgccgtcgtggcgctccgcggcacgctgctgagcggggccacgttccggcgcgacgtcgtggacgacctccggttcctggcctgggacagcctcaaggctccgtgcggttcgccggcgcgctggccgcgctgcggtccgcggcgcgcaggcacggcacggggaacgtgtgcgtgggcgggcactcgctgggcgccgggttcgcgctccaggtgggcaaggcgctg

SEQ ID NO: 84043 - DNA, 752 bp, Zea mays
  unsure (1)..(752): unsure at all n locations
  Clone ID: MRT4577_176659C.1
caggccagaaaaccggcgaggtcacggcgacgcagaatccgttcgagttccatgtgtacgggccgcgacacctgtcgtcccccagctggtgggatctcctccgttcgagctggaaggatcccagctaccggcggatggtgatcgcgtgcttcatccagggggtgtacctgctggagctggaccggcaggacaagcgcgacgagcgcaccgcccttgcgccgcagtggtggcgccacttcatgtacaggctctcccagacactcgtcgacgagcgcgacggctccatctacggcgccgtgctcgagtgggaccgccgggccttgctggctggctacgcgccgttccgccccgccggcgccccggccgccgtcgtggcgctccgcggcacgctgctgagcggggccacgttccggcgcgacgtcgtggacgacctccggttcctggcctgggacagcctcaagggctccgtgcggttcgccggcgcgctggccgcgctgcggtccgcggcgcgcaggcacggcacggggaacgtgtgcgtgggcgggcactcgctgggcgccgggttcgcgctccaggtgggcaaggcgctggccaaggaaggcgtgttcgtggagtgccacgtgttcaacccgccgtcggtgtctctggccacgagcctcangggcttcgcggagacggccggcgagatgtggggctacgtgcgcgcgtggctgccctacgtgggctcggctgcngcggcggacgccggcggc

SEQ ID NO: 84044 - DNA, 461 bp, Zea mays
  Clone ID: MRT4577_17665C.1
aagactctatagtgagtcctatcatcccgcccacgctggcgagtgaccaagtggtgtcgagtcttggagccatgttctttttctgctccatgatggtcatctttatttgcgtgctcaaccagatcgtcaccgagaaggagctccacctccggcacagcatgcagatgatgggcctcaagacactcgtctactggttctcgtggtggctctcgaacgctgtcctggtcctgatcagcgcagtcgtcatttgcggctttggaatcgcgttcggctttagcgtgttcaagaacagcaactttttggctcttcttgtcacctttttcctctttggactgtccatggtgaccatggcgttctggatcaccaccatggtcaaggcaagcaggaccgccatcgtgatcggcatctttttgttcaccctcggaatgctccttgagagcatggtgttctcgaacagctac

SEQ ID NO: 84045 - DNA, 175 bp, Zea mays
  Clone ID: MRT4577_176660C.1
gtcgttggtgctgaaagggatagaacggaacgtgacggggtggtctgctgactctcttcggagcagtgtatgcttgggattgatggttaaaattgcctgcgaatatagaagagttcgagaggcacagcagacgaggcgattgtattgtaggcgcagggatatatcatatatctgg

SEQ ID NO: 84046 - DNA, 427 bp, Zea mays
  Clone ID: MRT4577_176661C.1
gacgcccaaagcccgggtttcccttaaaatttcttgactaggggagtttaaaacattgaaccgaccaaaccaaagggcaaaaacccgagccacccaaacaaacaaaacgaagggggggggggaaaaaaaagggcaaaaggaaaccgggagaaaaaaaccaaactttagaaagggaaaaaggggggccggacgacccaccaccaggggagagaaaaaaaaaacaaccccccccctggctggccagggggaaattacacttctccaaccaactgacggggaggggggaaaagagaaaggcacccggggggagggggctgggtaaaaaaaactctccagaggagaaaaaggtccccggcaaaaaaggcttccctggaaaaaaaaaaattaactccccagaaaaagaagagggggccgaaaagcccaaaaa

SEQ ID NO: 84047 - DNA, 799 bp, Zea mays
  Clone ID: MRT4577_176662C.1
tggccaagctgccggccggggccggactctccgcctctgcttgcgcacgtgtgagtgtcagtcaccgtcgtttggatcccgctcgttggagccgccgttttgcttcaaccgcaatcgtgcgtagtagctgtgcgtgctgtctgcaaacgtggagaccgtgcgggggccgaggaatccttcgcattagctgagctgccatcgccaggactcaccctgcattcaccctcgatgaatgagacacgtcctccatgaccctctactgtttctgttctcttttgcatctgactgtgtttgattttgtccacaggaagaaagaacgccaccgcgtcgtcctcctctgggcgacacgggcggctcctccatcgatcccactcaactccacccgccgcacaggtcttcacttcgccgtcgccggagcagctcgccgaaagtccggcgagcagcgaggaggacagcggcgggaccgttttttccctcatttccctccccttcccgtctcctgctcccttcttccatcccctccactcctccctcctggcctgtaagccgttgggaaggctggatcggtgtgctgggtggctagatccgctgtgctgggtggctagatccgctcttcgcccggcgtggctggcccgcggcggctgcgcccgcacactcgcgtcggcggcggtcggatctggtggcctctcggctggagcacggcgcaccagactggcttctgaaaaatatcccaaacagcgcaattaaatttttagtattataatccattaacttcggttttatttttgcgaaaaaaaaa

SEQ ID NO: 84048 - DNA, 3352 bp, Zea mays
  Clone ID: MRT4577_176663C.1
aaaaaaagacggccggaagatagcctgttaagaaaaattaagaaaaacgggaaaagcaaagaaaacccgggaaaaaggtcacgaaagggaaaaagggaaaagggttaaacggttcccgaaaagggatttggagaaaagatttacaactttttaagaaccctgtcgtcacgttatagagcttatgaaagtccacgtcgatcatggaaacacttttatcaagtgtaaactaacatgttatcttttgtgcagaccatgctaagcagtaagcacggaatcaaactccaggaggtcaagctgtgcaagaagtacctgcaacactgggttcctgtgtagcgccttcctgccgcgcggtcgccctgcagcaaccgagtgacctctgcgcgggggcgacggaggccttgagggggaccctgccgttcttcacccccgccgccgcggcgtccaaggcatggagcctcgtggcggaggaaggcgggaagctgcatgccatggagttgatggatcgacgcgctgatggcgcgagcgcaggttgccacgaagggcactacagtcgacagagctaagcccgagcgccgcgtgggggaggtgcgtgtgggtgcctcgggggctatatcaaatcaattccccaatttctagcgtcaccggtggcgccgcccggctccgccacagaaactccgcctggccggcctgcggagacggggcctgatgcctcgagcggccgggggaaggcccagcccataccgacttttcttctcccccctttcccccaccaccggttggttcctcttccggtctcccctgccggcgagccgacgaacccaccctcgtggcacctacggcaccgccgcgatgtcgttgccggcagcgaccgcgccgtcctcttcgggggcgacgcagccccagcccacggagcagcagggaggctcgagggagcggcgggtggagtcgctgggatggctgacggagtcggcggtgatgccgaagaagcacaaggccatcgagggggtcggcgccgcttcgatcctcgacctcaaggcccagctctaccgcacccaggaggaggcccgaaaccccaccgcccccggcgccgctgcttccggtggggagttccgccgcgcaaagatacgctccgcacccaccgaccctctcggggccaagaactccggcgttgaatcccgggcccacaaggataagctggagcttaaagccgtgaaagacggttctgcaagctatgctgctctagaaaagaaagcagagctgtatgaaaaattatccagaggcgagctacctgacgaagaagacaaagagaaatactgtgtggatttcttccaaaaaggtttcgatcgtatctatgagcctcagatgccagagtgtagccacagagccactgatgctgcagaaccggtaaatgatcatgaagattctatgcctaatgccaaaccattgggccttggccgagcaggcactacaatcgacagagatgagcacaagcgctttgtgagggaagttcacgaggaagtaactgaggcaaggcagaaggcctcaacagtaagatctcgacgacaagagcaggatgctgctcgtagagagaaactcaggcaagcttacctgaagaaacgattggagaagttgattgctgaaaaacaggcctcttcaaccaccattcttgctggactgcatatcatgctgcctccaaactattcctcttcgcttttaaattcgagaagcaaaaccgcgacctcgccggagaacaatggccaatgcactgccaggccagaaaaccggcgaggtcacggcgacgcagaatccgttcgagttccatgtgtacgggccgcgacacctgtcgtcccccagctggtgggatctcctccgttcgagctggtcagttactctcaccttattttctgcgaagcgcacgacaaaagctccgtgtcactggtcttaggcttggggtttctcaggaaggatcccagctaccggcggatggtgatcgcgtgcttcatccagggggtgtacctgctggagctggaccggcaggacaagcgcgacgagcgcaccgcccttgcgccgcagtggtggcgccacttcatgtacaggctctcccagacactcgtcgacgagcgcgacggctccatctacggcgccgtgctcgagtgggaccgccgggccttgctggctggctacgcgccgttccgccccgccggcgccccggccgccgtcgtggcgctccgcggcacgctgctgagcggggccacgttccggcgcgacgtcgtggacgacctccggttcctggcctgggacagcctcaagggctccgtgcggttcgccggcgcgctggccgcgctgcggtccgcggcgcgcaggcacggcacggggaacgtgtgcgtgggcgggcactcgctgggcgccgggttcgcgctccaggtgggcaaggcgctggccaaggaaggcgtgttcgtggagtgccacgtgttcaacccgccgtcggtgtctctggccacgagcctcaggggcttcgcggagacggccggcgagatgtggggctacgtgcgcgcgtggctgccctacgtgggctcggctgcggcggcggacgcgggcggcgaggccaaggaagtgtcgctggggcgcgccgggacggccaagtggttgccgcacctgtatatcaacaccaacgactacatctgctgctactacaccgacactgcggccgggacggcgaccgtgacggccagaggagggagcgggggcagtaaggttgctggaggggacggtggcatcggcaagccggggctggcgaggatgttgacggtgtccaaggggccgaccaagttccttgatgcgcacgggctgcagcagtggtgggctgacgatgtggagctgcaggtcgccctcaaccacagcaaactcatcgaccgccagctcaggtcgctctatgccgcgcagccggcctcgccgcaagtgaaccagtaggctgtgtagctctgtagcagctcacaaaacgctgagaaaaaaacgcaacgctagcatgatgctgttgatggattggactccgctgcgtgatggtccgctgagcgcacggatgatgagcgttccaaacatttcggatttgaaacagttgtgggcttgtggcaaatttaaaaaattcaaaaagtgaatttccttgcatgttctatcaggctaccagctgtagcctgtagtagtccatggtctcatgcaaccatggaacggttactgtaaatgtcttctgatccagtacagtcgaattcaggaaatagcgtttgcatgtacaggtggtgttgcagaatattgttgtacacaattctaggcaatggcatcatgattttctgagaca

SEQ ID NO: 84049 - DNA, 517 bp, Zea mays
  Clone ID: MRT4577_176664C.1
tttttttttttttttttcgagaccaaaacatatataaatagacagaagtagtacatgatatttatcttcaactatagagctttttttttggaacaaaggaaaagtgaagtaattttgaagcattggaattctataggtggcattttttggaacaaagaaaaattgaaggaattttgaatcattgaaatcctataggtggccctttgaaacaaaggactgagtttctataaattctataaaattctatggaatagacttgtcggcgttttggacccgggagaccctcaaccggaccgactagtgaattttgtgccgcgtgcccctgtccagatgggttgatgcaagatggaacacaagaggagggatgaagcttatattatcttgtaccggaggtgcttgcagtaggggttacaagcttcacgagagagggaacgggccccaggcctcctgaggagttagtgttgcggagtggagctcgatgtttgagtgagtccgcctccgttgttcttgctgtccg

SEQ ID NO: 84050 - DNA, 150 bp, Zea mays
  Clone ID: MRT4577_176665C.1
ttgatgtcgcgtagctcaaatgctgccgtgtagaacgggtcaaattacacgcacaggtcggtcgcaagcgaacctgtagtcatggtgtctacgcaaggcgactccaaggaaaagaaaggtgcgtacggttgcatggcatgctcccccagt

SEQ ID NO: 84051 - DNA, 373 bp, Zea mays
  Clone ID: MRT4577_176666C.1
cagcactaaacatgtccaagattaccgacatcaaggccaaaatcgccgagctatacaaagaaaactgcaccaaagccgaaatcgagcccaacaaggcccttctccgtttcctcagcgagcccgaaaccaagtccgaacgccttaacattgtcttcaggggcaataacaagctcaacttcagctgcagactaggcgatgaagacgtgatcctcttgtgttctgctttggagccctttgcggaccttatagcccatgtggacctttcctataaccacataactgatactggtatgaattccctatcaaaactgttcgggatgattcctaacctggagagcatcaatctacaggggaatcagatagaaattgacgg

SEQ ID NO: 84052 - DNA, 192 bp, Zea mays
  Clone ID: MRT4577_176667C.1
gccgaatgccgctacctgctggcccgccctcagccgcgggccggacggtgccgaagagcgaggtaccatgaggttggcgacatccttgttctgatcgtctacgatataccccggtaattgagtccagttcgtccgcaacgacgtcacgatcttgggcttttgccggtcaaagtgcgatgagaacttcaagat

SEQ ID NO: 84053 - DNA, 461 bp, Zea mays
  Clone ID: MRT4577_176668C.1
cttaaaaaaaaaaaaaaaaccaaaaaacaaaacaaaaaaaaaaaaaaaaaaaaaaaaaaaaaataaaaaaaaaaaactttttttccctttgccccacccccccaaggggccatttttctggattcccccaccacttggcgtccttttgggccttcgttcccccctggccccattcgtcctttttttcattgtttttccattcccttgcccttcctttttaaggcccctttttggcccacccttgtccccttccccttttttccccttttcccctttccccttttttctcgttggcccttggcgaaaaagcttctaccctcttccctttcctcaattttttccccctcttttgtttatgggagcccccttttccggggtctttttgccgtcggggtttcgtgctttttccccaaatttacccccctttttccccccccccttaccgccccgttttttttttt

SEQ ID NO: 84054 - DNA, 275 bp, Zea mays
  unsure (1)..(275): unsure at all n locations
  Clone ID: MRT4577_176669C.1
gtggcgccnggaggcccgttttttccttccgattaactctgattancgcctgtcgggggtaactttttccttcgtttcgcagtccatgctgtttgaagcaaggattttccngttccngtttngnncggggccctgtcggggggcgcatatcgaccttgcnntcnnggccacggatgggcggcgggcgggtccccccccaacgggggtgttccctctggtctggggtgggcgtcccggtngccgcccggatnacttggccgcgcgggccccgccgc

SEQ ID NO: 84055 - DNA, 105 bp, Zea mays
  Clone ID: MRT4577_17666C.1
ctgccgacttcagggtccatgttatcgttccgtatcagtagaaagacggtaaataatcatatcaggctatggcctatgggcacgatttgcctgatgaaattctgc

SEQ ID NO: 84056 - DNA, 350 bp, Zea mays
  unsure (1)..(350): unsure at all n locations
  Clone ID: MRT4577_176670C.1
agaacgaggccttagcgttttttttttctaagtaccatcttatcatttgaagggttcattcaggccattcggtaacactggcactgacacgcacagggaggcgggacacatgatggcgaaaatatccacgttttatgactcaactagctgggggggggggggggatactacatctcatagggtcttcagtgggggacaggggggggaaaatccccccggcatggtaaccnntttttgggtccggtacttggtgtttattggtgcgcttttgtgtctggcgtgggccccntaacctgggcggtttgcgtntggtggtgggggggggtntgtggggcctgggttttttttgg

SEQ ID NO: 84057 - DNA, 418 bp, Zea mays
  Clone ID: MRT4577_176671C.1
tcgagtttttttttttttttttttttttttttttttttttttttttttttttttttttttttttttttttttttcttcacccccaccaaaagggggtgtgggcaatcaacagggagggtaattacaaaaaagccctccggggacactttgcccatggaaaagaaaatgccccgggcctgacagttttttttttcctttctttttccggactacaaaagcgggggatattttgcccgaccttctccttgggcaaagggcagggccggaaaaaaggcccgcttggcaagaacctgggggaaacttaactttacaccggcgcgggggggttttccccgaaccattccctaaaagattttttgtccgggagcctaggggccccatagaaaaacatctctgcaaatgggaaacagggcaaccc

SEQ ID NO: 84058 - DNA, 331 bp, Zea mays
  Clone ID: MRT4577_176672C.1
cccacgcgtccgggcacctggcagcatttaaggttcagatgaaagcttaggctttatacattgtactccatttgttccaaattataagatgtttttacttttctagatacattttttgctatgcatctagctatacattatgtttacatacaaagtaaaagacatgtatctaagaatgccaaaacatcttataatttggaacggagtgattactaaagtgttgttaatttcatccagagtagcttgtgcctattgttgactgctaaatgcctcagatgcatgcataatttatttgtgtcagttatttgggttgattagttggatagcccct

SEQ ID NO: 84059 - DNA, 107 bp, Zea mays
  Clone ID: MRT4577_176673C.1
cacacagcagccattttgatctccccgcgagcgctctcaatcactatcgactggcgacgaatccgacaacgccgccgctctacgcgagacgcccaggtcttcgccaa

SEQ ID NO: 84060 - DNA, 232 bp, Zea mays
  Clone ID: MRT4577_176674C.1
ccggaccggagccgaggggactttaattaacccatcgccccatgggcccggtacatacaggaggggttgtcctagtacaaaaattacccacccccggttccccggggtctgctgggctgttgcatgcatgcccacaaaaccgggggggttggaccccggcctggaaagcatatgcaatttggttggtagccctttaaaaacaaaccgcccccgcggggcggtttgacaatgc

SEQ ID NO: 84061 - DNA, 633 bp, Zea mays
  Clone ID: MRT4577_176675C.1
gccggccgggttctcgaacattcactctatttacaaaggatcaagcccacccataaatctatagcgacggcacctctctcatctcctacatgacgaacggatccaaagtatgactcaaggatgaacggcatctgccttgcattccctctcgtgtacgtccgcctctcctgcatatgctgccagatcgtcaactacttgaacattatgatgaaagcagatgaaaataatattctgaaagcttcactggtgggaggctgttaaattcttctgccgaaatctggaagctctaataccgcaactaataaatcaattgcatcaagtgcaacactcagaaaaggtatcgtattacataggtccaccatctactattatcctttccttagataacatggaacacttctatctgcaggcacatccaacgactcaaaatttcacaatacgcgaaaggtgcatagttctgagacaatgtcgacaacaacgacttacaaaacctgaatcctgatagaaattctccacaagatgattttgcaccctactcaaatgataatgatgattgcaatcctgctagacaggtatcatgtgaaacaaatataaatgtgcagaatttcctagtttcagaagatagcacaaata

SEQ ID NO: 84062 - DNA, 315 bp, Zea mays
  Clone ID: MRT4577_176676C.1
accgccgccgtttcccacaccagcacctcctttcgccctcctccgctgacccccgccttctccgaaggtccgtgtaacgaccgcgcgtagatggtgacgcagtacacggcgcccgctagcgaggcgacccgctatcccctgataacgagagctcggccattgcaatccagatgaacacttctctccaccgtcctcggagtcccagcagcagtggcagctcacggtcacagagttcgtgaacaaccccaagatcgagcccactgacctacatcaacatctacacgatggactcccccgtggtcctcctcgacagcg

SEQ ID NO: 84063 - DNA, 309 bp, Zea mays
  Clone ID: MRT4577_176677C.1
aattattataataaggggggtgttttatttgagaaaggtttggttaattcacaacacaaaagcaaatccactcaaaaccaccaaaaggggcccaaaaaaatccccacccacacgcaagaaaacaaattaagccaaaacacaaaagcaaccgcacagctaacacacttggtacctaccatacctacacccgaccataacacaccttgacaaaagggcccattacattatttaccgtaccaaccgggatccaacaattaacaccaaccggtcccgacataaccagttgttccaacgggaaaacttaaaaac

SEQ ID NO: 84064 - DNA, 274 bp, Zea mays
  Clone ID: MRT4577_176678C.1
tatcccaccatcacatcgggcattcatgtcagtagcgcagggtccacaaatcctatgcattcttattacattctatgttggaaacctttgtattaatcactatttatatactaaaaacccgacaagtgtctaccaatacaactgcatgtttaatcatgatttggaatattgggttccccttatttattaagcattttgaatggtactactaaactaccatgcctcccacaatgttccatcctgcattctatattttcaggaaaccctacctcaa

SEQ ID NO: 84065 - DNA, 240 bp, Zea mays
  Clone ID: MRT4577_176679C.1
ggccccccaaattttttgttttttaataacaagcatttacccatttttttaaagcatgggataagggtgtaacgtttttaaccgaataaccgactttttttgggcttactgaaacgttttttttttagggaaacgttaagccgttggcagattaaaaaaacaggaaccccccaaaccattttaaagtttggttaatgaaaccgctttagattttaaaaaaacaggtttagataacgaaac

SEQ ID NO: 84066 - DNA, 509 bp, Zea mays
  Clone ID: MRT4577_17667C.1
tcccttcctacgactcggcccacgtaactcctcgatgacacctatgcatgcgccctatttccagccatgactatcgacctacggtgccccgtgggacagatgaagaagaacacccgctcagcgccgaagacccacgatagctaactacctcctgcttgtcaagatctaccgcctcttggtcaggatcaccatcatcaacttcaatgatgtcattttcttcagcgtcttgatgaggatcacctctcggccacctatctccatgtcccagcttgtgaacgtcatgcaatactacgagaagaacatatgctgtgattgatgtcacagaacacctaggacaagaggatcgcatcagtgtcctccaacgagaggtactgccctgaggctcacccagacagccatactcaggattgcccatgctgcttggccagcgactcacatttgatcagcttgctctacgggatcctgttggtcagaactcactcctcttgaggcctccctagaatgcacgt

SEQ ID NO: 84067 - DNA, 249 bp, Zea mays
  Clone ID: MRT4577_176680C.1
tttttgggggtaattttaaagagagagacggctttaacgacattgcccaaacagataagtgggcacttgaagcgacaacatgcaggttccactgcgacaggccatagcccataccgaacaggctgtgacgacagtacacagggaaccagcactactgactgctgctcattttcaacacagatgcacgtcataagtggacatgaggcgacacctcccaccgcaagtgctgtagggtgaggatactggtct

SEQ ID NO: 84068 - DNA, 433 bp, Zea mays
  Clone ID: MRT4577_176681C.1
gccggccgggtccggtttcgatgcctgctgaatttgtaggaaggaactatggcgagctctttaaaaccttacttttggctcatgaagtcttggccatcggcttattccgtgcgcccgataatgaattgggtaatgaactaccctttgtgtatgcaaatcctgtctcttctttaatcctaaaggcatccgatcaagtctatgtcttttctcctcctggttggttataataaaactctttttttttattgagtatgttcaagttcacccaagatggcaatggcagcgcctagacaccatcctgtttcgacattatcaatctttttagctacggttaataatcgatcatgagggatctcataaccataagataataaacgataaataaaggatagatccaaacaccattcaaaaaaaaaaaaaaaaaaggccccta

SEQ ID NO: 84069 - DNA, 101 bp, Zea mays
  Clone ID: MRT4577_176682C.1
ataaggtcaaacgatatgagcggcttgtaaatgttaattctagaattaacatttacaagctgctcatatcgtttgaccttattaaccgtaactttcagggg

SEQ ID NO: 84070 - DNA, 1060 bp, Zea mays
  Clone ID: MRT4577_176684C.1
ccggccgggaaaaaaaaaaaaaaaaaaaaaaaaagggagccgaaggaaaagctcggccggtcgggcgggcgggcctcgggggagccggtggaattcgacgacgaaactccgtcacgtcattcctctgcgcctcccgtctggccgtcttccagacgtctccaatcggagctcccagcgtctcggagaagaggagcagcacggcacggcagctgtggcgaggaaggctcttgtcctgtcccatcccaacccagcagccgtccaaggaggaggagatccaatcggcgtgcaggcgtccaccgtccatccatcgatccaattccaatctgcaggcctctgcgtcgcggcttgttcgtggaggagaggttgctgtggaacccgccgccagttagccatgtcgtcctccgtgctgagggctgcggccgacagggctattcgcaggcaggccctcacgctgacggacgccgcggcgtccaggatccggcagctcctcagcctcaggcagcggccattcctgcggctcggcgtcaaagcgcgtggttgcaacggcctctcgtacacgctcaactatgccgacgaaaaggggaagtttgatgagcttgtcgaggagaagggagtgaaagtgctgatcgaccccaaggctctgatgcatgtcataggcaccaagatggactacgttgacgacccgttaaagtccgagttcgtgttcgtaaacccgaactccaagggggagtgtggctgcggcgaatctttcatgaccacgggcagcaaagggtcgccatcgtgaggcggcgtcgtcgtctgtctgttggtgtaaagcaaacgcgtccgccgcaggatccagagctatacaggttctttaaggtttatcctgtaggcatctgtggctccgccggagtccttatagttgtataaacacagggcagctgactcgcatgtacttgtaaattcacttgaaatgttgacatggtcaggttttccccccatgtttatgcgtatctggtaatctcacggttcaagggctcgaatttgtgtgcaaaaaaaaaaaaaaaaaaggccccta

SEQ ID NO: 84071 - DNA, 372 bp, Zea mays
  unsure (1)..(372): unsure at all n locations
  Clone ID: MRT4577_176685C.1
gcatcctgcactgcagagccaagcgaangaaaangtgagactcatctctttcagctaagctcgcaatggagctccccatgggtgccctgctgctggcgctgctcaccgtctccgcctcctccgccgtcgccacgctcgccgtcaccgctccccctccggcccctgcccgtgctcctgcccccgtcaccgcccctgccccggcccatgcatctcctcaagctcaggacgctgaaggtctgctgatgaacggcaacttcgagacggcgccgaggaaggtgaacaagaccctcatcgtgggccgccactcgctgccggggtggacgctgcggggccacgtcgagtacgtacttggcggtccccaacccgggggca

SEQ ID NO: 84072 - DNA, 414 bp, Zea mays
  Clone ID: MRT4577_176686C.1
ggcgcccacgcgtccgaaaaaaaaaaaaaaaaaaatctacacataaacaaacgagtaacgaacagggaccggggatgggacatggacaaggccacggatctaatggcactgggcggggttagccgacacagcgcgcgccggcggcggaataggcaactactggggccagaacggcaaaaaggggacgctggcgcaaacctgcgccacgggcaactacagggtcgttaacagtggcgcttcctcccgacgttcggaaggggccagacaccggagctgaaactggaggggcactgtgacacccctagaagagcgggtgcacgggcgagggcgcgcacgaagacgtaccaacgcatgagcgccaaggggctccgttctatatacgggggggcgtggggagataccgcctctcgtaat

SEQ ID NO: 84073 - DNA, 528 bp, Zea mays
  Clone ID: MRT4577_176687C.1
ttttttttttttttttttttttttttttttttttttttttttttttttttttttttttttttttttttttttttttttttttttttttttttttacaacaagggaaacccggggggggggggaaccaaacacgaacccaaggaatccgggacagaccggggcccaccaagagggcaggttatggcccccggacaaaacccgaaaaggggccaaggggggagaaaacccgctcaaaccgggggaatggaaaaaaaccgctcagggaaacaccctttaggggggggccaaaaaaacgggggggttttatttcacggaaccagggaaaaaaaaggacccaatttttttaaaaaaaaaaaaacccggcatgggggcggggttgtcccgaggaaagaacctggctttaatgggaaaaaatttccgccaaggggcccaccttttgggttttgaaaataaagggccccaaaagggctaaaaaaaaaggcccctggaggggggccagctaccggggtatcactttggttccccggt

SEQ ID NO: 84074 - DNA, 757 bp, Zea mays
  Clone ID: MRT4577_176688C.1
ccggccgggccgggacttctaactgcaactgctgctcctctttgtctcccccgttccgttctccactgaactcctcgccctcgtcgacccgtgacccgtgagcctcttccactgccgccgtcgacgagagctgcgttagccgctagggacaggtgatttcggctgcttccctcatggcgaccgcgctcaagtcgttcttgaacagccccgttggccccaagaccacccacttctggggccctgttgccaactggggcttcgtcgtcgcgggcttggttgacatgaacaagcctcctgaaatgatatctggcaacatgacagcagccatgtgcgtgtattctggactgttcatgaggtttgcatggatggtacagccccggaattatttgcttctagcatgccatgcttccaacgagagtgttcagctctatcagctgtctcgctgggctagggctcaggggtacctggagaagaaagagccagagacacaacagtaaagagggtatgcaacactgcagtgacttgttcctttagtgaccatgcagtatgccgaggagatttcatatacctagcgccgttacaagcttctgcttgcttacttttctgtgcatttggtttttacaatgcgttatgcaatgagtttcccccaaacacgcaatgagtttgggcactattttcgttttacctggctcatgtgcccatagtgctttgtaaaaaaccatcgttgcaaaaaaaaaaaaaaaaggcccctagggcc

SEQ ID NO: 84075 - DNA, 437 bp, Zea mays
  Clone ID: MRT4577_176689C.1
ctgaactcctcgccctcgtcgacccgtgacccgtgagcctcttccactgccgccgtcgacgagagctgcgttagccgctagggacaggtgatttcggctgcttccctcatggcgaccgcgctcaagtcgttcttgaacagccccgttggccccaagaccacccacttctggggccctgttaccaactggggcttcgacatcgcgggcttggttgacatgaacaagcctcctgaaatgatatctggcaacatgacagcaggtaggaggattaccagggatcgtcgtctcacagtgcatgtttgatgggtcaaatcaaactgccgttgatgcttatatgtttttatattatacgcagccatgtgcgtgtattctggactgaacatgagagttgcatggatggtacagtcccggaattatccgcttctagcatgccatgc

SEQ ID NO: 84076 - DNA, 269 bp, Zea mays
  Clone ID: MRT4577_17668C.1
ttgtcctttcttataataattgaactcaatgacgcaactattcccctagggggccttttagaaatcaacgtcagtcacaaacaaacccctacttgcaaaagcaatacacagcgctttacctatgcttgaggcttccgcggcgacaagcgcctacatgcccagcttgagcttcatctcgaaagatcaggggtgggtggagccctctaagagctaaatgtggaatcgcagtggtgaaagcaccaagtgccagatgtgaaactagacaaggc

SEQ ID NO: 84077 - DNA, 291 bp, Zea mays
  Clone ID: MRT4577_176690C.1
gtcctgtatttcgggaaaaggatcggctctgagggatgggctcgggggtccagaccccgaacccgacgggtgctggtggaaggctcgagctgctcgcgcggagagagcgggccagcgtgtgccggccgggggacggaccgggaacgggcccctcggaggccttgcacgggcgttgaacaaccgactcataactggtacggacaaggggaatccgactgcctaattcaaacaaaggattgcgagggccctcgaggatgctgacgcaatgtgatctctgccgagtgctctgaa

SEQ ID NO: 84078 - DNA, 409 bp, Zea mays
  Clone ID: MRT4577_176691C.1
tccaaggctgcagaggttttagggagagccatgtcaaggtttcagacataagtgaaatggttcttctcaagtatctgtgtctccgaagcacggacataaaatatcttccccggaatatacacaagctcaagtacttggagactatagatataagggagacagaggttcaacggttgcctgcaactgtaggaaagcttcaacgaataaagaacatactcggtggagataaaagagcaaggaaaaccctaaaacttcctagagaattcaagggaacaacgagaaccttacgcatattgtcaggggttgagatcgcggagggatcaacaacagcggcatcagatcttaagtactttacggggctgaggaagttggcaatttacaagatccaccaaaatgaagatatattcag

SEQ ID NO: 84079 - DNA, 554 bp, Zea mays
  Clone ID: MRT4577_176692C.1
ggtacacgggcccccccctcgagtttttttttttttttttttttgattacctttttatttttattttttttttttttttgttttttttttttcacagcaaaaaggggggcccggcccatttgggcatgccccccagacgggggtgtttcataaataaactaagcctaaggaaccccacggatgctaaaaaagaaataaaactccaggaccactcaaaaattggggttttacatgcgtggggggcgctttttaagaaacgatgacaaccattcgagaccttggaagctttcggaggtaacaaggcggcaagctcagcaaaaaccaagagcgatctttggagggccgacttcagaaaatttccaccccgggtacctttgggaccttggtccccaaactttgggggaccccgactgccttcgggggggtcatggaacacacttcaaaacaaaaattgggggaccctgctaccgggtctacaccacgagggcccaaggggaatccctttagaacataccaccttcaccgttctagggaaacgaggacatcgggggggc

SEQ ID NO: 84080 - DNA, 369 bp, Zea mays
  Clone ID: MRT4577_176693C.1
ccggggaaggaagaaggtggaggaagagctaaaagaagctttggcgagcttggagagtcagaaagaagaaaccattaaagctttggattctcagattgctgctcttagtgaagacattgtcaagaaggttcttccttcttaaattatatttttgttaactgtgtaattctctgtctctctatctcaaaacttatttacaagaaattactgtaaatctcttcttcttcttcttctctgtttcttggattgttcgtcgttcaaagaagaacaatttttattttgtaagtttataaataattagctctcttctgtcaaaaaaaaaaaaaaaaaaaggcgccgttaaggatccaagctacgagcgtgcagcga

SEQ ID NO: 84081 - DNA, 261 bp, Zea mays
  Clone ID: MRT4577_176694C.1
caaaggtctgggtgatacttaaatacatttacaacgggggaaaatttttattctttaactaattcataaaaacaacttgcctgccggattaaaaatataacccgggtgggcttaattaagggggaaagcctcgtttaattaaggggggccacttgccccttttttatgagtgaaacctctcttgcctgctgatttaaaaaatgggccaaccccccgggagaggggttttgtttatcgggcgggaggggggttttttttttc

SEQ ID NO: 84082 - DNA, 224 bp, Zea mays
  Clone ID: MRT4577_176695C.1
aaaaaaaaaacaataaaaaaaaaaaaaaaatcttaaacaacaaaaaaaaaaaaaaaagaacgagaaattacaaattatcaggttcctatcttacgcactccttcatctctacttcttacttattatatataatcacctacctacacttcactgtactcaactttactacaccctaaattgtaaaaacccttgagttacataccttattctccttatattatatc

SEQ ID NO: 84083 - DNA, 228 bp, Zea mays
  unsure (1)..(228): unsure at all n locations
  Clone ID: MRT4577_176696C.1
aaatgattcatcagtgcgtcgtcagcttttttctttcaccggaggcaagacgtcgtgggcgggggtgtttttgctgagcgtcaagtaagccaaaaagatgattctggcggacaagccnatcgccgacatcgtggtgctgctccaccaccactcattcggtgacctcctactttgggttcgactcggtccgtttttttctttggtaccattatttttacgctccatgat

SEQ ID NO: 84084 - DNA, 512 bp, Zea mays
  Clone ID: MRT4577_176697C.1
aggaataggaaaagataaattggtagtgcaagcaaagccacgagcattccacatttctactggcaaaaaaaaaaaaaatcctcgaacctgatgcatgtcaattgccacgtagagccacctcgtaagcagatgaaaaggcacaggaatcgcaccagcgttccgtgtcagtgcgagggcaagaacacgcctccgggaaattctgaaaacaatgtatttaattctacatttttgtttactttgctaaactctgtacctatacgacatctaaccacttcttttgctcagttatccacttgcccaatatctacagaactgagcacaccctatcatctgcaccagcaagcagcccaggagcagtcaacaccccatcatcatgcatctggaagactgcaacgacgtgtctaccgtctgtctgctgccgaggtgtctaccctcttgggtcaggggggaaaagactgaaagaatggaaggatctatgaattgtcaatgtcatcagaaaaaggataactctg

SEQ ID NO: 84085 - DNA, 601 bp, Zea mays
  Clone ID: MRT4577_176698C.1
ggggatataacggggatccgaatcgttttactcagctgaaaatctttaaccacacgaaatatgtagcacttaacccttgcatatgggaggcgtggccatatttcccccacaacatgaactggtccacgctacccaaaagcacagtactcctccatccagtctttagctgggaggggacacccttctcccaccatttcccacgcccagggggcggttgtcttttcacctttggaaaagacgggttcaagcttaccctggcccatttttagggcatgtggcccgttaaaaaagtccttgataataaaggccttcatacccctccaatccttaaataacccgggggggtcatttcctgttcctaccccaaggcccgatttaaagaccttccacccttagaaattttttggggccccctgggggggaaggggcctttttaggaaactttgcgggggtgaatccccaccattgttcccccacgaaaaatattatttggagggccaaaccccttcttttcttttagaaaaccccctggaccttgggttcttccgcgaaagaaacaccttttttcccccaggacttaaaaaggggcaaaccatttttt

SEQ ID NO: 84086 - DNA, 221 bp, Zea mays
  Clone ID: MRT4577_176699C.1
acggggtggtccagcgcgaattttacgttccggaacacatttgatttaatgacaggcgaaacatttgccatgtattgattgaagggaaaaagaaactcatccttccagctattagaaaaaagtggtctgaaatgggggtcgacattgattatcggcgtcacaagaggctgatcaaaaaccataggtggtttgctagccatattaacttaaagcgtagccta

SEQ ID NO: 84087 - DNA, 302 bp, Zea mays
  Clone ID: MRT4577_17669C.1
gagaaaattgggtttgggtgaaataggcgtcgaggcaatccattttacccttcattcctttcatgcctcttcttatatcttaaaaaggaacaactagttccctcaactttttgattatattataaattatttttgccctcttagggtatactaataacttacccctgggctgttctcacccccggaattaaaatccccctcgggggggaaaaaactcgtgcccaatttatttcaacaccccaccggttcgtatcacccccttttaaaggaaatagaacacaatcaattgggcttaggaaagc

SEQ ID NO: 84088 - DNA, 320 bp, Zea mays
  Clone ID: MRT4577_1766C.1
gtggtcttattcggaggggtattttctctctgggtgttctgtattctatgaatctatgtataggtgctggagacatgaaagacaaaatgccaacgaaaaaataatgagcggatggctacgactgcatgttgttagtgttctgctgtggagccctgcatgcgtcctccagcgaattcgcaagcgacgccgagaacgcggccatggactggaacacggcaggcagcttctcctgcacgccggtgatcgtggccgtcctcgtggcgtcgatggccttggcatgcctccgcatctcgtcctccaccatcttccggcaagccgcg

SEQ ID NO: 84089 - DNA, 447 bp, Zea mays
  Clone ID: MRT4577_176700C.1
ctactcacgaacggtcgacttatggtaggtgaaatccgatttttgcaaccctacaggatgcagcaggcagtagcatctggcatcttagcttaatcacccttgttgcttcaacaattatcggacatattacagcagctacctttggagcatgtattgacacaaaacatcaaggctcaacaactacaacaacttgcgctagcaaaccttgatgtctactactcattgacagtagatcattccattcaaccaactaactgcattgaactgtggtttttattggcaccaacaacaactaccattcagccacgctacctggtgcctaccaaacaccagttgcttacattcaaccaaatgacagtattgaactctcctgctgatttacagtaaactctgctactaacattcagccacctatactgttgagagccctggtagcttcctgataca

SEQ ID NO: 84090 - DNA, 536 bp, Zea mays
  Clone ID: MRT4577_176701C.1
aaacagggaaactctcaaaaatgacatacagactaacaggcgtggagggtcttagttacagcaaacgagatggaaaaaaaaaaggaattcagatcacacacatctgagagcataaaataataataagaaaagctggctggttagccaccaaaattgatttatttgatctgtgtccatttcatgtagatgaactgtgcaacagtgtaacacagctccaattgagggtttatagcaatttcaacaacaaaatggtacatcttaaatgctgcatctacacatgcagcagacaaaaacacccaacccaactagcagaacgccagaactaatcagacaccgctttagtatctcccaattcatttctgctttccaacgctgagacccgctgatttagggattcatagtgcttttcagaagtttccttgatgtcctccacctggcgggcgatggcggcgcgcgcgaggaggtggtccttgtagatgaagaagaaccccgccgccgacgccgtcgccgtgccgaccaggaacgacgacagcccg

SEQ ID NO: 84091 - DNA, 208 bp, Zea mays
  Clone ID: MRT4577_176702C.1
cgggtccacaacaacgtccaaacacgcgtccgggagacactgccatgaggactctactaccggtggccgccggccgcgagaccgtcgcctgcgcggatacacgcgtctcccagaggtcactgcgcctctcaggcgcagccgcaagtacggcgctgcagccggatcgagttgctggaggtagagccgtttaggctgagcaagaacgagg

SEQ ID NO: 84092 - DNA, 827 bp, Zea mays
  Clone ID: MRT4577_176703C.1
ggccggccggggcatcaaaacatgtcgaccggtggtgtggtctacaaagacctgctacctattcccgatacggatcctactgagcatgaaggcaaatcggccacgctacgagatgcacctacggacagccatgcattagctctggacggcgccagggttccccctacagaggagaagggtgcagctcaggtcgagcatcaaaaagaggtggtggatttgggatggaatgagccaaaagaacatgtcgccaagcctctcgtgggggggctcgacaatgagcatgtatggatgcttgttcggcgttttaacaagcaaatatatcaagttaaagagataccgacagcacctcccggaggattagacctcaatgttgccgacgaagaagagtttactccggacaagtttcgcgccaatcttgagcgcctctatatgactattatcattggtataatcggatttgccaatcacattgctcgcattcgatcatggagagaatcacgccgcactgcgtggttttgttccgcttactttgctgcttggaccttcgacatgatcgtgcctttactctcagtcactctgttgacactgatcgttcacccacctgctcgcgaagtaatgtttcctccggcccctatcgctctcgtaagctccagcggaggcgtccagaagcccaaatcaggtactcttggcagcattgacagcgtcactggagcgcctgaaaacacagggtgaagctgtggaacaagaggccacgaattttgtttacggatttgctacgattgcactgtcaagtgcgactggaaaacaacctgaggtcgaacctaaag

SEQ ID NO: 84093 - DNA, 421 bp, Zea mays
  Clone ID: MRT4577_176704C.1
aaaattcctttttttatacgtacacgacagtaatttacaggcacaagcaagcctttttccgagacttttaacaaagggggagtaaaaaaaaacgcaaattcttttaccaacgatggatcaccaaccaggggtggggtttagttgaggccgaagtagttggtcatggagaggaggttgcaaaaaccgggcgcctgcatgtgatcgatgggattgaagtgcttttggaaattccaaaagccggggccgttgttaccgaagccgggcagggacacattgggaccggatgggccattcaactggacgggcccctgggttatgcttataacctgatgcttatcgggggggggggagcccgtgctgggcgggggcacgcccgaagggccgagaaaaccaggggctgttggtgcttttaaagggaggg

SEQ ID NO: 84094 - DNA, 245 bp, Zea mays
  Clone ID: MRT4577_176705C.1
tagaaacgcgggacggcaggcccagaaccggggcgactttagggatgagggcccgatgcaccgataaagctagcgcagatgcatgccagaaaccaccacacgtgtacctgaagaccatgacgcgcgcggaatgtagcaggcaagaaccgcgatgaacctatctttctatctctatcgctctagttgatgctcgactccagcgcacctattacgtgctgaggagcttcttttgggatggcaccaat

SEQ ID NO: 84095 - DNA, 553 bp, Zea mays
  Clone ID: MRT4577_176706C.1
gaggaactcggaccttaagataattgaccgcagagttcgccgcgacttccacgacgacgtagcagccatagcaggggtgactgacgcctaccttggacacgactccagcacacactaaggcgcaaattggtgcccaccaggcacaggtggaagaatgggggttgaccttaacacaccgaaaactgacaaggtatccgaagatgggtggagcggaggctactgactgaaggtggttttctttccttgtgacgaatgtgttatataagtacttgaaccagccaagatcattcatccccccgcccccctaaaatggtgtaaagaagtaggagaggcgccgaagttcctcaccaacgtatgtgaaagccctcaatgggggaaaggtgtggactcaaaaggataagctcgctgaaacttgcgatgatgctctgcggaaagctcgaaacctttccacctgaaaaagcaaggaaaaagacgttccagagcaagaattaaccccctagtgacaatatatatgggctgaaataacaatacaggcacaaggggggaggaaact

SEQ ID NO: 84096 - DNA, 459 bp, Zea mays
  Clone ID: MRT4577_176707C.1
tcggaattttcgggtcgacccacgcgttcgcccacgcattcgtggacgcgtggggagtagtctagctctattatctgtgtattgtttgctctccacaagaaacaagggatatcaccaacaatggccgtcgccttcttgtcctcggtccatctgctgctcctggccgtcgccttggttggcatgagcgccaacgccgccacctttaccattaccaacaactgcgggttcaccgtgtggcccgcggccaccccggtgggcgggggcacgcagttgaactcgggctggacgtggaccgttaacgtgccggctggttccagcttcggtcgcgtgtggggtcgtaccggctgcttcttcaacggcaacagtgggagctgtcatacaggcgactgcggttgtgcgctggtctgcaccctgttggggcagtcgtccctgacgcttgccgagatcaccatcggtggt

SEQ ID NO: 84097 - DNA, 101 bp, Zea mays
  Clone ID: MRT4577_176708C.1
ggtggcttcgccgactccgactgcatccactggctgtcttagccatcggcaccatgggcggaaggtcctctagatgctttaggcagatgacgaacccgtcg

SEQ ID NO: 84098 - DNA, 200 bp, Zea mays
  Clone ID: MRT4577_176709C.1
tcgggatattggtcgtctccgaactctcgctccgaaggctgcaggattacgagctgtccctatagcgtgtgacataaatgcttctggtgaatatggggatcgctgattactgcatgtaaaagctcgccattcacaatgatggacaaactgctaaaactacatatgaaaagaggcatctgacgtggccaattttgtaagaa

SEQ ID NO: 84099 - DNA, 477 bp, Zea mays
  Clone ID: MRT4577_17670C.1
cgggccccccctcgagtttttttttttttttttttctgcaaatacatgttcatacaaactttgatataattaacacatgaaagtttaggtacttcggatattttaggtacaagattgtggtacccgaattatacatccaatttttttttacaagataccatccgaaattctagaacaaaattcaagttgaggtattccagattcgggtatttcgggttttgtttttttggcaggcattgttggtgcccttttatcccagcagcagaatggtggagcatgttttgtattaacagaaaccgagtggcggcatcgactaattctttacctgccagattaaatggaaaatagctcagcccacagaaacaatcatatcgatcggcagatgctgaagaactgcggagtgaagaccagaacaagaacatggagaaaccgaccagaggggttgaaactgatcagattaaagctttagatgaatcg

SEQ ID NO: 84100 - DNA, 297 bp, Zea mays
  unsure (1)..(297): unsure at all n locations
  Clone ID: MRT4577_176710C.1
ccncgggcggaggggggcggattatcaccatcaatgtcacccgaataccaaaccctatcctgatgccttgctccgatgcatgccatcttatggacacccctgttggttgtaatgcctacgcaatcgactccccaacgattgatcacaccctcataacctttagctgggggggctccaaatatatgatttatcttattcttctgcatgacacgttaacaaggtacctgtttattataaaaattataatcacactgcaccttgttagaacagtgatctagagcgccaccaccctactgg

SEQ ID NO: 84101 - DNA, 296 bp, Zea mays
  Clone ID: MRT4577_176711C.1
atcgcccttgaggactatgaacgataaaagcgtaagagcgtcgatgacaacaagggcacttctgccacgatctgaaagcccgagatactattgaccacatttctgacaaatagcgcgatcctaactcatggtgaggaggcactaaaggttgcattgccaaactaacacagaatgaacctggcttaacagggcctataagaaattgtggctgcctagcgctcacatgctattacatagcttatgctccggcatgtacaccgatatcaacctgatgcttggagtgcatatcatatacc

SEQ ID NO: 84102 - DNA, 101 bp, Zea mays
  Clone ID: MRT4577_176712C.1
gctgaactctccagctatggtcacagatttctgtatgtctcttatgtataagctatggtaataatgttatgctacatggtatgggcttgtgaaccgagact

SEQ ID NO: 84103 - DNA, 472 bp, Zea mays
  Clone ID: MRT4577_176713C.1
ggaaaaaaaaaagggtttaaccttttccttaagggcctccccaaaccaaattttgtttttttaaaccccccccccccccttggcccggggatttttttgctttgataaacacttttttttttgattaatagggttttttttttttttgccttgaagggggggacccgccatttccccaaacgttttttttttgttttccaattttttaacctttctttttgtcccacccgggaggaaacttccaatttttttaccccaaatttggggagggtttcccgttgaccatttttggcagtttaaaaatttgtttcttgttcctgaaattcaggcaccgctttatttgaccctccgggcaataggcttgccaggccttttgctttgatcgggttgaaaagcttaatagtttttttaaattcgcccttggaatggggcccttggtttccccacaaatggatcatttttttttggaatt

SEQ ID NO: 84104 - DNA, 308 bp, Zea mays
  Clone ID: MRT4577_176714C.1
gggggccaaaaaaaatccaaaatttgccttagagtattgaaacaattctagggtctcccgggacaaaaaaatccaatttaccaaagattggaaattttaaacaagaacccaattcccagcaattttcttgggttgccccatgacaaggtgaaaaacaaaagggatgttttccccggaaacgataaaccatgaccctttgagggattcaacttccaatgaagcacacccccttgcttttcacaaaactggaaaaagggaaaaaatttggaaaatgcccacctgatcaaccatgggctgggacctttttt

SEQ ID NO: 84105 - DNA, 403 bp, Zea mays
  Clone ID: MRT4577_176715C.1
gtccggacgcgagtagatggaagcaggcggcggcagaggaagcgtccacggccacgaccggcagcagcggcatacagcagagggtgaggatccgccgatctgaccaggtacaaggcgcgcgcgagccgggagctctggagggcatggccatgggaagggagccggtcgaagaggaagaggaagaggtggcgtgccactgctgcgggttcacggaggagtgcacggcgccgtacattgcgggcgtgcgcgcgcggtatggcgggcggtggatctgcgggctgtgcggggacgcgtgctgcgagtagctcgggcgcacgtccccgcccatctccgccaccgaggcgctggacgcgcacgcccgcgtctgtcgcggggcctccagccgccggcgtcacccccgggc

SEQ ID NO: 84106 - DNA, 252 bp, Zea mays
  Clone ID: MRT4577_176716C.1
ggtaggctttttttcccaaatacgacggcagcttggcgacgttcgtggggtgccgcgtgcagcatgacaacgcccgcgggccgcaaccggcccattatcaaaccaacactgacgcgaacagcaaatacttagacaacctccctatggagagggcaccaaacaacgcaggcgcatcggccgccttaaacgacccatgaattactgaccaccacggacacggagcaaaatgtggagggggctctcctttgggat

SEQ ID NO: 84107 - DNA, 294 bp, Zea mays
  Clone ID: MRT4577_176717C.1
ctcgaggggatatacttgggagagacgtacaaggaccatgagaacatcgtcatcgccaagatggactcgactgccaacgaggtggaggccgtcaaagtgcacagctcccccacactcaagttctttcctgccagtgccgacaggacggtcatcgattacaacggggaacgcacgctggatggttttaagaaattcctggagagcggtggccaggatggggcaggggatgatgacgatctcgaggacctggaagaagcagaggagccagacatggagggagacgatgatcagaaa

SEQ ID NO: 84108 - DNA, 237 bp, Zea mays
  Clone ID: MRT4577_176718C.1
gtcgccacgcgttcggccgccgccgttgtcacgccgcctgttgccgcagacgccatgggggcgtacaagtatgtgtcggaactatggaggaggaagcagtcggacgtgatgcgctttttgcaccgcgtgcgctgttgggagtacaggcaaaagccgtccattgttcgccttaccaggcccacccgccccgacaagggccgtcgtttttgttacaaggccaaacagggatatgttgtc

SEQ ID NO: 84109 - DNA, 310 bp, Zea mays
  unsure (1)..(310): unsure at all n locations
  Clone ID: MRT4577_176719C.1
gtacaatgtattacaggattgatctgcttnntggaagtgctaaacacttattgaacgactgcancacaaagatctcccttaaaacagcactaacgctggctaatcagatgatcaggacagtctaatccatgcacacaacgggcttttacattgggaccttaaacctggttattttctcattggtttaagaccttaagccaaccaagtatttgtcaatgactattgccctgccaagaagtattgagatattcaaacttattagcacataccattcagggaaaacacaaattttacacagaacacaaccata

SEQ ID NO: 84110 - DNA, 918 bp, Zea mays
  Clone ID: MRT4577_17671C.1
cacgggtcgcccctctccccccggatccgtctccagatttagggctccggctcggccgatccgggctcgtttccccccataacttttcgtcgctgatgatttttgttgggtctctctgcagggatcgccggagaggaatcgcgacgagggcttcctcctatcagttaaatcaaagccatggagcacaaggagaccggctgccagtctcgggagggccccatcctttgcgtcaataactgcggcttcttcggcagcgcggcgaccatgaacatgtgctccaagtgccacaaggagatggcgatgaagcaggagcaggccaagctggccgcctcctctttcgacagcatcgtcaacggtggcgatgccgcgaaagaacaccttgctgctggcagcacggcggtggcagttgctcacgttgaggcgaagacgcttattaccgcacagcctgctgatatcgctggtccaagcgagggggcgatggacaaccccaaaggcccaagccggtgcagcacctgcagaaagagggtcgggctgaccggattcaactgccggtgtgggaacctgtactgcgcaacgcaccgttactcggacaagcacgagtgcaagtttgactaccgcgccgcggccatggacgccatcgccagggccaacccgcgtggtgaagggcggagaagcttgacaagattctaggaaagggtccccccctacagtcggcagaacataaggtcccaaatcaaatctgcgctacctcgtcatcgtgcgtctttgctgcattatcctttcatcatgttggcttctgcaatcttagttgttgggcaatcgtgatgcatggcacacgcgcctcggcggcagccccaggtccgaacggtctccttgttggctatgttgtgaagcttttattatggtcgtctctctgcg

SEQ ID NO: 84111 - DNA, 2576 bp, Zea mays
  Clone ID: MRT4577_176720C.1
cgaggccggccggggattgcctcatttctgtgggactcgtcggattcactcaccatcgatccattgttttcgtctcttgcggccttgccccacccataaagccgatgggttagctcccccgcaccgcacgcccaagaacacagaggagccgacgccacggcgacggtcgtcctctcccggccagcaccgtcgcggactgcgtttcatccgtgcctttgcttctctcttcaccccgcgtctctctctcttggcgacgactgggggaccactgccgccgctcaagccagttttgtgatcagtgaaaatggctgctgctgaagcaagggctgcttggcaacgcgctgcaaaccgttgcctggttcaggaggacaggaagagagctccaaaactagcttgctgtccatcatcggctgaacaacatggtacaaacaatgggaactgtcgaaattctgcagatcgtcctatctgcagtttaatgcctttgagctgcaatcccatgcattctaatctgccaccagatgtcagatggtgggttcagtcacagccaaattttgggatccagaaggatattgttagcaagcggttatgttcgttgggcagggacattcatgagaagcaagtggaagattcagtgccacaacctaaacatgaggaaacattactctgtcaagcagttgacaccagcactgaaaagattggagatgctttggagcctccatggatggtttcgccagccttcacgaagtattcccttgaaacaggcttagaagagatgaagactgttggtagctattctcaagtgtcgaagtgcatagaaactctcagcaattgtttgtacaaggataatgaattcccagattttgaatgtattgacccagcacctttgaagaacccagataaggctaattttcacatagatgcaccttggaaaggtgaaaagactcgaccatggtggcagattgctgacgaggaccagctggcttcactggttgcagaaagagcaacacagcacattgagaattgtgacctaccaaggcctacccagacagtacgcattaacaggacagaaccatatactcaaaaacatataggtgactttgggggaccttcatctcctgcaggaagagtgtcacaccctgttcctggacattgtgaccatatcgagtgtacctatagcacaggaagtacaaatgagttagttctgttatatggtaatggagtttgggaacagcatggaagcagtgatacatatagtgcggttcaatatttttctagcagtagcacaaccggattggaaagcaaacaaacactccagaatggctctgagcgagacatgattttggaggcactccgccattcacaaactcgtgctagagaagctgatatggcggctaagaaggcgtacaatgagaaggacgacgtcatcaagcttttgctccgacaggcctcacatctctttgcgtgcaaccagtggctgaaaataatgcagctggagaatattgtcctgcagctcaagaacaaagagcatcagatagcagccatcatacctgaacttccatggttaaccctaaaagagaagcctacacagggtcaggagcagagagattggactaggaggaaaggtagaaggcagaagaaggcagccggcttcttcgacgcgatcttatttgctgttgggttgggtcttgctggagctgggtttcttcttggctggactcttgggtggcttctgccgaagttttaaagttgttggttatttttattttggggtacccagctaggcatgtattttactgtgtaggatccatagagggaaggccaagtgcactctgtgaaaatggtgtcaaatgatcaaatttgttagaccctagcatctgttcatttggaaaccatgatgccgcaatgagtaaatgaatggctgtccggtgaaaataatgcagctggagaatattgtcctgcagctcaagaacaaagagcatcagatagcagccatcatacctgaacttccatggttaaccctaaaagagaagcctacacagggtcaggggcagagagattggactaggaggaaaggtagaaggcagaagaaggcagccgggttcttcgacgcgatcttatttgctgttgggttgggtcttgctggagctgggtttcttcttggctggactcttgggtggcttctgccgaagttttaaagttgttggttatttttattttggggtacccagctaggcatgtattttgctgtgtaggatccagagggaaggccaagtgcactctgtgaaaatggtgtcaaatgatcaaatttgttagaccctagcatctgttcatttggaaacaatgatggcgcaatgagtaaatgaatggctgtccgcattccaccaagagcattttttctaaacattctgtttgttgtaaatatgtgtggtgaactgtattactttgatctgttaggttgtgtgaggtacctagatcaagctttataaaaaatgaggctgaggagaatatgtacctagatcaagctttataaaaaatgaggctgaggagaagagtctacgggctcggctatgagcagt

SEQ ID NO: 84112 - DNA, 662 bp, Zea mays
  unsure (1)..(662): unsure at all n locations
  Clone ID: MRT4577_176721C.1
acaaagaggagccgacgccacggcgacggtcgtcctctcccggccagcaccgtcgcggactgcgttgcatccgtgcctttgcttctctcttcaccccgcgtctctctctcttggcgacgactgggggaccactgccgccgctcaacgccaggtagtcccttcgccggcgacgagcacccactagttttgtgatcggtgaaaatggctgctgctgaagcaagggctgcttggcaacgtgctgcaaaccgttgtctggttcaggaggacaggaagagagctccaaaactagcttgctgtccatcatcggctgaacaacatggtacaaacaatgggaactgtcgaaattctgtagatcgtcctatctgcagtttaatgcctttgagctgcaatcccatgcattctaatctgccaccagatgtcagatggtgggttcagtcacagccaaattttgggatccagaaggatattgttagcaagcggttatgttcgttgggcagggacattcatgagaagcaagtggaagattcagtgccacaacctaaacatgaggaaacattactctgtcaagcagttgacaccagcactgaaaagattggagatgctntggagcctncatggatggtttcgccagccttcacgaagtattcccttgaaacaggctt

SEQ ID NO: 84113 - DNA, 607 bp, Zea mays
  Clone ID: MRT4577_176722C.1
gagcgagacatgattttggaggcactccgcccttcacaaactcgtgctagagaagctgatatggcggctaagaaggcgtacaatgagaaggacgacgtcatcaagttttgctccgacaggcctcacatctctttgcgtgcaaccagtggctgaaaataatgcagctggagaatattgtcctgcagctcaagaacaaagagcatcagatagcagccatcatacctgaacttccatggttaaccctaaaagagaagcctacacagggtcaggggcagagagattggactaggaggaaaggtagaaggcagaagaaggcagccgggttcttcgacgcgatcttatttgctgttgggttgggtcttgctggagctgggtttcttcttggctggactcttgggtggcttctgccgaagttttaaagttgttggttatttttattttggggtacccagctaggcatgtattttgctgtgtaggatccagagggaaggccaagtgcactctgtgaaaatggtgtcaaatgatcaaatttgttagaccctagcatctgttcatttggaaacaatgatggcgcaatgagtaaatgaatggctgtccgcattccccc

SEQ ID NO: 84114 - DNA, 384 bp, Zea mays
  Clone ID: MRT4577_176723C.1
aataccttggataccgttacattaaatgaaacaaattaatgcttcaacttgagatacagttctaaaaaagtacacctaatgtcgtgagggtaatgcagctaagctgaagaacgcacacctatatgtatcactgcttccatgctgttcccaaactccattaccatataacagaaccaactcatctgtacttcctgtgctataggtacactcgatatggtcacaatgtccaggaacagggtgtgacactctttctgcacgagatgaaggtcccccaaagtcacctatatgtttttgagtatatggttctgtcctgttaatacgtactgtctgggtaagccttggtaggtcacaattactaatgggctgtgttgctctttctgcaac

SEQ ID NO: 84115 - DNA, 662 bp, Zea mays
  Clone ID: MRT4577_176724C.1
aattcggcacgaggattgccaccatcatcatcacctccatctcctcgccatcacgcctgccggccggccgggtcttccttctccctcctttgcaccgccgctacaaattaaagagcacgcacactgcctgcgcgacctagctgctgttctgttctgttctgtccatcacaattcacgcgacgacgacccggactgcggctagctgctacgggcagatctttcttgacctaagccagctcgttcttgccgcactagccagctaggcagctagctagcttgctaccctcgctccccaccgtcctcagtgctagactattcgtccgatgggcggcgtccaactcgacgacctctccgaattggccgtgctccggccgatccagacagcggtagcggctcggccgccgggcgacgacgccgaagacggcccggacgccgccgacacgggctgcgtcacgccaacggcctcgagctcccggctgatgccgatgccgcgcctggacggcggctgcggcgccctggacagtaccgccggcgccgccggcgccggctgcgtcacgccggcggcgtcgccgtgccctggtgcgcgcgccacggtgtgccctccggcgccgcggaagccggcgaggccggcgcccgacaacaagaggaagcgctgctgctgc

SEQ ID NO: 84116 - DNA, 531 bp, Zea mays
  unsure (1)..(531): unsure at all n locations
  Clone ID: MRT4577_176725C.1
ccaaacaccctagctaatagttcagctattagctatttttagtaaattagttaatagttaggtagctatttgttagctagctaattccactaacaatttttattcaactaactattagttctaatacattcaaacacccctttagactcacgtaccaagtcccaaacaccctagctaatagttcagctattagctatttttagtaaattagttaatagttaggtagctatttgttagctagctaattccactaacaatttttagccaactaactattagttctaatacattcaaacacccctttagactcacgtaccaagtcaataactgcttctaacgtagggaggtgttctgtctagtaactaatgtacactgatctaccggtgactgttagtgtatctgttctcaaggttttgctaccaatgtataccatctgaataacttcactaaagtatgattcacctgttttggtatgatagttntgtctgagttacgtgtgctctgatcttgtcatnctaatgttgatgaact

SEQ ID NO: 84117 - DNA, 427 bp, Zea mays
  Clone ID: MRT4577_176726C.1
atcatcatcacctccatctcctcgccatcacgcctgccggccggccgggtcttccttgtgccctcctttgcaccgccgttacaaattaaagagcacgcacactgcctgcgcgacctagctgctgatctgttctgttctgtcctgtccatcacaattcacgcgacgacgacccggcctgcgggcagatctttcttgacctagccagctcgttcttggcgcactagctagccagccagctagtagctatcctcgctcctccccaccgttctcagagctagactatatgttcgatggacggcgtccaactcgacaacctcttcaaaatggccgtgctccggccgatccagacagcggcagcggctcggccgccgggcgacgacgccgaagactgcccggacgccgccgacacgggctgcgtcacgccaac

SEQ ID NO: 84118 - DNA, 681 bp, Zea mays
  Clone ID: MRT4577_176727C.1
gcggttcttcttcccaaaaggaagaatgacctcatggccggcgagaattcttgccgtgggcctcgtggtccaacgtcttacgaacttcagactacccaagaaactcttgtcaaaggaggagctgtgatgtcagctccgttccaaattaaatcaattaccatacaaacctcgagcacctcgtcaccctcttggccccgatgacctggtcagttaacaacgtcccccttatccggtgcccgttatgctctctcccgacggagaagcacggcggcgtagagcggaagagcgtctaattttggctcatcctgaacaaaacatgtttgcggttgctgcgtcaacgcagcccaacaccaccccgaaacctatgccgtatcccaccatacttccctaaaacctcatataagccagcagtctgcgagacccatccgagtacgtacgtactcgtctcggctgccggttcagtactgaaccggcaggtcacccgtgcagacgtcgaacgtcgacgatgccgcgtggccgtcgccatcaaatcaaatacccatacaccgccttctcacagcgttcattgaagacgctcgagcgtctcactttcatccgctgtcccattcgttcttgttcctgttgtatcgaatgaaaggctcttccaaatgtatgtgttccccttttcggcgctgtggttgc

SEQ ID NO: 84119 - DNA, 731 bp, Zea mays
  Clone ID: MRT4577_176728C.1
aattcggcacgaggcaccacggtaccagagcacacacggaggtgccaccgcgcgccccagccgaagcatggcgacgccgctggccgggaagggcccgatcgcggcggcgatcccgcggtccccaccccctctggccgagggcggcgcgggagggtcggcggccgaggcgcccgtgctcatcttcgtatacttccacaaggcgatccgcgcggagctggagcggatgcacgccgcggcggtgcgcctcgccatgggacgcgcgggcggggacgtggccacgctcgaggcgcgctgccggttcctcttcaccgtctacaggcaccactgcgacgccgaggacgcggttatttttccagcacttgacattcgagtgaaaaatgtcgcagggacatattctcttgaacataaaggagaaaatgatctcttcgcacatctattcactctgctacagttggatgtgcagaatgataatgctattaggagggaacttgcatccagtactggagcaattcggacgtttgtatcccaacacatgtccaaggaagaagaacaggtcttcccgttactcatcaagaagttttcacacgaagagcaagcagatttagtatggcagttcttatgtagcatccctgtaaacatgatggcaaaatttcttccatggatttctgcttctgtttctacagatgagaatcaagatattcttgactgcctaagtaaaatagttcctgaag

SEQ ID NO: 84120 - DNA, 530 bp, Zea mays
  Clone ID: MRT4577_176729C.1
gttggggggggggggtttttttttttttttttttttttttttttttttttttttttttttttttttttttttgggtaaaaaatcgacggcccggaattcagtaacaagtccattacatacacaattccccctccttcccccaaaccttggggggggggggaaaaaccggccccacgccccatgggggggagacgggcaccaaaaaacccgacccccccatccccccaacagggggacccagggcccccaacacctcccaaaagtagggggggggggccccccccccgggaaaaaccgctgaacccccccggggggggcgaacccccccccgggaaacaaaaaaatcttggccacccaaaacccaagggggccgaggggggaggccccgatcttaaaaaacccaaaaagggccccccctaaagacctatcccccgggcccaaaacggaaaggctcccgggggggggggggggcccccgggggcccccctgtaggggggccaggagacacgccccccccccccggggggggg

SEQ ID NO: 84121 - DNA, 159 bp, Zea mays
  Clone ID: MRT4577_17672C.1
tcgggtacgcctggactgacccgtgaactgacgcgtattaataagcggaggagaataaacttacgaggagatctctagtaacggcgagcgaacctagagcagcccaacttgagaatacaacaggcctcgccttctaaattgtcctatgtaaaggcctcc

SEQ ID NO: 84122 - DNA, 202 bp, Zea mays
  Clone ID: MRT4577_176730C.1
aagtacagaattacacgcttgttaataacaggcgccgtacactaaatccaacgttggtggcaacagaaactttccgatttttaagtttgaacgaaagaacaacacacttggcatggtacaatctcagacaccagggggtaaaatggacctaaagggaccactaaatgcgctgttatgttgcaggggaaataaacaatgaaat

SEQ ID NO: 84123 - DNA, 531 bp, Zea mays
  Clone ID: MRT4577_176731C.1
tttctctgcgtccacacctatgtcacctcccgtgacgcggaccccaagctctgcttaggtctcacaggtgaggtctcgctagatcggtcagccccaccttgccctctcctttcactgccgagctccggcacccccatatctgggctgacggcgccttacctttcttgtgagatccacctgaagcaggcgctgaggagggagctccccccctcttcgtcactctcgaataccctctcggtcgtgcacctggttcgtaagatgcaatccgtcgccccccctttctccgaggatccgcactagtccgcaccatcccgcctataggtgagacgatacagcaccatcaaaagaaccatgaaccttcagatatcgctatcttttccccaccatgttcaatggagcctgtccccgacacacgagggagtacgccacggtccctacagagcgcattgctctgctcagcgaccctcgtactgggaaacaggacgctatacagataatcgactgcctccttcaagcatgcgtctcgatgca

SEQ ID NO: 84124 - DNA, 308 bp, Zea mays
  unsure (1)..(308): unsure at all n locations
  Clone ID: MRT4577_176732C.1
ggtggggatatagagtgagtgaatttgtatgaagggagatgtaaggattgtaaaaaaggggttnggtaaggttgtgtgtgaggggggggggagaagagttggagggggggagggggatnttgaagaggagtggtggatgtggggttttttntgtaaatagtgtgntaaaagaaattttgatgtttgaatngggntgttgagggttgtngaagaagatnttattgnttttganataatntgtgatgttagggaaaaaaaaaaattttttataatgaaatttgatgatatttattggaaagggatntgtg

SEQ ID NO: 84125 - DNA, 370 bp, Zea mays
  Clone ID: MRT4577_176733C.1
tcttttttttttttttttttttttttttttttttttttttttttttttttttttttttttttttttttttttgggggcccaaaaattctttaattcattgccaaaataaatttggggctaccccaattaatccaacgggccttgggccccaaaattatttttttaattcctttaaaaaaaaaatcttttgctttgggtttttgaaaccaaaaaaaaaaaaaaaacccccaaaaatacaactcttgaaggccccatgggcaaagggatttacatgggtttggccttggaaatatttcccttttaaagaaaagcttgctttggtaaaaaaaaacctgatgcttttgggttttcccaaccttcggattccccg

SEQ ID NO: 84126 - DNA, 405 bp, Zea mays
  Clone ID: MRT4577_176734C.1
atggttgaaactgaaaagcatatgatttttcctttagtctacaagcttattgagttgtcattaatactgccagtttcaacagcatcggttgaaagagccttctctgcaatgaaaataattaacaaaccgcacaacatgattttagatgaatggttcaatcacttgatggtaccgggcataggcgacctcattgacccgcgctgcagtgcacagaaaaggagatcatatccattgcttccgttaaaaaatgtacagattggcctagattacgacatattggaggccgcatacaacttttctgaagaaaacaaacttggggaaggtgggtttggccctgtttataagggccagtttcctgaggcagctgggataggagttaaaagacttgcttcacattcaggataa

SEQ ID NO: 84127 - DNA, 670 bp, Zea mays
  Clone ID: MRT4577_176735C.1
cattgggaccctcgaggccggccgggcataagattccattttgcaaggcacgcgccgacaaaaggagtaaccggaaagagttaagcgactagattaggcgagtctgatttctccactatgcagactgaaatcaacctgccattcatcactgttgacgcatatggcgcaaagtacttcaacattaccttgaccaaatctaaggtctgagtctctggtggatatcctcattgagaggactctgatcccttgagtgaactgcctccaggatgctgacatctctgttatgagttgatgactgctactgatgggagcaatgactatagtacctgaggtccttcatatccgtgttctcaaatatgcaatgatccaccaagcaagttcgaccttcctgatgtggctgttgccatgcgaactgcaatccggaacggcttcttcatctagagtgagaacgagctcctgtattgatgaaagacacacctctctctcttgccataaggaccctgggtggtgatctatcacaaggctatgtaataggaagagcactattccgagctagaataacaaacacttctcgaccgctggagatatgcaaacgcagggtgtgagtaacgtactgcttgctgactagctagatgtatacgactgtgatatcctgggagaggtacagctt

SEQ ID NO: 84128 - DNA, 2614 bp, Zea mays
  unsure (1)..(2614): unsure at all n locations
  Clone ID: MRT4577_176736C.1
cattaaataacacacgtttcttcctcctgttctcttcatactgctctcttcacatcgcaaaaatatggccccgacgcattctccatctccatcgtcgagcagtgagtcagaccccagctggtattggcgcaaccctgccaggcgagcggcgcgtgaggcggcagctctcgcagcgcgtgaggcgcgtgcaagacaggaggcaagcgcggctagcgaggcagtagcgtctgcggcgcgtgaggcaacaccgtctgcggctagcgaggcagcagtgtctgctgcgcatgaggtccgtgcggcggcagcaggtgagtctcgtgcggcagcaggtgagtcccgtgcggcggcagcggcggctgctcgccgtgcaccagcccggcgtttccggcagtatccctacagcaggccttcacggcagagacgaggtgcaaggcttcgcactccttctgatgatgaagaaccgatcgtcacaggaggcagtgcaaaaggagaagacaagatcgatgcagcaaaaataaactgatggagattacattcggtgaactaaattctactatcactattcctaaatgttccatgtagcaagcttttgcatggcttcgtataccaatgatctttcacaatgaacttgtaccggtagtgatccttgtctttcaagtgttcccttcttcatgtgaggaagattaatacttattggatccatgaactttcatcgtttctttcaaaacttgatgaagtgttaagtacattctgtttgccttgcatggacgatattcatggaaagcctcttgcacaactggaattagatcttgaactgtttttgctgatttcttgtattgaattgattgtatggcacgaaaaaagcccaagtctaatatattaaaatctagggaattcgtcggttgacaagtgagacgaacgtcgaaaccatcttgttgtgtagcttcacaaaacattggatcgttaacttcaatatgagatggcgcgttgtcttgttgaatataaattggtttgttgacatcttcacgtggccacttagctttaatagatggaagtaccttctgtatcatgaactctctaacgacatctctctttatcgaagtgatggatttcacttccattgttccagctggacgattaatactactcctttttgcacgttcaaaagtaactaaagggaagcatccaatcttcccatcgaacgtgcaaattccattctcaaatcttggacgagcggtggcacataagaacatgagcttcgggatgttgttcttactccaacaagtacgataaggctcatcctcatcgggcaacaaataatacctctcagatttttgagtaatgaagaaccacttctcatcaatgaaaacatgatcaaaaagactcttaaaccttggattgtcatgcaaagtctcatgctcaagcatgtcaacacaccactgtagcctagacttcttgttttcatcggtaagatgcggtttgatactactcgtatgccttctaactttctcttgtttcacgtgtttcaaaagtgttctcttgcaaacaccaagtactttagctaaatcttcaagagtggttctttccttaagaggaacatagcgcaatcgctcatagtttactggacttggcttacgaccacatttacctctctttttactagcaaaactaaccataataccaagatcaagtgagagtttaccttcagcccaacatcgttgtacagttcgaattccaagattatacattacgacaacttcgctagtagcattccttggtagcaccccattcttacttcttcgcaacagttcctggaatacttgatttaaaacaacttcggaagcatctttccgctgaacactctcaactggtgccgccacattcaggtcaaacaagtgaactggttcttggttcaaatcaaaacggccgactcttggcgtgactcggcgacctttctccttcaacttccctctgcgagaggttaaatagaggagcacccctgtcactcggtacacgcgagaaaacactttcagtacacagtccagcagccgagtgagggtatttccatctcgtgactctgcgcgcacagagaagcgagagggcaggtgcctccggagcccttgccgttcgagaccttgcacgagggatcggcaattaggtttttggggagcgtctacgcgactgcccaaagtcttcttcctgctgacatgacaagtgaagttggacaaggatctagatcctcggagcgcatggcagggtatgatcaattcatctccttactgtttttcattctgcaaattatatatgttcttacctgctgttttatttatagccataaatttatccaatctgttttgtcgtattatatcatgacgtgtctgatccctgatcatactagtaatatgataaacctgtttgtcttaattttacagtcatgctgtttatgttgctatctgtttattttttgttggtccatantaatacatgttccatgtttatttgcttattatatttatatgattcatatgtttcgtgttctcttgatccataacgttatggatatatttgagataatggattctatgattaaacatatgttatatgtcatcatcat

SEQ ID NO: 84129 - DNA, 443 bp, Zea mays
  Clone ID: MRT4577_176737C.1
attccggaacggcaaactaaaaaaattcaaacatggcgggggtcacaacccaaaaggaacacaaaaaaaaacaaaaacatggggagttttccaagaaaaaagaaaaaaacaaaattataaccagattggaatatccgataaaaaaaaaacaagacccattttatgcaaacaaagaccaatcttgcaaaaagaccgaataatccaggccctgaacaaaaataaaaattttttacacctccagtttaatgttgttggaaacaaaattcaactgcttaaaaaattgatgccaaagtatttgggggtaaaaaactacccctttaagaatggacggcaaaatatttgatgccgggccaagaacccccaaaaaacgtacgggtttatgtttgatatctgcccacagacttaaaaagaaactttggtttttcacaccctattagaaccca

SEQ ID NO: 84130 - DNA, 227 bp, Zea mays
  unsure (1)..(227): unsure at all n locations
  Clone ID: MRT4577_176738C.1
cactttcttttttttttttttttttttttttttgcttttttttcttttccttttttttatttgtttgatttcgttgtttgatactgctcccatatcatattctatcgtgtgaatctggtggtgatcaaagacttcaccgaactcaaactccgcgcggtcctgtgcgtcctcatgatgttcccccagttctgctccctctggttcntcactgccctgaagcattgcgt

SEQ ID NO: 84131 - DNA, 581 bp, Zea mays
  Clone ID: MRT4577_176739C.1
ggccggaaaaattttctaatccgcaaacgaagcttccagaaggcttcttcttgcgtaccttccacttccacccaacgcgactcgctctttccgcgtgggggaagtcgccggctcagatccagccgggctgcggcgctggccggatggccgagcagggcggcgcagccggggaggccgctggcagcgacccccctgcgcctgcgcctgcgactgccccggcgccagccccagcgcttgctgcggacgcggccgggcagaggtccctgccgacgccgttcctgaccaagacgtaccagctggtggacgacccggcggtggacgacgtgatctcgtggaacgaggacggctcgacgttcgtggtgtggcggccggcggagtttgcgcgcgacctcctccccaagtatttcaagcacaataacttctccagctttgtgcggcagctcaacacctacggatttaggaagatggtgcccgaccggtgggagttcgccaacgacttcttccgccgtggggagaagcgcctgctttgcgacatacaccgacggaaggtagcaccggctccggcggcggggctggccact

SEQ ID NO: 84132 - DNA, 612 bp, Zea mays
  Clone ID: MRT4577_17673C.1
cccacgcgtccgaaaagatgagctgatcaaacagctcgaagaacaattgaaggaattgatggggcagaaagaaaccgttcagtctcaacttgacaattttcgtagagttgcaatagatgaaaattttgatgaccatgcaataagacaatgggatcaacgaaataggtcttcagagtcccttccacataatgtgtctgaagatgctctttcttcttttgatacttacgatgttgtttatggagaacaagatggtctaggcccaaaagcatttgatgtacatccaatatctatcttgcatcaaccaagaaaccatatttctgataacattcagatatatcaaccaaataaggaggcttcctcagaggtctctgaggagcattgcaaggaagtccagtgcatcgaaacaaatgagcttaggaggagtccattattctttcctgttgatcgatatcatgttggcacaaacattgatgaaggaaagcatgatgaaaacataacggacacatcagacagtgccatcaaattgtacacatgtgattctgagccatcttctgataccgaaaaaacaaataatgatgaatctttagccctgagaggtgcgtgataagctct

SEQ ID NO: 84133 - DNA, 290 bp, Zea mays
  unsure (1)..(290): unsure at all n locations
  Clone ID: MRT4577_176740C.1
caaaacccnagcccncgggccgccgccnnctccgccacccagcgctcgagcggcgcgcggcctgcgagcgcgcgccgcaacgccaccatgaagttcaacatcgcgaacccttccaccgggtgccaaaagaagctggaaatcgatgacgaccagaagctgcgtgccttttatgaccgaagggaatcccaggaggtcagtggcgatgcgcggggggaggagnncaaggtttttttcttcaagancangggnggaggngacaagcaaggccncccaangaagcaaggaccccc

SEQ ID NO: 84134 - DNA, 352 bp, Zea mays
  Clone ID: MRT4577_176741C.1
atgagcttatctactaacatcgcataatacccgatcgacactatgaagatgagctctttgaccttactgactgactatggatgcgagcgcacattcagcatacaacacgctgctgtgctgacatccaccgcctacgtttatctaccgcacggcgacgcatccatcacctacagcaacctgacaacttcggggtatcagcgaccaccggtccacctgtcgccgacggtccacctgacactgacgagccatgagccgtcgcactgacataatggcgtatactgatgcctgtagcttactcaaacgaacaggacttagtaccattcagagacatagctatggcctagtctacaga

SEQ ID NO: 84135 - DNA, 372 bp, Zea mays
  Clone ID: MRT4577_176742C.1
taatattgttttgtttattgtttttttttttttgttttttttttgaccaaagagatgcccactcaatggagaaaaggatctctcaatattttcatgaaacacagggagggaattttaagaggccatccatttgtttacttgtcaagaacaatcagaggaaattgacggagaatttcttgaagaacgcacagattccacatgcttgtggaagtgccgacagagtcaaattttcattcaacatatggccccacgatcgggggatcttatctcgcctttttaccagccgcgaactcccccgactgcagaaattggttaagaaatcctttgaggcccacttaatgttttacctgtgcaaacacaaagggcgaccct

SEQ ID NO: 84136 - DNA, 260 bp, Zea mays
  Clone ID: MRT4577_176743C.1
ccccccaaaaccaccactgttttattgtccaaacaaaatacaaatacccctaaaaaaggggtacaaatagaaaacctggcctgccctaataattaaccccaccactggtggttttaaggctgtaatctcaaagaatggccaaacacgttaccatcccctccttgggttaaaacttgaaaaaaaaaaaataattttctcctccaacaaaatggatgcacccacccccaaatccttaaaggttctttaccaatgaaatttac

SEQ ID NO: 84137 - DNA, 518 bp, Zea mays
  Clone ID: MRT4577_176744C.1
ctcaccgccttccgttcctcatcaaatatacgcatctctcccgacgaagaaggtgcagcaaccagctgcagggctccgacatgggcgctctagttccccagcaagctgcggttcttttggctgcgctcttggtcttggccgtcagcttattaggcaagacggcttggaaggccgaggcggcagcgccgccggcggtcgtggttggctccgtcaagtgcttggactgctcccccagcgatgtcgatgccttcaaagacctgcaggtagcgatcaagtgcaagtccggcgccgacgagggctacgagacgaaggcgcgtggccccctggacgacacgggcgtcttccgcatcccactcgccgccgagctcctgcgcgacgacgggagcacggaccgcgactgcttcgcccagctccgcagctcgcccgacgacacgccgtgcgtcggccaggccccgcccaggatgatcgcgcccgccagccaagtagacggcagcagcagcacgaacacgacctacctc

SEQ ID NO: 84138 - DNA, 411 bp, Zea mays
  Clone ID: MRT4577_176745C.1
ggtatctgctggcgtcgtctccacgcgtgcgcgatactaccgacgctaggcttgtaattgtgcgtatgcgacgatcctggggccttgtgattgaagacagaggcgtgattcgggcatgggaagcgacaactggttcatttgctcttctccgggctctttcatcgaatactgaatttgcacatgggttacctgagtacagcctgagcacaccactttcgcctgagaatagcactgctagggaactcggtcacacagtgatcagccagcactccgtaccctcggtataacatgtgatctaaatgcttccgaagttcaataaacttgtgctcatattgggcctttgtcagaccataaccctagacgttctgctaatgttctgaatattgtccggagttatattgtgtggctcta

SEQ ID NO: 84139 - DNA, 453 bp, Zea mays
  Clone ID: MRT4577_176746C.1
atcacacatagccaaagaccaaccacaagctaagctactagctcagccagcatatctatccgctctcttggcaagcagctgcacgcaataatggcagcaaccacactgacgaccaataacgcaccgctcctcctcctcctcctcctcctggcagtcctccctatagccgcactctcctcccgcgctggcccaccgaccgccgcgcacaaaagccacggccacggccacggccacgaccacggccacggccacagaccgtcggccaagcacccgccgccgccgcctcctccatcatcatcgtcaacaccaccacccccaccacccgcggcggcgctggtgcgcaccacctgcaactccacgtcgtactacgccctgtgcgtgtccgcgctggcggcggacccgtcgagcgcgacggccgacgtgcggggcctgtcggccatcgcggtctcggcc

SEQ ID NO: 84140 - DNA, 754 bp, Zea mays
  unsure (1)..(754): unsure at all n locations
  Clone ID: MRT4577_176747C.1
ccggccgggacattcaacctagcgctttcaactccgacaagaggagcaagatcacaagcaaattcacagtcctccagatggcttcgcaagcagattacaaggatcgccagttcctggctgttattggtgatgaagactccgtaactggtcttcttcttgcaggaatcggccatgtaaccacaggtgccgatgcccagaagaacttccttgttgttgacggcaagaccgacacatctgccatcgaggctgcattcgaccgatttactgaggaccgcaaggacattggcatcgtgctcattaaccaacacatcgcggagcgaatccgacaccgtatcgatacctacaccgcggctttccctgctgtcctggagattccaagcaaagatcacccctacgaccctgagaaggatagtgtgttgagacgagtgcgacgcctgtttggagagtaaacctacgattttatcggcgcatgggcttgttttggggtaatgaagcgaacatagcataggtgcggcgatcagcctagccgtatatgactcgcgagtcagtattgtgttttttatcgacttgttcacgttgtgcaggactgtagggcgacctatgcttatacagtgnngatgaggtggagtacaacgcgatggactcgtttatcaagtatgctaaatagattcgaaagccgctgcagtatgctctacttgagctataaattcacccaaaaaccaacgccaaaaaaaaaaaaaaaaaacccgcggcc

SEQ ID NO: 84141 - DNA, 473 bp, Zea mays
  Clone ID: MRT4577_176749C.1
gattaaaacaacgaaacatacacagactgacaggcaggtacatcaaactacattagctttggtctagctagctgctacccggcctgattacactatcaactacacatacgtacaggagctactagctagtctagtttttttgcatgaagtagcatcagctgcagtacgcactacttccaaggtcgtacggccggtacagaaaacatgtagctacctagctaggcggcataggacatgtacttggagatggctttggtgccctcagagatggcgtgcctgaccagctccctggggagcacgagcctgacggcgctctgcacctcgcggcaggtgagcgttgccttgcccgtggccttggacaggcgcgccgcctcgtccgcgaggcgctcgaacatgtcggccatcatcatgtccagcacctggatggcgtgccccgacacgcccaggcccgggtgcacctgccttagcacgcg

SEQ ID NO: 84142 - DNA, 590 bp, Zea mays
  Clone ID: MRT4577_17674C.1
aagatataaaggaaccattgggtagaattcgtgccgaaccatcaaacagggtacacacaaccagtgttgggtattactctcagcatgcagctcaggatccgatttcatcttgtaaggagatcaaagtgcctttgcgagacggtgcaagggattctggaagggaccgcacactggagttagtggttacaagtccacgagaagagactcctcgatggaggcaagaacagtacgcacttcagattttagaagacgttcaaaattcccgaattgctgagagatctaggatggagatggagatcagagtactgaaggcacaagtcagtagcatggagagacaagtgatgaacctggatcacttctctgaggtcaagtccagatctagtttgaaccaacaaatggtacatttgcacaaaccatacttcagaaactgtaatgggtttaaattttttgaaataaacacaaatccatgcaagttctctgtcccatcatcgactacctacctcctggaagtcggattgttttactcttaggtgagttccattttaaagtttaactctagcaaagaaaggtcctgcattctatcctaactc

SEQ ID NO: 84143 - DNA, 620 bp, Zea mays
  Clone ID: MRT4577_176750C.1
cccacccgtccgcacatggatgctgcaaaagaggctgcgaagcaatttgctcgcccgactgctggtactgtacaccgcattgctcaatgccacaactttaaagtacaacatgaagtcaagggctgccataggctatacccttgcagagctcatggctgataacctcccaaaaaaccttgctccaaccattgatctccgtgttgagcaccaacgcatgaacaaactccttgacggactgcagaccattgacccatacctgaacacatacaatgtcaagctaagtatctcccccaggggtacgcccaaggacaatgctgcagactatactgcaacacgatctcgacacccatacccactaccagcgagactccatgccatatactcgtggagagaaacgttcaaatgacgctgataaggtcacagattatactaactcatttgctgtctatcttaagctgctgctcgagcggctgaacaagaaacatcttgataccccccataagacagcaactgaagcaaagaaggaagataagaagtgatacggcccaagatagtaccctgcagtgatctatgcatgcatctacgaatgctactacttaaagggcttgttccatgaatgg

SEQ ID NO: 84144 - DNA, 253 bp, Zea mays
  Clone ID: MRT4577_176751C.1
cgcgggcgaccacgtgcccggccaccatgctctcgcttttcttcttcgacctagaccccaacctcacccgtcgccgtgcgttatcgcgctctgggccaccacagccgcgccctcctattcctactcctcctcatcgcccgccgtcggacccacgccggccgacgcggtggtcgagcttctccgcctggtggctgacccaagcgcggacccctgacccctctttcggaagctttcacattatctttacgcctac

SEQ ID NO: 84145 - DNA, 873 bp, Zea mays
  Clone ID: MRT4577_176752C.1
ctcgaggccggccgggatatctttctagtctccacagcttttgatatgctgtttatctttccaatcttcaacgatttttctatatgttgtttgcgctctagagagtcattcatattttctatctttgtctagtgagaaattaagaatagaagaagactatatttgatagccatttaaataagttgttggatgatattaaaaaaaaactctattcataaggaagaatatagatagtctgttgaagttgctcttaggtctcagcaagaacaatttttcaaatctggatgaactactttctgctctattagttcaatgtaattctgttagagaagggaataatccaaaccagccattctatttggttatatatggctagttaaactcaacagtggaccacagacagtagagcctggagatctggtgccaagcacaacaacaggtctgcctgtcctgtcctctagaaaagggtcgttttgggctcggttttttggtggcccttgggccaaccaaacgatagagcaatcgcaacaaacgctgctagccccaactcggttggccgttctgcaatttgctctgtggccacatgcatgccagtatttggagcctgtcactcataccagacagccagctccttatatagtatgggcataccaagcatgtggttttcattagagacttctcgttgacgacgacgatgtaataacaggcacagccttgcaaagttcctcctggatatcttaatttgcacgccatctgaagctctgaaaccgaggaatgggagctctctcttactgacgatcactgcgttgcattgacccttgtcatcacaggccaagctctcagacatggacctgtttccggagaacgaagccg

SEQ ID NO: 84146 - DNA, 202 bp, Zea mays
  Clone ID: MRT4577_176753C.1
gaaaaaggcccgttaggtggaaaaccaaaattacttttctgagaagaaagaccagcgaggcgcgagccaagagctaggagaaccgccccaaccagacgaggccgccgaacacgcggaaccaagccaagcacagacgcggaccaagcaacaaccacaacacacctgcccccaggaccccaacaccagccaacaaccccgaacc

SEQ ID NO: 84147 - DNA, 1216 bp, Zea mays
  Clone ID: MRT4577_176754C.1
gaaacgtactctgaacttgttcgtggtcctgtcgccttcatcagttcgttctgcgcgggaaccgccgatgggggacgccgtggaggacgtcgtcatcgccggcgcgggcctcgccggcctcgcgacggcgctcgggttacacaggaaaggggtgaggtgcctggtgctggagtcgtcgccggcgctgcgcgcgtcggggttcgcgttcaccacgtggaccaacgccttccgcgccctggatgccctcggcgtcggggacaagatccgggagcaccatttgctctacgagcgctactggtgaagcagctgcagaagtgagcctaaagattcagagcaaaagcgggccacacgagatccggtgcgtgaagcgggacttcctgctgcggacgctggccgacgagctgccggagggcaccatcaggtactcggccaaggttgtcgccatggaggaagacggcgtcggcggcgccaagaccctgcagctgcacctggcagacggttccaccataaaggccaaggtcgtgatcgggtgcgacggcgtgaactccgtggtggcccagtggctgggcctgccgaagccgatcctgtcggggcgctcggccaccaggggcctcgccgagtacccgggcggccacggtttcggccccgagatcctgcagttcatcggccacggcttccgctccggcgtgctgccctgctccgacacctccgtctactggaactacacctggtacccgtcccccgcggacggcgacgccgaggagagcgtggccaagatgcggagccacgtggtcgccaagctgcggggcgccaaggtcccggccgaggcgctggaggtggtggagcggagcgagatgagcgacgtggcgtcatcgccgctgcggttccggtccccgctggcgctggtccgcggcagcatcagccgcggcggcgtgtgcgtggcgggcgacgcgctgcaccccatgacgccggagctcgggcagggcgggtgcgcggcgctcgaggacggcgtcgtcctggcccggtgcctgggcaaggccttcgccctgctcggccatgagcgggatgaggggcgggtcgtcacggcggcgctggaggagtacgcggcggcgaggcggtggcgcagcatccagctcatcaccgccgcctacgtcgtcggcttcatccagcagagcaacaacgccgtggtcaggcgataaggctcaagtgggtcaac

SEQ ID NO: 84148 - DNA, 835 bp, Zea mays
  Clone ID: MRT4577_176755C.1
tgcggcaccgggcgctctagtgcgaacgctgtgcttgggcctgcactgcaccggtcgcgcgcggcctgcgactgcgagccgaggaatccaagaagccgggccggccggagtgtcgatcgttgtttccgccggttgcgagatcggagccagcaaggacaggtcgtcgtgggactagccatgctgcacgccgaggagaagaaggggaaggtgaagagagggtggctggcggtgcgcgtcggggcggcggagggcgacggcggctcccagcggttcgtcatccccatcgcgcacctgtaccacccgctgttccgccgcctgctggaggccgcgcgcgacgcctacggctacgactactccgcgggcccgctgcgcctgccctgctccgccgacgagttcctccgcctgcgcgcgctggtcgagcgggagacgccgccgcacgcggcgccagcgcccgcgtcctcgcaccgcgtgcacgaaggcggacactactctaccctctccccgtgcacccgcgccaaggtcacctcgtgatcgatcacggccggccggctggccgacctgcatgatcggctcgtcgaactcggctttcctacgcgcgcgcgcggcgaccgcgaagaagtttcccatgtctggtggtggtgtactggtatgtagtgtagagattagttagcccggccgtgcatgcatgggggtgggtgcttcctctttgatctccagttttggctgtttggtcttctctttttctgcgtttggttgtgcaggcgcatgtgctgtgtactaaagaattaacagatggatcagcgtatgattactcccgtagctgagttaacccccc

SEQ ID NO: 84149 - DNA, 1438 bp, Zea mays
  Clone ID: MRT4577_176756C.1
tatcagaaacgtactctgaacttgttcgtggtcctgtcgccttcatcacgagggttcgttctgcgcgggaaccgccgatgggggacgccgtggaggacatcgtcatcgccggcgcgggcctcgccggcctcgcgacggcgctcgggctacacaggaaaggggtgaggtgcctggtgctggagtcgtcgccggcgctgcgcgcgtcggggttcgcgttcaccacgtggaccaacgccttccgcgccctggatgccctcggcgtcggggacaagatccgggagcaccatttgctctacgagcggatgatcgccttctctgcagctactggtgaagcagctgcagaagtgagcctaaagattcagagcaaaagcgggccacacgagatccggtgcgtgaagcgggacttcctgctgcggacgctggccgacgagctgccggagggcaccatcaggtactcggccaaggttgtcgccatggaggaagacggcgtcggcggcgccaagaccctgcagctgcacctggcagacggttccaccataaaggccaaggtcgtgatcgggtgcgacggcgtgaactccgtggtggcccagtggctgggcctgccgaagccgatcctgtcggggcgctcggccaccaggggcctcgccgagtacccgggcggccacggtttcggccccgagatcctgcagttcatcggccacggcttccgctccggcgtgctgccctgctccgacacctccgtctactggaactacacctggtacccgtcccccgcggacggcgacgccgaggagagcgtggccaagatgcggagccacgtggtcgccaagctgcggggcgccaaggtcccggccgaggcgctggaggtggtggagcggagcgagatgagcgacgtggcgtcgtcgccgctgcggttccggtccccgctggcgctggtccgcggcagcatcagccgcggcggcgtgtgcgtggcgggcgacgcgctgcaccccatgacgccggagctcgggcagggcgggtgcgcggcgctcgaggacggcgtcgtcctggcccggtgcctgggcaaggccttcgccctgctcggccaggagcgggatgaggggcgggtcgtcacggcggcgctggaggagtacgcggcggcgaggcggtggcgcagcatccagctcatcaccgccgcctacgtcgtcggcttcatccagcagagcaacaacgccgtggtcaggttcgtcagggacaggttcctgtctcggctgctgtccaagacgctggtcgccatggcggactacgactgtggggcgctatgatctgccggctgccgcccctggactggtctgcaagcaatctacgcagcacactcgttctagaaaaactaacgtaataaatcgctggtgtcaagtcaacggttgacctctgaccgaatgaaaggagttcttcatcc

SEQ ID NO: 84150 - DNA, 162 bp, Zea mays
  unsure (1)..(162): unsure at all n locations
  Clone ID: MRT4577_176757C.1
ggaaggaangggcgcgccgacccacgcctccgggccataagaccataaccgaaaggcactccagagcgcgtcgaaaccaacacgacgccaagggggattggtctggtgccgtgcctctctctgtcagatgccagagcctccagcttgcaacataccctgccg

SEQ ID NO: 84151 - DNA, 728 bp, Zea mays
  Clone ID: MRT4577_176758C.1
aattccaaatcctcgccgccgcccccctcccaccacaccccaggtaaccctagttcccaaatccttcttggatccagccagccatggcgggatctttgatgatgtccggctccttcgacccccctgccgccgatcccgccggcgccaacccctcccgctaccccttctgggttctcctcgacagcacagcctacttcgccaaccgcgacaacgccaccaccgtgaagggcacgacgagcgcgggccacgaattcaaggtgaccttctgcctcgctgacccgcctgccgtctcttacttctgcgtccactttaccggagtcagcatacaagagctttgcaccacggagccccgcgtcgtctcctccacctattacctcgccctcctctgcttccccatcagaaccgccctcgagtactttgtctacaaggccttctccggcggcaagagcatcatccaaagggtccctccttctccagcatacaagcaccagtggctctcggcagtcgtgccacgcgagggcgacaatttcttggtcgctgatctttccccgggtggggaccttgggcactacaacctgcatatcttctcatcggagacgaaagagtggagcacaaaacacctacagctgcaggcgccctctgatgtcctgtcacgggacctgccaagccaaaccgacaaggtgatctttctcggagcaaacactgtggaatgggtcgatctctggcgc

SEQ ID NO: 84152 - DNA, 133 bp, Zea mays
  Clone ID: MRT4577_176759C.1
ggacgtgtcatgcctcccacccacaaagagataggaggatagcgtctatgcccaatcctcccgcagcggcgacgccttcgcatcgctccttcctccgtcccatgctccgccgctgacacgttggcccgactta

SEQ ID NO: 84153 - DNA, 120 bp, Zea mays
  unsure (1)..(120): unsure at all n locations
  Clone ID: MRT4577_17675C.1
ccctcggagtcgaccagcgtccggtggaaatggccgctgccaccccttcgaacaacggctgctgccggcttcgggcttggccacgcgcgcgtttcgcgcgcaacatgnacgtgctgccgc

SEQ ID NO: 84154 - DNA, 351 bp, Zea mays
  Clone ID: MRT4577_176760C.1
cttttccttataagaagaacggtaaacctgctggcgttcaatatcaaaccggtgcaatagctgattttttcagtgaggatagcgatgaattaggtgatctggatctgaatcatcaggaatgtattgcagctacaaaggtgccagaccttaccttgatggttgcaaaatttgatggggttcatgggctaggctatcaggaaatatctgttgagaatgcaacacctgtgtgctataacatggtgaaacaaggtctcatgagtgaccctgtattctctctatggtataaccgacatgctgatgacagagatggtgatgaacttatgtatgacgcaatggattctaagcactaca

SEQ ID NO: 84155 - DNA, 683 bp, Zea mays
  Clone ID: MRT4577_176761C.1
tcgccttaggcatccatgtcgcgccgtacatggcagaaagacgggaaacgagcgcgacgacgggaagacgacgattgtacatgaaccgacagctctccccgtctccggtgtcaagggagtcgtcgttccagcaggagactctggtcggcgtggaagtccagacgatgaacgggcacctgtacccgaagccgctgacccaggtgcgtcccgagccgtcctcctggcagctctccgccgccaggaggccggccgaggaaccgcgcggagaggtgtggcgcttctcggggaggcccggcgaggacggggcctccgacgccgtggaagcagcgcgtgccgtcgcggtcgctcccccgagggagagcaggagaccggggacccgcggtggggacaggctcaggttcagcatcccgcggtgcgtcgaggcgatgagcgccatggcggagctgtcgcccgtggagaagtcgcttgcgcccgacgtgttcttggacgagagcaaccgcgagatcttcctctcgctgagcgtagatgttaggcccatctggctgaggcgtaagatgaagagccttgtctagctctagttttttttttaatttttaattgtacccagtgctaatttatggtgcatgttatattttcgagtcctgcatatcgttagcagtaataagttggttacgatttcagct

SEQ ID NO: 84156 - DNA, 412 bp, Zea mays
  Clone ID: MRT4577_176762C.1
ccgcccttttttttttttttttttttttttttttttttttttttttttttttttttttttttttttttttttttggaccctttacctttttagtttttttaaaaaggttaagggtttccggggaaaattttttttcaccagcggtttaaatttcaaaagcccaaacaaaaaaatcgtctttaaaaaattatttttaaaggaaaaaaacaggttcaaaaatccggcaaaacaaagggaaaaaaatttcttatttttttgggggcaacactttatgacttttttgcaaaatttttacaattagaaaacacctatttaaggtttttaaaaaccaaaaagatttttcattccaaaaattgcaaaatttattcccatagcattccattttaaaaaaaaattctttttcgaaattttt

SEQ ID NO: 84157 - DNA, 389 bp, Zea mays
  Clone ID: MRT4577_176763C.1
acgaagctggatccttagagtctacctttcgtttttcactacagcgaactcccggacagggggctttggaggaggtggggggtgcccatagccttcaagctggtcaccaagcccgcggcggcgtctcccgctgcttctcactgtatagatctctccctgtgtccttatgttactagccgcgttgccttcttaccatctcccatgaacaattggctcctcacggccaacaactccgcatcgcccatggctaaagaagagaggtttgatcgaatttaaaaattatcatttaatatcatcagacaagtttcgattttactagaatacaacattatatttgtacttttggagagagcacaattttgttacaacgctgacacatatgatatcaa

SEQ ID NO: 84158 - DNA, 566 bp, Zea mays
  unsure (1)..(566): unsure at all n locations
  Clone ID: MRT4577_176764C.1
agctgctcgnacggccgcccgtgcgatggcaatctacagatttgtcctttatagcggaccaacaggacgggtgcatgctgtaacatggttggttatcgtcatgtgttgatgcgctaaacatgaattggtgatctgtagactgatgtataatgctgagagagggcaccaccaaacatggggggactgtcaaactgtgtggggttatcaaaggcgagaccatgctctggatcataatggggggcatgatacagggtgtcatcattggggacatcatgggagtaaatctacaacaactgctgatactcaagatggcaattggggaaacaatacttggcttgatgattggcggcatcatactaggcatcaaaataggagacatcatcaatgcgtaccatcatggataaggtaatactcggtatgggtatgatcgacataggtggcatgatacccggcattatcattgacatctggcactgctgaaagcagccaggccaacagaatgctaaaaaactgatgtcgtgcacagctaacaagatggctacctactgcagcttgatgcagtacct

SEQ ID NO: 84159 - DNA, 317 bp, Zea mays
  Clone ID: MRT4577_176765C.1
ttttgctcacacttcaaaatgtgtattggcacgctaaggcattaagactgggctttattcatgccactcctggagtctacaccgtcgcacgaggagatcatctgggcaaataatacaacactccttgatctgtgataaacttcaggtgcacggacataccgataccggtgccggcgatgataaaggtgaccgatcctatgaacaaggtcatgtgacacccggttgcaaggtgggcagggatacaccaactattggatagtcaagaaggagagctccatgagcatgatcctgtataagggctgaaactacaaccactg

SEQ ID NO: 84160 - DNA, 1317 bp, Zea mays
  Clone ID: MRT4577_176766C.1
ttcttgggggaccctcgaggctccggccggggcagcgctctacctcagggccttgctccctgacgctggcggcggcgtctcctgcgccgacgaagcctgcgaccctctcctccaggattcgtcctgcgcctcttccacatcatcctccgatgaagagctctcgcctcggctgccgccgcataagggaggcctgccgtctctgtccgacatggtcgcgcttctcactggcagtctggccttgtcaggggcagcaaccatcactttcttctacagtctaggtgaacatgggcttcagactgcattgctgtactacttgaaggcacaatttggttacaacaaagatgagtttgctaatctacttctaattgtcggtgctgccgggatgctatcacagctcactgtaatgcctatcttggctccgattctgggtgaagagatgctgcttattgttgggcttctaggtggatgtactcatgttttcttgtatggcattgcatggtcatattgggtaccttattttgctgcggcatttgtaattttgagtgcttttgttcacccatctataagaaccaatgtatcaaaaaatgtcggatcaaatgagcagggaattgctcaaggatgtatatctgggattagttcttttgcaagcatattaggtcccctcatctttactcccttaaccgcgtggtttctttctgaaacagagcccttcaacttcaaaggtttcagtattttgtgtgctggcttctgcacccttattgcgtttgttatcagtttgaggatgcctggtgctcgatctagtacgtgcaagaagaccgcagttcagcatgagcaagcatgacagaatatagtatagtgccacctactcttttttattctgcccaagtgcatagacagaaaaggacaggatgggaaaaaagtgacttcgagcaaaaggaaaaggtatagtgacaggaagtgctggagaaacatgctcgatttcgtatgttcaaagagaaggggttatcctatgcaactagacatttttatccttcactggaatgttgagcattgcagaattgacaattgctatgccatcgagcaagttcagtcgtttgtaaatatgctcctagtaggaagtaactgaattattcgcaaaaaaaggaagtggctgaactattgtgccttttgcacgatgcttcgtttcaaggattagccatgaattaacgtttatgtactctaagaggaggtgatttgcatctcaactaaacatttgagtatgcagttaagttgatttgtccagttaaatatgtagaacatgttcctccttcataggtc

SEQ ID NO: 84161 - DNA, 246 bp, Zea mays
  Clone ID: MRT4577_176767C.1
tttctatccgcgtcgtagctcgaattcggtcgaggccgcgcaggaagtaccgtgagaagaagaaggcccacaccgcgtcgctggaggaggaggaggtacatctgagggcgctcaaccagcggctcgtgaagaagctccagagccacgcggcgctctaggcgcaggtggccagcttccgatgcctgcttcgtcaaattaaggggcaggatccagggggagattggcccgtttccgaaccaaaggccg

SEQ ID NO: 84162 - DNA, 722 bp, Zea mays
  unsure (1)..(722): unsure at all n locations
  Clone ID: MRT4577_176768C.1
gaccctccgggctggccgggcctgcgccgacgaagcctgcgaccctctcctccaggattcgtcctgcgcctcttccacatatcctccgatgaagagctctcgcctcggctgccgccgcataagagaggcctgccgtctctatccgacatggtcgcgcttctcactagcaggttatgaaaaaattctcttgtgtgtatagcagtttttgtgaccctgcactctacttctctagtctctagaggaccgtttactcttggagtttctgagtgctctactgatgttggtttactcctcgtgtagtctggccttgtcgggggcagcaaccatcactttcttctacagtctaggtgaacatgggcttcagactgcattgctgtactacttgaaggcacaatttggttacaacaaagatgagtttgctaatctacttctaattgtcggtgctgccgggatgctatcacagctcactgtaatgcctatcttggctccgattctgggtgaagagatgctgcttattgttgggcttctaggtggatgtactcatgttttcttgtatggcattgcatggtcatattgngtaccttattttgctgcggcatttgtaattttgagtgcttttgttcacccatctattagaaccaatgtatcaaaaaatgtcggatcaaatgagcagggaattgctcagggatgtatatctggggattaggttcttttgcaaagca

SEQ ID NO: 84163 - DNA, 292 bp, Zea mays
  Clone ID: MRT4577_176769C.1
gccatgtgctccctgacctgaaggaggaggatggcagcctcagcctggatggtgcagacagcactggcgtggtggccaagctctcaccagccaaccagcggaaatgtgagcgtgtactgctggccctattctgtcacgaaccctgccgcccctgcatcagtgtctaccgactccaccttctccctggaccagcccggtggcaccctggatctgaccctgatccgtgcccgcctccaggagaagttgtcacctaccctacagctccccacaggagtttgctcaggatgtgggc

SEQ ID NO: 84164 - DNA, 200 bp, Zea mays
  Clone ID: MRT4577_17676C.1
tatacactttcaattacattataataatagttcatgacgacaacactaaggtggagaacattttaacaattgatgagcataataaaccaaagactcactctaatcatatcgtaacattctacaaaccatatatttattactatcagaaaaaagataacatgtccctgtgtcacaaatacatgtattgaaattcaattcca

SEQ ID NO: 84165 - DNA, 224 bp, Zea mays
  Clone ID: MRT4577_176770C.1
acaagcttttttttttttttttctatttgtccagctaccgcaccaacccctgtgtagtattggttatactaccgaccttatactgattcatgatattggggaaatcccctctttccatccctgtttatctatataggaaataatcgcaggtatgacgacacacattatcatgtgtgggatgaccagataatgtctgcatgataataaaggttggtgtttaggga

SEQ ID NO: 84166 - DNA, 228 bp, Zea mays
  Clone ID: MRT4577_176771C.1
cagctgccgtgccggcacatgtgcctgtgcaaggcgtgcgagccccggacggacgcctgctcggtctgctccggcgccaagaacgcgtccatccacatcgcgcccagctgatgcccaccgcgccaagtcgtttgtttgcggggcctagcatggcgcgtcgattggattcaatttgctccgtagggttcgtcaagtaacctagatgagtagttaggagtttgatagatt

SEQ ID NO: 84167 - DNA, 394 bp, Zea mays
  Clone ID: MRT4577_176772C.1
acccacccgtccggcggctaccagaagtggggagccccgagagcggatatagtttttggttacgggcggtcgggcgcggcggtggggggggtcatgatctgtgggagcgagagcactaccgccagctggtggcccgagctggccacgctgtgcgcgctggcgcgcgacgccgtggagcagcttcggctgccgcgggccggcacgttggcgccagtgttgtcctcgaggcgcgggcgcgaggaccacctccatggccacggctagacggcctaggcgatgcacctgctgctctggggacccaagtgaagcggcgagaggtcaccgtcccgccgggcgttcccgctggagttggtcgtcttgccttgtctgttatccgtccagaacggactgcact

SEQ ID NO: 84168 - DNA, 512 bp, Zea mays
  Clone ID: MRT4577_176773C.1
atagggatgctatcatgcagcttgtggatatgggatgtatttacaatacaattgatgattttcacttcaagtcagctggcatccctgatttgcatccttcggtacagcaaacttattatcaacagagaatgtcaacatttcaggcaccggtgactagtggaccaagtggatccgagactgatttgttgaaacaggtcctggatatactccaggaacctgcgagcattgagaaacagcacggggttcattttgatgaaatagtcaagcggttcaaactgcctgagaggaagatcatggatgctctcatgtaccatctggatgcagggcatatttacacaactattgatgattatcacttcgtaccagtaatttggggatgaagctgtagcaaaatcaaacatattgttctgcatggcagcctgctgtacatacaaccagagtgtgtaataattataatcgcatgtttaagctaatatgtcctatacttaaatgttggtgcattggcatggttt

SEQ ID NO: 84169 - DNA, 228 bp, Zea mays
  Clone ID: MRT4577_176774C.1
acacttctcattcaatacaagagcaaaggcaaacactccaaagacacaatcaaagcattcaatccactccaagcttcgaaatcacctcaatttctttgagacttgagagaggataatttgtgttcttttgttgctcttattgcttggattgctttctccttcttattcttattcttctaagtgttttgtaaagctagcaagagatacctaagtgtgtggtgatccttg

SEQ ID NO: 84170 - DNA, 4513 bp, Zea mays
  Clone ID: MRT4577_176775C.1
cttatgtccaaccgaacggtgcccatgaacctcactcagaccggaggggaggatctaggctagttggtctggtgcccccggcactctgaacctggtgtaacctttacggtatcttcgagagacatcgttgagatggagcgctggagcaagtcgaggccgccgccgttgcggcccggcctcgtccgtatagttgcttacgctgatccacccacagaccatcctgatgggccgccgctgtcggtagcgggttgtatttttgatggtggagagggtcctcatgggagggatgcacttgaggaacaacaggatggtgcggctgctcaacggggtgttgaagcctggggttccgttgatgcgtgtgcagttctgggaaatggtggcgctttttgtgatgcggagtgttaaccatacgagtaaggggttgagtaagatggctgagagctggattatctgaatcttcgaactcattcactacattcgcactgtgcaattccatcatgagtatccatggattgtaagtgctagtgacgatcagacaatccggatcttgaacttgaagtcacgtacttgtgaggctgtgttgactgggcataaccatgaggacatgtgggaatattaccatgccgatggtgccgagtttggatctgaatcacttgataagactgttcgtgtctgggatatcggagctgtgagtaatatgacagtgtcaccggcagatcacatcctccgtctcacccagatgaacacagatctttttggaggcgtggactctggagtgaaacatgtcctcgaagagctgttggcaatgctcattctgctttatttgctgctcctacaccaggtattcctgtcagccaaatttggactcagagatcttctctggctggggagcaagcggctgcagggaactttgacacagcaatgaggttgcttagccgccagttgggtatcaagaactttgttccactaatgcccttgtttcttgatctgcacatgggcagtcatacatatttgcgtgggcttgctgccgctcctgttatatcagttgcagtagagaaaggttggaatgagtccgcaagtcctaatgtgaggggccctcctgcgcttgttttcagcttctcacggatggaagacagactcaaggctgcctacaaagccacaactgagggcaagttcccagaagcactgaggcagttccttagcatcttacataccattccagttatcgtggtggactcacggagagaagttgatgaggtgaaggagttaatcgagatagtgagggagtatgtccttggtctgaggatggaactcaagagaaaggaactgagggatgatgtgacccgtcaacaggagttggctgcttacttcacaaactgcaagcttcagagagttcatatgaggcttgtgctcgctagtgccatggctctttgcttcaagcagaaaaactatgcaactgcggcacactttgctaggatgcttcttgagaacagccctcaggaggcccaagcaaagaaggcccgacaggtgctgcaagcttgccatgacaaggacgattcccaccaactgaactatgacttcagaaatccattcgttgtttgtggcgctacgtatgttcctatctatcgtggccaaaaggatgtttcgtgcccatactgtggatcccgatttgttccttccatcgaaggacagctttgtaccatatgcgagcttgctgcggttggggcagatgcatcaggcctcctctgctctcctacacagtcgagataagcgatggtagttagaggtcccctatattctttctagcgtctcaagttccaagatttcatcatatatatgttaccagagagtttactgattgtaaggaataagtattatacatgctgttgagtttttcttttcgtttttttgctaacaacattttcttcgtatgtcgtaatggctaaaacaagctgattgcagttgatgcatcagagtacattttcaagctcgcccttctcagaaaacgctatgatcatgttatgagtatgattaagaactcccagctgtgtgggcaggctgtgatttcttatttacaacagaaaggtttcccagaagttgctctacactttgtgaaggatgagaagaccagatttaacctagctctcgagagtggaaacattcaaattgcagttgcttctgcaaaggagattgatgacaaggatcactggtacaagttgggaattgaagccctgaggcagggaaatgttggtatagtggaatatgcttaccaacgaacaaagaattttgagaggcttgcttttctgtatcttattaccggttacttggacaaggtgggcttcatgtgcaaaattgctggacagaacaacaatttgatgggacagttccacaatgcgttgtatcttggggatgccaagaagcgtgttgagatcttggagaatgctgggcagctgcctcttgcttatgttactgctgtcactcatgggctcacagaaattgctgagaggattgctgctgaattaggcgagaatgttccttctctgcctgaaggaaaacccaactcactactgatcccccctgcacctctcacagcctgtggtgattggccattgctgagggtaatgcgcggtatttttgaaggtggactggatgctactggaagggcggatcttgaggaagatgatgaagctgctggtgctgattggggtgatgaggacttggatattgttgatgcaagtgaggtggtggcaaatggtgatggttttgatgtagaagagggtgaaccaaatgaggaggatggtgaggaaggtggctgggacctggaagatctggaacttccgcctgaaactgagactccaaaatctgttggcaatgctcgctctgctttatttgttgctcctacaccaggtattcctgtcagccaaatttggactcaaaaatcttctctggctggggagcaagcggctgcagggaactttgatacagcaatgaggttgcttagccggcagttgggtatcaagaactttgttccactgaagcccttgtttcttgatctgcacatgggcagtcatacatatatgcgtgcgcttgctgctgctcctgttatatcagttgcagtagagaaaggttggaatgagtctgcaagtcctaatgtgaggggccctcctgcacttgttttcagcttctcacaaatggaagacagactcaaggctgcctacaaagccacaactgagggcaagttccccgaagcactgaggcagttccttagcatcttgcataccattccagttattgtggtggattcgcggagagaagttgatgaggtgaaggaattaatcgagatagtgagggagtatgttcttggtctgaggatggaactcaagagaaaggaattgagggatgatgtgacccgtcagcaggagttggctgcttacttcacgaactgcaagcttcagagagttcatatgaggcttgtgctcgcaagcgctatggctctttgcttcaagcagaaaaactatgcaactgcagcacactttgcaaggatgcttcttgagaatagccctcaggaggcccaagcaaagaaggctcgacaggtgctgcaagcctgccaggacaaggacgattctcaccaactgaactatgacttcagaaatccattcgttgtttgtggtgctacatatgttcctatctatcgtggccaaaaggacgtttcctgcccatactgtggatcccgatttgttccttccatcgaagggcagctttgtaccatatgtgagcttggtgcggttggggcagatgcttcaggtctcctctgctctcctacacaatcgagataagccatggtagttagagcccccctatattctttctagtgtcttaagttccaagacttaatcatatattttaccagggagtttagtgattgtaaggaataagtattatacatgtttttatcaagttttttttttcttttttcgtgttctgttaccataatttttgtttgcctagagggtgctgtcatcacctgccgtatggtttagacttctgatcaactttggaagctatgctggaaattgatgtatgagatgtctctttcactcttaatttttcttacctcctgctgtccgcatcttcagcagcaccatctcgcaatgatgtctggatgtctcgatctggaggggatgaaacaattcactgaacaccaaacttatcaacgccctccatggcattccaaattttcgtctggaggggattcatcttggtcttgtctcaattatcgcagctgcgttttcagctctgttttgtaaacatattgatgtacgaaagctgatgtgagtgctggttcactgaaaccgattttctgttatggcatgccattttaatctctacagtttcagtatattgcacagtagattgtactcaaacacttaaaatttgattgtaccgaggattgagaccagtgttttaacactggaaaattatgattgatacacaaccttttgtcactgaaaaa

SEQ ID NO: 84171 - DNA, 583 bp, Zea mays
  Clone ID: MRT4577_176776C.1
tttttttttttttttttttctatatttatgatttatttatcttcattaaacatgaataaactttaataatattcatattacaatggtacattcggcttgccggaaggtgaaagagcgagaatgactcgagcacgattgcaatccagccttaacagtacagggcactgttcatctatttataggcatgggacgtagcccggataagattacatccatgcccccaaacacttgtttacaagtaattaaaactaataaagtctatctagttcttttccttctttgctaggtctgggccaaagctattgagcttcggcttgaggagctgagccgaggctgaaggtagcttcgacaagctattgtatcattttgccgaaggtatttttgactttaggaccttcggtggagaagaagaccaccaacctgagaatagcagctcggacaatgttcaaggatgaacttgattcctcctttttttattctcatcctgagactgggcacgtactgcactgtccagttacacggcgtatcaaagaacctatcaagcagactaaaatacgcagactttcagggccttgcaaaatac

SEQ ID NO: 84172 - DNA, 148 bp, Zea mays
  Clone ID: MRT4577_176777C.1
aagatatccatccagttcgagctagatgataggatattggaggcattgaaggttccggtgtcagtgtgatccatttatatccaaaacaattatcagacaagacttcaagattttttggtcgctcaattcaaatgatgtgcattgaaga

SEQ ID NO: 84173 - DNA, 427 bp, Zea mays
  Clone ID: MRT4577_176778C.1
gacagacatagcaggttcttgtagtgaagaattctatgaatccagaaaagactgggcagagagaggacactctgtgctcgcatttgaaggtaagatatgattgatgagcatctcttatatttattttttattttctagtaagatgtctaggctcgtaaactcctttcttagaacatgggtgaaaacacaccttgtgagaaacttccataagtgaaagaagacgctgcgcttattgtggcatctgaatatttgatgacaaatgaagcattctcaccagagatccctactttgatggtaatgcttggcacacgcgatatattttcctatagtataagatagtgcggttagagtggacgcactaaccaggttaacccacaaacttaagctgatgggagaacacagccaatccacttatatacttcaacac

SEQ ID NO: 84174 - DNA, 377 bp, Zea mays
  Clone ID: MRT4577_176779C.1
tcgaggctcggccggggcagatgcctcggtgtttatgttcggagatgaagacgatgattatgaaagtgaatagtgcttctatgtgtgttccgttgtacagtttggttccctctagtccccctctcggcctctcccacccacccaaaaaaaaacacagcagctgagaaggagaagtcgaaagaagttatgcctgtttgattgctaaatatgccacatattggctaaaattgaagaactaacattagatagaaaaagttaggcaaagtgtgtcaagttagacagagaaccaaaagcgtcatcagtctgatattgtacccagatgaaacttgctgtaactcaaccagggctgaaccttgttgataactctcctacttccg

SEQ ID NO: 84175 - DNA, 622 bp, Zea mays
  Clone ID: MRT4577_17677C.1
attataaattcacttaatcagttccaattcaaaattacacggtataagaattgcaaatgcaatcgaatgtgagatggaagtacttatttaagattaatcaaaaacgccttaacacgatctacgcaatcctctcagaagtccagaaatccatcaatccatcaatcagttgatcacttatttccagaggataactggcggcggtggcaataccacagtgattctccttattgcgggccatcttaatataaccctggtcgccccacgtcgtgccccacgagttcttcaccagccagtagtcctgaccggtcgccgcgtccgttccgaaacccacggccagcacgccgtggtcgagctgctccgaactgcaattctcatcgaaatacacgcccttcgagtagaactggaacgactcctgcgacgcatcaatggccaccgagacgggcccgatcgtggccagagcggcggccagcttggcctcatcgccggtgggaatgtcgacgaatcccttgtcggtggcgccactgttcttcgccttgtagcggcacttgtcgtcgatgccctcgtacgggtaggtcttctccgtgtcaatgccgccattatccttgatgtactggaaggcctg

SEQ ID NO: 84176 - DNA, 309 bp, Zea mays
  unsure (1)..(309): unsure at all n locations
  Clone ID: MRT4577_176780C.1
acaaccaacaaggacccagtggttagcactcctaattgacaacaaacatagnccactgcattaccttcattactaaccttagatatatccatacatgccaattgctaccgaattcaaatttgaaatagaccttgcctatcggaaaggggataagcccataaccataccacatattgtatcgtgagaggacaagagatattacacacaccccaccctgacacgataaaaaaaagggtctgcttgttataatacatttaatacagctcattaatagttgatccaaaagcgttacacaaagtttaaaatatt

SEQ ID NO: 84177 - DNA, 463 bp, Zea mays
  unsure (1)..(463): unsure at all n locations
  Clone ID: MRT4577_176781C.1
cccacgcgtccggcattgtcacaggggatatcgacaataccgacaaggtgctcaatgaagaatttggttctctgaatttcagtgagaagggaaatgaagataccttcgtgtcaaaccaagggttagaatatcctatggaacactcagcaggagccagtagaaagaaatcaggaaacagtgagagattctctagcagtctgttagatggaaatactaaactggttagccatgaagtttgtactaaaacactgtactatcttagtcggtttgaccggatgaaagacgcttgggacaaagatgcaaatagcctaccaaggagggctgttggtacgatggaaatgataggaaaagcatctgcaattcgacatgccgaaattgctgagttggacaaanagattaatactctgaaggaagagattctggcgctagaggcagcttgagaaagggaaatctcctgagtgaa

SEQ ID NO: 84178 - DNA, 264 bp, Zea mays
  Clone ID: MRT4577_176782C.1
gaccaaggtccgggacgcgtggcttctgcatcataatcatttcttcagtaaagctggcctaatttgataacaggagttccataagtcaaattgattattgcatgaataagtgctgttgagttgctttcgaggagacaattgtaatagtggcctaatttgagctcatttctgaattgttttgtttgcacacattgggggaatatatgggtcacttttctttgtttagatttatttgggggttagaggaaatctgtttgatttcag

SEQ ID NO: 84179 - DNA, 313 bp, Zea mays
  Clone ID: MRT4577_176783C.1
ttttttttttttttttttttttttttttttttttttggtttttggtttttttttttttttttggggaaaccaaaatataccccctggaaccatatttcttcaaaaggcccaaaggaggtccagatcaacccaagggggggaacaaaacaaatattgaaagggcccacaaggaaaaaaaagtctaaaaaatggccaaacatgggaggacaaaaagtatctagaaaccattctgggacacaatttggtaaccatttaagggcgcccaaacccaaagggggcataaacaggccccaactcctacccttttgttttc

SEQ ID NO: 84180 - DNA, 525 bp, Zea mays
  unsure (1)..(525): unsure at all n locations
  Clone ID: MRT4577_176785C.1
gcgcacacagagacgtctctccgaggatatcagtactgcgcgaacccgcgagcgcgcctctccngctcgcccataccactacaactacaccgccctctatgccaacgtcaacttgttgctcctcatccagatcggcctcaccttctccgtagcgcgagcagagatgaccgcgttccggttgggcggcgtcgaatgatgctgttaactctacttgcgtgagttcgaggacttacactacatattcgcgtccgactccttcgagctgctccgacgcacagaaatctacttcctacgtaatgccgagcgcgatgtcaacgcgcggctattctgcgagttcctcatggcctctggcggccagctcaatgcatctctgaacggtgtcaacttccgcatctaatactacttcttatacctactgtagattctcacctgcaacagactgccatagaatgaggccgtgatatttatactcatgcatatattcttcgcgatcgggaatgacatcaaggacctcatgaagtgctg

SEQ ID NO: 84181 - DNA, 457 bp, Zea mays
  Clone ID: MRT4577_176786C.1
ggaaaaaaccatggacacgggaaaaccttcgctttaatgggaggggtttacagaacaccgtttttagataaaggcttacaagaggggtaattatgatgacccaacacgggttttttacctaaaatttgggtcaccaattcaaaattcaacacgatcggaatcctttgtttagtgcctaagcaagtaagcaagcaaaggctttttgcgcagtaccaattcctggctcattttaaaggaaagggccattatcactccttaaaaaaaactgggacagaaaataagggtttaaaaaaaaaaacccaccgggctcgcgttgttcccacgcgcgggtcccaagcccgccgccggtttcccttttttttttttcctttcctgccaccccgccgtcggagctggccgccggcatggccctcccgccggcaaggagggtggcggcaaggctctttttttcgcgttg

SEQ ID NO: 84182 - DNA, 173 bp, Zea mays
  Clone ID: MRT4577_176787C.1
gtatatttcttttttatcttgatccaacactatggggccattacaagaaccacaggctcaaggtaagcgaatgatgactacattgttctaggggtacaagctgggtaaatataaaacaagatttcccaacagtagtaggatatctaataccttattccacaccataaaatgga

SEQ ID NO: 84183 - DNA, 312 bp, Zea mays
  Clone ID: MRT4577_176788C.1
aatacacatgcagccaagaacaccttttggtgcatttcttgatcctgtggctgacaaggtttctttctctctccactgcccaccatttcctggcatgtttacaactaagaatatcagttctcaagatgagctactcacaggatctaatttaattgctctaattctttactgcagcttatggtagccgcgacattagttttactatgcaccaaacctttggaaacatcactgctcaatgatgggccatggcttctaacagtcccttccattgctatcattgggagagaagtagttactctgccaatctgcatt

SEQ ID NO: 84184 - DNA, 806 bp, Zea mays
  Clone ID: MRT4577_176789C.1
ggtacccccgggttcggccgggcgaaagtttcgaacaaagtcccaaatccccttcgccgtctccggcgagccccgcccctcatcgccgccgcgccaaagagacagtgagaggggggatggatcagtccatcagaaccgcatgcgagttcctctcgtcggtgctaaaccacgctgagtcctcgtcccgcgagctcgccgacgccgtctcccaacgccccgtccacctcgagatggcgaggacctcgttcctgcagaagctggagcacagggtggaggcgtcggccgccgacttgcagcacatcgagtccatcgccctcgacaccgtctccttcgaggagctcctcggccactgcggcgaggcgctcaaagtctacgcgcgccacgccgacgccctccagtcgcacctcgcttcctttggctacgagcccccggacgcacaacaccccgagatcgatgtggatgtggaagatggagatgtcgggaaggttggggaccctggagatagatgcctcagcgtgtcgcgttcagtgctcaggtcggatgcttgtctagccactctttcttctgaaggcgcacattatggtgagagcccaaagaagctttacaagaatgctgaaagtactgatgatggcgaaaagatcatgaatgaagctgaaattatgactcccctaaatgaaagaaatggtcaaggtaattcttttgaaggagtgataagggcatcaaagggagattatgagcaactccctccttatatgaagagtctagcatcatggggaagagttgcaggagggaatatccaaactaaa

SEQ ID NO: 84185 - DNA, 299 bp, Zea mays
  Clone ID: MRT4577_17678C.1
cccgagtctccagccaaccacatccagtccaccccatccccctcgaccccgacaaccccgagtcccgacccgatggcgcccaaggccgagaagaaaccagcggagaagaaaccggctagccgaagagtaagctgagaagacgaccgcaggcaagaagcccaagtccgagaagcgcctgcccggctcgaagttctccggcaaagaaggcggcgaaaagaaggggaagaagaatgccaataagaacgtggagacctacaaaatctagatcttcaaggtcctaaagcaggtgcaacccgaca

SEQ ID NO: 84186 - DNA, 1601 bp, Zea mays
  Clone ID: MRT4577_176790C.1
caagatccttcagtgacttttcaaatataatcggcagtcaatgacagcacagtgcagttccgatcaaaattatgtgtgtcagggtgtcagattcgatgcatctcttatatacagctcttgattagcataaacgtagcagaataaataggtcctcaagcctgtaggcattcttacaagtgcatcatttcgtaagactagtgcgtccaattggatccgtggcatgtgaagatgcaacatgtgctgatacaatcagttgagatgttcttccgaggcaatgtcaatcttgctttgcgagcgccatcaaaccaaagaggagcctcaaacacactttatttcatggttggaatgaagatcacatgaccagaactgctcagaaaaaaaaaacaatattttgagctgagatcgagtgctacatcaacatgatacaatattctagccagactcgacatacgaaaagaaaaaggaaaacttaagcatgacacgctgtagcagtattcaggctacacgttgttcttgcacagggtgtaaaaggtagagccatcaactgtctccatagttagctgattgagtcgcaacagcatcagcaaacaggctcttcctttgcgccccaatcctatctctgcaacacggtcctggttcaaagcaacactcccctgcaacttgtcaccacccaagtatgaatttagtttggatattccctcctgcaactcctcccatgatgctagactcttcatataaggagggagttgctcataatcctcctttgatgcccttatcactccttcaaaagaattaccttgaccatttctttcatttaggggagtcataatttcagcttcattcatgatcttttcgccatcatcagtactttcagcattcttgtaaagcttctttgggctctcaccataatgtgcgccttcagaagaaagagtggctagacaagcatctgaaaacccaagatccttcagtgactcttcaaatatcgcatcgctgtggctatcaaaccgccgcttacccgacctgagcactgaacgcgacacgctgaggcatctatctccagggtccccaaccttcccgacatctccatcttccacatccacatcgatctcggggtgttgtgcgtccgggggctcgtagccaaaggaagcgaggtgcgactggagggcgtcggcgtggcgcgcgtagactttgagcgcctcgccgcagtggccgaggagctcctcgaaggagacggtgtcgagggcgatggactcgatgtgctgcaagtcggcggccgacgcctccaccctgtgctccagcttctgcaggaacgaggtcctcgccatctcgaggtggacggggcgttgggagacggcgtcggcgagctcgcgggacgaggactcagcgtggtttagcaccgacgagaggaactcgcatgcggctctgatggactgatccatcccccctctcactgtctctttggcgcggcggcgatgaggggtggggctcgccggagacggcgaaggggatttgtggactttttgtgaggatctggattattggaatgtgcctttaatgatgcagggttatcggaatcccggccggcctcgaggtacccaatg

SEQ ID NO: 84187 - DNA, 621 bp, Zea mays
  Clone ID: MRT4577_176791C.1
gtctcgtggctttcggctttcgtcacccttctcgacggaggaggcgatgcggagcgccatcgagggtatgaacggcaaggagctcgacggccgcaacatcaccgtcaacgaggcccagtcccgcggcggccgtggaggcggcggcgggggcgggtacggcgggggccgtggaggcggtggcgggtacggccgccgtgatggaggtggtggtggctacggcggtggcggcggcggctacggcggtggccgtggaggctacggcggtggcggtggcggctatggcggtggcggcggcggctacggtggtggcagccgcggcggcggtggctacggcaactccgatgggaactggaggaactgagcggtggggccccgcgcggccaagttatcttgttcgctactgctaccatgttgtgttgttaccctagtccatagggtttatctatcgtcttgttgttcgtcgtcgtcgtgtccgtgtgtttgttgttgttgcccatctgtgtttttgatcgcaagttgtgttagtgctgtgttcgtcctcgtcttgagccccgtgcatcaatcaagcatgaactgggctccagggatcgatggatgttgttgtcaagttatcagtcaatc

SEQ ID NO: 84188 - DNA, 153 bp, Zea mays
  unsure (1)..(153): unsure at all n locations
  Clone ID: MRT4577_176792C.1
cagtggattcttcggctgcagtagtcggcacgagccgtcgcctcgccgcgcgcgcgtacgttcggttctcggccactgctcagctctcgctgcagcgatggccctggaggcccngtaacttatgtgcttgggatgaggncgaggaggggtggg

SEQ ID NO: 84189 - DNA, 757 bp, Zea mays
  Clone ID: MRT4577_176793C.1
gagggcccggccgggaaaaaaaaaaaaaaagtttcgaacaaagtcccaaatccccttcgccgtctccggcgagccccgcccctcatcgccgccgcgccaaagagacagtgagaggggggatggatcagtccatcagaaccgcatgcgagttcctctcgtcggtgctaaaccacgctgagtcctcgtcccgcgagctcgccgacgccgtctcccaacgccccgtccacctcgagatggcgaggacctcgttcctgcagaagctggagcacagggtggaggcgtcggccgccgacttgcagcacatcgagtccatcgccctcgacaccgtctccttcgaggagctcctcggccactgcggcgaggcgctcaaagtctacgcgcgccacgccgacgccctccagtcgcacctcgcttcctttggctacgagcccccggacgcacaacaccccgagatcgatgtggatgtggaagatggagatgtcgggaaggttggggaccctggagatagatgcctcagcgtgtcgcgttcagtgctcaggtcgggtaagcggcggtttgatagccacagcgatgcgatgtatcctctttggtttgattttgttcggaaagcaagattggcattgcctcggtagaacatctcaactgattgtatcagcagatgttgcatcttcagatgccatggatccaattggaggcactagtattaggaaatgatgcacttgtaagaatgcctacaggtttgaggaccctattattc

SEQ ID NO: 84190 - DNA, 473 bp, Zea mays
  unsure (1)..(473): unsure at all n locations
  Clone ID: MRT4577_176794C.1
gggttaacccttccttaacataagaggggcttttttttataccccctggcggacagaacttaagaaaagagtcccgaacagggccattttttggaaaaaccaggggggagatttaacacagcagcaaatagtaggggccctggatttttaaaagcacccaggtagggagtaaatgggaatgttgttgagaggcacccaattttttttgttttggtgccaaccagccccagttgacagcctaaaatttatggggggggggttgggggaggcaatcatcaataggggaacatgggcggggccccaatgggcatgggggcacccgggtagggcatttgccagggacccaacagggggtcgtccgccggaatttcctcctggatgtccatggggaccccgttaaactcctcgacgggggggagcaccttttttgacggagcggagggnggtccccaagcttgggggggcggccccgg

SEQ ID NO: 84191 - DNA, 594 bp, Zea mays
  Clone ID: MRT4577_176795C.1
gaaaatctatatgcatctcccaggtgaattgcagggagatgagcggtgcctcaaacacactttatttcatggttggaatgaagatcacatgaccagaactgctcagaaaaaaaaacaatattttgagctgagatcgagtgctacatcaacatgatacaatattctagccagactcgacatacgaaaagaaaaaggaaaacttaagcatgacacgctgtagcagtatcaggctacacgttgttcttgcacagggtgtaaaaggtagagccatcaactgtctccatagttagctgattgagtcgcaacagcatcagcaaacaggctcttcctttgcgccctacaagggatgaaagcggaaaataaaaatgttatatctaccacaagagcagtgtgccagtggaacagcaatcgaacaaaacgattttgttcagcacgatatatatagcaagtgcatgtacccaatcctatctctgcaacacggtcctggttcaaagcaacactcccctgcaacttgtcaccgcccaagtatgaatttagtttggatattccctcctgcaactcctgatgcaacagaaaaaggtacaaaaagaaaag

SEQ ID NO: 84192 - DNA, 517 bp, Zea mays
  Clone ID: MRT4577_176796C.1
gtagccctcaattcctgaggtatgaagctacgtatatccttcggtgaatcaaacctgacgtttgttctaagttgtgcctaatagaaaaataatgcataccaagcctgcagtatgattctgtacctaaagaaaaaaatgcataccagcctgacgtctgttgttcaccttatgtgaatcaaactaaatgtattatgttcaatggttcttaattgtaggaattgtaagtcaccggtttgggcttcaaaggaatgatgtgctacttcagtcagatcttttgcaagtcttaattaatctttccatttagcgccatacaattgctttatattattaaacactgataaatgtgagtttaaaactatgtacaaagaaatgtttacggagttgccctatatgctttaactagctgagactgctgcatttactcttcatttatggcaggtacttaaatatcagtaaaacaaatgttcatgtcacatttggttaatggtgtaccatgcttatactaccgctatggtca

SEQ ID NO: 84193 - DNA, 552 bp, Zea mays
  Clone ID: MRT4577_176797C.1
tggacgcctgcggtaccggtccggaattcccgggtcgacccacgcgtccgcttctctgttatatttctttgaggtccgccaatcgtgcctttctacctgtcaagcttcctgagaaattggatgttgaaacagttatgagtattgattgtttgaaacagaaaattcctccttcattcttttataaagacacatatgtgggtcccaatgaagttttaaagaatggaatgtattgtagcctttatgaagttgtagaaaagacaagaattggaagtaatatggaatgtttactgcaaaaactggagaaagaaaaacttgttcttgttaaacctttaggagaccgaggatacctttttcttctttctcctttccagatggttgctccatatgaacatcagactgtcgagtgacgagtcctacatgctttattggtgttgcaagagcctagatgcctaattatcacacacgagggtataatgaatacaacaccactggggaagcctgagaacttagcagatatattaaaaataactcagttgttacagttctctctga

SEQ ID NO: 84194 - DNA, 657 bp, Zea mays
  Clone ID: MRT4577_176798C.1
cccacgcgtccggttgatttcagcaatgataattccattatctggacatctggtacttgtctttgatgtgcaatctgacttccattagcatctagataagatccaatgtttcccgttaatggctaccaattgatttaacttatacggttggtgactttggtatgcagattaagaagttcagggatgcacttgcaaagcacaaagcagataaatgtagccttggcccaacttggggactagaatcagaactgttggccctggctgcaaacaaggatgtccaaggagacactactggtttcaagcatggaagacttcgcggaggtcaggaccgctgacaagccaaggcttctgacatcactgaagctataggcaatatagggatctgatgacatgcgagagatgaaatgtggtgatcgccacttcctttattctcgtgcagttcttcactattctttgtgtgtatagtttgtttgttcctcttcatagtcgtggagtgtaagcttccagattttttacttgtgaagtctgcccacactggctgctagaaatgaaaaaatgtgttagcagtagcagcaacaagcgttgtgggcgtttgatcttctagaagtcgtgtggtggttgtatgaatctatctaccccggtaatgttgcatttcat

SEQ ID NO: 84195 - DNA, 1628 bp, Zea mays
  Clone ID: MRT4577_176799C.1
ccggccggcttcaaataagacacggaagaagcaagcagctcagctacatcccaccatcagtccttcccagtacaagcagctgcgattgctgctggtgggcgccttgccacagcctcaaccgccgcaaatttcttaaggagggcagccgccctgaatgctgtgcacataagatctctaggagcaacatctttgaaaccttccgcaagctttaaggcatcgattgtggttgagcatggaacacaacctgggggctcccagcacctagaacctctaaatgctagtgcagttcatgatgtttcaggagttgctgcagttaatcaatcagggccacttgctggggcatgttcagagactaagaaggcattgagtaccgcactagcacctgtcccatgcgacagcgaggaaaaggaggatgactcggaattttgtgtgattacgatagatgatctgttccctgaagatgcaaagcagccagaaactgtggataccaaggcaaagcaaccacaaaccacgggtctgaaggcaaatcagccagaaaacgcagatcccaaggtaatgcaacaagaaaccatggatcccaaatcaaagcagtcagatacagtagaggttgagatagttgatccgaaagataaagacatgctagagtttgatcaatatgttgcttctcaaggagggcacttaaacacggatgatctgaataaaagcaagtgtaccaacagtgtttcccaagcccaaggtcttgttggcagccagcaaaaactgattcctgcggatgggaaaggtagccctgtaactgtggttgggaaaggcaagcctgtaactgctggagtggcagcaactgggaggaagactaaattccctgtctcacatttggcagcagggaccccacgtggcattgttgacacagtcaacgccaacgccccaaataaaacgctagtaaggagggcagccatccctgcccctgtccctgctggttgccaagttaggaaggatgccatgaactcaaaaggtaaccaaatgacccctggcaatgccggttctggagtaccagccagcagtcagactagcgtggctgcacaagctgccagcaaagcaaatctaccatccagcagcagccaggccaagcccaataacatggtggtgaatggtggtaacaggctagtggttaatccaccgtccagcagccaagctagtgcggccgtgaacgacgctaacagggctgcgacaccacagtccagcaaccctgtcaacggtgccaacaacagagaggttaatccaccacccagcagccaggctagcacagccgtgaatggtgctgctaacaaggggaatgtgccagcagcagccaggcccccttaatacagtaaattttgtaatgattcccgtaggacttgtgtgcgtggaagaaatgtgtatagggcattaggcagaggtcatgtcattcttttcgccttgcatttgcagtttgcacccgtgaactggagaccactaggttggaatggttttttggctgctatctcctgctggccagttcccttgtgatgtaaatttttgatgcttgtgtttgtttacttgcgcccgagatgatggtgccaactttgtgccaaaaaaaaaaaagcggccgcatc

SEQ ID NO: 84196 - DNA, 153 bp, Zea mays
  Clone ID: MRT4577_17679C.1
ggtcccgtcgcccacctccgctctcagaaaataaatgcctctctctgctctgcgcctcgctccggcaaggaggggacgcctccctgcgactgccctctacagtgacctggcgccttgggcgtcaagggagccacgacaacgacaacctacaac

SEQ ID NO: 84197 - DNA, 954 bp, Zea mays
  unsure (1)..(954): unsure at all n locations
  Clone ID: MRT4577_1767C.1
gggtaccctcggagcctgccgggnaaaaaaatagcccatgtgcacggcacacatcatcctagcaaacgtccttatccggctacaactttcgcgacgtctgcgacggaataaaactgagctcgccccctcttgccttccctcctccgcctgacctctgctgtccgcctcaacggtccaaccctccggttcgacgtaggcgccggcggcggcgcgccgagatgaaggtctccgtgaagacgctcaagggatctagcttccatatcgaagtggagcccaccgacaaggttgccgctgtgaaaaaggttatagagaatatgcaagagcaggcttcctatcctgctgaccaacaagtccttatacaccaggggaaggtgctcagcgacgacacaacattagaggaaaatcaagtagttgagaataattttcttgttataatgctcagacagaacaagggatcatcaagtgcagcaccagctaaggtaaccgcgaatcaggcaccctctactcagacagtgcctgctactccacctcaaacgtcagcagccccagatgcaccggcacctattgtacctgtcagtgcaccggctgcaactgctacagcctcagcagctcctgctgttgctgtctccactgaggcggatagttatggtcaggctacctcaaacctagttgctggcagcaacttggaaggaacaattaaatccattcttgaaatgggtggcgggacatgggatagagacactgtactacgtgctctgcgggctgcgtacaacaatccagagcgtgctgttgagtacttatattctgggattcctgaacaaatggaggttcctgcaccgcctccgagttcccaaccagtcgaccctgttcaggcggtacaaccagctcaagctggaccaaatgctaancctctcganctcttttccaatctcttccgaatgattcgctaatgcc

SEQ ID NO: 84198 - DNA, 674 bp, Zea mays
  unsure (1)..(674): unsure at all n locations
  Clone ID: MRT4577_176800C.1
agggcgaatgggatcctccgaggncggcgggacacactcttgtagcgagagcaagggacgtaagaagtcgtctaattcttcggatcgaattagactacttcttcggccctctcttccttattactctagcttgtaatcggcaggatctaatgcaacactttttgccttcatgtccgtcttattaagcccgttcactgttcttgtgcttccagcttatcaaccttgcttaccgctaccagccgcggcgatccgcatgtctgtctacgcgttgtcgatgaccctgctgcccgacgatggacttcatctctagcctggaccccatatccgaggatctcctacttctcaccgttggatatgaccagtccagacctacccctgctgcctctccatgatcctgcactccaccgacacgaccttctgcatcaccatcaaccagacctgcgcactgtagctccccggcgtctgcaaggtccaggcgccgacactcagccagagcacaggcgtccctgcgtcacctgtgccgacgcctcccgactaactagcagtcacagccaagtaagaatccgacacagctgcagatgccccttcacaactgtcaccttcaggatcacaaactccaagaatgcaccgagcttactgcttctcatcagcttatttcttgatgccttctatta

SEQ ID NO: 84199 - DNA, 250 bp, Zea mays
  Clone ID: MRT4577_176801C.1
cagcccaggccattcatataactatcggtgtttactggaacaagttcaacgaatcatgccaagcacgtttgacaaaacatttgccgaaccaggtggttcgacatatagcttgttcgtacattggtgttacaacatacaaagaggggagtggtattatttgattaatgaaccgatccatgttaatatgcctcatgatatcttgagatttgaagggtccatttcttgagacttggcaacgtttaggatactt

SEQ ID NO: 84200 - DNA, 644 bp, Zea mays
  Clone ID: MRT4577_176802C.1
tccacgcgtccggcatctattgaagaactggtaaccctacgtaggaatgtccaattcaatctaacacaccgttctgtatattgttcattaggagtcaacttttgaagttttatttaggttcgaaatgtttttgattcgtcaattacactaattaaattttttcaacgttaaatgtttttgtgatattacttaattgtatgtgcatttaaaacgtaatcagcttcatgcattcctacaactggtttaccacaatataatgactatagcaaatatgatcaatggtaacattctttatgtaccctgatatttttactattttttatttttaacttgtttgaaatcattttaaatactcaggggaagtggggcatgaatttgtgtgatgtaggcaattatttagctttgaataatctgctcttccaccattccaaagtcgcattggatatatgttatacaaattatagtgggtgttgttcttgtggggtagatttttggatgttacatcttagaaactatcttagtagtacattggttcagaagtgacaatttcaatattttaattctatttgtaatattgtaaatccaatcatctttaaattggcaatgaaactttcaatgtattcaaatgaactttttaatttgac

SEQ ID NO: 84201 - DNA, 962 bp, Zea mays
  unsure (1)..(962): unsure at all n locations
  Clone ID: MRT4577_176803C.1
nagggccttttttttttttttttttttgaaggttaagaatagcaagagttcattgaccaaagcaagtgtgtcatggtatttctttgtatctatacacgataaattcaccattaatttatgttaaaagtctgacatattaaaattcttatctcagttagctagggtccatccttttcaaaactcatatgtccccatgttatatttgttaaatatgaaagtgttacgcttgttcatttcaaaattttagaaaaaaatatggatgggtaacagatgatagtgattttgctgagtaactagaggacttctactcttgtgtcagccacactagatgttcctcatggaggccctgtttgtttgagattaattacatattctagccaccagaagttgttgcaatctgtcaaacgtcaagctttttagcctatttctatgagaatcactttggcgaaaatcatctaaaatgaacgtgaacacataatcggtcgagtcatcgcgatatgagaagtttgtcacttcctagatcatgaaccccatggattctttcatctccatccacatgtagtccccacgatatgataatcagattatccccatagccagattttcaaaaaaaactcatcagaaaaggctgaaccaaacaggcctaaagtatgttcaacgaaaagctagttgtcttttatgctatcactaagattttattattagtgtaataaataatgtccctgaagtaataagacattttgatgggtactctctataatttatttctacttgtgtgtgattaatatccggtccaggggcgattctagtatgtggcagagggggcaatgttcccctgctcctcttcaaattttataggagttattaatattcggtccaggggcgattccagtaggtggcagaggggggcattatgctctagccctatcatgatcaattaatagggcatgggggttcgacac

SEQ ID NO: 84202 - DNA, 136 bp, Zea mays
  Clone ID: MRT4577_176804C.1
gcggccatacccctacattcctacctgtaactacacctgcgctccctctcagccgtttcacccacccaatccgaccgatggggccgttgctctacgccggggccggcgattccccggagaatccgcgcgattcggc

SEQ ID NO: 84203 - DNA, 378 bp, Zea mays
  Clone ID: MRT4577_176805C.1
aacagggggaacaaacaggggcttaattattaattcagggcgaacaaaggggctaagcccaggcgtttaattattattattacgaggattattattactggatgctagctagctgggactagtaagaaaactttggggttacttttggggggggggcgaccccgagcatttattggggacgaggtagaactaggaggagccatgggtacaagggggacgccgttgcctagaaagggagggggggccctgggtagaaggggagttgttggaagtactgtttgtagtagaggaggggggggttaattgggggggggttgtttgtgttgaatttggggggggtgtagatggacattgagggggggaagaaatttgggggga

SEQ ID NO: 84204 - DNA, 704 bp, Zea mays
  unsure (1)..(704): unsure at all n locations
  Clone ID: MRT4577_176806C.1
ggccgggccgggaacaagctagggtttgcctcccccaccctcctggcctcctcccgctttccctcatcctcgtgcgaacctcgcgagccaaggaccgctcgtcgtctcttgtcttgccgtcgccatgggtacggagcggaagcggaaggtgagtcttttcgacgtggtcgacgagacctccgtctccggcaagctgggccgcgccgcctccaacggcgcggccgccactgcggcggggggcaatccgtctgtcaaccggtggaacggccggccctacacggcacggtacttcgagatcctcgagaagcgccgcacactgcccgtgtggcagcagaaggaggagttcctccgccgcctccgcgacaaccagaccctcatcctcgtcggcgaaacgggaagcggaaagacaactcagattccacagtttgttcttgagactgaaggcttgggtaaccgttccatggttgcctgcactcagcctcggagggtcgcggcaatgtcagtctccaggcgtgtggcagaggagatggatgttactattgnggaagaagtgggttacagtattccgggtttgaagattgcagcagccacaaaactgttctcaaatatttgacagatggtatgcttctgagagaagcaatggcagacccacttttagagaagtacnnaggtgattggntcttgatgaggctcatgagaggact

SEQ ID NO: 84205 - DNA, 1190 bp, Zea mays
  Clone ID: MRT4577_176807C.1
ctcgaggccggccggggaaacctcaccaaaacacgcccagtttcctctccggcatcacctatccaaatcagaaacatcgggggaaaaagcgacgagtagaagaccgcttcaccttcccaattggaaccctgccagtcgctgacttgtgggcttcgcttagagcaagcaagcgtccgagcagcagccggttcctttcagaacgcgctcggaaatgttagctgattaggtaaccaagcttcaccaagaaccgccgttttcgtatatatccccggcctttttggcaagcatggatgccttggctgcctgcacagtgccgcacagagagcaagcatagcatggccatggcccaagctcgcgtcgttgctctggctctgtgcgccctgctccttgtctccggcgtggcccggagagccgaggctgtctcgtacaacgtcggcaacagcgcggggtgggatctcagcgccgacttgccgtcgtgggccgacggcaaaaccttcaacgtcggcgacgttctagtgttccagtactccagctaccacaccctggacgaagtcgaccaggccgggttcaacaactgcagcgccgccaacgcgctcctgtcgcggagcgacggcaacacgacggtgccgctgacggcgcccggcgaccggtacttcatctgcggcagccagctgcactgcctgggcgggatgaagctgcacgtgctcgtcagccagccggcgggaggagctccggcgaaggccacgccgcagtccacgccgcagacgggctccggggccgcccttgggcccagcaccgacgatgcggggcttgcgggcataccctggctcgttctcggcgggtcccatcgagctacggtgggctccatgctgctgacgtggctcaacgctgctatggttatctcttgtgtgatcaaaggattgctggtccacaatgttttggttgatacaagcagtgcagcggatattatatttgttaaggccttcagacagatgcaagagcccgaagacaagattcatgatgccacacatcccctttgtggcttcggaggaaggcagattgtagcacttggcaagatcacaatgccagtaacctttggatttatcaacaacacaaggactaaacaagttgtgtttgatattgttgacatggaatacccttacaatgcaatcattggtcgtggtacttga

SEQ ID NO: 84206 - DNA, 565 bp, Zea mays
  Clone ID: MRT4577_176808C.1
accaggccgcttctgttgaccatgacccagaagctctgctgcaggtaatggtgagcgatgaggatggcgcgctggaggacgcgctcaaccgcccacctgatgtttctgccgccgcccctagcttcttcgaggggttctcgctccacgggatcctcgaggagagcatcctgccagagccacatcctatgctacttcacgggccccttacgcctcacctcccgcagcaatcacataacccacgacaccgtggtggccctcgtggacgagatcgggtacgacatctgcttgtccgactgccaccacctcaaggcactacgtcaacatgtccgtcaacttctttgacctctacgccgacgtgcacggcgacgccctccgcatcaccgtcagggtgatcggccacaaggtcgcctactacggcacgcacttcatcatgcacaacatcgtcaccaagctggtgatcgccgtaggggaggcactcgctcttcggctagatgaagatcaagagcaacatctgaattgacacatgtgtgcacacagggctgcacacgttgccgtgtgctctgct

SEQ ID NO: 84207 - DNA, 243 bp, Zea mays
  unsure (1)..(243): unsure at all n locations
  Clone ID: MRT4577_176809C.1
aagacttaaccccnnttatngtggaacctacatntttantaagccaaactgcaatgtctaattttataattaaagcaaacttcgtcgcgttaccccacaaggggagactgcaaaaagcaaaaaggttgtctgtgatccttcctacctacctgacaaggttaaaaaaattggaaaagtttttcgggcaagtgctatcatgagccaccccatcccaaatactgctgaatctcactcagcacagat

SEQ ID NO: 84208 - DNA, 180 bp, Zea mays
  unsure (1)..(180): unsure at all n locations
  Clone ID: MRT4577_17680C.1
ctatgagctggctggcatgcgccacagcatccgtgagcgcactgctgctcctgctgctgctggcaacaccactgctgctattggaccggggtttgccattggttccgntgctcttgtgctcctggcgctttttggtgcctttgttcgccgcgctggcgtgccggtcgtcgcacgtctctc

SEQ ID NO: 84209 - DNA, 128 bp, Zea mays
  Clone ID: MRT4577_176810C.1
gtcagtcgatgctcttctagacttgttttctttataatctgcagttattgtttcaaaaagtgttttgttgctgcaaaattgttacttcagtcggtcgttgcttgtgatatttaattagtcaaactcaa

SEQ ID NO: 84210 - DNA, 787 bp, Zea mays
  Clone ID: MRT4577_176811C.1
ccggccaggtgaaacggcaagcgtcggggttcctgcaggacaagtacaagcaggcgaggctggcgctgggcgacgtgacgccggcagagctgctggcccaggaggcaaccaacaacgagccctgcgtccccgacgccaagaccctggcgtgcatcgccgactcggccttcgacatggacgacttctggaggatcgccaaggtgctgcaccagaggctgagccgcgctgccgactggaaggagtggcgccccgtgtacaaggcgctggtggtcctcgagttcctgctcacccacggccccgaggacgtgccctccgagttcctagctgacatgcgcgccatgcacgacctccgcagcttcaactacgtcgacgacaagggcttcaactggggcacctgcatgcagcgccggaccgacagcgtcctgttgctgctcacagacgccgaccgtctcagagaggcgcggcgcagggccattagagtctcccacgaggtgcgcggtggcggcgttggcggcggcagcccgacgtcgtcgtcctccccgtcctcggcctcgtcctccgcctcctccaggacctcgcgcacctggtccttcggcgggtcctcccactactccgatggccctgccatgtgcctcacctgtgcctccgacgccgactaccgccacgacaagaaatgcgacgcgtacacagccgacgacgactgctgggcctcgtcgaatcacaagagcagcaggtggggcgggcaggttggacgaaagcgacggcgaggaccagcaccagggcctca

SEQ ID NO: 84211 - DNA, 324 bp, Zea mays
  Clone ID: MRT4577_176812C.1
aatgcaaaagcagctttgcaatagctggtgcttttcatcacttgagctggcttttagttttttgaaaaagaaaaaaaaacaggttaaaaagcccaaccaagggctagtttgggaaccatatttttctaagagattttcattttctaatggaaaattaggttatttttaattaaaaaaatagaaatcccttaagaaaatgaagctcccaaactaaccccaaaagggcttaaatacagagatgtaaggtgggcctacagcagactacatgtgagaatacacagcgatcacgcactgattgggggatacatacatctgctcatgtct

SEQ ID NO: 84212 - DNA, 209 bp, Zea mays
  Clone ID: MRT4577_176813C.1
aattaccgggccgttcacacgtgccgccagttcgaagaacgcatactctacaagtttttcaaacagttcgctatcctaagggccaagtgccttttgacttggaacacggcgcatgctgctcttgtcctatccattgagaaaccaataacccatgcactaagcatcttgctatcactatatattttcccattattatcacactgtaatat

SEQ ID NO: 84213 - DNA, 335 bp, Zea mays
  Clone ID: MRT4577_176814C.1
gccgaccgacgcgtccgatcttcataattcataaacacacctttcttttctcactcaccacaacctaccaacgatggcgtccaatttattagccctccttgctctacaagcccttataacgagcccatcatacgctattattatcacacagcgctcacttgcttctagcgccattatttcacatatcctcccaccagttacttaaataaccttctaacatccacccattcaagcctacatgctacaactagcacctgcctaccacgatttacaacaaccaattgcccaactgcaacaacatttcttgacccatctaaacctacaaaccatcggaa

SEQ ID NO: 84214 - DNA, 300 bp, Zea mays
  Clone ID: MRT4577_176816C.1
gccccttcgttcgggtgttgcaagtttttttttttttccccgaaagccagcgtgaccatctctgggtcaaaggcgatggtaatgtacattactccataggcgccattcccaccgagggaaggatccggcccggcgattgatcctttgcaaagggcaccaccttttacagggcaatacgaacacggggctctttaagcaaggggtgcaccgaaaaggctcttttctaggggagtcttctaggtaggccggctgcttctttatttcctttacagatacttggcgagaagccaaactatgact

SEQ ID NO: 84215 - DNA, 335 bp, Zea mays
  Clone ID: MRT4577_176817C.1
aaggtacaccgagaccaaccaaccgcacaagaaccacgctcggcccaaaacaggaagaagcaagctggaaaccaagagcaccagaggcggcgcaccccaacacaaaccagcacccccaccagaggccccaggcatagcactcgcacgagaagaaaacgcccccccagaagcactcagcacgtgcgcaccccaccctggcgccccccacgccgaccatgagcgcgaagtggcacgaccccaagaccgcccagccgcccgcgcaccagccccgagaaccagccgagaaggacacccccgagcccaccagaagacggccccctcggcggaggcgcccc

SEQ ID NO: 84216 - DNA, 249 bp, Zea mays
  Clone ID: MRT4577_176818C.1
caaacagccagaacatactgttccaatataactcaacgtcgacaaccatactatgctccgcgcggattttcagcagattgatttctctaacgattgatatacgtgcactgttacttcacatggcaacacccaagaataccttagaccgccctctgatgatactcttgcgccacagacaaaggaatgctacgaaagcggcaactatacttgcctgactgtccagtctgcgatggatgaggagcagatctg

SEQ ID NO: 84217 - DNA, 360 bp, Zea mays
  Clone ID: MRT4577_176819C.1
tgcttgtatctgactgtagagtatggaccactacataccgagacaaccatctaggctgtctaggttctgaagttatgattaggtactagagaagtcaaagtgactagctctatatgctccatgtggaaaagccaagaagtttcagggcgagtagggtgggttctaagaaggcgcagtcgttagctaaatgtttggttgggctttttgcactctttctaaatatttggaattaattttcccatgtttcccgagttggatttagctttctaaggtttctttcacacactcccaacaagaaggtgacatcttcaaatggtctgaatctactagacacaggatgggcacgcctttttttcatga

SEQ ID NO: 84218 - DNA, 354 bp, Zea mays
  Clone ID: MRT4577_17681C.1
aggtctcacaaaattatgcaagtagtgatcttgtttgaacaccacttatcaagtcaccaactatttgatctaatggattatcttttgcaaaggtaactagttggacaatttgacatggagtgcttgagcttggttgataacttggttggcacttgagttgggctagccacttgttgatttacatttggtggacttgaggttgatcatgacaaccacttgtgctgggatgatcttcatttttgcacacttgatgagggaaccaccctaattgagccaccttcttgatcttgttcccctctagggattatatctctaattgccatatatttcgttgcatcatccagattggcacat

SEQ ID NO: 84219 - DNA, 213 bp, Zea mays
  Clone ID: MRT4577_176820C.1
ttccacgcaaaagttgcgacgggatttttatgagtttcattataatctgggccgtacaaaaacaatagcagagggggagatttggatggaccccccgcacgcccccgaaaacgtcgacctaatataatgaacaatgggggggcggccggaataaatgaatcatcagtaacggggtaaaaatcatgtcttgtgggggaaaaaacaaaacagggg

SEQ ID NO: 84220 - DNA, 748 bp, Zea mays
  Clone ID: MRT4577_176821C.1
tgtttgacctccctcccgatgcacaccgcacgcgatacctcgccctctcctatcccagccgccgcgccgctgccatcgcagaacctggagctggagctggacttgtttcacctccaccccgatccaccctctccttccgtcttcctcgacctcccgcccacgcctccgcccacctacttggacgactcaacgcccatgctcccctacatctcgcgcttgctgacatcgctgctgctgccccacacccacagcttcttctatcgtccccctccgtagacaccattgacggacgcgcagctgatgttcgccgacaggctcagtctgatcgctgctgcaacggcagggacgcagacctagacatgcacacctccgccttcctcaagggcatgcaggaggccaccaggttcttgccattgccctggctctgaccactcgcccaacggcagggacgcagatgcagacatggccacctccgccttcctcaagggcatgcaggaggccaccaggttcttgccattgccaaccagcgacgctactctcctccacaactccaggggcccgaagaacaagcatgctgtagcccgcgcccacgagccggagtcggggcatgccaccaagctcatgctgctggcgcacacgacagacgacgccgacgcccgccagatgttccacgaactgatgacccacgagcgcgacgacatctgcatgaagggcgtgcagctgcacggcactgccagcacccagaaga

SEQ ID NO: 84221 - DNA, 358 bp, Zea mays
  Clone ID: MRT4577_176822C.1
ccggctttctctttttcttttttttctttttttttttttttcttttatttttcttttgctttgctatgggaatcgtcttctacattgtctttatggccctttgtgaccgatacatcatattttctcgacgggggggagggggcgagaaaaattctggggggggagagaaagccaagtcctgaatcaccccctagacctaactaaaggaaaaaagttccgcagcctagctctccagaaaagaccacgaaggaaggcgaaagaaaaaagccctccctggggcagggccctggggtatagcagaaaaaaataccccgcccacacgtgtcttgagccgcacgctacaccccccccaagaaaa

SEQ ID NO: 84222 - DNA, 438 bp, Zea mays
  unsure (1)..(438): unsure at all n locations
  Clone ID: MRT4577_176823C.1
agaggggcaacaggggctatatgtccattggaaccaaaaggggggcaatggacaccgacccccccccacacgttaaaaaggcaccacctgcacctgccgggcgggggggcaaacgagggtggtgagtctgatcttaaaaacggggacgtagggatctaacccataatctgggcaagggccccggggtttttgaacccaaacacaaagcccacccccaggatggggcccacgggccccaaagccaacgtgtcgggaagggggaacccggggggggcacccctttgcaggccggaatcgcgcccctccaatttaaacccccccgttgccttggggttcggggacggggccaacccaaaccgccccggaaacaaaaaaagggggtnggcgcaaccataaacaagggggggggggagcccatgtaatcccaagggatgccct

SEQ ID NO: 84223 - DNA, 329 bp, Zea mays
  Clone ID: MRT4577_176824C.1
cgtccgagaacgaattctggaactatcagtaaaacaacttttagtatatcccaggcaatggccccagttagcggatgtaagagtttttagagaacagggagaagacccccacaaaaaagaataagcatgatgagggccaagactccgactgttgccaaagtatgataactatccgcaacgactgaaaactggtgaatcagaacaagagcgaaaaaaggatgcttgctaaatgggggatagaacacaaccgacgctgatatatagaatacaatcatctatgcatgtgcggtctgaattgacaacatggactccatcatcttcctaaaaag

SEQ ID NO: 84224 - DNA, 385 bp, Zea mays
  unsure (1)..(385): unsure at all n locations
  Clone ID: MRT4577_176825C.1
acgaacgaaaaccatcattggaaaaggggggggcatacatgagcatgcagacattacatccttttttttttggaatttaaccccccattttttgggggaatggggaaaaagggttgttctcctcaccggggcgaggatctgaggcccctttatatccccaccggcacctgactacctggggggggggactccccaaaaggacccgtccgggacgggggggtacccggggcaagggggcgggcaagcgtttcgggttttctttttngggggaaaccgatgcgggacccccccccccccaaagcgcttggggggcccacccggggggccaagggaagaccaaaccgacacgggggctgacgggggccacggggccacccccccaaac

SEQ ID NO: 84225 - DNA, 553 bp, Zea mays
  Clone ID: MRT4577_176826C.1
atcatgcgacgctagagcagtcctgctgattattacagagcgaggtcgtggagactatcggcaaactcgatgaccactactacggacctggggtcacaggcgacggatcattctctgaggacttccctgcggctgaggaacactgggagccgatacatttctgggaggggcggagctgtttctacctacttcaagagacaggggctacctctagaccatctgccttaacttcatgttgcaaccagagcacgtcatgatggctgaataggaataagagtaccactgatttgttaaatgattcaataactaatacgaggcccaacatataaatcgatgacgacgacaacgcagactgtgactcgggcaacatcactttgacttctgacccatgctagaattcggcgacgtcaacgtattgtggtgggaaccttaaccttacaaaacctgcagcacgaacataatcctcctagcacgacagacttggaacacctacagagacaggtactgaagacagctgataatatgaatgttagattcctgtgcaactttctta

SEQ ID NO: 84226 - DNA, 243 bp, Zea mays
  Clone ID: MRT4577_176827C.1
tacagatcaacaaagaggctgggcgttttgaggatcgtcgaacagaacagcatgaagatggtcctagctgtctacgcgtgccaagctacaacatctgacaaatactttcataagattatgccctgcccctgcgcggtgctgcaaggcttgtacggcgctggcgccggcctgactaccatgatgggcgccggcgggctgtacccctacgcggagttcctgagagcagccgcaatgcaacccgct

SEQ ID NO: 84227 - DNA, 1941 bp, Zea mays
  Clone ID: MRT4577_176828C.1
actgcgcgcaagcaagcaagcaagcgaaacggcagggctgcctgccacacaagagacaagggaagaggagaagggtagacgagtagacgactgtgatgaggctagaagaagagcaggcaggagctataagtaccccgccccctcccgcccggccgggccacctccctcccttgctgcctcatccattccagagctgcgaagacagacagacagagagaaagagggatcgacggagcaaggcggggccgtgtccggtcacacacgagcgagccctctcggccgcgcgtttgtgaatggtgaacggcgagcggcgggcggacgcggagtgcacgcgggcgtcgctgctggggaggtatgagatcgggcggaccctcggcgagggcaacttcggcaaggtgaagtacgcgcgccacatcgccagcggcggccacttcgccatcaagatcctcgaccgcagcaagatcctctccctccgcatcgacgaccagatcaggagggagatcgggacgctcaagctgctcaagcacccgaatgtcgtccgcttgcacgaggttgctgccagtaaaacgaagatctacatggtgcttgagtttgtcaacggcggcgagctcttcgacaagatcgctatcaaggggaaactgtccgaacacgagggcaggaggctcttccagcagctaatcgacggcgtcagctattgccatgacagaggtgtctaccaccgagacctcaagccagagaatgtccttgttgatcggaagggcaccatcaagatctctgacttcggcctcagcgctctacctcaacatctcgggagtgacggacttctgcacacaacatgtggcagccccaactacatagctcctgaggttctgcaaaacagaggctatgacggctccttgtcagatctctggtcgtgtggggtgatcctctacgtgatgcttgttggctgccttcccttcgacgacaggaacctcgtcgttctttatcagaagattttcaagggagactgtcagatccccaagtggctttcgcctgccgcgcaggaccttctcaagaggatcctccaaccgaatccgatgaagaggatcaacgtcgcggggatcagggagcacgagtggttcaagaaggactacgtgcctgctgttccgcacgatgatgacgaagacgtccttcctagtccagctccctcgataaagccaatcgatgagccggcgcaagagaagtgttctcctatcaacgcttttcagttgatcgggatggcctcttcccttgacctttctggtttcttcgaggaagaggatgcagcgcaaagaaagattcggttcacttcgacgcacccacccaaggatctatttgacaagatcgagagcgttgtcatggagatgggattcaaagtccataggggggcaggcaagctcaaggtcttgaagaatagcaagtgttccaggaacccgtcatcattgttggtgtgcaccgaggtgtttgagctcggtccatcattatatgtcgtagagcttaggaaatcccacggagactctacgttgtatagacagctgtgcgaaaggctctccgatgagctaggtgcctgcaagacagaccagatcgcgaggactgaatcatcgagtgacgacctctcgagcgtcgatggcgaagcgttccctctatctgggttctgatcatattgctttccctgtgttgttttgggaacaggggatgaggaacatgctcgttcctgatgcaattctagattaggatcatgaatatagtgtacaaagccagcggcggcggcggtgcaaattagccaccgggttgaatataaataatatatatatatgatatgttgcatcttctaaaaaaaaaaaaaaaaaaaaaaaaaaaaaaaaaaaaaaaagccaaaaaaaaaaaaaaaaaaaaaaaaaaaaaaaaaaaaaaaaaaaaaaa

SEQ ID NO: 84228 - DNA, 373 bp, Zea mays
  unsure (1)..(373): unsure at all n locations
  Clone ID: MRT4577_176829C.1
tcgggnaggaagatgacgacgacgacgatgatgacgatcctgaagctaatggtgaaggaggaagcgatgatgatgatgatggtggagaggatgaagaggaggatgacgacgatgacgacggggacggtgacaatgacgaagatgatgaggaagaagaggaagaggaggatgacgatgacgtcccccaaccacctactaagaagaggaaatgatcgatgcctgttcgcccctgcgcagcagtatactgtttagtgggtagggggtttttagcttggtcgtggacgattcatagcctagtttggaaacaaaaagaaacatttaattgtgcatgtactattaaaccattcctttaatcatgtatctcagattgctt

SEQ ID NO: 84229 - DNA, 154 bp, Zea mays
  Clone ID: MRT4577_17682C.1
cctttctttttttttttttttttgttcaggcaggggggcaatatgctcaagaggagatccccccgtccctttctgctaaatgtcatcgcgacaaagtatggtgcagactgtaccgtggaacgccacgagatactgattcttgcgcaatgcaacg

SEQ ID NO: 84230 - DNA, 224 bp, Zea mays
  Clone ID: MRT4577_176830C.1
tctttctctcgtttctcccgacccgcctgcgggggcgttccaaccccgggtgggtagcctccttccactcccaataccagcccccgcccctccagcaccaccagcagctcgccttctgaccatgagacggttcggaggagacctgcatggcgacggcacgacgcctcggtccgcggcctctggtcaggccatgatggaacttaaggccaaccggtcgcccgcca

SEQ ID NO: 84231 - DNA, 728 bp, Zea mays
  Clone ID: MRT4577_176831C.1
cctcgaggccggccgggttgattaatacgtaatgcccactgggtgcataatgtcaaaacatgtaccacatcattattgccatgggcatttcttttcgtctcccaaagctgaggattgtttgtttccttctccacaaggattctgagcaaaaacaaaaatgcaactgatttcgagaacaaggatgatggagagtctgatgatgataatgatgaggagggagacgatgaggatgctgaaaaccaagaagatgatggtggtgatgagggatcagatgacaatgggaatgaggaggaagatgacgacgacgatgataacgatcctgcagccaacggtgaaggaggaagtgacgacgatgatgatggtggagaggatgaagaggaggatgatgacgacgatgatgatggggatggtgacaatgaggaagatgaggaggaagaagaggaagaggatgatgacgatgatgtcccccaaccacctactaagaagaggaaatgatagatggctgtgatttggttggctggttgcttacatgcaggaatgctccctgttcgcccctgcctagcagtctcctgtttagtgggtagggggttttagcttgatcgtggacaattcatagcctagcttggaaacaaaaagaaacatttaattgtgcatgtactattaaaccattcctttaatcatgtatctcagattgctacccaaaaaaaaaaaaaaaaaaaaaagggccc

SEQ ID NO: 84232 - DNA, 352 bp, Zea mays
  Clone ID: MRT4577_176832C.1
gccagcagtaccggttcggatttgcggggtcgtcccttgcgttcgcgcacgcgttagcgccagtgtgcgaccacgcgttcacgctttctcaaatccgagaacaggcgtgacttatctagcggacaggtacttcgttctctttatctattcaataagttgaaacgcggcgggacttgatccctgccagcacggagtctttctcttgctgttaagcctcaactgtggggctcgagctttctgggcatggtaatataaagaaggcgtggtccataccgttcgagtgggctggactgcataaaataggtgctggcatgcagacccagctgtatgagctgataggttagttaataga

SEQ ID NO: 84233 - DNA, 268 bp, Zea mays
  Clone ID: MRT4577_176833C.1
tcgtccgccagcaggaggaggtcctggcgtacatcgagaagaagaagaagaagcgagggatgcagaacccgttccgatggtgacgcgccagggggggaagggcgatggcgcggtgcatgatccagtgatcaggcggcccttggacccccaatatgtatgcatcctcgtgtagtcgtgagactgtgtcagtgttcttctccactcttatgggtggggctgtctttctctgcctctgtcttttcctgcgtgcccgggggggcgggcccct

SEQ ID NO: 84234 - DNA, 391 bp, Zea mays
  Clone ID: MRT4577_176834C.1
cgtcaacacatgagaagtgccaagactttgtatgcagctcgagatcaccatctccaacatggaagacaacctcaccatcagatgtcgacggtcttccttgcagctccctccacttgtccaacttcgacattggccacgatcctcaaatttgtcaacttcctcacgtcccctgcagcttgccctagctctccgacttcgacgttggctgtgatccccaagtctgtcaacttactcttataggcttcgactttccctgcacgcgctcgacgtcacccgttggctgtgatacaaaatagtcaattatacattaagatcaatctcatccaacaacttcttctcaatgcacaaaattgccaaaccatataatcaatcttgagtcattgttgatctc

SEQ ID NO: 84235 - DNA, 432 bp, Zea mays
  Clone ID: MRT4577_176835C.1
agatatccatggttggactctagatctccccgttgtgctgctcagccgctggtaggcaccgctcacttcctacagacgcactataaatttaaacggattcaataccacgcaatccatatcccataagggtgacgtggacaagttacaaggctgccgagggccgctggtctcccgagaaatagaagtgtcaccatgtattcctcccactaccatacacatccaaattgtcatcaccatcgtcgcggattgaactcagcagtgctcgtagctcgcgagcactcacgatgcccttctgctccatctccctcgctagtctgtcagcatcctcccgcttcccggccctggacaactcatccaccaatgctctccttgtgatgtcatccaccaccctcccggccctggccatctcccacatcacccgctctgcgtccg

SEQ ID NO: 84236 - DNA, 768 bp, Zea mays
  Clone ID: MRT4577_176836C.1
gaccgtcgtctcactttccacttgcatccctcgctctcaacgcgctctggcagatgcaatgtccccctcgaatcaaccccgattcaaccgcaccggagcgaaattccctccgacaagggtggacatgaacgctgcgctccgtgtcgccgctcgcaatccgccatgagaggaagccccatccgatgccgccgccaaggccgatggctacgtgagatccgaagagaccggaagaggacagaccctgccacagtgcacagaatgcgccacatccagcgaacgcaccccaacaaatctaacaggactcccagagtgatctgcgggtccatgcatcaatctcccaaggagctcaaggagaacaaccctaagaaccagtcggtcgctgccgaggacaaagatgttggcgacatgcgcaaatccctgagcgatatcaagaacgatcactatgtagtcaagggtaacaagatcaagctcaagtatagaaggccatcgctgcctaccacaagggcgagagcactgcaactaaaaagggtcctgccaaggaggaataggaggaacatgaagaggagtctgacaagtgcaagtcgtaggtcaatgacgaggatgatgaatacgttagtgaggaggatgaagatgatgacgagtgatgcacctcctcgagacaatggaccgtgcttcatccaacaatgtagcggctacacaaggccctcgggcgatcacaaaaaaggagcctatatccatgtactacaattattcagcttcactccacat

SEQ ID NO: 84237 - DNA, 265 bp, Zea mays
  unsure (1)..(265): unsure at all n locations
  Clone ID: MRT4577_176837C.1
gngacggtaagcgacgcggcgcgagcgaggagggccaaggcgaagaggggaagcaccgcaccaggaccctngnncgccgccgccgcctcngancnccgcgagggggncaggangcaanangncgaccagcacanncgcnaccnccngcacgccgnngggcaangnnagaacaacgcagggcggccagacagcggngaagagcccnncgncncnaagcnncnncagccaagnnacgaaggggccaagccngaagacccccaagaaa

SEQ ID NO: 84238 - DNA, 449 bp, Zea mays
  unsure (1)..(449): unsure at all n locations
  Clone ID: MRT4577_176838C.1
tggcttgngacctttgggctgatttatgtgcttgtttatgtgcttgagtccgtagatcccggcccagttagggtacccggaaccttcgctggcatacccatctacgaggcagcgataccacggcatagagtcttagaaacctcgtccggagtgtggtagcaccttatattagccgacgcgcggctcgcgggtcgcactcccgtggaaacggcgaattaaaagttatcacctttcggtgacctcgagactgatgaatcccccaagacacctaggacatcaggcatattgaacgagtagagccggttaggagctagccgcccgttcgatcctaagatagtcccttttaggcggtaagtctaggattcggtaatagcagctttaaactccgatttcgtcgngccggattcctctctcaaaacgtcctgacatgagttaaagtaaagaactat

SEQ ID NO: 84239 - DNA, 346 bp, Zea mays
  unsure (1)..(346): unsure at all n locations
  Clone ID: MRT4577_176839C.1
tggacctttgggctgatttatgtgcttggaaggacatcaggcatattgaacgagtagagccggttaggagctagccgcccgttcgatcctaagatagtcccttttaggcggtaagtctaggcaaggtaatagtacaagtaccctgtcgggtatacgcggtaagcgtaccgcgcacttctacttacagtccataactcgcgcccgctacacacacttgacgttcntaccataggattcggtaatagcagctttaaactccgatttcgtcgggccggattcctctctcaaaacgtcctgacatgagttaagtaaaagaactatagtgaggntagtatccgagtacgag

SEQ ID NO: 84240 - DNA, 807 bp, Zea mays
  unsure (1)..(807): unsure at all n locations
  Clone ID: MRT4577_17683C.1
gacgcctgcggttccggtccggaattcccgggtcgacccacgcgtccggtcgggccgtggctcggggtcttcgccgcccgttgtccgccgtggtgggtgcggctctgatgctgcggcaggctccggacgcccggagctctggaggaatttaagaagcttttattcatgtgcatgtcatagaagatgaattcatcctcttctactatgaatgaagaacctgatgctctatcagtagttaaccagctacgggatttagcagcagatccactaaatagaagagccatcgtccaggatcagggatgtttgcctggccttattttatttatggaccatccaaaccctcctgtcgttcactcagctttgcttgcgctacgctacttggctgaatgccgtgcgaatagagaaaagatgaagggagagctggggatgatgctgagcttgcagaatgtcatccagaagactacaactccaggagaaacaaaacttctggcctcagaaatctatgacatccttcaatcctccaatttggctgatggtgatagttttaatgaaatgaattcgcgtagaaggaaagctcagttttttttgggaactacaaacaaacgggccaaaacagtagttttgcacatagatggtctcgatgatacgtctcgacgaaatctatgtgaagaggccttgntaaaaattaaaggtgtcattagctttacttttcaaatggctgttcaagatgcgtggtggggatccgttcagacttgaaggcagaggctctggcgtcaggcatagcatcaaccaaggtcatgaaagctc

SEQ ID NO: 84241 - DNA, 147 bp, Zea mays
  Clone ID: MRT4577_176840C.1
ctcatgcgtgcacgaacgcaacaccagacaccgaccaatttgaagcggaggcgaccggactccttggtcggtcatgtcatgccggggctagggcagatgggggctcggttagggctgagcgaagcgtcatccggaggggatgggcga

SEQ ID NO: 84242 - DNA, 172 bp, Zea mays
  unsure (1)..(172): unsure at all n locations
  Clone ID: MRT4577_176841C.1
gggagggcggcaaatcccgatgaccgntgattttgaacatcnngcttgggcgatcaancttcttccccctctttcttataccangtcctcaccaagcgctcaaagtccttttagaggtcatgggtgggcccaacatattgggttgcccgcnnagtgtaaaatcccccgcgtt

SEQ ID NO: 84243 - DNA, 215 bp, Zea mays
  unsure (1)..(215): unsure at all n locations
  Clone ID: MRT4577_176842C.1
accgacgcgagttctgcctccgagcgtcggggagggcgccacgcgcccgaagacgaatagagggtaggagggaaagaggagcccaagaccgtggagaacttccgcgcgctgcgcacagccgataaaggactnntgaagcggggggggggacaacactaagaggaagttaaattagaccgagtgatggagcattatatgggccaatacacacaatt

SEQ ID NO: 84244 - DNA, 567 bp, Zea mays
  Clone ID: MRT4577_176843C.1
ccggccggggcctaacccatatatgagtaatgatcctgtgtcacaaccgacaatacctatatgctcaacagatgtcagaaggaccttgataccaccccactggttgacaaggacacagaggctcctaaataaaggtgcctctgcctgagtgcaccgctttcgctacggatgttacctaacaggctgctgttgttggaatctaaatacttcaaaacatcgagtcgatcggctgcttaacggacgacaatctgccgaacatctctaagcaaaatcctcgaagaactttcgacagggctggttgatgatcctgcatatcattagggacatcgctgagtctcggcttgctgatcactagatcgttaaatctgatttctggaaatctggaaccgaatggactgcgaatggattggcactcccacggtatgatctaaaaaattaacgtgtttgatgctccgtggcccagatactgcatatcaccggaataccaacactttcaagcaatttgatgaataatgatcaagacacgctcctactgaaaaaaataaaaaaaaaaccgcgggcctactc

SEQ ID NO: 84245 - DNA, 170 bp, Zea mays
  Clone ID: MRT4577_176844C.1
aaggcgcagcaacttatccgattcttaaacgaaggctttgtttgcaagaaaaatttcccgactgacaaacaaagggcatactttattaccataaatgttgttggggaccaatgttactacatgtttgtttgttacgaagtttttgagatttaagtttttatccaaaacaa

SEQ ID NO: 84246 - DNA, 845 bp, Zea mays
  Clone ID: MRT4577_176845C.1
gggctgatcgaccttgtgtttccgaacccgaatttaacgtagtactagcgactaggcgtagtaggccgccggtgaggtgcgcttgcattgggaggcggaagcggcaccttaggcctcctttggtaacccggtaacccggcgggatcccggcccaatcccgagataaaataacctcgggcccaattttccccgagcaaaataaaattgcgcttggcagcccattatcccggccgaatccacgggagaggaaggggctatctggcctagcctcacgaggtcgggctggaaaccctcgcctctcgctgtctcgcctctccaagacacccaggccgccgccccggcctacaggcaccttgccgcctccgtccgctgcccgtggcttccgtccacctccacctcactcacccactacatcgccgaccaagcgcagcaccgcgcgtggaccagacaccgcccgtggcttccgtggaccagacgccgcccgtggcttccgtggacgcagcaccgtgcgtggaccagccgctgctacatcgccgaccaggtgatacacaagggattttcatcaacaagtggtcgccagaagaactgaaacatcaagatggcgtttgcttttaggtcgtgtatgttgaaactatatgttttattattatgcactgagactatgtttgacattggtcgtgtacactgagactatgttttattatgagactatgttttattatgatgcactgagactatgtttgtgcacacatgttttattatgactatgtttttttatgagactatgttttattatgatgtactgagactatatttgtgggaaaaaaaaaaaaaaaaggccccta

SEQ ID NO: 84247 - DNA, 700 bp, Zea mays
  Clone ID: MRT4577_176846C.1
gactcctaagggcgattgggttcctcgaggccggccgggctcgcctctcttggtctcgcctctccaagacacccaggccgccgccttcgcctacaggcaccttgccgcctccgtccgctgcccgtggcttccgtccacctccacctcactcacccactacatcgccgaccaagcgcagcaccgcgcgtggaccagacaccgcccgtggcttccgtggaccagacgccgcccgtggcttccgtggacgcagcaccgtgcgtggaccagccgctgctacatcgccgaccagatgtgctgatccaattcagttttcagagtatgttgacaatctgaatttagttcaagcaataccttctctttattacagatgtttaaccaggtgatacacaagggattttcatcaacaagtggtcgccagaagaactgaaacatcaagatggcgtttgcttttaggtcgtgtatgttgaaactatatgttttattattatgcactgagactatgtttgacattggtcgtgtacactgagactatgttttattatgagactatgttttattatgatgcactgagactatgtttgtgcacacatgttttattatgactatgtttttttatgagactatgttttattatgatgtactgagactatatttgtgtacacatgggctatgttttattgtgagactatgtttgacattg

SEQ ID NO: 84248 - DNA, 212 bp, Zea mays
  unsure (1)..(212): unsure at all n locations
  Clone ID: MRT4577_176847C.1
gaacgaaagcgaggcagnggcagcaanncaaacaggggggncacaacaacnncnacaagccaancncgccnaaacnggccacagcgcgaaccggcncagggagggacagaccgaacaagagacnggacgaaaaggagcgaggggcgcaacaaaacgaaggaacngggcacaggaaggaaccncnanggccgcgcccggggccaacggagcac

SEQ ID NO: 84249 - DNA, 699 bp, Zea mays
  Clone ID: MRT4577_176848C.1
cctcgaggccggccgggatgccaccaccaccgccagcatggccgccaccacgggcacctcatcctcgccgccgcagctcccggtccacggcggcctcctgctcctgctccctctcctgaccattacctccgccgcgtcgtcggcgccgctgcccctcctcgcgctgctctccctgaagtcatccctgcacgacccggccggcgcgctgcgcgcttggacgtacgccgctgcggcgtccgcgggcgccacgcggtcgctggcgccgccgtggtgcgcgtggccgggcgtgtcctgcgacccggccacgggggacgtcgccgggctcgacctctcccgccgcaacctctccggcaccgtctccgccaccgcggccaggctgctggcccgcacgctgacgtcgctcaacctcagcgcgaacgcgttcgcgggggagttcccgccgtcggtgttcctgctccggcggctccagtcgctcgacgtcagccacaacttcttcaacggcacgttccccgacggcgtcgcggggctcggcggctcgctcgccgcgctcgacgcctacagcaactgcttcgtcggctcactgccgcgcggcctcggagagctccgccggctgcagcgcctcaacctcggcggcagcttcttcaacgggaacatcccgggcgagatcggccagctccgatcgctgaggttcctgcacct

SEQ ID NO: 84250 - DNA, 151 bp, Zea mays
  Clone ID: MRT4577_176849C.1
cctcttttttttgggggaattttaaaatgatatggggggtacggaccatgaactatcagggacacatgcaaaccaatgataaggtactactacaatccattgtcatgaacaccaaccctcaattcatcaaaatgccccctaggctactgaa

SEQ ID NO: 84251 - DNA, 473 bp, Zea mays
  Clone ID: MRT4577_17684C.1
gaatgggaagcagtcagtgtgttcgcaaataccacagggcacgtgggtaccacccgctagacaagcaatagatctgggagattaggctcttggagctcacactctcgtgatggctgatctaggagaacagactgggtatagcttttggcagagactagtgagaatgacacaatatatctagacccgtgtttgggcgactgagacggcagccgggcaggggcagcctgcgcctggggatctagcgctccctagaacgacttccggaccgggccctgcacacgcaccagctctcactgtcgggacatgtattacagctgcggcgaatcatggtcatcggtgtactcgtgcggaagctcgaaggcacccacactgctatgctgcttaccaacctgatgcacggaggggccctcctgcgaggcctacagagcggcgcacttcacagtatttgcctggcgctcactgccccttttgca

SEQ ID NO: 84252 - DNA, 397 bp, Zea mays
  Clone ID: MRT4577_176850C.1
cccacgtcgtccggcagcggcgcccccaggccaggaccccacccgctcagtctcctcagctgcccaaccttcttcccatagtgctcaccctgagctgtaattcccgagaagcgccgtctcccggttctatcgatggaccgagacgccgccctggtcgacgcgctcctgcgccctcttcttcgtcgccggggccacggtgcaagccccggacttgtcgcccaagcgcacttcagcgccagcgcaacccaggacagtcttgctcccgccgacgccagccagggcgcatatggcctacccgccctggcctcccgcgacggtgcctgtgcccgggccctcctccggactgccggcctctagcctggtcagtgcgagagactgggactgcacgatagtcccc

SEQ ID NO: 84253 - DNA, 289 bp, Zea mays
  Clone ID: MRT4577_176851C.1
cccagcgtccgcgccgggcgttcggggagcgcaggccgagaagcgagtgtgtagtcatgtcggcgtcggtagcgtcggttatctcgcggttcctagaggagtacttgagctccacgcctcagcgcctgaagctgcttgacgcgtaccctcctgtacatactgctgaccggggcgctgcagttcggttattgcctcctcgtggggaccttccccttcaactcttttctctcgggcttcattctcttgtgtggggagcttcatcctagcggtttgccctcagatacagatc

SEQ ID NO: 84254 - DNA, 719 bp, Zea mays
  Clone ID: MRT4577_176852C.1
cattgggtacctcgaggccggccgggatcgtgtcctttcttctctttcgcgtttcccgcgttcagctcagattccgttggctcgccgtactcggatttgttcctcggctcgctgcgcttccttgctccgcagtcctctcctcgaattctctcgcggcgggagaaatcggggcgtcaggatgaccgtgatcgacgtcctcacccgcaccgtactcgatctgccagaagtgcgacagggacgacgccacacaagctcaacggtgcgaacgtcgccgaggacgagccgttcgcccgcctctacgcgtccgacgacacgtagatcaaccaatgcgtctataaagcagaatgcggcgagatacgtataagaaccgtcccgtgatgtagatgctgaacgcccagatccgacgcaccaaggtcgaagctcctcgaggaggacctcccgaagttgtagaggctcatcgacttgaaggtgaaagggctgacagagagatagaaattgcgacccagcattgatctggatgccgctttacctgacataatacaatcattcccactagctagatctactgccacaaatgaaaatggaagctgaagagcctcatgatctcacactggatcatccataaagttcgactgtatctgctgatggaatctttgatgatgagtattttgaggcgacagaccaatctgatctcttccgtcgggaatatgagatgcgca

SEQ ID NO: 84255 - DNA, 693 bp, Zea mays
  Clone ID: MRT4577_176853C.1
cattgggtacctcgaggccggccgggaagatccctaccaagtacagcaccgaggaaggaaatagtggcgagcgagaggtggggggaagaagatggaaagccaggtacgccgctcacccaccgggccaccaaccggagatcctaaatgcgatctctctctctctctctgctctccctcccgccctacgtgtcgagggtcatcgaggacagatcgggtcagggaaggagagcttgatgagagcacatcatccgcaacgagtgagaaggacctcgcatgctgtcgctcgctgctccgagtggggacaggaatcccgcctgcatcaaatggaatgcgttacatcgacaatgtgcgcaggacaggagctggagaagagtctgaggaagatagcggcaccaggatgtcctacagatgagcaggatagccgtgaggtggataaggagcgcgataccgaaaaaggtcatctaggtgaagtggcgcgaccagacgtatcaaacgatctgcatatgcacccttgacaagaccctcaggaacgtgtgcggtctctgtctacatgaactggctatacgctattaaaggtatcgaactatatgagagaaaggactctggcgagaagaagggggactgtatgacatgaagtcacttgtctgccgatggtaggcataacctagccgctaatctatctgccagtccttt

SEQ ID NO: 84256 - DNA, 180 bp, Zea mays
  unsure (1)..(180): unsure at all n locations
  Clone ID: MRT4577_176854C.1
aggcggcggttcgaaagagtcaacgttatccggntctagccgagcggcgtctcctctctccagcggntccagccaatccgngaatcccgctccctcagntcgctgctcgnccgntctcctccgncctccgncatggcggacttnacctccgactccccgtcgacggcgatntccgactcg

SEQ ID NO: 84257 - DNA, 452 bp, Zea mays
  Clone ID: MRT4577_176855C.1
gggggataattgaagctggctctggcagacacgattgaggggtaagcgtgtggcggcaaattccacaaaatggtatgtggtgaagctgattgtatactacacggctgaggctgatgtccaaaatgtggacgataggagagctatacctgagcacgtttggaagatgagaaatggaaatattgtagcaggttgagcacatacagtgatactgtttgtgatgatgacgcggctattgcagggctagaagagccagaacatgttacttggggccaccatgtaccggggtggggaagtaggttccaaatagttgtaggcgtaggtcatacaaactatttggaatacgtgaaatgagagaaaattggatacattaaggcctttatcttaaaacagattaattcttgggttacagacatctatggacatgacgatataagactgtttgcaccatacta

SEQ ID NO: 84258 - DNA, 564 bp, Zea mays
  Clone ID: MRT4577_176856C.1
caaaagaaaatttttttttttaaaagttttatttgtatacccccagggggcctttgtgggggttgggaaccccccaggcaattttttttccggaacaaaccctaacccccttatgtttgggtccccccttaaaaatgggaaccccaaaactaaactctccctaacacaatttttttcaaacaattttttttgccctggaacccatgctgacaacaatcaaaaattttttgcaggggcagccaaaccctggaaaaaaaaatgggccccccctgctgaggatccaaaaaaaggacggggtccggcccatccctttaaaaaggggacccccgaaactggaacccctggaggatcatgctgggggccattttggcctcaaacagggaaaatttttggccgaagaaaatcctgggcccccacccaaagggaaaaaaccccggttggtggcccttggcccccttgaaaaaccccctggggaaacctttccggcctaaactggggcccgtccttgccccaaacattggggtcgggggggacaacaataacggggagctccagaaccccccc

SEQ ID NO: 84259 - DNA, 363 bp, Zea mays
  unsure (1)..(363): unsure at all n locations
  Clone ID: MRT4577_176857C.1
cacatttcatatttgactttatcataatataccatgagtttatcaactaatggataggatcncatgatgacaaaaatctatacactatataaacatggatagagtacttgtcactcctattgttacctgaatttgcatttgtgcattttgttaactggtaaactcagtactctttaaaaccttttttcttaacaaatataaaaacatggatcctaccttgtttacaaaatattataaatataccttttataattgactatacttcctgttattgacaaccaatgcaacatgtaataccatccctcaatttcctatttttcctgtaaggttacacttgatattgctccttctatttacttacaa

SEQ ID NO: 84260 - DNA, 360 bp, Zea mays
  Clone ID: MRT4577_176858C.1
gatcggcagcctgcaccaggcgctgaaagccggcaacccccaagccgaggacggtagcattggcagccgcaccggacgtccttcaccgtcacctgcatcaaggcctacctgtccgagttcatcgccacagtcctgttcgttttcgactacctgcattactccatcaccttcagacaactgaccaatggctgtacgctggacccttcctgactggtgactatctggagggcgcactctctggctttcttcttgggcatgtcactggtcactaacacatgcacgggacacctgaaccccggcgtgacattctggcttaccttgggccggcacattaccagactgaccagtctattgtactgg

SEQ ID NO: 84261 - DNA, 318 bp, Zea mays
  Clone ID: MRT4577_17685C.1
gcgattcaccaagagaagcatgctgtttggctggagtggatcgagagccacttgccttaggcgtagatcttgattcctgacttatgcatgaatcttgatttgtggccaaaaaaaaaaaaaaaaaaaaaaaaaaaaaaaaaaaaaaaaaaaaaaaaaaaaaaaaaaaaaaaaaaaaaaaaaaaaaaaaaatgtaaagggaggagggttgggaggataaagcttatgaaaggagctatggaaagtaaatatgtcgataatggtgaaaccataaatttagtctgacaacaccgaagattataactaataaactggtaaaac

SEQ ID NO: 84262 - DNA, 425 bp, Zea mays
  unsure (1)..(425): unsure at all n locations
  Clone ID: MRT4577_176860C.1
ccggccggggcctccctctccanatccaaatcgcgcagaagcagacgtccctgcacacggcggttttcagactgcgatccattccgagcttcgaggaatcgatggtcaagcttcggtgactaagagatcaaactcttcaagttctacgaggctgaagatcctgagcatctgtttggtgaaggttgcctttggtgcaatctatgctcaggtaaagaagaaggcgtcgaggcggatctccaggagttctaggacttcgacgagttcgaggattaggctagcgacctcccccagtcagctgcctgtggtgggtttatttacgttggctatgtttctattctgtgtactttgattatattatgtaaatgactctagtctttcatattattacttatctttattgnaaaaaaaaaaaaaaaaaagcggcc

SEQ ID NO: 84263 - DNA, 700 bp, Zea mays
  unsure (1)..(700): unsure at all n locations
  Clone ID: MRT4577_176861C.1
ccggccgggactcgcgcgcgcagcgcgaaccctagcgcacgctcgcccagccgccgcccctagcgcgcgctgcccagtcgccgctccctgcacgctcgccactgctgttcgtgccgattcgcagcaccgccggccgacgttgcgagcatgagattgcgatccgttttcgagcttcgaggaatcaaagatcaagcgtgggcaaccaagtgatccagttctttgagttccacgagattgaagacctgagcatcagtttggtgaaggttgcctttggtgcaatctatgctcaggtaaagaagaagcgtcgaggcggatctccaggagttccaggacttcgatgagttcgaggattaggctagcgaccttccccagtcagctgcctgtggtgggttaatttacgttggctacgtttctattctgtgtactttgattatattatgtaaatgactctagtctttcatattattacttactctttattgcaaaaaaaaaaaacgtgctatgatgagtcatttatgtaatcgccgtgtacgtgaatttctgatcctggcacgtacatggttcgcattcggtttaccttccaaaaccgggtgtgacatttaggaggggcattaagtttgacattgtcccccttttggaagccaatgccatccttgatgccagggcgtctcccactatagagcatgcttctagcanattt

SEQ ID NO: 84264 - DNA, 416 bp, Zea mays
  Clone ID: MRT4577_176862C.1
cggagctttaaattcgtcgaaccaatgggcgcggacgacatacagatcgaactggtggaggcatacacccaaccaattttataaggccatcaaacaaggaaaaagatctcctccatggcgacgcgaaggcctggagctgacgctgatctcgggcaaggacctcaaggacgtgaacctgatgtacaggatggaggtctacgccaaggtgttgctctgcggcgaccccccgtttggtcagggtttccaggccgaccgcactggctgacgtaaccctacctggaacgccacgcttcgctttgacctactaactattgacaccggttctctttaattactttttttttctttagggttttttcaaatactgttacttttacattgtaaaaggtacttttttcttaatttatttttttttt

SEQ ID NO: 84265 - DNA, 672 bp, Zea mays
  Clone ID: MRT4577_176863C.1
ccggccgggatgtcgcccactcttcccgcgtctcggccgttccaaggaggatcccaaaaaaaacctgctcgtccctttctttagcgcagggccgctcgcgcttggccgggctttcctctccccaaacggttccccctcccctccgtcctccaccggtaggccggtggccacggcgcccggcgcagcgatttggcgtagcacgacgaccaacccagcgcagccgttgccccatcttcgctggaccgaacccctcgacgctcgtccccgtcgaccacatccttccccgtcgcgtccatgtcgagattgcgatctatttccgagcttcgaggaatcgacagtcaagcttcggcgaccaagtgatcaagttcttcgagttctacgagattgaagaccatgagcatctgttttggtgaaggttgcctttggtgcaatctatgctctggtaaagaagaaggcgtcgaggcagatctccaggagttccaggacttcgatgagtttgaggattaggctagcgacctcccccaatcagctgcatgtggtgggtttatttatgttggctacgtttcgattctgtgtactttgatttatattatataaatgactcttgtctttaatattaatacttacactttattggcattcgaaaaattgaactatgatgagtcatttatg

SEQ ID NO: 84266 - DNA, 141 bp, Zea mays
  Clone ID: MRT4577_176864C.1
gctgatgttccaccgcttcaggctcaacacattcctgacggtcgaggcaatgctgaacgcgctctaaggcatggacggcaaggacctggaccgtctcatcatgatggtctacaaggctcaatcgcgcctatgactttttag

SEQ ID NO: 84267 - DNA, 686 bp, Zea mays
  Clone ID: MRT4577_176865C.1
ggacccccgagttcggccgggcaggaaccaacacgctcgatcgctctctccacccaccgcgcatgccatgcgccgtagctacgcatcgcgcccaccaggccgccccatctcctattcatcttctccaaaccgcctctccccacccatctcgcccatgttcgcgaaacccagagccgaacccctcccagtcgacctcggctcttcggcgagctgccctccatgtcctggccactcagtcgttcgccgcgtcgatcgcccaggaagatctgcgatgctctcatcgttgccgagatcgcgatttgtttccaagcttcgaggaattgacgatcaagcgttggcgaccaagtgatctggctcttcgagttctacgtggttgaagaccctgagcatctgtttagtgaaggttgcctttggtgcaatctatgctcaggtaaagaagaaggcgtcgaggtggatctccaggagttccaggacttcgacgagttcgaggattaggctagcgacctcccccagtcagctgtctgtggtgggttgtttacgttggctacgtttcgattttgtgtactttgatttatattatgtaaatggttctagtctgtaatattattacttactctttattgtaattcgaagcattgtgctatgatgagtcatttatgtaaaaaaaaaaaaaaaaaaggccccta

SEQ ID NO: 84268 - DNA, 195 bp, Zea mays
  Clone ID: MRT4577_176866C.1
ctgtttccccctgtggttgccgcgtgggtcgtgagtctctctcagtcgtgctgtggtggaagcatctgaactcttgcgcggtttgcctgtgctggcctttgggtcacactacttctggcgtgtgatatcttgtttatgtgggccagcgctcttgttgactgcgggtggtggtttgccccggggggtggactgatt

SEQ ID NO: 84269 - DNA, 677 bp, Zea mays
  unsure (1)..(677): unsure at all n locations
  Clone ID: MRT4577_176867C.1
cctcgagccggcgggcgggctctctgcactaatctcgccaggtcgaaccatcacacgctcgtctcatcggagcagccccagtagcctcgtcgcttccgcgcttcatcctcgccgtcgtcgattcgtcacttcggagctccaccagactgctcgctgttcgctgtccgtatcagagtttgtcgcggtgtcgccttgccgagtcgccgacgtccatggcaccggagttctctgccgctgcccacgtttcatcctcgccggcgagcctccgcgtctccgcgtctagattgcgatctgtttccaagcatcgaggaatcgacgatcaagcttcggcgaccaaatgatccagttcttcgagttctacgagatcgaagaccctgagcatctgtttggtgaaggttgcctttggtgcaatctatgctcaggtaaagaagaaggagaacggtgtcaaggcggatctccgggaagttccaggacttcgacgagttcgaggattaggctagcgacctcccccagtcagctgcctgtggtgggttgtttacgttggctacgtttcgattctgtgtactttgattaatattatgtaaatggctctagtctgtaatattattacttactctttattgtaattcgaagcattgtgctatgatgagtcatttatgtaatcactatgtacgtng

SEQ ID NO: 84270 - DNA, 587 bp, Zea mays
  Clone ID: MRT4577_176868C.1
ccggccgggctcttttctcccaaataaaccacaacaacccctacgctaatgaaccccctcgtgtgccgtcctgctcctgcgcacaccgcgaaactgctgcgccgcctcacgagccttctccggccatctttttcgaccctgatgagctgctcgcgtcgctccctacccgattgtgatccgtttccgagcttcgagggatcaaagatcaagcgttggcgaccaagtgatccagttcttcgagttccacaaggttgaagaccctgagcatctgtttagtgaaggttgcctttggtgcaatctatgctcaggtaaagaaggcgtcgaggcggatctccaggagttccaggacgtcgacgagttcgaggattaggctagcgacctcccccagtcagctgcctgtggtgggttgtttacgttggctacgtttcgattctgtgtactttgatttatattatgtaaatggctctagtctgtaatattattacttactctttattgtaattcgaagcattgtgctatgatgagtcatttatgtaatcgctgtgtacttgaattaaaaaagaaaaaaaaaaaaaaaaaagcgggcc

SEQ ID NO: 84271 - DNA, 644 bp, Zea mays
  Clone ID: MRT4577_176869C.1
ctgtgcggcgctcgaggcggccgggtccggagtgacccatgacgtgatttgctcgcaaccgcccacccgaggcccctgctaagatcctgcgcagatcgcccccacggacgcagcaaggcagggatgggcctctacgcacggcagccggccggctgcagcccctagccgtggccatggcggcggccatccccatcccagccgatctcggtcctccggtgatgcccttgcgtcggtcgagtgccagtcgcctgctctggatgacagcagagctgtctcgcccgcactcgacgtcgtccgccgaggagcctgcgtggagccgttgccgagatcgcgatttgtttccgcgctccgaggaatcgacgatcaagcgtcggcgaccaagtgatcaagctctctgagttttatgaggttgaagatcctgagcatctgtttggtgaaggcaagtgtcctctgacctattatgtcccatttactttataattcatcaacccgcataccatgatcaacaaggattgactagctttgtatttaccttgtccttgattaccttttggattattatggttaacttcatgctattgctttactttaatcaatgaacatgatgtgaacatttgtaaaaaaaaaaaaaaaaaaggccccta

SEQ ID NO: 84272 - DNA, 300 bp, Zea mays
  Clone ID: MRT4577_17686C.1
cccacgcgtgcgaggctacctagccatatccttttccccagtttctggtcttcagcagttcctattctcagttggtccgcgcgtgccgtcgacgacgccgccatcatggcttctattactttaccgagccaagatgaatgtattaaatctcatgaagatggccggagctgtgcgctccggagggtagggttcagtgtgcttgatgatgaaggcagttcacaagacttcaacctcagatgacaaaccgcttcaaagctcctctaaaagagttggagagaacagggtttctggggatgaatg

SEQ ID NO: 84273 - DNA, 716 bp, Zea mays
  Clone ID: MRT4577_176870C.1
cccgccccagccctaggtcccgccgggctggcgtccagccggcgcggcaagccggtgcggccagcccagcgtggcggcctgacgcggctcgccagcatggatgcctcaccgacgcgtccccgcacgcgcccgatcattgcgtggaggagttgcacagcctcgccatcggcacgccgatcatgccccaccatgcacggccgtcgtcatcaggaggagagacgcggtgagcatgcgcatcaccttcgtcgtgcgtccaagcctcgccatcatcgagctcgtcgacgccttcgccctctcgccatcgaggagggagccacgccacgttcaccttatggtagtttgtcgcggagactgcgatccatttccgagcttcgaggaatcgaagatcaaacttcggcgaccaaatgacctagttcttcgagttccacgagattgaagaccctaagcatttgtttggtgaaggatgcctttggtgcaatctatgctcaggtaaagaaggtgtcaaggcggatctccaggagttccaggacgtcgacgagttcgaggattaggctagcgacctctcccagtcagctgcctatggtgggtttgtttacgttggctacgtttcgattcggtgtactttgatttatattatgtaaatggctctagtctgtaatattattacttactctttattgtaattcgaagcattgtgctatgatgggtcatttatg

SEQ ID NO: 84274 - DNA, 593 bp, Zea mays
  Clone ID: MRT4577_176871C.1
gcccttctccgtcgcctccgcgcctctgcatgcgcacatgcgcgcaggcgcagacgccacgccccgctccctgcaaaaccacccacgccggttcccctgcacccactcatccccctcctctccctcacaagcagcacacgaccagagccgccccgcctacaccggcctcgccctgctggagacgccgctgttgccgagctcgacgtgcacagatcgcgatttgtttctgagcttcgaggaatcgacagtcaagcttcggcgaccaaatgatccagttcttcaagttctacgagatcgaagaccctgagcatctatttggtgaaggttgcctttggtgcaatctatgctcaggtaaagaagaaggcgtcgaggtggatctccaggagttccaggacttcgacgagttcgaggattaggctagcgacctcccccagtcagctgcctgtggtgggtttattcacgttggctacgtttcgattctgtgtactttgatttatattatgtaaatggctctagtctgtaacattattacttactctttattgtaattcgaagcattgtgctatgatgagtcatttatgtaatcgctgtgt

SEQ ID NO: 84275 - DNA, 1584 bp, Zea mays
  Clone ID: MRT4577_176872C.1
ggcaaggtccccgacaagtacaggaagcagcagctgcaaggcgagagggcggtggatttcttctccaacgggttagacggcagagaaaaccacttggatctgcaccagctgggtgcgaggatgctccagcactcgcacagcgcgaacgagatgctgctgaggaggaagctggaggagcagcagcaggccgctgctgccgagctgcagcaggccatggagctccagagccgtcgcctgatgaggctgcagctgctggacctgaagccgcgcgcgtcgccgagccccatcggcagcatgcccctgggccccacccaaagggccgtcgactcgccgcccgattccggcagggaggagtcgtccgccggcgacgcgagcccgaacgcggacagcgaccaaagcgccgagcacaacctgccggacagcccgttcgcgtcgccgacgaggtccgcggccttggctcgcgaccctttcgcggccatcgacggggagatggctgcctcgcccggtcgtcgaaacggcgccggttccttcgctggcatcagcagcagcagcggcgtcctcgccggccatctgaggccgtcggctctggacatcccttcgccgttcttccccatgtcgatgaccaggctgtcctccgatcacggcgccggcgcgatcgggatgtaaagttatatagtcctcgctgctacttgcctaatcatagaatacttaactagaagcaaaggaaagaagatatagtagtgggagtagtataggagaaacaaaacatcgcagcgtagttcctttttttttactttgtttgtttgtttgtttttttaccatgaaaccaaaggtcagcagatggcagcagcaagcaacagattatagcgcttgctctcctattacattacattacatgatgcatttagcactaattagtagtagttactattaccagcccatctaggtagctgctcctccatgaccatgatatgcacagcagtactaggggggaggaggggtgtgtgatgcacaagaagatgctgctgctacccacatgggactacactggatgcagacagacgtgacagaccagctggtccagcgtgaagatctcacaggattagaagaaacaaacgagtcccggtcccaccagtgtaggtgtcattgaaggaggaccggcccacagcctgctgctgctgctgtgcaaatcattgttggctgcgtcccttcagccctctagcactagcagtagcagcgccggatgcagctcactacaaacaaacaaaaaagttgtgttttttcctgttctttgaattttacttttgcctctgtcgaatgaaatctctactctagttgatacaaagaaatgaaagtggaagatatggaaataatttgctctggtgcttttaaaaaaaaaaaaaaaaaaaaagcacttgggtcgtcgtctcccttttgtgagagaaagccatgcatggttatggtgttcttactttggtttcggtaaaaaaaaaaaaaaaaaaactcgagagtacttctaccaaagggccgtcgactcgccgcccgattccggcagggaggagtcgtccgccggcgacgcgagcc

SEQ ID NO: 84276 - DNA, 637 bp, Zea mays
  Clone ID: MRT4577_176873C.1
cgcgcagcttcgccaaatgcatgctcccgttgtctgctgctccaacaagcttcaccgacgtctccaaatctaacgcccaacccatcgttccggccgggaagcagcgccctcgccttgccatcacgtccccgccatcgacgtccgtgcagcaggagcctgcgctcggagttccgcccacgccgtgctccgacaagcctcaagcctccgacatgccaagcgtccatcgcaccctcgccgtcgtgccgttcggcatgcacctatcgcgatttgtttccgtgcttcgaggaatcgaagatcaagagttggcgaccaagtgatctggttcttcgagttctacgagattgaagacccttagcatctgtttggtaaaggttgcctttggtgcaatctatgctcaggtaaagaagaaggtgtcgaggcggatctctaggagttccaggacttcgacgagttcgaggattaggctagcgacctcccccagtcagctgcctgtggtgggtttatttacgttggctacgtttctattctgtgcactttgatttatattatgtaaatgactctagtctgtaatattattacttactctttattgtaattcgaagcattgtgcaaaaaaaaaaaaaaaaaaggggcggcc

SEQ ID NO: 84277 - DNA, 383 bp, Zea mays
  Clone ID: MRT4577_176874C.1
ggggactccatgcagcgccgagtctcaacctgccggacagcccgttcgcgtggccgacgaggtccgcggccttggctcgcgaccctttcgcggccatcgacggggagatggctgcctcgcccggtcgtcgaaacggcgccggttccttcgctggcatcagcagcagcagcggcgtcctcgccggccatctgaggccgtcggctctggacatcccttcgtcgttcttgcccatgtccatgaccaggtatgttatgtaatgcaaacaacagggtggccgcagatcgcgcggccgtgtgtgctctccatgattgatttgctcagaggctgtcaatccggtggcaggctgtcctccgatcacggcgccggcgcgatcgggatgtaaa

SEQ ID NO: 84278 - DNA, 656 bp, Zea mays
  Clone ID: MRT4577_176875C.1
gggcaacccgcacttcatctgcgacgcgcgcgtgctcgtgaagccctacaaggagaagggcaaggtccccgacaagtacaggaagcagcagctgcaaggcgagagggcggtggatttcttctccaacgggttagacggcagagaaaaccacttggatctgcaccagctgggtaaggcattatcatctgttgcaaaatgacgatggagtgtttgaggactgatgctcgccgccgtcaggtgcgaggatgctccagcactcgcacagcgcgaacgagatgctgctgaggaggaagctggaggagcagcagcaggccgctgctgccgagctgcagcaggccatggagctccagagccgccgcctgatgaggctgcagctgctggacctgaagccgcgcgcgtcgccgagccccatcggcagcatgcccctgggccccacccaaagggccgtcgactcgccgcccgattccggcagggaggagtcgtccgccggcgacgcgagcccgaacgcggacagcgaccaaaggtggaattagcggctaagcatgcgtcgttatcgccatcatttgttgcgtccgtgtcgcgttttgctgtcgtccagcagcgcagcgaagcaacatctcaccaactgattctccatggggggactccatgcagcg

SEQ ID NO: 84279 - DNA, 843 bp, Zea mays
  Clone ID: MRT4577_176876C.1
tccccgcgccagagccagtgctgcatgggcgtggtcgtggacgggcgcacccggatgttcccggacggcgccatgaaggcctacttcggaaacgtgctcaccatcccgtacggcgtcatcggctccaaagacctgcgctgcatggccctcgccgacgtggccgacgacgtgcaccggtgggtggcggaggccgccaccggcgaccatttccgggggctcgtggactgggtggaggcgctgcggcctaagccggccgcggcgagggcgtacctgggagggaccggcggcaacgaggcgatggcgtgcatcgtgtcgtccggtatgagcttcccggtgggcaaggccgacttcgggactggcctccccgcgttcgcgtcgtaccatttcccgtggcccgccggcgccgggtacgtgatgccgatgccgagcgcgcgcgggaacggcgattgggtggtgtacgtgcacgtggcgccggaggtggcgaaggtgatggaggagtccaccgtgttccaagccctggtgaacagctacgcgtttgaatgatgatggagatgggccggcatattcgtggatgcgcgcgcgttgccgtccacgcgtgtgtctaggctagtgttgatgtgcatacggcatggagttctcactactcagcagtgctaccaatttgcctcgttggttactatgtttgccagaaaataataatagtaactccatgcatatatgtcacgtgacatatgtgtaattaacaaaccaaggcctactttgcctagttaaattatgtggagaaatgtatatttggtgcctccttttggaaacccggtgggaagttagtcctatcttttgggc

SEQ ID NO: 84280 - DNA, 1269 bp, Zea mays
  Clone ID: MRT4577_176877C.1
tcgaggccggccggggaaaagattcaaaggaaaggaaaggacaaaggagcggcggcgaggtctatggcgtcgacggcggggtacctggcgcggcgggcggcgcagaaggagcgggtgcgcctgctctaccgcagggcgctcaaggacacgctcaactgggccgtccaccgccacctcttctaccaggacctctggacatcccttcgccgttcttccccatgtcgatgaccaggctgtcctccgatcacggcgccggcgcgatcgggatgtaaagttatatagtcctcgctgctacttgcctaatcatagaatacttaactagaagcaaaggaaagaagatatagtagtgggagtagtataggagaaacaaaacatcgcagcgtagttcctttttttttactttgtttgtttgtttgtttttttaccatgaaaccaaaggtcagcagatggcagcagcaagcaacagattatagcgcttgctctcctattacattacattacatgatgcatttagcactaattagtagtagttactattaccagcccatctaggtagctgctcctccatgaccatgatatgcacagcagtactaggggggaggagggtgtgtgatgcacaagaagatgctgctgctacccacatgggactacactggatgcagacagacgtgacagaccagctggtccagcgtgaagatctcacaggattagaagaaacaaacgagtcccggtcccaccagtgtaggtgtcattgaaggaggaccgggaccggcccacagcctgctgctgctgctgtgcaaatcattgttggctgcgtcccttcagccccctctagcagtaagcagcgccggatgcagctcactgcaaacaaacaaaaaagttgtgtttttttagttttaccttcctttttctctccctgttccttctctttgaattttacttttgcctctgtcgaatgaaatctctactctagttgatacaaagaaatgaaagtggaagatatggaaataatttgctctggtgcttttctccgtggctggcactggcgtctggcatctggcaacgcaacgcgtggaaaaggcgatgcttttggcgatgatgctgctgctgctggctagtgcgatgcagcagccaccaccagcagtacttcagtcgacggagtagcagcaatatcaagagacaattagactaatctcttatgtacccatatatcatacacacaaaaaatatcttgtatatgttattcagtgacatacaagagatgagtat

SEQ ID NO: 84281 - DNA, 554 bp, Zea mays
  Clone ID: MRT4577_176878C.1
atactcatctcttgtatgtcactgaataacatatacaagatatttttgtgtgtgtatgatatgtgggtacataagagattagtctaattgtctcttgatattgctgctactccgtcgactgaagtactgctggtggtggctgctgcatcgcactagccagcagcagcagcatcatcgccaaaagcatcgccttttccacgcgttgcgttgccagataacagacgccagtgccagccacggagaaaagcaccagagcaaattatttccatatcttccactttcatttctttgtatcaactagagtagagatttcattcgacagaggcaaaagtaaaattcaaagaacaggaaaaaacacaacttttttgtatgtttgtagtgagctgcatccggcgctgctactgctagtgctagagggctgaagggacgcagccaacaataatttgcacagcagcagcagcagcgtcagcaggctctgtgggccggtcccggtcctccttcaatgacacctacactgggaaaccgggactcgttttttcttctaagaagtgaga

SEQ ID NO: 84282 - DNA, 299 bp, Zea mays
  Clone ID: MRT4577_176879C.1
acgtaagctcggaattcggctcgggtagcgaaaggcattgacgtaagaagcacctaagagtccgccgacccttttgagaagctcacccagccttccagctcatctgaacatggggattgattggagccactagtttaaccccttcgccgagagctcgagcacacattttgggttcaacagaggggcaatagccggtgtgcaagcacacactgttcacagacgtaccttttcacacccactaagattatcaccgatggcagctattggaaaacaccctaaggtcactttttttttaagtg

SEQ ID NO: 84283 - DNA, 296 bp, Zea mays
  Clone ID: MRT4577_17687C.1
tctttttttttttttttttttttttttttttttttttttttttttttttttttttcccttataaaaattccctttccattaaaagggtaaattaacgtcattgctaccaccgccccccaggggaaggggggacactacctaaccaaccgcaagtaacagcagaacccagcgagctaggtaggcaaccacacggcccagaagcatgaaaacggagcacttgcagccccgaccacaccgcggaagtagcacctcagcgccagccgcgctgggcccgagatcacacagcaccgacctcc

SEQ ID NO: 84284 - DNA, 772 bp, Zea mays
  Clone ID: MRT4577_176880C.1
tctgcccatcgatcatccgcgcacgcatgcttggtaaaagaaattcttcaagctttgttgctatatatgctactggagtactatagatgttgctatacactttagtgtagcgatacagcagcatgagtaggcgtccttgtgtacaagtggaaaaaagaaaggtgaagggaggaaattgatgatgtcgagctcgtcgccgtcaacgaccccttcatcaccacggatgatccctgtcactgccactagccctgagaacaagacggtgtgaatttcagtgtttcattattacctcaaattgactctgggcatatcgttgtccctccgtagggggagttttattattttaaaaaaaaaaaaaaaaaaaaaaatgttgctatacactttagtgtagcgatacagcagcatgagtagacgtccttgtgtacaagtggaaaaaagaaaggtgaagggaggaaattgatgtggcttcggcactactagcttggcagatgcactgggccacggatgatccctgtcactgccactagccctgagaacaagacggtgtgaatttcagtgtttcattattacctcaaattgactctgggcatatcgttgtccctccgtagggggagttttattattttaaaaaaaaaaaaaaaaaaaaaatgttgctataccactttagtgtagcgatacagcagcatgagtagacgtccttgtgtacaagtggaaaaaagaaaggtgaagggaggaaattgatgtggctttcgcactactagcttggcagatg

SEQ ID NO: 84285 - DNA, 157 bp, Zea mays
  Clone ID: MRT4577_176881C.1
cccacccgtagaccaacaacaacggtactaaccagtaccagccccgaatgcctctcgcggcggctgaccgacacgttgccgaatgtcgttcgccgatcggcctcacccgctctttgtgccgtatcgaggcgcatccgcggcgccggcggaggttcag

SEQ ID NO: 84286 - DNA, 519 bp, Zea mays
  Clone ID: MRT4577_176882C.1
aaaaaaaaaaaaaaaaaaaaaaaaaaaaaaaaaaaaaaaaaaaaaaaaaaaaaaaaaaaaaaaaaaaaaaaaaaaaaaaaaaattttttgtacttcttgccgaaaccatcatttttggggatttttataaaatttccttcacaattgggggttggtttttgcttttttttgggggccctttttggggtttttttgggtttttttttacctttgttgggggggttttttacttcttttttggggggggcaattcccctttttttaccggcttttattaaacttttttgggccgcctttttttacacgggggggggggggaaaaaaaggggcctcccccatttttcttttttaaaattttttccctttttttgggggttggaccctccttattgcgcccctttatatcgcgtttttacaggtggttccccccatttggtcagtttctctcccctgggccctacctttaattcctttggtttttttgtcttccttccgggggccttttcttttttttccccc

SEQ ID NO: 84287 - DNA, 515 bp, Zea mays
  Clone ID: MRT4577_176883C.1
cccacgcgtccgagatgaccaacttgatgatcatactgttcatcatacccttgaacacactcttggtgaccatgattctgagccagagcatcaaggccagcatcatggccttgctcatgggagtggtcatggcagtcggcaccgatctcgagatgaatctcctgctctagctcatcggctcgctcatcatcgttctcaccagcgttgggacaagcgtgacccacataatgcccaagcagctgcagggtaggctgacggatttgctgaaccagttgctgtcccaccagtccgcggagctgttcgtgacgctgcttttcacggacaatctcctgaacaagcgtgacaccttgcgggacagctacacgacccaatacacgacgctcatcctggtgtccatcctgatcgcgggctgcatcaacttgagcacaatcctgatgatgggcacgacgatcggcgcgacgtaccacgtgatgtgccacgtgctgacgcgcctggagacctgcttggggttcttc

SEQ ID NO: 84288 - DNA, 553 bp, Zea mays
  Clone ID: MRT4577_176884C.1
ggcattgctgttccaaacgtgggactcataacgtccaccggactggattgtgacctgctaatgttcacaggaatcacaaaggaacaggcctccaaaatagaacggaacaatattcttctagagtggcctaaagctttgcttatgcagtaacactaagacaatactagcttcagcctcattttttgtatttggcactcacaaattaatgctcacgtatgagtatcaccctttataccgggcagcttggaactctaactgagggattgttacgcatgtggacggataccacgagacccatacgcttgtgaacactgacggctcagagcaaccttctctcttcggctcgtaagacaggccctgtgagtctgagtttgtcaagatcgcccataacggcgagtacaccggcgcctgtggacatggatcctatgttaagcatgaagatcttgaacttggcgagcttggacaccttcccagccttctgtgtgcctttcgttctcacgaggaacagaccacggagtcggaagaaaccgacctcaaactctacataagacat

SEQ ID NO: 84289 - DNA, 355 bp, Zea mays
  Clone ID: MRT4577_176885C.1
tactgcatacacaacacagagcattagaaggagctgcgatctgatcgacatgcctgccgccaccatggctatcacctcccgcgcgctcatcagtaagccggcggctggcacgagggacgtcttcggccagggccgcatcaccatgcgaaagaccgcccacaagaccaagccggcggcgtccagcagacccccggtcggagaccaccgcgctctgcacctgggcccgctgtccggctcgccccccagctacctggacggcgagttacccggagaataagggcgggacaccgaagagatggccgcgaaacccgaaaacttcacccaaaacccccaactggaagggaaccaccggccc

SEQ ID NO: 84290 - DNA, 698 bp, Zea mays
  Clone ID: MRT4577_176886C.1
ttgttcctctcccgatctctctctcgaagacgatcggttgaccgctgcctcctgctgtctgcgctctcttgtcccctctggccaaatctatccttcccctctccgacgacgacgtgaccaccgcccgcaatgaggctgcggactgtgatgcaggagttgttgcttgttgcgcatgaggttcatatattggatgatgaccgtctttctcgcctccgcacggcgatggcatgcatgctcatgcaagatagtacagagagaatgaggcgaaacaatagtccgtaataccgtgcccatatggaggctgatctatgctagcaatttgctgaggatgcccttaatcaccctcgctgactctgatcgttcgtcgaggaaaatgcggtctggatgatcctccttatctcacctttcactggctgagcatctacccgcagtatcgtgatccagcatgcttctgcgagatgtcaccactcgtagctagactggaagaatgctgatccctatactctgctgggaactcgtgaccatccgtctagttatttatgtctagactgagaatggctctgaacattatgaccatctgaatcctgagctcctgttcgtaactacggggtccctcggcgcatctatatccggctactggactcttactggcaggacctaccattgctagttggaaccatgggcatatatgattgctg

SEQ ID NO: 84291 - DNA, 446 bp, Zea mays
  Clone ID: MRT4577_176887C.1
gcggcgccttcttatgtgttctgcatcaggctgaggtgcactgacggtaagtacatctgcatcaaagcctccgtgtatcgtccgctgtatactttcaaatgctcgaaaaagctcgcactgatctgagatacaattacttccatggtggcgcgagtttacatactttcactcatagatacacaagccgatcgctgtagacgttataaaacgacatcaacctgggagagcctcatccgctccatttataactgctaccacacacacgctaagactgaatgtgattggatactacagctttattctatctcagcttaacccaagtgcttattgacaatacatctatcacatattggattctatcaccgaaacccaatttacatgcacgtcttgtcaaaataaaacataaaaggcgattccatttatatgataacacattaacattctgc

SEQ ID NO: 84292 - DNA, 1160 bp, Zea mays
  Clone ID: MRT4577_176888C.1
ttatagtagtgatgtagctttttatttcctcgtttgttgtattttgaaaggaaaaaagaagaagaagtgagctctactttcgttggccgaagcgccgttgtctggtctggtaggaacgcaaggccccgaggtactcgtcctccccaaaatccggccacatgacgtcagagaagaagagctccgcgaatgcggactgccacagcaggaagttgctcagccgcagctcgccgctggtcctgatgaccaggtcggggtaagagagctcgccgccggcgatactggtccccagcttcccggcgatgagcgcctcgtcgatgtcctctggcctcagcaggttccgctgcacctccgtggcgagctcttggcacgcccgcagtatgtcccgccgcccgctgtagcccatggccagcatcaggaccatctccgactcgctctgcgtggccagctggttggcttccctcgccgcgcgcagcagggacgctggcaatcccggcgagtcgccgatgagatgcagccggattccctccctgcagaactggtcgacgttgtcacggataaacccctcgtacagctgcatgaagaagtccatctccgccttggggcgggtcgtcatgttctcgtgggagcaggcgaagacggtgagcacgcggatgccccacgctcgcgacagtcgcaccgtgtgctccaccgtgcgccgcccaaccgcgtggccctccgacaccgacagccccctggcgcgcgcccatctcgcgtgcccatcgatcaccaaccctacgtgccgcggcagcgactctgcccgcaccccgctgtggaggagctggagtagcggcgcctcgcgatcggccgtggccggggcatggccggtgctcgtgtccgtggccgccgcggtggacagagcgaatggagacggccggataatgcgagcgcggcgcgagatggcgggtaatggagccggacgacgacgacgccaagcgacggtaccggtagatggagaatgcagtgcaagcagcatcatcctagctagctattcgtatctcggtacctgtggagaaccctagttataagtcgtgattctcttgctcgctctcgcaggatgctcggctcaatggtgaagaacgggattctgctatggcaacatatataagggggccggcctcgag

SEQ ID NO: 84293 - DNA, 1142 bp, Zea mays
  Clone ID: MRT4577_176889C.1
ttgggtacctcgaggccgggccgggaatccgactccggacgccccatgatttcgctctcttcttcccgtcgagacccaaccataccagcggcgccgcaggctgacgaggaggcggagtagagtggccggactacctcgacacctccactgcaaccatgggtatctcacgtgattcgatgcacaagcgccgggccaccggtggaaagcagaagacgtggcgcaagaagcgaaagtatgagcttggccgccagcctgctaacaccaaactgtctagcaataagacagtgaggagggtccgtgtccgtggaggcaacgtgaagtggagggctctccgattggatacaggtaactactcgtggggaagtgaggctcttacccgcaagacccgcatcctggatgtggtctataatgcatcaaacaatgagcttgtgaggactcagactcttgtgaagagcgccattgtacaagttgatgctgctccattcaagcagtggtacctcactcactatggagtggacatcggtaggaagaagaaggtgcctgttgctaagaaggatgcgactgagggacaagagggtgaggctatagctgaggaaacaaagaagagtaaccatgtgcagaggaagattgagaagcgacagcaggaccgtgcactcgacactcatattgaagagcaatttggcagtgggagattgttggcttgcatttctgcccgtcctgggcagtgtggccgagctgatggctacatccttgagggtaaagagctcgagttctacatgaagaagctccagaggaagaagggcaagggtgttgcatcttagagcattcttttaactagaactgcaaaatatcttctacttgggggttttgttgttagtctttatgcatattatttgcggacctgatgaacacttcataagtgaatcaactctcgattccaagaattgataattttcacatgcggtggttgtaattgtgatatttaggtttgctatttattgaaacttcttgtctaaagcagttttagtttaccttgaagatgattgttagaaacgagatcctatccaatgtttggttttccctttatagctgctaacatttgattgcatagtaagaactggtcacgcgaaagactttctctc

SEQ ID NO: 84294 - DNA, 677 bp, Zea mays
  Clone ID: MRT4577_17688C.1
actcgcagtaacatcctttggggttgaggcagacgccgacgccgccgtggtacttgctggcgcagtccgtcttgcactgctggcgattgcagggcttgcctggatatagtgttactgactccgggtccgggcaccgagctgaaaccttggccgtcaaatctgcggcagatcggcataagtacagattagtctgaaatgcacagacagtgcgtacgtctgaacgatcggcctgggctggaagtacctgaggatactgccaggagcaggaggaggggagtggcaaccagcagcaggtgtctagtcctcatcctcctgtcctgctggtttcttacagggaacgttgagaggaatgctgttgatagtgaatgggtggtgtatacgtagctgtctagcttatgatatggtgacatatatgcagaccagcagtgggttttatagaagaagctgtactgtactgtattgccgtggctatagctttaattttggctaaatacgcaggaactggcggcaatcatcagtagcagctattttggactgacttgcgtatccatgcaattgaatccctgctaaaaactgaacaaatacgttgtagtacgtagtagctaggagccaattttcagggctcatagataatatagttcggtcgactcctaaataccaattgtttggatagctgg

SEQ ID NO: 84295 - DNA, 427 bp, Zea mays
  Clone ID: MRT4577_176890C.1
aaaaagggcccaggggttcatacccaggggggacaaccaatttggcgggaatttgggctaaaaaatggaatttacatttgatctttttttctggtttaccggtacaggagcaggcacaaaacgcaaactggttagggggcaaaagggttacagttacttccccacaaacaaataggaagcgggttgggcccgggacccctgaaaaaaaagggttacccccttggccaactacagggttggtcgggtagctctcaatccatgggaattgaaagaaattgggtgggtttgaaacccaaacaagttaaacttcttcttaattttttccaatcttatccaacccatttgtattaaaaaaaaccgaacaagggtttgggggccccctggggggtcttttggtaacccgtttacaaaagcgcgacaaaaaccc

SEQ ID NO: 84296 - DNA, 177 bp, Zea mays
  Clone ID: MRT4577_176891C.1
gcgaacaaactttccaataaagaaggtttattaaatctgggcgaactcagggctattgttttttcttgtggaaaaatgttattccctgcctacttccaaaattaaaccaaccggaggcaataaaggaaaagccgggggggcctaaaggggtggcttatactaaaattaaattgcttt

SEQ ID NO: 84297 - DNA, 364 bp, Zea mays
  Clone ID: MRT4577_176892C.1
cttccgggattttggccagggctattccttcaccaaggtttggcaaggccacgaaagcttcgtccctgggatggccctttcctttttgacacacttcccgaaaaaaaaaaggcgctggaggggaaacgcccttcacgagcactctttcttagtggatcccttagattagacacgtttgtggacgccctgcctctatatatattggagctgttcggcgctggaccgccgagcaaatatcaatcgcctcttgataccacaccaccgtcttttgcaggggttgtggcagcagctcatgcagggaatgatgacaacatgttgttattattattgaaaaatgtctgcagtggccgataatcatgtaaaa

SEQ ID NO: 84298 - DNA, 505 bp, Zea mays
  unsure (1)..(505): unsure at all n locations
  Clone ID: MRT4577_176893C.1
aaaaaaaaaaaaaaaaaaaaaaaaaaaaaaaaaaaaaaaaaaaaaaaaaaaaaaaaaaaaaaaaaaaaaaaaaaaaaaaaaaaaaaaaaaaaaaaaaaaaaaaaaaaaaaaaaaaggggcggccgttattaaaggggcccagccttttcttaacgcgttccattcgcaacgttcctggctttctttttatagggcacaccttattttaatattccccggcgccgttttttattaacaacggccgggcttgggaaaacccctgtgggtttgccaaaatttattgcgctttgccaaaccattccccttttgcgccagcttgtgcttttttgcaaaaaagggcccgaaccgttcagccctcccaaacagttgccccttccaaaatggggaaggggcccccccctgaaggggccctttccccccggcgggtgtttaggttccccccagttggacctttccccttgccaggcccctaacccccgntcctttcgttttcttcctttttttt

SEQ ID NO: 84299 - DNA, 320 bp, Zea mays
  Clone ID: MRT4577_176894C.1
ggcatgcacgtcgtcgacggtgtcggtagtggtcatgttatgccgaccatgaactgtgcgcatatccagcaaggtcaacggcagccaccgcggtcgaaggaacatttttcttccattgctggcctataaatacattgtgttgatctagttggtgtctcattccctggcaggctcgacgtgatcgccgcagttatatctcatcaactgccatggcctcctgcgtgtcgatgtcgacctcgttcccgaggttgctgttggtgctccagctttgcggtggcggtgctgaccaccctgggcgcgcaggcgcagctgtagtacgg

SEQ ID NO: 84300 - DNA, 593 bp, Zea mays
  Clone ID: MRT4577_176895C.1
acaataaagagtaagtaataatattacagactagagccatttacataatatacatcaaagtacacataatcgaaacgtagccaacgtaaacaacccaccacaggcagctgactgggggaggtcgctagcctactcctcgaactcatcaatgtcctggaactcctggagatccgcctcgacgccttcttctttacctaagcatagattgcaccaaaggcaaactggtgttttgtgaaagcaagggtgagtacacatcaacgtactcagcaaatgtcccgtttggctgtagtggactagctttatgtggggttaagtcaagcagttgcttttagttggtcaggttattattactaatagaacgccaggttttagcattaacccaagttcttaacccaaagtaccctttccaaacggaaagaataccacttaccattaccatgagcataatcaaaaaccatcatcctcatcacaacctgtaaaccaaccatctttgatcaaagtatctctaatcaatggagctcccttggccgctcataaccgcgagcacggctgatatatcagtttcataacactctgcagaggttgcgcacttt

SEQ ID NO: 84301 - DNA, 994 bp, Zea mays
  Clone ID: MRT4577_176896C.1
acatgccgccctgccgcgccatccaccgctcggccaccgcgcacgcgccgtgcagcgcgaagaacgcggtcacctccccggtcccggcctccagcgtgatgtagtagaacatgacctcgtgcatggccccggacacgaggaacgccgcgagcacgcccgcggcggcgccgaagcgggcgcgcacggggcggtacacgcagggccggagcacgccggggaccatgaggttccaccgccggccccagaagtcgcgcagggaggaagcgaggtacggccggtcgaactgcggctccagctccgcgcccagcagcgcgcgcgcgagcgccgcggcggacgcgaggaagagctccagcatgaggtacacgtgcgcgccgtcgaacacgggcacggcgtacgcgggcatccgcgccctgtagcaccggacggagacgagcgcggagaagagcgccgccttggccgcgtaggacagcaggaatccggaaggcagagacgagtgggatatccgtgattgctgcttcttctccttctcgttctcgtcccggaccttgatgggcagcgcggcgcacgcgacgaagcgcacgagcgggagggcggggtggagcggcccgtcgtgccccgcggcgaggagaaggagcttgaagccgcagagccagacgaggaagaaggcggagacggtgcggaggtggatggaggagaaggcgaaggggaggactgggaggagtaggagcaccgggagcagcgccgcgaggcggggggtgccgggagccagccgcgaggtggcgagacgagcgtagaccagggccacggacgcggcggccgagaccacggcgaggccggctacctcggatgccatgcctgccttactgaccacggcggccaccggccgatcgagatctggacgacgtcgcgttatgtcgatcgaactggtgacggatatattatattattgagttggtaggaatggcgatcaaaggcagggttaaaacacatcatt

SEQ ID NO: 84302 - DNA, 739 bp, Zea mays
  Clone ID: MRT4577_176897C.1
atggccccccccggcgcgcggctcctcgtggctctcccagcgtgttcctgcgcgcacgacaacaagcagctcgtggttcctgagggtgttaccgaagatcttcctgagcaacaacctgtgtttgagggtttgtttgtgggtaaagtgtgcaacctctgcagggtgttagaaactggtatatcagccgtgctcacggttaagagcagccttgggatcctctttgattagagatacagatggttcgagatacaatggttctactaatgtttttggttcgatgatgatcatgatgtttcctcgatgaggaaatggctcatgggatggttatatgataaaacttggcttctacaaataataaatacctgaccaactaaaagcaactgcttgagcttaaccccacataaagctagtccacctcagccaaacgggacatttgctgagtacgttgatgtgtactcacccttgctttcacaaaataccaggttgcctttggtgcaatccatgctcagataaaggagaagatgtcgaggcggatctctaggagttccatgacttcgacgagttcgaggattaggctagcgacctcccccagtcagctgcctgtggtgggttaatttacgttggctacgtttctattctgtgtactttgattatattatgtaaatgactctagtctgtaatattattacttactctttattgtaattcgaagcattgtgctatgatgagtcatttatgt

SEQ ID NO: 84303 - DNA, 602 bp, Zea mays
  unsure (1)..(602): unsure at all n locations
  Clone ID: MRT4577_176898C.1
ttcgcaaaactgcttctctcgcgcagcagagcaaccgcgccaggcttcttctccaggtccgcgcgtgagaatcgcagcctcggttcatctcccaaatttcaaaccatctacccacgtcgcgaggacccgggatccatggcgcccttgcagcagaccagccggtctttggcaccccatcccctgcggctggcctgccatccgtcccctatgctccaaggtggtcatcccgcgtcgtttccgtcgagattgtgatccgtttccgagctttgagggatcgacgatcaagcgttggcgaccaagtgatcaagctctctgagttctataaggctgaagattctgagcatctgtttggtgaaggttgcctttggtgcaatctatgcttaggtaaagacgaaggcgtcaagacagatacacaggagttccaagacttcgacgaatttgtggtttaggctagcgacctcccccagttagcttcctgtggtgggttgtttacgttggctacgtttcgattctgtgtactttgatttatattatgtaaatggctctagtctgtaatattaccacttactctttattgaaattcgaagcattgtgctannnaa

SEQ ID NO: 84304 - DNA, 574 bp, Zea mays
  unsure (1)..(574): unsure at all n locations
  Clone ID: MRT4577_176899C.1
tttcccggttttttttcctctcccccacgtattcttcttcctgattcgattcaccaaaaccgctcgtctctctgcctgtttcgtcgcgccgcccatctgccggagctcatcgctaccgtccgtgctgattcgagacccaccgtctgtcgtcgcgagggcgagaatgtgatctgtttccgagctcgaggaatcgaagatcaagcttcggcgaccatgtgatcgagttcttcgagttctacgagatcgaagaccctgagcatctgtttggtgaaggttgctattggtgcaatctatgctcaggtaaagaagaaggcgtcgaggcggatctccaggagttctagggcttcgacgagttcgaggattaggctagcgacctcccccagtcagctgcctgtggtgggttgtttatgttggctacgtttcgattctgtgtactttgatttatattatgtaaatggctctagtctgtaatattattacttactctttactgtaattcgaagcattgtgctatgatgagtcatttatgtnnnnnnnnnnnnnnnnnnnnnnnnnnnnnnnnnnnnnnnnnnng

SEQ ID NO: 84305 - DNA, 180 bp, Zea mays
  Clone ID: MRT4577_17689C.1
gcgtactgtctgtgcaaaggcgaccattccttcttcgatccttcgccgccactatggttaagtactagcaggagccaggcaaacctaccaatatcggccaacgccatggacaagggaccctgaaggtccactctcaataacacaaccgaagacagcttttagcacttgtcatagtctgcc

SEQ ID NO: 84306 - DNA, 260 bp, Zea mays
  Clone ID: MRT4577_1768C.1
ggccatccgagttcaactcgattgttgactagctcttcctcctaaacggagcggggtgcgccgtggactagatacagaggctcggctgggtcaactttcacggctacactaagaggatagaaaaggctgtgctcatgtaagatcgctacactggagcaacgcgatgcatatcacgaccagtgtcgacagaggatgggcggaggtttatctcacatagacatggcacacctggtgctggagctagccgacgacctcaaact

SEQ ID NO: 84307 - DNA, 319 bp, Zea mays
  Clone ID: MRT4577_176900C.1
ggacacaaataccccaacagggttttttgtttccacttttttccatgcaaatgaacaacaaattttcaccaaattgggcccttggtgtcaacgcaagaacacgggtcctcgatcgtaccttttaatttattttttgggaagttaagggtttaagtcatagagaacgcagggggtgtccaccagcaagtgttgccttgtgacagttttacattggaacgggggggggttctcactggatttttgcctttttactcgacaacaaaggggctccaactccaaccaagctaaaaagcttttggggccttttaaagcccaaaag

SEQ ID NO: 84308 - DNA, 425 bp, Zea mays
  Clone ID: MRT4577_176901C.1
attcggctcgaggggctctggtccaggtcctattcaacacggtgatgcacctggcccgtgcgcagcacgctcggggcgtctggattaccgagatctacaacggctgaacgctagcgcaggacccggcacggtactcgggcgactaccgcttcgcgcccttgcccttgaaggttacccctgagttgatggctctcgatgacatggtcgccatggcgacggctctcaaggccggctgtgaggctcccttgcgggaccgtctgtaggggctgctgtccgcatcctgacggtactgcgcagaggctgggggccgcgcgcgctgaggtctaccgactgtaggtgagacaccttgctgtgggctggccaaggcctaggtgagcccgcgctcctcgtaatgactggcagatacggcacgttgctcgtctaca

SEQ ID NO: 84309 - DNA, 444 bp, Zea mays
  Clone ID: MRT4577_176902C.1
gccggccggtccgggagtctccttccctagatcaaatcgcgaagaagctgtcgtccctgtacatggcggttcccgattgcgatccgtttccgagcttcgagggatcaaagatcaagcgttggcgaccaagtgatccagttcttcgagttccacaaggttgaagaccctgagcatctatttagtgaaggttgcctttggtgcaatctatgctcaggtaaagaagaaggcgtcgaggcgaatctccaggagttccaggacttcgacgagttcgaggattaggctagcaacctcccccagtcagttgcctgtggtgggtttatttacgttggctacgtttctgttctgtgtactttgattatattatgtaaatgactctagtctttcatattattacttaccctttattgttattcgaagcaaaaaaaaaaaaaaaaaaggccccta

SEQ ID NO: 84310 - DNA, 549 bp, Zea mays
  unsure (1)..(549): unsure at all n locations
  Clone ID: MRT4577_176903C.1
agattaggaactactaacagttaccagagattaaccggaatccgcagataaacaatgattaaccacaagcatgcagctgaaagtgccggccaagcctaataagaaccaatctgaatgcatcataaagaatcatcaggccgatgttccgcagattcctgccgcgtaacttcttctgaagaaactgccactagctcccagctggnttgacacggcctctcttactccaggcactccataccatacatatagccactatatatattgctatatttgctccattcttctctctctctctcttcaactatgcaaaagcaaaaaccctagctgacctgacttaccatcgtaaacaccattcacctggatagctgatgagtgcaggaagaggctccgacatgcaagattctctaagcttgatgcagtttcatgatccgtacctctacggcggcagcgctggaagcgccagcctgccactgccacaccctttcttgcctcagcatcaccaaggctttgtccatggttgcaccggcaagggcgtggcggagttcgtcg

SEQ ID NO: 84311 - DNA, 516 bp, Zea mays
  Clone ID: MRT4577_176904C.1
cccacgcgtccgcccacgcgtccgcccacgcgtccgcccacgcgtccgcccatgcctcagggtgttgtgctgccgcctcgcccgcacagccaacgggcttgccgtcgcgcgatggagctttgttggtcgcagtcgttccacgccaagattgcgatccgtttctgagcttcgagggatcaaagatcaagcgttggcgaccaagtgatccagttcttcgagttccacgagattaaagaccctaagcatctctttggtgaaggttgcctttggtgcaatctatgctcaggtaaagaaggaggcgtcgaggtggttctccaggagttccaggacttcgacgagttcgaggattaggctagcgacctcccccagtcagctgcttgtggtgggtttatttacgttggctacgtttctattctgtgtactttgattatattatgtaaatgactctagtctttcatattattacttactctttattgttattcgaagcattgtgctatgatgtgtcttttatgt

SEQ ID NO: 84312 - DNA, 696 bp, Zea mays
  Clone ID: MRT4577_176905C.1
cattgacttctacaccagttctggaaaaaggaaaccagatcagatcatcatcttcagggatggtgttagtgagagccagtttaatcaggtgctgaacattgaattggatcaaataattgaggcctgcaagttcttggatgaaaattggaaccccaagttcacgttgattgttgctcagaaaaatcaccacaccaagttcttcattcctggatctcctgagaatgtccctccaggcactgttgtagataatgccgtctgccatccaaggaattatgacttctacatgtgcgctcatgctggaatgattgggactacaaggccaacgcactaccatatcctacatgatgagatacactttgccgcggatgacctgcaggatcttgtgcactcgctctcgtatgtgtaccaaaggagcacaacagccatatcagttgtttctccaatctgctatgcacatcttgcggcagctcaggtggcgcagttcataaagtttgatgagatgtcagagacgtcgtcgagccagggtggtggccacacctctgccggcagtgccccagtgcaggagctgcctcgcctccatgagaaggtccgtagcagcatgttcttctgctgagccagcccgccagcctgctgcacttgcgcgttccaacttttggttatgcgcttggttatctagtactagtagtatgtggtagt

SEQ ID NO: 84313 - DNA, 252 bp, Zea mays
  Clone ID: MRT4577_176906C.1
aaacccaagccccatgtacttatgcaagcaaccaaaaaaaattttttgggaaccaaactggccacatacacacaaccaaacacgctttactggatgcactcaaccagtccagtctgagccaggctcattaaatacgagccaggctcacccatacaagtaaccaaacgcccccatattgaattgccataaaaagggtacacaatccccaagggcaactagtagcaaaaccatcgtgattaggggccaaccaaa

SEQ ID NO: 84314 - DNA, 404 bp, Zea mays
  Clone ID: MRT4577_176907C.1
ccggccggggtctcctccagatccatgaagggcagcggttaccagattgcgatccgtttccgagctttgagggatcaaagatcaagagttggcgaccaagtgatctggttcttcgagttctacgagattgaagacccaaagcatctgtttggtgaaggttgcctttggtgcaatctatgcacaggtaaagaagaaggcgtcgaagcggttctccaggagttccaggacttcgacgagttcgaggattaggctagcgacctcccccagtcagctgcctatggtgggtttatttacattggctacgtttcgattctgtgtactttgattcatattatgtaaatgactctagtctttaatatcattatttattctttattgtcaaaaaaaaaaaaaaaaaagcggcc

SEQ ID NO: 84315 - DNA, 328 bp, Zea mays
  Clone ID: MRT4577_176908C.1
gtcaactggtgtgggcagaacttggtaagcaagcaggagcggccatgcctgacggagtgacggtggaaggcggaggcgcgcctttcgcatcgcaccctctgagctctgaccctgctccgcgaagtttttttttttccttcttttttgacaaaagcagccgcttcatcaagcatctagacggccggttcggtgcgggtcgcggaagtacagcccaggtggcctgccggcctgttgtttggtcaagctgagtgggcgcgcgcgtagccatgcctcactcaactgctgacctgtaacatcgaaatggtctgctctgcgtctcgtggtccgc

SEQ ID NO: 84316 - DNA, 544 bp, Zea mays
  unsure (1)..(544): unsure at all n locations
  Clone ID: MRT4577_176909C.1
cggncgcgtgggaccgcctccccgcgatgtgcgtgtccatcttgcccacatctcccaaaataggaactggcgctcccgttgcctcgttcctcgccccagtaatcgccagatgcgccctcgtctaccttccgaagctgctttggtgccccatcgtccgttggagctcgccttgttcgtactctaccttcgccgtcgccgtccgagatcgcgatttgttcccgcgcttcgaggaatcgatgatcaagcttcggcgatcaagtgatctagctcttcgagttccatgaggctgaagaccctgagcatctgtgtggtgaaggttgcctttggtgcaatctatgctcaggtaaagaaggcgtcgaggcggatctccaggagttccaggacgtcgacgagttcgaggattaggctagcgacctcccccagtcagctgcctgtggtgggttgtttacgttggctacgtttcgattctgtgtactttgatttatattatgtaaatgactctagtctgtaatatcactacttactctttattgtaattcgaagc

SEQ ID NO: 84317 - DNA, 262 bp, Zea mays
  Clone ID: MRT4577_17690C.1
ctttttatattttttttttttttttttttttgagcggggaccattaaaattaccattggggttacattttttgaaccaaacaacacctgtgaatgcacttttcaataacaaaatccaagtaatgggccactttgattttttggtactcctacaagagaacgaaaagaatatttaatggactgtttatttaatttacgaacgtactgccagaataacaatttgagtggggttacctacccaactaaacaaaacaaaacaaaaa

SEQ ID NO: 84318 - DNA, 337 bp, Zea mays
  Clone ID: MRT4577_176910C.1
ctcgcggactacattttgtggaatgacacccggactttcaatcgcaagcttccgatttaccttaataccttctgaaacgtcatgtaagggggcagttatgggtccgtcaaagccacggtagtgcacgcctttccctttcactggagcgagatctggcaagactgcaggaaatccatactagagcagaaagtcgtcgtgcacacgactctgttaaggctgtacaggcatggccccgagtgatgattatgggcatccttgcagcaagagtccccttgccatattttccttctagtacgacatcgtgcacgttcagctggattgattgagcactctgctc

SEQ ID NO: 84319 - DNA, 386 bp, Zea mays
  Clone ID: MRT4577_176911C.1
tcccacgcagacgcaagaacggagcggggggaaaaaaaaaggagacccccccgacccacccaccgggaaaaaacaagggaagcaaaaacgagccacacagcaacaaaagcgcagcaaccaacgagacccgaagaaacccagccaaccacgaagcccagacggccacgaagccaacaacaggggggaccacacaacaaaagcagaacgcgagacacagagaaaggggagcgccgcaccaaggccaaaacagcgacagagccaaagggagcacgggacagaacggacgagaaggcacacacggaggcagaggcagaaaggcagaacagaaaacctcgcgccggcaacaaggctgaaaagcacaacgacggggaaagcagccacagaca

SEQ ID NO: 84320 - DNA, 471 bp, Zea mays
  Clone ID: MRT4577_176912C.1
gcttgtgccccccagatccagatcgtttccccagatccagatcgcaggcgtgaagggcaactgttaccagattatgatccgttttcgagcttcgaggaatcgacggtcaagcttcggtgaccaagtgacctggttcttcgagttctgcaagattgaagaccctgagcatctatttggtgaaggttgcctttggtgcaatctatgctcaggtaaagaagaaggtgtcgaggcggatctccaggagttccaggacgtcgacgagttcgaggattaggctagcgacctcccccagtcagctgcctgtggtgggttgtttacgttggctacgtttcgattctgtgtactttgatttatattttgtaaatgactctagtctgtaatatcattacttactctttattgtaattcgaagcattgtgctatgatcagtcatttatgcgaaaaaaaaaaaaaaaaaaggcccctagggcc

SEQ ID NO: 84321 - DNA, 857 bp, Zea mays
  Clone ID: MRT4577_176913C.1
cattgtcctcctcgagggccggccgggatttcgccgctcaactatctccgtgcagccccctctccgcactcgcctcatcccccagcccccgctccctccacggcgaacgccgtcctgcagcctcggaagcagcgcaggtgcaagcgagctcgacgcggccggtcctcggctagcccagctcgacgcggccgaccccagcgcaccggcgtgcaggcgccctcgccctgctccctcgcgcagccgctgcccctgcgtgcggcacccgcccctgctccctgcccagcacacccagcccacgccatcggcgagccggcgcagcaagctcctaccgtgtggccatgtcaattgctacttcggtgcgaggcgcgctaccggccagcgagctccgctcggtcccccgccgtgcctggccggcgacgccaaaacagctcacccggtggttaccagatcgcggttcgtttctgagctttgaggaattgacggtcaagtttcggcgaccaaatgacccagctcttcgagttctacaaggctgaagaccctgagcatctgtttggtgaaggttgcctttggtgcaatctatgctcaagtaaagaagaaggcgtcgaggcggatctccaggagttccaggacttcgacaagttcgaggattaggctagcgaccacccccagtcagctgcctgtggtgggtttatttacgttggctacgtttctattctgtgtactttgatttatattatgtaaatgactctagtctgtaatattattacttactctttattgtaattcgaagcattgtgcaaaacccacgcgtccggactagttctagatcgcgaaatttctgatcctgacatgtacat

SEQ ID NO: 84322 - DNA, 554 bp, Zea mays
  unsure (1)..(554): unsure at all n locations
  Clone ID: MRT4577_176914C.1
tttttttttttttttttttttttttttttttttttttttttttttttttttttttttttttttttttttttttgggaccaaaacgggatcaccccgggtgggagcaggtcaaaagcccacaaccccctaactaagggttcaaaacaccccggggggggggaaaaagcccacaaccccctagttaacaaaaaagcattccaaaaattcaggtacgggatccctggagctagggggcccccggggaaggaccctaaacaactttttaaggaaattccttcccctttggggggcaacaaccgggggggctaggtccccaaaaggggggggggcatttggcggggtgggattcaaggccccgatagggggnaaggagggggacggggcccaatggcttacccatatcccattcgggggccggttccgggggggtgagagggtctcgggatcaaaggtttcttgtaagggggggggcgccccccggggggggccccggttcgccctgcggttcttggggggtggcttccccgggggggcgcggtttttccccccacagg

SEQ ID NO: 84323 - DNA, 271 bp, Zea mays
  unsure (1)..(271): unsure at all n locations
  Clone ID: MRT4577_176915C.1
tattcctgtgtcgacagtacctagtcggcggccgccctnnnntnnngggggttttttttgagatccacgcgtgtacaccccgaggtgtattagaaaaaatgacccatgcaggttacaacagggcctggacacaatcacatattgctggatggggggaaatgggactgctaatcacagggattgtgggtgatacgttgttacaccatcacgcgagatgcaatgtgccggaacacctcaatgatctgaccttgtccagatatcttctatgacc

SEQ ID NO: 84324 - DNA, 1276 bp, Zea mays
  Clone ID: MRT4577_176916C.1
ggccgctttttttttttttttggcagcggaaatcttgttaccaaattttacaagttacaaaaattttacattattttatcggagtgattacaaaagtatatgtttgaaatatatgctggctcaaacgaccatcctcaataagaagtatagaagggttacttagacttataagaaggccgagcccaccggcacttaacaccattacagcagcacaaggttagaacctgggtaacactaggttagtgtttgttaggcgtcgatcacttgacgaccatcctttgtcccgatacttgcttcgtctgtccatctccagttccgttcatcagcaccatcttgtggtcgatcagttctggttctccgcatcgcgtggttaattcacgtaccatgtccgaatcgactcggagctatgatttcgacaaggctatccggtttgagccattcatcgaacaccatgcgtgcgtcgatctccccaaaatcaaacaatcaatattcggcaagaacatcggtgccgatcttcccaacacgcgacgagcactggtccacacattttgccgaacagggagctgcaggggcgcacgaccagcgggcacgaggaaacgacgatagcgtggagcgagcaatttcgcgcgcacgacaacgcgatggaggtgaactgaacagagagcttcgcggcagcacgcgtagaaacaacggaacgctacgcgcgcgacgcaaaagcgagcaggaatttgggcgccgagcaggaagacaggggcgagctcgaggagatgtcgagctgatgacgagcgcgctagagcctgggcaccagagcagcgcaaccgccaggcccggacagggatcgaggcaggggcttggctgggacgtgacatgggagggctccggccatagatgaaagctgggcaagcaggacgccgtggggatggagagggactcggcaggacgcgtcggctgaagaacgcagcagccatggagctcgggcgccgtagggaggagatccgagctagaagaaactccgaccagggaacggcggccatggcagggactaggggagagagagagctgtgagcgccgagggagagaagctgggcgcggcctgcagtagagctgagcacgcgaccacggaagggagcaggagcttgtcgcgagcaggcaccagggagagagagacacgcgtgaagaagccgctcggcagagaggagcgcgcaaggaataggcatcgcgcgccaaaatatcagtacagcggtggctagcccggccggcctcgaggtacccaatg

SEQ ID NO: 84325 - DNA, 419 bp, Zea mays
  Clone ID: MRT4577_176917C.1
tgcggccyttgctcgcggcgccgtsgtccckggtgtytttacgccaktcggggtgcgcgcgagcgktcktctccgtgtgtcgtscgaaacgtacggaraccggcgcgatcscccgacaaggagatcctmragattgtcaaggagaacttcgctttaaggcctggcgtgatctgtgcgktcaaccttgacgtcaagmvaggcgggcaakgggggctgccctcaagacgggcstacggcvactttgggagggacgaccctgacttsacctgggaggtggtgragcaactywagtcggagaacccttcctgcctgaggcggcctttttttcyagtgrgacgcttttggtggtctgctgtgcttacttyatgcttttctgtggcttcgtactytgttgtggttttgttcttgctcttgctcgg

SEQ ID NO: 84326 - DNA, 366 bp, Zea mays
  Clone ID: MRT4577_176918C.1
ggggggaagccaaagaatttaaaaattggtggggttaaacccccctggggggataaccggggccccctaaaacacaccccccttggggggttttttaagggccaaaagtttcccccaaacaaaaaaaattttttggggggcctaaacccaaaccccccttggggggtttttgaaaggcaaacggttccccccaaccccaaaatccctggggggaggccccaccatccaagaaccgggcaagggtttaaaaggggggttttttttgaaaaaacctttggggccttgaaaggcccccaggggcaaaaaaatcgaaccaattagcggttttcaactttctgggagcccgggggggttggcccccccaaa

SEQ ID NO: 84327 - DNA, 392 bp, Zea mays
  Clone ID: MRT4577_176919C.1
gttcataatatatgattcatatgttgtaaaattataaggattttttgaaatgaatggtccatggttttcaaatcatccgacgtccgattaatcgcgattaattgtcctggtcggtcagatgaagtcgattaggggctccgacctgattaggtagtttggtcgtccgagtaatcgtcgcctaatcatgactaatcggccgtttagatatttgctgcgaccagaagttgtgaacatggaaagcaagcgctgggtccaaatttggtgcctcgttttcctttctgacgccttatttattggggctaataaaggaaccatttaaccgattggctggctttccaaatctactttctctctctctctctcttctccttcctgggccggcggctgctgat

SEQ ID NO: 84328 - DNA, 188 bp, Zea mays
  unsure (1)..(188): unsure at all n locations
  Clone ID: MRT4577_17691C.1
ccgacgcgtccgtctagcttgtgtgccttacttgctagagctnnncaccattanccttatgctttctaaaactagagcggctcaccaatacgccgtcgtatgcttagtaccgctgcttcgtcggcggcctcgcctgggactcctgtggacctcttcactgaaaatcccttgatcaactttctccttaa

SEQ ID NO: 84329 - DNA, 195 bp, Zea mays
  Clone ID: MRT4577_176920C.1
ttggggttttttattgaacgaccgagcgtaaacaccatacccaaccggggtaaaacaaaaatggcaccgtaactaacctagcaaaaccagttactaagactagcaagcacggcgtggcagaacagggaccacccacaatgggcgccacaggaaaacggcaaactccttgcacggactgagaagacgaaagaaaag

SEQ ID NO: 84330 - DNA, 1373 bp, Zea mays
  Clone ID: MRT4577_176921C.1
tcagatacggatttgcatggcattttatttctttgagcttagcttattatctgctgctgagcggcagggcccaggtcagtgtcagcactgcggccacggagagtgaagcaagacggggagcagccgggagcagtgcatggtgtggtggtggtggtaaaaggacggggattggacagcgacgctgatcatttatgccgccgtgtaaatacccaccacaagcagctagcttcgcaggtcggctccaacaactacaccggagaggcatggaataacagcggcggcggcgtgcatgacagcggcccgccgcaggtcgtccccgcagccgcgctccactcgccggtcccgtcgttgctctccttggctccacgtccgcgtcagcgggcattctcctcccccgaggctgttgctccgcttcacggcgtccacatctctctcattctcgtctccccccactgctagctgctgcagctctcaagctagctggcagctagggtttacaccgatccggggtccggtcgccgccggccggcggaagcgggcaatcgagctccgcgacgtcgagatctgcttaattgctaggtggtcgccgcgccggcagccccggcacagagaaagtcaattgctctttgcaggggttgctgctcgttttaaaagagatcctctagccgtcaagggcacccggagatggcgggcgcgggcgtgctaacaaggcgatgataaggggcggcaaccaccagcaggcggcggacgtcgaggaggagctagcccggcgtgcatgacagcggctcgccgcagatcgtcgccgcagccgctcaccactcgccgttcccatcgttgctctccttggctccacgtccgcatcagctggcgttctactcctcggaagctgatcagcagtttcaggtggagaaccttggctcgcaaagcctgtccttgagctcggcgagggcttaccatgatcaggctagctagcggactgcgtactggaacgactcttcgatcgagattaaggtagcaataatgctcactgatcccaaaattcccaagtacaatatactatctagctgtgcaagagtgtgcatgtcagagtttccaagtgccttttaaggatcggatcggaggcagttaagcttgtgatgatttcataattagtagtagacctgaaacagaataaaatgtgcggggcttgatcttgaagcgtacgtgtgtgtgccatacgaatttgttacttctttcaatacacaaaggagtaatattaatctgtatgctggcttgtagaataacaatatatggtttgctaatattacggttttagttataacattttatcttggcgacgtcgcggcaatggtcggcgcagacggagtcgcgca

SEQ ID NO: 84331 - DNA, 314 bp, Zea mays
  unsure (1)..(314): unsure at all n locations
  Clone ID: MRT4577_176922C.1
tgctggagctgctggacgtgcacaacaacagcttcaccggtggcatcccgccgcagtttggggagctcatgaacctagagcagctcgacctgagcatgaacgagctcaccggcgagataccggcgagctttggtaacttcagctacctcaacaagctgatcctcagcggcaacaatctgtccgggccattgcccaagtcgattcggaacctgcagaactgacaatgctggacctgagcaacaacagcttctccggccccataccgncggagatcggcgcgctgtcgagcctgggcatcagcctggacctgagct

SEQ ID NO: 84332 - DNA, 584 bp, Zea mays
  Clone ID: MRT4577_176923C.1
ccacgcgtccgaaccgaacaaacctttccccaaaatttcccctcccccgcaccgaacgaactctcgatccgatcccgatccctgcagggagccgcctcggctcaccgatccggccccggatccgctcgttgctcgacgggatctctcgatcgtctggacaagcatgctgcatcaggagaacagtgaggctttcgggaggcaccactctgagcagcttgcatgtgtcaacatgaggggagcagataatggtcatccgaatttccttcctgagaaatgccagattgcagtcaccatttttgccaagtggtgtcaaagaaacacctatagtggatcataacaagagacctgcatccagtgacatactggacatagttgaatgcaaacggctgaagcaggaagatcaaatcgttactaaggaagacaaccatacatctgctgaggaggaatttcatgactaccccacatacacgacttgcgaaagaagctttgactcaccactatatgagagtgaggaaagtgaagatgagggcgtagattcacctctccattgttcacatgctcgcacctatgttgaagatggtcta

SEQ ID NO: 84333 - DNA, 510 bp, Zea mays
  unsure (1)..(510): unsure at all n locations
  Clone ID: MRT4577_176924C.1
tnnnnnggggcnnnnccgaatgggtacctcgaagccggccgggccgggatttgatcattgtacagatgactctgtgactgttcctgcacatgactcaatccgaggttcttcctgtcgcttcatccgtgcgccctgttgtccgacaactgcctcgtctagatctcatcgaaattcgtgcacataccgagaaggtcgtacgtctaatggtgaccgacccgagatgggagaggaatcggcatgtggcttggagcgtctctcacctctgcaggtctggggacatttctgccgccagaaaggaagactcttgcatgatctaactaagtggtgttgatgcggtctaatacgagcccgttgcaagactcaggtggcatgaatactttttttttaccaccaccgacaagaataagctgtataaagactctaggcgttttgacgacatgcaagacgcgaagttctgcatgcaccactttctactgtctagaactagccgcagcctctattaacaattaa

SEQ ID NO: 84334 - DNA, 911 bp, Zea mays
  Clone ID: MRT4577_176925C.1
attccccaaggcgggggtcgccggcttccgcgactcaaatccgcgtgcgccggccggcctctaaatactgccccgccgaggggccggggccgccttttcttttcccgtttttataaagaaatcagcccgaaaaaaggacggggtcggcggtcgtgaaccgaacaacctttccccaaaatttcccctcccccgcaccgaacgaactctcgatccgatcccgatccctgcagggagccgcctcggctcaccgatccggccccggatccgctcgttgctcgacgggatctctcgatcgcggtctggacaagcatgctgcatcaggagaacagtgaggctttcgggaggcaccactctgagcagcttgcatgtgtcaacatgaggggagcagataatggtcatccgaatttccttcctgagaaatgccagattgcagttttcaccgaaggggtgaaaaagttggactatttgatgaagagctggtacatggtgttcatctaaccagtccttgtgttcagtcaccattggtgccaagtggtgtcaaagaaacacctatagtggatcataacaagagacctgcatccagtgacatactggacatagttgaatgcaaacggctgaagcaggaagatcaaatcgttactaaggaagacaaccatacatctgctgaggaggattttcatgactaccccacatacacgacttgcgaaagaagctttgactcaccactatatgagagtgaggaaagtgaagatgagggtgtagattcacctctccattgttcacatgctcgcacctatgttgaagatggtctatggcctgccagctttcatcaatctgttggccctttttccttgaggaaacctgttcctatcgggtcaaatcatcaggctgaattacctgagtgcaggcca

SEQ ID NO: 84335 - DNA, 887 bp, Zea mays
  unsure (1)..(887): unsure at all n locations
  Clone ID: MRT4577_176926C.1
gccgggctgggggcggtcgtgaaccgaacaaacnctttccccaaaatttcccctcccccgcaccgaacgaactctcgatccgatcccgatccctgcagggagccgcctcggctcaccgatccggccccggatccgctcgttgctcgacgggatctctcgatcgcggtctggacaagcatgctgcatcaggaggacagtgaggctttcgggaggcaccactctgagcagcttgcatgtgtcaacatgaggggagcagataatggtcatccgaatttccttcctgagaaatgccagattgcaggtgataacttagcagcatcctcttagctgcgctagacatttgtcttgactctaatacatgtttagtttgtcctgaagttcaccgaaggggtgaaaaagttggactatttgatgaagagctggtacatggtgttcatctaaccagtccttgtgttcagtcaccattggtgccaagtggtgtcaaagaaacacctatagtggatcataacaagagacctgcatccagtgacatactggacatagttgaatgcaaacggctgaagcaggaagatcaaagtaacaactccaccctctcttgaccagtacataacgtcttttctgaaagtttgtgtatgcagagacagttagataatgtacttgtcttttgtttattccagtcgttactaaggaagacaaccatacatctgctgaggattttcatgactaccccacatacacgacttgcgaaagaagctttgactcaccactatatgagagtgaggaaagtgaagatganggtgtagattcactctccatgntcacatgctcgcccctatgntgaagatggtctatggcctgccagctttcatcaatctggtggncccttt

SEQ ID NO: 84336 - DNA, 392 bp, Zea mays
  Clone ID: MRT4577_176927C.1
agaaaatgcttgacacaaaacgttctgagcttcgaaaagctgaatctgaggttgacactatgggagacaaggttgatgcactcttgagtcttgttcaaaagatatatgtaactcttgagcactactctcctgtttttcagcatcatcctgtgctattggatgctttcttgaagacatgcaagcttgttgcaggtatcagaagcagacaaaagaaggacttgcaagatacaatctaagttggagcagcaaggatgttccattattgaacagttctaatgtcgccatctaattcgcttgctatagcattccatgctaataaagctgcaccaacagctggcttcacctgcagagcaagcagctgcgaccgtcgaggagcgagtccaggcgcggct

SEQ ID NO: 84337 - DNA, 880 bp, Zea mays
  unsure (1)..(880): unsure at all n locations
  Clone ID: MRT4577_176928C.1
agagaatgcttgacacaatacgctctggcctgccacaagccgttccgggcgtcgacacgctgggtcggcgggggtcatgcacggagacaaggttaatgcactcttgagtcttgttcaaaagatatatgtaactcttgagcactactctcctgtttttcagcatcatcctgtgctattggatgctttcttgaagacatgcaagcttgttgcaggtatcagaagcagacaaaaaaaggacttgcaagatacaatctaagttggagcagcaagtttagagtggcctaaaagacactagagagagattaatttcgtcggtggaggaacactacacagtcgcaactcacaaggctgtgaaattgatctatggccaaattgacaccgcaaatctgcagccagaaggaagttgaggtagtccattcgacagaattttgaaatctagggtatgcatttcaagggcattaagctgtaatatatttacaaattgtagcaatgcatttttctaaacatagtttgataatggatgcagttatactgtctctgctcactccgcagatgattggattcatgtcctgtatggtgtatgtataagtctatgcactttataatgtacaaattatgatagttcaaattctgtgagggtgaaaaaaaaaattgtcagcagcatatgtagaaataacttagctgttatacaagccatagtcatattgtaagcatagtaacttcaaggctgtcttttacttgattctggnatttncatcgttcttataaattttggagcctgtttgtacaattattgaacagttctaatgtcgccatctaattcgcttgctatagcattccatgctaataaagctgcaccaacagctggctccacctgcag

SEQ ID NO: 84338 - DNA, 357 bp, Zea mays
  Clone ID: MRT4577_176929C.1
cctcggaaattctaagcgctgccagaacaagtttttactcctgaagcattgttctatcaattccatgatggcttggcaagattatagtagagacttgtatttctcatattgccgcaagtgctcccatgaagaggacattccgcaagtacagctatcgtgacatcaacctcgatgctctgcttaacatgtccaccgacgaccttgtccaactctttctggttgacgcctggagaaggttccagaggggcttgaagaggaagcccatggagatcatcaagaagctatgcaatgcaatggagctccctaagtgacttaacattgtgaagactgagattcaaggagctcccttcttatgat

SEQ ID NO: 84339 - DNA, 259 bp, Zea mays
  Clone ID: MRT4577_17692C.1
ctgacgcactcggatctgcacctggatattatcagaatgtgtatcataatatacagggtgggctacctatgatggcacctgagattacgatggatcacatggtggatcagattcagcctgcgacacaggctgtggcacaggctatgcaccatgagattcaccgtgattctcaatctaatgtgacacatatggagcatcatatgcatcggcctggggatgggcaatgggaccctgacggacacattgcgcgacatcttat

SEQ ID NO: 84340 - DNA, 537 bp, Zea mays
  Clone ID: MRT4577_176930C.1
atcttcccctagatccaaacgcgcaggagcaggcaccccgacggttaccaggcgcagactgcgatctatttccgagcttcgaggaatcgacagtcaagcttcggcgaccaagagatcaaactcatcgagttctacaaagttgaagaccctgagcatctgtttggtgaaggttgcctttggtgcaacctatgctcaggtaaagaagaaggcgtcgaggcggatctccaggagttccaggacttcgacgagttcgatgattaggctagcgatctcccccagtcagctgcctgtggtgggtttgtttacgttggctacgtttcgattctgtgtactttgatttatattatgtaaatggctctagtctgtaatattattacttactttttattgttattcgaagcattgtgctatgatgagtcatttatgtaatcgctgtgtacgtgaatttctgatcctggcacgtacatggttcgcattcggtttaccttcaaaatcgggtgtgacaatgtgtaagagctcaagtggcctgtcagtcgt

SEQ ID NO: 84341 - DNA, 2709 bp, Zea mays
  Clone ID: MRT4577_176931C.1
gggtacctcgaggccggccggggcgcgcgaggctcgctggaaacgccagtctacgggcaccgatttgcacgtgctgcatccaacgaacctggtttgatgcccttgtcggcatcggggggcttcgcctacccgcatcacccacgctctccccgcttccctatccgtgacgcagtcaggagatccccaattccccattcaccaatccccagtattgtagtagggggaaaaacgagagaaaagaaacagcagtagcggaggcaagacgaaatggtggccgccgtcgcgtcgccttcgtcggcggcaccctccgccggccgtccccatccgacatacaaggagatgatcatgcaggcgctgacggagctgcgggacccgagcgggtcgagccgcagcgccatcgccagctacatcgccgaccacttctccggcctccactcgcgccacgatgccctcctctccgtccatctccgcagcctcaagtcccatggccaacttcgcctcgtctctggcaactacttcgtctccaccgccgctcagcggcaggggcgaggctccaacatcccgcccaaccccaagcctgctccggggcagaagcgtggtcgggggcggcctcgcaagcacgcagattcagccccttccgcttcgaccccggcgtttcagggcgccaagcgagggcgtggacgcccacgcaaacgcaagagcgcccaggacccggtggcttcctccccctccccttcgccgctacagggagcaagtgttccgccgcctccatctggggtcaagagggggcgtggacgccctcggaaggacgcccttgtccctccgccttcctcttcttcgccactgctgggagggattgatccaccgcctccatctgggatcaagacgggccgtgcacgtcctcggaaggcccttgtccctgtgcgttcctccttttccgagctgctgggagctgttgttctaccacctccgtctggggtcaagcgtggccgcggacgcccgcgcaagagtgcctaccccgctgtggcgccgttggtgggagctgagaagggacctgctggtggacaaccacagaggaataccactcctctctcaccgacacctgctaccatgtcccacagtggtaagagtgagactgtccggctgcccaaggttgctgttgatatcagtgctttgcgtggttcctccatgaacatatctgcttctagtaacagtttggttggtgcgaagcggggaagagggcgcccacctaaggttgtggttgctgggaaagagaagatgcaacaacctgaatctgtgcagtccgtggatgcttcattgactaagagagggcgtgggaggcccagaaaggagaaggcattggaaagtggccgcatgaaagcctcgcagatgactgagggtcaacgtgaagctctgactgcagaccaagctggggctgtccaaaatgaagtagaagatagggatttgcaatccttgggtactcctttgacagagaagagaggccgcggtcgtcctagaaagaggccgttggaaatcgaaactgcaaaagcaggggctgctaagcgtgggaggccaagaaaggagaagacatctgaaactggggacttgaaagttgcacagatgactgagggtcggcatgaagctctgcctgcacaagctgtagaccaaactgggcctgtgcaaaatgaagttgaagctatgattttgcaatcccttgctactactcctttgatggagaagaggagtcgtgggcgacctagaaagaggccattggaaactgaaactgcagaaacccaagttgctgcatcggtggagaagcgagggcgtgggaggccaagaaagaagaatccatcggcagggtggtctgcaggaaccagggatactgcattaaaggggattaagagagggcctgggaggccaaggaaggccaggccttttgaaactgagtctgtgaaaactgcacttgaggtgtctagggacttgacagaagatgggcctcaaaaggatggggatcttgtgtcagggaagaaagcagatactcatggtgtggtttggtagtgtcaactgaggaggtagccattgctcccatggatgctgggtgcgcagacgccaagggttgatctgatggatgtgggcaccaagagtcactagtgctctgatggtgcgaacaagaacaaaaaagaaataatgatagtacctgaaaggctaaacagaacatgcagctaataagtgtgttcatggatataattaatagccatactgcaagtattgctatatgtttgcaccagtttgattactcgtatgtttttgagcagttccattggaaactgcgtttgatgggtttcacttttgggggttggatttaaatatctaacccacatcctctttctttgtcaaggactataacatttttgtaattttgttgcttgtactggaaactagccatcataaggttcattttgttttccagtttcaaaaaaatttagtgatatgttcacataatatctctgttttgtgctttatttggtgtgtctattgggtgtttggttggagggatgggacgagttggtccactattgcttcattcagtcattcctcatactaataagcacagagtattcagtataaaaacaaggatttgtgtcatctgagtaaattttgtagaatggtattatgatgtaccaaaccattgaggtttctcataccaac

SEQ ID NO: 84342 - DNA, 165 bp, Zea mays
  Clone ID: MRT4577_176932C.1
acggtcggctcctcgaccgggcgcgtggctgcgcatctgcaggagaggaagagtgaaatggtgaagccgcgcgtggctactcgatcgctcctctcctctcagcagacaagggcaacgacgccaacgcccgcgtgccgcggcgaagaagttgctccgtgggggggg

SEQ ID NO: 84343 - DNA, 695 bp, Zea mays
  Clone ID: MRT4577_176933C.1
gccggccgggttcgggcagcacgccgcctccccacaacttgccagccacgccattccctcgctgcacctcgcctcgccgcggtcggaactgtgcctcctcgtcgtgcgcagcaaccacagcccagcctcaactctagccccgtctcaccggcgcctgcagccacggctgctacgcgcgtgcgcagggcaacacgcgccctcccctcgatgtctgggctgctgcgctatcgtcgccatggagtatcgctgctgttcatcgacgtccacacctctctgttggcgttcttcttcttccgattgtgatccgtttccgagctttgagggatcgacgatcaagcgttggcgaccaagtgatcaagctctctgagttctataaggctgaagattctgagcatctgtttggtgaaggttgcctttagtgcaatctatgctcaggtaaagaagaaggcgtcgaggcggatctccaggagttccaggacgtcgacgagttcgaggattaggctagcgacctcccccagtcagttgcctgtggtgggttggttacgttggctatgtttcgattctgtgtactttgatttatattatgtaaatggctctagtctgtaatattattacttactctttattgtaattcgaagcattgtgcaatgatgagtcaaaaaaaaaaacaaaaaaaaaaaaaaaaaaggccccta

SEQ ID NO: 84344 - DNA, 474 bp, Zea mays
  Clone ID: MRT4577_176934C.1
cgaataacaataaagagtaagtaataatatgaaagactagagtcatttacatagtaaaatcaaagtacacataatagaaacgtagccaatgtaaataaacccaccacaggcagctgactgggggaggtcgctagcctaatcctcgaactcgtcgaagccctagaactcctggagatccgcctcgacgccttcttctttacctgagcatagattgcaccaaaggcaaccttcaccaaacagatgctcagaatcttcaatttcgtaaagctcgaggagcttgatcacttggtcgacgaagcttgactgtcgattccttgaagcttggagatggatcgcattctcgcgctctcgacgatggccggaggtgttgtgaatcggcatgaacggccgtggcgagctccgggagatgggcggcgcggctagacgggcttggtcgcgggcaccaggcagcggcgacttgagatggagttgttg

SEQ ID NO: 84345 - DNA, 632 bp, Zea mays
  Clone ID: MRT4577_176935C.1
ccggccggggcccacgacgcgcaggtccaaatcccgcccgctaccatgctctactcaagtgctcctctctcacccaacttccccacacctcatcatgcccaacactacgcagcagcaggaggagcaagagcccggcgaccatggtgtccgtcgtcctacccatggccctgcgtcttggaaaactttacctctgcgagcagccgcacccccataagctccggcggcgcccccatgatccccgctcgctgctctggcaagtccctcgaatgcgatccgttttcgagattcggcgaccaagagatcaaactcttcgaattctatgaggctgaagatcatgagcatctgtttggtgaaggttgtccacgttgcaaccactgctcaggagaagataaagtcgaggcggatctccaggagttccaggacttcgacgagtccgaggattaggctagcgacctcccccagtcagctgcctgtggtgggttgtttacgttggctacgtttcgattctgtgtactttgatttatattatgtaaatggctctagtctgtaatattattacttactctttattgtaattcgaagcattgtgctatgatgagtcatttatcaaaaaaaaaaaaaaaaaagcggcc

SEQ ID NO: 84346 - DNA, 595 bp, Zea mays
  Clone ID: MRT4577_176936C.1
cccagcgtccgcggccgcgtggggcgtgaccgtaataacccgctctatttcattttgcatgttttattatgtttttctttgaatggtgtaatgttcttatgcatatatgttatgagcggccaagggagctccattgattagtgatacttgatcagagatgttcggattgcaggtggtgatgagaatgatggttttttattatgattatggtaatggtaagtggtattctttccgtttggaaagggtactttgggttaagaacttgggttaatgctaaaacctggctttctactagtaataataacctgaccaactaaaagcaactgcttgacttaaccccacataaagctagtccactacagccaaacggggcatttgctgagtacgttgatgtgtaatcatccttgctttaccacaaaacaccaggttgtccacattgcaaccactgctcaggagaagacgaagccgtggaaggagacttccaggagttccaagactacgacgagttctaggtgtgggttggcggcaacccccagtcagctgcctgtgaagaccctatctttactgcgtttcgcttagcactttgatttaccca

SEQ ID NO: 84347 - DNA, 1261 bp, Zea mays
  Clone ID: MRT4577_176937C.1
gaaggtcttcctcgctctgatggcttcaattgcattttggtggtggtggatcgtctcactaagtacgcccattttattcctctacgtcaccctttcactgccaatcaagttgcttcagccgtgctcactcatgtggttaaactccatggtgtgcctgcttctattgtctcggatcgtgaccggattttcactagtgccttttggaaagggctgttcaaactgttggacacaaagctgttagtcagtacagcatatcacccacagacggatggccaaaccgaacgcgttaatcaatgtctggagatgtatttgcgttgcactatctacaactctccagccaagtggaaggcatggctgcctctggccgagctgtggtacaactcttcgtatcactcatccttgcaatgctccccattcaaggcattgtatggatatgaaccaaaattaccttcttttcctgtgctggctgatgtttccactactgatctttcctcactgatcaaggaaagggatcttcatctggaattattgaaacacaatttgctggctgcacaaactcgtatcaaacttcaagctgataagaagcgtattgatcggcagtttgcagaaggggagatggtacttctgaaactgcaaccttacacccaatcctctgtggccagtcgaccctttcctaaattggccttcaaatactttggtccttataaaatacttcagaagattggcgtggcagcttataaactggagttaccggctgggagtttggtgcaccctgtttttcatgtttcccaattgaagccctatactgctgactactctccagtatatgctgaccttcccaagatacctgatcttactcaaagggacctgcagcctcaatgcattctccaacgccgactggtcaagaaaggtggcgcggctattgtacaagtgctggtgcaatggcaaggacttccagctgattcggctacatgggaagactggacggtgatgcaagctcgtttccctgattcaagcgcttggggccaagcttccattccaggagggggtgatgtaacaccggcgccaaccatcaccggagttacggcataagtgtaatacgtgtttcattgtcgtttacgtattttgtaataaggttggtccactgtcaggccgtagggctttctgttaagacttgtataaggtgaacctcgtggagggagacacacagaaaaagaaaaatagaaatacctgctccaaaaaaaaaaaaaaaaaggcccta

SEQ ID NO: 84348 - DNA, 401 bp, Zea mays
  Clone ID: MRT4577_176938C.1
atcattggttgggaaacaagcccccaaaatacaggggctttttcagattccagggcaaccccaaacatagggggcgggccaattaagggttgaccgcctaaacggggttaaaaaatagttggaaaagcccaaagtaaaaaaaaccccttccccggtccaggcctttaaaaaagggggcgttggggcccaaaaaactagaggggcttcggcaaaaaaaaaaaaaagcttttaaagggggcccttgaaaccctgtatttgggggttaagggggcccccctaataacggggcacggagcaagaaaaaaccggttttggaaaaccaaaagcccggccaaaagcttgttttgggggaaaaaaaacaaaagggccgtttttaaccttaaaaaacaaggggggggggg

SEQ ID NO: 84349 - DNA, 1576 bp, Zea mays
  Clone ID: MRT4577_176939C.1
tgtggaatttgatggtcgatggctatgtaaagcatggaaaaattcatgacgctattgagttgtactcaaagatgtctgaaaagaatttggaagcttctactactttgatgtcttgttttatagacaacggaatgcttgataaagctcgggatgtgttctacagtatgcctcaagtagatgtggtttcctgcactactttactctttggatatgtgaaaggagggtatatatatgatgcactggaccttttctgtaggatgcacaaaaggactgttgtcacatacaatgtgatgatagctggtttgcttcatcaaggtaaggttaccgaagcttacaagctttttgatgaatctccaacacgagatttagtgacctggagctgtttgatcaacgggcttgctcaaaatggtttaaacaacgacgcaattaagctgtacaagaagatgctactgtcaaatatacggccaagtgattccattctttctagccttattagttgcttttcacatcattctatgattgttcatggccagcagtttcacgcttctactatcaggcttgggtttggatcacatttattaattcaaaatgcactcattagtatatattgcaaatgtggtgaaatgattattgcccaaaccatttttgataggatggacaacagagatacagtgacatggaacacaatgatttgtggttatgcattcaacagctttggtcaaaatgctattgagacatttgataacatgaaaaaggcccaagttgatcctgatgagatcacatttctcggcatactttctgcatgcaatcacatgagacttttggaggaaggcaaacatttcttcaatatgatgacatgtaattatggaattttaccaaataaaatgcattatgcttgcatggttgatctgtttggtaggacaggcatgcttgaacaggctgaagagttaatgaagtcaatgccatttaaaccagactttgcaatttggacttccctcttgagcagttgccgattgaatggcaatgacaggttggcagagcatgcagcgagtcaattaatttccatcaaacctactatcaaaatgccgtatctgcatctcatcagggtaaatggatcaaccaaaagatggaatgtgatggaaaatttgagaaatcaaattagaaatgctgctactgacaaagaagttggctatagctggagttaactgatgtgtactacataacaggagcatgtcaacaaggtaccagaatacaagcctgcctgtagcctaccgctgctgattattgaggtcattttttaacttttttgtggtggagccactatccatggatcagttatgcagaaacttgtcagtttgtcactaagcaggtaaaatctagtacattatgttgttagctaaccttcccctgacatcgaaggcattaccaagtagatgattactttgttgcttttcagtgccatgctgaatgtgtgaaattcttggtgttcaaaattcatgttggacgtgtgggcacctaagaaaaatgctgatacataccttaaattagtataaagattacattattatttgtcaaa

SEQ ID NO: 84350 - DNA, 499 bp, Zea mays
  Clone ID: MRT4577_17693C.1
ggaacacctgtttcccataatattttcatttcctccaatagggactccaaaaatacatccatgtcaactttaggttatttaggcccaaaaataaaaacggttagcaaaatgtccttccttttttgcatcaacattggaggaaggttgtttttggggaggatcaccaaccatgggttatgcatgtggctcctctcagcaaagggattctttccatcagtcctcagggcaaacctaacattttttggttcatcaacaaagtctcggggcttgtcattgaaattttgccactgtttcccatgggttaaatgtcaaaccttcccatcgggtttatgcctataaaaagcatgcatgttttttagtttggcatccttaaaattagggaacaaacaactcattcgatcgacaatgggggggtcccacatccccaaagcaagaatttttttgagcgcaaaatagcctacttcttttttttttttactcggggattttgaactctttt

SEQ ID NO: 84351 - DNA, 531 bp, Zea mays
  Clone ID: MRT4577_176940C.1
gccggccgtcccgggctctaaatagtctcccctgtgcaggcatccacttcttctctccctgatccaaatcgtgaaatagcgtcggcggttccctgcgctcctcccctctttttctagcggcgcgcagcagccacgaccggtgttctggcgatcctggacgccccctgcccagactgcgatccattttcgagcttcgaggaatcgacagtcaagcttcggcgaccaagtgatctggctcttcatgttctacaaagttgaagaccctgagcatctgtttggtgaaggttgcctttggtgcaatctatgctcaggtaaagaagaaggcgtcgagatggatctccaggagttccaggacgttgatgagttcgaggattaggctagcaacctcccccagtcagctgcctgtggtgggtttatttacgttggctacgtttctgttctgtgcactttgattatattatgtaaatgactctagtctttcatattattacttatctttattgtgaaaaaaaaaaaaaaaaaaggccccta

SEQ ID NO: 84352 - DNA, 479 bp, Zea mays
  Clone ID: MRT4577_176941C.1
ctatcacctggtggttgccgatcacagcgcccaatccaaagcaccccggcgagcgcccagacgcccagcttggctgtctcggcgcggcctcttcttctccggcgagtccttcgaccagtttgcgatccgtttccgagcttcgagagatcgaaggtcaagctttggtgaccaagtgatcaagctcctcgagctctacgagattgaagattctgagcatctgtttggtgaaggttgcctttggtgcaatctatgctcaggtaaagaagaaggtgtcgaggtggaccttcaggagttccaggacgttgatgagttcgaggattaggctagtgacctcccccagtcagctgcctgtggtgggttgtttacgttggctacgtttcgattctgcgtactttgatttatattatgtaaatgactctagtctgtaatattattacttactctttattgtaattcgaagcattgtgctaatacacaaa

SEQ ID NO: 84353 - DNA, 469 bp, Zea mays
  Clone ID: MRT4577_176942C.1
ctggttcgattcccaaaaccgctcgtctctatgcctgtctcgccgcgccgcccatctgccggagctcaccgctaccgtctgtgctgattcgagacccaccgtccgtcgtcgcgagggcaagatcgcggttcgtttcagagcttcgaggaatcaacggtcaagtttcggcgaccaaatgacccagctcttcgagttctacaaggctgaagaccctgagcatctgtttagtgaaggttgcctttggtgcaatctatgctcaggtaaagaaggcgtcgaggcggatctccaggagttccaggacgtcgacgagttcaaggattaggctagcgacctcccccagtcagctgcctgtggtgggttgtttacgttggctacgtttcgattctgtgtattttgatttatattatgtaaatggctctagtctgtaatattattacttactctttattgtaattcgaagcattgtgtc

SEQ ID NO: 84354 - DNA, 874 bp, Zea mays
  Clone ID: MRT4577_176943C.1
cgctctcgtctcgtctcgtcgcacgcgagcccatccccccgcccgccgcctgcgcttgacttgacccgcgctcctcctcggcgtcggggagaccgggctcggtccgcgttgtctcggcggacggaggaggaccgtagcgcgaccgcccgtccgccgccagagccctcgtcatcgtgccggctgctcctgccgctcgtcccgccgcgttgagcattggggatctcgcgggcccttcgtctgtacccgccgactcttcaaaccctagcctctgtggcccgccgacgccgacgggaggagctggagctggggctggggctggagggcgcggaagctggtggctgttgtttcgctgattgaaagtactccatggcttaatgttgaactggtaataaagaggtcaatcattgtcagctagctgtctgaggagggtttttggagttcttactaagaagagagttactcatgctagccagtgaaggacggacacagatcttgcttgctttactgaactgaagacatgcccaaaacacctcctgtcaatgcaagcaagaacactgaaccgcagaaacaatctgcacccaacttaacaataacaaatgggcacacaagtacaaaggtagtggttaaaaaagagcaccctatcaatgatgtgaaacacattagcacttgggtttgcaaaaatttggcctgtaaagctgttagaccagcagaagattccttctgcaagaggtgctcgtgttgtatttgccacaagtttgatgacaataaggatcctagtcaatggttagtttgttcaaaaaaaaaaaaaaaaaaaaaaaaaaaaaaaaaaaaaaaaaaaaaaaaaagcaaaaaaaaaaaaaaaaaacccgcggcc

SEQ ID NO: 84355 - DNA, 478 bp, Zea mays
  Clone ID: MRT4577_176944C.1
gcacaatgcttcgaataacaataaagataagtaataatatgaaagactagagtcatttacataatataatcaaagtacacagaatagaaacgtagccaacgtaaataaacccaccacaggcagctgactgggggaggtcgctatcctaatcctcgaactcgtcgaagtcctggaactcctagagatctgcctcgacaccttcttctttacctgagcatagattgcaccaaaggcaacctggtattttgtgaaagcaagggtgagtacacatcaacatactcagcaaatgtcccatttggctaaagtggactagctttatgtggggttaagctcaagcagttgcttttagttggtcaggtatttataattagtagaagccaagttttatcatatacccaacccgtgaaccttttcctcatcgaggaacatcattatcatcatcgaaccaaaatattaaatagaaccattatatatatcg

SEQ ID NO: 84356 - DNA, 941 bp, Zea mays
  Clone ID: MRT4577_176945C.1
cggcccgggatcacccccctgtgacgagtaagccaacctccatatcatcacggtagtgtattgtaacccactggggattccacctctgcttctttaacttcgacgtcgaccgtaatcaccaattagttaagtctgaatttcctcagggtcgcacacgcatgacatcacctccgcggacttcgtggtcaagatcgatcgctgtcgtgctgtcattgattagtgatttgtgaattctaaatttaaaatacattatatatacagtgaaataaattttaatttatttttatctttatatacaacatgtttggcatttagatgtagaattttgaataatttaatcacccctattattgagaataaagttttgtttatattctattttctatcatgatacacatgtgagaaatatttttctcaaccccgccaggtacactcacggtgcgccgccatagccctaaccgcctacaatagaaaaacgtcatcaggaaaacgctgcttgtgcatggctgctttttccactgctgcaaggacgctctcgtaggatttgatattagggtttctgtcataggatctgataaaataaattcacgagtgtgaaaagcttagatgaaatagatggagataaaataaactcacgagagccttatgaaatatcttatgaaacagatgttctagccattcgatgctcttttcacaacgttctcaagatatggaacctgaacgaacactccagcgtcgttggcgccttcaactgccaaggcgccggttggtgccgggtagccaagaagaacctcatccacgaccaccagcccagaacggtgagcggcgtcatccgggcgtaagacgtggagcaccttgcaaaggtggctggtcacggctggaacgacgatgtggtcgtgtattcgcacgtgggaggtaaaccatcatctttttttatgaac

SEQ ID NO: 84357 - DNA, 741 bp, Zea mays
  Clone ID: MRT4577_176946C.1
ggtctctctcctcagatccaaatcacgcagaagctgatgtccctgcacatggcggttccagatcgcgatctgtttccgagcttcgaggaatcgacggtcaagcgttggcggccaagtgatcaagctctctgagttctacgagattgaagaccctgagcatttgtttggtgaaggttgcctttggtgcaatctatgctcaggtaaagaagaaggcgtcgaggcggatctccaggagttccagggcttcgacgagttcgaggattaggctagcgacctcccccagtcagctgcctgtggtgggtttatttatgttggctacgtttctattctgtgtactttgattatattatgtaaatgactctagtctttatattattacttactctttattgtaattcgaagcattgtgctatgatgagtcatttatgtaatcgccgtgtacgtgaattactgatcctggcacgtacatggttcgcattcggtttaccttcaaaaccgggtgtgacaggctgctcgtgaaacagacgctgttttcgccaaggctggatgcaaccacctgaaaactgtcaataaaccaaccttcggccttttagcatcaaacttggacaacatcccagccgaggctagaagcgtaggtaatatgtttatcactcaaatctagacgaagggtggccgaagagttgctggagacgaagctcgggcactaattaacaaggcgagactgatgaagaatgacaatct

SEQ ID NO: 84358 - DNA, 228 bp, Zea mays
  Clone ID: MRT4577_176947C.1
tgggatgtccactggctgtcatcactgggcaacatcatgtcggtttgcagctttgccatgcacttcctggtactggtcagcaagctagcagctgtgagaaggggagacaagacgacacctttctccgccttgttgtgaatcgtgtcagttgtcacgatggtgatgcttgctggtctcaaaaccagtttcaaattggaataactaggaaatgggcagacacataccgac

SEQ ID NO: 84359 - DNA, 278 bp, Zea mays
  Clone ID: MRT4577_176948C.1
gcatgccacaacaaggagagatgctggagtgcaagcagtgaaaatagaacagcagcgcctttcgaaagccatcctaagctgctactagttttcccccgattccctgaagatatagcatttggaaaggacaggaagaagcaaggagttgcttgccaccatccaaagctcatagtgttacagagggaagacagcatgcgtgttattgttacttcagctaacttagtaccgaggcagtggcatctcataacaaacactgtgtggtggcaagacttcccttg

SEQ ID NO: 84360 - DNA, 548 bp, Zea mays
  Clone ID: MRT4577_176949C.1
acaaaagaattgggggtttccgtttaccaaaaaccaacagaaccaggggatcccacagattggtgtgctaaaatttattcccccagggggcccccatggaatctctattttaaaaaaacaggggaaaaaccaaacattccccccaaattttctcggaaaacgcaaaacctttccgcaacctatgggccaaagtcctccagctgtttgagctcggccttaagttgttccattttttgccccatggagcgaaggaccccctcggcgttggcggccggaaggccccctaaaaccccatcaaaagcaaagagcgcctttttgggggggctacgccccatggaggcctcccgggaaaaagaaacccctcccttgccctccatggccgccttgaccccctcccgcccctccgggaacttggggggcacctggcccaaattcttgcaaaactttgccaaggaggaagaaaaggccccgggggggttgaccctacccaaaggccccaccgcctggtttggccgcctcgccccaagctcaggcgagggcctcctttt

SEQ ID NO: 84361 - DNA, 1698 bp, Zea mays
  Clone ID: MRT4577_17694C.1
acgcgacatactagattacttgaggagagacatgataggaaaagaaggtgaaattttctcagcagaagatgctgacagtgcagaatatgaaggtgctccaagaaaaaaggagggagctttttatgtgtggaccagtaaagagatcgaagagacacttggggagaatgcagagctattcaagaaccattactatgtgaaatcatctggcaattgtgatctttcaccgatgagcgatcctcacaatgagttcagttgtaagaatgtgctcatgtgtggaaaaccagcttcttcgatgtcatcgaagtgtggaaaatctcttgatgaatattctcaaatcctgggagattgccggcagaaattgtttgatgtccggtcaaaaaggccaagacctcatttggatgataaggttattgtttcctggaatgggctagcaatatctgctttcgcaagggcttcgcaaattctgaagtcaggaccatctggaactatattcaatttccctgtaactggatgcaaaccagttgaatatcttgaaactgcagaaaatgccgctaactttataaaggagaaactttatgatgcaagctcaaagaggctgcatcatagctatcgtaatgggccatcaaaagcaccaggatttttagatgattatgctttcctaatcagtggcttgctggatctctatgagtttggtggaaagatagagtggcttctgtgggctgtccaactgcaagtcactcaggatgagttatttttggataaacaaggaggtggctattttaatactcctggagaagacccttctgttctcttgcatgttaaagaggattatgatggtgcagaaccttctggtaactcagttgcagcaatcaacttgatcagattatccagtatatttgatgcgtcaaaatctaccggttacaagcgcaatgtggaacatctcttggcggtctttgagaccaggctacgacaacttagcatagcgttgcctttaatgtgttgcgcagcagatatgctctctgttccttcaaggaagcaggtagtgatagtggggcagaaaggatctgaagaatttcaggacatggtagcagctacgttttcgtcatatgatccgaatagaacagtgatccaaatcgaccctaggaacacagaagaaatggaattctgggacggcaacaatgcaaacatcgcgcaaatggcacggggcagccctccggggaaaccggcggtggcgcatgtgtgccaggacttcaagtgcagcccgccggtaacctctcctgggtcgcttcgcgagctgctgaacaagacactggctgctgcaagctcagcctgaggccttttgcctcctgctatgttcgtagatgttctgataccagtgtaacaatagttaaaaaaaaactgtgtacatatttacatgtgagaaatataaataggattgtcagttaagctgtacagcctgttaaagccttctcagctgtacacatgttcacaataataaggcacggagcataatggtttccttttcagcgtttttttcgagttgttttagtcaaagaacaggagcatccaaaattgtaagtcgattggtgaaaactgaccagtttttggggttgtggggccatttataaaaacaaaaaaaaaaaatatgaccccggcccgttgatgtggtaaaaaaaaaaaaaaagggtggtcgagata

SEQ ID NO: 84362 - DNA, 260 bp, Zea mays
  Clone ID: MRT4577_176950C.1
attcttctcgagcggtcttcgcgaccatttttttaccccccccccacgctgccaatcgggcggggtcaattttaaaaatagctgcgcggaaaaaaaacccgggacaatcaaactcactggatttatcagaggtaacataccacccttaggagtgctaccccaatgcgcacacacataccctcaactcaaaatacctctgagctgtaacctcttaaacactataaagaataatcgcgaactcttatgtactctaaaacaaa

SEQ ID NO: 84363 - DNA, 299 bp, Zea mays
  Clone ID: MRT4577_176951C.1
caataaaaaaaataaagggaaaatcccttcaaatgacccccagaaaaaggggggaaaatcgatccatcatcgacccccctcatgcccacccccccttttttgggattaaatcgagcctcttgactttatctatcctggcgggaaccatttaatccttgaccggaaggctttcccccgcggcggagggcctgaaaagctcccccctcacctggttgggggccccaaaccccacggtcccccgggcctgtcccgccccctggaacccggcgtttatccttgcaatgaactcccggccccag

SEQ ID NO: 84364 - DNA, 783 bp, Zea mays
  Clone ID: MRT4577_176952C.1
gggtacccctacgaggccggccgggacatttaaaagatagtggctcgctagttctgctcggccgtgatcaaattctttccctccctttcgtcgcatgcttcaccaccaagtcttgtagcttcctctccccgcccgaaagccaaggatccatcgctccaactccaagcctctcaattccaactccatcgcaacagcctatcgagtccccgaacagtcctgcgcgcgtccgcaatggcggagacggccggcgcggctccagcacagcagcccgctagagtagctacgacgacgacgaacagcgatgtctccacgtgggcgtggctgcagcaggtcctcgcgctgctgttcccgtccagcctcgccgcgaaggccgcgctgtttgcgctcgtggtggcgctgctgccgctgctgccgtcggggcaggcgcccaggatctgggagctgccgcacctcctcctgctcggcatcatcatctcctacggcgtcttcggccagaagaacgccgacgccgaggtggccaccgctgcctacgccacgcccgtcgacgtggaggcgtcggtggaggcctacgtctcgcagatgatgcagggctcgcttgtcttcgacgaaaacgacggcaacgatggcgccaacaaggatggcagcgtccaacagcaggcgtggagctctcggtaccttccagacgacccgctcgtggtcgtcgcggacacttcagcgccagggaccaacagcggcaacggcgacaccgacacgggtgggaaagggaaaccactcctgctgccg

SEQ ID NO: 84365 - DNA, 345 bp, Zea mays
  unsure (1)..(345): unsure at all n locations
  Clone ID: MRT4577_176953C.1
aaaaatcccccaacggnggcagtcatacaacaatgcaacaaacatttcccccaaatgtgccgtataccgttacaattccacacattcaagtccccctatatatcgaaaccatcactctagcaaatcccacaaacagaagttaataatgtacccagctatgcctggatagcattttttattttgctacaaaaaaaaatacatttccacgcttccgacgacaattaacttcctattattccaactccgcaacagcaaaaccaaatatcactcccattcttttagggcaccacccctcccaaattcctttattaaaaatctgcttactgatgcacccacttcactctt

SEQ ID NO: 84366 - DNA, 323 bp, Zea mays
  Clone ID: MRT4577_176954C.1
ctattctggagggtcggtcgcgtgcaagtcgtgcagcaagacattcaacagtgagggcgctctagcttcgcactccaaggccaagcatgaggccaagtagattaaaagaggaggatgctggctggctgcctcctatgagattatcgttatgctcctgtcctgtgttaggctatctactatatccttatgttgtcgtgcgtgttccctaccctacctttccttacctagcctcatccttatccttttggaagggaagggaaggcaaggcaagttaagggagaaaccgttgagctgttagtgatgatgagttgttgccgtgattc

SEQ ID NO: 84367 - DNA, 434 bp, Zea mays
  Clone ID: MRT4577_176955C.1
gccaccaagctccggacggcagacgaaggggtgaccctttccggatcctcctccgagagacctcttcctcctatcgcccgttattagcccaaccaccatcaccggcatcattcataaacaaaaaggcaggaaggaagacagtccctcagtagggacaagcgcagacggagcgaggcgtccgcgcaccgcccttccacctgtactcttcgccttgcgtgctcctggcttcaggaaaccgccgcacgccatccagcctgcggtgcggcggtcgcgcagcccgcctggatgccacagttttttttctccttccgcttctccgctaacgctaccgctaccaccagaggcgagggcccccgagtagaacgaacgaattcgttacccgggcagcgcaaccacgcacgcgcctagagaaccgctacgagacgaaagattcc

SEQ ID NO: 84368 - DNA, 180 bp, Zea mays
  unsure (1)..(180): unsure at all n locations
  Clone ID: MRT4577_176956C.1
catactgtatctnacatacactcgacaatcggctcgatctgacagcaaaagaaaaacaccaaaaaaccaagcagagactagggttgtgtatacctgagcatgggatgagaaataaactagttgccaaaccctagcccgccgatgtcgcgcgttctgtctccggcgcccggctactcctct

SEQ ID NO: 84369 - DNA, 119 bp, Zea mays
  Clone ID: MRT4577_176957C.1
gtcagatcaccagaaggcggatcacacgattcaagattaagctctcgcccgtgcgaaggggtacctatcttatagagtacattaacttaaacttactgtcctgccttttacaagccgac

SEQ ID NO: 84370 - DNA, 617 bp, Zea mays
  Clone ID: MRT4577_176958C.1
cctcgaggccggccgggccggggttctctccaacctcctgggctcacgaggtcatcctcctgcttctcttcctctcctcgaagatgcccaacaaaccctaaaccgaagacccaaaccctcctcgcgttaacacaccagatgctaaccagaagagccagctcctcctcgaggaagatcgcgacggtctgtgcactcgcactctgagctcgagaaacccggaggccaccgcatgtgcccggaaaacatcccacgtgtcggccatagaccaagaaatgtggacaaaagagggagcatagggtgcagcgacatagatgtcagagcgctacgaggatagcaagacaaagaaggcgaaggcgtactctcgtatctgcaatgggtctgacatctgctccgggcgtagcaacagtgtcgccactaccgtcaggcgccctcaaggatcgcgacgtcgatcggatcgcgacgaagataaatcaatacatcccactacactgacatcgatgtgaaagtaatagacgtcggcaagatcctagaatacggccacatactcgtcgctatccgggcacgagctactattagtgagcgacccagtatcgccatcacgatgaatgtaagatgat

SEQ ID NO: 84371 - DNA, 631 bp, Zea mays
  unsure (1)..(631): unsure at all n locations
  Clone ID: MRT4577_176959C.1
attcggctcgagtactaggataatgatttagtttatggaccaagtacatcacaaacattgccttgaaaaggtggtatacatctgtacaaatcaatgtttgtgatgtactaggataatgatttaggggatggaccaagtttgtattgtagttcttgattcgctcatgatcactttttgtcaatttagctatatatactctaggaaatgtaattgaaaaagggggaatggatgtgctgtcaagcatctgaatctgcatggaaacaggccttcttttatagtgtcatctagtgcattcttgtgtacagctagtatatatatattccatgtcctcagttaagattgacatcatattgaggttttgacaaataatgaagtgatgtctgtaggcttctcaaagccaggggaggagtggaactcagaagtagaagatggcctggatagtttaaaagaactaggacagagtaaatggtcaaaagattttgaggatgaaaccacaaagtccgagaatacagaggaaaacacacatgctctttctggcctggcccggacatatagcacaggacgcaaaaatgtcagttggggtgatcggcttgaaaaggtnnggtttcatttatgcaactaaaagaaacta

SEQ ID NO: 84372 - DNA, 420 bp, Zea mays
  Clone ID: MRT4577_17695C.1
attgcagagaggctcaggaagaggaggatgcggtcagggctcaacaacagcctgccgctgccaccactggctttctgaatggccaaagccaaacagagagggtagaaatagttgcggtgagtcgaaagaggtgatcggcgcctatttatttgttgatgtttggtgtggtggcctggggggtgctcttggcacaagttacatgctggggagctataggaggtacttgttgtattctggaagacagtagctagcattatgtgttgtaattgtatgccatcgtttcctgttttgggtgcgtgacttgccgacttagctgcttctggtgttttgaccttggtaaggagagaataaagagataatgggagtgcaatgtttgctgaactggtgctcaataaattgatccccttgatggttctattt

SEQ ID NO: 84373 - DNA, 257 bp, Zea mays
  Clone ID: MRT4577_176960C.1
gccgagctcctaaaaaccctacgagcgtgcttgatcggcggctgataagtgatggagatagacggtgacgcgtgttcgaatgcactttgtggatcattactaccgaacgttcgacaccaaccgtgcggcgctggttgggctgtgccaggagacctacaagctcaccttcgagggccagatgctgcagggcctgcccgtcattgacggctagctcggatctctccattatcatgcctgagagcatcagatcgtaatag

SEQ ID NO: 84374 - DNA, 255 bp, Zea mays
  Clone ID: MRT4577_176961C.1
tgcgtacgcactaccactcttctgctcgctctgtcatatgtctcgagcaactaaatcgtcgaacgtgtgcacctctggaactgctggcatcccactgcatggatttctcggacacgagcttggtctctttctgatgtttctaacgttatcatgctgctcgctcctgtgaacgaaatatcacagagttctagattcttttcgtgctctgataagaataaacaatgaggtttcagtttaaaaaagaactgacaagct

SEQ ID NO: 84375 - DNA, 215 bp, Zea mays
  Clone ID: MRT4577_176962C.1
tctggaacagattgtgatgaggttgaatgggtaaaaaacacccaccgaccgctgtgtccccttgtacatcaccttaaagggctgcccactcctgcattcttggcccacaacccggtgcttaacatcttctcttcttcctaccggaactatttctttggccgtcgattaccctacatctttcctgtctgaagttatttttcggtcaaatttcctca

SEQ ID NO: 84376 - DNA, 842 bp, Zea mays
  Clone ID: MRT4577_176963C.1
atctctcgtgtgcctagacatggcggcggcggcggcgcttcctgtagccaagacggcaccggatctgccagaaatggatctgattagctctctccccggtgagatcctcagcataatcatatccctcctccccataggctccgccgtgcgcactacatccctctcccgccgctggcgccctctatggcgctcctccccgctcaacctcgacatctcccacatcgacgggtgcggccgcgaccgcgccgccgccgtgtccaagatcctctccgaccacccgggccctgcacgccgcttcctgaccgcctgcctccagatcaccgaccccgacggctggctcggctcccccgccctccgagacctccaggagatcgacttctggctccctcggtacgaaattccgatgccactgtccattctccgcttcgcggcgaccctgcgcgtggcccgcttcggcaattgcaggttctttgagtacgacgcgccaccgtcgtttaacttcctttgccttgagaagctcaccatgagatttattttcgtacgggaagacaccctccactgcctgctcgatggctgccctgtcctcgagagcctgctgctggacaggtgccacggtttctactatatggtcatcaattcactaactcttaagagaatcggcacaaatggcggtcggcatggctgtcaactagttatagaaaatgcccccagactagaaaaattgatcaggactgaccttcatccagagtcaacatccggctaacaaggcaccgaaacttgagatctttggcttcatgacagacgactttactaaactcaagctgggggtatgaaatttctca

SEQ ID NO: 84377 - DNA, 571 bp, Zea mays
  unsure (1)..(571): unsure at all n locations
  Clone ID: MRT4577_176964C.1
ccggccgggaccggccgcctcgctcgcgcagcgcgcatgcgcgctctccacccgccgcgccgtgctcatcgtcatgcggaggagccccgccgagccaccgccgttcgcgcagtgccgcgctatgcctgctgtcgcgctgtccgccgttgtcgaagtcgcgtcgtgccgcgctgctcctgctgtcgcgccgtccgccgccgtcgaagtcgcgtcgtcacgtcgagatcgtgatctgtttccgagcttcgaggaatcgacaatcaagctttgacgaccaagtgaccaaactcttcgaattctacaaagttgaagaccctgagcatctgtttggtgaaggttgcctttggtgcaatctatgctcaggtaaagaagaaggtgtcgaggcagatctccaggagttctaggacgtcgatgagttcgaggattaggctagcgacctcccccagtcagctgcatgtggtgngttgtttatgttggctacgttccgattctgtgcactttgatttatattatgtaaatggctctagtctgtaatattattacttactctttattgnngatcgaagcattg

SEQ ID NO: 84378 - DNA, 620 bp, Zea mays
  Clone ID: MRT4577_176965C.1
cctcgaggccggccgggccgggtcttcaccttatcccaccctcgctatgcacatccaccactgcccatgctaggctcgctgcggtgccgcgtcatgccgcgcccgcgcaccgccaccagtgtctcatcacacatcaccgagctccgtcgagcgctggagaatggacatcagccacccccatccgaaggcttgcagcgcccgaagctacgccagagcaccacggacatcgacgcctctgactgcgatccattttcgagcttcaaggaatcgacagtcaagcttcggcaaccaagtgatcgaatttttcgagttctacaaagttgaagaccctgagcatctgtttggtgaatgttgcctttggtgcaatctatgctgaggtaaagaagaagacgtcgaggtggatctccaggagttccaggacgttgatgagttcgaggattaggctagcgacctcccccagtcagctgcctgtggtgggttgtttacgttggctacgtttcgattctgcgtactttgatttatattatgtaaatgactctagtctgtaatattattacttactctttattgtaattcgaagcattgtgcgaaaaaaaaaaaaaaaaaaggcccctagggcc

SEQ ID NO: 84379 - DNA, 113 bp, Zea mays
  Clone ID: MRT4577_176966C.1
cacaagtcacaatggctactagcactaagcttgtagctcttggctttgttgtcctcgtgagcattgggttcaccaatgcttcaaggatgctggctagctcaagtgctggaggt

SEQ ID NO: 84380 - DNA, 765 bp, Zea mays
  Clone ID: MRT4577_176967C.1
agcgcagccatctcctgaccgcacattagccaccccacgtcttgctcaccgtcgggcagaggagccgtgccgcgctcaccatcgctcatgtccaaaccatcggcgtcccggccatgtatcaagattgcaatccgtttccgagcttcgaggaatcgaagatcaagagttggcgaccaagtgatctggttcttcgagttctatgaggctggagatcctgagcatctgtttggtgaaggttgcctttggtgcaatctatgctcaagtaaagaagaaggcgttgaggccgatctcttcggccgggtcttttttttcccctacccagcacatcccgcagcccctgccgcagtgcatgacgccatgtgccggagcattgttgttcgccatcgtttcgccgacagcgcagccttcttctggtcatcttcttcatctccgattgcgatctatttccgagcttcgaggaatcgacagtcaagcttcggcgaccaagtgatctggctcttcgagttctacaagattgaagaccctgagcatctgtttggtgaaggttgcctttggtgcaatctatgctcaggtaaagaagaaggcgtcgaggcgaatctccaggagctccaggacttcgacgagttcgaggattaggctagcgatctcccccagtcagctgcctgtggtgggtttatttacgttggctacgtttctgttctgtgtactttgattatattatgtaaatgactctagtctttcatattattacttatctttattgtt

SEQ ID NO: 84381 - DNA, 585 bp, Zea mays
  Clone ID: MRT4577_176968C.1
tgaacgttttctccaaatccattccctagctcccggtattgctcgccgaagttcggggcggttccaactccggcgagcaattactcccaatccgtgcatcgtctacggaatccgagggtaccgctgcgttcgtctcgtcgagggcttcgtcgcagcgcgttcggttcgtcgattggatccccaaatctccggcaatcgacggattttctctcggctccggcgaggatcttctttcccgatcgcgattcgcttctgagcttcgaggaatcgacgatcaagcatggcgaccaagtgaccgaactcttcgagttctacgagatcgaagaccctgagcatctgtttggtgaaggttgcctttggtgcaatctatgctcaggtaaagaaggcgtcgaggcggatctccaggagttccaggacgtcgacgagttcgaggattaggctagcgacctcccccagtcagctgcctgtggtgggttgtttacgttggctacgtttcgattctgtgtactttgatttatattatgtaaatggctctagtctgtaatattattacttactctttattgtaattcgaagcattgtgct

SEQ ID NO: 84382 - DNA, 582 bp, Zea mays
  Clone ID: MRT4577_176969C.1
gccggccggtccgggctcgacacacaagtagtgctgccctgacgacgtctgttctccgaagagcgccgacggggcttcccgcttgaacttgcttcatataatcctcctgttcgttcgacctcgctgcgctcactgatttgtggttgtggggcacgacggatcctccaacggtccagatcctctgtttacggtgattgatggtgctggaggtgcctcggcccgttcctccgtcgacacaggatgtggctgatcacgaagccggcgatgatcgaggtgctgctgctcttctgatcctcgcggcacggtgacgacgaccattgtgagggcgcggctgcgccggaccaaatacatcatgcaaggactagtatgttcgagtacagcatctgctctcgcgctatggagctggacaagaatgtcgaccgcatgacgcaaatcgagagcatcgtctgcgactccggatgagctcagggactactacatcggcagtatgctcaatgaatcatgcagcgcgccgcttaatgaggtgacgttcaacgtagtgtgtcacacatagtaacaacgacttccagatatgcgtgactg

SEQ ID NO: 84383 - DNA, 681 bp, Zea mays
  Clone ID: MRT4577_17696C.1
ctcatgtgcaaaagaatccaattcttgaatcagataagggtaaaaaaatttactatagcttcttaatactatagcagctaggggattggtaacctttggagtcaatattgtacactgtattccattttgggaaaataactaacaaggcccaatggtaactgaaatgaggaagatagaacattaagatacagattaaaaaaactatagagtgttattagtgctaggccatacccttcctggcaaacaacaaatgaagttagtaaaagtgtacctctgctagttgtatgcctgacttaggccataacacaaatgaatttttggcttcgccaagagtgaacatatcaccaccagcgataggtatagggagtggaaattccaataagttgtcaaacacaaaatcaacctgcacttttgtgtggtcatctcgccgctcaatcccatggacggttacaacatcctttggagggtaagcctgccctctagcgaccacaacagattgtggacctatctgcaccaccaacttgcatttcatcacctcctgaaatgttaaacataggaagaattaagggaaaatgcagaatattagtggcacattgattttgttatctgataagtcatatgtgctggaagtagatgaagttacttgtaatgagtcaactgaatgatgtgttgcatggcctg

SEQ ID NO: 84384 - DNA, 577 bp, Zea mays
  Clone ID: MRT4577_176970C.1
gaggctcggccgggcacccatcttatttatcatactacctactactagcgagggcactacctacatccatcaacaagcgaggcagactttatgcgctgctcgccctgctttgctttgttatttcgtgatgcgtcggtgactattatatcacaatgctcagatcactacctttcttcagtgcaaggcgcgagattagaatacccatctattctatactacagtatacactacgccatgacatcacgcatcgtacggtacgtaggattgaccggacagcacccatatgctctattgtatcgaccatacttagcgtatcggaatcgccaatacatagaatcgcagcacctacaccaccggatggtttcatcacataattaagtaaatgcagtgaaccttgctgtttaccttaacttacaacacttcatttcattcaattaactaaatggggtgaaccgatgctgtgtacttgactggacagcacatactatcataccatcaaatcgacttgagccctgctgtcttgttattgtattgacagatgatgtcatgccatttacaagacgaggcgaacattgca

SEQ ID NO: 84385 - DNA, 693 bp, Zea mays
  unsure (1)..(693): unsure at all n locations
  Clone ID: MRT4577_176971C.1
ggtcaatggagagtagctctctccgggcagaaagggaatcacgactcgtgggtaaagtgtgcgacctctgcagagggttagaaactgatatatcagccgtgctcacggttatgagcggccttgggatcctctttgattagagatacttgatcagagatggttggtttacaggtggtgacaaggatgatggttatgactatggtaatggtaagtggcattctttcctctttcccagagtagagttcgcaggcgtgaaggacagcggtgacaaaatcgcgatttgttttcgcgcttcgaggaatcgacagtcaagcttcggcgaccaagaggtcgaactcttcgagttctacaaggctgaagaccctgagcatctgtttggtgaaggttgtccacattgcaaccactgctcaggagaagacgaagccgtggaaggagacttccaggagttccaagacatcgacgagttcgaggattaggctagcgacctcccccagtcagctgcctgtgngtgggttgtttatcgttggctacgtttcgattctgtgtactttgatttatattatgtaaatgactctagtctgtaataccattacttactctttattgtaatttgaagcattgtgctatgatgagtcatttatgtaatcgctgtgtacgtgaatttctgatcctggcacggacatggctcgcatt

SEQ ID NO: 84386 - DNA, 716 bp, Zea mays
  Clone ID: MRT4577_176972C.1
gccggttggaaaatacattgaccctcgtcatctacaccctctctctctcccaaatcctctcactgcgaatctgcgatggccgttgcgcagcgtctcaccgcgctggagctccaccattgctgctgcccaacacctcgtcatacgtcgcgcctagacttgagctcgctgcgcgctgggagccccgccgagttcgctgttgagcaccgccgcggaagactcttcctgccgtgcgtcgtcgcaagactgcgatccatttccgagcttcgaggaatcaacagtcaagcttcggcgaccaagagatcgaactcttcgagttctacgaggctgaagatcctgagcatctgtttggtgaaggttacctttggtgcaatctatgcttaggtaaagaagaaggcgtcgaggcggatctccaggagttccggggcttcgatgagttcgaggattaggctagcgactacccccagtcagctgcctgtggtgggtttatttacgttggctacgtttctattctgggtactttgattatattatgtaaatgactctagtcttttatattattacttactctttattgtattcgaagcattgtgctatgatgagtcatttatgtaatcgctgtgtacgtgaatttctgatcctggcacgtacatggttcacattcggtttccttcaaacccgggtgtacatgtgtttcagcaaaaaaaaaaaaaaccaag

SEQ ID NO: 84387 - DNA, 645 bp, Zea mays
  Clone ID: MRT4577_176973C.1
ccggcccgggactaataaatccatctgatacacagacaagatcgctcccctcctcaatgcgatagacagccttgttcttcttgcctctcttccgcctcccgcatgactgagaatgaacaacacaaagagatctatgcatattcgtacggtactggtgggatcttcgacatcacgacgccccacgacaccgacaatggcaatacagacgggacgaatgatatccacaaggaatactactcgaaatgcctagctactgcctcccctactaacctcatacccatcgttgacttccttgtaacctcactccacttcacttgccacctgtaagggcacaccagaccactcacagatggcataggcaatactggctgtctaccacagacctatccatgattacgtccatgatatacgaatccagattcaacatctggataacctgaacatcacctgataaatgaaccctgacacataccttccatgcgcacaagacctacgaactcactgccactctgaccagtacgactgctaaattcttcccatctctgtgttgatggacttcataaacaaacattacatgctctgctgctcgctgttctactccaagttactccacatgaacctgaacacgcacctacgacatgctaa

SEQ ID NO: 84388 - DNA, 648 bp, Zea mays
  Clone ID: MRT4577_176974C.1
ccggccggggctcgcaaccgcccccgggaggcccctgctaagatcctgcgcagatcgcccccacggacgcagcaaggcagggatgggcctctacgcacggcagccggccggctgcagcccctagccgtggccatggcggcggccatccccatcccagccgatctcggtcctccggtgatgcccttgcgtcggtcgagtgccagtcgcctgctctggatgacagcagagctgtctcgcccgcactcgacgtcgtccgccgaggagcctgcgtggagccgttgccgagatcgcgatttgtttccgcgctccgaggaatcgacgatcaagcgtcggcgaccaagtgatcaagctctctgagttttatgaggttgaagatcctgagcatctgtttggtgaaggttgcctttggtgcaatctatgctcaggtaaagaagaaggcgtcgaggcggatctccaggagttccaggacttcgacgagttcgaggattaggctagcgatcacccccaatcagctgcatgtggtgggtttatttacgttagctacgtttctattctgtgtactttgattcatattatgtaagtgactctagtatttaatatcattacttaaaaaataaaaaaaaaaaagaaaaaaaaaaatttgcggcc

SEQ ID NO: 84389 - DNA, 1082 bp, Zea mays
  Clone ID: MRT4577_176975C.1
ccggccgggatatatattcctcttcaagcgtgttctagatctcgtgttcttttcgcaagatcgacaaaccacctcatcttcccgcgaaattatgtcgctggctcgcgtctaccctgctgtccacccctgtctaccttcatctacccctatttaactctatctaacctagtctcgcacaactcgtcgtgtaaccgcctcttgcttgatcagtacgcaagccacgatggaatcgtcaaccacatcccacactctcttccctatatatagatacacccctgacattacacatcctttcttttatttcccctacccagcagcatcccgcagcccctgccgcagtgcatgacgccatgtgccggagcattgttgatcgccatcgtttcaccgacagcgcagccttcttctggtcatcttcttcatctccgattgcgatctatttccgagcttcgaggaatcgacagtcaagcttcggagaccaagcgatctggctcttcgagctctacgagattgaagaccctgagcatctgtttggtgaaggttgcctttggtgcaatctatgctctcgaaaataataactaccaacggccgaactccaggagtccatggcgttcgtccagcagaccagattaggctagcaccccaacccatgcggctcccctgccatccgtgttccctgcgttctagggtggtcgtcccgcgttgttgccgtcgagattgcgatctgttcccgagcttcgaggaatcgacggacaagcttcagcgaccaagagatcgaactcttcgagttctacgaggctgaagattctgagcatctgtttggtgaaggttgcctttggtgcaatctatgctcaggtaaggaagaaggtgtcgaggtggatctccaggagttccaagaattcgacgagttcgaggattaggctagcgacctcccccagtcagctgcctgtggtgggttgtttacgttggctacgtttcggttctgtgtactttgatttatattatgtaaatggctctagtctgtaatattattacttactctttattgtaattcgaagcattgtgctatgatgagtcatttatgt

SEQ ID NO: 84390 - DNA, 602 bp, Zea mays
  Clone ID: MRT4577_176976C.1
gccggccggttcggggcgcccagatcgctaggcgatcgtgcccacgcccctcaccccatacttctctcccagaaccgccctccacttttccccgcccgcacaacagcctctggaggtcaccgtcgacggcagcgttgtcgtttgcctcgcgatgcaatgcatgccgaagttcgtcgatctcgccgtccgccgtcaggcatcacgagactgcgatccatttccgagcttcgaagaatcgacagtcaagctttggcggccaagtgatcgaactcttcgagttctacgaggctgaagaccctgagcatctgtttggtgaaggttgcctttggtgcaatctatgctcaggtaaagaagaaggcgtcgaggtggatctccaggagttctaggacgttgatgagttcgaggattaggctagcgatctcccccagtcagctgcctgtggtgggttgtttacgttggctacgtttcgattctgtgtactttgatttatattatgtaaatggctctagtctgtaatattattacttactctttattgtaattcgaagcattgtgctatgatgagtcatttatgcaaaaaaaaaaaaaaaaaatttgcggcc

SEQ ID NO: 84391 - DNA, 537 bp, Zea mays
  Clone ID: MRT4577_176977C.1
gcgctgggcagcgaccggtccgccacccgcgcggaggccgccctggcgctcgcggagctctgcggcaacgcgggcaaggccggcctacggcaggaggccgtggtcgcggacgccgtcccgcggctggtgtggatgctggaggccaagcccgcgggcgagcgcgacgccgcggcgcgcgcgctggctgcggtcctggacgcgtcgagtgggtgccgcaaggcgttccggaaggacgagcgcggcgtggtgaacgcggtgcagctgctggacccgtccgcgcccggcgtggagacgcggttccccgtgtcggtgctgctggccgtggcgcagtcccggcggtgccggaagcagatggtggccgccggcgcgtgcgggttcctgcagggactggtggcctccgaggttgtgggcgccaagcggctcgccgagcggctcggcaaggggaagatgcttggcgtgttcccgcggacatgacgctcggtggcgcatcaacctcagctgtatgtatgtgctcctgcttctatgtgatataaacat

SEQ ID NO: 84392 - DNA, 368 bp, Zea mays
  Clone ID: MRT4577_176978C.1
taggggggggttttgtgctacaattggactgtccgcctgcactctcatacttcacctttcggccataagaccaaaagagtacacggatattgtagaacaactcgtgaataattattctgaaggaataagaaggggctctaatcgggaggaacactttctatgcgagctgggctagagttgaactcatttcgggcacaattagaatcgcgaccaatgcgctgtcaaccttttagcaggcaatgtttttcaacaaacgtaagacaggtttcattactgactggcaaaattgcgagcttagtgtgcactatactttccattgatggatctatgaacttaatacacattcgcatttatactattgagttgat

SEQ ID NO: 84393 - DNA, 981 bp, Zea mays
  Clone ID: MRT4577_176979C.1
gccggccgggtcgggatctataattccttttctctcttggaactccctcgtccgcccaattaagctggccacgagcccacgacatggagcctcccataactgccctccccatattccctatgcgtgagcacagcaagccccacggccaaccaattcgacgtctgagccggtccggcgagcagccgcacccccatgaactccggcgccgctgccatagggccgatcctcgctcgctgctctggcaacttggcaagtccctcgactacgatccattccgagcttcgaggaatcgacggtcaagcttcggcgatcaaatgatccagttcttcgagttctacgagatcgaagaccctgagcatctgtttggtgaaggttgcctttggtgcaatctatgctcaggtaaagaagaaggcgtcgaggtgaatctccaggagttccaggacttcaacgagttcgaggattaggctagcgacctcccccagtcagctgcctgtggtgggtttatttacgttggatacgtttctgttctgtgtactttgattatattatgtaaatgactctagtctttaatattattacttatctttattaataaaaaaaaaaaaaagacctgctgactgcaatagcttgacttaaccccacataaagctagtccactacagccaaacgggacatttgctgagtacgttgatgtgtactcacccttgctttcacaaaacaccaggttgcctttggtgcaatttatgctcaggtaaagaagaagtcgtcgaggcggatctccaggagttctaggacttcgacgagttcgaggattaggctagcgacctcccccagtcagctgcctgtggtgggttgtttacgttggctacgtttcgattctgtgtactttgatttatattatgtaaatggctctagtctgtaatattattactcactctttattgtaattcaaagcattgtgctatgatgagtcatttatgt

SEQ ID NO: 84394 - DNA, 300 bp, Zea mays
  Clone ID: MRT4577_17697C.1
cccacgcgtccgcccacgcgtccgcccacgcgtccgggagattgttactcgccaaaagtgcgtctcttccccacgggatcgaaatatcccctgttcgctttgatttgatatacagatctttgctcctagctttttattcgcccgattcatcggctgtcgtctctgccattggcgtgcatacgcgtacagttggggatcgaacagccagctgctggacgaggatggatcggaggatgcatgcatggatcgagcagcggggtgtccaaatcgcgcgcctgggagcggctcacgggatgcgca

SEQ ID NO: 84395 - DNA, 577 bp, Zea mays
  Clone ID: MRT4577_176980C.1
gcgctgggcagcgactggtccgccacccacgccgaggtcgcccggcgctcgcggagttctgcgacaacgcggcaaggccggcctgcggcaggaggccgtggtcgcggacgccgtcccgcggctggtgtggatgctggaggccaagcccgcgggcgagcgcgacgccacaccaactgcttctgttctctgtcccaaacaagccagggcccaacgtatgcttctgtctggttcagctatttactttaaatctagagctagcagctgccctacttttcaatcttacatgattgtgctctgaaaattgaacccaggggtgagtggtggggtttgatgaatacaactcccaggtggatgtcgccgtgtccggtgaaatagccgcatctgtaaagcatatagacccaggcacagacagtgatgccgggattgggaattgggattaagtagcgccgtggccgctccggcccaaagtgtatcgaagtgtatgcgctgattggttgtctacctctgttgtgagtttgttcctgcgtggtaaaaatacgtaccttgttgttggtagatggctcgttgatggggtaca

SEQ ID NO: 84396 - DNA, 1709 bp, Zea mays
  Clone ID: MRT4577_176981C.1
aattcggcacgagggccggatgcaccgccgccttgccaccgcggccacagcgcccgcgctccggcggttctcgcaccacagcgcgcgtccccagcctgacccaaggttcgccttcctatgctccgaggtcgacaacctcgacctctcctcctctcataaaccatcgccacggcctccccatagagagcaattccaggtgttagaagagctaagaagcgaccttgctcttgctggagacgctccggcggctgtggctatagcgcatccgtggccggagtggatttctctgatggagcacctcctccgtcaaggccacgttgacccctccaccttcgccgccgcctcgctgtcttctaaggacgccaacgctgtccgcaccgcctgcctccgattcgggcgccagcggccggagctcatcaggcatgtatcaagatgggatattcaggttgccgtgcgatgtggttgtcccagcattgacaggaaggttgtaaactctgggaagcgattgcgggcttatgtaggacttgatgaaggagaggtttgcagccaatgcaatttaagaggaagttgtgatagggcatatgtgaaggctcggaaagaggacgttggaagaactgtggatgttatgcgcatccttttgacttacggtcttgatgttattaccggcaatgtagataatagagcatgcctgaacaaatctgtcaaggaatcaataaagatcctactaagcgaggttgttgaggtggattctaggggacctggttccagcactgtgaaagctgcacagcgcaaaggtcaatctgctgtacccatgaagcagggtgattggaattgtcccaaatgtgactttctgaactttgcaaagaatatcaaatgtttgcgctgcgatggagaattccaagagaggtatcagttgttgcatgaagaccgagagcatctgcctctcaaaaagggtgactggatatgcaaaaggtgcaactttttgaattttgctaagaatacaagatgcttgcaatgtcatgagaaaccaacaaaccgtttactcaacccaggagagtgggagtgtgtctcgtgtaactatgtgaacttcaagaggaatgggttctgcttgaaatgtggctggaaaagaccaaagtctctaaacagtcaaaatagtgtcgaattgtgtcatgatttagagcatagtaagaatccacgtatttcatttgttcaagatggtgtccagatgaaggggtggcaaagtctgcaaaagaagggttcaccatccgacacagatttggatttctggagtgcagacgacgaagagggtggtagcagggataatgatacgctgctgcgacagaaggactacagatttcttgagagttttcccattgtcggtggcaggactgctaattcccaagatcttcttgcaagggagaagtggaaggatgaaatgtccaggagagataaaggccttcaaactacggaatcgcaagaaagcaatcggccttctagccacggccgtcttccaagaagcatggagctggttgactctgatgatgatattgcttcttggttttcgggtggggataataataataggaacctggataaggtataaccagatcttgtaagtggatgcagctcatcaataaaagttgcatcctttggaattattgaaattcaggcaaaaagaattattaaagctcacggagaactgtcaattt

SEQ ID NO: 84397 - DNA, 1740 bp, Zea mays
  Clone ID: MRT4577_176982C.1
gcgctgggcagcgactggtccgccacccacgccgaggtcgcccggcgctcgcggagttctgcgacaacgcggcaaggccggcctgcggcaggaggccgtggtcgcggacgccgtcccgcggctggtgtggatgctggaggccaagcccgcgggcgagcgcgacgccacaccaactgcttctgttctctgtcccaagtttgttagccctcacgtttgcctgagatctttcagttacaattcctccggatcttagcccaataactaaaacttagtttcttgattacagacaagccagggcccaacgtatgcttctgtctggttcagctatttactttaaatctagagctagcagctgccctacttttcaatcttacatgattgtgctctgaaaattgaacccaggggtgagtggtggggtttgatgaatacaactcccaggtggatgtcgccgtgtccggtgaaatagccgcatctgtaaagcatatagacccaggcacagacagtgatgccgggattgggaattgggattaagtagcgccgtggccgctccggcccaaagtgtatcgaagtgtatgcgctgattggttgtctacctctgttgtgagtttgttcctgcgtggtaaaaatacgtaccttgttgttggtagatggctcgttgatggggtacattggattggtggtcctcctgaagactacattcctgactggttgtgtgtgatgagagatcttccagaacttgtgctgaagtatatgttcctgcataagacaaattagagttttggtcaggtaggtgcttacccaaggttttgtgtccattggtttcttcagaatgagctgagttgttgactgctatatgtgcggctattttcattatgaacttgcacaactgtccatgattttggaattgaatctcttgtcgttcctggctttccaaatgtaccgaatcatcaggagtatatggttggatcagagctgaaaaaatttcctggactccatcttgttcctgagggaggttagtagtacgtagaagagggatagaagaaagttagtaaaatgtatcagcggtacttggaacttttgaacctaagctaaactttccatcattattttattttcttacgaggctcgcgcgctggctgcggtcctggacgcgtcgagtgggtgccgcaaggcgttccggaaggacgagcgcggcgtggtgaacgcggtgcagctgctggacccgtccgcgcccggcgtggagacgcggttccccgtgtcggtgctgctggccgtggcgcagtcccggcggtgccggaagcagatggtggccgccggcgcgtgcgggttcctgcagggactggtggcctccgaggttgtgggcgccaagcggctcgccgagcggctcggcaagggaaagatgcttggcgtgttcccgcggacatgacgctcgctggcgcatcaacctcagctgtatgtatgtgctcctgcttctatgtgatataaacataaccaaatcccattcccctgcctcggttcaccatctgcttcggctctcttgtgtgatgaactgggatgatgatggattgatcttgtacatgtcggcgtgcgtgcgtgcgtcaatgctgctgttggtagatcactacgggtgctactggaaacaataataagaagatggaaacattcttgtatgcagttgtaaaatctaaaaaaaaaaaaaaaaaaaaaaaaaaaaggggccgctcgcgatctagaactagt

SEQ ID NO: 84398 - DNA, 1062 bp, Zea mays
  Clone ID: MRT4577_176983C.1
ggggacctggttccagcactgtgaaagctgcacagcgcaaaggtcaatctgctgtacccatgaagcagggtgattggaattgtcccaagtatgtttgaaaagttaatatgtgtctctatcgcctatcccccctggtcataatgccttgcattcactgtcagatgtgactttctgaactttgcaaagaatatcaaatgtttgcgctgcgatggagaattccaagagaggtatcagttgttgcatgaagaccgagagcatctgcctctcaaaaagggtgactggatatgcaaaaggtgtaactatgtgaacttcaagaggaatgggttctgcttgaaatgtggctggaaaagaccaaagtctctaaacagtcaaaatagtgtcgaattgtgtcatgatttagagcatagtaagaatccacgtatttcatttgttcaaaatggtgtccagatgaaggggtggcaaagtctgcaaaagaagggttcaccatccgacacagatttggatttctggagtgcagacgacgaagagggtggtagcagggataatgatacgctgctgcgacagaaggactacagatttcttgagagttttcccattgtcggtggcaggactgctaattcccaagatcttcttgcaagggagaagtggaaggatgaaatgtccaggagagataaaggccttcaaactacggaatcgcaagaaagcaatcggccttctagccacggccgtcttccaaaaagcatggagctggttgactctgatgatgatattgcttcttggttttcgggtggggataataataataggaacctggataaggtataaccagatcttgtaagtggatgcagctcatcaataaaagttgcatcctttggaattattgaaattcaggcaaaaagaattattaaagctccctggagaactgtacaatttaatgtttcggaactttgtttatgggctgctcagagatgatatgattttttgcaaggggcttgtgcctgctgtcatgcaattaagttttggggaccaaactagtatgatataactaaggctatctctagc

SEQ ID NO: 84399 - DNA, 551 bp, Zea mays
  Clone ID: MRT4577_176984C.1
ttgggtacctcgaggccggccgggatttttcaaccatacatcacagagacccttctgctttgctctttcttatgtccggtgggcctgcgactgagttttcctcctcttcatcccctaccacgcgcaaccggactcacaaaggggaggtagttcctctacccaacggagaccgagaacgcctccccctcggaacattgacccctgttctgcgcaataccacccgtgacaaacgaatcacggctgcccttgccacagcttctccatagatatgctactgattcacctactgcaaagggactgactggagtatccacctgaccgcaaagatgtgaagaacggtgcgaacgggccagacactgacacagcttacgaggacgcagacaatgacaacgagccatctgatgcgggaaagacaacaaagaacatctgcaagtgccgtgtgaccgacatgcctactgactcatgaggcatactactggatgctgtttgtagatactgacacgtctgttatctatacatactatacctgagaccctgaaggtgtatgcatg

SEQ ID NO: 84400 - DNA, 576 bp, Zea mays
  Clone ID: MRT4577_176985C.1
atggatcctaagggcaaggggattgtgatcaatgataaggagaaggagtccttcgtcaacgagcctaaagataacaagcctaccgactcgggctcgggcaacaaacgaaaagatgggaagaagaagaagacaaggcacatcaaggagatcgtctactacgacgacagcgacgagtcctcttcttcccaaaaggatgacgacaacaactacgagaaaaagaagacggttaactcaaacttctctttcgattattctcgtattccgcatagttcaaatgcacatttgctttccattccacttggtaaacctcctcattttgatggagaggactacggattttggagtcacaaaatggacgagtaccacaaggtgagcggcttggacaatgccaagcagatctgggacaccctcaagatctcacatgaggggaacaacgtcaccatgctcaccaaaatggagttggtggaaggcgaactcgggagattcgcaatgattagaggagaggagccaacacagacgtacaacaggctcaagaccctcgtcaacaagataaggagctacggaagcacgcgatga

SEQ ID NO: 84401 - DNA, 1891 bp, Zea mays
  unsure (1)..(1891): unsure at all n locations
  Clone ID: MRT4577_176986C.1
atggatcctaagggcaaggggattgtgatcaatgataaggagaaggagtccttcgtcaacgagactaaagatgacaagcctaccgactcgggctcgggccacaaacaaaaagatggaaagaagaagacgaggcacatcaaggagatcgtctactacgacgacagcgacgagtcctcttcttcccaaaaggacgacgacaacgactacgagaaaaagaagacggttaactcaaacttctctttcgattattctcgtattccgcatagctcaaatgcacatttgctttccattcctcttggcaaacctcctcactttgatggagaggactacggattttggagtcacaaaatgtgtagtcacttgttctctctccatcctagtatatgggatatagtggagagtggaatgaaatttgatagctcagatagtcctttatttatcaatgaacagattcataaaaatgcacaagctactactgtgttgttagcctcattgtgcagggacgagtaccataaggtgagcggcttggacaatgccaagcagatctgggacaccctcaagatctcacatgaggggaacgatgtcaccatgctcaccaagatggagttggtggaaggcaaactcgggagattcgcgatgataagaggggaggagccaacacagacgtacaacaggctcaagaccctcgtcaacaagataagaagctatggaagcacacgatggacggatcacgacgtcgtccgcctaatgctaaggtcctttactgtacttgatccacatctggtaaacaatattcgtgaaaatcctaggtacaccaagatgtcgcccgaagaaattcttgggaaatttgtaagcagacggatgatgatcaaggaggcgagatatgtggatgatgcattgaatggcccaatccacgagcctcaaaccgttgctctcaaagcgacaaggagcaaggaggcactacctagcaaggtggcgcaagttgaggcagccgggcttaatgaggaagaaatggcccttatcatcaagcggttcaagacggcgctaaagggtcgcaaggagcaccccaacaagaacaagacgaaggggaagtgctcctgcttcaaatgtggtaagattggtcattttatcgctaattgtcccgataatgatagtgaccgggaaaagaagagtggaaagtgggaagagaagaagaattacaagaaggcgaagggcgaggcacatcttggaaaggagtgggattcggattgctcctcgtccgactccgacaacgaaggactcgccgccactgccttcaacaagtcatctctcttccccaacgagcatcacacatgcctcatggcaaaggagaagaaggaccttttatatgaagagcatgataaatttgttagtgcacaaaactctcttgctctagaagttaaaaggaatgaaatgctttcttgcgaactatctatttgtcatgaaaccatttctactttaaaaggtgttaatgatgatttaaatgctaaactagaagtagcaaataaatctaactcttgtgtagaacatgttatgatttgcaataggtgcaaagattttaatgttgatgcttgtagtgaacacctagtttgcattgctaaattaaatgatgaagtggctagtcttaatgcccaacttaagactagcaagagtgaacttgacaagctaaaatttgcaagggatgcctacacgattggtagacacccctcaattaaggatggtcttggcttcaagagggaagtccagaacttaacaagccataaggcttccatctacgccaaggagaaagggaaggctcctatggctagtagtgctcaaaagaactatgccttcatgtatcatgataggagacatnctagaaatggttatagag

SEQ ID NO: 84402 - DNA, 831 bp, Zea mays
  Clone ID: MRT4577_176987C.1
atggcccttatcatcaagcggttcaaaacggcgctaaagggtcgcaaggagcaccccaacaagaacaagacgaaggggaagcgctcctgcttcaaatgtggtaagattggtcattttatcgctaattgtcccgataatgatagtgaccaggaaaagaagagtggaaagtgggaaaagaagaagaactacaagaaggcgaagggcgaggcacatcttggaaaggagtgggattcggattgctcctcgtccgactccgacaacgaaggactcgccgccaccgccttcaacaagtcatccctcttccccaacgagcatcacacatgccttatggcaaaggagaagaagggattagataaaactaagattgataagattaatgaattgattgatgctttgaatgataagaatagattactagaaaaacaagatgaccttttatatgaagagcatgataaatttgttagtgcacaaaattctcttgctctagaagttaaaaggaatgaaatgctttcttgtgaactatctacttgtcatgaaaccatttctactttaaaaggtgttaatgatgatttaaatgctaaactagaagtagcaaataaatctaactcttgtgtagaacatgttatgatctgcaataggtgcaaagattttaatgttgatgcttgtagtgaacatctagtttgcatttctaaattaaatgatgaagtggctagtcttaatgcccaacttaagactagcaaaagtgaatttgacaagctaaaatttgcaagggatgcctacacgattggtagacacccctcaattaaggatggtcttggcttcaagagggaa

SEQ ID NO: 84403 - DNA, 2338 bp, Zea mays
  Clone ID: MRT4577_176988C.1
cattgggtacctcgaggccggccgggaaaatcgccctggccgtggaattcggctctcggtttccgatctcgtccccgccactctactatataaaccgaaccccgcatccttgatagtgccgagcgcccatcccaacttcgtcgttgtgcgaatcgaacctggccccgctcctcctgggttgctgtgcggatattgtgtggtcacggatgatcaccggtgtgcaggcaagctttccgcgtcgttggtgggcgggttatggcctcgggtcaccggcaattgctcaccggagccatatcgccgccgcgaatccactcaccgctgggggcagcggcatctgtgctaccaaccgtcacggtgaggacacgtgtcatctgaagagcaagttggtacctgaaatctcaagtcccaggcaagttgtgcccttgatcacttctttttacctactcatgttctgattaatcataatgacctgcataggttaattttgatgggacccaataggttaccctagtttgtctatctttataccttgtttaccactgaactttttgggtagtacttgctagtgctttatgtggttttgggtatgaggatacattattcatgatcacacttttattatctgtttattatcactgttcatgataagatcattatgttaattggaacatggagcgaccacccgggaaaacagtgctaccacaagggtttaatgggacgcccttggccgattaattaggaaagctagtggaagactaccttactcgaaaggggcaagggcagtaggggagtggtcagtgtagggaggtccttggttgattttgctgcgatggcggtcctgcaagggattcctgggaaggccctcgggaggattttgctgcgttggcagtcctgcaagggattcctgttaggaaggccctcgggaggattttgctgcgatggcggtcctggtgattatgttcgcgcccgggttttggacccctaaaatccgggtgtgacagctttgcctaagggtcgtcaatggggactggggcatagtgctcactctgccaaggggggtgcagaggttcattcgatttgattttgttagtcacccaccttggggaggtgtactacgtttgtacgactggcgaaacctaacgagcagctatgcaccaggggagtctttgtaaaggctacgtagtgaaaccttaccgactcaccttggtagtgtttgagggtttgatcgacccgaggcagaaagggatcatgactcgtgggtaaagtgtgcaacctctgcagagtgttagaaactggtatatcagccgagctcacggttaagagcagccttgggatcctctttgattagaagaactttggatacttttatggtgatgtttaatgatgatggttataattatgatctctggtatttcctcttggagggagtacatttgtgtaacacccgggtttaaggaacaaagccgggtgcatctcatacatgcgccaagaagacaacatatataataacagagtgtatagagataaatgtcacaatataattagagtacttattacatagcggaagtcttacaaaataaaagataaatataaatcgaactaaaatccatcattggtgccagaaagtcaactgggagacgccacctagatcgaatcgaactcctcgttatgtggctcctcttgaaccacctgtacttctcctgtggggggtgtgagacagcaagggtgagctcacacatgttcatcgctcaacaagttgtggggaataatgtgcatgaactcaccaaaggtgggagttcatatgatgtgtaaggctaatcaacaatagaggttaaagctgagcattgcttttaataagttggtcaaattttattagtagttactaaatgtaagtaaataccaaaccataatgaataataatagatcaaaattaataataaaccacgatgcgatgcaaatgacaaattgaatttaattccataaattaataatgcgaaagtcctgagctgctcatgaccgcgagcatggcgtataccagttttacactctgtagaggttgtaccctttacccacaagtcatattactcatctgccacggggttgtacggatctcatacacctctaccaaggaagcgaggcagggtaacactacgaggcctttacaaagttctactagcttcagaaaactcgttacaatttctaggaagagcaatgcatgaatctcccgtttgatcgctatcgcagcaaaatcaacacgagaaccttcctacacgcccactcccctactgctcttgccctttcgggtaaggtagttctccactagctttcctaattagtc

SEQ ID NO: 84404 - DNA, 469 bp, Zea mays
  unsure (1)..(469): unsure at all n locations
  Clone ID: MRT4577_176989C.1
gtaatttttgagattttattaaatttatacaatagtctatcacctacaagtgtgtaagttattgtaaaaaataccatagtgggtaaaaaattatatataccagggtcaccaaatgaataactaancntgaattatctcatcacttagatattgtagttgaggttgaatataaaccaacatgagttgagttggctagtgggtgggagattaggcattctgctcaaggcattcagggtttgattcctgagcttggtgcaattttttttgctgcgacaataacagacgggagaggacagaacgagggaggggcagaacggggtgacagcctacccccttacattcttcatagtagtagagatttccgaattctactttatgttttcggttttcctgcttgtttttttttctagctgcagagataaatttgtaaaaccgacaacggacctgcagccacgtgcaccaaggcaag

SEQ ID NO: 84405 - DNA, 266 bp, Zea mays
  Clone ID: MRT4577_17698C.1
gggggattgaagacaaccccagctaacaaccgtgaaaaaaacccgcaaaaggttcaatagtgaaacacgaaaaggggccccttcataccggcccaaagggttggaatacccaaagggaacaaactgttttagaggcctatggggccttagggcgccttgggcaacatggcggaattcagggagcgtaaagctaaggccatttaaagggtgtgccggaaaaaccaaacaggggaatccgcaggaatttcccggtgtgggcccccctg

SEQ ID NO: 84406 - DNA, 295 bp, Zea mays
  Clone ID: MRT4577_176990C.1
atatctcaatataggcataattggggatgctttattattcatatacctctatacgtggaagaatgttagggctctgatacttgccgaattatgaaacactgaactcgaaacctgaattctcgaaattgcccccccatggctatcttagtacttcaataaacccaactcctttcggagcctgccgcggagctggctagctggacgactcaggatgtgccaccttttcatcacttgtaacaacgaagggtcttttacgttcaccacctagggtcgccgtgcggatggggtttggtgg

SEQ ID NO: 84407 - DNA, 1588 bp, Zea mays
  Clone ID: MRT4577_176991C.1
gctgcctgaaccaaaacacacacacacacaaaacacgcaatgggcgccatgactctgccgcccggcttccgcttccacccgaccgacgacgagctcgtgggctactacctcaagaggaaggtggacaacctcaagatcgatctcgaggtcatccccgtcgtccatctctacaaatccgagccatgggagctaccagagaagtcgcttctgccgaggcgtgacctggagtggttcttcttctgcccgcgcgaccgcaagtacccgaacgggtcgcgaaccaaccgcgccacgtccacggggtactggaaggccacgggcaaggaccgccgcatcgcctgcgacggcggcgtctacggcctccgcaagacgctcgtcttctaccgcggccgcgccccgggcggcgagcgcaccgcctgggtcatgcacgagtaccgcctctgccaggacctcgcccacggcacttgcaacttcatcggtgcttacgcgctttgccgcgtgatcaagcggcacgagggcgggctgccgcagggcgagagctacgcgaaaggagccgccggcagcgcgagatcagggcagatgagcaaggtctccagcagctcgtccctcgtcagcaacgaccagctcagcgcgtcgttcacccctcctcctacactggacgtgggcaccatggctggatccggcaacgcgttccagagccccgttgggtacgggtacggcgtgacgacgacggcgacggcgacggccaccactgcggggctgccgtcgagcgcactggccacgcccctgctcatcgtgccgtctccccacgacacgttttccatcggcggcgacggcgacttcctccccgccgcggccgagtcgcgcgcgttcgcacgcgcacctgttcgacaccgtgggaatggggatgggcggcgtctcggagcaggagctgaaatgggacagcttcgcctgcccaagcacgttctcgagtggtgccgacatggcggcggcgagtccggcgacgctgtgccggcaggcgagcgacggcttcgacgacctgctggcggccttcttcttctcggatgacaacaggatcgtcttctgaacccaatgcacagcacaggggtaaatgctgctctgatcaactcaagatgttcatactgggaaataaaaagtgacctctgctctcccagaaatggcgattatatttttcacagccagggaaagggagatactacgtactggggagttcactcgtgttggctacagacagagtgatggcattttatttaccgtgcggtcttctctgtagcactggtgctgtgtacgacggccgtgtgtcacttcttcctgaattctcatgcgtgtgtcatttgcaccaccacctactactagttacatgtactagcagtagtacttgtgtgattgacctgccctgttctgtatacgacagagctaatgcagtattgccatgctttgtagccttactaaccattcttaattccatggcatatcgtgttaaagcacacatgctgttcccaattgccatgtatcttgtatcacgcagtgtaattcagtatcaacgattcccgaagcagtgcgctgtgcc

SEQ ID NO: 84408 - DNA, 288 bp, Zea mays
  Clone ID: MRT4577_176992C.1
atggtcatcctggttaattgcattcaaagcacccaaacaagagctcttattgtacttggacaaccctactcaggctatgaggcacttgcatctcgagctgaaaaccagtctgttagaatccaacaaccaaacactttgaataactactgagatggctcaccggtgggtctagatgatgcgaccgtgttcacagaaccgtaggcgctacccttagcagttatagcgtacagccatggactggctgctgttgccacagtatttgatgctgacggggtccatggtgacacc

SEQ ID NO: 84409 - DNA, 173 bp, Zea mays
  Clone ID: MRT4577_176993C.1
cgcactcttaatcgtattcatatctttatccaattgacatactcaaccattatactggcgagagactctttcatctacttacctcaacactataacatatacccaattcatatcctactatcagcatatacatattctcctccatattatcttcatcattaaccttacattat

SEQ ID NO: 84410 - DNA, 379 bp, Zea mays
  unsure (1)..(379): unsure at all n locations
  Clone ID: MRT4577_176994C.1
cctgacgcgtgggcgcaccccgttgtctttaaagagaaagaggntccgcggggcggataaagcttgcttctttaccaactgaaaccaaggccgtaaaggccgatcgcaattcgcacccactaagctatgaccggacaggttcgcagacaccgtcaaccttaataatagtgaaaatgggccgttcaaatattgagttgcaagttcttcccggaaaaaagcatttatcgaagacttctattaagcaaggattgactacttttaccgaaagaaaattcgaaatggtttgtgtttattaatgtcaacgaagaatcacaacacctgaatacttttatcagcatttttttatcaatttaatcatacaccccaaagtttattactt

SEQ ID NO: 84411 - DNA, 221 bp, Zea mays
  unsure (1)..(221): unsure at all n locations
  Clone ID: MRT4577_176995C.1
acgtgcttgactttcaatcggtgtcaattgaagaagcttttagggatatttgtgttctgagaaattgtgtttttttacttttgtagcctaactacatggaccccaaaaaaaaagtcacgggcattgcttgtagacgtttctttgatgaattcatcccttgttttgtcccgctaacgtattgttttgctactaagatcctttgctggcagaagtttgtngac

SEQ ID NO: 84412 - DNA, 689 bp, Zea mays
  Clone ID: MRT4577_176996C.1
cacaatcaccccttccctttctctaacccagatcacactagagcacatcggttaccattttctcttccttccgacgatcgacccaccgcctccggacgcagttcgtcgcccccagacccctctcctcctcgtgcactgcccctcgccatggctgctccatgtctagaaaatgcacgctgcttcgacgagccgtcgagtctcatcagcatccgtggtcggtacaccctgcgatgccaagttcgtcttcgcttcgcgttgcgattagattgcgatttgttttcgtgcttcgaggaatcgaagatcaagcgttggcgaccaagtgatcaggctctttgagttccatgaggctgaagaccctgagcatctgtttggtgaaggttgcctttggtgcaatctatgctcaggtaaagaacaaggcgtcgaggcggatctctaggagttccaggacgtcgatgagttcgaggattaggctagtgacctcccccagtcagctgcctgtggtgggttatttacgttggccacgtttcgattctgtgtactttgattatattatgtaaatgactctagtttgtaatattattacttactctttattgtaattcgaagcattgtgctatgatgagtcatttatgtaatcgctgtgtacgtgaattactgatcctggcacgtacatggttcgcattcggttt

SEQ ID NO: 84413 - DNA, 748 bp, Zea mays
  Clone ID: MRT4577_176997C.1
gcttttcgcacgctcgcccagccgccgcccctagtgcgcgctgcccagccgccgctccctgcacgctcgccactgctgttcgtgccgattcgcagcaccgccggccgacgttgcgagcatgagattgcgatccgtttccgagcttcgaggaatcaaagatcaagcatgggcgaccaagtgatctagttctttgagttccacgagattgaagacctgagcatcagtttggtgaaggttgcctttggtgcaatctatgctcaggtcaagaagaagcgtcgaggcggatctccaggagttccaggacttcgatgagttcgaggattaggctagcgacctcccccagtcagctgcctgtggttggcaaaaaggttgcgcaaattatcctcctcatcactagaattatcctcatcactagaggttgcatatttagtggaggattttgattttaccttcttccttttgccgtcctttgccatgaggcacttgtggccgacgttggggaagaggagccctttggtgacagcgatgttggcggcgtcctcatcagaggaggactcagaggagctcttgttggagttccactcgcggcacacatgggcatcgccgcccttcttcttgtagtacctcttcttttctctcctcttgcccttcttgtcgttatccctgtcactgtcacttgataaaggacattttgcaataaagtgaccgggcttaccggaaaaaaaaaaaaaaaaagggccctagggcc

SEQ ID NO: 84414 - DNA, 309 bp, Zea mays
  Clone ID: MRT4577_176998C.1
gtccatgccccctacctaagctcggaattcggcttgagggccggaatcacagacctttttctcgtctccccagcactatacgttagacactgagctgtacagcgccgatcaacgtcgccgcaccatcatgagggagcgaaggctgtggtacacaaccagcggccagacgggagcgcggacggactcccgaactcgacgaagggctgctagaaaggccatgatgcactacaattacgacgactgacagtttgacgggtacatcagcaagatgaactcgatgctggcattctagaggcttgagaaggtgaa

SEQ ID NO: 84415 - DNA, 943 bp, Zea mays
  Clone ID: MRT4577_176999C.1
gtcccgtctcttccactggctcctgccccgacggcgctgcatggaagcgcggcgcggcagccggtcggccggccagcgagcctgcgcgcccccgtcctcgccagcgtccaagctcgcctcgccggagtcgccgttcgtcaccgtgactgcgatccatttccgcgcttcgaggaatcgacagtcaagcttcggcgaccaagagatcgaactcttcgagttctacaaggctgaagaccctgagcatctgattggtgaaggcaagtgtcctctgacccattatgtcccatttactttataagtgactgtcccgcatactatgaacaacataaggaccggccgggaagcactgagtcgcacccccgtcgtgaaaagggaacaacatcgcccccaacaccgagagagatagggggatctgccgcacgagcatcctgcagggatcaccgctctgggctggacagatggtcaaggcaagtctccagagcacgtacgttcgtgacctcatatggtgaggttggtggatgggagcatggttgtttctcaccgaagtttccctccgccaaggaaagccccctgccgcgggccggcgttgctgcttcaccactgtcggttgcctttggtgcaatctatgctcaggtaaagaagaaggcgtcaaggcagatctccaggagttccaggacttcgtcgagttcgaggattaggctagcgacctcccccagtcaactgcctgtgttgggttgtttacgttggctacgtttcgattctgtgtactttgattcatattatgtaaatgactctagtttgtagtattattacttactctttattgttattcgaagcattgtgctatgatgagtcatttatgtaatcgttgtgtacgtgaatttctgatcctggcaagtatatggttcgctttggcaaaaaaaaaaaaaaaaaacccgcggcc

SEQ ID NO: 84416 - DNA, 134 bp, Zea mays
  Clone ID: MRT4577_17699C.1
acgcaacccatacaccaagaggctacgcacaaccttatgcgccaaacctgacacatacaagggggcagtggggtttacccgagaccaatatctatacatatccatcctatactagagctcgaaacaacacgact

SEQ ID NO: 84417 - DNA, 1904 bp, Zea mays
  Clone ID: MRT4577_1769C.1
ctcaacggtccaaccctccggttcgacgtaggcgccggcggcgaaatgaaggtctccgtgaagacgctcaagggatccagcttccatatcgaagtggatcctaccgataaggttgccgacgtgaaaaaggttatagagagtatacaagagcaggcctcctatcctgctgaccaacaagtgcttatacaccaggggaaggtgctcaaggacgacacaacattggaggaaaaccaagtagttgaaaataattttcttgttataatgctcagacaggtaggctacttgtttattattctggttgacacatgggcacatgacaaatcacgggtgtatgacttggtatgataagaaagttattactgagatatgaataactgataatgttaactgaataactttcatagtgcattggattgtttgaaagaatttgtgcttcaatttctatggctagcttattaggcagtattttatatatggatgcaaaggctgctgtgaatttggaatgtctacgatagcatcagaaatgttctatatatcttatcaattgtaacctttcacagaacaagggatcatcaagtgcagcaccagctaaggtaaccgcgaatcaggcaccctctactcagacagtgcctgctactccacctcaaacgtcagcagccccagatgcaccggcacctattgtacctgtcagtgcaccggctgcaactgctacagcctcagcagctcctgctgttgctgtctccactgaggcggatagttatggtcaggctacctcaaacctagttgctggcagcaacttggaagaaacaattcaatccattcttgaaatgggtggcgggacatgggatagagacactgtactacgtgctctgcgggctgcgtacaacaatccagagcgtgctgttgagtacttatattctgtcttctgtttaggggattcctgaacaaatggaggttcctgcaccgcctccgagttcccaaccagtcgaccctgttcaggcggtacaaccagctcaagctggaccaaatgctaaccctctcgacctctttccccaatctcttccgaatgattccgctaatgccaacacaggaaatcttgatgttttgcgtaataactcacagttccaaaacctacttggtttggttcaggctaaccctcaaattttgcagccattgcttcaagaattgaggaaacaaaatccccgggttatgcagctaatccaggaaaaccaagcagagtttatgcggttgattagtgagccactagagggagacgaagagaatgaaatgatgctggatcagatggcagatgcaactgagaccattgcagtcactccagaggagaatgaagctatacttcgtcttgaagggatgggctttgaccgggcactcgtcctggaagtgttcttcgcctgcaacaagaacgagcagctggccgccaactacctcttggatcacatgcacgagttcgacaacgatgacgggctcggagggcctccattgtgatgcgatgcgaaggctgtggacagaaaataggaaaacgttttgggatttgtctcgtctgtccgctccgctccccctacatttctttgctgtttagtacataattctagatttacagaaaagacaaagtttactcttttctggatcataaaaaaaaaaaaacttattgccgttctggccggcattgggccagcatgcagttattcacgggttcaacctgacaagcgctggctgcagcagcgaggtgtttgtaggtttcgcggtgattcgtctacccaaatctggaaccgtactgatactgaagaccgtactgatactgaaggcattatccggcgtaaactgttaattcaaacattattacacgaatgcataaggctgagcacggcttttgggcttgaact

SEQ ID NO: 84418 - DNA, 623 bp, Zea mays
  Clone ID: MRT4577_176C.1
cgattgggaccctcgaggccggccgggctaattgagtatcgcagagataggagtcttctcactcatctacctccgcggctcaaatattgtcccccttctccgaatgcccgccgccgctccatcccgtaacgcgacaccatgagggagagcatttcgatccacatcgcgacaggacggaatccaggccggaaacgcgtgctgggagctgtactgccttgagaatgacatgcaagctgacgagcagatgcccggtgacaagaccattgggggaggtgatgatgcttatcaacaccttcttcaaagagactggtgctgggaagcacgagccccgcgctgtttttgatgaccttgaacccactggcatcgaggacgtgaggactggaacctaccgtcagctcttccaccctgaacagctcatcagtgggaaggaggatgcagccaacaactttgaccgtggtcactacaccattgaaaaggagattgctgacctatgccttgatcgcatcacgaagattgacgacgactgcactggactccaggacttcctcgtcattcacgctgtcgacagtaggaacaggatctggccttgcatccctcctcctagagtgcctgtctgatgacta

SEQ ID NO: 84419 - DNA, 438 bp, Zea mays
  Clone ID: MRT4577_177000C.1
acaccatgaggggtgtcgtgcctccttcctggctctcgtcgagcgccacctcacctacaagcggggtgggtgcaccaccgcgcgttcatctaccgcgcgggcattgcacctcggggggggcctctggcattccaccgccggccactgcgcgcggccactgcaccgcggccatggccgcgcggtcattgcgcgcaccatgccactaccctactaccgcccggctcagctatcccagcccacccatgcccggccaacagcgcatcaacccggccagctgaggacctgcggcgtggcgcgccccacctgggccagggtcagttcctgaggcatcaggagcccgacggcgacgccctactgctgcctaggccatcgttgcggcagcagtgttgccgcagctcagcaggggagcgacaccggaccggcgatcttcgggtggcc

SEQ ID NO: 84420 - DNA, 768 bp, Zea mays
  Clone ID: MRT4577_177001C.1
cccggccgggaaaaactcttttctaaacaaataaaccacaacaacccctacgctaatgaaccccctcgtgtgccgtcctgctcctgcgcacaccgcgaaactgctgcgccgcctcacgagccttctccggccatcttcttcgaccctgatgagctgctcgcgtcgctccctacccgattgtgatccgtttccgagcttcgagggatcaaagatcaagcgttggcgaccaagtgatccagttcttcgagttccacaaggttgaagaccctgagcatctgtttagtgaaggttgcctttggtgcaatctatgctcaggtaaagaaggcgtcgaggcggatctccaggagttccaggacgtcgacgagttcgaggattaggctagcgacctcccccagtcagctgcctgtggtgggttgtttacgttggctacgtttcgattctgtgtactttgatttatattatgtaaatggctctagtctgtaatattattacttactctttatcgtaattcgaagcattgtgcaaaaaaaaaaaaaaaaaagcggccgcctttggtgtaatctatgctcaggtaaagaagaaggcgtcgaggtagatctccaggagttttaggacctcgacaagttcgagtattaggctagcgacctcccccagtcagctgcctgtggtgggttaatttacgttggctaccttttgattctatgtactttgattcatattatgtaaatgactctagtctataaatattattacttattctttattgtt

SEQ ID NO: 84421 - DNA, 453 bp, Zea mays
  Clone ID: MRT4577_177002C.1
ggccctgggaacaagggggggggtttaacaaaacagggggggggccccatcacaggttcttttatccccctttttaaccccccagttaaaattttaaaaaaccccccaaccaatttcgggcacatccctcacgccaaaggggcaaaaaactccgggtttcctcctgaaaaccaaacacggggggttcattaattacaaccgaaacttcctaatttttacttaaaaaatattccttccaaccttatttatatccctaaagaaaaatctttggcccccaaaccctttggggggggtaaattcccccccctaacccaataaaattaattttactagcatggaggcccccacctcccggggggaacaacggttaacaaagatcaagccggcttttgaacccatttttgaaaaaaagcagccgggaaacatggaagggacagccctcttcctttgggg

SEQ ID NO: 84422 - DNA, 538 bp, Zea mays
  unsure (1)..(538): unsure at all n locations
  Clone ID: MRT4577_177003C.1
tccattcgtccgctccctcctccctgcggcggcgcggcgagtgcgcacaatgcacctcctccctgcggcggaacggcgcggcgagtacgcatcccgggcgcacctcctccctgctccctcctccctgctccctacggcggaacgatgcggcgagtacgcatccggtgcacacctcctccctgctccctactccctcctccctgcggcgtcgtggcgcggctagtcggcatctggtgctccctgctccctcctccctgctccagttgctccaagttttgtggatccgtgaggaaccagtgcgcgtcggatctccatcggtctccacggcgagtcagcgacggtaccaatgctccagatctgctgctcactgtcactggtgagtggtgaccggatctgatgctcactgtcactccctatctagcacagaggtaacctcatccactattgaaatgttttgctcactgatgaattgtttagtttacaccggatctactactcactactgaaantgttgttggtgggaaatcgttatctggat

SEQ ID NO: 84423 - DNA, 226 bp, Zea mays
  Clone ID: MRT4577_177004C.1
atttctattcatctgggacactgagaccgagagacaccctgccaagactgtgggaacaggtcacagacgccgcctttgacggtagacgtggtggggaccctaagagacaaggccgctagagagagctgctccactgccaacagggcaatagacctttgttgagagcacacaacgagatgaatgcaagactcccagaagatggtgcaggagacctgtcgtgcattga

SEQ ID NO: 84424 - DNA, 261 bp, Zea mays
  Clone ID: MRT4577_177005C.1
gcgggtaccggctaatgagttgacatgccatcgtgtgtgactcagtattaacatgtgagaaagtggagtcttatactgtgccagaaaatatatgagcggaaagcgtataggcagtggctggggaggctaatgagcagagcaatagaggggggggggggagagctcactgtccggtgagaagtagggaaagctgtagtgacagaagtattaatgaatgcggacagctcgcggagagagggggagagcgtataggacgctctg

SEQ ID NO: 84425 - DNA, 211 bp, Zea mays
  unsure (1)..(211): unsure at all n locations
  Clone ID: MRT4577_177006C.1
annctctttcttttttaacatatatcttttacaggaggggcgttttgtttatgggggcacaacaaaaaaaggccccatgatacaaaacaaagggtgaggggccaccattaaaaagaacacatttttttcctagacctgactatacatacacaagcagtgactaaaaggatgaattaataatggctaggtgggcgcgggtaaataattcaaa

SEQ ID NO: 84426 - DNA, 732 bp, Zea mays
  Clone ID: MRT4577_177007C.1
ggccggccgggaggcccgactcccgtccccttcgagattccgcacgaaacgagtccacttcgtatcgccgcccggtggcccgccgccgctcgccggagtagcagcagcagccgtagcaaggagtaggcaagagacaccggatggggatcctgggcaaaggctcggggtggtgcttctgctcccgcggggccaagctggagcggatcaagtccagcctcctcgccgcaaagggcgccgccatagctgccgtatccttccccagtggcggcggcggaggaggagctggaggcaaaggtgggagcgggttcctcatccaccgcagcctcctgctcaccacgcacggcaccatcccctcggcagccgcggcgggcgccgccgaggttcggctcagccacggccgcctcctagctcgcctggtgccgcaaaggttctttattaccagttctatacttgaccttacaatagttggccttgatgtcgtggatgatgacctgagttcacatgggcaacagcctcattttttgaaaacttgcttgaaccacagcttggaccttggcagtacggttttgctactgggccacaacagaaatgatttggctgtaggtgaggggaaagttgtaatagctacagacaaccttataaagttctcgattgatgaaagtctgtggcatcctggatctgctgggtttgatatgcaccgcaacctagcttttatggggctgggatcccatg

SEQ ID NO: 84427 - DNA, 756 bp, Zea mays
  unsure (1)..(756): unsure at all n locations
  Clone ID: MRT4577_177008C.1
gaagggtgcgggagaggactcgaggaggaagaaggacaccgtctcctcctcgtgcctttatccgctttcgtgccttctgcatcctccaagaagctagctagcagcgcaggcagcagctgggtcacgcatgctttgtggatagggtagctaccccgcagtagtacacagggttatcatctatctgggagttgcttgcatgggcgtgggagtttgggatcttggttagcttatgcgtggtgaagatactttgctttaatttgggggcgtgaagacctgtaattaagcatcgtgagtgtggtggtggcagcggcggcgcagcgagcaatgccactggcggtggcgcggccgtcgtctggcgtgtcgcgacgccatcggccctgctggtagtgcagcggtaccgtcgtcggcatgccgcgcgcgacgtcgcgcagcgagtcttgatcctggcgccccacatgctgtcttgcttccggctgccgcggctgatcggcggcggggacgtggaccagcaggccgcggcggtgtccccacgtcggggcccgtcgctgccgttcgcggcgtccccgtcgacgtcggggcgcgggaggagcccgtggccgccgccagagccagcggacgacatggagaagaagcggtgggacagcatggnagtcgtggtccatgctgctggacacggtgctgtgcgaagggtcgtcccggccggacagcggcggncggcggnaggaatggatggccgacctgtcgcagctcttcatc

SEQ ID NO: 84428 - DNA, 620 bp, Zea mays
  Clone ID: MRT4577_177009C.1
ccccccccccccttcgtcgccttcgttgggttcgtcactgtcatggctttcccggtcagatcaacctctgtcgcgacctccccggctagatccatcctccctttggctggatcgtcgtcttcatggctggattcgtcgctgtcatggctttctcgactggatccgtcgataccccttcttttctgccacgggcgcagccacattgtccggcgcagacgcgtgtgctgccgccggcctcccttgcgaggctcctcgacgaccggtcgcagaaggaagcaagaaggccctgaggtttctgttgtccttttgtgtcgcctcgccgaccgttgacgctcgaacgtcaacccctcccgaagaacagactactgctgcgtgtctcccgaccacggccacctcgacttcggctacctcggcatccaggggctattgtcttctcgaagtccacaccggtctgtactctagccgcaacattcgcaccctcacgacgctgcgactacggggtgatttgaacccgtcggctcctaccttcggcttctactacagtctcatcgtgttcggtgcccccgttgcgtctgcaggaggatgttagactgtgggggggggcaccacagttgggctac

SEQ ID NO: 84429 - DNA, 348 bp, Zea mays
  Clone ID: MRT4577_17700C.1
aagctctttttttttttttttttttttttttttcttttttattttttttatttctttatataactagaagaccttttgcagaagttatttatgattttcttattggctgacctatttaggccccgcccccgccacccccaggggggggagccaacacccacagggcccctaaagggggggagccaagcgccgcccattgtgagagcaacaacaagaggggtgggcaccaggagaaaaagggcatacacctacaaaccccacaaaaaacgagcccgaagcgtgaagcgccaatcccgcgggggcaaaggcgaaaaccccaacaaaataaaaaagggcgcccaacaggcc

SEQ ID NO: 84430 - DNA, 330 bp, Zea mays
  Clone ID: MRT4577_177010C.1
tcgacaagattgttgagatctacctgctttctctgcctgtcaaggagcaccatatcttggtgactttcttacctttgctcagggactacgtgatgaatatcactcccgtccataatcataccctctcctgtcagctcactctcttcaaggccttcgtcgtcgtctgctaccgtgactgccacgtcggtctcgacgtcaagtgctccaaggaggtcgccaccgccatccttgtcgccatcatcctgtccaagctctcggtcgtgcccgtcatgaagtgctactgctgaaacaatatctgccagccttacactgtgccctgcaaggtcacct

SEQ ID NO: 84431 - DNA, 386 bp, Zea mays
  Clone ID: MRT4577_177011C.1
atcccaaaccatccctgtgggaagcacagggattacctttatccacggagctgatcaccgctggggtgaaatgaaacaaggaccacaccacctacataccatgcagcttgagaggaggaccggtcggatctatatatatacgcatttttgaggatccttacctgaagaactaagggaggtacggcacgtacaggagaaaggaggcccaaaacaccccgcatatgccgcacgaagaataatcccccggtgaacttggcccatccgtccgaggtctgtaacttgttggacaacttcttcctgcccgcgagcgtgatccagggcgccgaggaccggtacccctttttgaaggaggcgactacccacatggtgaagcacacgctgaggat

SEQ ID NO: 84432 - DNA, 1527 bp, Zea mays
  Clone ID: MRT4577_177012C.1
cctcgaggccggccgggtttcccggatgcaataatttttttccgccaaagccaggattcctctgctcttcctgtttagggtttccccctctctctgctcctgccggatgcgatggcgattccgccgcggactccttccccgccgccatcgtggtcgcgctctgtaaccgagaccgttcgggggtcccaccagttcaccgtacggggctactccctcgccaagggcatgggccccggccgctacctcgccagcgacgtcttcgccgtcggaggataccactgggccgtctacctctaccccgacggcaagaacgccgaggacaactccaactacgtctccgttttcgtcgccctcgcttccgacggcatcgacgtccgagccctcttcgagctcaccctcctcgaccagtccggccgcggctgccacaaggttcactcgcactttgaccgctcgctcaagttcggcccatacaccctcaagtacaggggatccatgtggggttacaagcgcttctacaaaagaacactcttggaagaatctgatttcttaaagaatgattgcctagtgatgaactgcacagtaggtgttgtcaagaaccgtatagaaacaccaaaggacatccagattcatgttccacgatcagacatgggccgctgcttcaaggagctcctcagccgctgcattggatgtgacataacattcgaagtgcgagatgagaaagtcagggcacacaagtggattcttgctgctcgctccccagtatttaaagcccagttctttggtcctattggaaagcctgacctgcacacggttgttgtggaggatgtggaacctgttgtcttcaaggcaatggtgaacttcatttacgctgatgaactccccagcattcctgagctagctggatctgcctcaacgtggacatcaacagtagtagtacagcatttgttggcagcagctgatagatatggactggtccgtctgcgtatcctgtgtgaatcaaagctctgtgatgaactgactcctgaaactgtcgcaacaactttagcccttgctgaacagcaccattgtgctgagctgaagtctgcatgtctaaagttcattgctttgcgaggaaatttgggagctgttatggagacggaaggctttgattacctggaggatacatgcccgtccctactatctgacttgttagctactgtggcagtcgtggacgacgatcttgcatcccttaaccgaaaaaggggagtcagcgggaaccaagtcatggctctagtgggaagcgttgaaaggcgcacccggaggaagctttagtagctggcttccctagagggagactgtagttgacaacgatttgatttggacgctggtagctgtgaataatatcgtatccagatgatttttttttttttttgcagaagcagaagttgtaaattttttgaattgaatgcctttttttttctgtttgggacccttccttacgtaaagttctagcttttatactgttttcaatactctaaattgtcccct

SEQ ID NO: 84433 - DNA, 837 bp, Zea mays
  unsure (1)..(837): unsure at all n locations
  Clone ID: MRT4577_177013C.1
cccggccccgccgcgtgctcctccccttgtccgccctccgcctccctctctccacctagcccctcccgcagccccgggacccgtcctcccccaattccaaccgcggccttcctgctttcctctccttcctcgccgccgcagccgcaggcggaatcaccagttccgtcgctctctgcgatgccggccccgaccaccgggtcggcgggaaagacagttcatagaagagctcgcatccttcctcggggagaacctgacggtggattacgaggagaggagcttccacgggacgccgcagaatagcttccacaaggcagtcaacgtgcccgacgtcgtcgtcttcccaaagtcccagtatgaggtacggaatattgtgatgacttgtaataagtacaaggtgccgattgtaccatatggtggggctacatcaattgagggacatacgttggcacctcatggtggtgtttgcattgacatgtcttcaatgaagaaaatcaaatctctgcatgttgaggatatggatgttgtagttgaaccaggagttggatggattgagctgaatgaatacctgaaaccccatggtctctttttccctcttgacccaggacctggagccactattggtggaatgtgcgctacacgatgttctggttcattagccgtgaggtatggaactatgcgggacaatgttatcaatcttcaggctgttctaccagatggtgacgttgtcaagaccggttctcgggctcgaaagagtgcagctggatatgacctaactcggttgatcattggaagtgaangggactttagggtaatacagaagtgactttacgacttcaa

SEQ ID NO: 84434 - DNA, 595 bp, Zea mays
  unsure (1)..(595): unsure at all n locations
  Clone ID: MRT4577_177014C.1
gtacccccgnggtctncggccgggccgggnaaaaaaaaaaaaaaaaaaaaaaaaaaaaaaaaaaagagacacagagcagggcgctcttcggtcggaggagaagcgcgaccacgaccgtgggctttatctcgttcgtcggccgggttctcttcgcctccctcttcctcctctcggcctaccaagagtatgtctccccccttcttccccgtcttgctcgcacacccctcagatcccgtctcgtcttagtatcctctgctcgtcgccaactcgaggccgctcctttcccgctgggccgcctctccgttggttgctttcgtctggatctggccctgggggctcgtgttcggacgtgctcaatcgaaatccttcctctgcgatgcggagatgcgagatgagattcggtgcgtttttttttgaatttgatgcggnagatccgacggtcagttaaggtacccggacttttaccccgcggcgagcctgcgagccgacgaatgagtggaattctagagatggacgggattggatcaaaccagatgctgcgcgcccggtgcacagaaagattgggcctccctacatctgggtggtgaccgtgtga

SEQ ID NO: 84435 - DNA, 2107 bp, Zea mays
  Clone ID: MRT4577_177015C.1
cattgggtacctccggcccgggcggggcggccacacgcgtttggattttgctccttgctcccttgatccatccacttctgaaagggtcaccatgtctgcctttgtggggaagtacacagatgagctgatcaagaccgccaagtgcctcgcaacgccgggcaagggcatcctggcctccgacgagtcgacgggcaccatcggcaagcgcctgtccagcatcaacctcgagaacgtggagtcgaaccggcaggcgctccgcgagctgctcttcacggcgcccggcgtgttcgactacctctccggggtcatcctcttcgaggagacgctgtaccagaagacctccgacgggaagccgttcgtggacgtgctcatcgcgggcggagtggtccctgggatcaaggtcgacaagggcaccgtggagatcgcgggcaccgacggcgagaccaccacgcagggcctcgactccctgggcgcacgctgcgccaagtactacgaggccggcgcgcgctttgccaagtggcgcgccgtgctcaaggtcggccccgcggggcaggggcagccctccgagctcgccgtcaggcagaacgtcgagggcctcgcgcggtacgcgctcatctgccaggagaacgggctggtgcccatcgtggagcccgagatactcaccgacggcggccacgacatcgggacctgcgccgccgccacggagcgcgtcctcgccgccctctacaagtcgctcagcgaccacaaagtcctgctcgaggccacgctcctcaagaccaacatggtcacccccggttccgatagccccaaggtctccgcggaggtgatagcggagtacacggtggcggcgctgcggcgcaccgtgccgccggcggtgcccggggtggtgttcctgtcgggcgggcagagcgaggaggaggcgacgcagaacctggacgcgatgaacaagctggaggtgctcaagccctggacgctgtccttctccttcggccgcgcgctgcagcagagcaccctcaagaagtgggtcggcaagaaggagaacgtcgccgccgcgcaggccaccttcgtcatccgctgcaaggccaactccgaggccgcgctgggcaagtacgccggctccggcgccggggacgccgccgcctccgagagcctgtacgtcaaggggtacaagtactaaagccgccactgctgactgtgccgacccaatccttgtgtcccacgtcgcagcgctcggactgtgccgagatatatgtgctacactagtgtttgtgtactaaattctcttctcttcgtccggctcctatttgagcaaaacatacacacacacacacacaacacgttgatctatttgcagctcgcaatgtacagtattactggaacataagtgcaatatatatagatgtgaccatcttacttaaaaaaaaaaaaaaaaaaaatggggcccgcccatacataaaaaaaaaaaaaaaaaagcggcggagtacacggtggcggcgctgcggcgcaccgtgccgccggcggtgcccggggtggtgttcctgtcgggcgggcagagcgaggaggaggcgacgcagaacctggacgctatgaacaagctggaggtgctcaagccctggacgctgtccttctccttcggccgcgcgctgcagcagagcaccctcaagaagtgggtcggcaagaaggagaacgtcgccgccgcgcaggccaccttcgtcgtccgctgcaaggccaactccgaggccgcgctgggcaagtacgccggctccggcgccggggacgccgccgcctccgagagcctgtacgtcaaggggtacaagtactaaagccgccacagctgcctcgccggccagtggaatccaatccaatccaatccaatccttgtgtcccacgtcgcagcgctcggactgtgccgagatatatgtgctacactagtgtttgtgtactaaattctcttctcttcgtccggctcctatttgagcaaaacatacacacacacaacacgttgatctatttgcagctcgcaatgtacagtattactggaacataagtgcaatatatatagatgtgaccatcttacttacaaaaaaaaaaaaaaaaaaggccccta

SEQ ID NO: 84436 - DNA, 255 bp, Zea mays
  Clone ID: MRT4577_177016C.1
atgattattcgtgccttctctatgtttcatacaatcatgtttatacctttgtacattgcaatgaacaagcttttgagaacaagtgaccaacaacacccttggggagggacggcccctaatgatatggctttggtgccacatgtgccgttgctcaggatggccacaaggtacaagttaaggaagtacactatcgccatgtccaagatagcaggtgtacccacaaccattatatggtacatgccaccatctttgtaa

SEQ ID NO: 84437 - DNA, 2133 bp, Zea mays
  Clone ID: MRT4577_177017C.1
cattgggacctcgatccgggaaaaggctctgctctgcggccacacgcgtttggattttgctccttgctcccttgatccatccacttctgaaagggtcaccatgtctgcctttgtggggaagtacacaggttcttgctcgcgctgaatatacttttgtatgtcttttcaaagtcacgctggctgaatatactcttgtatgtcttttcaaagtcacgctgaatatactcttgtatgccttttcaaagtcacacataggtgatgcttcagtcttagaacgattacttttgcatgtaagaatttgtttctgtagcagttttgtagtcgtgctggtacgcgctgagtttttaacaatttatgggatgtttctaagaatttcttgtgtttgaaacaagtcagcgcagtttcgtctgttgatacagctgtttgtagacatattttataggagtagttgattaattatactagtctgctttgctggccggcatatagacagtggtaaacagtatttaccaacaggaagaaacagcaggaacagcgttatatacagtactgaacagtagcgcgtacagctagagctaggaaacattcgtgaacattatatgaacagcgtcagatgccctggccctggtggcctcggatttatttcgggttgaagaagtaataaaaaacttacctttgtttttaaatatttgccgctagtttatttttaaacttaaccgataaaaaccgagagattaaataatatggcgagatataaatagctgcagcatatagatgcacatatagtacagtacataatacgcgcgcgcgcgcagatgagctgatcaagaccgccaagtgcctcgcaacgccgggcaagggcatcctggcctccgacgagtcgacgggcaccatcggcaagcgcctatccagcatcaacctcgagaacgtggagtcgaaccggcaggcgctccgcgagttgctcttcacggcgcccggcgtgttcgactacctctccggggtcatcctcttcgaggagacgctgtaccagaagacctccgacgggaagccgttcgtggacgtgctcatcgcgggcggagtggtccctgggatcaaggtcgacaagggcaccgtggagatcgcgggcaccgacggcgagaccaccacgcagggcctcgactccctgggcgcgcgctgcgccaagtactacgaggccggcgcgcgctttgccaagtggcgcgccgtgctcaaggtcggccccgcggggcaggggcagccctccgagctcgccgtcaggcagaacgtcgagggcctcgcgcggtacgcgctcatctgccaggagaacgggctggtgcccatcgtggagcccgagatactcaccgacggcggccacgacatcgggacctgcgccgccgccacggagcgcgtcctcgccgccctctacaagtcgctcagcgaccacaaagtcctgctcgaggccacgctcctcaagaccaacatggtcacccccggttccgatagccccaaggtctccgcggaggtgatagcggagtacacggtggcggcgctgcggcgcaccgtgccgccggcggtgcccggggtggtgttcctgtcgggcgggcagagcgaggaggaggcgacgcagaacctggacgctatgaacaagctggaggtgctcaagccctggacgctgtccttctccttcggccgcgcgctgcagcagagcaccctcaagaagtgggtcggcaagaaggagaacgtcgccgccgcgcaggccaccttcgtcgtccgctgcaaggccaactccgaggccgcgctgggcaagtacgccggctccggcgccggggacgccgccgcctccgagagcctgtacgtcaaggggtacaagtactaaagccgccacagctgcctcgccggccagtggaatccaatccaatccaatccaatccttgtgtcccacgtcgcagcgctcggactgtgccgagatatatgtgctacactagtgtttgtgtactaaattctcttctcttcgtccggctcctatttgagcaaaacatacacacacacaacacgttgatctatttgcagctcgcaatgtacagtattactggaacataagtgcaatatatatagatgtgaccatcttacttactg

SEQ ID NO: 84438 - DNA, 204 bp, Zea mays
  Clone ID: MRT4577_177018C.1
cgagtccgccgccgatctggctcagcgcatggcccggcgtgatctaatcactcactttattgtctaaaccatccgggccgtagaagcaggaccacacgccgacggcggtgctcccaagatgaggacgttgcgtaagtatcagatgccgacgactacacctacaggcgcatgtcgacatgtccacaggctgagcctgcccaggct

SEQ ID NO: 84439 - DNA, 156 bp, Zea mays
  Clone ID: MRT4577_177019C.1
gggaaccgggagcttcgtcgtttagaaccgggcttcaatagatcgatcctcggtcgttgagcggacacggtaatggaaggccacggctgggggggtcggcggaccctggaggagatgcgggaggaagagagccggcgagaggattcagtatgccct

SEQ ID NO: 84440 - DNA, 103 bp, Zea mays
  Clone ID: MRT4577_17701C.1
caataatctgtagccatgaacatgggaggttataagacgcgacgccaagtttctgagctcgctgtgtgcagaattttcagaatctagttctctcaggatcacg

SEQ ID NO: 84441 - DNA, 370 bp, Zea mays
  Clone ID: MRT4577_177020C.1
gtcatcgatgcctaccgtactttgggtgaccgcggtcactacgcggccgatgaggcagttaaggacctcgtcggcacattcgccttcgtcgtacttcgacagccgctccggagcctaattatgcgtacttggcgccggctacacaagaatagcgcacacacctgtggactacggcgtctcagactattgcttcagattgatcagcgtctgaccggtatctcggtcaagcacggttgctgcgagagatacgcgcacttccgcgcagtctgcatgatgcacagagacgaacgtctcaacagcttcgagctcttcatgaacaggctaaatgtcatgccatgcgtacactgctaatgcgccatgtacggatcca

SEQ ID NO: 84442 - DNA, 583 bp, Zea mays
  unsure (1)..(583): unsure at all n locations
  Clone ID: MRT4577_177021C.1
cttcacccaactctcaccccagcacagctgtctccgagtccaacaagccaatggctgtcgtccgccagcgccgccagctgccgcaccttaccctcccgctccaccacttcgtcctgcgcttgccgccgcagcctcagcccaccgccgcgccgtccacctccacgtccgacgcccgcctctcggactacgaaaggctctccgttctcggccacggcaacggcggcaccgtctacaaggcgcggcaccgccggtcctcgcagccgctcgcactcaagatcttcgcggacggggacgcctccgcggcgcgcgaggccgagatcctcatgctcgccgcggacgcgccccacgtcgtgcgcctccacacggtgatcccgtcggccgccgccggggaggcgcccgcggctctggcgctggagctcatgcccgggggctccctcgcgggcctgcttcgccggctgggccggccgatgggggagcgccccatcgccgccgtggcgcggcaggcgctcctcgggctcgcggcgctccacgcgctccgcgtngttcaccgcgacctcaagccgtcgaacctgctcgtcggcgc

SEQ ID NO: 84443 - DNA, 1186 bp, Zea mays
  Clone ID: MRT4577_177022C.1
ggccggggcctctccccttcttctcccggcaactcctcaccccagaggccacaactgccaacaagccaatggctctcgtccgccagcgccgccagctgccgcaccttaccctcccgctggaccacttcgccctgcgcgtgccaccgcagcctcagcccaccgccgcgccgtccacctccacgtccgacgcccgcctctccgactacgagaggctctccgttctcggccacggcaacggcggcaccgtgtacaaggcgcggcaccgccggtccgcgcagccggtcgcactcaagctattcgcggacggggacacctcggcggcgcgcgaggccgagatactgatgctcgccgcggacgcgccccacgtcgtgcgcctacacgcggtgatcccgtcggccgccggggaggctcccgcggcgctggcgctggagctcatgcccgggggctccctgtcgggcctgctgcgccggctggaccggccgatgggggagcgccccatcgccgccgtggcgcggcaggcgctcctcgggctcgccgcggtccacgcgctccgcgtcgtgcaccgcgacctgaagccgtcgaacctgctcgtcggcgccgacggcgaggtgacgatcgccgacttcggcgcgggcaaggtgctgcgccggcggctggacccctgcgcgtcctacgtcggcacggcggcgtacatgtcccccgagcggttcgacccggaggcgtactcgggagactacgacccctacgccgccgacgtgtggagcctcggggtggccatcttggagctgtaccggggccacttccctctcctgcccgcgggccagcgcccggactgggccgcgctgatgtgcgccatatgctttggcgaggcgccggagccgccggccgcggcgtcggaagagttccgggatttcgtggcgcggtgcttagagaagaaggccgggcggcgcgcgtcggtggccgagctgctggagcacccgttcgtcgccgagcgggaagcggccggcgcacaggaggcgctcgccgcgctcgtgaaagaggcggagcagctggacctatagacagtaattcacgtttaggacaagctgagatgtaaattacgccatattttttgtttatccgtttattgagtttaacaatcaaatctcagaagtcaacaaaattagtgaaattcaagattccctcc

SEQ ID NO: 84444 - DNA, 766 bp, Zea mays
  unsure (1)..(766): unsure at all n locations
  Clone ID: MRT4577_177023C.1
agtttgccttgtttaaccattcctccccaaaacacatcctgcgatcctcgaagcctccgccgagcatcgatcatgtcggcctactgcggcaagtacgcggatgagctcatcaagaatgctgccaattgttgagcctgagatccttgttgatggccctcatgacattgatcgctgcgcttacgtcactgagacagtccttgctgcctgctacaaggctctcaacgagcaccatgtcctcctggagggtaccctcctgaagcccaacatggtgactcctggctccgactctaagaaggtgacacctgaggtgatcgcccagtacgccgtccgtaccctccagaggaccgtccctgctgctgtgcctgctgttgtcttcctctccggtggacagagcgaggaggaggccaccctgaatctcaatgccatgaacaagctcagcaccaagaagccatgggccctgtccttctccttcggccgtgccctccaggcgagcaccctcaaggcctgggctggcaaggtggagaacgtggagaaggctagagcggccttcctcgccaggtgcaaggccaactccgaggctaccctcggcacctacaaggngtgatgctgccgccgacaccgagagccttcacgtcaaggactacaagtanctgagttgcttctctttgcgatccccggtgttttggaactcctgcctgcgagtaggttggctgagtggtgntttgcttgttagagcttttattattcggacatgaaaaaaacatgc

SEQ ID NO: 84445 - DNA, 533 bp, Zea mays
  Clone ID: MRT4577_177024C.1
attaaaacgcacatgtggattgctagctactactccagcttgttgcatcccactttcactccctctgctagttaacaagtggcagcattacacgcggttgagggggcagcagcatgcaggcgaggcgaaggcgacgcgcttttttgtcggcgtgccgtggcgctgctccagtgctccgtgccgtgtgtgtccctgcgcagcggcagcccatgccatcaaattgaaactaggggggccacagccacagacacagacacaggcgggcgcgggtggcccccgggcactggtctcgtcccagcctcggaggcgagctcgtggccggacagctggcgctactatacgagctcctcgacccccccacatccacatgatccacaacccctcctcgcagtcgcatttgcccacgagtggagttagggtgtgtttggtttgacttttggctttggcttttgcccccctaaaagccaaaagccaaccaaagggctggatccaggaagtaactttttctaaaagccgactttcttgtagtgcaa

SEQ ID NO: 84446 - DNA, 545 bp, Zea mays
  Clone ID: MRT4577_177025C.1
ttaacataaaatataaagataaccatcatcccacataggaagcatgttttttggatgtccgaaaataagctctaacgagcaaaccacactccgcaacctagctcgtaggcaggagttccaaaacgggcacgcaaagagaagcaactcagtacttgtagtccttgacgtgggtaatttgcgcgcctgctgagcttgttcatggcattgaggttgcgggtggcctcctcctcgctctgtccaccagagaggaagacaacagcaggcacagcagcagggacggtcctctggagggtacggacggtgtactcagcaatcacctcaggagtcaccttcttggagtcggagcctggagtcaccatgttgggcttcaggagggtaccctccaggaggacatggggctcgttgagcgccttgtagcaggcagcaaggacggtctcagtgacgtaagcgcagcgatcaatgtcatgagggccatcaacaaggatctcaggctcaacaattggcaccagaccattctcctggcagatgatggcatagcgagccag

SEQ ID NO: 84447 - DNA, 951 bp, Zea mays
  Clone ID: MRT4577_177026C.1
cccaacaccacctcgcctgcgatctccgtagcctccgtcgcgtcgagcatcgatcatgtcggcctactgcggaaagtacaaggatgagctcatcaagaatgctgcctacattggcacccctggcaagggtatccttgctgctgatgagtccactggcaccattggcaagcgcctttccagcatcaatgtcgagatccttgttgatggccctcatgacattgatcgctgcgcttacgtcactgagaccgtccttgctgcctgctacaaggcgctcaacgagcaccatgtcctcctggagggtaccctcctgaagcccaacatggtgactccaggctccgactccaagaaggtgactcctgaggtgattgctgagtacaccgtccgtaccctccagaggaccgtccctgctgctgtgcctgctgttgtcttcctctctggtggacagagcgaggaggaggccacccgcaacctcaatgccatgaacaagctcagcaccaagaagccgtggtccctgtctttctccttcggccgtgccctccaggcgagcaccctcaaggcctgggctggcaaggtggagaacttggagaaggctagagctgccttcctcgccaggtgcaaggccaactctgaggctaccctcggcacctacaagggtgatgctgccgccgacaccgagagcctccacgtcaaggactacaagtactgagttgcttctctttgcgtgcccgttttggaactcctgcctacgagctaggttgcggagtgtggtttgctcgttagagcttattttcggacatccaaaaaacatgcttcctatgtgggatgatggttatctttatatttgtatgttaattagtctctttgctgttaaatttcgtgtaagttggtcctgccgatggagaatcgagcagccccctttttttgttctatcaactatgctgtaatgctggc

SEQ ID NO: 84448 - DNA, 1451 bp, Zea mays
  Clone ID: MRT4577_177027C.1
cccaccccctaatcttgcccgtccaccaaaccgcctccgtcccctgcctgccaaccccaaattccgctctcgaatctttcccgagcatcgaccatgtcggcctactgcggaaagtacaaggatgagctcatccagaacgctgcctacattggcacccctggcaagggtatcctcgctgctgatgagtccacaggcaccatcggcaagcgcttcgccagcatcaatgttgagaacgttgaggacaaccgtcgtgccctccgtgagctcctcttctgcacccctggtgccctccagtacctcagcggtgtgatcctctttgaggagactctgtaccagagcaccaagggtggcaagccctttgtcgacatcctcaaggcgggcaatgtcctccccggcatcaaggtggacaagggtaccattgagctcgctggaaccaacggtgagaccaccacccagggctttgatgaccttggcaagcgctgcgccaagtactacgaggctggtgcccgcttcgccaagtggcgtgcagtcctcaagatcggcgccaccgagccatcgcagctctccatcgaccagaacgctcagggtctggctcgctatgccatcatctgccaggagaatggtctggtgcccattgtcgagcccgagatccttgttgatggacctcatgacattgaccgctgtgcttatgtcaccgaggtcgtccttgctgcctgctacaaggccctcaacgaccagcatgtccctcctcgagggcaccctcctgaagcccaacatggtgactcctggctccgactctaagaaggtgacacctgaggtgatcgcccagtacaccgtccgtaccctccagaggaccgtccctgctgctgtgcctgctgttgtcttcctctctggtggacagagcgaggaggaggccaccctgaatctcaatgccatgaacaagctcagcaccaagaagccatgggccctgtccttctccttcggccttcctcgccaggtgcaaggccaactccgaggctaccctcggcacctacaagggtgatgctgccgccgacaccgagagccttcacgtcaaggactacaagtattgagttgcttctctttgcgatcccgttgttttgaaactcctgcctgcgagtaggttgctgagtgttgtttgcttgttagagcttttatattcgaacataaaaaaaacatgcttcctatgtggatgatggttatctttatattcgtatattaactactagtctctgttgttagtttccgtgtaatttgctcctcccagatgggagaatcgaacaccgcttttttgttctatctgatatgctgtaatactggcctttgtattggccttggtatcggcaaaaaccattccgtatgctggagtcatattctttgtaaattgacctttggtatcggcaaaagccatttatatgctgagtggagacagc

SEQ ID NO: 84449 - DNA, 584 bp, Zea mays
  unsure (1)..(584): unsure at all n locations
  Clone ID: MRT4577_177028C.1
gccggccgggccgggatatgccacacccacggccactcgaactctcacgtacacgaagaacgaggaggtcggacaaggcatggacatcgtgcagattccttgctaaaatccctatcggtcccacgctcccaaacactcacaataacatttacaatggagtctctgggattaccgagcactgtagatgaggccgggcagccgaaatcggaaacgacatgaccagcacgactgaacgtgctgagcgggccatacattggcatgagagcgcggcccggcgccgcgcaacgacgagaacaagctccgcgctgacgatattactgcgtacatcttcaagaattaccacgtgctgcaaaaacaccgtgttctccgtaaccgtcaagaagctgccgccgccggataacaaggccaagaccacgcacgtcaccatcgctctagaagtcggaagacagcactcgcgcacagtagcatcaacataattgtactccgtacgtactgtcctgacaagntgagctgagcgctcttttggttacggatgtgctgactcagagctcgatgtgtgtgtgtaacagaccatgcttcttttc

SEQ ID NO: 84450 - DNA, 1253 bp, Zea mays
  Clone ID: MRT4577_177029C.1
ccgggattccccgtttgccttgtttaccattcctccccaaaacacatcctgcgatcctcgaagcctccgccgagcatcgatcatgtcggcctactgcggcaagtacgcggatgagctcatcaagaatgctgcctacatcggcacccctggcaagggtatccttgctgctgatgagtcaactggcaccattggcaagcgcctttccagcatcaatgtcgagaacgtggaggagaaccggcgggctctccgtgagctcctgttctgctgccctggtgccctccagtacatcagcggtgtgatcctcttcgaggagaccctctaccagaagaccaaggatggcaagccttttgtcgatgtcctcaaggagggaggcgtcctccctggcatcaaggtcgacaagggcaccattgaggttgttggcaccgacaaggagaccaccacccagggccacgatgacctcggcaagcgctgcgctaaatactacgaggccggtgcccgctttgccaagtggcgtgctgttctcaagattggccccaacgagccgtcacagcttgccaattgttgagcctgagatccttgttgatggccctcatgacattgatcgctgcgcttacgtcactgagacagtccttgctgcctgctacaaggctctcaacgagcaccatgtcctcctggagggtaccctcctgaagcccaacatggtgactcctggctccgactctaagaaggtgacacctgaggtgatcgcccagtacaccgtccgtaccctccagaggaccgtccctgctgctgtgcctgctgttgtcttcctctccggtggacagagcgaggaggaggccaccctgaatctcaatgccatgaacaagctcagcaccaagaagccatgggccctgtccttctccttcggccgtgccctccaggcgagcaccctcaaggcctgggctggcaaggtggagaacgtggagaaggctagagcggccttcctcgccaggtgcaaggccaactccgaggctaccctcggcacctacaagggtgatgctgccgccgacaccgagagccttcacgtcaaggactacaagtactgagttgcttctctttgcgatcccgttgttttggaactcctgcctgcgagtaggttgctgagtgttgtttgcttgttagagcttttatattcggacatgaaaaaaacatgcttcctatgtggatgatggttatctttatattcgtatattaactactagtctctgttgtcg

SEQ ID NO: 84451 - DNA, 366 bp, Zea mays
  unsure (1)..(366): unsure at all n locations
  Clone ID: MRT4577_17702C.1
ctccccttctccggggggtggctccggtggggggaccgggagaaatgcagcactccctctgaaccaccctctgcttctccagtaccgcgagtaacactggagaaccatccatccaaagggacaccagctctaactagggttcatgtacaacacgtaggttgtgaatgatcacaacaagcttcaattaatgcttccacatacatatactacagctaatgatcattcgaggctttgccatgattcataaaagggttaatcaatgtatatgggctcatggtggtacgagattcaaatatacatggcaaggacactcttcaacctactcancatatctcattaagagaaacaacttcctgggttcaagct

SEQ ID NO: 84452 - DNA, 186 bp, Zea mays
  Clone ID: MRT4577_177030C.1
ttgattaaaaggcatgccggcagtcactacgagccattcaatcgatgaaaaacacacataagcgtgacattacattgggaggcccaatccacggcataaacggaaaaaaaacaaccagcatagaaaacgcgcgcaactcatcgatagaatggataataataaaaaggcatgctggcaggcactact

SEQ ID NO: 84453 - DNA, 826 bp, Zea mays
  Clone ID: MRT4577_177031C.1
gtcccaacaccacctcgcctgcgatcttcgtagcctccgtcgcgtcgagcatcgatcatgtcggcctactgcggaaagtacaaggatgagctcatcaagaatgctgcctacattggcacccccggcaagggtatccttgctgctgatgagtccactggcaccattggcaagcgcctttccaggctccgactccaagaaggtgacccctgaggtgattgctgagtacaccgtccgtaccctccagaggaccgtccctgctgctgtgcctgctgttgtcttcctctctggtggacagagcgaggaggaggccacccgcaacctcaatgccatgaacaagctcagcaccaagaagccgtggtccctgtctttctccttcggccgtgccctccaggcgagcaccctcaaggcctgggctggcaaggtggagaacctggagaaggctagagctgccttcctcgccaggtgcaaggccaactctgaggctaccctcggcacctacaagggtgatgctgccgccgacaccgagagcctccacgtcaaggactacaagtactgagttgcttctctttgcgtgcccgttttggaactcctgcctacgagctaggttgcggagtgtggtttgctcgttagagcttattttcggacatccaaaaaacatgcttcctatgtgggatgatggttatctttatatttgtatgttaattagtctctttgctgttaaatttcgtgtaagttggtcctgccgatggagaatcgagcagctccctttttttgttctatcaactatgctgtaattctggctatgtatcggcaaaaacaattctat

SEQ ID NO: 84454 - DNA, 233 bp, Zea mays
  Clone ID: MRT4577_177032C.1
cggactcctctcattactcgattcttttctcatctaactcaatcaacaaatgagatgggtaaattacaacgtataaccgcaactttaaactcaaactaatactacaatctatttacacaaacaacatcatccacatttaccgaaaatccttaattccctcaaccaaaacaaccagatccataaccaatacttcaacacataactttcaataaaaataattccccaacacacat

SEQ ID NO: 84455 - DNA, 1190 bp, Zea mays
  Clone ID: MRT4577_177033C.1
ccattcctccccaaaacacatcctgcgatcctcgaagcctccgccgagcatcgatcatgtcggcctactgcggcaagtacgcggatgagctcatcaagaatgctgcctacatcggcacccctggcaagggtatccttgctgctgatgagtcaactggcaccattggcaagcgcctttccagcatcaatgtcgagaacgtggaggagaaccggcgggctctccgtgagctcctgttctgctgccctggtgccctccagtacatcagcggtgtgatcctcttcgaggagaccctctaccagaagaccattgaggttgttggcaccgacaaggagaccaccacccagggccacgatgacctcggcaagcgctgcgctttgccaagtggcgtgctgttctcaagattggccccaacgagccgtcacagcttgccattgacctgaatgctcagggtctggctcgctacgccatcatctgccaggagaacggtctggtgccaattgttgagcctgagatccttgttgatggccctcatgacattgatcgctgcgcttacgtcactgagacagtccttgctgcctgctacaaggctctcaacgagcaccatgtcctcctggagggtaccctcctgaagcccaacatggtgactcctggctccgactctaagaaggtgacacctgaggtgatcgcccagtacaccgtccgtaccctccagaggaccgtccctgctgctgtgcctgctgttgtcttcctctccggtggacagagcgaggaggaggccaccctgaatctcaatgccatgaacaagctcagcaccaagaagccatgggccctgtccttctccttcggccgtgccctccaggcgagcaccctcaaggcctgggctggcaaggtggagaacgtggagaaggctagagcggccttcctcgccaggtgcaaggccaactccgaggctaccctcggcacctacaagggtgatgctgccgccgacaccgagagccttcacgtcaaggactacaagtactgagttgcttctctttgcgatcccgttgttttggaactcctgcctgcgagtaggttgctgagtgttgtttgcttgttagagcttttatattcggacatgaaaaaaacatgcttcctatgtggatgatggttatctttatattcgtatattaactactagtcgtctgtgt

SEQ ID NO: 84456 - DNA, 554 bp, Zea mays
  unsure (1)..(554): unsure at all n locations
  Clone ID: MRT4577_177034C.1
ttctccgggagttccggtnnttcgtggnngtgggcggaatcgnagnatgnngcggcgtcggnatggttgagtaccccgctgcttcgtncnnggcggcctnncgcctgggccacggnacgaaccacttccctctcatcaacgcccttcagnncacctaccggcgaggggtgggtgggaggtccaagnatcanntcctcgnatcgggnagaacgcagnnaggtcnnccgcggcttttcggcttttcgtcaacccttcttccacggnagggagnngcgatgctggaactgccattcgatgggcatgaaaacggcaaggtagnnctggacggccgcaacatcacctgtcaacgaaggcccagtccccgcggcggnccgtggaggcggcggcggcggctactgtggtggccgtggaggcggnggctacggcggtggcgggcgccgtgatggcggcggcggctacggcggtggcggcggcggctacggtggcggaggaggctactgaggtggtggtggaggctacggcggaggcaaccggggcggaggttacgggatact

SEQ ID NO: 84457 - DNA, 850 bp, Zea mays
  Clone ID: MRT4577_177035C.1
accaaagccgccagcctccctcccctgcctgccagcccccaaatctcccctccctctgtcgctctcgaatcttccccgagcatcgaccatgtcggcctactgcggaaagtacaaggatgagctcatcaagaacgctgcctacattggcacccctggcaagggtatccttgctgccgacgagtccaccggcaccatcggcaagcgcttcgccagcatcaacgttgagaatgttgaggacaaccgtcgcgccctccgtgagctcctcttctgcacccctggagccctccagtacctcagcggcgtgatcctcttcgaggagaccctgtaccagagcaccaagggtggcaagcccttcgtcgacatcctcaaggagggcaacgtcctccctggcatcaaggtggacaagggtaccgtcgagctcgctggaaccaacggtgagaccactacccagggctttgatgaccttggcaagcgctgtgccaagtactatgaggctggtgcccgctttgccaagtggcgtgctgtcctcaagattggcctcaccgagccatcacagctttccatcgaccagaatgctcagggtctggctcgttatgccatcatctgccaggagaatgggctggtgcccattgttgagcctgagatccttgttgatggacctcatgacattgaccgctgtgcttatgtgaccgagatggtccttgctgcctgctacaaggctctcaacgaccagcatgtcctccttgagggtaccctcctgaagcccaacatggttacccctggttccgacgccaagaaggtagccccctgaggtgattgctgagtacccgtccgcaccctcagaggacga

SEQ ID NO: 84458 - DNA, 878 bp, Zea mays
  Clone ID: MRT4577_177036C.1
gccgctcgaggcgcggggcgggactacgacacaccccatcactgcctgccaactagccccaaatctcccctccctcccccgctctcgaatccccccgagcatcgaccatgtcggcctactgcggaaagtacaaggatgagctcatcaagaacgctgcctacattggcacccccggcaagggtatccttgctgccgacgagtccaccggcaccatcggcaagcgctttgccagcatcaatgttgagaatgttgaggacaaccgccgtgccctccgtgagctcctcttctgcacccctggagccctccagtacctcagtggtgtgatcctctttgaggagacactgtaccagagcaccaagggtggcaagcccttcgttgacatcctcaaggagggcaacgtcctccctggcatcaaggtggacaagggtaccgtcgagctcgctggaaccaacggtgagaccaccacccagggctttgatgaccttggcaagcgctgtgccaagtactacgaggctggtgcccgctttgccaagtggcgtgccgtcctcaagattggccccaccgagccatcacagctttccatcgaccagaatgctcagggtctggctcgctatgccatcatctgccaggagaatgggctggtgcccattgttgagcctgagatccttgttgatggacctcatgacattgaccgctgtgcttacgtgactgagatggtccttgctgcgtgctacaaggccctcaacgaccagcatgtcctccttgagggcaccctcctgaagcccaacatggtcacccctggatccgacgccaagaaaggtggcccctgaggtgattgctgagtacaccgtccgcaccctccagagactgtccctgct

SEQ ID NO: 84459 - DNA, 734 bp, Zea mays
  unsure (1)..(734): unsure at all n locations
  Clone ID: MRT4577_177037C.1
gggagctggcactactggcaactggattcacttgtgcggttgcactgtacacagtcatctcagatacaagatacagagncgagaggggaaaaaactatgcactccgtcataaattattctaattttcttgtagggtcaaaatgtctctgtgtcagaaatttctgtgatttttttttcttgtaattttaatgaagcgaccgtcaaaggaggagaccgttacagtggctttaatttggaataacatacgaaagctaccgaattctgttccgatcgatcggagccggaggtggtacgcacaagatcagtcagtggcgcctgcccttggctttggcgttgccgccatccttgccctttccgccgccgaagagcctgcagaagccgcagacggcgacgcgcggcgacggcgggtcgagcgcgggcggcacgcgccccgtggccctgtacccggcgtgcccgtgcccggtggagcggctgcgctccaccgcccgcgccgcgcccgcgccgccgtcctcctccgccggcttgatctcccccgagaagctcttgttgtcgtcccacaccagccctgacgagcccgaccgccggaacgtctcgctggaccgctgcagccccgccatgcacgcagcaaagagccaaagacagagagagagagagatagagagagagacgatggcgaggcgaggcgaggcgagagccggcgtggactgtgtgcagcggtcccggccggcctcgag

SEQ ID NO: 84460 - DNA, 435 bp, Zea mays
  Clone ID: MRT4577_177038C.1
gccgctcgagccggcgggccgggattctcccctctccctccttcctcctatctctcttcctctccatcccgcgacgagagaccagagctcccgactggcggcgacctccagtccgtgaagcccgccagatcttcgacagccgcggcaaccccaccgtcgaggctgatgtgtgctgctcacatggaacctttgccaaggccgctgttcccagcggcggatctactggtgcctatgctcctttgaagctgagggacggtggttctgactacttgggccagggagtttccaaggctgttaacaatgtcaactccattattgcacccgtctttggttggcaaggaccctacgcgctcactctgtgcttcgacatctttatggcacaggagcttgatggaaccatagaatgagtggggggtggtgcaaagaaaaagcttg

SEQ ID NO: 84461 - DNA, 214 bp, Zea mays
  Clone ID: MRT4577_177039C.1
ccagggatcaaacccatgtctcttatgtctcctgtgttggctgggaagcgggagtaattgccttataaagtgcaatgtaattaggattttttaagattaataaaatgcacggaactattgacattgtttcattggaatgctcttaagtctcaaacagtcctataataccttattaagaaactgtttcctgcctcctctgttctgtgattacagt

SEQ ID NO: 84462 - DNA, 1257 bp, Zea mays
  Clone ID: MRT4577_17703C.1
gtacccggccccccccctcgttttttttttttttttttttttttttttttttgtcatgagccaaataatttctgatttcctaaagtcaaccgctaatattacaaatactgaatatcataaatagagtactgaacttgttcaactgggtatctgataaacagaagttcatacagataactactaagttcaataagaaaaaacattagtggcacaactttgcttcgatcagagctcatcttcatcctccagagcatcaaatcgcagcacaatcaacttcttacatctagctttcactcccagggtgcctaaccagttctggttacatctagctatacaaaagtccatccaaagttcattagcctcccagcataaatcggttggatgcttcctccccctaattcatctgtcccatcacaaaccacccaatcaacgccaaaagcagaaaacacagttccatattcctaggtttcactttagttgaccctttcagcatttgcatctcattctccatcaatttcaatgcagctatcgatttcttgttttcctcaatttcaaccatggctgccttcatcgactttttcacgttatccagctcttccatcactaactccaggtcggacaactttttcttcatctctctgatggaattggttagagattcaacagctttgccatgatcattaagtgcgaccattaacaactcaaggcattggtcaccactgacaaccccatccttgattaacaaaacagcatagctcgcttgccaatggaaaaaatcacattgagacccatccattttcttggctctgcaccggtagaacttcctcgatgtgctttctggttgtttggagacccgctcaatcaccaccccattgcagagcttgcaagggattagaggaagctcaacactcacagtattggagccagagagtaaggatgatgatgacgatgacgacatctcctcaaatagcctcaggcggcacggctgacgatattgcatcgcggggctgtgaggagctcagcgaaggaggccgtcgagatccgcggtgaccggaaaccctagctcgcgggcccgccagcagctgatgcgagggggccagagctcccatggcacagccgacgaggttgcgtcagtggagcggtgaggtcgcaccgcggcgaggtcccgtcgcggcagtggatgcggagaagaaagaggtcagaagaagatgggcagccccgcagtggagcggtgtgttttttcccagcccggccggc

SEQ ID NO: 84463 - DNA, 265 bp, Zea mays
  Clone ID: MRT4577_177040C.1
gctgaggtcatcatcagatttgaaatatttaaagtggatacaaactatttcagcaatgcagacaattaagtgtgttgttgtgggcgatggtgctgttggtaaaacatgtctcctgatatcctacacaacaaacaaatttccatcggaatatgtaccgactgtttttgacaactatgcagtcacagttatgattggtggagaaccatatactcttggactttttgatactgcagggcaagaggattatgacagattacgaccgctg

SEQ ID NO: 84464 - DNA, 390 bp, Zea mays
  Clone ID: MRT4577_177041C.1
agcctgctaaaaaaaaaaaaggagttggattctagccctctatcgtttctgtacgcttagaatatacctttcattcggacggttaagggcggagacgggaatcaaaccctggcacctcaaggttatgatgcctcgagagctaccaaactgttttattccgttctgttgggccgaaaactgggggacgaaagaaaaaggaggagtacacgtctctaccatggctatacaaacaaatggaatactctttttatacaaaagggagcgggtagcgacaatcgaacccttatcgttagctggtaaggatagggggcatagtcaacattggttgataatttttgacgtctctatttcaaagccaaacatgaaatccaggtttcatacggttccttt

SEQ ID NO: 84465 - DNA, 256 bp, Zea mays
  Clone ID: MRT4577_177042C.1
agaaaatgggaggagacggacatcacgaagatcctggacgagttactcctaaacgagtttggacaccctgcggaggacaaggtaactatgtggctcaatggcgtcaaagatcagcagtaggagcaggagtggtttttttcctttcttttttggctgttaatttaatcggcaagcatgctgagaggcgctccccgccgtccatccctgtgccaagtcagagatggtgtacccatactctcgatgactctcccaacta

SEQ ID NO: 84466 - DNA, 268 bp, Zea mays
  Clone ID: MRT4577_177043C.1
ggaaaagcaaatataatttttattttgggggtaattttaatcccttaatactgaccaataaaaaagttggcatgggttttcttaacaaataattggatgactgaaaaataaataaaaccgcactttatgttcaaattaacttgattgacgcccggaaaaattttttcttaaaaatgcaaacttggaataaatttgtaggcttttttttaaattggtaaggataagactttttgcccatgtcaactttggtggtattgcccccaatgtc

SEQ ID NO: 84467 - DNA, 1020 bp, Zea mays
  Clone ID: MRT4577_177044C.1
aggcatcgcaagcccagatcccgctgtcgttaggagctaatggttggtgctcgtgtggcacggcaacgcgacgacggagcaaatcggagagcctcggtccgccctccaatatgagtacaaggttttcataaatccgagcattagtgatgtcctgtgcacaacaacaatagaggctctttcaatggggaaattcatgatctgcgcaagacatccatgaaatgagtttttcatgtcattttccgaactgtttgacatacaagacttcagaggagtttgttgcgagagtgaaagaggcaatggatagagaaccccaacagctaacccctgagcaaagatacaacctttcatgggaggcagcgaccgagagattcatggagtactcagaccttgaaaaggttctgaacagtgaggctgctcagcctgaacaaggtaggaaaagaaagaataaaagaacctcacaacctaatttgtcttcggtcttccgtgctcacctttgagtgatcaagttgctgctgcggtagtccccaaccgtcatcatgcagaacgaggagggtaatacggtggacctctacatccctaggaagtgctcggccacgaacatgatcatcactgccaaggatcatgcctctgtccagatcaacattggccacttggatgcgaatggcctggtgatgctgacagctcgttggacaggccgtggcagaagaagaaggctgagatcaagcagtaggtcttgcacgtagttccaccaggaatggactcttgagggatactgttttagctatgttttatctcatgtatccgtactgtccagatgcaagtgttgtgctttcacttggcaccttaattctgaagactcaatattgttactaggtatatgcccgtgcgttgcaacggagacatataatacataagtccccgttgcaacgcatgggcactcacctagttatatatatatatatatatatatatatatatatatatatatatatatccaaaaacagatcatgcgaaccttcc

SEQ ID NO: 84468 - DNA, 208 bp, Zea mays
  Clone ID: MRT4577_177045C.1
acgagccataaaccagagctagtaggattgccgcgtggctcttgtttaatgagtcaaaccattggcaggtctacttgcgtaaatgaagccttataagtatcgattccaagtgttcttgttgacattctgttacgtggaggactctcgctccaacacatgaaaacccactaattctgttaccggcgattgtatctttcttgctaatggg

SEQ ID NO: 84469 - DNA, 888 bp, Zea mays
  Clone ID: MRT4577_177046C.1
tgggtaccctccgggccggccggggatattaaattatgccaaagccacatatggttggattttgtggagaatctgcttgtgacgtgctgttaaaaaaaaaaaaaaaaaataaaaaaaaaaaaaaaaaaaaaaaaaaaaaatcgagccgccgccgccgccgccgcagttgtcttcggtcttccgtgctcaccttcgagagatcaagttgctgctgcggtagtccccaaccatcatcatgcagaacgaggagggtaagacggtggacctctacgtccccaggaagtgctcggccacgaataggatcatcactgccaaggatcatgcctctgtccagatcaacattggccacttggatgcgaatggcctgtacgatggtcacttcaccacgtttgctctctctgggtttgtccgtgctcagggtgatgctgacagttcgttggacaggctgtggcagaagaagaaggctgagatcaagcagtaggtctttgcacgtagttccaccggtaatggactcttgagggatactgctctagctaatgctttagctgggggggggggagtgattctgatgtttggctgttcgtttgttggatgaccaggttttagtttgtctggccatgcttgggtcgcagcaatctgtggcacgatgaatatcattttgtcaacctattcttctcacatatttggtcgcttagtatttactatttacatcaactgtgcacccagtcatgtccttttcgtgtgggattgggagaacgagtctttgtccccgagcacgacggacgtcctcgcggcgatggatggactatgcagttttataggatcgtgaggatgcattttgactaagtatgcactttgatttaaataagcaacattgatttggtggct

SEQ ID NO: 84470 - DNA, 243 bp, Zea mays
  Clone ID: MRT4577_177047C.1
ttttccctcaaaggggaaacattttgttttaacattttaagaccctttttttttttaagctcttatgggttcgggggaatcccttgaaacccacggggcacttatttagggcaagtgttcccactgaaagggcccacaagggtggtcccgccatttttgggtgatttaacattaacgccccacggttgggattattttttttgttccaatttctatggacatgcttggaacaccacgactacc

SEQ ID NO: 84471 - DNA, 775 bp, Zea mays
  Clone ID: MRT4577_177048C.1
gggaccctcgaggccggccgggccggggtcgagccgccgccgccgcagttgtcttcggtcttccgtgctcaccttcgagagatcaagttgctgctgcggtagtcccccaaccatcatcatgcagaacgaggagggtaagacggtggacctctacgtccccaggaagtgctcggccacgaacaggatcatcactgccaaggatcatgcctctgtccagatcaacattggccacttggatgcgaatggcctgtacgatggtcacttcaccacgtttgctctctctgggtttgtccgtgctcagggtgatgctgacagctcgttggacaggctgtggcagaagaagaaggctgagatcaagcagtagatcttgcacgtagttccaccagtaatgcactctcgagggatactgctctagctatgctttagctagggggggatgattctgatgtttggctgttcgtttgttggatgaccaggttttagtttgtctggccatgcttgggtcgcagcaatctgtggcaccatgaatatcattttgtcaacttattcttctcacatatttggttgcttagtatttactatttacatcaactgtgcacccagtctacacatactttcagtcacgtccttttggtgtgggattgggagaacgagtcttgttcccgagcacgacggacgcggcaatggatggactatgcacttttataggatcgtgaggatgcattttgagtaagcatgcactttgatttgaataaggaacattgatttggtggct

SEQ ID NO: 84472 - DNA, 473 bp, Zea mays
  Clone ID: MRT4577_177049C.1
acgccgccgccgcagttgtcttcggtctcccgtgcttcctcccttcgagagatcaagttgctgttgcggtagtttccccaactgtcaccatgcagaacgaggagggtaagatggtggacctctacgtccccaggaagtgctcggccaccaacaggattatcactgccaaggaccatgcctctgtgcagatcaacattggccacgtggatgccaatggcctctacgacggtcacttcaccacgtttgctctctctgggtttgtccgtgctcagggtgacgcagacagctccttggacaggctgtggcagaagaagaaggctgagatcaagcagtagatcttacatgtagtttaccaagaattggacactttgagggaccctgcataagctatgttttgatttcatatcaccatatgcaatgttgtgatttcagttggtatcttaaatctaaagacttggtatctttgctggatc

SEQ ID NO: 84473 - DNA, 773 bp, Zea mays
  Clone ID: MRT4577_17704C.1
agtgagcatgtgcttgatgaggcagagagatccttgcatgatgccttgtgtgtgctgtcccagacagtaaatgatacccgtgtcttgtttggaggcggatggcctgagatgctgatggctaaagaagtggatgaacttgcaaggaagacccctgggaagagatctcatgctatcgatgctttctcccacgctctgcaagccatcccaacaatcatagctgacaatgctggtttggacagcgctgagttgatctctcagctccgagctgagcaccacaaagagaactgcactgctggaatcgatgtcatcactggcaccgttggggacatgcaaaggctggggattcaagagtcgttcaaggtgaagcaggccatactcctgtctgcgacggaggccgcggagatgatcctcagggtcgatgagatcataagctgtgccccacgcagaagagaggataggatgtgattagacacgctgtttctcggtgtagtggggatgcttgttaccctagttttgatggtggttctggggcgttcaagttggtcacatttcaagtgtttttggctcctaagaacctagtaattgttatttcgttgaaacaaccaaccgtaggcttttttttttctagattctcatgatgtaccatttggtagcgaagttcttcctctgttcttttttatgtgtcgagttttagtttaaaactagacaacaaatattcgataatggaggtagtacattgtttacgaaaaaaaaaaaaaaaggcccctagggcc

SEQ ID NO: 84474 - DNA, 1061 bp, Zea mays
  unsure (1)..(1061): unsure at all n locations
  Clone ID: MRT4577_177050C.1
ttgggaaggtgattgtggatctatgcctggactgtgtgcgcaagcttgcagacaactgcactgggcttcagggattcttggtgttcaatgctgttggtggtggtactggctctggacttggttcactgttgttggagcgcctttcagttgattatggcaataagtccaagcttggtttcaccatttatccttccccacaggttgctcaacttttttatggtttggtgaaggctggtaagcaagcacgaccggagaagtttgagatcccatctaaaatcaagaaaaaagctgaagattacataaatagtttgcaacaagaagcacaagcaaaagctcaagcattacactttgaagatgaattagctagaaaaagaatgccggattggatctctagcctcacaagatcggcgactttgagcgtgagcgaggtcgaggcattgtacaagctattcaagaagatcaacctcgccttcatcgatgatgggctgattaataaggtcagcaatgggtgtctgctgctacaggccaaccacgctaggcgatcgcggaggccaaccacgcttcgggcgcgatcagccgccgccatgcagggcttccccggcggcgcccccgatccgcagcagctacaggccaccatgctcgccatcgagcaggcctgctccctcatccagctcctcatttcagactgggaatctgtacgatggtcacttcaccacgtttgctccctctgggtttgtccgtgctcagggtgatgctgacagctcgttggacaggctgtggcagaagaagaaggctgagatcaagcagtagatcttgcacgtagttccaccagtaatgcaccctcgagggatactgctctagctatgctttagctagggggggatgattctgatgtttggctgttcgtttgttggatgaccaggttttagtttgtctggccatgcttgggtcgcagcaatctgtggcaccaagaatatcattttgtcaacttattcttctcacatatttggttgcttagtatttactattgaaaaaaaaaaaaaaaaaaaaaaaaangggtt

SEQ ID NO: 84475 - DNA, 1386 bp, Zea mays
  Clone ID: MRT4577_177051C.1
atggtggagggcctcctggttggcgcagagtcgaccgttgacctcccacctgagaaggtcgagctactcaaggaggcgttcgatgatctcgtcgcgccgttcgccagcttcgtcgtggagtcccccgcgggcgtgtgccgggccaagcgtacctccggcgtggtggcctcggcctcggtcgccagccccacaggtaatattgcaaactatttgagcctggcagaggttgattccatatatcttccggtccctgtgtacttcatctttattggatttgatggaaatggacggcatgagcttaagttggggcctgaagaactggagcgctggtttacaaaaatagatcacgtatttgagcacacaagaatccctctagttggtgaagttcttaccccgttctataagactactgttaagaaacttcagcattatgatcttcctttagtcggccatgtgaaccacaatttctctgtgcatgccatacacatgggagaagatgtcttatctgtttttgagcatgctataaaagttctatcctgtaaagatgatctcgtggattctagatttccattgcttctaagaacttctctggctagaattagattgttgacagtgagtcgatatgtcattgatgtatgcttacctgatagctgtggtgtactgatcagattcgtggatatgtctgataatgagaaattggtgggggagggaaccaccccccaaggggcggactgggaagttgtcactcttacagcatctgccacccagagcagctcatctcggggaaggaggacgcagctaacaactttgcccgtggccactacacggggattcttggtgttcaatgttgttggtggtggtactggctctggacttggttcactgctgttggagcgccttttagttgattatggcaataagtccaagcttggtttcaccatttatccttccccacaggttgctcaacttttttatggtttggtgaaggctgtgagcgtgagtgaggtcgaggcattgtacaagctgttcaagaagatcaacatcgccttcatcgatgatgggctgattaataaggtcagcaatgggtgtctgctgctacaggccaaccacgctaggcgatcgcggaggccaaccacgcttcgggagcgatcagccaccgccatgcagggcttccccggcggcgcccctgatccgcagcagctacaggccaccatgctcgccatcgagcaggcctgctccctcatccagctcctcatttcagactgggaatctgtacgatgtcacttcaccacgtttgctctctctgggtttgtccgtgctcagggtgatgctgacagcttgttggacaggatgtggcagaagaagaaggctgagatcaagcagtag

SEQ ID NO: 84476 - DNA, 703 bp, Zea mays
  Clone ID: MRT4577_177052C.1
cctgccggaaatcgagccgccgccgccgccgccgcagttgtcttcggtcttccgtgctcaccttcgagagatcaagttgctgctgcggtagtccccaaccatcatcatgcagaacgaggagggtaagacggtggacctctacgtccccaggaagtgctcggccacgaataggatcatcactgccaaggatcatgcctctgtccagatcaacattggccacttggatgcgaatggcctgtacgatggtcacttcaccacgtttgctctctctgggtttgtccgtgctcagggtgatgctgacagttcgttggacaggctgtggcagaagaagaaggctgagatcaagcagtaggtctttgcacgtagttccaccggtaatggactcttgagggatactgctctagctaatgctttagctgggggggggagtgattctgatgtttggctgttcgtttgttggatgaccaggttttagtttgtctggccatgcttgggtcgcagcaatctgtggcacgatgaatatcattttgtcaacctattcttctcacatatttggtcgcttagtatttactattgaaaaaaaaaaaaaaaaaagcggccgcttttttttttttttttttagcataaactcggctcttcatgatttgcattaaaaccagacgacagcaccataaacaaaaaaaaattcagatgtccaaattgc

SEQ ID NO: 84477 - DNA, 193 bp, Zea mays
  Clone ID: MRT4577_177053C.1
gcgcgaggcggagcggagaaggggcggcacttagtgcttcggaacacagaagctgcgagcacttgtaggaggaccagcgcctccacgaacgccccccagtcgttgcgcttgcaccgcctgacacctcagaccaactacgcgcgcaggacggcacttcgagacacagctcagcgaccacgggagacatcgagaa

SEQ ID NO: 84478 - DNA, 444 bp, Zea mays
  Clone ID: MRT4577_177054C.1
ggaggtgtcccctgtttttacatttttttttgctgactttttcgagagagagccacccccgaatttggtgcgtgtatgaaaaaaaaattttttcccctaaaatggggggggtgcccccctaaaacttatataccgggttggggggtttcctttttcttggggacgcttaccaattgataaattgttagggccaaggcggggcaaaaaaaaattttttttcttaaagctgggcctatgcccggggggggcttaaacctctcttctctttgtggggacccctgggggtcccccttggggctaatcaaattacccagggctttggggggggggcccttttttccaacattagcatttctcagggttcccccggggtttggtcccttggaatgttaaaaagtgttcccccctcccgggggggggggggccccctttttttttttaaag

SEQ ID NO: 84479 - DNA, 463 bp, Zea mays
  Clone ID: MRT4577_177055C.1
gccggccgggatttcgactttcgagcgcagaaacgagagggccggagcagccgcagacacgaaaaaaacctggtaaagagggacttgaggtgatagcgaacgcccagcgctttacaagggtgtaagatgggacgcacttctctcagaccagacgagaaacgctatagtgggcggggaccaagctgctccccgccggggaccacctgctgctgttgtacgtcatcaaggagcccgactacgagcacagcgaggccatcctctggtgaaaaaccggctccccgctgattcccctctcgtagttgtctgaccctactatcacgaagaaaaatggaggaaaacccgacaaggagaacttgtacctcctgaacactacagctacccagagagaaataatgtagggttgtgaaagtactgcgtggaagatccgcgtgagcaagccctgtctagctatccatgaaacacc

SEQ ID NO: 84480 - DNA, 913 bp, Zea mays
  Clone ID: MRT4577_177056C.1
aaaacgctcctgtatagagagagctgggaacaggacgggaggcaactggtcggtgctcgccacctttaatttccgcctccgctgctactggagtagttatatagctagcttgctcaaacacctttttggatgctcgctgctccagacaagaccgtccgccatcctacagccatcgcagatcgggatctcgcgtagctgcgattcattcgccagccatcctactcaaacgccacccatctctgagtctttgaccaactgttctgaagatttgagacactgttggagatgggtacaaggatgccaatctttccccgactatcgagcgcactgtccacggcgttgctggagtggatcttgatgctcctgctgttcatcgatgcggtttacagcttcctggtcactagattcgcccgtctctgcagattaccggcgccatgccctttctgctcaaggctcgatcacttcctgggcaacgagaaaccgtgcttctatagggacctgatctgcaaaacccacaagtcggagatttcgtccttggccttctgcagcctccaccagaagctcgcgggagcccgaaatatgtgtgaagggtgctgtggggaagtcgccggtgatgataagacagatgagactgatagcaatcaaagaattggtgatgctttcaattctcctcgtgaaaaagtctgctcgtgctgtggacagcattttaagcgacggagtgtagctttgtcctctagagagactgcagaactagaacctactcgagcgtttggctcaccaaaaacttacacggagtactctgtagtatgtcaagtggatgagcctttggagcctaaagatatataccaccaaagtgactacaggtctaatgagccagacggtctgctacagatgacatctgactctgagactg

SEQ ID NO: 84481 - DNA, 486 bp, Zea mays
  Clone ID: MRT4577_177057C.1
ggggattacccatctgaaattatattctgaacaacgaaaaatttgccgccaaaaaacgaaagaatgccggcacttggcaaaaatcaaggggggatgaacatcaatactacaagggaacttaaaaaatgccggggggtacttttgccctacccccctagaacaagatattagcaaaactttttttgggggggggggggggtccatgaaaaaaaattgaactatacaaagtttgggttgggctgcatccgggcgcccccggggtcgccgaagggtctcaaaaaaaggggaagcccccgtccggctccattttgggggccatcggcgagaccagcatggagccctaaaaaaggggggggtcccccgggatctgcaggtcgtcgagggtgatgcccgcgagccaatcgtcgccgccgagggcgcccaaatcctccaccttcttcttgggcaggacaaccccggcaggggcttctgttgttggggctgggc

SEQ ID NO: 84482 - DNA, 394 bp, Zea mays
  Clone ID: MRT4577_177058C.1
ggccggaccaaaaaaaaccggccccaagaggattgttcaaaatgaacccaaaccaacccttccagggaaaaaaatggctacgctccattccttgaaagaagcgactccaaccataaacagggcagatcactgaattaaaaaaaacgtaagggttgggggcaggggggttaacctttcggggtcaagttatggggtggggcccgggcctcctttcccggtgtgacctgaacccgagcaaaaagaccctccagttagaataaattggttggaaaagcaggccggccagattggtcccctcccccacttctttgagataagtccaaaacctttggatgcgttttctatggaagtctgggcccatatccttgactctaccctccaggcggttgggggg

SEQ ID NO: 84483 - DNA, 142 bp, Zea mays
  Clone ID: MRT4577_177059C.1
gccgttacccttcctacccagcgggatttttggtgccaattacccacggatttcaggtgggatttaccttatttggaggaggttgcccgagttagggttaggggtcggcggttctgagagagtcggtcgagtcgagtcggtt

SEQ ID NO: 84484 - DNA, 820 bp, Zea mays
  Clone ID: MRT4577_17705C.1
ttttaattgacaagcaaagtgtcctggctactacgccatgttagcagagaaaatataaaccagttctgattacatctagctattgaaaagtccatcctatgttcattagcctctcagcagaaatcggctggatgcttcctccccccaattcatctgtcccaccacaaaccacccaatcaatgccaaaagcagaaaacactgtgccatattcctaggtttcactttagttgaccctttcagcttttgcagctcattctccatcagtttcaatgcagcagctgtcgatttcttgttttcctcaatttcaaccatggctgccttcatcaaatttttcacgttatccagctcttccatcactaactccaggttggacagctttttcttcatctctctgatggaattggttagagattcaacggctttgccatgatcattaagtgcgatcattaacaactcaaggcgtcgatcaccactgacaaacccatcctcgattaacaaaacaacatagctcgcttgccagtggaaaaaatcacattaagacccatccgttttcttggctctgcaccggtagaacttcctcgacgtggtttctggttgtttggagacccgctcaatcaccaccccattgcagagcttgcaagggattagaggaagctcagcactcgcagtattggagccagagagtaaggatgacaatgacggcatctcctcaaatagcctgctcgccgcgctggggaccgaggagggggcgtcaatcaccggtggcgggccgccggccgccggcgcccgtggtgcgctccaatctagggtatggcgtccg

SEQ ID NO: 84485 - DNA, 551 bp, Zea mays
  unsure (1)..(551): unsure at all n locations
  Clone ID: MRT4577_177060C.1
acgctgctgccgttcctcatactaccttgcgctgatttagtcgctgtcgctgtcttgggtggttcgctctgtcgcgaggacctctagctatcctgctctgactcctaggacgccgaggcacccagggtttccgacaactcctccgactacggatacgactcccccggacttcgtctcctccaagttaggcaagggcgcaagagagggtacccccgcctctatcaacggagttgagcgccacctccgacagatccacatgaagcacaaggcagatgatcacctggtactctagctgagatctaaaccgaagcgtgaactccggctggtgcagcgtgggcgaggtctacctgcacagtgctgcgaatacgcaccctacgacgatcggaaaggccctgagcgcgtcgaaggagcctaccatcagcgggctcgccgaggtcgccagcaacatcgaggccgagctggacgtggtcatcggcaaggctcaccagcgacgacgacgagccggncgaggagcgccacatacgtgagattctccgcctcacatgcggatc

SEQ ID NO: 84486 - DNA, 1764 bp, Zea mays
  Clone ID: MRT4577_177061C.1
ttttgtggtttttcattggggtcctcgaggccggccgggcacaattcggcacgaatttttttaataaatcttccgaggcgtccagcgtcctcccggcgacgacgcttcccgagctctctccttcccgcgaccctctcctctgccccgctccactagggttttgccgcagacctctcgctcgcttccggttccgcgaggcaaccgtccgaccggtcggaatggtggatgtggaggagaccgggaacaagttgcaatcgcagatgcgcctccacgcggagccggaggacgacgccgccgacctccccctcccggccctcttcgatagggcgtcgcggctccacgccctggcctccagctccgctctcgaccaggatgggatccgcacgggggttgacctgctgcggcgctgcgacgacatggtcagcaagctcggcctcttctcccccaacgagaccaaggaggacgtctccacagcaaacctcaagtacctactggtcccatattaccttgcagaaatgaccgaaaagatagcacaggaggatcggatcccggttcttaagacgtcacaggaccatctgaaggagttcattgctctatgtgaagtactagagcttatcccagaggatgagctagaattgtctaggcagaagcagccagatactatgacaaacagaagagcgcagaaggttgcccggttcaaacgtcaaaaggctgcagaaacgaagctccaagagatcagagagagaaaagaaaggcgtggacgctcattgagagcagctgctttgtctgccccaattgaagctggagaggaagatgacctggagaatgatggggaggaagaaagggaggcttggttagctaccatctcattggctatctgcaaggcttttgatcttctcgacatgttaaagaaggaagaagaaatgcttctagctgtaaaggaaaggaaggcaaaggacgggaatgcatttgctcgtgaaatgctcgacgaacggacaaagaaggctgaagcatggcaccacaaagctgccagtcgtgtggcatattccaaaccagccgatccgatcacctgtgcaacatttgctcaagatgtcattgaaggtagagcaagcgtttcacaagcccacgagcacaaacaccagcccctgatatttggacctgcaagtattgttggtggtggtctaaccagtgaaagggaaagaatggcagcgcaagtttttcagcctagctacaggatgccaacaatgagcattgaagaagctggtttgcgcgagatgaaaatgatggagaaatggcaagaaaggaccgctgagctgatgaaagaatcaacctccgcgtggcacaaggatggcagcagctcggcccaagaggatgaggacgccgaggaggaaaaagcaagagcgtgggacgactggaaggatgacaaccctcgtggcgcaggcaacaagaagctcacgccctgtggttaatttgtgaaacacgctgtgtattgatactccacatggaacatgatgctcatgtagacggtaggatgtttaattttatcattgttgctgtgttttttctgtagtgatgttgagtgtatcgtagcctgtttgtgcaagtgcgatatgtcctccctaatacgacacgtttttctggagccaaagaaatcgtatgcctgtctgcaattgtcatgctgcttggtgccgtttggcttattaataagggaaaaaattggttgtaaaaaatgtgtaaaaaaaggcccctaaccccccccccccc

SEQ ID NO: 84487 - DNA, 2486 bp, Zea mays
  Clone ID: MRT4577_177062C.1
aggccggccgggccgggcccttctcccgctttctaagtccagtctccccggtagaagaggcacgagaggaaggtggggaaggaaaccacagccgcttctggcgggcgctcaccctgccccttccacctcgcctcgcctcgcaatggaggtttccagtgggaccctcgaggccggcctcctgctcctgttgctcctcccgctcgcggccaccccgtcacgcgccgccacgatggcgagatcgccgtcgtcgtccactgccgtgttccagctccagggagacgtataccccaccggccactactatgtcacgatgaacattgggaacccagcgaagccctacttcctggacgtggacactggcagcgatctcacctggctgcagtgcgacgcaccctgtcggagttgcaacaaggtgccacatcccttgtatcgaccaacggcaaaccgccttgtaccgtgtgcaaacgcactctgcactgcacttcacagcggacagggctctaataacaagtgcccttcaccaaaacaatgcgactatcagataaagtacaccgacagtgcatcttctcagggtgtgctgatcaacgacagcttctcactgcccatgagatcctccaacattcgtcctggcctcacatttggctgtggatatgaccagcaagtggggaaaaatggcgctgtgcaggcagcgattgacggcatgcttgggctcgggaggggatcagttagccttgtttcacagctcaagcagcaagggatcaccaaaaatgtcgtcggccattgcctaagcacgaatggaggggggttcctcttctttggggatgatgttgtgccttcatcacgtgtaacttgggtgccgatggctcagaggacatctgggaactactactcacctggctcaggaacactgtacttcgatagacgttcactaggcgtgaagccaatggaggtggtatttgacagtggtagcacctatacttattttactgctcaaccataccaagctgttgtttctgcgctcaaaggtggtctcagcaaatcacttaaacaggtgtcagatcccactctgcctctgtgctggaaagggcagaaagcattcaaatctgtgtttgacgtcaagaatgaattcaagtcaatgtttctgagctttgccagtgccaagaatgccgccatggagatcccacctgaaaactacctcattgtcacaaaaaatggaaatgtgtgcctgggcattcttgatggaacggctgccaagctgagtttcaacgtaattggagacatcacgatgcaggatcagatggtgatctatgacaacgagaaatcgcagctgggatgggcgcgtggggcatgcactaggagcgccaagtctattctgtcttcctttccctgagctcagttctatgtacttctgatagagtttaagaaaatcactatatcaaacctcctcgcaatgcatgaatttcctaactgaagagggagggagagagagagagagaatgttcctgtttatgtagagatggagtccaaaatttgtgtgcctgatgagttcttccccatatgatattaactgaaatagtatatcaattgaatgtattacattttaagttttaaataaaaaaaaaaaaaaagaaaaaaaaaaaaaaaaaaaaaaggcccccccgcgaagaaacatcccgagcttctccttcgttcctccttttccccgcggttttcctctgccccgcaccggcaccgctagggttttgccgccgacctctcgctcgcttccgggctccgcgaggcaaccgtccggaccggccggtcgaaatggtggatgtggaggaggtcgggaacaagatgcaatcgcagatgcgcctgcacgcggagccggatgacgccgccgccgacctccccctcccggcgctcttcgacagggcgtcgcggcttcacgccctggcctccagctccgccctcgaccaggatgggatccgcaccggggttgagctgctgcggcgctgcgacgagatggtcggcaggctcggtcttttctcccccaacgagaccaaggacgacgtctccaccgcaaacctcaagtacctactcgtcccatattaccttgcggaaatgaccgagaagatggcgcaggaggatcggatcccggttcttaaggcgtcgcaggaccatttgaaggagttcattgctctatgcgaagtactagagcttattccagaggatgagctagaattgtctaggcagaagcagtctgatactatggcaaacagaagagcacagaaggttgcccggttcaaacgtcaaaaggctgcagaaacaaagctccaagagatcagagagagaaaagaaaggcgtggacgctcattgagagcaactgctttgtctgccccagttgaagctggagaggaagatgacctggaggatgacggggaggaagaaagggaggcttggttagctaccatctcattggctatctgcaaagcttttgatcttct

SEQ ID NO: 84488 - DNA, 387 bp, Zea mays
  unsure (1)..(387): unsure at all n locations
  Clone ID: MRT4577_177063C.1
ccgggctcgacccacgcgntccgaaaaaaaaaaaaaaaaaaaaaaaaaagaaaaaaaagaagaaaaaaaaaaaaaaaaaaaaaaaaaaaaagggagaaaaaaaacaaaaaaaaaccaaaaaaaaaaaaaaaagaaaaacaaaaaaaaaaacaaaaggagacaacaaaaaaaaaacaagggccacggccggaaaaaacacaacctatggggaagtaggggacccaaanaaaatagcttaaaaaaaaaaacccaaaataaccactgggcccgagacgaaaaacctaccaaacgagaaaaaaccggccatgccaaaaagcacccacccggaagaggcacagcaacaacccacaggagggacaaaaaaaaaaggacgagggggagactacc

SEQ ID NO: 84489 - DNA, 394 bp, Zea mays
  Clone ID: MRT4577_177064C.1
gaaccagtcgcttgcgtgcacgacgtctcctaccccgagggctacgacccatccgcctctacgtcccgcgccattgccggcggagctgatgcctctgagccagcaaagaagtttcctttccagctcgaccccttccaggccgaggccatacgctgcctcgacaatggtgaatccgtcatggtttcagctcatacgtcagcgggaaagacagtagtcgcgttgtatgcaatagcgatgtctttgcgcaaccaacagcgggtcatttatacatctccaatcaaggcactgagcaaccaaaagtacagggagttcaaagaagagttctctgatgttggtctcatgactggggatgtcacaattgagccgaatgcctcctggctggtcatgaccacag

SEQ ID NO: 84490 - DNA, 520 bp, Zea mays
  Clone ID: MRT4577_177065C.1
aaaacaacacatctatactatttttaatattatttcaaattaccgatagacatgaactttacaatatgaggccccaaaaacctttactgaggaatttatgggggttttgggagggacccctaactgaggaattcatcaactggttggcacccgcagttgcaatttataaaaaaacaaaatactgtaaaacccacggccggattaaagccgcagcgaacaacccgggatttaaaaaaatcctcggtctcatggggactttacttcaaccaccggggggactattatccatttatcctaaaaaacaacagattttttcccggcccccagcaaaaaaccgcagttgcctttattgggggcccatttgatgctgcttgatcaaaagttgaacataaaccagttcattccaaaaatttggtactccagggaggccccaggggctgcagtcctgaaatttttggggcgatctcctttcctcgaaaatcaggttttgcttgcggaaaatggaagggtgggcatcctt

SEQ ID NO: 84491 - DNA, 1911 bp, Zea mays
  Clone ID: MRT4577_177066C.1
agcaatataatggctggttcttcaatggacactgaagctgcaggcaaggagctcaagcagggcagcggcggcggcggcggctacaccatgccggctactgctcatgcggtggacacagactcgtggcagcaggtggggctgctcctggtgatcggcttcaactgcgcctacgtgctcagcttctccaacctcatgatggtgcccctgggctgggcgtggggcgtcgcctgcctgctgctcgtcggcgccgccgcgtggtacgccaactggctcctcgccggcctccacttcgtcgacggccagaggttcatccgctacagggacctcatgggcttcgtattcgggaggaacatgtactacatcacctggttcctgcagttcgcaactctacttctgtgcaacatgggcttcattttgctaggagcaagagcgctcaaggttaaaaaaactgtatctgaccagtggtgactcctcctagtagtatatatatagcagtaaatcagtaatacgtactcgtggttattattattattaaccaggcaatcaacacggagtttacccacaccccagccaggctgcagtggttcatcacggccacgggaatcgtctacttcgccttcgcctacttcgtgccgacgatttctgccatgaggaactggctcgccacgtcggcggcgctgacgttagcttacgacgtcgctctgctggctatcttgatcagagatgggaaatcgaacaagcagaaggactatgacgtccatgccggatcccaagccgagaaggtgttcaacgcgttgggcgccgtcgctgccatcctcgtctgcaacacgtccgggctgctcccggagatacagtcgacggtgcgggagcccgcggtgcgcggcatgaggcgggcgctgctgctgcagtacaccgccggcgccgcggggtactacggcatcagcgtggcggggtactgggcgtacgggtcagcggtgtcggagtacctccccaacgagctcggcggcccgaggtgggccgccgtcctcatcaacgccaccgccttcctgcagagcattgtgtcccaacacctgttcacggtgccgatccacgaggcgatggacacgcggctgcagcggctggacgagggcatgttctcccgctacaacctcacgcgccgcgtctgcgcgcgggggctcgtcttcggcttcaacgtcttcgtcaccgcgctgttcccgttcatgggggacttcgtcaacctcgtcggctccttagcgctcgtcccgctcaccttcacgttccccagcatggccgtcctcaagatcaaaggcaagagcggtgggagatgtaacagactttggcattggggcatcatagttctgtcctcggctctctgcgttgctaccaccgccgccgccgttcgtttgatcttcaacaatgctaggatctaccacttcttcgccgacatgtagcgagctagtagtagtgggattgacatgtgtatcgtcaccatgaggtgatagtatggcccacttcgttctcaattttttgtttggtccaagagtggaagggtacggtggtcacttattagctcatgtttgatttttttgattatggaaacaaagagttcgggcttttgcatcatgtacgtagtcatcctatcaaaatttagaaaaatgagcttattgtgatcgatggaccacctccctctaaccaaacatctctgttttccgtgaaagcttaaaaggcaactcgtgaatgtgttcttttagacacctcatgcctattatttcttggaagtatagaataatgttgagagttgtaaacatacatgcatgtcgcatctagcccttttgtctatcacacgtgtgctacctgtagactaattgcattatagtgtgactcttgggactcagactcatgattatatat

SEQ ID NO: 84492 - DNA, 372 bp, Zea mays
  Clone ID: MRT4577_177067C.1
cattacggttcatttgttttttcatttccaacctgcaacacttcaaataaggggacgatagggcctatttaaccgtgcaacagcggtccacaggggtcaagatttcaccaaatgcactgacaccaactactaaaggtctagctgaggagttccacacgctatctggcccttgacccacatattctccggtaagcgggctggatcatgagaacgaactcatcgggcatcacctgcccggcaccggcggtgtgcgctcgcctgatcatatggttaacgtcctgggaggatatcttatcccggagactggtgattaccgtgctaaactgaacacggggagacgaagccgcactggattttggccaggaccttaaa

SEQ ID NO: 84493 - DNA, 179 bp, Zea mays
  Clone ID: MRT4577_177069C.1
ccgggtctttatgtgactcgaaatatgaccattgcataccaggttcggttaggaaatcatgttgcagtgtttcttcttacaacctggtaatgtggatgctaccttttaaatctgaattcacagtaataaacttaatcatgtgcttctgaaccctagaaaaagataatggtaccagctcc

SEQ ID NO: 84494 - DNA, 1497 bp, Zea mays
  Clone ID: MRT4577_17706C.1
cattgggtacctcgaggccggccggggatatcaaatctatcactgtcctgtggggccgtcgccggtcgacccccatatagttctcgaccaggccgcggccggcggggagacagcctcccattcatcagattcagatcagatcgtagcagccaaggattccgcgctccgggggtgccatgaagctgaagctcctctctccctgccttctcctcctcgccttctttgccaccgcggcgtacgcggcgtcggcgtcggcgtcgcgcgcggcggccgtcgtcaggggcgcgggcgccccgtcgcagtcggagttggagtcggacccggagaaccagtgcgtgtacacggtgtacgtgcggacggggtccatctggaagggcggcacggactcgaccatcggcgtgacgctgctgggccccgacggcacgggcatccggatccgggacctggcggggtggggcggcctcatgggcgccggccacgactactacgagcgcggcaacctggacatcttcagcggccggggcccctgcatgagccaggcgccctgcgccatgaacctcacctccgacggcaccggcgcgcaccacggctggtactgcaactacctcgaggccacggtcacggggccccacctcgggtgcgcgcagcagctcttcaccgtcgagcagtggctcgccaccgacgcgtcgccctaccgcctgtacgcggtcgtcgacaagtgcaagacgaagcggcaggagccgcgacgctcgccggccggcgaggccgaggccaccgtgaccgcgctctaggtacgaccagtagtaaatcatcgacagaggctagctcctgcctctgctgtgtgtaattactgtatgtgagtgaccgatcccatcggattgcgttcgtcttgtggagacgctgcgtgatcgcgcgattggtttcgctttcgccgccttgtttttgcacgaggaggttctgctagtgcgtacggggagaataaaagcagcattcctgctgtccaaggcctgtcctatattatttctagctgagtttgactcagctggtggggtgtcgacgtgtggtaggttggttatgtgtctgcatcagctcacttgccaccggatggcggtcatttgccacttggcattggtttctccgtgcctagctatcgttaatatgtgattgcgagtgattgcgaaggccgtgtttggttcagttattttttctgaccaacttttctgaaaatttgactgtggaaagatctggctgtgaggagaatctgagaggccaaggcccccgtgcccgcgctttaggtcccagtagtaaattttaatcgccagaggctagcccccgcctctgctgtgtgtaattcctgtatgtgagtgcccggattccgttcgtcttgtggaaaccctgcgtgatcgcccgattggtttccctttcccccccttgtttttgcccaaggaggttttgttagtgcgtccggggaaaataaaagcggcattcctgctgtcc

SEQ ID NO: 84495 - DNA, 469 bp, Zea mays
  unsure (1)..(469): unsure at all n locations
  Clone ID: MRT4577_177070C.1
cgaacgcccgccgccgcgaaatccgccgccgcgaaacctcgccgcctaccatacgcccacccgcggccaaccgagcaccgaaaacctcgccgccgcgaaacctcgccgcccacctgcgcccaaccgagcaccggaaaccccgccggccgctaacaacctcctccggcatgcggcagatgcggcgggaggttgggccctctacttcaaggcgtgcgacctgccgagaacagtctgcctcctccgccgccatcgcccaaggaggagctgacgaaggaggagcaaataccgctgcagacggagaagaaggaggagattatgccgtcgccgccagtgaaagtctaagcgcctacaccgaaggtttactaatcaccatccaaggaggagccacccaaggagaatcgggtccacggngagcctgttcagggtaatgcatgggtactatcactggaaaggcgnccaaggaagctta

SEQ ID NO: 84496 - DNA, 229 bp, Zea mays
  unsure (1)..(229): unsure at all n locations
  Clone ID: MRT4577_177071C.1
agaaagcccccaaancaacnccacccggcgcgcacaccccacgcgcanccggaggcgggcgcancagaacgagagagggganccggacaccgagcccgccagagagggcgaggagggcacggacgagaccgagcaggaggacaaccgcgagaacaaccgacagagcaaccaggagccgagggaggacccggaggacaacaacgccgacggagacgccaaccagaacgag

SEQ ID NO: 84497 - DNA, 666 bp, Zea mays
  Clone ID: MRT4577_177072C.1
cctcgaggccggccgggggaacatcacatctgaaacagaaacagctagaagacatattcaacagattcagagaaagcacatatagatagagagagagagaggcaaaaaaagagcgagagagagctgccgattaattaccaacccggccagcttccatggagagagttgcatcaagctactgcgtcagcctcctagcacaaagcaggagggcctacactgtggccgcggccatggctaagaagggagccgccgcacggagggtcgacgagaagaaggcggcggccgcgctgaccaagcgcgtgatgggcaagaaggaagtgaacacggctgccgctgcggcagctgaggagaaggcgtgggtgccggaccctgtcaccggctactatcgcccagcaggtagcgccaaggaggttgacgcggcggagctacgcgccaagctgctgacggaggctgcggccaactgattaatcaagcagtcactttgtcgagctacagcatgagttggctcacttggctgtccacctagcttctcctgctttaatattcgcgctcgttgatccccgagctcgttggcctagagccttttatacactgaatgatacatatataatatataacgggaacatatcggtgcacaaaaaaaaaaaaaaaaaggcccctagggcc

SEQ ID NO: 84498 - DNA, 362 bp, Zea mays
  Clone ID: MRT4577_177073C.1
ggtttgtgtggcccccaaaggcttggcctgttacgtccatagggtcttccatccaatggttaaggagcagggttccttcgccggttttaaggccgaaagcttcgggaagaatctccaaagggagggcagttttctgagggttggggggtaaagagcgatgggttgaacattcgttcgttttccacacgtgtccaactcctaccggaggggccctgccattggcctagaccggatattttaatggctccaatattaattttaatttcctttggctccgtccttttaaaaagctttttgttttttttggggttctccaaagagttctttgtacctatgttttacaaatcttttatttgtttaaa

SEQ ID NO: 84499 - DNA, 1188 bp, Zea mays
  unsure (1)..(1188): unsure at all n locations
  Clone ID: MRT4577_177074C.1
aattcggcacgagggtcgcgccctctataaaccaccactcttctcccccacagcactctctccctcccatcccctccctcgtcgtctcgccactcgcaacaccccaaaaacctcacgggctctcgacccctcgcgctcgcctcgtcgccacgccggcgtgaggggcgcccacccccgtgcctatataacgctgccggagcggagggtataagctggtatcatggcgtccagcgcagtagcaccaagatggttaaggggtaaggtgaaggctgtgacatctggggattgtcttgtaattatggggtgcacaaaggctgagatcgaacctgagaagtccatcaccttatcctaccttatggccccaaggctggctcgtcgtggtggagttgatgagccgtttgcatgggaaagcagagagtttctgaggaagctctgcatagggaaggaggtcacattcaaagtggattatacagctcctaatattggacgagaatttggaactgtttttctatgtgataagaatgttgcatactcagtagtttctgctggatgggcaaaggtaaaggagcaaggctcaaaggggggcgaacaaaacccgcaccttgctgagttgttgaggttagaggaagttgccaagcaacagggtgttggtcgttggagcaaggaacctggtgctgctgaagagtcaataagatatcttccaccatctgcaattggtgaagcaagtggttttgatgcaaagggttttgcggttgaaaataaaggcaagagtttggaggccattgttgaacaagttcgtgatggcagtactgttcgtgtgtatttactccctaatttccagtttgtgcagatatatgttgctggagtacaggccccatcaatggggagacgcccatcggtacctactgtaattgctgaaactgatgatactgctaatgtcgcgaacggtgaagattctgagggaacacctgcgcaactgactacagcacaaagacttgttgcatctgcagcttctgctgaaattccaccagataggtatggaagagaagccaagcacttcacagaggctagagttctcagcagagatttgcgtatcggtggtggaaggcacagacagctttagnaatataattgggttctgtgtattaccctgatggagagactgcaaaggacttggcccttgagctt

SEQ ID NO: 84500 - DNA, 638 bp, Zea mays
  Clone ID: MRT4577_177075C.1
aattcggcacgaggctccctcgtcgtctcgccactcgcaacaccccaaaaacctcacgggctctcgacccctcgcgctcgcctcgtcgccacgccggcgtgaggggcgcccacccccgtgcctatataacgctgccggagcggaggtactcgtccctcttatcccgtcgcccagatctaattctgtttaacgccttcgtctccgcggcgtcagggcgatcccgccgaggtcagggtataagctggtatcatggcgtccagcgcagtagcaccaagatggttaaggggtaaggtgaaggctgtgacatctggggattgtcttgtaattatggggtgcacaaaggctgagatcgaacctgagaagtccatcaccttatcctaccttatggccccaaggctggctcgtcgtggtggagttgatgagccgtttgcatgggaaagcagagagtttctgaggaagctctgcatagggaaggaggtcacattcaaagtggattatacagctcctaatattggacgagaatttggaactgtttttctatgtgataagaatgttgcatactcagtagtttctgctggatgggcaaaggtaaaggagcaaggctccaagggtggcgaacaaaacccgaccttggtgag

SEQ ID NO: 84501 - DNA, 342 bp, Zea mays
  Clone ID: MRT4577_177076C.1
catgaacccataaaactataatttttccttctcaccacaactacactaatctggtccttgctacatcccagggcccatggggcccaaagcagccattcagccatctcaaaacaagccttctaccaagcacaacgcagtgaacacgaccaccatgaacacttcccatgccaaaaagaccctacccacgttccattcctacatcaccgatgcccaccataaaaaacagaacacacacgccacacataacttctatacctacaacatctacatactcaatgcacttacacagacgctccatcacctgcagctattctccaatgacatatacctcataaactcctt

SEQ ID NO: 84502 - DNA, 167 bp, Zea mays
  Clone ID: MRT4577_177077C.1
tgtcagatcctcactaaccttaatactcatatctaagatcaccaattacctcttctaataaaagaatattatccctatataacattagtctaccaaatactttatttttttattacctttaaacactataaactcttatattttaattcaataaattttaaaattat

SEQ ID NO: 84503 - DNA, 268 bp, Zea mays
  Clone ID: MRT4577_177078C.1
gggcaaaaaaaaaggtttgggggttaacctcagacaaatttaagttttaacaggtctggcatttgggacaagggagattcacattttggtcccagatacatacaaggccttaaattttttgggctccgggaccaaaaaatggacctaaattttggccgggcgggcccggggaacacacggggccaagagattttttacccgccaaccaaaagcccttggttgttttagggggggaaaattttggccggccccgggcttttttttttgg

SEQ ID NO: 84504 - DNA, 179 bp, Zea mays
  Clone ID: MRT4577_177079C.1
agcacacgtaataatagctagtctcatcatccgttgttttatcttgcttatcttcatgcgtgccattagttttctgttcaattccaacgacgctcgctttcgttccggagggataaattacgtcacaattgtcacaacttaggtctcctacttcttctttttgtacacagtatcttaaa

SEQ ID NO: 84505 - DNA, 2012 bp, Zea mays
  Clone ID: MRT4577_17707C.1
caagggattagatgaagctcaacactcacagtattggagccagagagtaaggatgatgatgacgatgacgacatctcctcaaaatagccatccagaccccggtcggctagccccaacgccgccgcccgccgctcggggatcgcctgctttcctctgccgaccacatctacaccgcaccaccggtccttccaagtgagcttcaatcccctgcgtgtatatggagagggttctcaaggatgacgccgtcgaggagaagggcgagcgcgccaggatggcatcgtttgttggggccatggcaatctcggatttggcgaagaccacattgggtccaaaaggaatggtatgtttttgaaacatattgttcatgccttacagaggaaccgtccactttacatgaatgatagctttttttttacttctcattgtttttattgaaaatttgcaagttgcattttttttgtgtatgtagacaagatcctgcaatcaactggtagagggcgtaatactaatgatggggctaccattttggtattcacattgatcctgctgagttcctcgtatccggtgggagaattcggcacgagagccccaacgccgccgccgccgccgccgcccgccgctcggggattgcctgctttcctctgccgaccacatctacaccgcacaactggtccttccaagtgagcttcaatcccctgcgtgtagatggagagggttctcaaggatgacgccgtcgaggagaagggcgaccgcgccagaatggcatcgtttgttggggccatggcaatctcggatttggcgaagaccacattgggtccaaaaggaatggacaagatcctgcaatcaactggtagagggcgtaatgttactgttacaaatgatggggctaccattttgaagtcacctcacattgacaatcctgctgcaaaggtccttgttgacatctcaaaagttcaagatgatgaagttggtgatgggacaacttctgttgttgttctagctggagaacttttgaaggaggctgagaagttaattaacatgaaaattcatccgatgactattattgcaggttacagaatggctctcgagtgtgccagaaatgctttgctacaaaataccatggacaacaaagaaaatacagataagttcagagctgatctcatgaatattgctatgactactcttagttcaaaaatactttcccaagacaaggagtactttgctgaacttgcttgatgctgtcttgaggcttaagggtagcaccaacttggaagccattcaaattctgaagaaacctggaggatctcttaaggactcctttttggatgaagggttcattcttgacaagaaaattggcattgggcaacctaagagaattgagaatgccaaaattttggttgcaaacagtgctatggacacagatttaagactatggggcatgtgtctgggtggattcaatgtttagggttgcagatattgaagctgctgaaaagcagaaaatgagaaagaaggtgcagaagattatagcgcatgggatcaactattttgtcaacaggcagttaatctataacttccctgaagaactctttgttgatgttggcatcctcgcaattgagcatgctgattttgagggcattgaacggctagctcttgtcactggtggtgagatcgcatcaacttttgataatccggagtctcaggcggcacggctgacgatattgcatcgcggggctgtgaggagctcagcgaaggaggccgtcgagatccgcggtgaccggaaaccctagctcgcgggcccgccagcagctgatgcgagggggccagagctcccatggcacagccgacgaggttgcgtcagtggagcggtgaggtcgcaccgcggcgaggtcccgtcgcggcagtggatgcggagaagaaagaggtcagaagaagatgggcagccccgcagtggagcggtgttgttttttccggtcgagaagatggggttccggccggcctcgaggtacccaatg

SEQ ID NO: 84506 - DNA, 266 bp, Zea mays
  Clone ID: MRT4577_177080C.1
ccgatcttttcgtgatgtctaatcccatgagagaagtcacactggagagaaaccctttgtgtgtacagaatgtgggaaagccttcagttattatagctctttccatagacacagaagaactcaccagacagtaaccttgaacacagagcttgagaagacttcataacacccataagattgcatatggagtaaaactgtaaaagttaagcgagtgaaacacctggttctactcatgggtacaggacctttaggccagacatggtgtg

SEQ ID NO: 84507 - DNA, 391 bp, Zea mays
  Clone ID: MRT4577_177081C.1
tgttaagagatagataaaggcaccgctatcacggcgaacgcgacaacaatccaaagggtcggactcaacgctactggggacttctatcctcgcatgaacgaatgttggaggcaccctattgcatggaaccaactgctactcgccacactatggctaagcatcgccatcgtcgccttacctatctatctactcgatgacgccggctacaaccacctgtaccgtccctacgacgacaaccaccactagatcgcctgcaggatcagatactcggccaagaacctcgacccaactctacatagcactgctgctgctaataatcatacagtttaagatctcatatgagttagccatgaccatatatgtaatctgataccatatactactatgccca

SEQ ID NO: 84508 - DNA, 750 bp, Zea mays
  Clone ID: MRT4577_177082C.1
cggccgctcgagccggcgggccgggtcgtgttgcatgtccttgcgttgttgcacaattatctcactcttgccctcctccacagactgcgcctaataggctcccctctcttcttgccctttcttgccccagccgctggagctcgacatgccctgctgcgaggcgacaacatcatggttgcggggcgatggcagcttccggcgacgcgctgctctcccttctctatccagaaagcccacaaacggcttgccgtcgccccgccacgcctagagtgcgcgaccagagccagcagcatcgccaccaggaatgagcgccacggaggccaagctttcgacccggcaaatccactgctgctccgccgcatcgtcggctaggccgccgcgccaccatcggagcgtcatggccgcgggcaccttcatccgttgccacacgccacctgggcttgcccacgttctgatccagccggcaaacggacggatccgtttcccccttgtccgtcccaggcctttctacctcgctggagtcgtcaaggcgccgacactctccaccaagtcaactgcatcgcgcccctgctccgtctcgggaggagcagcgagccagcgcccgcctctgcatcgagcactgctcaatccgaccgcatcgcccaaggcccactccgccgttgctgccttgctccgccctcgcagtcctcccgccggtgagcagcacctgtagcacgtcgccccgtctctcttatttcttctcctttctct

SEQ ID NO: 84509 - DNA, 338 bp, Zea mays
  unsure (1)..(338): unsure at all n locations
  Clone ID: MRT4577_177083C.1
cgtcctgcccggcgcctctgctgggggcgggctcccngggtggacccgtctcctcttttcctcttcctctcccgttgccnggcctggggttggccttgttgtgcccgttgtgcgctggccgcctccttgtgtcctccagatctgtgcctccngggcccccgttcctcggcgtcttgccgtccagttggcctccgccgggcccctgcncctgtttttttgcgccggcgccgccgcggcgccgctgctgctcgccggcgcggccgtgggtcctgtctgtggtgtgcctgtcttccccctgcggggtcggctgcgtgttgcgctcgcccctgtcgttgctg

SEQ ID NO: 84510 - DNA, 250 bp, Zea mays
  Clone ID: MRT4577_177084C.1
ataagacttgcaaaagtatacttcgtactcagggttttcaaacccatgttgttgtaggtgaggaaacaacggagttttgttgtttttgttcgaaggtggtaccaaaggaggagccaaatcagtgatcgtgtgtgcgggaggatgtttgcctcccaatttgaaaacactaaacttttgttcgggagggtgttttgcctccctggtatgtaataatattttatgcactcataacatctggtactgtaataat

SEQ ID NO: 84511 - DNA, 556 bp, Zea mays
  Clone ID: MRT4577_177085C.1
tttttcctcttagcaggatgtgaggaaaggggcaggaagcatgcatacccgatcgacggcctcttcgttttggtgtattaattatttgttgtggtagctaattcgttctgccgatgctgatgtttgtgcttgaccagggtgggctgaacaagttccatggccagcatgcgctcagggagcgagcgaggaagctcgaccagggcatcctgattataaggtttctttcttctgaaacattgctttgttttcttgtttgatcatacacaaggatgttatgttagttatgtagaccagtggacgatccaggattcaatacctgactacctgtggaaccaagcacattagttttaaatgaattaacacaaatattacatgattagcatatatataattgtgtattctgtgaaccccctaagctttacatggatccactgcgacctctctgtgtatgtccatgtgtttgtttgtatgttcttggggtggggcattggacggaggggttccattaataacaaatagagagtctaagattggtatgtatggatgaaacatatat

SEQ ID NO: 84512 - DNA, 374 bp, Zea mays
  Clone ID: MRT4577_177086C.1
gcgtacgtaggctcggaattcggctcgagaggaggtagtgacgactatgtttatggtggagaggatgaagaggaggatgatgacgactatgatgatggggatggtgacaatgaggaagatgaggaggaagaagaggaacaggatgatgacgatgatgtcccacaaccacctactaagaagaggaaatgatacatggctgtgatttggttggctggttgcttacatgcaggaatgctccctgtttggccatgcctagcaatctcctggttagaggagagggggtcctagctaaatcgtggacaattgatagcctagcttggcaacaaaaagaaacatttagttgagcatggcctatgaaaccattcatgtaaata

SEQ ID NO: 84513 - DNA, 138 bp, Zea mays
  Clone ID: MRT4577_177087C.1
ccctgaaggctgggcaggtggtgacgatctcggctacaggagctggggccacccacagccgtttgcgatccacctggggctgcgggaacagcctgcgtagtggctctcatcaactccactggtgactaagtggccatg

SEQ ID NO: 84514 - DNA, 366 bp, Zea mays
  Clone ID: MRT4577_177088C.1
aattgggaacacgatcttcgaaggaaggggtgaactacaacagaattccagctcaatcatattagtatgtataggaataaaaaaatagcaagggcgctgctgatttgctcctccttaaaacacttggctaaaaatatctctgcaaggaaaatgaaaattgcaaaccgccaagctcgaacatacataaatattacatgtttgactccatagcactagggggataatctggagtccaccacagaaattgacaactagtcttatttatggagcaccttaacggggggaaccaaggggtctctatcaggggggggaagaaccccttaattcccagatccgccacggcaccggggcccggggcaacaaccc

SEQ ID NO: 84515 - DNA, 479 bp, Zea mays
  Clone ID: MRT4577_177089C.1
ttttgctagactgttcccatccttcagagattaggactttgcatgatggaccctcgcgccctgcattggtgaaccgccatcatgccatttatgccactccactgaaatgcggtgtgccctagcacaccgtcgggtagctatagggcctggtcttctaccttacagcacccgaggagtgaaaagcagctcacgccggttgtagagaactctctgatgcatacagtcccgtacatgacacccaaccagctgacttctgttgtcccgaaccaacattagcccgtgattgtactccactatatgcttacacctacgctatagatccatccgctatctatcgcttgaaaaatgctgcttcagattctagcacttctccttctgccgagctggtaactagaggcaactggacatgatccctatatgtggtatggatgtgacctcgccgactgtatcctgtgaccataggcaggattctgatgcca

SEQ ID NO: 84516 - DNA, 105 bp, Zea mays
  Clone ID: MRT4577_17708C.1
gtcgagccagcgtcgccgcgatggtgttgttcgagagcgagcagttcctgacggagctgaccagacttttccagcagtgccggacgtcgcgcagcgtctatatca

SEQ ID NO: 84517 - DNA, 194 bp, Zea mays
  Clone ID: MRT4577_177090C.1
ggggtgtattgaacgctaaaccgcttactagctcactgagttgctgtaaaccctaggtgccctgcggaaaccgggggggagggagtctacagctgaaataaggttatacacaaaggcccaggataacgagcgaaagacctgtaagcagaacgtcatgcgatgaatattaatcttccaaatggcccgttccttgc

SEQ ID NO: 84518 - DNA, 370 bp, Zea mays
  Clone ID: MRT4577_177091C.1
ggcatctaaaagtattgtccacttttattgcagcagtgcttgaggattcagtgatcaacagatctgcaagaacaaaggacctaagggatgtctactgggccttccctatttttttatctataaagggatatattatataagttggcaaaacgcctagcatcgcctaggcaagcctaggctggactagtccctaggctaagggtcatcgcctagattccgcctagcgcctagcaaaactttgatgggattggactaatctccttgtaatgccctatattatgcctttgatgccctagacaccattcttaaggacaacgatctgtgaatcatcagaatgaagagtcctaactcctaaggtcctgccaatagc

SEQ ID NO: 84519 - DNA, 1284 bp, Zea mays
  Clone ID: MRT4577_177092C.1
atgatactcgccgacggcctcttcaacttcctgtccatcgtggcgtgcacgctgcacaccatgcgcaagaggcgcagcaggcagcagccgataataatccaaggcggcggctgcggtggcggtagtgaagccggccccggtgacacgccgccgacgcgtccccactgcctcaacgctgctgccgagcaaccgaagaagagcttcgatgatcgccgccgggcgcaggtgtttctgcgtgaccacatatccaactcggtcaacatcgtgtgctacgtcctcctgtcgatggtctccgtcgccgccataccgtacctctacccgcagatgcggcgcgcgcacgtcgccctcatctacctcgccgcgccggtcgtcgcgttctgcgacgcgtacgccttcggcgtgacggacatgaacctgtcgagcacctacggcaagctcgccatggtgctcgtgggctccagcgtggggcgcaacgacggcggcgtcgtcgccggcctcgtggcctgtgggatcgtgatggggaccatgtccaacgccaacaacctgatgcaggacctcaagacggggtacctgacgctgacctcgccgcacaccgtgttcatcagccaggccatcggcacggcgctcgggtgcgtcgtcaacccggtcatgttctgggccttctacagggtggtgcagaacggcgacaccgacgtcttcgacgcgccctacgcccgagtgtaccgcagcatcgccatgctgagcgccgggcaggacgggataccaatgcacagcctctggctctgcaagctcttcttcgcgctggcgctcgcgctcagcgtgttccgggaggtggccatgtggaagcgctggcgtgtggcacactacattccgagcatcatctgtgtggccatcgcctttgtggtgccggcgcgcatacccatcgacatgttcgtcgggagcttggtgctgtacctgtggaggcgtgccgaccctagcaaggcgccgacgttctcgatggcggtggcgtcagggatgatctgtggggacgggctagggatgctcttgtcatccacgatggcactcatgcatgcgcgggcgcccatctgcatcaagttcatgtctcgtaccgataatgtaaagctagatgccttcttagctacactgcctgtgacatagctccgtccgtgcatgtatgcaatgtatcataggagggaacccattccgtagttgtgggttgtatctacttgtaaactcgtcgtgttgtagtctaacattgtgagtgaatatagatttcatttgccc

SEQ ID NO: 84520 - DNA, 211 bp, Zea mays
  Clone ID: MRT4577_177093C.1
tgcgggatgacttctgcgatgtggcatctctgcctgttgatatgcaccacccaagtgtcgacccgtattctgcaggagcacttgatctacctggtagatcgactgccagagtgaccgaatattcgccctcacgatctattcggcccaggttcggctactgcatgcgcaactcctagatcgacgcaagacctgactcatggccatgtctact

SEQ ID NO: 84521 - DNA, 1701 bp, Zea mays
  unsure (1)..(1701): unsure at all n locations
  Clone ID: MRT4577_177094C.1
atggtgncagggtcgcaaacacgcccttggagaccttcccctgccgcggcgagggcaccgcttgctttcacggccgacgacctaatccccttccctcccattggcagccgtcgccatgctgcgcgtccgaaatcggctcctccctctgctcggcgccgcctccccgcttccctcccccatccacatccacctccgcgtgtgccgcctcctctccacctccacctccacctctacggccaccgtccccgcacccttctcccttgagaactacctcgtcgccgcctgcggcttcgcacccgcccaagctcgcttggtgtccaagaaggcgttcaacgagttgtccagggaatccaagagatcatcggaggagcactcctgcagacgcctcatctccgcctccaacccagatgccatcctcgcgctgctgtccggcgccggcctctcccgcgccgacatcgctgccgtcgtctttgcggacccgctgatcctccgcgcttccgtgagtaaaatcgcaccccgccttgtcgctctccgcgaccgcgtcggcctgtctactccccagatcgctcgcttcctcctggtcgcctcacgcgctctccgccggtgcgacgtcgttcccaaggttgagttcttcttgtccttcctcggctcctttgatcgggtactggcggtcgcaaaggcaaacttgggcatcttcaacgcgaaccttgagaaggtaataaagcccaacatagacttgtttcgtcaacgcggcgttcgagacgtccctaagatctgtctccaccgcccacggacgctttcctttaacctcgaacgcgtgaaggaatttttgctgcgggcagaagaacttggggtgcctgccgcgtcgcccttgttcatgcaagcagtgggagtcgtcaccagttttccccctgagaaggttgctgccaaacttgacttctttaagaggactcttggttgttctgagtctgaggtttcgaatgcagtgtccaagatgccacaaatactagcattgtctgaggcgactcttcttcgcaagatcgagttcctggtcaatgagggggcgatagagccacagtatattatgcaaaggcctatcctgctcgcattcagcttggagaagcggctagtgccccggtatcgtgtcatcaaagtgctgcagggaaagggattgctgaatagcaacatgagcctttcctcattagcttctcttgcagaagaaaccttcaagtccaagttcgtcgactgccacaaggactgtgttcctggccttgcagatgcttatgctgcagcttgtgctagtattgtgccctcgacagtgtaagttaagccgtttcaaaaacaaaaacagtgtaagttaagcttctcattttgtgttttaggtggatgctcattggctgctgtccactctgcaattttgatttctgaagtatataaccactcatgatcactgattggtcatatccaaggtttaagttatggacttgtggttattgatgaaaaaaaaaaaaaaaaaattgttctggatgcttaatgcacgttttgttggtttcatcttctgcctagcacatggcctaagattatccttaacttcgttgtcttccgtggatcagtctttgatgtagagcagtatctgtaagggaatgagatgctgacagaatctaagtcttaaaactttttattaaaaaaaaaaaaaaaaaa

SEQ ID NO: 84522 - DNA, 403 bp, Zea mays
  Clone ID: MRT4577_177095C.1
ccgggtatgacacgaatgaagcacttaagtggatcttgccccaactcttgctcttctatttggtgtacccaattccgaagaatagttttggtgtcgtgcttccaaagcttttaaattcgctgacagatgaccagaaactaaggatgttagagcttaactcatggcaaatcttaagattgctgcaagcacaagtgtctgctttctgccttgaagattgtattaatgtggagagcagtattgaacttgacatccttcctgaatctattgagcaaaagttatgttttttactttctaaagccatttcttctcatcagtcttcacgtcttcatcgaggttctgatttcaagtctgttgaagccgggtactatgggactgctgcagataactaccacgccttcttaag

SEQ ID NO: 84523 - DNA, 159 bp, Zea mays
  Clone ID: MRT4577_177096C.1
acgccaagctttcataacgacttcactatgagaggaaagctaggttaccgcctggcagggtacctaggtaccggcaattaatttcgcctgggttccgacgaagcttcactagttcgagcgggccgggccctctatttttttttttttttcaatatacat

SEQ ID NO: 84524 - DNA, 2478 bp, Zea mays
  Clone ID: MRT4577_177097C.1
ggccgcttttttttttttttttttggagaaaatagatgcctttataagttcacttgattgattgcataggacattctcctcttatgcagatgtcgttcatatacaggaagaaatggcacttacagtgttgccactagtacttaatgcagttatttgttttggtactagcatgaagatgattctcaatgttcttgtttgcaaccacaaaccatttctcgttgccattggttgattgaggtgtggcttgtctacatttctgacttcgtcagttctcttgatttcagaagatatgtgcaatttgcctcagcgccatgaggtccggccgcggccaagcactgttcactgctgaatgctcccacaagttccacttcaactgcatctcctcaaacgtgcagcacggcaacaaaatctgcccaatctgccgtgcagtatggaagcagctgccttttcaggggcctctggctgcatctgctgcccatgggtcagcgagagtaaacccagcgatttggccccagatgagcatgctgtcggtgaatccgctggacgagctcccagtctttggcaatccggagccagctgttttcaatgacgatgagcagatacttcttcagcctgaaacagcagttggcggcgaggagggtgacgaggttccccctttgcttgagatcacgacatacaatgaattcccagccacccaggagtccgtggcgcaggaggaattcgccatcttgatccatctcaaggctccgcatgtgccgtcgtgggtgagcacccgagcgccgctggatctggtgactgtgctcgacgtgagcgggagcatgtcgggccacaagcttgcgctcctgaagcgcgccatgaggttcgtgatcgaaaaccttgaccccagcgaccggctctccgtcgtcgccttctcctcgtcggcctggaggctgttcccgctccagaggatgaccgcctccggacagcagcagtcgctgcaggctgtcaactccctcgccgccgatggcggcaccaacatcgccgaggggctgcggaaggctgccagggtggtggaggacaggcaggccaggaacccggtgtgcagcatcatgctcctctccgacggcgtggactcccacaacctcccgccgcgggacggctcggcgccggactacgggccgctcgtcccgcgctccatccttcccgggagcgagcaccacgtgccgatccatgcctttggcttcggcatggaccacgactccagggcgatgcacgccgtggcccagatgtccggcggcaccttctccttcatcgacgtggtggggtcgatccaggacgccttcgcgcagtgcatcggcggcctcctcagcgtcgtggcgcaggagacgacgctcagcgtcgagtgcgccgaccagggcgtgctgctcacgtccatcaagtcgggcggctacgccagcggagcggacggcgacgggcgcggcgggttcgtcgacgtcggccgactctacgccgacgaggagagggacttcctcgtcaccgtgcgcgtcccgcagtcacgcgggaccatcgcgctcgtccggccgagctgcacctaccgcgacgcggccaccacggagatggtgcgggtggggggcgacccggtgacgctgctccgcgcggcgagcccggtgagcgcggggatgtccctgcaggtggagcgcgagtggcaccgcgtccacgccaccgaggacatagccgcggcgcaaaccgccgcggaggagtacgactacgcgcgcgcggcttcgatcctggaggcccgccgcctgctgctggagtcgtgcgcgtcgctgtcctcggaccagcaaacgcaggcgctggtggccgagctgcgggagatgcaggagcgcgtgctgaacgcggagctgtacgaggggtctggccgcgcctacctcctgtccgggctgagctcccactcgtggcagcgtgccacggctcgtggcgactcgactgagctcacgggcctcgtccacagctaccagacgccgttcatggtcgacatgctcaacaggtcgcaggcgctccagccggaggtagcggaggcgctgagccggtccccgacgatcgcgtcgtcgcgcagctcggccccaactcccgcccctgcctcctccggctcgccgtggacgcgacgcgggcttcggtcgttcaggccggcaaagtctttcaccgggctgtcattgtgagtgcaggactgcaggttcgctgattccattcacaatgcatgcaaactggcatcttgcagtagcagtagctaggaggagcgcggaagaaaactatcaccattgattcgtttcttcgatactctattgtcgtagagaggatttggtattactggtttgtactgctgtttgtccgtggattaatcctgagacatgttgtttgaccatcgattcgggtgtttttgttctataaacgtttgtgctgtttgtcgattgttttttccatatagtagctgtttggccc

SEQ ID NO: 84525 - DNA, 253 bp, Zea mays
  unsure (1)..(253): unsure at all n locations
  Clone ID: MRT4577_177098C.1
ctatagaagagcctattgacgtgggttgcccccttccttagcctcggattccgctcgaggccggatttgcagcccagctccctgggtatagattagtctttcncctcgcttagagagtaagtgccctcttcttcacctggcgctccaagtccatgttttgagcgtgcacagctcatgcgaattgagaaactgggacgctggcgtgcccatcgagatctggccacctcttcgatgtgatcaccttcgccccgct

SEQ ID NO: 84526 - DNA, 490 bp, Zea mays
  Clone ID: MRT4577_177099C.1
ctcatatcctaaatactgtctcctacctgtacatctttctaatatgtaattgcacgattcatcgctcttcaccttgccaggcatggccgattttactatgctatactgcgatgaacgatgcgacgtcgctctttacgattaagttcttcgtcaagaacgaggtctacaaggtcgacgccgacaactacacctacatgaacatggactacatacaggtacatctcttaatgactaccacgcgcacttactatggaagcacagtggccttatcatcaaggtcttaatgacgcatacattcgttacagaacccatactccttatttggtatcagcaaccctgagatgatccgaaagcctcgaggctggttctcagtataagttgaactccacctgtgtcattatggacaaggacagtggctgctgcgcataacaagggtggcatcaagatggtcattatgtccagcccaagcatagatgcgacaatgtttgtt

SEQ ID NO: 84527 - DNA, 1012 bp, Zea mays
  Clone ID: MRT4577_17709C.1
gccggccggatcgaaacgaggccggccggcagcgtcgctctcgcccctgtcctatttacgttgctgaactttttctttttcgtttttgaagccgtggaatatgctgctgcctttggaatttggattcctcctcccccagatcaaatctgtcactgtcctgtggggccatccccggtcgacccccatatagttctccaccaggccgccgcccacggctagacagcctccccattcatcagattcagatcagatcgtagcagcctcatgggcgccggccacgactactacgagcgcggcaacctggacatcttcagcggccggggcccctgcatgagccaggcgccctgcgccatgaacctcacctccgacggcaccggcgcgcaccacggctggtactgcaactacctcgaggccacggtcacggggccccacctcgggtgcgcgcagcagctcttcactgtcgagcagtggctcgccaccgacgcgtcgccctaccgcctgtacgcggtcgtcgacaagtgcaagacgaagcggcaggagccgcgacgctcgccacctgcagccggcgaggccgaggccaccgtgaccgcgctctaggtaccagtagtaaatctaaatcgacagaggctagctcctgcctctgctgtgtgtaattactgtatgtgagtgaccggattacgttcgtcttgtggagacgctgcgtgatcgcgcgattggtttcgtttcgccgccttgtttttgcacgaggaggttctgctagtgcgtacgggaagaataaaagcggcattcctgctgtccaaggcctgtcctatattatattattatttctagctgagtttgactcagctcagctggtggggtgtcgacgtgtggtaggttggttatgtgtctgcatcagctcacttgccaccggatggcggtcatttgccacttggcattggtttagctagcgttaaaatgtgattgcgaaggccgtgtcggcagataattttttgtgcttcggggctcggtc

SEQ ID NO: 84528 - DNA, 115 bp, Zea mays
  Clone ID: MRT4577_1770C.1
caacaagatcccgtgtctgtgtggcacagagagctgccggggctccctaaactgaggtggggcaggataggtgcccacacgcctatttattccccctggtgccctgagctcccag

SEQ ID NO: 84529 - DNA, 331 bp, Zea mays
  unsure (1)..(331): unsure at all n locations
  Clone ID: MRT4577_177100C.1
aagcagcacgctacaccggggcacgcncacacaacgacagctaagtacgctaacgcgcgggggccgagcaacaangaaaaagctccgacacgggccgagggagaagaagcaggtgcctgcgagctgcaggaccgcgggggagaggcccatggcgggccagccgctggccgcagtcgccgatggggacgaagaaggggccggggcgggagcgagntatcctggcagcagggaccctgggggaacaaggagcggagctgctccgtccgcggccaaccgcgggnngcataagaaggatccgccgggcgtgcgtggcacgaacggcccgggcccc

SEQ ID NO: 84530 - DNA, 130 bp, Zea mays
  Clone ID: MRT4577_177101C.1
gaggagaaaggcaacaggacctgaccattggcaggagggttaagtagcatgtaagaggctacaggaacagacggtactggccactacacggggaggcacgtgaagaacaatgaaaaagtctcgataacag

SEQ ID NO: 84531 - DNA, 695 bp, Zea mays
  unsure (1)..(695): unsure at all n locations
  Clone ID: MRT4577_177102C.1
cctcgaggccggccgggctcagtttccccaatcgcactccgcttcgttcccctgcttgctcgctccccactcctcagctcgtctcatcgatcgccatgctgtgtccccccctccatgtcctcctcctcctcctcctcctgtctctgcgcgcggcgccgtgcccgtgcttcgcggccaccaccgacacgctgtcccccggcaatgggctcgccggcaccgccgccagtgccaggctcgtctccaacaacagcaagttcgcgctcggcttcttcaagacagacagcaagtcccccaacacctacctcggcatatggttcaacaaggtccccaagctgaccccgctctggagcgccaacggcgagagccccgtcgtcgacccggccacgccggagctcgccatctccggcgacgggaacctggtcatccgggaccaggccaccgggtccgtcgtctggtccacccgcgccaacatcaccagcaacaccaccaccaccgtcgccgtgcttctcagcagcggcaacctcgtcctcaggagctcctccaacgcctccgacgtcttctggcagagcttcgactacccgacggacaccctcttcgccggcgccaagatcggctggaacaagcgcaccggnctcaaccgccgcctcggtttcagggaagaacgcgctcgaccaggcccccggcctgtactctct

SEQ ID NO: 84532 - DNA, 326 bp, Zea mays
  Clone ID: MRT4577_177103C.1
tcgacaacccagcgcccgcagtcatcgttatcgatcgatcgccggcaaactaacctctaatgttgtctggagcctgcgaggaggacatgaagctcgcggtgggcggcgcccacatgaaccttaaggtcaagggacaggatggccatgaggtgttctttcgcgtaaagaggtccacccatctgaagaagctggtgaacgcttattgagaccgatagtctgtggatatgtgtgccattgcgttactgtttgatggccgcacgctttgcattgagcaaaccctcgatgagctggagatggaggactgcgactagatcgacgccatgctt

SEQ ID NO: 84533 - DNA, 532 bp, Zea mays
  Clone ID: MRT4577_177104C.1
agcagtggtaacaacgcagagtacgcgggggcgacccagcgtccatacacacagcagcctttttgttctccccgcgagcgctctctttctctatcgactggcgacgactccgccaccgtcgccgctctacgcgagacgcccaggtcttcgccaacgacgagcatccgcttatatacaattgcaaaccccagattacgagctacagggttagagaggaagaaattgcaaccgaaacaatggcggcagattccggcgctcgcagacaaccaagcttcaccaaggtcgaccagctgcgccctggaacccacggccacaacctgatgctcaaggttgttgactccaagatggtcgtccagagaggccgcgagggagggccccagggaagacagatgaggattgcggagtgcttggttggtgatgaaaccggcatcattgtcttcactgcaagaaacgatcaagtggatgtaattaggcctggaacaactgttgaactgaggaacgcaaagatcgacatgttcaaagggttcgatgc

SEQ ID NO: 84534 - DNA, 1113 bp, Zea mays
  Clone ID: MRT4577_177105C.1
ggtaccctccgggctggccggggctgctttggcttgatgcggcgggttgtcgaggcccgtcgtccaaaccatttgccttcgcggactttgagattttctttgtttttgttttttccttattacccaaaatataacgcgacccagcgtccatacacacagcagcctttttgttctccccgcgagcgctctctttctctatcgactggcgacgactccgccaccgccgccgctctacgcgagacgcccaggtcttcgccaacgacgagcatccgggttagagaggaagaaattgcaaccgaaacaatggcggcagattccggcgctcgcagacaaccaagcttcaccaaggtcgaccagctgcgccctggaacccacggccacaacctcatcctcaaggttgttgactccaagatggtcgtccagagaggccgcgagggagggccccagggaagacagatgaggattgcggagtgcttggttggtgatgaaaccggcatcattgtcttcactgcaagaaacgatcaagtggatgtaattaggcctggaacaactgttgaactgaggaacgcaaagatcgacatgttcaagggttcgatgcggcttgcagtggacaagtggggaattgtgaaagctgctgaaagctcagctgagtggacagtcaaggaggacaacaacctgtccttaattgagtttgagctggtgaccgtgacggagtgaaaaccgccattgcttaggagtattgttggtttgctgtgttgttgaacctaatcatcatcgccaatcaataaggactcgtggttgatgttctcggcatcggagttgcgtattgctgtaccgttgcttgcttactgtgcgttgtggctacttttgactgctatcgaataataataaattggtgtcatgaagtggaaaaaaacatgcgatgatggctactttctgcagcagcgcctgttgttccatgggacgtgatctctttaaaaaaaaaaaaaaaaaaaaaaaaaaaaaaaaaaaaaaaaaaaataaaaaaaaaaaaaaaaaaaaaataaataacaatcaaaaatattaatattcttaataaaaaaaaaaaaaaaagggcgacacactctacggggg

SEQ ID NO: 84535 - DNA, 337 bp, Zea mays
  Clone ID: MRT4577_177106C.1
tttacacgtaccgggtaatgattatcttgggggggccgtactgggtcggtgtacggacgccacgaagtaggcacgcaccaaatatacatcaatcaatgtgcctatgactcactctgaaattattgctgatctgatgttaaacgcacgtacgagcaatgtggaactcagttagcatttgcccccaaggacaatagcgctgctagagaactgggaggactacatggacacccttagtggaggattggacgatgtctgtcctagcatgagtggcggtgtgaatactaatgacagggatgatctacacgaaacttgcatagatgttgctgaggacaagcta

SEQ ID NO: 84536 - DNA, 170 bp, Zea mays
  Clone ID: MRT4577_177107C.1
acgtctcttgctctgacacgtagcccgccacctacaccagacctcagcagacgggggtcccacgtaatctcaattttgactgcctatccaacagcacacatgtgctcataacctgcatcgtaatgatcacctgacaaaattcggtccctactagacgatcaatttaatgc

SEQ ID NO: 84537 - DNA, 292 bp, Zea mays
  Clone ID: MRT4577_177108C.1
gctcccaagagactgacggcatctaccggatcaggaagaacacacacgtgacactatagaacgtttaggttttcacatcactctacctgtgtctgactacacaatggggaaggtcgacgtcgatggcgccaatctgtgatgcgcttcgaagatgtgaagctatattactcactctgaccactagcaccaaggtggcaatgcagcacagcgacaatcgcgtttgtaggcttagataacacatacctcactcaataaaaagaggatttaaaacacacctgtggcgatgtgtggt

SEQ ID NO: 84538 - DNA, 570 bp, Zea mays
  Clone ID: MRT4577_177109C.1
aattcggcacgaggcaggggtacgggatgacggaggcaggccccgtgctggcgactgtgcctggccttcgccaggagccgtacccggtcaagtccgggtcgtgcggcaccgtggtgcggaacgcggagctgaagatcgtcgaccccgacaccggcgccgccctcggccggaaccagcccggcgagatctgcatccgcggggagcagatcatgaaaggtgcgccgcacaccgccccagccgttgacttgtcatctcatttctttgcagttgcagctgtaggctgtatagcgctcgtgttcgcaaaatatggccatctatccttcgaattcgaagcatcactttcacatgccattagcgccaccagccaaccaagctgcgggcacgccacgcctctgacgccgtcctggcgcttgaggcaggcgacctcggcgcactgccacgtgggccaatgtggtgctcgtgcgcgcgtgcaccgccacgcggggccccgcgtggcttgggtacaggttggtgacatggacaaaatttcctgttggtccgagtactttggctgcaaagaatccgtttggt

SEQ ID NO: 84539 - DNA, 2381 bp, Zea mays
  Clone ID: MRT4577_17710C.1
gctagcctcaacgccgccgaccgccgatcggggatcgcgtgctatcctctgccgaccacatcttcaccgcaccaccggtcctttcaagtgagcttcaaccccctgcgtgtagatggagagggttgttacggatgacgccgacgaagagaagggcgagcgcaccacaatggcatcctttgttggggccatggcaatctcggatttggcgaagaccacattgtgtccaaaaggaatggatactcctgtctcgtacctccgtgggtaggtatttgatcctcagccgcgggccggccggccgggacaccccggtcggctagtcccaaggctgctgccgccgcctgccgctaggggatcgcttgctttcctcggaccactctgccgaccacatctacaccgcatcaacggtccttccaagtgagctccaatcccctgtctgtagatggagagggtgctaaaggatgacgccgtcgaggagaagggcgagcgcgccaggatggcatcgtttgttggggccatggcaatctcggatttggtgaagaccacattgggcccaaaaggaatggacaagatcctgcaatcaactggcagaggacgtaatgtgactgttacaaatgatggggctaccattttgaagtcacttcacattgacaatcctgctgcaaaggtccttgttgacatctcaaaagttcaagatgatgaagttggtgatgggacaacttctgttgttgttctagctggagaacttttgaaggaggctgagaagttaattaacatgaaaattcatccgatgactattattgcaggttacagaatggctctcgagtgtgccagagattctttgctaaaaaagaccatggacaacaaagaaaatacagataaattcagatctgatctcatgaatattgctatgactactcttagttcaaaaatactttcccaagacaaggagtacttcgctgaacttgcggttgatgctgtcttgaggcttaagggtagcaccaacttggaatctattcaaattctgaagaaacctggaggatctcttaaggattcctttttggacgaagggttcattcttgacaagaaaattggcattgggcagcccaagcgcattgagaatgccaaaattttggttgcaaacactgctatggacacagataaagttaagatatatggagcacgggtccgggtggattcaatgtctaaggttgcagatattgaagctgctgagaagcagaaaatgagagagaaagtccaaaagatcatagcacacgggatcaactgttttgtcaacaggcagttaatctataacttccctgaggaactctttgctgacgctggcatacttgcaattgagcatgctgactttgagggcattgaacggctagctcttgttactggtggtgagatcgcatcaacttttgataatccagagtctgttaagcttgggcaatgcaaggtcattgaagagattatgattggggaggacaggctaatccatttctctggggttgcgatggggcaggcttgcaccattgtcctaaggggggctagtgagcatgtgctcgatgaggctgagaggtccttgcatgatgccttgtgcgtgttgtcccagacggtaaatgatacccgtgtcttgtttggaggcggatggcctgagatggtgatggccaaagaagtggatgaacttgcaaggaagacccctgggaagaaatcccatgctatcgatgctttctcacatgctctgcaagccatcccaacaatcatagctgacaatgctggtttggatagcgctgatttgatctctcagctacgagctgagcaccacaaagagaactccactgctggaattgatgtcatcacaggcactgttggtgacatgcaaaagctggggattcaagagtcgttcaaggtgaagcaggccattcttctgtctgcaacagaggctgcggagatgatcctcagggtcgatgagatcataacctgtgccccgcgcagaagagaggataggatgtgatattacacgctgtttctcgatgtagcgggatgctcattaccctagttttgaggggtattatggtttaggggcgctcaagttggtcagatttcgagtgtttttggcccctaagcaactggtacttgttatttggttgaaacaatcagccttaggtttgtgttctattttctcatgctgtaccgtttggtagcaagttacgtcgtacgatatgcttgttccatcatgtttttctattccttttaacgtaagaatgggcttgtctttgtttcaaaaaaaaaaaaaaaaaaaaaaaaaaaaaaaaaaaaaaaaaaaaaaaaaaataaaaaaaaaaagaaaaaaaaaaaaaaaaaaggcccctagggcc

SEQ ID NO: 84540 - DNA, 352 bp, Zea mays
  Clone ID: MRT4577_177110C.1
tttttgttgtttttttttttttttttttttttttttttttttttttttttttttttttttggacccaaaggctgaattttattggaacattttttcgcccaagatttgcaaattccctgggggaaaaccgccttgggaccgaatgggccccaaactaaaacaaaaattccaattatttacgactcctggccttttaaatccaaggatgaaacaccccccttgcctcccgaaatgaaacccaaggaggaacccccccgcccgggggggccctccatggaagctagaagggggtgcccctcctggaggtgggcctgatctcgccggggctcccggtgaggggggagaagttgcc

SEQ ID NO: 84541 - DNA, 702 bp, Zea mays
  Clone ID: MRT4577_177111C.1
ggccgcgggttttttttttttttttttggtaacaaatgtctatattctatagtctaggtctatttccttcgcgtgccagtcaaggcgaccactgtactctatacaagcgtaatgtattgtggtattttttttttcgtattcgtctcccgttcgtacatgttcgtcaatcgcgtgttggtcgtcgatgctctatcgtatgtgggtgtgtatgtacacattgccctttctactgagagcgggtgttgatgggaattcgggtttcattggaggtatcattctctccctgggcggaaaagtactcgaggctgcccttggggtcggccttcatggtctttccgccctcctgccagccagcagggcacacctcgccgtactcgtcggtgaactggaaggccttgacgagacggatggtctcctcgacgtcgcggccgacgggaaggtcgttgacggtgatctggcggaggacacccttggggtcgatgatgaagagaccgcggagagcgatgccctcgtcctcgatcaggacgccgtagttgcgagagatcttggtggacttgtcggcgatgagggggagctccaggtcgggaccgagaccaccctgcttgcgaggcttctcaacccaagcaagatgggtgaagtgggagtcggtggagacaccgaagacggtggggttgatctccttgaagcggtcgagggcgttgt

SEQ ID NO: 84542 - DNA, 157 bp, Zea mays
  Clone ID: MRT4577_177112C.1
cggacgcgtgggtgaacgccggcagcgcccggatgacggcgttctctaagccgcgcggctcggcgctggaagccggggtgccgccagtgctggtgcggacacgggcgcgggcgcgctgggggcggcgggagacagtgtttgacgcgctacggtcgcg

SEQ ID NO: 84543 - DNA, 498 bp, Zea mays
  Clone ID: MRT4577_177113C.1
cagtcaaaaaagcgctatgcatcattgaatcccgatggtgggttccttctactagggcagagacaattcatacaacagatgcaccgtgacagcaccagaatcactctgattgcaccaccgtattgtgcaaccgggtaaaacatgccgtattagtacaacacggggatagcaacaacagagcggctaaaatcacagatcttcctaccatggaaacctatatcaagggattgacctagcagtggtgggacaacgacagaggaggtacagaactacgctttgccatcaacaagcttgccgatgaggtccgtgacgcttacaactgaggcgattgttggcgccactggactcctaatcgctaatatggaagggctcctccagactcatcacaatctcaaccgagaccattgaatctgcacctgagttacagaactttattgaccgaacacttaaaactggacaggaatagcaaggtggtttttcacaatctcacaaaccttg

SEQ ID NO: 84544 - DNA, 802 bp, Zea mays
  unsure (1)..(802): unsure at all n locations
  Clone ID: MRT4577_177114C.1
aattttatattcattcatgctcctacataatgcgtgccccggttcatccgatgggccgccaccgtccgtcctacagctctggtcgcgcgatggcgtggcctgcgccgccgttcctgtacgcgccgtcgccgctcgaggcgtgggcgtcggcggcgggcgccgtagcgatggccttcctggccgtctccgagttccgaggcgaccacttggcctactccaagttctcgcgcggcggcggcggcggccagcaagggactaagcagcggcagcggcaacgggtgcgggtaccgagccgagtcgggatggtgctgctctacttcccggcgctcgccgccgcgctcgcgtccttcgccgtgccaggcgccgtcgacggcgcgcgcgcgcacgtcctcagcgccgccgtcgccgtccacttcctcaaacgggtcctcgaggcgctcttcctccaccggtacagcgggagcatgccgctggccacgtcgctgctgatcgccggccactacctgttcgccggcgtcggcatgatctacgcgcagcgcctcaggcgccgcgggctcccggagccccgcgtggacctgctgcttcccggcgtgctcgccttcgccgtcggcctcgccggcaacttctaccaccactacctcctctccaggctgagggcgcgcgacggcggtgacgcaggcggcgagggggcgtacaggatccccagcggcgggctgttcggcctcgtcgcctgcccgcactacctcttcgagaccctcgncttcttcggnctcgncatggtctcccagacgctggtcgcgct

SEQ ID NO: 84545 - DNA, 174 bp, Zea mays
  Clone ID: MRT4577_177115C.1
atggccaccgttcaaaaaccgaaggatgaaggtaacaagggcaacagaaagatctttatagatcatcctgtatccgacggttgttttgctttgatgaagaacttcttgcctccggtggagttgtcttctgtggcctttgctctttttgtgaaagcaagtgctgatgacgtgtga

SEQ ID NO: 84546 - DNA, 399 bp, Zea mays
  Clone ID: MRT4577_177116C.1
gggggggggggggcccaacctcaacgcagagttggtcgccgcggtccgcgcctaactgaaagcaccgtaacgtccgaggacaaacgagcgaaacggatcacgaaaaagactgagttttttttttttttaagcccccgccaagctgggtggggggggggggcattttttttaacaaaaatgccggctctgtgtgctgggtgggagaccccacaatgaactgcttctttcatccctgcattctcccggccattcactccctgtgccctcgcttcgggtgtttggcttctcgtacccgcttcatcaccggtgctgctgcaaattgaacctcgtttttcgtctgacggcgtgctgcaaattgaaccgggctacgtcggaaccgcacaaaccaggcccaaaccc

SEQ ID NO: 84547 - DNA, 815 bp, Zea mays
  unsure (1)..(815): unsure at all n locations
  Clone ID: MRT4577_177117C.1
gcagaacagtaacccgcactgcgcccactccgatctcccaatcccctccaatccctcgccggaaccctagccccgcgccgccaccatgcctccgcgccgctctaagggagggggcgggggcaaacccgaccccgaagccaccgacgccgagcctgtggagaccgcggtcgacgccatgtccgaagacgaggccgacgacgacaactccaaggaggagtccgctgagagcggagctgaggatacggacggcgaggactccaaggaggaagccgccgagaccaaggccgaggagatggatacggagcatcaagaggaagccgccgagaccaaggccgaggggacagtcgccgaacctgaagccaatggtgcagatgcggagaccaaagtcgaggcggcggatgccaaggtcgaagaggaagccgccgccgagagcgactctgagcgcgaggcagatgccgggaaggccgatccagaagcggaagcagaggaaaccgacggcgagaatgacgagcaagccgctcgggccgacggtgagagtggagaggaagctgctgggactggcggcgatgatgaagaagaagccgccgtcacagacggcgacaacgccgctgaggttcgtggcgagaacgtagatgcggattctgaagccgaaggtgagggtactgatgccgatccgagcccccccgggggaaatctccccctccctcccctccagnccgtggncgnncgccgcaagcgagtggtcaaacccgacccgcctactngagatgacgaggaagaggagacccctctgccccacgntcggcgccgacgtc

SEQ ID NO: 84548 - DNA, 262 bp, Zea mays
  Clone ID: MRT4577_177118C.1
gttataagcacctttatgttatagctaaacaacatgcgccgacgattaaaccctgcgaataccaaactttttattttggtgctaacaaagccccattgaggaacgctcgcaggttctatattcagagaaagaacacacagcacgggtgatcatattgccactttgtaccatgaattcaattccattttactgggccccaaattctttttacggcggaccaatggttggttctcctggaacaaacctgctaaaaccttcttcc

SEQ ID NO: 84549 - DNA, 428 bp, Zea mays
  Clone ID: MRT4577_177119C.1
ccggccgggaccagcggcatctatagcaaccggtccaacactttcacgctcagcttagcaatggctgcctccaccatggcgatctcctccacggcgatggccggcacccccatcaaggggggttccttcggcgagggccgcatcaacatgcgcaagaacgtgggcaagcccaaggggggggggtcccggagcccctggtacgggccccaccgcgtcaaggaccttgggcccttcttcggggagcccccgagctacctcaccggcgaggtccccggggactacgggtgggacacccgccggcttgtcccgcgaccccgagacattcgccaagaaccgcgagctggaagggatccactcccgctggggcatgctcggggcgctcggctgcgtctttcccgagctgctctcccgcaacggggtcaagttcg

SEQ ID NO: 84550 - DNA, 327 bp, Zea mays
  Clone ID: MRT4577_17711C.1
cggacgcgtgggcgaagcggcaggagccgcgacgctcgccacctgcagccggcgaggccgaggccaccgtgaccgcgctctaggtaccagtagtaaatctaaatcgacagaggctagctcctgcctctgctgtgtgtaattactgtatgtgagtgaccggattacgttcgtcttgtggagacgctgcgtgatcgcgcgattggtttcgtttcgccgccttgtttttgcacgaggaggttctgctagtgcgtacgggaagaataaaagcggcattcctgctgtccaaaaaaaaaaaaaaaaaaaaaaagggcggccgttttaaaggat

SEQ ID NO: 84551 - DNA, 216 bp, Zea mays
  Clone ID: MRT4577_177120C.1
aggtgtcgggcagcctttcggagcagatttagtggataggccgggcgatcttgagccgtgccaaggcacgcgcttgcatgttgaccgatacgccactcgtattcactgatgacatttataacacctgcgtggtggatatctgtgtgtacgacatgctgatttgactcggtagtatctcgggattgtacatgatacgacatcatcaacctgctgatg

SEQ ID NO: 84552 - DNA, 234 bp, Zea mays
  Clone ID: MRT4577_177121C.1
cccacgcgttcgcccacgcgtccgcccacgcgtccgcccacgcgtccgcggacgcgtgggttggagagttggatctgtttcatttggtggtgtttgctttactattaggtcagtatctgtttgtggagacttggtgtttaatttatttagccgtttgtgactggttgtagctagcggtggtgcggtggtgatgttcttgaggcatgaataatgctacatgcatgtgatgtatcc

SEQ ID NO: 84553 - DNA, 995 bp, Zea mays
  Clone ID: MRT4577_177122C.1
ccggccgggaaagtcgatgttgatcacttgcagaagtaaatgacttgctgaatcaggaagttctgaaattgcaatctcaggttgaggatttgaaacaaaagtgcgaagcacagcacgagcagcttcagaaatcagataaaaaagctaagtcagttgcctctatggccactgaagaatcctcgaaacgtaatgctgccgtggagtttgttaaatttcttgataatgagctcaagggtattgcagataaacttcctgttgacgttgccgacagcttgaaagctttgcaaatgcgaacacagtcactactgagggaacaatcaggtcaccccttagagctcgtgaatccaatggaacgtgatcatcttcacctgtccagtggtggaagtggaagatatgatttggtcactcataagtcaggaggtgtaggttacctgacaatgtctcaagatggcagttctgccagtggctcagccatgtccatcacgagtgaatccccatcccatcgtttcatggaaaacagttcaaaggcccatggtgattttgccccgaagcagggtacccatggagaggtccagttaattgagcagtttgaacctggcgtatatgtgacacttatccaactaaaggacggtaccaaagtattcaagcgggtccgattcagcaagaggagattcgcagagaatcaggctgaagaatggtggagggaaaaccaagagcgggtcttcaagaaatacagccacccaactcatgcaccacatggaaacacaacttctcacgaggaagagcatcattcatgatctccaaatcaggtccacacaggtcgtcatgtaggaggtttatcacgcgaaatagggtaacacaggacttactattgttttgttcattattttcttgtaaattgtagattactgttgcccttttttttgttccttttaccctgttcaacccccttctgacaaaggtattcatttccaaagccaactaaattgaggttc

SEQ ID NO: 84554 - DNA, 281 bp, Zea mays
  Clone ID: MRT4577_177123C.1
gactgaatatagctatctatatctacatgcgcccacagggtacgctacgcaccagaacgcctacaatgtgcaaccacactatagctatgggacgatgctacaccggctaatccagctaacattgaatcacgtcaccggcagaacaaattaaatccgtcttaaaaggtaaaccttgtactcctcaggatacttgggttgcatttggacgaaaatgaggttaaaggaccaatctagattatgcagtctaacttttatgccatggctcttcaaactggcctgcc

SEQ ID NO: 84555 - DNA, 221 bp, Zea mays
  Clone ID: MRT4577_177124C.1
attcggctcgaggcagatcgaaatttttattttacgaacgtgccccatgttaaatggatggtttctatgaatacaagcatgggatcagaacggattgaacaaacggaggtgcgtctaaaaaagaaaaatggtgtcatcttgattgtgctaccagagaaattttttggtaaggacagatcgccctaataacaaccactgagggaccactagtagtgaacaaa

SEQ ID NO: 84556 - DNA, 341 bp, Zea mays
  Clone ID: MRT4577_177125C.1
ttctcgattgacccagcagcaccaagcacacaggtagggcgactggcaggcaactacggccatggtgttcccatgtcttcgcctgtcccttttgttgcgactggaactcaagataccggtcgcgctcctgagattgtgtgggctcaacactcccagaataactattgactatttgattgccagatgccaaacatgttgcatgaaagaccgatcctaaaggcctttgtaactaatatggtgaagctcatcgagaacctcctagctttactgacgagctttttgattcaatactgtcagatggacataaaacgaagacacagatgggtctgcgaaacataatc

SEQ ID NO: 84557 - DNA, 383 bp, Zea mays
  Clone ID: MRT4577_177126C.1
acatattgtcttgtctggcaggaaataaagctccctcataatagggccacaaaccgcctgactggtttgtcttaacaccaaactttggatattggccgaaacccccatggatggccttctggagggcctgtttccaaaccgagcccttggacccctggcaaagggggacccccacccaggatgggccatctctccatgaactcacccattgaagaaacgtaacacaattttgccgtcaccaccattcacaattcccattagcctactgggatctttgccctatgttttgggggttccttttcaagctggcactgcgcgttttttttcacttggcccttataggcgccctcttgggggcaccccttggcgggtttcctacgacc

SEQ ID NO: 84558 - DNA, 835 bp, Zea mays
  unsure (1)..(835): unsure at all n locations
  Clone ID: MRT4577_177127C.1
gaggctgtgcttgggagagttgagctcacatggagcaggaaaaagaaccaaggtgctgtgcctgcatggcttccgtacaagcggcgcttttctgaagaagcagatcagcaaatggcacccttccatacttcagcagtttgagatggtcttccctgatggcgtcttcccagctggtggaaagtcggagatagagggcatatttccaccgccgtacttcgagtggtaccagttcaatatgggcgcaacacttttggcgcttttggtaggctaccaagcacagggcaaggtgctgagtgatcatccgccaattaagttcgtggtctcaatatctgggtgcaagttcaaggacccaagcatctgtgatgtcacttacaaagacccgatcaaggtgaaatcagtgcactttattggagaaaaggactggctcaaggtaccttcggaggagctggcttctgcctttgatgagcctctcatcataaggcatcctcatggccacactgtccctaggcttgacgatgtgtctgtgaaacagctttctgaatggagctcgtgcatcctggaagaccttgagactgcaatcgttcctgaggccttagattcaggcaacccatctgataaggaagctactagtgcagaattcgcagaaaacctggtgactgcttgaggcttgtccactttcgtggcatggttggtttggttgcatttgaaacttgtacccgttctactgagtagtgcgtggaacttgtttgatcgcatgtgtatttgcattggcaannacataagcgctatctactgaatcaaatgggatcagacatncagtacnaagtattggtgg

SEQ ID NO: 84559 - DNA, 933 bp, Zea mays
  Clone ID: MRT4577_177128C.1
ggaacttaggctgtgcttgggagagttgagctcacatggagcaggacaaaagaaccaaggtgctgtgcctgcatggcttccgtacaagcggcgcttttctgaagaagcagatcagcaaatggcacccttccatacttcagcagtttgagatggtcttccctgatggcgtcttcccagctggtggaaagtcggagatagagggcatatttccaccgccgtacttcgagtggtaccagttcaatatgggcgcaacacttttggcgcttttggtaggctaccaagcacagttcaaggacccaagcatctgggatgtcacttacaaagacccgatcaaggggaaatcagggcactttattggagagaaggactggctcaaggtaccttcggaggagctggcttctgcctttgatgagcctctcatcataaggcatcctcatggccacactgtccctaggcttggttcgcactcttcccaaatctttctgttcgatttgcctccttggaatcagcatatgatataaactgcttgcttttcactcagtttatgcatactgctttctcactgataatctgatgggttctttcgcagacgatgtgtctgtgaaacagctttctgaatggagctcgtgcatcctggaagaccttgagactgcaatcgttcctgaggccttagattcaggcaacccatctgataaggaagctactagtgcagaattcgcagaaaacctggtgactgcttgaggcttgcccactttcgtggcatggttggtttggttgcatttgaaacttgtaccgtttctactgagtagtgcgtggaacttgtttgatcgcatgtgtatttgcattggcaacaccaatccagcgctatctactaatcaaatggaatcagacatcaagtcaaagtattgtggactcgagccgaattccgagctt

SEQ ID NO: 84560 - DNA, 666 bp, Zea mays
  Clone ID: MRT4577_177129C.1
ctccgtccggccacgccccagcctcccttttcccgatccgcatcgtcatcaaatgggccatcttttcctcctcctggtagccctcctcctgctcacctccacgcgtgccgccgccgccgtccacgccagagcttcggtcattgaggaggcgagcttcgctggcatcagaggcgtgatcggatccaggccgccgacctgcgaggggaggtgcaggtcctgtggccattgcgaggcagtgcaggtgcccgtatctccgcagcagcttcagagaaggaagaaggagggtctcggccttggcagcagcagagctgctgctgctgctgccaccggtggaagagcaagagcaatgccggcctcctactacgaccactccaactacaagcccctgagctggcgatgcaagtgtgggcggcacatcctggacccttgaaagatgaaacgccggcgctggtcgatcggaaccagtcttctgcgcttgtggatataatgtactaatagtacaggatcacttttgggtttggtgattgttttcatctttcctcttatattatgatcaagaaggtgctgctgtcccttttggccgtggtgatcaccggagaaacgtatatggtgacaagcgtataaaaaaaagaaaaaaaaaaaaaaaaaagcggcctagggccgcca

SEQ ID NO: 84561 - DNA, 690 bp, Zea mays
  Clone ID: MRT4577_17712C.1
gccggccgggttcaagagacaggctccccattcatcagatttcctcagatcgtagcagccaaggattccgcgctccgggggtgccatgaagctgaagctcctctctccctgccttctcctcctcgccttctttgccaccgcggtaagcacatcatcggtcatctgctgtctgctgctattgcgctgtggcgcctacgaagtcgcctcttgaatcgattattcgctccgtctccgcgcgcgcctttatttgcttgattattcatcaggcgtacgcggcgtcggcgtcgcgcgcggcggccgtcgtcaggggcgcgggcgccctgtcgcagtcggagttggagtcggacccggagaaccagtgcgtgtacacggtgtacgtgcggacggggtccatctggaagggcggcacggactcgaccatcggcgtgacgctgctgggcgccgacggcacgggcatccggatccgggacctggcggggtggggcggcctcatgggcgccggccacgactactacgagcgcggcaacctggacatcttcagcggccggggcccctgcatgagccaggcgccctgcgccatgaacctcacctccgacggcaccggcgcgcaccacggctggtactgcaattacctcgaggccacggtcacggggcctccactcgggtgcgcgcagcagctcttcaccgtcg

SEQ ID NO: 84562 - DNA, 2015 bp, Zea mays
  unsure (1)..(2015): unsure at all n locations
  Clone ID: MRT4577_177130C.1
gggaccctcgaggccggccgggacagttccacacacgcgtggcacgggcgggcaagcaccagaaaggaaaggcggaggccgcgcggcgggcgccagctgcagccaagagcccactagtagtagtagtagctagttcaccaccgcctgcttgcctcctttactttgccatatttgctagcgtttcctggattggggacgcttccgtttcgggaagccgtgaagggatcggccacgacgatggtgcgggggaagacggagctgaagcggatagagaacgcgacgagccggcaggtgaccttctcgaagcgccgcaacgggctgctcaagaaggccttcgagctctccgtgctctgcgatgctgaggtcgggctcgtcgtcttctccccgcgcggcaagctctacgagttcgccagcgccgccagcctccagaaaacaattgaccgctacaggacatacacaagggacaatgccattgtacacaattcctttcttgttttccacatcgtaattttcttctatttctttatccatatagaactttcttgtcatttcttgtttttggtctcatataatcaaggaaggggtataaactaaaatccagtcaaatttcacctataaaagaaagactactattccttagtaatgtataggaagaaggggtcatcttttttagggataggaaaatctcgtctatacggttcattctatatatatataatatttattttgtttttttagttaggaatttcgcctaaacaaaagaaatacaaaggatcttgggcaagagtatctgatcatatatgtattccaatacggaaggaggattttcaatgcgggatataaaaacatatctctctgtagcacccgtgctaagtactctatggtttggggctttagcaggtttattgatagaaatcaatcgtttattcccagatgctttgtcattcccttttttttaattctagttattcctatgcgagagatagaattcttcgtgacatgacgaaaatttcccctttttgaattcttttttagtatatgaagcaaaaagaaagaaaagatggataaggattgtattctttaattatttctctatgttttattacttaatttacgaatttcaaaaattttgtattctattggattggatttgttcgataattcgaagaattacaacaaaatctttagaaatcacatttttagttaggaacttctatggattttattcttcttcttttctttggatccaaaatagaagaataaaagaataggtataagaattaagttaagtcgatccaaaaaggaaaggaggttcatggccaagggcaaagatgttagaatccgagttattttggaatgtattagttgtgttcgaaagggttccaataaggaatcgacggggatttctagatatagtactcaaaagaatcgccacaatacgcccggacaattagaattaagaaaattttgtcgttattgtcgcaagcataccacccataatgaaataaagaaataggagcatcgtgtgttcgatttttccaaagaacagaaagagtaagaacttcttattaaatatatagaacatagatagaatactaaatacaaatcaactcatctgattttagcccgatattatttcatatgtatagagaggtttttatttttatatattgattttttatatttttatatagtatttcccggcgccctcgagatncctncacatggcggcgtccgagcagtatcagaggcccaaacaaannnnnnnnnnnnnnnnnnnnnnccnnnnnnncnnnnnnnnnnnnnnnnnnnnnnnnnnnnnnnnnnnnnnnnnnnnnnnnnnnnnnnnnnnnnnnnnnnnnnnnnnnnnnnnnnnnnnnnnnnnnnnnnnnnnnnnnnnnnnnnnnnnnnnnnnaataggtataagaattagttagcgatccaaaaggaaaggaggttcaggcagggcaaatgtagaatccgagtttttggaatgatatgtgtgttgaaagggt

SEQ ID NO: 84563 - DNA, 694 bp, Zea mays
  Clone ID: MRT4577_177131C.1
gccatcggcatcaagcacgacaagccgctggaggccgcgtacagcttcgacggccagccgttcgagcgcgtgcaggtcgcggacaagggcgagaagcagggcgccaggaagacggtggtgtaccacctggcctcgagctcggacgccaggggcgtggcgctgggcaacgccggcgaggccgagttcaggaaggagaacgcgacgggactgttcgaggtggaggtggcggtcaccggcaagttcaagtacacgctgcgcaagaccaagtgcaagatcgaggccacctgccccctcaaactgcagctcgccacgccgggggcggcgacgacgtcgtccgtcgtgttccagaaggttgactgcgaggtcgccaaatccgacgacaagtactgctagagatgatgatgggtttgcaaatgtcattgatttggagagatgatgtgttgtgttttgctcatgcatgtccccctcttgttggtgctttgttgcagttgagttcaagtgtgtgggtgtgtttcgcccgtcagattattcgttgttttcaatggccaatgtttgaacgagatgagtagtccccccctgaggcttgaacaatgcagcaatttaccagacaaactttcttgccgcgaacaaacctagtggttattgtaatgagattccaggatgttgacaatggacagatctcttctatttttcc

SEQ ID NO: 84564 - DNA, 603 bp, Zea mays
  Clone ID: MRT4577_177132C.1
cctggcttcggcatcatcggctggtttcccattccttccttccttccttccttccttccacacgagagcctgccttttcccgatccgcatcgtcatcaaatgggccatcttttcctcctcctggtagccctcctcctgctcacctccacgcgtgccgccgccgccgtccacgccagagcttcggtcattgaggtcagtcggcagtggcaacagccagatggttacggaggcgagcttcgctggcatcagaggcgtgatcggatccaggccgccgacctgcgaggggaggtgcaggtcctgtggccattgcgaggcagtgcaagtgcccgtatctccgcagcagcttcagaggaggaagaaggagggtctcggccttggcagagctgctgctgctgccgccgccgccgccaccggtggtggaagagcaagagcaatgccggcctcctactacgaccactccaactacaagcccctgagctggcgatgcaagtgtgggcggcacatcctggacccttgaaagatgaaacgccggcgctggtcgatcggaaccaagtctctgcgcttgtggatataatgtactaatagtacagggatctcttttgg

SEQ ID NO: 84565 - DNA, 1797 bp, Zea mays
  Clone ID: MRT4577_177133C.1
atgagaatggaagcgccacggtcgcagaaaaaggtacaaaggcttactggatgcatgggagctctgagcaggttcatatcaaggataggcgagagaggattgccattttacaaattgctcaagaaggtggacaagtttcagtggaacatggaggcacaagaggctctagaggcactgaagaagttcttgaccacaccaccagtactcaagccgccgagccgagctacgcctggtcagccgacaagaagatctgctcctatatatctcctgcacgactcacatggatttccgataggtgacattctccacaacaaagaagctattggaaggatagccaagtgggcacgcgagctcggggctcacgacatagagttttggccccgcacggcgataaaaactcaggcactggtcgacttcatatcagaatggactgagcaccaggtcctggatagcctagaagttgttgaagtgtggagaatgtactttgatagatcactaaagctgcaaggagcgggtgcagggattctctttattgctcccggaggtgaacaactcaagtacgcactccagctgttgtttccagcatccaataatgcagcagaatatgaagcactggtccatgggctgagcatcacggtatcactcggtatcaagaagctgatggtatatgacgactcgctagtggtcataagccaaataaacaaagattgggactgcttgaccgacttaatgggcaaatactgtgcagctgtgcgaaaactagaagacaagttcgaaggattggaattccatcacgtggaaagggatcgcaatgcaacagtagatgcattgtcgaagctggggtccagtcgggcccaggctccacctgggatctttgtccaagaaatatcacaaccaagcatcatcacagaccagatggaagaatgcaatgccctgagtcagccagagacagaccccaatgactggagagagcatatcatcagaagaggtgcgggaggagtcttcatgaaatgcatccactcggccaccgggagacaattcttagatgaaattcatgctggacactgtggtgtgcaagctgcatcaagaactctagagggaaaggctttcagatccggtttctactggccaactgcaaagattgacgctgccgatttagtccagaagtgcgaggcatgccaattcttgtcgaagcaacaacacttgttcgcgcagcagctgcagaccattcctgtaacctgcttagagttcttcgatttctgcgagcaaaggagcatccatatcaagtacgcatcagaggcacatccaagagcaaatgaccagcccagtcgagctctgcatggaaatatcccgttcttcatggtgtatgggtcggaggcagtgctgcctgtcgatctgatctttggggcgcctaggttgaccttcgaaagcatagctgaggcagaggcaatcaggctagaggacattgatgtgctggaagaagaacgattgaacatggtaattcagtcggccaggtaccagcagaccttgaggcgctatcacgataaagttgtgcagcaccgatcctttgtagtgggagacttggtcctccgccgagttataacgggggagggacgacacaagttgtcaccaccatggaaaggaccgttcatcgtagcagaggtcacacgaccgggatcctatcggcttactcagatggacggcacagaagtggggaactcgtggaacattgagcacctcagaaagttctatccttacgatgcctcaaaagtctcgaaggaaaattgtactctgtaa

SEQ ID NO: 84566 - DNA, 273 bp, Zea mays
  Clone ID: MRT4577_177134C.1
aagaatgtgactcgattggcatcccagcactcagttcgtcgttaaaactctctcttggtagaatcaaacagagctttgtattgtgagttatttgcatattttgtccattattttgttgtctacttgtctcgtcttatttttgtattcaaaacattgtatgcccaattcatgcgtgcttcattactaaactgatcattttgtactgatcacaggactgactcccggttgcctgacatgccaattatttatggtagggccccccccacatggtta

SEQ ID NO: 84567 - DNA, 275 bp, Zea mays
  unsure (1)..(275): unsure at all n locations
  Clone ID: MRT4577_177135C.1
ctggaatttcttttgagcgtggncttgggcgagggcccaatgactgcaccaaagatagggctggcgtttgttgaaacaagggtgataaaggtatgttgcttgctgcgattgcttgttggagcctatagggttgaagagctgggttttcactttttgaatctttttttgatggaaggnatgggggatgaggggaagctatatgttttttttttcaangagggaaaanngncgcgnnaacaacacaggcggggggagcaaggagccccccccgggaa

SEQ ID NO: 84568 - DNA, 1665 bp, Zea mays
  unsure (1)..(1665): unsure at all n locations
  Clone ID: MRT4577_177136C.1
gattcttcctcttccccacacctaaaagatccgaatctagggacgaccgggttcctccaccccaggattctcgtggcgacctcgcaacaaccttgctcttcgcatcttttcagttgccgaatctctctcgccttctctgcttcaggctatagtcagtctgttcttggtgataggtttagtcacagtaactcttctactatcgtttgcttgctcctccgatttgcgccgagaagcaaccgctatagttttcagcggtttcttttgttccacttgatgttgctttcgcttaaagggcggttccttcctccatttgcctgccaatccacttttgacgagacagatatttattggatctagttccggaagaagataagattttcctcacagattatcctttttgctttgctctattctctttgattttgtcagctttgcgcccccaattttcaaccggagcaagacgacccgagcattctttgatttctttcccccacaacggccatgtcgctgagccgattctcgcagtggatatggccggggagcagagccagaaaccgtagaggccgcgaccgcgagccaccggcgtggagcagcacggccgtgacgaaaggcctcttcccggactccccgtccgggtttcgggagccagacgccggcgtcgggcgcacgggcatgatcagccggcgcggcggccgcgcggaggacagggtcgacagcgagcacggcatggttatcgtgcagtccgacggcgacggctgcctgtctgactcggactccgacgcctccgactggtccatcggctggttggagccgctcgcgccggatctccatagggacgtggactccgagggcagcttcgccgtcctcgtgccgtgctatcgacgcggccgcgttgaccgacctgcccgacctgatggtaggttccctggtcctggtggtgtccccgcccacggcggccctgctgataacaggacttctgtggagcagtgggtgtcttcccttcagaactgatttctccagttccattcttagctggcttcaatgtataatacagtattgtttcattcctcatgtgtgggaatagatgaagagaggaaacccaaaagggaaaaggaagaggacagaatcacagaacagaacattagcaatggattatatataaaaaaaacaacaacggatgggtcatgggtgcatcattcttcctaaggttccaaggctaccttattcttgcagagtaagaccatcgtgataaccttgatttgtgattggtatgaaatgtcattgacacttttgacgatggagcaatggattgatggcctcattatcccattttcttctaaagtctagactacctgtatatacaatcattatgtcattggcatgttctttcttctgcattcatgaataactggaactgctcttatggattccacgtatcttttgtatgaagattatttagtttttgtcaaaaaaaaaaaaaaaaaaaaaaaaaaataaaaaaaaaacaaaaaaanaaanaanaaataanaaaaaaaaaaaaaaaaatttaanaaaaaaattaaaaaataaaaataataaattataaaaaaagggggggcccttttaaagaaacaaaatttactaacgcctgcatgcaagggaaaagtttttttttggggcccccaa

SEQ ID NO: 84569 - DNA, 1549 bp, Zea mays
  Clone ID: MRT4577_177137C.1
ggtggattcattagagaactgcgtggaaaaaccagctggattcaaatgtgaatgtcctagttgtgacgaggcacgtgatctaaacgaacaaagacggcatgaaaattggcaaatcaaggtctgcaaaagaatatctgctgagacaaattttcctaacgaggagatcattaaattgtatctaagcgataacaatctggttgaaggtaacaaaaagaagtatggtccaacacattagagaacaacattatgcttatttaagtgcttattgagttgtagtttttttctttggtcaaggttccaaattagcatttgtttatagtaaaaatctaaatttttaacctgtttgcagaaaagggtgttcccttgcttagttggagtaagcctgatgttgaagctttggttgacttattaagttataagcagaattgggagccatcttatattcgccaaagcatgcttcctatgttatcaaccatatatttaagagaggtggcatcttcttcgtctacaccattgcttctttgtgatcagtatgagtttgattcaattgagcggactaaaataaggcacggtcacccttattacttggtgaaatggaagagagctacccgtggtatgaattctaatatgtctagcaagaagccagtaacggagggagagacaagtagcgaggtagtggtgttggatgacgatgacaatgaggatacagtggtttgcgagtctccagagttattagatgaacctgatgttccacaagtgcttatggatgatggctgttgctttctattgacggatgaagacattcaacttgttggtgctgcttttcctaaggaaacagcaaggtttcaggaagaacagaggctgaaagaagcaagatcaagatcacggaaatccaaatcaagcttagcagacagtgcgtgcaagacacctgaaggcccgagacctagcggggtgcagcttagcatcacagagttctaccgctcgaagaaagcgcagaacgtagaatctgggaagaagccggcgggagaagggcacgccgcgagggaaggctcgagaaaatcgtccgacagggacctcgacaagagcctgccgaagtctgttcggcgccgcctcctcttcgattgctgaggactaggtagcctggcttttttttggtgagcactgcactgtaatcttggtgccactgctgtagatgacctagggaatgccttaacctattttagccggtgtagattgcgcgcggcccattttgtacagggaacagagcatcgtctttgtctaagaggaaatgaagcaggtcttagttcggaatgatcatctgaacctcatcttctttgtcatagtttcacaagtgcttgggaactcagcttcgattctaggaatgggatgcgtgccgctgctagagcaattgctttttttttttatgtctgcttttgtgccggacaatagctgacagaattgatgtgatactacagtatgcacaacttttactcccttagttccaaatttagtttcaaaaattatgagaaaaaaaaaaaaaaaaattatg

SEQ ID NO: 84570 - DNA, 832 bp, Zea mays
  Clone ID: MRT4577_177138C.1
cgattgggaccctcgaggccggccgggaatggattcaacgtgaatgtcctagttgtgacgaggttggatttatattcatttaattatccaaatcctgttgattctgatgccttacagcacgtgagctaaaggaacaaagacgacatgaaaattggcaaatcaaggtctgcaagagaatagctgctgagacaaaatttcctaacgacgagatcattaaattgtatctaagtgataacaatctggttgaagaaaagggtgttcccttgcttacttggaataaacctgatgttgaagctttggttgacttattaagttacaagcagaattgggaaccatcttatattcgccaaagcatgctccctatgttatcaaccatatacttaagagaggtggcatcatctccatctacaccgttgctcctttgcgaccaatatgaatttgattcaattcaacggattaagataaagcacggtcacccgtattacttggtaaaatggaagagagctacccgtggtatgaattctattatgtctagcaacaagccagtaatggagggagagacaagtagcgaggtagtggtgttggatgaagacgacgatttggatgcagtggtttgcgagtctcttgagttattagacgaacctgatgttccacaagtgcttgttgatgatggctgctgctttgtattgacggatgaagacattcaacttgttggtgctgcttatcctaaggaaacagcaaggtttcaggaagaacagaggctgaaagaagcaagatcaagatcacggaaatccaaatcaagctttagcagacagtgcgtgcaagacacctg

SEQ ID NO: 84571 - DNA, 278 bp, Zea mays
  Clone ID: MRT4577_177139C.1
cggctcgagcagtgagcgatgcacgcacctgatggatgactcaaatgaaccatgctttctttctcctgtctgtggtttcgatcggtgcacgtgctctgccagcttcctcggcgccgtcgacgacaccgcctgcttcggcatcgccaacatggacctcacggcggcctccgccgacgccgccgccggcaaatcggatggcgtggacacgagcgccttcttcgcccacaacgaccaccgcggcgccctgccgatgcgccaagacgagcagcagccagtgt

SEQ ID NO: 84572 - DNA, 328 bp, Zea mays
  Clone ID: MRT4577_177140C.1
gttgactgcaggaaaaccttgttttcataacaaaaaggcttacgaacagagacgcccgatgtcctgcttatgacgcgccccatgaagagcatgcgcatagaccccctgctgggtcaccttccaaccctgactagtctagcaccgtacgctattttataggtgttgatgcctctgctcattataatactgctggctcttgtccatgaccaggcgtttgtcaagccagtcttgacatccttacaatgcggtagcgtacgactgcagggtcctcaggctataacaagccatctaacaaagacgacaacagttacgactaggtaaacaaaat

SEQ ID NO: 84573 - DNA, 330 bp, Zea mays
  Clone ID: MRT4577_177141C.1
tttttctttctcctttctctctttcctcttcttttacacccttccttcttagggtctaagacccccctgccaaaaatcactacctctccaccttcccttctcccccctctcttctactcatcaatttcttctcttccaccttcatctctatgcactactttatcttctatcatcctaccttctaaaacttttacctcatcacctacaatatcatatcttcttcttattcttaacccctcatcccacattccctaaaccaacttcaacaatacttcacctcatccattctttattataaataccttcacccactctttctaaatctttttt

SEQ ID NO: 84574 - DNA, 297 bp, Zea mays
  Clone ID: MRT4577_177142C.1
tgctcgcttcttcacgcgtgcagcttcctgcagcccaccgcccacgcttcctcatctttcttctaccagcgctcggcttttagccaccgaagttggccgatcgtcgaccctgcctggacctccacctccggccactgtcttggtctttccctgctctggatccatggcaactagatccgcccagctgagttcgtcggacctctggtctttgcctccccacgcgccatggttgttggaagctccatcagccatcccgccgaatgtgcgacctcttcagctcgccggtgctccctctgc

SEQ ID NO: 84575 - DNA, 376 bp, Zea mays
  Clone ID: MRT4577_177143C.1
cctcactaacatattatagcactagctatcactatactgataaccaccgtccgacgtcgacaaccgtagcaaaaagacaaggacatccccaccgcccagaaataatggtccaaatatgacgatgtggacgctggccttggtgaccctgctgaaggaggacaaggagaccaccgcggccaccgtctacgagtgctacgaccactaacaatcgctgttccaacggcacgaaataccccggctgcaccaagacgtgcaaccacctcgtgatcttcctcgtaacagggatgcgatgccgccagagccccgccggcttgatcacccaccgcattcatcgcatcagctcgaaataatcgctgctgcgccatcaacctcacat

SEQ ID NO: 84576 - DNA, 1818 bp, Zea mays
  unsure (1)..(1818): unsure at all n locations
  Clone ID: MRT4577_177144C.1
cgggnaaaaaaaaaaaaaaaaaaaaaaaaaaaaaaaagccggggcgcgtgctccttgctgctgttctgctgactggtctcaccatctcatctcatcccaccaccaccaccaccaccaccaccaccaccatctttaggataagatagcaaatatatggccatcatactcgtacgagcagcgtcgccggggctctccgccgccgacagcatcagccaccaggggactctccagtgctccaccctgctcaagacgaagaggccggcggcgcgccggtggatgccctgctcgctccttggcctccacccgtgggaggctggccgtccctcccccgccgtctactccagcctcgccgtcaacccggcgggagaggccgtcgtctcgtccgagcagaaggtctacgacgtcgtgctcaagcaggccgcattgctcaaacgccagctgcgcacgccggtcctcgacgccaggccccaggacatggacatgccacgcaacgggctcaaggaagcctacgaccgctgcggcgagatctgtgaggagtatgccaagacgttttacctcggaactatgttgatgacagaggagcggcgccgcgccatatgggccatctatgtgtggtgtaggaggacagatgagcttgtagatgggccaaacgccaactacattacaccaacagctttggaccggtgggagaagagacttgaggatctgttcacgggacgtccttacgacatgcttgatgccgctctctctgataccatctcaaggttccccatagacattcagccattcagggacatgattgaagggatgaggagtgatcttaggaagacaaggtataacaacttcgacgagctctacatgtactgctactatgttgctggaactgtcgggttaatgagcgtacctgtgatgggcatcgcaaccgagtctaaagcaacaactgaaagcgtatacagtgctgccttggctctgggaattgcgaaccaactcacgaacatactccgggatgttggagaggatgctagaagaggaaggatatatttaccacaagatgagcttgcacaggcagggctctctgatgaggacatcttcaaaggggtcgtcacgaaccggtggagaaacttcatgaagaggcagatcaagagggccaggatgttttttgaggaggcagagagaggggtaaatgagctctcacaggctagcagatggccagtatgggcttccctgttgttgtacaggcagatcctggatgagatcgaagccaacgactacaacaacttcacgaagagggcgtatgttggtaaagggaagaagttgctagcacttcctgtggcatatggaaaatcgctactgctcccatgttcattgagaaatggccagacctagccaccagagaagctgcaatgcaaggttcaggttaggctagatagaaagttaaatggggcaacatcaggaggccttgatgaaaaacagacaacctggtgaattgttgttgggatcaggcacagaacagataagagccgcgcagccaacctagatggatacggaacattcgcctcttattcggagcaatatatgtctctcaaggaaagagcccaacatgtatactgccttctttttctcatcccagatttgggggaaaaacaatgtaaatgccaatggtatcgtaggaagattactagaagtaaatgccaatgtaaaaacagatgagttggcatttacatgataggatggtgggatcatcagactgaaaatgataggggattgtgctcccctgcgactccaactattaaacaagaaaaaaaaaagcaggcggcc

SEQ ID NO: 84577 - DNA, 352 bp, Zea mays
  Clone ID: MRT4577_177145C.1
agcctggatcctgtataccgtacagccgccgcccttttttttttttttttttcatacgaaatagggccaagatctacaaatccatttcaaatcatcctataactcacacaacacactgggtttattttgccgttgacctgaacaatcctgaaacaaacattaaaaaccccattccaggttaagtacatgttgaatgtagcacaactgaaactatttttacataaaatttacagctacagctaatcggtgattagtcaaggtagacactccttggtgtgaggcctctacccaatgatcatatatcttggatagtactttaggatcaaccttgcactcactattagtgcccttc

SEQ ID NO: 84578 - DNA, 416 bp, Zea mays
  Clone ID: MRT4577_177146C.1
cagccgtgcaagcctacaggctacaactagcgcttgcggcgagcgccttaacacgaccgaatgccccaattgaacggccatcccttgcaccatttaaccttccaaccaatggaacccaaccaccaccaccaccagttcttgcattaattaaccaacttacccttgtgaacccttgcaactaatttcaacaacaacttgttgcattcaacccaattgctcttgccaacctaactgtataccagcaacaacaacagctgcaacagtttatgccagtgctcagtcaactatccatggtgaaccctgccgtctacctacaactactttcatctagcccgctcgcggtgggcaatgcacctacgtacctacaacaacagttgctgcaacaaattgtaccagctctgactcaactagctgtg

SEQ ID NO: 84579 - DNA, 605 bp, Zea mays
  Clone ID: MRT4577_177147C.1
cttgatcaatttttctcttggaatatttctctttgtgcccaaacaagcgtgtttgacttagagataggaaaatgaatttgatttgcaaaaacaaaccaagtggtggcaaagagtgatccaaatatgccaaattatagtcaaaaaacaatttggtcctcaattgcattgatgttgcacttcttttggttgattttggttgtgttggcataaatcaccaaaaagggggagattgaaagggaaatgtgcctttgggccatttctataatgttttggtggttaagtgcccaacacatattctttaagtcctaatgtgccaaagattgaaaagttcaaattaaggcatgaggtatgtttctagacttagtacatttgtttttgaatactaatgaagttatctaagtgctagaaacagtgagaaaagaagaagaaaagaaatcgaaaagacttggctctgtgctgccaaacttcagctcagtctggcacaccggactgttcggtggtgcaccggacagtgtctggtgcgccaggctggtctccggtgaaaaggtcgctctcgggaaaagatcagcggcgtacggctaaaattcaccggactgtccggtgag

SEQ ID NO: 84580 - DNA, 393 bp, Zea mays
  Clone ID: MRT4577_177148C.1
aacgggaaccaagcggggggggggggggttttttcggaaaagccaaaaggggggggggaattcaaaatggggggggggggcccggggttacaaaaaaaaaaaaaaaaggggggggggaacaaaatgggtatccttaggggtacattaaaaggggggatgggggccacccagctaagggacaagccccccggagcaggaaaaaattttaccaaaccacgggccgggcaagggggcttttaaatgcaaggtttaaagggggggaaaacccccgcaggcccccagggccacgtttggggggggtaaaaaaacaaaacatgggggtaaggggtgggggggcttgaagccaaaaacacggggaacatagggctgggagagcttttgggggtggggggg

SEQ ID NO: 84581 - DNA, 128 bp, Zea mays
  Clone ID: MRT4577_177149C.1
ccgggcccaggttttgcccggtttacaaaacaagaaaaaagatttgggcccaggacaggaaaaatggggttgtctttaagaggggggaaggcaccctagaaaccggactgcatctaaagaagggcata

SEQ ID NO: 84582 - DNA, 301 bp, Zea mays
  Clone ID: MRT4577_17714C.1
attcggctcgagcggcacctactgccttttgcaccggctgctgtgatagcagtctaccgtattgaacatacacaagcgcaattccagccacatgcatggccacagaaccgccttgaggtctctctccactggcgtgggccattgccggctgtgcatatactattttttgctaccatgcatatccgcatgtcgacgcaagggctctaatacatgacaaacaataacggatctgcagcacgcatattactacaatctctatagaaggcattgtgcacgccatgtaaaaagctaacaacaaggg

SEQ ID NO: 84583 - DNA, 875 bp, Zea mays
  Clone ID: MRT4577_177150C.1
agcacgcgtagtaaaaagatttggcaccactcaccggccggggtgccggccccaaccccaagcggagcccccaacgcatcaattcctctctcgtcttccctttcccctccggcgagccccttgttctcgccctccgttctacaaggtttgctcgttcatgttctaggtgctggacaccttttgcttcgcatggctcgggcgctgcacagtccctgtttcgtggctccgctgctgtggctgacgttgttactggttgccgtgtcaccggggggtgcgttctacttgcctggcagctacatgcacacatactcccaaggcgaggtgatacacgccaaggtgaactctctcacgtccatcgagacggagatgcctttcaactactacagcctaccatactgccgcccccagggcggcatcaagaagagtgctgagaatctgggtgagcttctgatgggtgaccagattgacaactccccctaccggttccatgtgaatgttaacgagtctgtcttcctctgcaccacaaaagggctcaatgagaatgacgccaagctccttaagcagcgcacccgtgatctttaccaggtcaacatgatgctagacaatctgcctgtcatgcgtttcactaagcagaacgatgtcacggtacagtggactggttttcctgttggtcactctccacccggtgcctcggatgattatatcatcaaccacttgaagtttaaggtcttggtccatgagtatgagggtagaaatgtggaaatcattggcaccggagaagaaggatctgctgtcatctcagagacggacaagaatgggatgtctgggtatcagattgttggatttcaggttgtgccttgcagcgtgaagcgtac

SEQ ID NO: 84584 - DNA, 242 bp, Zea mays
  Clone ID: MRT4577_177151C.1
gaaacccccatggaaaccttaactccaaagctccattacaaaaacggcttggaaattggaattctactaccgtttttaggctgtttaaaaatacccgaagattcccaaaaaaaaaacccaaaaaaaccccaattggatctttactccctttactgaactgggtctccttttccttgcctactacagtactactagtgggatccgtccatttgacaagacaacacccgggcccaaacggaaac

SEQ ID NO: 84585 - DNA, 178 bp, Zea mays
  Clone ID: MRT4577_177152C.1
gaatctatacgtacctgacagtagctagcgcaaatcccctaaggtgcgtctggggagactcactataaaccggcgagcagctagatggctctgacctgctaaaacggacagtcgcaccgcctcccaggaggtgaactcgaaggcagccctggcagcggagcagatgctgctggagatt

SEQ ID NO: 84586 - DNA, 634 bp, Zea mays
  Clone ID: MRT4577_177153C.1
cttaaaatcaatttaacattgcccaaagggttaacatttgggtcttagagcatttttgtttgggaaaaggtgaaatagcaggatggtcccaaataaatagataaaagggcacatgctaccagatttaaacagttaacacgataacagcaacgatcacaaacaaaacttgtgatgataaaaactaggttttgttaaagcaggcccaggatcccataatttttttttggcagccgccttggtcaccttggccccggtcgggtcctttttttccacacttttgataactccaacagcaaccgtttgctttatgtcacggacagaaaacctaccaaggggaggataccctgaaaacttttccaccaccatgggcttggtcggttttattttcaccataccagcttcaccgtttttaaggaactttggttccttttaaagctccttgccaaaccgcctgtggatcttggtaatgagctaaacaaacttgacagcaatgtgggaggtgtggcagtccagcactggggcatagccgttgccaatttgcccaggggggttcatgatgataacctgggaggtgaagttggcatcctctttggcagggtcatccttggagttggaggccacaaacccacccttg

SEQ ID NO: 84587 - DNA, 364 bp, Zea mays
  Clone ID: MRT4577_177154C.1
gtgttataaacgactactgactcgctttgagattagtggagaacgaataacatgtgtcaaccaatcacaaacattggcatgaagcaatctgcaatcccctatccgttgaacaaccaaagcctacatttggctccaatatgtaatcaggcatagacacgctgaggatggctcgaaagggttggttggttctaatcgaccactgtctttgaagaacacaggcacccgcctgcctggcctactggcgtcaggcgaccgccctcagctggtgtcgagggcctacaggaacctcaccacagaggacatgtcaatgcacatatacgggtgttcgttccaacacttgtgcatgatgaaaatcattgggttt

SEQ ID NO: 84588 - DNA, 1549 bp, Zea mays
  Clone ID: MRT4577_177155C.1
ccttagtcgtgttcttgtgcggccggtgctcccggtgctccccatcacaccaccaaacggaccaggcgaggcgtcctccaggccctagctctgtggtgtgcgcctctgcgatactgcgactgcggggcgccggtgcccgtcccatcggccgccgaacctgtgcgccccggttgcccactaggccactactgcagtctgcactctgcagataacacagaggaaggcggaagccgatggccgccgtggcaagccccgccctccggctccgcccgagagccgcctctacgtcggcgacctcctcctccgcccctcctcgctgtcgcttcggctccttctctcactcctgtttcaagtttgggaggtcatttccagttcagagagtcaatggaagcacgatgcagcatttcggtactctaaaagctcaagtttttagcagcactggcgaccatgatggacgatttcatattaagaggactatatgctttgctgctacggacaagcaggagccggtcgtttcacgttcctcagacatgccggttttgcatgaggcagaaagtggtactaaagttacccctgcatctgaaaactcctacttcgctggcagaggtgctggaaaaccaggattcatctcttttcaagaaagcagcttccgaaagacaactgtggagagcgtgccacatcctggcaaagaagcatctcgattagtttggtttattggccctactattctcgtgtctttcttggttcttccatctctttacttgcgcaaagtactctcagcagtgtttgaagattccttgttgacagattttcttatactattctttaccgaggctttattttatggaggagttgcaatttttgtcttcttgattgataaagtctggagacctttgcagcaagtagcaccaaagagttacatttggtcaaaatccagatttttccgtatttcctcagtaacaacaatggttctgagcttgataatacctcttttaacaatgggcatggtatggccctggactggaccagcagcatcagcgactcttgccccttatttggttggactggttgtacagtttgcatttgaacagtatgcacggcatcggaaatcaccttcttggccagtgattcctattatcttcaaggtatacaggctacaccaactgaacagggcagctcagctggtgacggcactcacattttctgtcagaggaacagagacaacaaatcaaaccctagccatcatgaactcattaggagcattactgactgtccttcaaattcttggcgttatctgtgtttggtccctctcaagctttctgatgaggtttcttccctcttcagacattcctgatccctgactcctagacgttttggtagaacttttggagcgtgggcatagcttcccattgtaaattggttacacggaaccagtttcacatgtttgcaatgtttagcatttctttagggcatcttgatgcaatcttcggctgagtaattggaagagaaactgacgctggaatcaaataaacagcaaattaaaaggtcc

SEQ ID NO: 84589 - DNA, 357 bp, Zea mays
  Clone ID: MRT4577_177156C.1
aggaccttttttatttttggtattcctcttccgacatacaaggatctatattattggactatatcaacgctgagatgtacacagagcgcaactatccctgaggaactgttgtgacaacactgctttgaaactccaaaggtgtaaaggaactgtaggccactcttgcacgggtaagatggtgccctggccaggcgcacggtgctaagggaaaattaacaaccgctggtgggcgaagatagtagcatgcctcacaccaacctagctggctgaatggcatggagcatggtgctgctgctgataaacaggagagtccaatgctgccagccgcatgaatggaacacattgctgtaggtaggc

SEQ ID NO: 84590 - DNA, 145 bp, Zea mays
  Clone ID: MRT4577_177157C.1
gtagagcgaaaatgtttcattctttattgcatactggaaaataatgtttgcatccatacaattactccctgtaaaccatgtgacgggcgtaatcgtgaaaatcccaacggcagtagtgcaacgttaaatttttctcattcttatg

SEQ ID NO: 84591 - DNA, 787 bp, Zea mays
  unsure (1)..(787): unsure at all n locations
  Clone ID: MRT4577_177158C.1
ataacatccatcatagttagctagcgcacagaccaataatctcttcttcacctcactagctaagcccacctagcaggtcgatcgctctgccatgcaataatggccgctcactcctcctcccagcaactgctcccgccgcaagaccaggctgcggcgctgctgctaatgaagccgggggccgggacgatcacggcgaacgtgagctgcattgaggtgatcacgtcggagatgccccgcctcaaggactccaaggccatcctgctgtcgccctcctccacgtgctgcaacatcgagctctcgatccacagccgagcgtcggcgaagacgtaccagaactacacctgtcactgcctcaacagcatgacggtccggctctactaccacaacaacatggacaacgccgccaacataccacggcaaggacatcttctcccgcgacgagcgcatccttctcaccgtcgactgcaccaagatgcgactgcatacagataggaaccatagtcgtaggcaccctcgctcaggttcatgacagcctaccggtgcatcatcagcatgccgctcttgccggacaatagacgtgctagctacaacttggcagagcaatgcctgtacacgtgaattaaatttctatcatgcgcacctatattatgtgcttctataactagatgctgcgntacctgcaacttgcgctgtcgtaccctcatatttacactttttaagacttgcgctcagagactttgccatcgagatatgagagattgttaagactgaaaacaaaaaacaaaag

SEQ ID NO: 84592 - DNA, 215 bp, Zea mays
  Clone ID: MRT4577_177159C.1
ttgggattcttttgagaggggcggcccttttttttttttttttttgagaaaaagccgcagaggaagaatcaattcacatacatggagggccttctgcaagttacagggacaccgaccacggagctctaaaggccaaacacttgtattgggccaaaactacaaggcctaccgggctacccgttctaggccagaggcttggagattccatagaccac

SEQ ID NO: 84593 - DNA, 305 bp, Zea mays
  Clone ID: MRT4577_17715C.1
cgcccgcaggctgcaaaagctcattccctagcagtagacgacgaagaagcagccagcgcggaatgcatctggcagcagctgtgaccagttcagaaatggactaccagcacacaggcctaggcacaagacgccccgacctggagcaagccctggagaagacgaaagccaacatcaagtgggtgaaggagaacaaggaggtggtgctccagtggttcacagaaaacagcaaatagtccccagaccttgaagtcacccggcccccaagcaaggtgcccacatgtgtccatcccagcggctggtgcagg

SEQ ID NO: 84594 - DNA, 642 bp, Zea mays
  Clone ID: MRT4577_177160C.1
tgccaagctttattgagtacaatgtaagatttggtgacccagaatgccaggttctgatgatgcgattagaatctgatctggcacaagttctgttatccgcttgcaaaggagagttgagcaatgtttcactgacctggtctcctgaaatggctatggtggttgtgatggcaagccagggataccctggctcttataagaaggggaccgtaataaaaaacgtggacaaggctgagcgagtgtctccagctgtcaagatattccatgctgggacagcagtagatggagatggcaatcttgttgccgttggagggagagtccttggcttcactgccaagggcaaggacatcgaggaagcaagggcaagagcgtacggtgcggtagacgctatcgagtgggcagaagggttctgcaggcgtgacattggttggagagcactgaggcagaagcaagtggctaaccagtaaccagtagctattccatgaccatgagatttccctagagaaccgcaactacggtgagcctgtactgtttacaagtaataaaaagggaaacggtgcaacacccattgtttttggttgtggaaagacaagtattgctgatcaaacagtagttaacacctgttgatttcaagcatgattcggt

SEQ ID NO: 84595 - DNA, 354 bp, Zea mays
  Clone ID: MRT4577_177161C.1
atggccgcgcacgccgcaacattcgcctccgccctgaagaagtcgctgtcgtcgctgccgccacagcggcgggagaaggaggaggagcaagggtcgctggcggcgatcaaggctatggacgccgatgtggctgttcaggaggaggaagaggggaggacgatggtggtaggcgtgcgcgcgaacgccgagagcagggcgctggtcaccggggtgctcgtcaatgtggccacgactatagatggccaaacgggccggcacggtccgacccggcacgacccgccaggcccggctacgaagcgtgtcgtgcccagatgggccggcgtgccgctgccgcggcccaggcacggctcgtga

SEQ ID NO: 84596 - DNA, 159 bp, Zea mays
  Clone ID: MRT4577_177162C.1
ggcaacgggctatggcattcttttgaacagaattctttagcattttcacgcactgaagcgcttatgtcctcatctggtaccacaacaggctaccgttgtgtcctgaagcaagatattcctagctattattggcatttcacggttaggaacagaaaaccc

SEQ ID NO: 84597 - DNA, 737 bp, Zea mays
  Clone ID: MRT4577_177163C.1
gatgatgcgattagaatctgatctggcacaagttctgttatctgcttgcaaaggagagttgagcaatgtttcactgacctggtctcctgaaatggctatggtggttgtgatggcaagccagggataccctgggctcttataagaaggggaccgtaataaaaaacgtggacaaggctgagcgagtgtctccagctgtcaagatattccatgctgggacagcagtagatggtgatggcaatcttgttgccgctggagggagagtccttggcttcactgccaagggcaaggacatcgaggaagcaagggcaagagcgcacggtgcggtagacgctatcgagtgggtagaagggttctgcaggcgtgacattggttggagagcactgaggcagaagcaagtggctaaccagtagctattccatgaccatgagatttccccagagaaccgcaactacggtgagcctgtactgtttagggcttgttcggttatctctcaatccatgtggattgagtgggattgaatgggtttgaatcccaaacaagtcaaatttctttttaattttttccaatcccacccaatccatgtgtattgggaataacggaacaagcccttacaagtaataaaaagggaaacggtgcaacccccattgtttttggttgtggaaagacaagtattgctgatcaaacagtagttaacacctgttgatttcaaaaaaaaaaaaaaaaaggcccctagggcc

SEQ ID NO: 84598 - DNA, 262 bp, Zea mays
  Clone ID: MRT4577_177164C.1
aaaataaatcaaaaacaacaaaccataattttttatttttttaataaaaaataaaaaacccagatatcttaaaaaagaattgtattacgagcattaacttacaatccaacacacgtcgttcagtacataacatatatattccaaatttaaaacatctttgccagaaacgtttcttgaggcaatggctgccttgtttggtacataaaatatcttctgcttttatacttcgacaaattggcctccttcagtatgctgttatact

SEQ ID NO: 84599 - DNA, 941 bp, Zea mays
  Clone ID: MRT4577_177165C.1
agcagtggtaacaacgcagagtacgcggggcaagtgagaatgaggatcatgctgtaaacggatctactgtacttgaggggctcaaaagtctgcgcttaacatcagatagacaacctaaggcagaatctattgtaaacagtgaaagaccaccatataggagtacatctgacagccctgcaaaatctagagattgcccagacaataatagtgctggccactacgatgagctagagtcatatatagccgcatttgcagaaaggtcactatcacaagccaggcagatggttgaccaagccatgcaggcgaactctggaggtagtgaggatgaaaaggtatgcacttcaaatcaagtggcaggttgtgcaggcccaggttctgaacctgcccgtggcgcccaacttccttctgacctgatatcgaacggcatcgccacggttctttcaatcaagagccttagcgactcgcgacatccgtttgctaacgtagcaggcgtcttggatcacgcttgctccatgctgcgtccaagctgtccgcagaacctcgctttgtacgatcaaataaagagagacatcggtatcataaagacccagatatttgcacttatgccaacagcattgggcaattgcagccctcctgtcccgcccatgtaactgggccctgagcaagatagactcccgctgccttcatgcaggccctgcagtagtacacgcttcttcctttgctgtgagttcaaaacgcagcgaacttgacgttatggaggaagtcctatgtatatacctcgatggcttaatagtttataggtatacacatattcaggatagttgacatatgattttggagtgaataaagttatgtctgcagtcatttaagatgtagtgaataaagatgtatgcctgcagtcattattcttgaatgtaatgtcacaagatggtttcttgatc

SEQ ID NO: 84600 - DNA, 365 bp, Zea mays
  Clone ID: MRT4577_177166C.1
tgaagcagatgtgttggtggtatggattgaagagggatgtggctacacgtgtggctatgtgcgaggtgtgtcagaaatgttaaggccgaacaccaaagaccagctggactattatacccattaaagatacccgactggtagtggaaagagattagtatggactttattactggattgcctcgcacctcaaaaggataggattctatatgggttattgtggatagactgaccaaagtggctcatttgatttcggtcaagactacttataaaggttctcaattggtagagtatatatggctcggattgtgtctctacatagtataccgaagtggatcattttggatagaggatcacaatctacctcc

SEQ ID NO: 84601 - DNA, 199 bp, Zea mays
  Clone ID: MRT4577_177167C.1
catctatacctgatccctgacacacatccgtgtctccccaaaatgtgtcacacgcaacgagctatgaatgttctgacacacaggctaatgtttgtctacacaaaccccactatgtattgtgctgcttgcaccatcgacttcaagccctatatcctctaccttctcgccactgctctcgcacctgccaccaactacgagc

SEQ ID NO: 84602 - DNA, 360 bp, Zea mays
  Clone ID: MRT4577_177168C.1
tatattttctcctttcatttttttttttgggtggggtttttttaaactggtgcgcagtgcagcagggcacctttttctcaacgtcttttgtgaaagtaacccaaatcaagggacgacatatatgacaaaccaccggggtcaaacaaattttggcggaaatttaaatgcggggatctatatggagaggagctacccgcaaccacaggaagggaagcagtttttttcttttcttttggggggggggaacgtgaaaatgtgtatatatacactggcggaggggcacccgctttttcaccggccaacggcacgtggcgggcgtgacaactaaggaaatgtatggggagcgaacggtggagccag

SEQ ID NO: 84603 - DNA, 569 bp, Zea mays
  Clone ID: MRT4577_177169C.1
ccgtttcctccagtttcctaccttcctctcgtcccagcagccgcaagccaaaaccctagcaagcaaaccaccggagcagcggcgctcgcgcgggcggagccatggcggacgacgattacaacgaaatcgacatgggctatgaggatgagcctccagaacctgagattgaggaaggggccgaagaagagcttgagaacaacgaagatgcccctgatgatgtcataggtggagagggtgaagataaggaacaggaaaagaccaagcgtgagcgcaaaacaacaaaatatatgacgaagtatgaacgtgcgcgcattcttggtacacgagccttgcagataagcatgaatgctccagtcatggttgagcttgagggagaaactgaccctcttgaggtcccataaaataagaatcaacactgaggcctaattcatagtgaggatttggggctaatcttttctctgctctacatatagcgacttcaaccaatctttaaagatgtgtgattgtgagtttataccttagtccatccatcttatttatatgctttcacttttttagccttctgtgcc

SEQ ID NO: 84604 - DNA, 586 bp, Zea mays
  Clone ID: MRT4577_17716C.1
gatccgctggaaatatcacataggatgctcaacttctcaaattgcaacattaagtatgagctacaactggagagagcaaccagcactaccactcaaaatacacgtatctgaagatcacttaggttaggtggagcaagcggggaggcggaaaatacacattggtttgtctctcagatccatgggagaaagcgtgcatatatacataattacacagtccccccaatagctgagcaagggtacgctatcgaaggcacagcatgtggttgccacggtgcagtagcaatactacaaaaatcggcttcagcgtacttgagtgattcctcaacttgacacaaatatacttggagctttgaaataagtgaacaattttctgttttttggatgtcaagtgaacctttcatctcttggtatttctcctcctccatccccatgatgcacatgtcaaggaacttgagtcgctgctctaatccacagtttattgcttctatctcaagtatctccttctctaatcttactttcctgctcttgagattcatatggggattccttgtacaaagaagattatggagacgaaccttcagggggg

SEQ ID NO: 84605 - DNA, 708 bp, Zea mays
  Clone ID: MRT4577_177170C.1
cttttttcctcgagtttcctattttcgtctcctccccacagcagcccggcgaaaaccctagtaagcaaaccaccggagcagcggcgcttgcgcgggcggagccatggcggacgacgattacaacgaaattgacatggggtatgaggatgagcccccagaaccggagattgaggaaggagctgaagaagagcctgagaacaacgaagatgcccctgatgacgtcataggtggtgagggtgaagataaggaacaggaaaagaccaagcgtgaacgcaaaacaacaaaatacatgacgaagtacgaacgtgcgcgcatcctgggtacacgagccttgcagataagcatgaatgctccagtcatggttgagcttgagggtgaaactgaccctcttgagattgcaatgaaggagctgagagcgcgcaagatacccttcacgatcagacggtaccctacaacaagccccgcttccttcttgacacaacaacaattgcttccgttctaccagcagtttgtggctaaccccgcaacccttttacaactgcaacagttgctgccctttgtccaacttgctttgacaaacccagcagccttctaccaacaacacatcattggcggtgccctcttttagattgcttattagttgtcattcaataatgaagttttttggctgatgtatgtggcctcctagaaataggaagttatatttcc

SEQ ID NO: 84606 - DNA, 874 bp, Zea mays
  Clone ID: MRT4577_177171C.1
ttttttttttttttttgtctaatgcgtgggccttggctggcatgggctggaggcccagaaatagatgaccgcatcgtaagaaaaacaaggagtggagaggagagcccaactaaaataaaccttatcccgccggccggcctgtccactccattcagaccctcgtgacgtctccgatcgcagcgattcagcctccaatggcgcttcctcctcctcctcactcgctgccgcgcgcttccagcttcacgagcagcgccgtcacccccgagtccccacgcaggggcagccacagacccaataatacgttcgtcccaaacgcctccaccactgccgccgccgcggcgcagctctcgctgctccgcgcccacgcccgcgccggccggatgcagcccgcgcgggaggtgttcgacgcaatgccggatcgagggaggtccctcgtcgcctggaccacgctcatgtccgggtacgccacccacggcccagcctccgaggcgctcgagctgctcctctgcatgctcggccttctcgtcagaccagacgccttcgtcttctccgtcgcgctgcgcgcctgcgccgccgtggggagcctccggctcggcaggcagctccacggcgccgtcgccaagctcgggtacgtgggcgttgacctcttcgtggccaacggcctcgtcaccatgtactcgagctgccagtccctcccctgcgccgagaaggtcttcggcagtatcgcctctcctgacctggtctcgtggacctccatgctcagtgcgtacaccgagaacggacgtgacgccgaagcactggtgctgttcatggagatggcccgtggtggcgtcgcttgcgacgcttttacgctgtcggtggcgctaagggcagc

SEQ ID NO: 84607 - DNA, 334 bp, Zea mays
  unsure (1)..(334): unsure at all n locations
  Clone ID: MRT4577_177172C.1
ccgcattcgatgggcgccccaagggcccgagaagaaaccctcgcggcgaagaagcccggcggagggaggagcccccgcggccgagaaaggcgcccgcgggtaagaagctcgaaaggcggagaaaagcgggtccccgctggcaagtctcgctgccaaaggaagggcggcgagggccaagaggggcacagaagaagggcaagtaagagctgtggagaacctacaagatctacatcttcaaagtgctgaagcaggtgcacccggacattggcatctnctncaaggccatgtccatcatgaactccttcattaacgatatcttcgagaagctcgctgc

SEQ ID NO: 84608 - DNA, 225 bp, Zea mays
  unsure (1)..(225): unsure at all n locations
  Clone ID: MRT4577_177173C.1
aaaaaaacaaagacagnaggntgngcttacgntaaaatatgcgaaaccctngccatttgtcactaacccgagcgtcgatgtagcgcgccactaaggaagcgatgacccgatccttgctcacttgacaccgcatccagatcacgacacgacatgccaccaagggggnggngnnccgggccttgcccgtttgggggggtgccccgcggtgcggggnggggggggggg

SEQ ID NO: 84609 - DNA, 645 bp, Zea mays
  unsure (1)..(645): unsure at all n locations
  Clone ID: MRT4577_177174C.1
ttacatcagtagaggttactcagctccactatgttaagaattcttgaacgtgagaacagtttccannnnnnggtactattggataaactttaaaatcatacagtactcagccatcacacgttctatgcttctgtgttctgtatgtgtgccatgccaaagaataaaagaaccaagatagagacactgccacataacatcctgtaggcgtgctgtgggcatactgttttcttaatcagatcacaacaattcagtgaggttcgacatgttcatcacagaatgccagactggtaaattcagtggataaggttaacaccatcatccataatagaaaacttctccttcattttgaggcaaggttgcacccactcagaagtatgcaaaggaagcacctcactttccagcacagagggaacttctgcttctacttgaaggtttatcctgtgtgtgacaaaagaatgagtactcatcaataaagattgaacctcagtgtcaatttatcagacctgccatattgatggcatatattcccgattagagagnnnnnnnnnnnnnnnnnnnnnnnnntatcccaaaccgctaggatcctccagcatgtattttgaagaatcccgattgaagtcatttgctgttgtggtgccttcccca

SEQ ID NO: 84610 - DNA, 113 bp, Zea mays
  Clone ID: MRT4577_177175C.1
tgctacgcgtgccaggtgccgagccacatgcgcgtacgggtactgggcaggcggatctccagcacccacttgccccagtgccactgccgaacgccggggctcagctacgtggt

SEQ ID NO: 84611 - DNA, 385 bp, Zea mays
  Clone ID: MRT4577_177176C.1
acttatatgatgtttgtctatgattatctgttacattaacacttaattccttgttattcttttttctttcttttcccacaaacagggaacgaggggcattttttgggggcagatttaacatccccatatccaattaaagggggggaaaaggtgggttacaacccgacctttttggcacttttgggcctgtttacaatgcattctttagaaaaaaaaaacctggaaaaccctctgccgagggccatttgaacaccctataagccgcaacaaaaaatccgataattgaattgtggggaactttggaaacccctttttacatggggccagaaacaccatgcgccaaatcttccacaaaaattgagagatcaaattctttttccccacc

SEQ ID NO: 84612 - DNA, 256 bp, Zea mays
  Clone ID: MRT4577_177177C.1
cccacgcgtccggcccaggctcccatcggccaaggactggtgtagtggtgtggagtgtggacgtgtgtgtgtaagtgtaactgtgtctgactctatatgaggttggcaggtgcaagttgctatccaccgtcctcgttggctcgttgagacttgagaatactttgaggttgcaatttcaaactgcactatgatgttgtaaactgggagttaagtattacgtgtactgttaaactcaaaaaataaaaatttataaaat

SEQ ID NO: 84613 - DNA, 246 bp, Zea mays
  Clone ID: MRT4577_177178C.1
gacggggatcatttaatgaatatggggcaaccacaccaaccgataaagacgctagtgtttccaacgcccaagctaatcgggatgcctctacaggaccaggcgctgatcccaggggacacacggtccccggaacctctgcaattacaagcgttgctgataagaacgaacaaacagcttgctctactacaaccagtgctggccatcctagcacccaaacaggaccaggcgtagctgctaacagcaccc

SEQ ID NO: 84614 - DNA, 177 bp, Zea mays
  Clone ID: MRT4577_177179C.1
atggctgccgttgcagcagctgctcctccactcggaggcggcccagccccacgagggttagtcacaaatggtatgcatcgatcggtaggaacatcgaagttgtacatctttaacgagtgggcgagatttagaatactgatcgtgctcattgacgcgcactacaacctcactaattaa

SEQ ID NO: 84615 - DNA, 265 bp, Zea mays
  Clone ID: MRT4577_17717C.1
aaaacaggaacacattgaaacaggggtggtaaaaaactaataaccatttttgccttacattcgaggttccaaaaaaaaaattaagttttaatagcatcacggtttaaacgaaagtaataattttttttgaccaggcaaacattgccattataaattatttgttcacccgacaactgcaggggttgcaacaagacgagatattttaagtttccacgggggaaccaaaaagcaagcacagcacccggcaaatagatttttttttttt

SEQ ID NO: 84616 - DNA, 461 bp, Zea mays
  Clone ID: MRT4577_177180C.1
cgattggcaagggcaagctcaaaaatggataaccccgctaaatttcttcagatgggaactctatgaagtcctgaaacctgatttggcttacaccctctgagagactgtgcttgctacctgcacgcataatccacgtgaatctgaatctaacacgcataatattgtgaacgaatccaagggagagtcttacacgtttcacatagcataggaattatcaggcaatatacttgaccgcacggctgataattaggctcagtgctgtaaaaatacacagtatatataagacgccattttcaatctacctgggatgccagtgaatgccgctgttctaaaagttggatgcctggacttatgacacttgttggaccccagactgcaccctgctgcccttgtggtctataaatgcttttatggaacactggttaagcccacctacactaactccaagtattgaagtgcta

SEQ ID NO: 84617 - DNA, 1344 bp, Zea mays
  Clone ID: MRT4577_177181C.1
ctctcttacttcacaatctgggcccggcgtgggggaggattcgccgatggggacctcgaggggagaaaccgtcgccagttcggctgtcgaaccggaactgaagcaacatttgttctgtggaaattgggatggctctggctagggtttcaccgtcttccttagcgaaccttataccgcccctgctccaatccttcttccgccctttctcctcggactttcccatccgcaattcccgccgaagaagctcccccgttgctgccgccttctctcttacttcacaatctgcccacgctgcgagggaggggctggtcatggaggcgcccaggccgagctccaggtatccttggaagcccacgtgtttgtactacacccagggcaaatgcacaatgatgaatgatgcaatgcatctggagaagttcagtcacaatttgaagatggaccttccagtgaatgcatcagccacagataaatccaagcctcagaaactggaatatttattgattcttgatttggagggtagggttgaaatccttgagttcccagtcatgatgattgatgctcaaaacagagaatttgttgattcatttcataggtttgtgcgtccaactgcaatgagtgagcaaagaacaacagaatacatagaagggaaatatggaaaatttggggttgaccgtgtttggcatgacactgctacccctttcaagcaagtgctgcaagagtttgaggactggcttggaaatcacaacctgtggaaaaaggagcaaggtggatcactcaaccgtggagcatttgttacttgtggaaactgggatttgaagacaaaggtccctgagcagtgcaaggtttcaaaaataaatttacctacctattttatggaatggattaacttgaaggatatctacctcaacttctataacagaagggcaactggaatgatgacaatgatgagagaacttcaactgccaattgttggaaaccaccatctcgggatagacgattcaaaaaatatcgcaagagtggttcagcgcatgcttgctgatggtgctgtgattcaaatcactgctaagagacagtcagctactggcgatgtgagatttcttttcaaggaccgaattaggtgattgaaaagtgacacccccaattcatagtggtgctgatattagttgcctgaaaggcatttcaggattttggagcaaagatagagcgactgaacgctcaatcaacatacaaatatgtctagaaattgtgatgctttaaccaaacaagatcaaattactgtccccccaagctcaaaaaaaaaaaaaaaaaaaaccgaaaaaaactcgaggggggggcgcgtgtacc

SEQ ID NO: 84618 - DNA, 200 bp, Zea mays
  Clone ID: MRT4577_177182C.1
ctacgcgtagacggtctcctgtgcagattcaggtgttaaccttatggactgctttcatgcgacggcatacttctaatctcgctggatctaaacgcaatatagagacctatattctacaacttcgtatctgataaaaacctttcgttaatcaatttaaggacttggcataagatcctccaatatcatgcatgacaagtact

SEQ ID NO: 84619 - DNA, 162 bp, Zea mays
  Clone ID: MRT4577_177183C.1
cttataataatcataacgacaactagcagcttaatactaccatattgtaatgaacattcaacctccacaagatcattgttaaatgctcctacagggctcacaggagtcccagtcatacatgactagggctgtcccttgttgtcctcctattcccactccacg

SEQ ID NO: 84620 - DNA, 308 bp, Zea mays
  Clone ID: MRT4577_177184C.1
cgcacacaatgcgatcaggtggtaagcaaacaacaacgaacgaacgccatgttggcagcctgcttggacgcacacaaaccctacctgatcgctattgccatacagatcataggcgccagaatgttcgtaagctaaaaggcagactttctcgaatgctggaccgcggtggcacacacgctttaaatgatggcctacgactccggtcatgcttgggccacagcgacggcccacacaaggtagactacatcgagccatgtctgatacagctagttgtgatggtctatctgctcgccctgatcgggaacaca

SEQ ID NO: 84621 - DNA, 365 bp, Zea mays
  Clone ID: MRT4577_177185C.1
tattgttatccatttgaatatggagtttttaatttatagagctagaacaaacaatctcccgggacacaccatgttatattcctatgagcttgagatgcaaattggtactgtttcagctcacatggtcatttagcatattttcaaaattcaaactaactagaccaacctaggaggtttattatgttttctatcaatgtatatcttttctgttcgttcgtactttacctttcatttttccctatgattgctgattggtttttaactttgctgttgaccagctatatggcaaatacccaagcgtgcatgtatatgcatatggaccacttccttgtgtggactttgttatagcggatgcatgttcgcat

SEQ ID NO: 84622 - DNA, 474 bp, Zea mays
  Clone ID: MRT4577_177186C.1
aaaaaaccacacgccccaaaaaaaacaaccggcccgagaaaaacacccgaaggggagggccaacaccaacggggggggcccacaacaataaaccgcccccgccaacaaaacccccccccccccaaaacccccccccgccccccccaccaaccggggcgggccaacccacgggcgggcgccaccaaccgagccgggcccccaaccgggcccggccgaggcccgaaccaagccggaacccgggccaaaggggaatcccgtcccaaatccaaacccacacccagcccgacccaaaaaacgaaagggcgggggaaccgaaagagagagcgggcccccaaaaaggggggagcccacacggaccccgggccggccacaaacccggacccacccgggaaaacaaggagaccgcccccccccaggaaggggccgacgcccgttggggggcggctccccttccgggcgcactaacaccgcccc

SEQ ID NO: 84623 - DNA, 701 bp, Zea mays
  Clone ID: MRT4577_177187C.1
atcccatccctccctcctcttgcgcatttccaccacctcgcaccaggctccactcctctccttcccttccctccccctttcgctcccctcctcgctcgcctcgcttctcgccgagccacacgaccaattcccccgccccccgcgcgcccagatcgccgccattcccttccccgccctgccgcgacgatcccgctgccaccgcaccttctccctcccgtcgtcctcccctccccgcagctggcggtcggtcggtcggacggaggaagccacagccggcggccagagagcgccgcagcgtgcccgcggatgggctggtaggcggcggcggcggtgactgtgttagcggcggcggcggtggcagccatgtatttcgccaagctcgatgactcgcccatgttccggacgcagatacaatcacttgaggagagtgctgaattgctgagagagagatgtttgaagttccataaaggttgccgtaagtatactgaaggactaggggaagcatacgatggagatattgcatttgccagctcacttgaaacatttggaggaggccacaatgatccaatgagtgtcgcttttggtgggcctgtaatgaccaaatttacaattgccttaagagaaaatggagcatacaaggaagtcctgcgctcccaggtggagcacatgttaaaaagacagattactgaaatttggtgaca

SEQ ID NO: 84624 - DNA, 505 bp, Zea mays
  Clone ID: MRT4577_177188C.1
cttcagtcgaccaaaagtgaaactacagattatggtaacttggtggtggaccagcaggagctgataacaccaaataataatactacaagcttgaaagaagtaaatgaggatggaagctgcagtttggcttcacctaaggctgatgcttcgactcctgtgcaagctttagagaaatatgatatttcagttggcagctccctgaacaaagaagagcatacaaaggcatcttgtggagcttccatacaagctgaaggtgccagacaaatcaaatacacattcaatcgcagaaagcgcaagggtatgtctattgacagcacccctcagcgtgctgtccctgaggagagcagtgacctgtgtagtccaactaacaagcaaaagcttcaccccgattgtgtggaacaggatcatttgatagattctccacaaggccacagtcaactaggtcaggttgccgaacagctcattttgttgtcagaacatatgtgaagagagttttgaaacataa

SEQ ID NO: 84625 - DNA, 205 bp, Zea mays
  Clone ID: MRT4577_177189C.1
tcggcggttcccgtcgcggaggtggttgaaaaccccatcatggacgcacgctcctggccggcgctacccgggctgtcgtctccgccgccgccgccacagcatgcggggccaacagccaaagtgtcaccgaaggccgcttctccagctcccactggggcggcgacgtcgcccgtctctttgggcaatcctggcccgccggatgcta

SEQ ID NO: 84626 - DNA, 559 bp, Zea mays
  Clone ID: MRT4577_17718C.1
tttagggatcggcgccggcgtcggcggtggtgtttctttctcagggtccgggttctacccgcgctcaccgtccgggtcatggtcaggctcgggctcggggtctggcgctccaggctcatcggctggctcttacgctgagtcaggatccgggtcgaacgcagggcccggtggtgcaggagcaggatcctacgcgggctcgagagctggctcttacgcaggctctagctctggaggagcaggatcggatgcaggctctgacgccggctcgtacgctggcccgcacggcggctcgggtgcaggttcctacgcagggtcccatgccggatcctacgctggcagcggacatggcaagtgagcgcgagagcttacttatcggtgccgcgcagcacgaaacagaccttcactacgatgttgctactgtgtgtcatcatcatgtatattattcggtcctatggcacttgcactggtgtacgagagcagccacaaataaggtgccagagcaaccatggccatatatatatatatatatatatatatctatatatatatatatattata

SEQ ID NO: 84627 - DNA, 611 bp, Zea mays
  Clone ID: MRT4577_177190C.1
gccggccggtccgggagactgcactctgttctccctctctctctgcctaaccaactagaatcaggaaaagcaatgatggagaagaagcagccccacagagtgacaagatgaacgacgtggttacccgccaagtatgctatcaacctccacaagcgcctcccgcatgcaccctttataagacaaccccaccatgctatgaacgaaataacatagacctgcacataaatgaacgggcaccaatgacatgaccaccgatacgaaactcctcaagcacatctcgagtactatcatccggagcgcgccaacgcgtctccgaactacgatcgcacccaagaggaacaatgataacaatgccgatgaacaatgttagtctcttgctaccagccggtgacatcccacctacagaggcctgaacaactgggtgaccaaggatgagtaggacgacgaccacatctgcctgggcactgatctgtgtcaactgtcgaatcattttactgtggcgaccaacctggtgatcaataactcgataatcttctgagaaaaatagaattttctgatggagaactagctctcgaataatatataactcttgaagatacctgaaccaatca

SEQ ID NO: 84628 - DNA, 365 bp, Zea mays
  unsure (1)..(365): unsure at all n locations
  Clone ID: MRT4577_177191C.1
ctntaaannagccctaaatttttcccttaccagtaacacccccctacagaactttttcaagagaaagacaagacactcatcccaaattcacatccatgattaccgacatttcccttcattttcctatttcaacttccttgcaaaccatatctccttcctcatctcttctatccacacattttatctactccaaccgctcctatctacctatattctacctcaattataccttcctactctccctttctctttacattaattcccttcacctttttactttctttctcatttaatcttttccaaatagcaaaaaataaattctcttccattcttccttcctttccatttccttttttttaccctct

SEQ ID NO: 84629 - DNA, 391 bp, Zea mays
  Clone ID: MRT4577_177192C.1
gcgagagacagactcgtatacccaggcttctgttgacgaggaggacaataatactagggatatggcttcctgcgcgtacgcctcatggtccaagctagtggatccgtccctaggtgtacccgatgttcgtgccgatggacgtggccctgagtatctgctagtaccagcttgagcgcaacatcacaacctacctcaaagtccggttgaccaaacaaatgatggcagtcgtcgtacatgacatccacaactagggcgacacttactccatgcacggactcaggaacttcgtcatctggcacgaagccctgagatcatgtattgcatcaactgcttcttctgagactctcttaaggacgattaatctagagtccgtcatggatggatgcatatg

SEQ ID NO: 84630 - DNA, 435 bp, Zea mays
  Clone ID: MRT4577_177193C.1
ccccggggtccgaccccacgccgtcccggtcaagggaaaactccgtcatcagtaagggtaatcaatgatgcttggagggtcttccttcttgaaaggtggggagcgatgttcgtggcactaatcatcaacatatgcatcatctctgtctctggaactgtctgtaactccagcaacgtctcaccagatgactctgcaaaatgcagtgacatcaccttggactcctcgtccttcctcctgaggaatgtgctaggcaacagcagtgcggttgtgtatggtgtggctctcttggcttgtggaataagctcttccatcactggtacttacgctgggcaatacatcatgcagggtttcttggacatcaagatgagacagtggctgaggaacctgatgactcgcagcattgccattataccaagcttaatcgtcgccatcatc

SEQ ID NO: 84631 - DNA, 323 bp, Zea mays
  Clone ID: MRT4577_177194C.1
gtctgctgagagattcagctcgagctgggttcccagccactcgcgctagaagaagagctcggcgattcctagtgccagcgagaatatgccgaagcagatccatgagatgaaggactgcctgcttaccgctaggaggaaggatgcccgttcagggaggatcaagaggagtaaggatgttgtcaagctcaaggtgcgctgctcgcaagtacttgtacacgctctgcgtcatcgatgctgagaaggcaaacaatgtgaagcaatctctcccccagtttgaccgcgagaggctgattgatacatggcacgccgagttgactacccaa

SEQ ID NO: 84632 - DNA, 402 bp, Zea mays
  Clone ID: MRT4577_177195C.1
cgaaaaccgaaacagaaaaagacgaacatacgacatcagacaaagaaatgtacgtcggcatgatgcaacacccatgacacttaggttttggtttatacatgacatggacacctgtcaccatactggtttgaaattgggaaggagcgaaacaggaagagaaaagagagtaacgcccgaatttggtgagagaaaagaagaaaaaattccaccctcaaattcagggcgttacagggctggtccaggtgaagcttcaccctaggtgacaaatagcgctagcctagacactcattaagctctacgaatatgaggcttttctgtgactattttagatattggttactttcttattttgtgaaaggactgatggcaaagcaatagccagagccaaatctcaagatgatc

SEQ ID NO: 84633 - DNA, 560 bp, Zea mays
  Clone ID: MRT4577_177196C.1
ccggccggacactgatacaacacacgccagccagcctcgtacactggtgagctctgcactctgcttagctccgagcttcagtgccttcgttgtttgctccacagtccacacacacacacgtccagctagctgcactgcaccaatggccgccgtcgaggtccaggtcccgactgccgctcccgtcgaggaggctgcccagctggccgccgcctccgccgtcgagaccccgaacgaggagaccgctgctccggcggtggagaccgaggtcgtcgtcgctaaggagccggagccggtggaggccgagactgagactgagaccaaggaggccgaggccgttgctgagccgaccgaggcagagcccaaggaagcggccgatctagctcgctgcgtcagcctgtcacctggcgactggcgtgcgccgcgctggtgccactgccacggcaacagcacggcatggcgccggcataggtcgctaggaaaaacctgcttttgtgttcgggttcacgtcgtgtcctacgtggcgcggcgggccccgcctagtaaaggagcgtcgttttgtg

SEQ ID NO: 84634 - DNA, 408 bp, Zea mays
  Clone ID: MRT4577_177197C.1
ggagaccgctgctcctgcggtggagaccgagggcgtcgtcgctaaagagcccgagccggtggaggccgagactgagaccaaggaggccgaggccgttgctgagccgaccgaggcagagcccaaggaagcagagccggaggccgccgcgccggcagcagagacggaggccaaggaagcagagactgaggccgccgcgccggcagcagagacggaggctgctgctgccccggtcgaggctgctgagccggagatagccgccgagaccaaggaggcggcgactgtggaggctaacgaggaggaggaggcaacgcctgctgttgctgccactcctgaggtcgcagcgaccgaggaggaagcggcggcccctgcccccgaggccgccgtcgagaagtccgtcgagtgagtaca

SEQ ID NO: 84635 - DNA, 1310 bp, Zea mays
  Clone ID: MRT4577_177198C.1
gggacacaaatatgcttactacacactcgaaacacatactagatggtacagtacagagtacacacatatttaaacgacacaggagctcaacggcccagccccaccgatgtgctgtaaaagtaggccacatcagcaccgacactgggcccactaacccgacacgggatcggcacacagacacattatttattcgaccacaacacaaaacgacgcacctttactatgcggggcccgccgcgccacgtaggacacgacgtgaacccgaagtcccgaacacaaaagcaggtttttcctagcgacctatgccggcgccatgccgtgctgttgccgtggcagtggcaccagagcggcgcacgccaggtgacaggctgacgcagcgagctagatcggccgccgtccggcgctggactcactcgacggacttctcgacggcagcgacggcggcctcgggagcagggaccgccggttgccgttcggcagtcctcagagctggcagcaaccgcgggcgatgcctccccctcctctgacgcagcgagctagatgccacaggcggttccgagcgctgggagctaacactcgacggggtccggcgctggactcactcgacggactgctcgacggcgctcgggagcaggggccgccgcttcctcctcggtcgctgcgacctcaggagtggcagcaacagcaggcgctgcctcttcctcctcgttagcctccacagccgccgcctccttggtctcggcggctatctccggctcagcagcctcgaccggggcagcagcagcctccgtctctgctcccggcgcggcggcctccgtctctgcttccttggcctccgtctctgctgccggcgcggcggcctccggctctgcttccttggcctccgtgcctgctgccggcgcggtggcacccggttctgcttccttgggctctgcctcggtcggctcagcaacggcctcggcctccttggtctcagtctcggcctccaccggcaccggctccttagcgacgacgacctcggtctccaccgccggagcagcggtctcctcgttcggggtctcgacggcggcggccagctgggcagcctccactcccgctgctgctgcagcagcagtctcctcgacgggagcggcagtcgggacctggacctcgacggcggccattggtgcagtgcagctggacgtgtgtgtggaactgtggactgtggagctaacaacgaaggcactaagctcggagctaagcagagtgcagagctcaccagtgtgagtgtgacgatggctgctggcagagtgtgtcccggccggcctcga

SEQ ID NO: 84636 - DNA, 167 bp, Zea mays
  Clone ID: MRT4577_177199C.1
aaacgcggttttttttgtgggggcaggggccatggtttttttattcacatgggggaaaacatcggatggacacaaacaggtacaacatctctacattatatttattcacgattctacagaggcaaattttttttttttactggacgaagactaaaccctcgggaggg

SEQ ID NO: 84637 - DNA, 454 bp, Zea mays
  Clone ID: MRT4577_17719C.1
acacccttccaagacctaaggcctttggggaggcagttaagtttccaaatcctgggagccccagaagtttttcttccaaatcgttgggcccagggatatttttgaaggcaatccattcctgaagcaggggttggtgctgcccaacccttacataaccaccttgaacgggttccaggcctccaccctgaaccggttaagggacccaaacttaaaggggacccccaacccgccgttgtccaaggggttcgccgccaagaccaagcccgccggactggtaaagctgaacccggcaggcaagtccccgcccggcctgaaaaacacgctaatcttaaccatgaagggcatggccgccggcttgcaaaacactggttaggcggttttttttaattaacctgcaaagtgcaccgaaataataagtttccggtatggtggcgttttgtcagttttggatgga

SEQ ID NO: 84638 - DNA, 1411 bp, Zea mays
  Clone ID: MRT4577_1771C.1
agtgggtggcggtatatgggacagagacactgtactacgtgccctgcgggttgcgtataacaacccagagcgcgctgttgagtacttatattctgtaagaatgattctttgtcctcccttgctactttctaggccttaattataatgaactttcagcgatctatgtgtgcccaaataaatttaactagtgaatacattatctattgcataaattagattgaagccgcatgcagatatgtttaatttgaatatttggtgactgttaaaagttaattgcccttttaacctacattacgatttacgaggatacaattttgttttacaaatgtagacacactaatgtccttcctcttctgtttaggggattcctgaacaaatggatgttcctacatcacctccgagtatccagccagccaatcctgtccaggctgcacaagcagctcaaactgcagctccatctggaccaaatgctaaccctctagacctctttccccaagtagctcccctctgtgcatgcagactgacatttttgcaactagttgactttggatctcatattcgtcattgtctgaactgtagtctcttccgaatgcttccgccaatgctggcacaggaaaccttgatgttttgcgcaataacgtacaattccaaaacctgcttggtttggtgcaggctaatcctcagattttgcagccattgcttcaagaattgggtaaacaaaatccccaggttatgcagctaatccaggaaaaccaagcagagttcatgcggatgatcaatgaaccacttgagggagacgaagagaatgaaatgatgctggaccagatggcggatgcagctgagaccattgcagtgactccagaggagaacgaagctatacttcgtcttgaagggatgggctttgaccgggcactggtcctggaagtgttcttcgcgtgcaacaagaatgagcagctgaccgccaactacctcttggatcacatgcacgagttcgacaacgatgacgggctcggagggccaccgctatgagggcgctctcgatccctacatcatgcgaacgaaggctgtagggcagtagtaggaaaacgttttgggattcgtcccgtctgttcgctcactctacatattcgtttggctttgctgtttagtacagaatttctagatttacggacttactacttgatatcctgatatagaggtcacggccaagcttacttttttttttgtttccctggatcaacttgttagcttactactatgttttgtgctacttcttgccgcattgggccagcggttgaacctggcaagcgctggctgcagcacagtagcaccgagatgcttgtgggtttcgcggtggttcgtttacccaatccggaaccccgctgatactgaaggcccagcctgttagtcc

SEQ ID NO: 84639 - DNA, 1517 bp, Zea mays
  Clone ID: MRT4577_177200C.1
cgctccagcgagtaccgacgcctcccacctggagaccgtactttactggcactggcagtaatctttccgcccgcgtcggcgcctcctccctctctcccaacatcgcccgctctctcctcgctgttctccgctgtcatctcccccggagaagcgtggctcctgtagccggcctcctacctgcccctcctccgcgcgccgagcaccagacgacgcgacacggccgagcacggtcgctgcttccgcggcggcgccgctccactctcgtgctgcagctagcggaacagagatccgtggggacatgaacagggtttctcctctctgttggtatgaactaaattgatcgatggtcctattgaatatagagctactattatatggcatattctgtcatgcaaatgatggtggttgtaagttgtgattgaggaactccattgtttgagaaatggatgaaacaccaactagttctgggcaatctgaagatagttcatgtgaacctaattggtggccaccagacttattagagaagatagagtctgcttccatatcaaggaaacatgatgttttgggtaatctaaggtcctcatcctggaaggcatcacaattactgtggtcaacaggatcttattcagggttaatccctaatggtttctattcaatcatcccggataaaaagttgaaggagactttcccaacaattccatcggtagatgacctgcaaactcttgaagcagatgggcttaaggctgacataattattgtagacactgagagggataagaaggttttcatgttgaagcagcttagtgctgcacttgtgaaagggttaagctctagcccagcattagtgataaagaaaatagcaggtttggtttttgactgcttcaagcgacaaaatcctgacgccagtccagcaaaaggctcgattgaagatactcatttctttggatataaaggaccacaacttctagggcagataagacatggatcatgccgacctcgagctattctatttaaagttcttgcagatgctgttggccttgagagtaaacttgtagttggtctacctgatggcggtgccgttggatttgtggactcctacaaacatatgtctgtggtagtttcgctaaactctatggaactgctagtggatcttatgcgatttccaggccagttgattccattttcagctaaggctatctttatatcgcatatatctgctgcgggtgaaagtgactcagctgaaaatgactcttgtgattctccccttgagcccaacagccctctttatggattgtctgataaagttgaaactgaaggaattgaatcttcatcaaatctatctggacgatcactgcgtaatatgatgttgagatcaaggacattttctgaggggaaattaagcacgtcatgtagtgaaccgaatatagcgaatgccttttggaggcacagtcaaaggagaggagttgctgaggaaccccgtggtgctagttccagtcctgagcatccattaatgagag

SEQ ID NO: 84640 - DNA, 148 bp, Zea mays
  Clone ID: MRT4577_177201C.1
cattcgacctgagattctggggggtggtgctgtctttgttgctctaatcggtgcacaacgggccgtagctcgaacggtgcttcctgtgccgctcactcggacgggggcaaggggggctccgctgcctgtgtgcccagcaggtggtgct

SEQ ID NO: 84641 - DNA, 2497 bp, Zea mays
  unsure (1)..(2497): unsure at all n locations
  Clone ID: MRT4577_177202C.1
aaaatcgcactttgcagaaccgacgtaaaaaccttatggaggatgaattggaaaaattaatgctgctgaagaaatttccaaatgatgaggttcagagaagaaaagccgacctgggaattgatgtctctcttgatacgatttcagagcatacaaataaatcaacagataactcatatcaccaggcaggaatctctacgccttcaactccatcaatggattatggggttttgaattatactgaagaatataatcttgaatctgtgctggtgaattttctaggtgaaatatatagttgtcacaatgaatgcccacacagtgattgcaagaacaagaatgaattgtgtccttcactgaagtccctaatccataaaaaggtcaatgaattgaataatcttccccacaatattggccgtgggcaatctcaagagggcagtgatgctaagccatctgaccaaaataatctttataacaccatggcagcccaatccaaacaattcaaggatgcattggaaatacttggttcgaacagtgaactttttgtgaaactgcttcagaagccaaatcaacatatagctgatagtatccaacagcatgaaaacagtaaggtgtctgctggattagagcctgacaaaattcatggacagaccaattttgttggaggaagaggaagctcaaaacagcatcctttggctacaaaagagcaggctaaagagagaaaatatatgttcttctggaggaagagtaaatcaaatagaaggcagatgcttgacgcaacagatggagctcagactgttagcaaaattgttattctgaagccaaatccagaaagagggattaatcagaaagcagctactgcaagaactttacatcaacagccatgtacatcgaatgctcctggatgcagtggaagggaaaactcaaagttttcaattaaggaagtcaagaaaagattcagatttgtgactggtgagagaagtgaaagaaatttgtcacctgcagaggaccttcaaggagacccacgtaagatcaaagattctgttgttgcaattaataaatattttagacatctccctgaagggagcttggcaaacagtctgcatcagacattgagaatggcatcaaaccttttatcagcagtaagcaaaaaatcaaaatgggagcataaccggccggagttccgatatagtagctccaactctttgaagatattgacaatccagactgcataaacaagaaagaatgtgagctgcatggtctccaaaggaccctgtattttccagataatgaaccagatgttagcctccttggggaggacaggagtgtcagagtggattacataaagttggtgctagaactctcggagttgtgtgcagaacaaaatttagaggtatggtacctagaggacgaattaatcagcccctgcttgtttgaagaactacagagtcagggcgatcaaacggatgatctaaagctcctatttgactgtatctgtgaggctctaacagagatccaagagagatattttagactctcttggctaactttcctaaagcaagacataaggacacctccgattggagaaaacctcatcacagaagttgatagatatgtttacgggtatatccaacatagtcttccaatcactctagagcagataatcaagagggacctgggaagttcagacgtggatgaacattagatcgaaaactgaagggatattatgaggatgtgggagtttgtattggatgagttgatagatgagactgtcactgcatcacaacacacgccagccagccatcgtcacactggtgagctctgcactctgcttagctccgagcttcgtgcccttcgttgtttgctccacagtccacacacacacacgtccagctagctgcactgcaccaatggccgccgtcgaggtaatcatacgtgcacagagctgcttccgagaccccattctcttcgtccatctgcacgcaccagccaccattgtatttgtgccccaagtcccacgcatgtgttcgtacgtacgtgcaggtccaggtcccgactgccgctcccgtcgaggaggctgcccagctggccgccgcctccgccgtcgagaccccgaacgaggagaccgctgctccggcggtggagaccgaggtcgtcgtcgctaaggagccggagccggtggaggccgagactgagactgagaccaaggaggccgaggccgttgctgagccgaccgaggcagagcccaaggaagcagagccggaggccgccgcgccggcagcagagacggaggtcaaggaagcagagacggaggccgccgcgccggcagcagagacggaggctgctgctgccccggtcgaggctgctgagccggagatagccgccgagaccaaagaggtggcggctgtggaggctaacgaggagggggaagggaggcancgcctgctgttgctgccactcctgaggtcgcagcaccgagagggaaagcggggggccctgctcc

SEQ ID NO: 84642 - DNA, 321 bp, Zea mays
  Clone ID: MRT4577_177203C.1
tctactcgttcgcccacgcgaacggatcaaaggagctgcactgacagctagctaggttgctcaccacgatggagatggacgggcaacagaggctattttagtgtggtcagcttatgtaagcgctacgttaacattgagtgctactatagaccaggagagcccccatgacatgacactggagacatgcattctgatgagggttggacatggaatagctatggctataccaaagagatgctcgtggccgggaagggcataatgatcaggatctacaacatctaccagagagcacataggtgcagtgatatggactactatatc

SEQ ID NO: 84643 - DNA, 2324 bp, Zea mays
  Clone ID: MRT4577_177204C.1
gatcacaccacacgccagccagccatcgtcacactggtgagctctgcagtctgcactctgcttagctccgagcttcagtgccttcgttgttagctgttagctccacagtccacagttccacacacacgtccagctgcactgcaccaatggccgccgtcgaggtaatcatacgtgcacagagcttcttccgagaccctattctcttcgtccatctgtacgcaccagtcaccattgtgccccaagtcccacgcatgtgttcgtacgtacgtgcaggtccaggtcccgactgccgctcccgtcgaggaggctgctgctgctgctgcagcgggagtggaggctgcccagctggccgccgtcgagaccccgaacgaggagcgctgctccggcggcggagaccgaggtcgtcgccgcagccggtgtcggccgaggccgagactgagtccaaggagtcgaggtcgaggccgaggccgtagctgctgagccgaccgaggcagagctcgaaacggaggccggccgggcccgcgcgtccgcccaacaccacacgccagccagccatcgtcacactggtgagctctgcagtctgcactctgcttagctccgagcttcagtgccttcgttgttagctgttagctccacagtccacagttccacacacacgtccagctgcactgcaccaatggccgccgtcgaggtccaggtcccgactgccgctcccgtcgaggaggctgctgctgctgctgcagcgggagtggaggctgcccagctggccgccgtcgagaccccgaacgaggagaccgctgctccggcggcggagaccgaggtcgtcgccgctaaggagccggtgtcggccgaggccgagactgagtccaaggaggtcgaggtcgaggccgaggccgtagctgaggctgagccgaccgaggcagagcccaaggaagcagagcccgaggccgccgcgccggcagcagagacggaggctgctgctgccccggtcgaggctgctgagccggagatagccgccgagaccaaggaggcggcggctgtggaggctaacgaggaggagggggaggcatcgcctgcggttgctgccactcctgaggtcgcagcgaccgaggaggaagcggcggtccctgctcccgaggccgccgtcgctgccgtcgagaagtccgtcgagtgagtccagcgccggacggcggccgatctagctcgctgcgtaagcttgccttcagtgttcgaggccggcatcacaccacacgccagccagccatcgtcacactggtgagctctgcactctgcttagctccgagcttcagtgccttcgttgtttggtccacgcagtccacacacacacaccagtacgtccagctgcactgcaccaatggccgccgtcgaggtccaggtcccgactgccgctcccgtcgaggaggttgcccagctggccgccgcctccgccgtcgagatcccgaacgaggagaccgctgctccggcggtggagaccgaggtcgtcgtcgctaaggagccggtgccggccgaggccgagactgagtccaaggaggtcgaggtcgaggctgaggccgaggccgaggccgtagctgaggctgagccgaccgaggcagagcccgaggccgccttgccggcagcagagacggaggccaaggaagcagagccggaggccgccttgccggcagcagagacggaggctgctgctgccccggtcgaggctgctgagccggagatagccgccgagaccaaagaggtggcggctgtggaggctaacgaggaggaggaggaggcagcgcctgctgttgctgccactcctgaggtcgcagcgaccgaggaggaagcggcggcccctgctcccgaggccgccgtcgagtgagtccagccagcgccggacggcggccgatctagctcgctgcgtcagcctgtcacctggcgtgcgccgcgctggtgccactgccacggcaacagcacggcatggcgccggcataggtcgctaggaaaaacctgcttttgtgttcgggttcacgtcgtgtcctacgtggcgcggcgggccccgcctagtaaaggagcgtaggagcgtcgttttgtgttgtggtcgaataaataatgtgtctgtgtgccgatcccgtgtcgggttagtgggcccactgtcggtgctgatgtggcctgcctttacagcacatcggtggggctgggccgtagagctcctgtgtcgtttaaatatatgtgtactctgtactgtaccaactagtatgtgtttcgagtgtgtagtaagcatatttgtgtcccatccatctttcaaaaaaaaaaaaaaaaaagcggcc

SEQ ID NO: 84644 - DNA, 1818 bp, Zea mays
  Clone ID: MRT4577_177205C.1
gaatcacaccacacgccgtcagcatcgtctcactggagagatctgcagtctgcactctgcttaactccgagcttcagtgccttcgttgttagctgttagctccacagtccacagttccacacacacgtccagttgcactgcaccaatggccgccctccaggtccaggacccgactgccgctcccgtccaggacgctgctgctgctgctgcagcgcatagtggaggatgcccacctggccgccgacaatacccctaacgtacgataccgctgctccggcgtgggataccgatgtcttcgccgctaatgagtcgtggtctatcgaggccaacactgattccaatgagggctaggacaaagacgaggacgtaactgaggctgacccgacctaggctgagccagccggccgggccgggcgtcgccagccatcgtcactggtgagctctgcagtctgcactctgcttagctccgagcttcagtgccttcgttgttagctgttagctccacagtccacagttccacacacacgtacgccctcggacccattggatccctcgggcgggccgggggactgcatcacaacacacgccagccagccatcgtcacactggtgagctctgcactctgcttagctccgagcttcagtgccttcgttgtttgctccacagtccacacacacacacacggctagctgcactgcaccaatggccgccgtcgaggtccaggtcccgactgccgctcccgtcgaggaggctgcccagctggccgccgcctccgccgtcgagaccccgaacgaggagaccgctgctccggcggtggagaccgaggtcgtcgtcgctaaggagccggagccggtggaggccgagactgagactgagaccaagggaggccgaggccgttgctgagccgaccgaggcagagcccaaggaagcagagccggaggccgccgcgccggcagcagagacggaggtcaaggaagcagagacggaggccgccgcgccggcagcagagacggaggctgctgctgccccggtcgaggctgctgagccggagatagccgccgagaccaaagaggtggcggctgtggaggctaacgaggaggaggaggaggcagcgcctgctgttgctgccactcctgaggtcgcagcgaccgaggaggaagcggcggcccctgctcccgaggccggtcgatccgtcgagtgagtccagccagcgccggacggcggccgatctagctcgctgcgtcagcctgtcacctggcgtgcgccgcgctggtgccactgccacggcaacagcacggcatggcgccggcataggtcgctaggaaaaacctgcttttgtgttcgggttcacgtcgtgtcctacgtggcgcggcgggccccgcctagtaaaggagcgtaggagcgtcgttttgtgttgtggtcgaataaataatgtgtctgtgtgccgatcccgtgtcgggttagtgggcccactgtcggtgctgatgtggcctgcctttacagcacatcggtggggctgggccgtagagctcctgtgtcgtttaaatatatgtgtactctgtactgtaccaactagtatgtgtttcgagtgtgtagtaagcatatttgtgtcccatccatctttcgaaactttctttttttaagctcttgaagcgtgaactctgttacgagctgctcgccctattataaattataaaattagtatttcggcaagtatctgtaagttatcttactggcgaacgcccatcatgaggttgctcactgctgtaacttattatcatgatgcatatgaaatggcaatgaactatgttatcagtt

SEQ ID NO: 84645 - DNA, 412 bp, Zea mays
  Clone ID: MRT4577_177206C.1
caactatcatgtttcatatcgacgatgcaactccgggagtatggaacattaactcgcttatctccgccataaaacacctcctatccattcaagttactgacaaaaggttttctcggcttaaggctatgttcataaaatagccacctttgaaaaagccgcacgttttcaggcattgatccaactcactgatgcagatactggtttagctgctaaagaatccttagatcgaaggagcataccaagttacttgcttccggaacatgtaacattctgctgcctgcgaatttttttttatgcacataaagatttgaacatcaattttcactcgaaccgcatcaagcattataataattcatatctatcaatcaattattctatcatggatagttcattacagccttcttttggagct

SEQ ID NO: 84646 - DNA, 204 bp, Zea mays
  Clone ID: MRT4577_177207C.1
gacctctagccaccggggaattcctagcgagatgagccataccttcggacctacgggatccagccaagcatagcaggctgacctggctaccttaatgacggcttgttagaccgactctgatgagagcatattacataagctgcctgtagcgcacggatgcgtgcatcacagctatgggcagcatgctgcagcagcctgagctag

SEQ ID NO: 84647 - DNA, 237 bp, Zea mays
  Clone ID: MRT4577_177208C.1
cccacgcgtccgcccacgcgtccgctttttctccactccgattttgcttggttccatcgggccggagagggagaagctagctagctagcagcagctctgttggtgtgtgtgtgtgtgtgtgtgtggagggtagctgaagctggtgctcgctggaatggtcaggagccatggtgaggggccgggtggagctgatgcggttcgagaacaacatctaccgccaggttaccttacacaagc

SEQ ID NO: 84648 - DNA, 397 bp, Zea mays
  Clone ID: MRT4577_177209C.1
agaacacgatgaccggatccttgagcttgttgcgagccactctggtcttgagacactgtgagcatttcagacagatctcagggcatgaatcaagctttaaatcttgcttgtgcacaactcgtcaaggttgaatactctgaatattagtgagtgtatcatgccagaccaggttagtctgacgccaactgcacagacactactggaataaaattggggatactttgagaatcagagtcaacctgacgcaggctacaaattagagaacgaatatccaagtcctttactgcaccggtacaatatgctgtatatgatgacaaatgagagacagatactggtgacatatgctggtgtacttaaaaagatgaactcgttgaatacatgcctgtacaaacctgat

SEQ ID NO: 84649 - DNA, 408 bp, Zea mays
  Clone ID: MRT4577_17720C.1
taagctcggatcctgtatagcgggcgccctccacgcgttcggggtgctcgccgtctctgaccggcgccatgacggtgaccccctcctacatcaaaggcgtgggtgtcgccatgaataccatccttgggctgcctgttagctagatgatgctgctcccttataagcacttgggatacgtgaccacccacgacgtcgcttactcgtctctcaattcactcctgctctttgaaatagacccagctggcattactttacgatgaagagcttgcgcattggacacacctctgctgctcagagtaatgctccatgacctcaccttcaagaagctttactcggagaacctgctcatgaaggaaacgctagtcactactccgacacttctgctagactacaatggcacgctgattc

SEQ ID NO: 84650 - DNA, 216 bp, Zea mays
  unsure (1)..(216): unsure at all n locations
  Clone ID: MRT4577_177210C.1
acccacgcgcccgaccgacgggaggacgagacagaacaacggggatttanacgacgacagggaaaagagaagacggggcaagacaaaaaggaacaggggggcaggaaggaacccaaagacaccgcacaaggagcaacgggagacaacagagacgaaccagcacaagacaaacaaagacgcacagcagaggcaaagcaggcaagacccagcaacaca

SEQ ID NO: 84651 - DNA, 480 bp, Zea mays
  Clone ID: MRT4577_177211C.1
aaggtaaaccctttttttttatggggaaagccagatttggttttaaccacgggggaaaggacccggccaggactaagaggggtttggaaggccaaacccaggcccagaatttgggaaaaaccaggttttaattacctggccggggagggggggggagatcagttaaggggataaaagccttaatactcggggggtactcctggggcctttcaaaacccttttaaggggggggagcctaaaaaaaggggctaaaaatgggacgggaaaaaaaaaaacgggcggttcccaagccaaagatttgtttaaaatgcttgggggtggaaacaccgaaaccaaaagttacgggttggggggaaacctttttgatctcccaaagaaggggttctacacgaaagttaaaattggggggggcacctgtaacccctacagggttaaaaaaataaaaaaatcctttggaaggtggggcaattcccttaaacc

SEQ ID NO: 84652 - DNA, 1048 bp, Zea mays
  Clone ID: MRT4577_177212C.1
cccacgcgttcggccaacctcgcgttgcggttatatagggccgtatttcccccgcgtctacgcgtcattggaagcgatcgacaccatccatactttctcaaagcttgctttcgaaacacttgatcaacactactgatcgatcaatggcttcttcctgggtttctcggttgcctctggcagtgctgctgctcgtggcctgctcctcctccagggcagcggccaccagctacaccgtcggcgacgggtccggctggacgaccggcgtcgattacacatcttgggccgcctccaaaaacttcaaagtcggggacaatctggtgttcaactacgcgaaagggctgcacacggtggtggaggtgagcgcggcggagtacatggcgtgcacggcggccaacccgctgggctccgacagcagcggcgcgaccaccgtggccctcaagacgcccggcacccactacttcgtgtgcagcatcacgggacactgcggcgccgggatgaagctcgccgtgaccgtcggcggctccaactcccctgccaccacgccgaccccgacgaccccgcgcacgtccccgaccacgccctacacgacgccgacgaccccgactaccaccacgccgtacacgactccgaccacgccctacacgacgccgacgtgctctggcggcggtggtggcaccacggcgaccccgggcatgactccgttcatgtcataccccagcgcggccggcctcggatcggcggcgttggctggatttggactggtttggtgtgtgatcgtccaggtagcgctgctctactaggcacaagggcggtcgaccaggatggaggcagagataggtcatgtcgcctgtaagctgtaacgcactactgatgtgtttgttctttgttccggatcgagctagctggggtatagtgtacttggatgaaggaaactggtgtctctgctccgctgtgaatcgcaggtgcaagtcaatttccttgagcctaaatcgccgtgcaaccaaaccgtgcaaatcactttccttgaaccaaaaaaaaaaaaaaaaaa

SEQ ID NO: 84653 - DNA, 381 bp, Zea mays
  Clone ID: MRT4577_177213C.1
tcgttttgatcaagtacgtctttgatggacagtagcagattggcatgtgtatataggcagcttctgcacttggttattagaggaaagtcttggatgagtcttatcagaatgactctgtgatttatgagaataaaaggagcaaaaaggctaaagaaaagagcaccgtggttgtggcgttaaaaatgtaaacaaatgaaagaagggtgagagcagttaaacctgccggtggttacactgaaaacaccataaatcgtaaacgccggagagggatttacaaagaaaaggcactggctaacaaggaaaaattgtggacagtatgtaggacagatatcatgaaagcactccaaaaaggaatgtatatcaaccccggttttttaaatt

SEQ ID NO: 84654 - DNA, 229 bp, Zea mays
  Clone ID: MRT4577_177214C.1
aggaacagtcagactatagaatatttgaatcagagcttaagcagagagaaagatacaaatcacccggtatcatctatcaaacggcttgtttttgatgcagatgagggaaatttagacattagagctggaaatccaaagagcagtatgtgagattgcaggaaaacactcatcctgatagtcctaataagtgtcgtactagagatcgctcatccttagtggctggtgttgg

SEQ ID NO: 84655 - DNA, 2420 bp, Zea mays
  Clone ID: MRT4577_177215C.1
ttggccgggaaacgaaccctaagcaaattgaggtcgaggggtggtccgatctcggtggctactgattatcggccgcccttcccgcgccgcggtctgcgctttggccggtcctgcggggccttgacatccgcccgggtccccgtcaaccatatcaactgaatatccaattcaaagggcggggagcgtacgtgtaccgccaccgtcttccggccgtccaccgtttccagcacacagggtaaaggcaagcaaacgagcggcgggacggctagcccgcaatacaaaatccggaggaactcccaggaggcgaaaagcagatccgtctcccccgaccggcgatcgctatcgacttgtagcggaagccatggcgtcggcagcgctaatctgcggcacggagcagtggaaggccctccaggcgcacgtcggcgcgattcagaagacgcacctgcgcgacctgatggccgacgccgaccgatgcaaggcaatgacggctgagtatgaagggatctttctggattactcgagacagcaggcgactggtgaaaccatggagaagctccttaaattggctgacgctgcgaagctcaaggagaagattgagaagatgtttaaaggtgaaaagataaatagcacggagaacaggtcagtgcttcatgtagctctgagggctccaagagatgcagtcataaacagtgatggggtgaatgtggtccctgaggtttggagtgttaaagataaaatcaagcagttttcagagacttttagaagtggatcatgggttggagcaactggaaaaccgttgacaaatgttgtgtcggttggaataggtggtagctttcttggccctctatttgtgcatactgcactccagaccgatccagaagcagcagaatgtgcaaaaggccggcaactgagattccttgcaaatgttgatccagttgacgttgcacgaagcattaaagatttggatccagaaaccactctggtggtggttgtatcaaagacattcacaacagctgaaacaatgttaaatgctcgaactcttaaggagtggatcgtttcttctcttgggccacaggctgttgccaaacatatgattgctgtcagcactaatcttaagcttgtgaaggagtttggaattgacccaaacaatgcttttgccttttgggactgggttggcggccgttatagtgtttgcagtgctgttggcgttctgccattatctcttcagtatggctttccaattgtccagaaatttttggagggagcttccagcattgacaaccacttctactcatcttcatttgagaaaaatatacctgtacttcttggtttgctgagtgtgtggaatgtttcatttcttggttatccagctagggcaatattgccatattctcaggcacttgagaagttggcaccacatatacagcagcttagcatggagagtaacgggaagggtgtttccattgatggcgcccaactttcctttgagacaggtgaaattgattttggtgaacctggaactaatggccagcacagcttctatcaattaatccatcagggaagggttatcccttgcgactttattggtgttgttaaaagtcagcagcctgtttacttgaaaggggaaactgtgagtaatcatgatgagcttatgtccaatttctttgcccaacctgatgctcttgcttatggaaagactcctgaacagttgcacagtgagaaagttccagaaaatcttatccctcataagacttttaagggcaaccggccatcactaagtttgcttctgcctacactatccgcatatgaggttggacagcttttatccatctatgagcaccggattgcagttcagggcttcatatggggaattaactcatttgaccagtggggagtggagctagggaagtcactcgcttctcaagtgaggaaacagctgcatggaacccggatggaaggaaagcctgttgagggttttaaccacagcacttcaagtttgcttgcacgatatcttgctgtcaagccatccaccccgtatgatactaccgtgctgccgaaggtgtaattactcagttgtttttgacatgccaattgctgagttctgacttggcaaggttgagcataagtctttcttcatttgggagttatcacagagccagtttggcagtgctgtagttttggttttacctactctttgtagaagaaaagtgaagagtggatattatggaacaaaatatatacctacggcagcacgcagcatgatgaaacatatttaaaaaatttgggtgctctaccacatgcccgtggaataaaacggatgtaaactcagtgcacttataacaccctaattgtggttttgtttgtggttcaaaaaaaaaaaaaaaaaaaaaaaaaataaaaaaagaaaaaaaaaaaaaaaa

SEQ ID NO: 84656 - DNA, 279 bp, Zea mays
  Clone ID: MRT4577_177216C.1
gagaaaatgttaacaaaaggagcaagattcacagggagggtacattgtaaccaaacatataaaggtgattattaattgatctggtaacaactacatttttataaaatatttttttacatgttttataaaggtgatgttgagtacatttaactttggtgtcaaatgcacaagtgtgtaatatttagaattttaatatcttaagatgtattagtaatattttttattatcaagaatttatttagatataattgagggatttcattgcatgttattagttat

SEQ ID NO: 84657 - DNA, 281 bp, Zea mays
  Clone ID: MRT4577_177217C.1
ccacagcgcgcggttcaacgctgacccatgtggtgaaccgggctgtgaagtttgaggcatattggtcaacgcactcctgtgcattggcactggatgaccataatctactgttaaatgggcaccttaagtattttcattttcggatggtcttggctccgaagaaactcgagattaaggtgctggatacgaggaacatgtgcaaatcattgtcgtgcagagttcaatatactgcatatactctgagacgccttgcccactgactgttttggaggaggcactag

SEQ ID NO: 84658 - DNA, 312 bp, Zea mays
  Clone ID: MRT4577_177218C.1
aaggcggggggggaaggtggcctccaaaaccaacacgttttgggttcccatcacgtgataaattggcaggccaaaccaaagcaacattttttactttttttttaaaagaagggggcatccccctatcccagccctttaaatgtccatgggggcagaagggttattcgagccccttttccccttcttctggacgggggggcttgcaacaacaccctccccagtcggggttttcttggggacccccattttcatggggtcgataagttcctggacccttgccgcgccgatcaccttaaacgggttgacggggcc

SEQ ID NO: 84659 - DNA, 238 bp, Zea mays
  Clone ID: MRT4577_177219C.1
cagcccttctccccaagggaggctgaggaggcttctccaccagtggctacccccccccgtccctggccattcttggcctcccccccgctcaggcccctactcgggcgctcccagaaggagccacctctcagtgcctcacctccccctgcctcccagcctccgcagatgaggttcctgccccttcctcctcgtaaccaaaaccctcactgctcccaggacggtcttatttatgaaccag

SEQ ID NO: 84660 - DNA, 331 bp, Zea mays
  unsure (1)..(331): unsure at all n locations
  Clone ID: MRT4577_17721C.1
ggggcaaaaaaccaatgctccaaagtttaaaagtacactcacaaacgggaattgggtgcgtggggcgtaccacaaacaaatctttggggggggggggggggacctntttacaataacttaaaaagaacattaancccaaataaaatttggacctttcagtgataataccaaggttgctttgggttgtaataaggcggcgaatagagtaaagaggaggaggtgcttgacaaacgtggtttttacgggggcttgtttgcgggtaaaatncctttttttatttttgagggaagaattgatatttaagtttggggcctgaggggggggttttttt

SEQ ID NO: 84661 - DNA, 323 bp, Zea mays
  Clone ID: MRT4577_177220C.1
aagactgacgcgagcacgcgtcgtagctggaattggtcggaccaagcaactacaagcattggattattcgtgttgatcttgcacagacacatggggagggtgcagtgagaatggagctattgtaaaatgcaagtgaccaatagggtatgaagttgacctttataccatgtaacaggctaagtgtaatccacctttgggtgggactcacctgatgattgggtacggaataagagacttgtgggcactgggttaacaaagagggccaggaggtattttgtgggaaggaggcatggtgctgggatgctctatgatgtgggtgctac

SEQ ID NO: 84662 - DNA, 742 bp, Zea mays
  Clone ID: MRT4577_177221C.1
gggtcgacttcgacatgcccgccggccgcctcgacggccgcgcctccaacgcctcgcgcacgctcgacttcctcccgccgccgacatccagcctccccgagctcgtccagagcttcgccgccaagggcctctccgccgaggacatggtcgcgctctcgggcgcgcacaccgtcggccggtcccactgctcgtccttcgtctccgaccgcctcgcagtgccctccgacatcatcgcctccttcgccgcgtccctgagaggccagtgccccgcgagccccagctccagcgacgaccctaccgtcgtgcaggacgtcgtgacgccggacaggctagacaaccagtattacaagaacgtgctggcgcacagagtcctcttccacgtcggacgccacactcctcacgtcgccggcgacggcgaagctggtggatgacaacgccaacgtccccgggtggtgggaggacagcttcaaggtggccatggtgaagatggccagtgtcgaggtgaagaccggcaatagcggcgagatcaggaggaactgccgtctcgtcaactagctgttctgatgatatacatcagcagcaaccataataattcctgttcataattccatcttgttgcattgcattgttttgtttcattataaatatatgtcgacttcattttgtacatggttgcaaatttggtattggatgatcgataattaataataaagccatatccgctctcgagggggggcccggt

SEQ ID NO: 84663 - DNA, 341 bp, Zea mays
  Clone ID: MRT4577_177222C.1
ttaatatctctctagagcttttttcctttcttatgaactaacacataccaaactgtgcatttatattttttagtggaccataactacctatcatacatcactcactatacaataaagtgatatctcaaaaagatcacctgcatataaagcacaaagaactttctaatgcatatctcataagaatgcccaacatcatggtggcacacaaaattaactatcaatgaaatattcttttgcatcagttaagaatgcatctcaaacatcatcatacattcagaatgctttccgttccttctcttttatgaatatacatctaaatacttcttaacttattaaatatt

SEQ ID NO: 84664 - DNA, 128 bp, Zea mays
  Clone ID: MRT4577_177223C.1
tcggtgaattccaattgcttattgctttaaataacgaggcataaatgttcatatatgaactggaattatctgtgatactattatgcctatcctgaatccaaaggaaatgagatcggaattcctcgggg

SEQ ID NO: 84665 - DNA, 369 bp, Zea mays
  Clone ID: MRT4577_177224C.1
attcacaaataatttagatattatatgttctttgttatgtatattcctgtattgtgtcatatttattatgtttatgcatggttcttatacaattaataaggaaagataatgcatatgcacccacaataataaccatagttacaacaaaaataattaataaaacataactttctggttttttatcaaagaaaaatgtgcactgattgtctccataatctgcgcatttatcgtgcctgtgactatctgatattgttttatatattgtgtactttggataatcagttcggtatgccgttttacatttgctattattaaaataataaactttgcaatcggtctggtatacaaaagtattatttgatgattcta

SEQ ID NO: 84666 - DNA, 234 bp, Zea mays
  Clone ID: MRT4577_177225C.1
tataaaatattcccaaaccctaacttccgatctttattgctaaccctcgcgtcttcttcgggatgagccttttcaaggggcccggctatccttatactaattgaactttactccaacgaggtgcccaataccgcgttaaaactttcattgcgcttttcacattcgataaagactttgatcaaatcctagaaacctctccactacaatggctccacctttcaccgggtcattccc

SEQ ID NO: 84667 - DNA, 456 bp, Zea mays
  Clone ID: MRT4577_177226C.1
gttagattctggacttaggcaattcagtgacctgcctggggggattgacaagcatgctgagcatttgtatggcaaatccaatgttatgcacgtgccaggacgaaaacgctgttaaaggcgataaccttatctgcactcaaaaggtgaatcgattgagaacgaattttaccaatttgcggtgcattgatcggcatctggcgcaaggtctagatggcggctattttgacggaaagaatttttgattagaccacataagatgatctgtagagccttatggagaacttactccgtgcatgtgtgatatgtgaggataaatttgatgactattatgacacgctgacagaacacacattgcagaatgtttgtcttagcgtgcccaccatgtcaggatgctgctgaggaatattgcatgccagctgtcccaaaaggatggcaacgaaccgtgccaacgtatca

SEQ ID NO: 84668 - DNA, 972 bp, Zea mays
  Clone ID: MRT4577_177227C.1
ctcgaggccggccgagatggcaacaagctcgccacttccctcctcgccacggccgtcctcctcatggcgctcgccgccccctcactggccggcgaccccgacatgctccaggacatctgcgtcgccgactacaaatccctcaagggcccactgcggctgaacggattcccgtgcaagaggccggagaacgtgacggcttgcgacttcttctccggcgcgctggcgagcgccggcaacacggccaacgcgctggggtccgcggtgacggcggcgagcgcggacacgcttccggggctgaacacgctgggcgtgtcgctgtcgcgcatcgactacgcgccgtggggcgtgaacccgccgcacgtccacccgcgcgccaccgaggtcatcttcgtcctccagggctccctcgacgtcggcttcgtcgccgccgccagcaaccgcctgtacgcgcgcaccgtcagcgccggcgatgtcttcgtcttcccccgcggcctcgtccactaccagaggaacaggggcggcgaccccgccgtcgccctctccgccttcgacagtcagctgccaggcacgcagcccgtcgccgaggccctcttcggctcgtcgccgcccgtgcccaccgacgtgctcgccaggagcttccacgtcgacggaggactcgtggaggccatcaggtccaagttcccgcccaagtagaagtagaccttgccactgccatgctcatgcaatgcaagcgccacgtacgtacgtgtacgtattatatatacgtacgctggtatcaataacaatcgaggcgtggtttaattgaacaagcactgtcgctttgtatgatgtgtaaggtggtgtgtttctgtcgacgtgcaaatccagagtaatgagtgtcctgattacattaattgttgcctggattaatactgttgctcttgcaccatagtcccttcgatccaaattacacttcctttcaatttaaaaaag

SEQ ID NO: 84669 - DNA, 346 bp, Zea mays
  Clone ID: MRT4577_177228C.1
agagggacaggggcctttttctttacgccgaaacaacccggggtcagttttcaggggggggccccagggcaacggggtttttccggttcacagcagggttagcaagtaggagggcattttcctttggggggggagtttaacccttggagattttgcaaaacttaaacaacctaccggtgggggatttttttttcaacagttttactgggttttgggatttttaagacctgcccacgttttatcccaaagaatcttgcttttggatttgtaatttgaatccggggcacttgggttttcttttcgggggaccgtttttaaaaaggttttttggtttccggtgttaggg

SEQ ID NO: 84670 - DNA, 108 bp, Zea mays
  Clone ID: MRT4577_177229C.1
gcttggccatgacacaaacgaaaatgttttacatccgaaagaataaatcgcaacgttactctcgcttagcttctgtggcactgcaggagtgaaaataacgcaaggcaa

SEQ ID NO: 84671 - DNA, 615 bp, Zea mays
  Clone ID: MRT4577_17722C.1
ccggccgggactttaacactttgacaaactttccaacgctcctttatttctacttttctgcctcactcttctcttcggctcaaccaaggtctacgttcgctcaccttgcgcatctttaacaatgttggacaaaatcgtcggtctcgccatgctcgtggccgcttccgtcgtcttcacctactacaccatctggacccttctcatgccctttgtcgacgacgatcaccctctccaaaacttctttcctcctcgcgtttgggccattcgcatccccgtcattatcatccttctcggttccgctgttgttggctccttcctgagcatggtcatgattcggagcaaccagaagaaggctgcaaaggccaaggctgccgctaagaaggccaactatacaatcaatatgccgattcatataccttttaattgtttactggcattaaaagtcacctaatcgcaccacggaacatgacgacgtcctgaaccttggataccgtggggcatcagcttatgcagaagaaataaaagagcactatgggaaatgggcatctaatgtgtttctatttatttaataaggcattatgacctgtcaaaaaaaaaaaaaaaaaacccgcggcc

SEQ ID NO: 84672 - DNA, 401 bp, Zea mays
  Clone ID: MRT4577_177230C.1
gctaggtgcagtacccgccgctggcgcgccacctccgggcgcagccgcaggggaccagcaggcagctccccgggttgagcggctcagcgcgggggtgcagcagcagttgaacctggaggggatgcgcgcgcgcgcggtggggctgtacaaggccatctcccgcatcctcgaggactttgacgtcatcatacgcaccaatcccagcgcctcccccaagtggcaggacgtgctcgggcagttctcgatggtgagcatggagctcttcaacattgtggaggacattaagaatgtgtccaaggtgtttgtcgtgtacccccggaatgtcaatgccgagaatgcaacaatactacctgtaatgctgtcgtcaaaactgctgcctgagatggaagttgaggaaactt

SEQ ID NO: 84673 - DNA, 148 bp, Zea mays
  Clone ID: MRT4577_177231C.1
ccccgcacgggattttgtgttgcgcgccctgaaacggggacccgggacacttgacaaaccacgggcgccagggccacgcccactgatcaggataaccacatttactgcccctcaagagctacacccgtgcaaccatatggtgggccta

SEQ ID NO: 84674 - DNA, 351 bp, Zea mays
  Clone ID: MRT4577_177232C.1
ctctatttataattgacgcatgttcacaggtgtacgaggccagtggctactacggagccgctggggcactgacacatctgacgcgccatgcgcgggcgggatccagcgcaggaaccgatcacacctccatgtatgtggatccagcgcatgtgcccctcgcacctacatttatggtgcctggcccggcctcccacttaacgccacaccgacgaggagcaaggatggggccgcgcacgagcgcgtgcacataccatgtcaggatcaaactcactccgggtgagagcaggtggccatggctgtaacggtcgttttttaaacacatgtgaaaaccaatgttggatgaccgactag

SEQ ID NO: 84675 - DNA, 327 bp, Zea mays
  Clone ID: MRT4577_177233C.1
gatgaggccgtcgctgccggcgtacagtaggggggcatattacatgagggccagtgttcgtggacgaccaccatgcgtgagaaatagggccaagcgcttgaacttacagcgagatggacaatgatagaaggcaacttgggcagagcgatacaaggagagcccgctgtccttgctgctcagtatggactccaataccatgcatcgcttgagtggtgccgtccataggacacatgggcctctgcatggaagacggcgtaaaggaggtcgtctctggtccacatactgtatgacttgacaattttgaatctggggctggagggggctaca

SEQ ID NO: 84676 - DNA, 461 bp, Zea mays
  Clone ID: MRT4577_177234C.1
ccggccgggaaaccctagctcagactctcattttcaacctgatggcggcggctggcttaacggttaagttcacacgttggcggcgatggggatgaagcaggagatgccgttgctgctcctgtaggatctcggccactactccctgtccctagctcactgctggcggcaagcaatgaagcaagtagcaataatcaaggcagtactccaatagtattctctccactctccaacctccaattgctgcccagttcaaccggcaccatatctcagcaagagaagcaaacaggcatgtattcttcaatagatgctcatgcttatactcttttttctttgcaaatccgctaaaagggttagcttccgctatacccggccatagcatggactcagctgttctggaacccaaccgataaacctcttaccccgggattaacgacatggggttctctgggcgggcagggccc

SEQ ID NO: 84677 - DNA, 388 bp, Zea mays
  Clone ID: MRT4577_177235C.1
cgtgcttgtttagtctttcttttttctagagcgcaagacatagtctattggctcttatgtatcacccggcctaccaggttgacaggcggctaactctttgtagcatgaccaacgcacgggcgagcaaatagagaggccccccccaggcggggagagtctattacggcctgcgtcatgcttgatgcggactactcggcgcgcgtcccgtggaaatgcagccaaaccatagtgtgcatcattcattcgctcatcatcgggctgcgggcatatgctctcacgggaggccaacgctctcagctaaatacttgaaacccgtgggcacggtcctgccgaaacactggaggttgacgctgatatcgattggctcgttgaggctgatcccgaggat

SEQ ID NO: 84678 - DNA, 127 bp, Zea mays
  unsure (1)..(127): unsure at all n locations
  Clone ID: MRT4577_177236C.1
ggcaatggaacaccaattattccttgtgcnattggaacaatagtttacatcatgggtaccaaaccggaaaaccaggncgtgcgcgtcacatgcgatccggnacacnnctaaaggtgcaccggcccca

SEQ ID NO: 84679 - DNA, 212 bp, Zea mays
  Clone ID: MRT4577_177237C.1
acagagaagcaataaagtaatgtacaaaattacaaggtggcagctttgtgtgtgtgtggaggactggtggtggtgggggatcaagcactgacataaactagttttacactgtataaaggattacaaggaaaaaaacaaaactttcctcaaacttgaagcatgccattatatttaatagagaacaaactgcaccccaaaaaaaaaaatcgctt

SEQ ID NO: 84680 - DNA, 1306 bp, Zea mays
  unsure (1)..(1306): unsure at all n locations
  Clone ID: MRT4577_177238C.1
gccggccgggttccgannagcatacccgngnagctcgctctctctcccacctccccctccctccccttttgaccctccctcccagctgcaaaaccgcgggccgcatcccgcccgcgccgcccaccggcggccacagccgcctacataaaccactattcgaccactcgccgaaccaagccacccacccaccacccaaacccaatggcgtccaacctcctctccgccgccgcggatggccacaagcctggccccgtgccattcttcgccgcggggattagttcggtgcttcaccccaagaacccatttgctccaacattgcattttaactaccgttactttgagacggatgcaccaaaagatgcacctggtgcaccaagacaatggtggttcggcggtggtactgacttgactccttcatacatcattgaagaggacgtgaagcatttccattctgttcaaaagcaagcatgtgataaatttgatccaagtcttcacccaagattcaaaaaatggtgtgatgattatttctatattaagcaccgtaatgagcggggggcttggtggaatattttttgatgaccttaatgattacgatcaagaaatgcttctcaacttcgctacaggtgaaaccatttgctagagtgattggatggaattatttgtattcagaatgtgcggactctgtacttcctgcctacataccgatcatagaacggcggaaggacaccccattcaatgaggaacacaaggaatggcagcagttgaggagaggtcgttatgtggagttcaaccttgtctacgaccgcggtacaacattcggcctaaagactggaggaagaattgagagcatactcgtgtcccttccactcacagcacggtggcggtatgatcataaaccggaagaagggactgaagaatggaaacttctggaggcgtgcataaatccgaaggattggatctgattagccgaagtttctttattcttgagatcttttgttaattttcccttgtgtagcgctaagatatcagttcacgtgtagtttctttatttcttttgtatatctgtaggatcgtgaataaatctgatataattctgcagctgtttgtatctaatctgctgcttttcccccatgtgaatgagagaatcattgccttgtgtatctacaaaggctacagtttgtcagtttgttgccggcctgtcgcttgaaattcgtagttacagtgtgagcggagtttggacaggccgtctctatattcttgtgtgaaaagtaactggaatagatacattgggctgaatttggattgt

SEQ ID NO: 84681 - DNA, 421 bp, Zea mays
  Clone ID: MRT4577_177239C.1
ggactctgtacttcctgcctacataccgatcatagaacggcggaaggacaccccattcaatgaggaacacaaggaatggcagcagttgaggagaggtcgttatgtggagttcaaccttgtaagcggttttaggcgactacaaccagtgtcttgcttggatgcctatcttctggctttaacatgctcgtctttggaaggtctacgaccgcggtacaacattcggcctaaagactggaggaagaattgagagcatactcgtgtcccttccactcacagcacggtggcagtatgatcataaaccggaagaagggactgaagaatggaaacttctggaggcgtgcataaatccgaaggattggatctgattagccgaagtttctttattcttgagatcttttgttaattttcccttgtgtagcgc

SEQ ID NO: 84682 - DNA, 332 bp, Zea mays
  Clone ID: MRT4577_17723C.1
aatccttattattattctcactagtagatctgttaacacaaacagcagcagctactcctgagtagctagccttatgtatgggtgctactgcaagtgctcaagtctgcaacgacgcccgaaatgtcgacggtgagacgtgcatccattgaccagaagcttgcactagtcaagcgctgctcccgagaggctactattgccggagctaaggcggtagcagtggcaactatcgcctcagagatttccaccatcacgagcatgcggatgctgccatgggccaaggccaacataaaccccaccgtgcaggcgctcatcgtcttcacggtggccgggat

SEQ ID NO: 84683 - DNA, 538 bp, Zea mays
  Clone ID: MRT4577_177240C.1
ggccgcatcccgcccgccgcccaccgcccatcgcccacctgtggcaaccgccggctacatggaccaccaatcgaccactcgccgaaccaagccacccaccccaaacccaatggcgtccaacctcctatccgcggtggcaatcgagaaggagacgccggagagcgagctgcccccgacgttcctccgcgaggacgggcgcggcgccgggtccgtgcgggcgcggttcgagtccatgatacggcgggtgcagggggaggtctgcgccgcgctcgaggaggcagatggcggtggggcgcgcttcgtcgaggacgtctggtcgcgccccggcggcggcggcggcatcagccgggtcctgcaggacggccgcgtcttcgagaaggccggggtcaacgtctccgtcgtctacggggtcatgccacccgacgcctaccgcgccgccaagggggaggccggcaagaacgaggccgccgcggatggccacaagcctggtcccgtgccattcttcgccgcgggtattagctcggtgcttcaccccaaa

SEQ ID NO: 84684 - DNA, 1772 bp, Zea mays
  Clone ID: MRT4577_177241C.1
gcacgagagagaactagtctcgagttttttttttttttttttcccatagtagtagcaaatgatagtgttcagaaacctgaatccttcgtaaatacagaagccaatggttctctcattcacatgggggaaaaacagcagatagatacaaacagctacagcattactacatcatatttattcacgattctacagatgcaaaatatataatgaaactgcacgtggtcttagccctacagaagggaaaactctaacaaaagatctcaagaataacggctaatcagatccaatccttcgggtttatgcaggcttccagaagtttccattcctcggttccttcttccggtttatgatcatactgccatcgtgctgtaagcggaagggacacaagtatgctctcaatccttcctccagtctttaggccaaatgttgtaccacggtcgtagacaaggttgaactccacataacgacctctccgcaattgctgccatgccctgtgctcctcattgaacggagtgttcttccgccgttctatgatcggtatgtacgcaggaagtacagagtccgcacattctgtagcaaagttgagaagcatttcttgatcgtaatcattaaggtcatcaaaaaatattccacctagcccacgccgctcattacggtgcttaatatagaaataatcatcacaccattttttgaatcttgggtgaaaacttggatcaaatttatcacatgcttgcttttgaacagaatggaaatgcttcacgtcctcttcaatgatgtatgaaggagtcaagtcagtaccaccgccgaaccaccattgtcttggtgcaccaggtgcatcttttggtgcatccgtctcaaagtaacggtagttaaaatgcaatgttggagcaaatgggttcttggggtgaagcaccgaactaatccccgcggcgaagaatggcacggggccaggcttgtggccatccgcggcggcggccccgttcttggcggcctcccccttggcggcgcggtaggcgtcgggcggcatgaccccgtagacgacggagacgttgaccccggccttctcgaagacgcggccgtcctgcaggacgcggctgatgccaccgcccccgccggggcgcgaccagacgtcctcgacgaagcgcgcgccgccgccgtcggcctcctcgagcgcggcgcagacctccccctgtacccgccggatcatggcctcgaaccgcgcccgcacggacccggacccgtgcccgtcctcgcggaggaacgtcgggggcggctcgctctccggcgtctccttctcgatcgccaccgacgcgcgcacgcggagcgcgcggctgctgcggcggggggcgaggccgaggccgccgcgcgggaggtgcgcctgcaccggcacacgcccgcggaggcccgcgggggccggcgccggcgacggagctagggttcgggacggggcggagaggaggttggacgccattgggtttgggtgggtgggtggtttggttcggggagtggtcgattagtggtttatgtaggcggctgtggccgccggtgggcggcgcgggcgggatgcggcccgcggttttgcagctggtgagggagggtcaaaaggggagggagggggaggtgggagcgagagcgagctcccgggttatgctatgctgaccctcgcctgctccaagggcaaaaggagaaggaacagccttgtgcggtctcggcgctgtcgccatattaggacccagccaaaggcatgcccgcggtcctcgagaagctcaacc

SEQ ID NO: 84685 - DNA, 1699 bp, Zea mays
  Clone ID: MRT4577_177242C.1
ccgatcacatgtgcattgccaatcgcgcgcccttcgcctacgccacagcccacagccaacagccgaggccgaggccgaggccgaggcatcccgcgccgcgccgcgccgtgccaacgccttccccttccctgatgaccagacgcgcaccggcgccttcccacgtctgcacagcgcccaccgacagcgacgcgggcgcaatcctccaaagtccaaagtccaaacccgtggcgcggggcagccgagcagggtgcgcctccgccaccacaaagagacgtcgcgccacactagcctaatccccgcgctggcgcctggcgggcagataacggtcgcggcacggaaagggcgagagagaagggcgccagagcactagtacaggaggcgcggagcaggaggagacacatggcagatgaaggcgaggaggcggtgccgccggccgcgatggtgggggaggcgccaacagaggactttgggctgcccgctgagctgatggccgtgctaccatcggacccgttcgctcagctggacgtggcgcgcaagatcacctccatcgcgctctcgcaccgcctcggccgcctcgaggccgaggcggcgcgcctgcgctcgcagctcgccgagcgtgacgccgaggccgaggagctccgcgagcgcgtcgagaagctcgactccgcgctcgccgtcgccaccggccgcctccgccgcgctgaggaggaaaaggagacactgctgcgggacaactctgcgctgtccaacaccgttaggaagctgaacagagatgtcgccaagttggaagttttcaaaaagacacttgtgcagtcgctccaggaagatgacagcagtgataatactgctcccaggccaagcgttgcagcaacttcaaacttctctgcgccatcagatgaagattctgcatttccaacttccaaatcatcacagatttcagaaactgcgagttcagtttcagaggaaaagaggaaaataaccaagttgacccagatgcacctaggcggccaccccgtccacatgtatttttgccatcatacaatagcacaccaaggatgactcccccagactcacctccaaggcgttttgcatcggtatcaccgccaaggcgacattcaatctctgttacatcgatgaatatgtttaatgacaggtcctcaggcttttctggtcagcatagctctccatttgacgctccaagtcaaacaggacgaacaagagttgatggaaaggagttctttcgtcaggtcagaaatagattatcttatgagcagtttggtgcattcctggctaatgtgaaggagctgaacgcacataggcagaccagagaggataccttaagacaagcttatgagatcttcggtcctgaaaacaaggacctgttcaccatttttgagggcctaataagtcgcaatattcgctagtctcattacccatcgttactagtgattcaagttttaccggtatattgttattacgatattcatcactgtttgtatttgaagtctgtggtctgttacggattcttggtatatagtagttctatggttcatcttttcatgcttatgtccatgtagaattctgggtttgtctggaagctacaatttatattccaatacaaatggaagctaaaattgtacgtaccaaaaaaaaaaaaaagcttgcatgtttctacattatttattatttttcttctttt

SEQ ID NO: 84686 - DNA, 249 bp, Zea mays
  Clone ID: MRT4577_177243C.1
tttgaagccggagttgatggagatvatgaaggsggcggaggtgtgaagtggggttaagatgttcvaaccgttcaccsgtgttggggtgatgtgctgaagagagatsagagtatttttttgtttaacggtgccgtgctatgtaagctactaactttgggctggtgcggatggtgatttccctccscccctagstttttgtgaggstactctagaggttgattgagcttggtaataatgtttgsgtctgga

SEQ ID NO: 84687 - DNA, 420 bp, Zea mays
  Clone ID: MRT4577_177244C.1
gtccaaattcagcaagtttgaaatgattacttggatttcttctgtgaggaggcctatattgggctagttcttgtcttgattaatgaagccttgtatgcgcaaatggctgattattttctttcttaatgcttgctttagactttagcactttttagaaggaagtaaatgcccaggtgaatgtatttgagttagtgactatttaggccttgtatgtgcataatgaaatagtaatgcaagtcgtaaaatttagcacttttttcatccatccgcggtgttaccctttattgcttagtcttacaaatggctatgatcctgataatgattagtcgcttgatcgaatggtgtaataatatgtttggctgatgtgttatgcctaatctgttagactggtagttctaaggactagtcgaaatacttcta

SEQ ID NO: 84688 - DNA, 183 bp, Zea mays
  Clone ID: MRT4577_177245C.1
ctcaccaacaaccaacgactcggatgatggaaattcttcaaaatcagatgatgaccgagacagcgacggtgaacaataacatgagcacttgatcgcagcaaccggcggacgaaaagatctcagagatacacacaggactttgctgaggctgtctcggatattgatcctaactttgacagtgac

SEQ ID NO: 84689 - DNA, 305 bp, Zea mays
  Clone ID: MRT4577_177246C.1
aaaaaaaagtttttagccaaaactagggcaatgttttaaaaagaccagggttttgaatttccccgaaacctcaggattactttccggggggttattttattttttttaaggggagaatacggccccaggaaaacattccgacaaatgcctggagaggggacacacctttccccaaaattatattctttccaaaaaccccctgggggggggccaactaaagggggtttatttggggggggcccccccaagcgggaacatggggggggaactaaaaaccggggggattgcccttggaaggttttttt

SEQ ID NO: 84690 - DNA, 629 bp, Zea mays
  Clone ID: MRT4577_177247C.1
ccggtttcggatcatgttttctatcttcttaatcatgggtttgacacatatctacgtggattgcaatctaatctaccattgggggcttaaggtggcaaacagggtacctgtacccgtttcatgatgtatgaagctcctcttggctaccgcattgacgaccctcgatctgtcggaggtgtgaagaaccttcacactgctgcttactcctactgggcgaacaatccatcctgatatcccttttggcttactcattctcaaatacctaggatactgttttctgacgctttgattatgaccaatctctctggcctgctgttttctgatactcgaccaggtcccaagccttgctccttgtactactcccttctccatctacaacattgtgctctgattcaactgctccaatggctgctctttctgctgctgatgcttccacgggctcaggtatcgcttttgagggctatgagaagcgccttgagatcacattctctgaggcacctgtctttgttgaccctcatgggcgtggttagcatgccctctcagagcccacattgattctgttatggatcttgcacagagcacaattgtgtccgagctctacaacaacgattacgactcatatgtcctct

SEQ ID NO: 84691 - DNA, 345 bp, Zea mays
  Clone ID: MRT4577_177248C.1
atggctaggatcaggtctactgctaggataacaaacaaaggtgaagagactgaggcaactgagatagccccaatctcagaagtaatgagacgttctgagttggttgcccaagaggaagaaggatctgttcccgagaaacatgacgtcattgccgaagctgaacaaactgttgtcgaagctgctagtgatgatgaagaggatgatcacatcttgagtccaagcaatcctaaccatattgaatttggaaaatccactttaaaggcaaaagatttgattttaatgaagaagcttggatattttggaaaaaatgatgatgaattgataaggttcgctgggacgaagtag

SEQ ID NO: 84692 - DNA, 837 bp, Zea mays
  unsure (1)..(837): unsure at all n locations
  Clone ID: MRT4577_177249C.1
cgatgtaagagtattattattagcattcacaaacgcgataacatttttcacatattacatgaacaccacagtatatgacacaggaacactcagtaatcgtatatatagatcatcatgcaagggccgaggggacagtcgctttgtcctgacctctgaaactagccaaccaacaccaatgttgcattaattgcaggcacactgaagagtgaagactcatgactagctgaaaaccgaagggactaaacgagcaattagatagagggcctgaatttggtgcacttgctttgaactgaacgtggagcgtgcagtttggacaggtagcaacagcggcggggtccaccaccaatggctcagcacaccccccccgcgtctccgcccgaggacgcctggagccttccgtacatgtcacctcccgggnnnnnnnnnnnnnnnnnnnnnnnnnnnnnnnnnnnnnnnnnnnnnnnnnnnnnnnnnnnnnnnnnnnnnnnnnnnnnnnnnnnnnnnnnnnnnnnnnnnnnnnnnnnnnnnnnnnnnnnnnnnnnnnnnnnnnnnnnnnnnnnnnnnnnnnnnnnnnnnnnnnnnnnnnnnnnnnnnnnnnnnnnnnnnnnnnnnnnnnnnnnnnnnnnnnnnnnnnnnnnnnnnnnnnnnnnnnnnnnnnnnnnnnnnnnnnnnnnnnnnnnnnnnnnnnnnnnnnnnnnnnnnnnnnnnnnnnnnnnnnnnnnnnnnnnnnnnnnnnnnnnnnnnnnnnnnnnnnnnnnnnnnnnnnnnnnnnnnnnnnnnnnnnnnnnnnnnnnnnnnnnnnnnnnnnnnnnnnnnnnnnnnnnnnnnnnnnnnnnn

SEQ ID NO: 84693 - DNA, 590 bp, Zea mays
  unsure (1)..(590): unsure at all n locations
  Clone ID: MRT4577_17724C.1
gtggnaacgtcatccctggtagatgagcaacctaatcctgtgctggatggtgatgaagttgagaagcacagcttaaactgtgaggcagacaccggtcggattcttggtactggatctgttacgagcaacacaacccttgtgcccaaggacggtcacaccatttgttgccaggaactggagctaccaaatggcttatcctcgtttctatttcccgaagaatctggaatttgtcagtatgcgagtgtttcaggatcagggccttgcctgcagcacgtaaatgaaagcaccagtacgcaagcgacttacaatattgaaacgctcaatcagcatcacgaggagtacgatcaaaataatgaagaccgaaccgctcgtggtatcctggctagcagttttcctgaagctgtagggattgaacagtcaggtctgacccctgctgcagaagcaccagtgttgccagtgccagatgggcagcctaacagcaagctggagggcaacgaagtggatgagcacagctgtagctatgatgccgagttcctgaacagagaagcgtctaaccttcacaaagatgtttgcgtggatccgtgcagtga

SEQ ID NO: 84694 - DNA, 1053 bp, Zea mays
  Clone ID: MRT4577_177250C.1
cgaggtaagagtattattattagcattcacaaacgccataacatttttcacatattacatgaacaccacagttgatgacacaggaacactcagtaatcgtaccggccggggctcattcaaacccacccggccgcccacgcgtccggtgatttgaaataattgggaataaatagttcgtgaatccctgaagcgtgcatatatatattcctgccaagataaaggtaatggagtcgtcacgcaggttccagccggccgtcatcctgcttctcctgctcattgtgtccaccgatatggcacaggcaagggaatgcgagaagtacagtgagcgatttgttggggcatgcatgatcgcagacaactgcgccaatgtgtgccgcggtgagggcttcttggccggcaggtgcagcaccttccgccgccgctgcatctgcactaggcagtgctaaacaagatcgctcgatcgctcgccatgcatcgacaacctattcttaataacgttcattatctcgttcttatttatgacgaatgtcatgtatgttctggtgactgtcatgtatattctgatgactgtcatgtatcttgttcatgtatgctcaaggttcattatcttgttcatgtattaagtatgttatgaataactcaatatttattattttgttcatgtatgaattatcttctaatgagctcaaggttcattatcttgttcatgtattttacacacgaaagtttactcatcgaagatatagatcatcatgcaagggccgaggggacagtcgctttgtcctgacctctgaaactagccaaccaacaccaatgttgcattaattgcaggcacactgaagagtgaagactcatgactagctgaaaaccgaagggactaaacgagcaattagatagagggtctgaatttgttgcacttgctttgaactgaacgtggagcgtgcagtttggacagttagcaacagcagcgtcgtccaccatcaatgagctagcacagcgccaccgctcctccgtccgaggacgcctggagcatcatgtacatgccagattggt

SEQ ID NO: 84695 - DNA, 405 bp, Zea mays
  Clone ID: MRT4577_177251C.1
ggcaaaaacacaaacggggctttgtttttcaaaattccccaataaaaaattttgggcggaattatggaaacgaaagggacaaaaaatcccttttttaaactacaaaaaaacccccggttttaggacaacaaaaaatttaaaaaaggggggggggaaaaaacccctcttccttctcaaaaaaaagctttttttagggggcctaggggggacccaaacaaactttttttttcaccccagggccgaagggggggcccatttactgggccttgccttttgggggggggggggtcaacgggttcagttcatcccaggccttgatccaggggaccatggggtccccgaccttgaaaaggagggggaaatggggcccagtttttccttcatttgtccaaagagggaaaggga

SEQ ID NO: 84696 - DNA, 277 bp, Zea mays
  Clone ID: MRT4577_177252C.1
aaaaaaatggtgtatgctctagcagatccaatctgacaacacgtcaccgcatgaaaggctatagattttattagggaaaactacattcattttacgtgtgagctgttttacaacgccataaagtgggtaaaaccctctcgtgacccaactgaactacctggcctacatcaccttaatcgaatcccatacacctaaaagaccccaacaagcatcctttgcaacagtagcatcatactacatgtagacggaaacgcgcactgtacagaaacattaactc

SEQ ID NO: 84697 - DNA, 395 bp, Zea mays
  Clone ID: MRT4577_177253C.1
aattcggcacgagggctccactacaccacacagtatccgcagtaatactcgcaggggaaaggagatggatcgtctggccgagtcgacccggatcatgaggaaggactcgtcggatgcctggaggcttcgcgcggcgcggcagggcccccacgggcggtcgctgacggcgcgcacggcgcacatcatgtccacgacggcgctgcgcaccaagtccaaatcggccgcgtcactgctgcgcatggtgcccttcgcgccgctccgccccgtcctagccaaccagcatgatgtgttactcggcaccaagctcgccgagctattgcccgccgagccggtcgacatagcgcgtccagtgcgagacacttatacatgtgtgggtgtgtacgctcagcctactg

SEQ ID NO: 84698 - DNA, 302 bp, Zea mays
  Clone ID: MRT4577_177254C.1
ctttccttcacagcgtagtggtgccagttcccacctctccgtcctcaagcagcgcgtcgagctcgagcccgagacagctgcacagcagcagcagcggcgagtggcacgccgtggtgcggcggaacgtcaagtcctcgctgctgctggtcgtggtgctctccaccgtcttcgtcttctccgtcctgcagtcgtcgcacggcttcggcgcaacgacgcctgaccagcaagcgctgacgcagacgcagacgcagacgcagacgcagacgcagagcacggaccatggagccgtcggtcgttttgtg

SEQ ID NO: 84699 - DNA, 267 bp, Zea mays
  Clone ID: MRT4577_177255C.1
gccaccacctgagccccgactactggctctgatggttcaaggactagccactgaccagataatccttaatgcttaacaatcaaagctcgggagacctagtcgatccggggtagagcatagccaacgtatattgacttgcaatccgtggaaaccgtccaacgcacgcttttactgcagactggatgggcccaattcaaaaatggtctcgtccgggatcacggacatgtacgcgctaatggataggatgccaacagtgtacctgagcag

SEQ ID NO: 84700 - DNA, 837 bp, Zea mays
  unsure (1)..(837): unsure at all n locations
  Clone ID: MRT4577_177256C.1
ggaccctcgggctcgccgggtgctgaaacttgatgagatattctactagactgcaacatgctgcgtgcaatcctatggcctccggaaggaagaaagaaaagatatcctagcaagctgcgcattcaaacaaaaaaggagagtagcacacccagttatatgtggtggtatatttcagtatacgatgaaaggctgctctggtcacttttgcccttaaaacagtatttcaattactacattgtacatgtggagatttcctctcctggtcgcctaccagatggcttggcatgtacaagtgatgaaatgatcctagaagtgacaaccccagaaggtaataacacgtcaatatatgtagacgtcgccaagggccacctgctacatgtgaagggagatgaaggtgattctcctatatccttcacaagggtatggccctgcccacgtgctcctgatttagtccaacaaaactgctacctgcacatacaagactggccacagggaagaaaaccacaacgaactagtcaaaaaaactgctaccattactattccagatactatatgcaacagtactggcatcatacatgtgcacgatagcttgtacatcactcggatgccagacccagcaccttctggtgcagtctgggattatcttttttggtgccgagtggagcagtgccctaaaatggattgtgtattcacaagttcgtncatgttaggtgctgagaacagggacgacaggatcttttggagactggcaaacgctatgggtgtcccagcttnccaaggcacggntcatatggagctcgaggaacacgagatcagcggtcattcgtttgagtacct

SEQ ID NO: 84701 - DNA, 2210 bp, Zea mays
  Clone ID: MRT4577_177257C.1
cttggagtagcaaagtctacaattgaatgtggtacaactctctggaatggtgacttgttggcagggtcgaaacacttgcggtttcttgacctctctggtaacgaaataatcagtagtggaaagagttgcatatctgccacagaaaaaagctgcagcctggagaccatcgtcattcatcaaggatgtgctggactagagaagatctcattggccgggtgtgctcagctagagaatgtactcttgacaggatcattcaatgagctcgtgagccttgatatctcaggatcagctgtgaagaggctggatctcagtgcgatgataatgctgaaacttaatgagctaattctactagactgcaacatgctacgtgcaatcctatggcctccggaaggaagagagagagaatatcctggcaagctgcgcattcgaacaaaaaaggagactaccataggcagtgctactgctccatcaggattgacaatgatgtttggtagtctagtccccgccgaatatttgtggtggtatatttcagtatacgatgaaaggctgctctggtcacttttgcccttaaaacagtatttcagttaccactttgtacatttcgagatttcctctcctggtcgccgaccagatggcttggcatgtacaagtgatgaaatgatcctagaagtgacaaccccagaaggttataacacgtcaatatatgtagacgtcgccaagggccaactgctacatgtgaagggagatgaaggtgattctcctatatccttcacaagggtatggccctgcccacgtgctcctgatttagtcccatcaaactgctacctgcacatacaagactggccacagggaagaaaaccacaacgaactagtcaaaaaactgctaccattactattccagatactatatgcaacaggactggcagcatacatgtgcacgatagcttgtacatcactcggatgccagacccagcaccttctggtgcaatctgggctaatcttttttggtgccgagtggagcgttgccctaaaatggattgtgtattcacaagttcgtccatggtaggtgctgagaacagggacgacaggatcttttggagactggcaacgctatgggtgtcccagcttcccaaggcacggttcatatggagctcgaggaaacacgagatcagcggttattcgtttctggacctagacttcgtgcatgtggacttctgcccccggttgacacatgttcttcccttgtccatggcattgatcagaggaagtggcctggacagtctaacaaccctagagattgtgtggtgtggagatctgagggcagttttccctttggacactgatgcccagagctaccaagatcatcggcgaaaccaggcaatcaccgtggaatttccttcccttcagcgtattcacttgcacgagtcaccaaagctgcatggcttatgtggccgtggaaggatgtacgcaccaaagcttgagagcatggtgatcaggggctgctggaacctcacacgcataccatccgttggcgatggcggcgaccgcattaccaagaaggtgaagtgcgactgtgagaaggagtggtgggacaggctcgagtgggactggcttgaagaaagacaccatccatccctatatgagccaactcatccaaaatattacaagaaaaccttgctcaggacctccgtgctcagatgagcattgctcaagcctaataatggtgatcgatatgggccatgaccagtgtgatgtgctgctctatatatgggccatgatctgtggtcaccagagtgtttgttcttcgatttcacctgcatgtgtgttttggttttgcttgttgtttttcaaatctgtgacatcgcatccacagaatattgttcacttgtttccatggtgtgtggacttccgatcttggattgtggtctgctgatctgcgtcgcaacgcgaactatctgcaaaatgtatcagctcttctcagtagacacataaataaatatgggtgagccaaaatgcatttggttagtagctggatgtgtttgccccctcataatatttgtaactctgtactctccctgggttttctggtgtggcgtgtatttgtcagcattgtgtaaactgaatgactgctcctactgttgtgcttgctcaagctacaaacatatatataaatggatctggacttttgtgtctgcagtagcagaatttgt

SEQ ID NO: 84702 - DNA, 606 bp, Zea mays
  unsure (1)..(606): unsure at all n locations
  Clone ID: MRT4577_177258C.1
cccactcttacgctcgaagaaaagctaacagagatgagaaatcaaactgcgtggtcaactacatgaaaaatgaaagtgggcctgctgttagtaagactgatcttaagcataaacagctacttaaacagttataaaggtcatcatcaacctcattatccaaggttttatacaagcaatatgtgaaggtagatatggtactaaacacagtacttgtggtagaggctctcatagcggatcacaaaaaggcaattgaaagtgcactggaaatagtacgagtagagatgaatgtattacaagaggtcgatcatacagacagctttattgacaacttcatgtttcagctaagctttatggtttctcggtaggcttgtgttttggtaagctttcaagcacgcttggaacggtttaaggaacacctgatggtacaggagattattagacggaaataaccattaacatagattaaaccgaccttaatggaaacctttcatcttgtagatcatcgcaagctgcctactatactggatactgacatcctttgctactgccttggatcatggccttcaacatnntcttttanggatctaagggagaaaggatnggaga

SEQ ID NO: 84703 - DNA, 751 bp, Zea mays
  unsure (1)..(751): unsure at all n locations
  Clone ID: MRT4577_177259C.1
ttcggcgccaagattcgccactccgtccgttaccttcactcgctcactcacaatgcggcgccatggcgaggtacgcgtgatcttagctatggccgccgccgccgccgccgcgctcttggcgtcggcggccgtggccggacgagacggccggcagacctacatcgtccacatgtcccattccgccatgccggacgagttcgcggagcatgaggaatggtacgccgcgtcgcttcaggcggtgtcggatgccgccaccgtgctgtacacctacagcaccctcctccacggctactcggcgcggctgacgcgcgcggaggccgcggcgctggagtcgcagccaggggtgatcgtcgtcaacccggaggtgcggtacgagctgcacaccacccggacgcccgagttcctggggctggacggcacggacgcgctgttcccgcagtcgggcaccgggaccgacgtcgtcgtcggggtgctcgacaccggcgtctggccggagaggccgagctacgacgacaccgggttcggccccgtgcctgcgggctggaagggcaagtgcgaggacggcaacgacttcaacgcctccgcgtgcaacaagaagctcatcggcgcgaggttcttcctgacgggctatgaggcggccaagggccccgtggacacgtccaaggaatcccggtcgccgagggacaacgacggccacgggacgcacacgtncagcaccgcggcgggcgggcgccgtccaaggcgccgacct

SEQ ID NO: 84704 - DNA, 1003 bp, Zea mays
  Clone ID: MRT4577_17725C.1
agcacatcacacttcaactcaattcccattttatataccccaaacttctttactcttcataaacccacataatcgccacaatgcccatcaccgttccccaagctaccgagctcaaggacctcttcagccttaagggcaaggtcgtcatcgtcaccggtgcctccggccccaccggtattggcacagaggctgcccgaggatgcgctgagtacggtgccgacctcgccatcacctacaactctcgcgccgagggtgccgagaagaacgcaaaggagatgagcgagaagtacggcgtcaaggtcaaggcctacaagtgccaggtcaacgagtacgctcagtgcgagaagctcgtccaggacgtcatcaaggacttcggcaaggtcgatgtcttcatcgccaacgccggaaagactgccgacaacggtatcctcgacgctaccgttgagcagtggaacgaggtcatccagaccgacttgaccggtaccttcaactgcgcccgtgccgtcggtctccacttccgcgagcgcaagactggctctctcgtcatcacctcctccatgtccggccacattgccaacttcccccaggagcaggcctcctacaacgttgctaaggctggctgcattcacctcgccaagtcgctcgccaacgagtggagggactttgcccgtgtcaactccatctcccctggatacattgacactggtctctccgacttcgttccccaggacatccagaagctgtggcactccatgatccccatgggtcgtgacgccaaggctactgagctcaagggtgcctacgtctacttcgcatcggatgcctcatcctactgcactggttccgatctcctcatcgacggtggttactgcgtcaggtaaatgtgtcattccggaaggcagatacgagtggaggaatataataatggacgacgtcttgccggaagtcttgtgtccatgtaaatagcatcgagacatcaataaagcttcgcaggtttcacatc

SEQ ID NO: 84705 - DNA, 377 bp, Zea mays
  Clone ID: MRT4577_177260C.1
atttccacccgcgcctaccctcccaccaactacgtgtacatctctcgaaccactttgcttctgatctaaacacccaccctctgtcttatcctcagggggggcgggctactaatctacaacaccaacgccctcttctggtaatgatatccaatgcattctcttcttccgattcatccttaaaatcacattgtttgactataatctaacctccatggatactcaaccttccacatgtaacaataaatagctctcctcttcactacataatcatcatactatatctgtataaaacaactcaacattaaaaacatacagccttcccctttatatgattcattcttacataactaatacattcctcctctttatttctttta

SEQ ID NO: 84706 - DNA, 531 bp, Zea mays
  Clone ID: MRT4577_177261C.1
aaactaccccccacctctcctgtgccattccatcctcccctccccaccgaagccaacgaccgaacgaaccctagactccaagcgcacgaggagagagagagggagatctcccaggtcgcgaccatggcgatgcgtgcgctgtacaacgagatccgcgcgatgaaggtgcgcgaggtgccggcgtacctcaagccgcgcctcacctggtccaacgtgaagaagagcaccgaccaggcggtggaccgctacatcgagaagtacatcgagaccagctcggttgacccgctcttccacgtctgcttcggcggcatggccttctcgtacctcgtgggcctgccccaggagcgccgccacctcgagcacctcgagaagcacggcggccactagatccggatccgccccgcgcaggagagcttatctacggttgattcaggatggtgctctccgtttttcttctactgatgggctacctggagttgatgtctatttgatggctggtttattttgtgtcggaaggcagcaatgaactgt

SEQ ID NO: 84707 - DNA, 517 bp, Zea mays
  Clone ID: MRT4577_177262C.1
gccctccctcgagtttttttttttttttttttttttttttttttttttttttttttttttttttttttttttttttttttttttttttttttttttttagcccaacgaggcataccatttttaatagggttgcagaaacccttcgatccaaaaaaaaaaaaaataaaagttttaaaaaatttcccataaaaaaaaggaaactagggggggaccaaaacaaaaaaacagggttttttttatttttccaaggagtgggggccggtttttttgccaaatccaacaacggggggaaaaaaaggggggttgtactgaatgcccttgaacccccggccggggggttttttttttttgtcctgtttccccaccttgggggtttgcccaccccccttccccgggggggaaaggaatccggaaaccttacccatgggaacgggaacgaaaagtttttgtcctcggaggatctggaaaaaaacaaacaactcggttttttacgtgggggtgggccttgggccaaatt

SEQ ID NO: 84708 - DNA, 264 bp, Zea mays
  Clone ID: MRT4577_177263C.1
gtaaaacagagtacaacatgaaaaccgggaccagcagctcctcgttggctggattgaccctcgacaataggcccaatccgtcttgtacttcttgatgtctatccggtgctctgcttacataaaaggaggcacttccgatcattgccgcaccaagcttcccttactttattgtcataggcccagacaccactactccattaactgagcatacatggttagcggggtgcttcaccgttctaactacccatgtattcatcttgccgc

SEQ ID NO: 84709 - DNA, 2144 bp, Zea mays
  Clone ID: MRT4577_177264C.1
gccggccgggcttgccggtgcaatcagaatatccagtcttcactcgtattaaagccttagcctttagcatacgtcctaatgatcgatccgatccacatagccattggcagttcagttctccgatcctctaccgcagcagcgtaggcaaagtaggaggcaaggatcaatggcgccgccgcggatctccttcctggagctctgcctctccttcctctgcttcgtggtcttctactacttgcacatcagatccaagcggaagaaccctttcgtgccgctggactggccgctggtgggcatgctcccggccctcctcggcaacctccaccacctccacgactggatcacctccctcctggtcgccagccagctcagcttcctcttcacaggcccgccgcgctccggcatgcagttcttcgtcaccgccgaccccgccaacgtccgccacgtcttcacctccaacttcgccaactaccccaagggccccgagttcgaggagatcttcgacgtcctcggcggcggcatcttcaacgccgacggcgagtcgtggcgccggcagcgcgccaaggcgcagctgctcatgtccagcgccccgttccgggccctggtgtcgcggtacagccgcgccaaggtggacaccgccctgctcccgctgctctcgcacatggccgccaccggggaggcgttcgacctccaggacgtgttcctccggctgacgttcgacaccacgacgacgctggtgttcggcgtcgaccccgggtgcctgtccgtcggcctccccgaggtgccgttcgcgcgcgccatggacgacgccatgggcgtgctcctcctccgccacgtcgtcccgatgacgtggtggaagctggcgcggaggctccggatcgggcacgagcgcaagatggcggaggcgtggcgcaccatcgaccagttcgtcgccgacacgatcgccaagcggcgggccgagaaggcgaggcacggcaacgggcaggtctcggcggacctgctctcgtcctacatcaacgacgacgaggacgaggaaggcggcgtggacgcgttcctgcgcgacacgaccatcaacctcatgctggccggccgcgacacgacgggctcggcgctgtcctggttcttctacctcctgacgcggaacccgcgcgtggtgggcaagatacggcaggagctggagtgcgtcaagagcaagagcagcggcagcggcggcggcatggcgagcttcgacccggacgagctgagccggctgacgtacctgcacgcggcgctgtgcgagtcgctgaggctgtacccgcccgtgccgcaggagctcaaggaggcggcggcggcggacgtgctgccgtgcgggcacgaggtgcgggccggggacaagatcctggtgtctctgtacgcgatgggaaggatggaggaggtgtggggcagcgactgccgggagttcaggccggagcggtggatcccggagttggaggacgggcgcagggtggtgcaggtgcggtacgtgccgtcgtacaagttcatgtcgttcaactcggggccccggacctgcctcggcaaggacatggcgttcgtgcagctgaaggcggcggcggccgccgtggtcagcaacttcgacgtggaggcggtgccggggcacgtcgtggagcccaagctgtccatcatacttcacatgaagaatggctttatggccacggtcaagaggaggcgccagacgtttgcttagcttcgacgtacgtacgtacggtccattattatctgtggtaaacatgagatcacacagtcggtacgtacgttagctcgctcacatgtatgtaccagcaggtgcaagtacacgtggtcgtcgtggcatgtacgtgtacgacactccgtccgccgttgaaaggtacgtagtgttattacgtgtacttgtacgtgtgtgctgtgcgatgtcgatcagtgcatatagcatatgggtgttttctgtggtgtggtggggcgaaatgagagtatgagaccaaacctcctagcaaatttatactctcttcgttctttttttccaaatcgtctcggtttaattgaaaactaaactatcgagaagatttggcctctaaaaaaaaaaaaaaaaaaaaaaaaaaaaaaagtactctgcgttgttaccactgctt

SEQ ID NO: 84710 - DNA, 144 bp, Zea mays
  Clone ID: MRT4577_177265C.1
ccgggcaatcgcaaaaggaacttacgctttatcacccctgttctttgaacaatcggcaggcctatctttgggggagcgattggtgcaaaccatgagggcgcagcagctgtggcaacttggtgctaccagtgatcaggggggggg

SEQ ID NO: 84711 - DNA, 287 bp, Zea mays
  Clone ID: MRT4577_177266C.1
ccgcccgccaaggggaggcacaaaaaaaacccgtggggattattggtgaaaacagttatcgacgcctgccaaaaaaaaaaagggggggcgggaattaaggaacccccctttacttgccggggcccccccccaccaccttttgcccccaagctaaagaattttaatcaccacaaagaggggggttccaaaggcccgagaaggacttcttatgggtaaacatttaatttcaaacccaagcccgcccaaaaaaaacagggggcttgccctgtgggcaagaattttttcac

SEQ ID NO: 84712 - DNA, 469 bp, Zea mays
  Clone ID: MRT4577_177267C.1
gttggcattccacataatataccccttgcttacggattttccccctcaacacactaggcgagcatgcggtaaactaacagtggccttctggatctatcacttggtctttggttacgggcatgctatacaaaggaaacttttgcagtagtacaacgtactcacggtgttttacttcgactttggcagacaggttacgacgccgccggaaactgctgaccgcctcaagatgctgctggagaggcagcagacgtccatgtgagtaaccgactctctatctggggccggccagtgaacctatcgaggctggtggatcacgccaggagcgctgctgttggggctgtcggcgcacttggtcggggtctcggagtgcctgggattttcccggatcctccgtggggctggctccgctctttggggagcccaagctaaacgccttgagcaccgtatatggctgaggaaaagcacacgg

SEQ ID NO: 84713 - DNA, 629 bp, Zea mays
  Clone ID: MRT4577_177268C.1
aaaaaccgcccccactttgggccggggttttggtgacccccccccacgttaaaggcgggggtaaggggcccccgccccccccccccaaaaagaaaaaagggggggggggggcccccccaaaaaaaaccggggcccccccccggggccatttccccccagggggccaaaaaacccccccctttgcccccaagggggaccacaaattccccccccggggaaaaaattcccccggaaaaactatggccgcacccgggaaccccgggcccctaaaaaggggcctgggggccccccaacaccggggaggcaatttcttttttggggccccccgcgcacaagacttataaagggtgggccccccggggccagggatcccggtaacgccccccagggggggggccccccccgcgggccccctttgggggggggaacccaagcccctctcccaaaatctcgggaaaaaccccccgggcccctttttgaacacccccccggggggggggggggggggatttgggggcgctcaaacccgcggccgcaaaaagggggtgttccggggggaaccacaaaggggggggggcccccccgggcgagggggctcacacccccgggaggggggcgccccccccccc

SEQ ID NO: 84714 - DNA, 509 bp, Zea mays
  Clone ID: MRT4577_177269C.1
aacacacaaatgagagtaaatttcagaaacacttgtacaattgtgttttaactataacctatctgcacaggagtacatttacaaatgaaccatacaaaaataatttagcataatattatcagtggaaagaaacataactttcaatgtgtcttcttcctagacacgaacagggccactaaggaccgtggaaagattgacttccgtggctttggctccttcaccctagttgttgctatagtgtcagctctagacaatgttccaaccatgtgaggattggatgttgatgacgatgcatcaaaagaaagcgatgtactcttaaaattggggatgtcaggaacgtccgactcattcgctttactttgctgctcatggttggccctcctcttccgtagttcattctccatggtgagctttccatattgcgctgaattggctttctcctgtgcagccctcagctccaacttcctctcattggtcttcttggtcgactgctccagctgattcaagct

SEQ ID NO: 84715 - DNA, 486 bp, Zea mays
  unsure (1)..(486): unsure at all n locations
  Clone ID: MRT4577_17726C.1
cgtggaggagcgtggcgatagtgttgtatcttaggtttctgtcggtacacattttgaagaaccaaccggctcttgggggtccagggtacatccgtgcacgggttttcgctaaagccgagcgcaagcgcccgagggttgtttacatctacaaacgtgctgcagtaggaaaacacgaagcatggaaaactgggagcgccgtgcaacttttaagagtcctcagacgaattaagcgagcgtgggcatgtccttaagccaggcgtcgcgcggcttgccgatggagcagacgatgaagccgatctccctcagcttctccggagcgacgacggtgcggccgtcgaagacgaaggcggncttctgcctgttgcggaagatcttctggtagtacagggggttgaaatggtccaatttctttcgggatgcgcacaccgtgggccgcccttggtaggccctggttccgcgtaccacacggcatgttcacccggctta

SEQ ID NO: 84716 - DNA, 335 bp, Zea mays
  Clone ID: MRT4577_177270C.1
gggggataaatttaccttatttttaaaaaaagcggaaaggggaccaccggaaaaacccggcttttttttgtaaataaaaaaatcccccctgccaaatgggggttattataaaaacaaattattttttttcaaacaaaatatccttaccggaaaaaaccgctttctaaaaagggtctcaggttcggcggggaaactttaataattggcccccaattcaaattcatttttgaataggggaacagccccaaacagggcctgagtttactgttttggcaaaaaccctaggctggtttacactggttatgttaaaaaacccgctttcacagataaaagga

SEQ ID NO: 84717 - DNA, 119 bp, Zea mays
  Clone ID: MRT4577_177271C.1
gtttgacatagacgacaggctaggggtctgcttgagatggccttaaaatgagacagatggtatgcttctagcaaatatcgtggcttcctctgagctaacttgtgatttttcctagatga

SEQ ID NO: 84718 - DNA, 361 bp, Zea mays
  Clone ID: MRT4577_177272C.1
cctggaagtaatgactcgggcgatgctttgatttttttgcgggcaactccctttagagaatcctcaaaaaattggaacccacacaaccagggggaacagaatgggcactacaacacccggcaggtggtgctttagtcatacaaaaaaaaactgaaaaaccattgtttatttttgtaccacatacaggcggttgcccaaaaaaatgcaactaaacctttaattaaacaatgtaacaataaggcaacctctgggctgtttcagaggccacgatccactcccaaaaacttggataacaaaaaaaaggacgcatttttaaagcgcagagccgagccccagcataaaagtatggttcgagtcatta

SEQ ID NO: 84719 - DNA, 203 bp, Zea mays
  Clone ID: MRT4577_177273C.1
aggccattccaagcttggtgattagcaaactacaggcgttacatgaaaaaaaaatggaccaacgatgttatttaaaacagtaattgaacaaactttgtactccaaatgtgcgttattccgtagcattccacagacattcaaggtccccttattttcgaaacccttacttttgcaaattccaaaaacagaagttaaaaggggcc

SEQ ID NO: 84720 - DNA, 316 bp, Zea mays
  Clone ID: MRT4577_177274C.1
ccctcgcgtccgataaaaaaaaacatattaataaaacaagaggaaaaaaaacttacgggggggacacttagaatcggggtgcgaaccaagatcagaccatcttgcgattcgggcggtctcgccgtccgaattgttgtctggagaggcgttctcttggactgaccggtcctaagctctgtggaaaggtacgcctgcgacgcttagtgccccgtcctgcccggaccctgtctctccacgatgcgccgtcaactagtcaggtcgtttgcgaatgcaccctaaatcatgcgggcaactctgtccatggcttaatacatgc

SEQ ID NO: 84721 - DNA, 809 bp, Zea mays
  unsure (1)..(809): unsure at all n locations
  Clone ID: MRT4577_177275C.1
ccggccgggaaactgaatgctcgatccaatccccaacaaaccctaacgctcgtgcccatgcccagggcgccgcctctagctacagtgcctcttggttcggccccggcatctcctcccacgacgcctcctccgatctcctctcccgttcccagccatttctgttcaataattcagccacgggatcccctcgtcgccaccgacgccgagctccgtgtcttccctcgtctcgatccaagactcccaggtgaaacattcagactctgaccctgtcacaaacgtgcttgtccgccgacggcggtggctaccactcgccagcaagccatctcttgaagctggagggggtccgcttcctccttgtctgcccatcgacctctccgcccccgtggccttcgcaccggtgccaacagatgtgaaagaaggtggcatggatgctgtgctcgtgtcatcctctatggggatgctcagactccccttcctcaccagactccctggattcaccaacacgaaggcgcttccctgtttctacttctttatctctgtatcatactagcacttattaggttgcagctcgatagtttaggtactagtcttaaattttctagctgttacaattttgttagaggtgcactacctgttcttggtatgaaattatattagtaaacatataattataaagtgaacctatttttatttaaatattttncatttgatctgtggcctgtcaaatacacgttcatttttttatgcttatttgactttacccttttttttcctgggagatatcaaatgcagaatttacatttgcaccg

SEQ ID NO: 84722 - DNA, 583 bp, Zea mays
  Clone ID: MRT4577_177276C.1
agcagtggtaacaacgcagagtactttttttttttttttttttttttttttttttcctttttttttttttttttttttttttttttttttttttttttttaaaaaaaaacccccaaaaatggcagggggaaaaaaaaaacttcaaaaacacttaaaaatcggaaagccactgggtacccatggaaaacgcccaacaagggcccccttggaaaggcactggctatccatggaaagggctctaaaaggcccccctttggggggccccggttttctggggtaggggagaaccaaccaagggggggggggggaacagcttcccaaaaacagggggcaaagcgacaacaggtatgaacccaaggcccaagaacaaaacgggggtgggggacattttgggacccgcagccccatcggtaaaaaacgggagcataagggggcaccacctccgccagaaaaaaaagcgcttggggcccaaagcttgcgcaggcttgaagctgcccccacacccccttaagcaggggcggggccattcgccaccattttggttaaacacactctgacctgacgccggggggggaagaacccg

SEQ ID NO: 84723 - DNA, 690 bp, Zea mays
  unsure (1)..(690): unsure at all n locations
  Clone ID: MRT4577_177277C.1
cttcttacaataaagctttgcaagtttgatattatgttctcaggtcttacattttgattcagagacagaaaaaatggatcgtttgggattagttgatttcttgaagggtctccttgaatttgatccaaataagagatggtcaccattgcaggctctataccatccattcataacaggcaaatcgttcaccggtccatatgaacctgtacctgagaccacaagaattcctgttgttcgtgctgcagcaattgatcacaatcctggagggggccactggctacattcaggtctttccccgcagagcagatcaattatttcatgtgtcttctcaaggattgagtgcccattccagtgttcccgtcaactacggtggttacaaccctccaaattatcctccgcaaaatctccgtcctcgtcgtggacaaccaattcttcatcagcgatataaccaggcaacttccagtccgatgcggccaatgggaagccatcacagtgggcagcctgcgtggcctagttttggcatgggcgatggagtgccctgnggaggaacaggagggcactcatttacgacaagtgggctatcttcatctcttgcaagaaaggattatgggagcatctttttagtgtgttgtggacaggaggaatggcngtgattcattgncagtcgtaaattattttgtattagcaaaa

SEQ ID NO: 84724 - DNA, 383 bp, Zea mays
  unsure (1)..(383): unsure at all n locations
  Clone ID: MRT4577_177278C.1
cctcttttttttccananaannnncnccccactgcaaaatgtgaaatgggtaaatgggctcaggggcttcagggcttgtgattgttctcagcaagaacgagtgaagagtaacacaccacatagccgagttgggggtaaacaaaatgttcctatgctttgaaacaatcatcaaatgtccagccaaaactcagaaatggaggcatgcacaccaaatgttacagaaatctaaaatccataagctttgcatgagggggggaaatatacaacaatgaaactcaggttggagtagaaccaattacgaacacaaggtatccttgtcagacctgtgctcaccaaaggacaggttattggcacctgactaaacctgaaaaatgtgccaatgg

SEQ ID NO: 84725 - DNA, 1930 bp, Zea mays
  unsure (1)..(1930): unsure at all n locations
  Clone ID: MRT4577_177279C.1
gatgttttatccttttgacatttcagtattataatttttaattgattttgcatgcactacacattctacagaatgtcaggtttttcataacaagtccatatttagaataactttgtttatgtcatctagaattaacttgattattttctgaaacctatttcaggctctacaccatccattcataacaggagaatcgtttactggtccatatgagccaatacccgagactgcaagaattcctgttgctcgtgcagcagcaattgatcacaatcctggaggggggcactggctacattcaggtctttccccgcaggtgatagatgccctctcatttcctgtttctgtgtcgagttttagaaataataaccatatggaatctttcttaaaccattatgccccatacttgaaacttgtaacgagtggaagtgtaaacagatacctacctttgaataatgtctaccctccaaaggttcctttttcttatgggagtagttatggaagctttggtagccatggcagctatactggtaatgctggttttggtaacagctatggaagcattggtgatgctaatgctatcaatatgtattactcacccttaggttcttctggattaacgcaaattggccctagtccagatgttagactaaggatgcgtctctcacatgatagaggaattcgattgagccctggtagtcttgggcctatgtctcttggagccagtccatcacagtttaccccaccaaactaccagatgcaaatcccagctaattcggttgggaagcatggttctggttctcctgcaagtggaggcattcatggttctccgttaggaaaatctgcaggagttggcccatacaacatgaggaggaacttgccaatgccgccacatgattatgtatctcagcatggacacgggcgttgtggagatggtgtcagtttcagtcattttgatgcctgtgctcgaggacatacaggtcactctcatagtgcagcgggacctagttcttatcattctggttggagaccacaaataggttcaaggagtggtatttccttggaggcctcgtctagtcatgtgctttcacaggctccatcacaatcgtttgacttttcaccttcatcagcacttgatcctgctaattgggaccctaattatagtgatgagtcactactgcaggacaattcactgtcagctgaactaagtagcaacctccactttggagatgcaactggccaagggagtggatctatcaggtcagcaaatttccaaggccacgtcttcgctacatctaaccctgtaccaacaaaccaaagagcagatcaattatttcatgtgtcttctcaaggattgagtgcccattccagtgttcccgtcaactacggtggttacaaccctccaaattatcctccgcaaaatctccgtcctcgtcgtggacaaccaattcttcatcagcgatataaccaggcaacttccagtccgatgcggccaatgggaagccatcacagtgggcagcctgcgtggcctagttttggcatgggcgatggagtgccctggggaggaacaggagggcactcatttacgacaagtgggctatcttcatctcttgcaagaaaggattatgggagcatcttttagtgtgttgtggacaggaggaatggcgttgattcattgcagtcgtaaattatttgtattagcaaaattggagtgcgatgattctggtttattgtttcgatgttgttaccccatccctccaattggtcctttgtgaacaagacagttgatatacaatatatgatcgatgacaatagcattcctttgtagccctttttttaaaaaaaaaaaaaaaaaaaacccctaattggcgnnnnnnnnnnnnnnnnnnnnnnnnnnnnnnnnnnnnnnnnnnnnnnnnnngaaggcgtgatg

SEQ ID NO: 84726 - DNA, 143 bp, Zea mays
  Clone ID: MRT4577_17727C.1
atagggcgccatgcttgttcgcacactggtaacaacactgacccctatctgggacattattcgttccgacaatgagagggataatgtacgatgcctgcctatggtccaagaaagtatctgatgtaacagatctgagaccatat

SEQ ID NO: 84727 - DNA, 691 bp, Zea mays
  Clone ID: MRT4577_177280C.1
gggtaccctcgggtccggccttatatattttcctgtttgcgaggaatctccacaagttggagcctctcgcccttacaagattgatcacaaagaaagcataagagcaaggttgggaagcaacacacacaaatccgcagcacacacacgcacacaagccaagacttgagctcaaaatgaaacacagagagttcacaactagaatggagctcaaatcactaacacgatcgatcaagtgcgcggagacggagtgtgggagtattagattacttagtgaatgctttagggggttcctccatgcgcctaggggtctcttttatagccccaaggcagctaggagtcgttggaggccaacaaggaaggcaattcttgcctctgttcggggttggcgcaccggacagtccggtgcaccaccggacaaccactgttcatgtctggtgcgtgatctccttcctactctggcacagccgaccgttgcaactccgggctggttggcgcaccgttggtgcgggccacgcgtcgcccgcggattgtgcggttgactgttgcgctggcggccgttggctcatcggacagtccggtgcaccaccggacagtccggtgaattatagccgtacgccgccaaattttcccgagagcggcctgttcaccggagttcagcctagcacaccagacactatttcggtgcaccacc

SEQ ID NO: 84728 - DNA, 702 bp, Zea mays
  Clone ID: MRT4577_177281C.1
gcgacccgctcctccaggtcgccgtcggtccgccgcccctccaggtcgccggcgccgcccggcatagaggaaggagcgccgcccctcctcggctcccccaccgcaacgccggctcgccacgcctacaggtatctctcctcaacactctcgtcacctgctacggtggcaggggcaccttcgtcacctgcaactacgacccgctggggatacgtcggcgtgcgcccgtactgaccggtgccggtcaagggcacctgcctctctccgttgattttggtgcttagttcatgtgcggttggtgttctatgttcgatcaaatgcccggttgagtttagctaagctttttgatgtttagagagatttttacctcgttgttgtagtggaacgagttgttttttccccccaactgatgtccataatacaatcactgatgcagcaagctagctttcaggttgttgagcacgacactgcccagtctacttgtaaatcagtacaaaacacagtagaaaacgactgttggcagattggatctaattaatcgggggtacgcagaggcgtctcgctctcgatctctcatcaattgagacgtcacattcatacgctgagcatgcatttgctgcttattgcagctagcaacagctcgcgcgaacacgttctaggcagcgagatatcattttacatggatataagtgcatcattttacag

SEQ ID NO: 84729 - DNA, 479 bp, Zea mays
  Clone ID: MRT4577_177282C.1
gccggtgatgtagtatccaacgggtgataaattaaaagctgacgtggatagtctttgaagccccgtttcctaccgggattgtaatataaaaatacccccacagatcacataaaaccagcaaaaaaaattttccccggcctatgctacgtacactttccgtttctccagttacacgggcacaggcttaaaacccactttttgtgggcaaattaacggggatcgtaaatcaatcgccctccaatatttcggtaaaagtgatggaggtgcccctttttttcttaaacaaaaggggggacaacccccccatgatcgaggtcaacaacgtggaccaagtggccctgctccgaaattttaagtctccaaaatccctgatcacgttgggcttgctgatcgtttccgtgtccacgtccgccttgccttttaagatggccaccaccgaaaacatgcccggccggggttttgtgccgttttgggtgcaa

SEQ ID NO: 84730 - DNA, 1227 bp, Zea mays
  Clone ID: MRT4577_177283C.1
gatcctctttatatacatgtgtacgccaacaatccaacatctcgcagtcgcgttcgccgctcctcggtcctcagccctcacacgccgcccgcccgcgacgaagcccgcatagccgccgccgagcgccggagttgccacctaccgcgcgcccatctgccgccgatgctgcgcactcatctgctacccgaggcttggcggcggccactgccccaggaggcaggagcgcgacaccaaagtccgcgcatttccttccaccgagccgcaccaagatccgggatccaaggtggccaagttcgttgcggcggccctgaacttcgatggctgtcctcgtcacggaattcgtcctcagattcacagccatggactacaatgtgcgtgaatgcagactataccactcctgctgattctgtcgccacctcggagcaaacaggtggtgaagctgaggccaccttagaaacaggtggtgaagctgaggccaccttagaaacaggtggtgaagctgcggccaccttggagcaaacaggtggcgaaaccgaagagccaacaattgtagcacctgctaatgaatatacagagcaggaggctgctcctcagcagaagtgtgcaaagatacacgacttttgcctagggataccttttggtggacttttactctccatgggccttattggatttctcttctggaggagccctgcgagtcttacctttggcgttgcacctggccttgccatattggccctggctgtacttagcctcaatgtctggaggagcgggaagtccagcttaccgttcatactggcgcaagcaggcattgccgctgcggtagcatggaagcacggccaggcgtacaccactacgaggaagctgcttccgtggggattctacgtcgcgctgagtgccgcaatgatctgcttctactcctacgttcttcttgccggagggaatccgcctcctaagaaggcgaaggctgctgcttgatttgatgttgaaggcattcaccggagcgtctcataattgcactacctttctctggtaaatatggttgtggtaattggtatggcctctgttgtttacttggtaaaagactgaggagataagactgtccccctatgctgcataactgttgttgtttcctttatatatacatcaataagggctgggttggttccattccatcccactacccatctcatttatggtggtaaaaaaaaaaaaaaaaaagcggcc

SEQ ID NO: 84731 - DNA, 150 bp, Zea mays
  Clone ID: MRT4577_177284C.1
gcgaggacgcgccgccagttgttgcggagaccgctgacgccaccaccaccactgaggtcgaggtggacgtggagtcctgcaagaaaggagctgcgccggtgccatagcccatcgatgcttgcgacgcagaggacgacctggtggcggaca

SEQ ID NO: 84732 - DNA, 1380 bp, Zea mays
  Clone ID: MRT4577_177285C.1
aaaaaaaaaaaaaaaaaaaaaaaaaaaactaattcggcacgaggctaacatctgccaacaatgcaacatctcgcagtcgcgttcgccgctcctcggtcctcagccctcacacgccgcccgcccgcgacgaagcccgcatagccgccgccgagcgccggagttgccacctaccgcgcgcccatctgccgccgatgctgcgcactcatctgctacccgaggcttggcggcggccactgccccaggaggcaggagcgcgacaccaaagtccgcgcatttccttccaccgagccgcaccaagatccgggatccaaggtggccaagttcgttgcggcggccctgaacttcgatggctgtcctcgtcacggaattcgtcctcagattcacagccatggactacaatgtgcgtgaatgcagactataccactcctgctgattctgtcgccacctcggagcaagcaggtggtgaagctgaggccaccttagaaacaggtggtgaagctgcggccaccttggagcaaacaggtggcgaaaccgaagagccaaccattgtagcacctgctaatgaatatacagagcaggaggctgctcctcagcagaagtgtgcaaagatacacgacttttgcctagggataccttttggtggacttttactctccatgggccttattggatttctcttctggaggagccctgcgagtcttacctttggcgttgcacctggccttgccatattggccctggctgtacttagcctcaatgtctggaggagcgggaagtccagcttaccgttcatactggcgcaagcaggcattgccgctgcggtagcatggaagcacggccaggcgtacaccactacgaggaagctgcttccgtggggattctacgtcgcgctgagtgccgcaatgatctgcttctactcctacgttcttcttgccggagggaatccgcctcctaagaaggcgaaggcgaaggcaagtgctgcttgatttgatgttgaaggcattcaccggagcgtctcataattgcactaccttcctctggtaaatagggttgtggtatggcctctgtttacttagtaaaagactgaggagataagactgtcccccctatgctgcataactgttgttgtttcctttatatatacatcaataagggctgggttggttccattccatcccactacccatctcatttatggtggtaaatagggttgccctttttttggctttggtttgaagtgtttgacgagattttgtaaatttcctttttagagagaagcacattctgccacaagaggctcaacatgctattgcaattcgatatgggctgctaaaaaaaaaaaaaaaaaaaaaaaaaaaaaaaaaaaaactcgaggagggg

SEQ ID NO: 84733 - DNA, 1377 bp, Zea mays
  Clone ID: MRT4577_177286C.1
attcccacccttcgaatctcggtcaactcgttgacccgcgagaacctaacatctgccaaacaatctcgcagtcgcgttcgccgctcttctcggtcctcagccctcacacgccgcccgcccgcgacgaagcccgcatagccgccgccgagcgccggagttgccacctacctcgcgcccatctgccgccgatgctgcgcactcatctgctacccgaggcttggcggcggccactgccccaggaggcaggagcgcgacaccaaagtccgcgcatttccttccaccgagccgcaccaagatccgggatccaaggtggccaagttcgttgcggcggccctgaacttcgatggctgtcctcgtcacggaattcgtcctcagattcacagccatggactacaatgtgcgtgaatgcagactataccactcctgctgattctgtcgccacctcggagcaagcaggtggtgaagctgaggccaccttagaaacaggtggtgaagctgcggccaccttggagcaaacaggtggcgaaaccgaagagccgaccattgtagcacctgctaatgaatatacagtgcaggaggctgctcctcagcagaagtgtgcaaagatacacgacttttgcctagggataccttttggtggacctttactctccatgggccttattggatttctcttctggaggagccctgcgagtcttacctttggcgttgcacctggccttgccatattggccctgggctgtacttagcctcaatgtctggaggagcgggaagtccagcttaccgttcatactggcgcaagcaggcattgccgctgcggtagcatggaagcacggccaggggtacaccactacgaggaagctgcttccgtggggattttacgtcgcgctgagtgccgcaatgatttgcttttactcctacgtttttcttgccggagggaatccgcctcctaaaaaggcgaaggctgctgcttgatttgatgttgaaggcattccccggagcgtttcataattgcactacctttttttggtaaaaatggttgtggtaattggtatggcctctgttgtttacttggtaaaagactgaggagataagactgtccccctatgctgcataactgttgttgtttcctttataaaaacaccaataagggctgggttggttccattccatccccctacccatttcatttatggtggtaaaaagggttgtccttttttttggctttggtttgaagtgtttgacgagattttgtacatttcctttttaaaaagaagcccattttatcccaaaaggctcgacatgcttctgcaaaaaaaaaaaaaaaaaaaaaaaaaaaaaaaaaaaaaaaaaaaaaaaaaaaaaaactcgaggggg

SEQ ID NO: 84734 - DNA, 423 bp, Zea mays
  Clone ID: MRT4577_177287C.1
aattagcagtcatacaagaaacattttctggtttgataagttgggctgaaaaggaaaagggaaacagttctggctgttcataggggtagcccaaagatctgcagttgggccgggaaaagggggaggcccaaaaatgggcagggggcaaaaaaaaaaatcgggggggggaagcgggggggggaaaaaaaagggaaaaaactgtttcctgtgtaaaagggggagcccaaaacaagggcggggggccccccgaaataatcccccgcccccccgggggggccccccctttttctaaaggaaaaaagataaagaggggggggcaaacagcccaataccctggccgggagaaaggaggggccccccccccaatcaacaaaaaaaaaccgggggggaaaataaaagaaaaaccggcggcccccccggggg

SEQ ID NO: 84735 - DNA, 313 bp, Zea mays
  unsure (1)..(313): unsure at all n locations
  Clone ID: MRT4577_177288C.1
cccggattcncaattccctttcgacccacgcgncttacactttttattttttacacccccgaccgatacccagaaaggtcggggtagcgctcgcggctgcagagtgcggaccactacgtacaccatggcgcggcgggccctgtccctgctgctcgcgtaggcgctcgccctaaagtccgccgccgccgcatcggcggactcgtggttcgtcgacaagttcaacacggactgcaccgtacgcacccagaacaactcctaagagcaggagggggcgatccacaaaactgaaccgcatctccagagccgacttgaa

SEQ ID NO: 84736 - DNA, 559 bp, Zea mays
  unsure (1)..(559): unsure at all n locations
  Clone ID: MRT4577_177289C.1
atttattaattggcctttgnntgattgtggaaagtacgatctagcttataacatggtaagcaaatacactgttcttcatgagatcacccaggaaagggttgcaattgagtccatcgcttataatatggtaattgatggactatgcaaagaaatgaaactggaggaggctgaaaaagtcttggacatcaagaccagacatggatctacccctgatctatatggttatagctatctcattcgtagttattgcaaaatgggtaacttagaaaaggtgtggcattatattgaagccatggtatcccatggcatcgagataaattgttacattgttggttaccttctacagtgcctcaagaagctaggcatgatatctgaagttattgttcacttccagaaatttagagatctaggactccatcttgacggcgttctttataacattgctatggatgcttattgcaagcttgggaacatgaatgaggcagttaagctactaactgaaatgatggccggaggtttggtcccagacaaaatccactatacatgcctgatcaatggt

SEQ ID NO: 84737 - DNA, 703 bp, Zea mays
  Clone ID: MRT4577_17728C.1
aatcccatctagcgtccgaactacgtttattatcattcgatcaggcggagccggcctgcctctcgccgctctctccattgccccgcacgaatctaagactatgaacctgatgtcgacagagatccccatgaaccaattggccaccagtgcaccacctcaagccccgctcaggtccaccggcgcgcttcgacaaccacacaatgaccgccccatgacctgcgttctcacacagatccgaaagcaccaaaagaatgcgccgattctcatccgcaaactgtgctttccgcgagtgtagcatgaccattgctctccactacagaatcgaccttcgattctcttacaccgctggcccctgcattggcaagaggatcgtcgaactacatctcacggatcactaagaagacatcatcctctgtatatgtccaatccaacagggtatgcatcttggccttgaacattgatctctcctgccatatcaggtccaagagctgctgattgctgcactgacgtccagcaacggctatagaatgaactaataaatggacgctatcctcacactgaactcaatcatgtatcgaaggtcctggcacatcaaactacttgctatttttgtcctccgactgatgagtttgtcatccgccgctcaactctgacatctcaaaaatgtggtccctttagggttggtgaaatgttccactcatgc

SEQ ID NO: 84738 - DNA, 239 bp, Zea mays
  Clone ID: MRT4577_177290C.1
cgatctacttttgttagaaaacacaacagggagggtgtctcgttctgtgtcaggttcacaaaagggtatgcgaagaatctaaccgccactgataccgacgacgagtacaaggagacgatcggaaaatatgaaaccataccacgcgctgaagatatgcggcatagcgaaggaaattcgaggagccaggaaattgtcagtcgaggaaacccagaaactggtggtcaaactagcaaagattg

SEQ ID NO: 84739 - DNA, 563 bp, Zea mays
  Clone ID: MRT4577_177291C.1
ttgggaccctcgaggccggccgggactatgacccctgctgcctgtccaccttcctcgatctccctaactcgctctccaatctcccatcgatcttcgccatccatccatcccgacgccatgatacatggcggcagaccagccgtccgaggagatgacgacgcaaaaagggacgccagccgccagctattctccgaacagggatgaaggtggaggcaggagcgccgaggatgaagagaaagagaaggcgatggcgatcgacgactgagcttcccatcagcgcgaagcgaaatgacaagtggtgaaactccgacttccacaacgtcacggacgtggacggagccgatgcgctcgcgctcccctacaacatgtcccaactcggtctggatgtgccggtcatcacgatcatgctcctgacgcggacgatcacgctgtacacgctgaggcagatggcgaagatgcacgatatgaaggcgatgaatcggatcgaccggtaccacgagctgccacagcacgcgatcataaagcgagtgtttcatgtggatcaacgagacgaagcagatggt

SEQ ID NO: 84740 - DNA, 657 bp, Zea mays
  Clone ID: MRT4577_177292C.1
ttgggtacctcgaggccggccgggaagcggagacgggagacgcgctccccagtccccacccccctctcgtgtcgtggcgacgactggggggctgtcgctgccgccctacgtcaggtggccaggtcgtattagggcacttcgccggcgacgagtaccacaagaatgataagatcccagatacttcatcagcagatgcaagaaaaggaagggacattcaaggaataccctgggagcagataaacataacccgtaaaaaatacagacagtccagattagaacagtacaaaaattatgagaatgtacctaactctggagaagaagctatgaaggattgcaaaccaacagagaaaggtgggatatactatgagtttagacgaaatactagaccggttaaatcaactattctacattttcagcttagaaatttggtatgggcaacgtccaagcacgacatctacctagtatctcattactcaattcgtcactggtcagcattgagtggtgtggatactgaacttatcaacgtccaaggacatgtggcaccaagggagaagcatgcaggaagtttattagaggggttttatcagactcaagttagtaccttgacagtcaaggacaatttactggtagctggtgggtttcaaggagagctgatct

SEQ ID NO: 84741 - DNA, 542 bp, Zea mays
  Clone ID: MRT4577_177293C.1
cggacttactttatagatctgagtgcaaattttttactaccttgagaatttacacagacatcaaatgcttttgtgtagttagacaatatactctcaccaacggacgcgtggggatggtgaaaactaaagatcatagtcatattgctgattggattgttccaatatcattattgcgcgacaaaataggtggtgatcatcggggccgctaacatagaggagccgatactactactgctgctatcaactcccatttgacgcgttgctctaactactccaggcaaccaattctctagtcgactatcaatatgaaagagtaaagtacatcggcatttcgggtgtacatctaggtctatatactattcaagatgacattcccattttaacttcatttgtcacactataatggcgtgtttggttgcaattacgagatgggattggacgatccatcaaataaggttgattggttcagcataaaggatgagacaacaccggtcgatggatgagaggacccctggatgtcccaactggccacaactgaacac

SEQ ID NO: 84742 - DNA, 1441 bp, Zea mays
  unsure (1)..(1441): unsure at all n locations
  Clone ID: MRT4577_177294C.1
ttgggtccctcgaggccggccgggggtggccatagtttagtactggtccggacgcgcaggacccttgtttgcctatacgctgccagcctgccttttctaagttcttcttccatcgctccacccccacccccttctctctcgtagcaacgtttggggcgccgtcgctgccgctctactcgggtgcccaggtcttgttcgggcccttcgccggcgagccaggggacactttctttggtatgagaggatcaatgtccaattattatgatgattacgacgacattgatgagattgaggatgactatgatatggatgatcctgctgatgacatggtagacgagcagcgaggggttagggattctgatgcggaggataatgattatggacaaccaaatgacaagatcccagatacttcatcagcagatgcaagaaatggaagggacattcaaggaataccctgggagcagctaaacataacccgtaaaaaatatagacagtccagattagaacagtacaaaaattatgagaatgtacctaactctggagaagaagctatgaaggattgcaagccaacagagaaaggtggaatgtactatgagttcagacgaaatactcgatcgattaagtcaactattctacattttcagcttcgaaatttggtatgggctacgtccaagcatgacatctacctagtatcacattactcaattcgtcattggtcagcattgagtggtgtcgatactgaacttatcaacgtccaaggacatgtggcaccaagggagaagcatgcaggaagtttatcagagggtttttatcagactcaagttagtaccttggcagtcaaggacaatttactggtagctggtgggtttcaaggagagctgatctgtaaacaccttgatcgggaaggtattagtttttgctgtcgaacaacttatgatgataatgctattacaaatgcggttgagatatttaatacctctagtggcgccgttcacttcatggcatcaaataacgactctggtgtgagatactatgacatggagagattccagctattcaagcatttgcagtttgaatggccagtgaatgtaggtttctttggcttcttagctatttccgttacctttatgttctatatttggatcttcttgttggtgctatcattacaaggtacatctttctacacatgctgtctgcagatgaaatttagaatagacttcattgcttatttcatatgccccatagttgtgcttgtactatcaacttattctagttccttgggtatgtttctgacctattgatcaatgaatctatcaattccaatacaaacttataggtggtatgttgaaaaaattcaatatgggtttacatcatctgtgcntcagtgatgacatagcgtgctcccatcttatggatacaggattaatataaagagaagtgt

SEQ ID NO: 84743 - DNA, 398 bp, Zea mays
  Clone ID: MRT4577_177295C.1
acgggtgccccgagtcacaggctgctttgggtctgccacagtgggcaaggaaatggaatcaggagacagggaccctccattccccatatccaggaaaatgtgatgagctacaggtttcagcttctagatcaccacttaacgttctagctacaagtggaaaatccaagggcagcaaggtccatcagaaggatgtctgaagaaatggcagaccaaagagaagaagctggggaaaaagaggcatgcagagaccagatcaaagaatccgacaaagaagaggaaccaccagctgcttcgtcccatggccaggagtggcgtccaggtggcaaagcacctaagaacccaaagcctgaacccggggccagaccccctgcactccccgttatggtcaatgacccacc

SEQ ID NO: 84744 - DNA, 3399 bp, Zea mays
  Clone ID: MRT4577_177296C.1
gcgtctcacgcgtccgcatccctaggtctttccttcctgctgtgcgaaaccgagcacccgaaccctaactttctatttgtatccggatctgatcgaatctatatgcatgtattattcctactaacatcgattgtttgcagaaaaaaatcgggtctacatgtgtacacccatgcgctttactgggttcgccccctgatgttagaattaggaagttgtatgcatgctagaagcctataattcgctgagcagtggacactttctctggtatcagaggatcaatgtccaattattatgatgactacgatgacattgacgggatggaggatgattatgatatggatgacatcacatagcttttgagatgcacaattcttattggacgagtataatatcatcaacggctacaatacaagcttgtaccattttgaatgctgatttagcatatctcttgcatatgctgcattgctacttgcaatggtagcgcaatatgcagcccagtgagatatttatttgctgcatgatgctccaatgttaccaacatgctacttctaacagtagcactatatgcttttctcatgtgcaaatcttattggctgagcatgtaattctgctgatgtacatcaatgttcttgttttacatactgcatgtactttataacctcgtgcagttgtctgttttctttatcatagagtgatgtcctcacacagttgcaaaattcggcacgaggattgcaactacccaaattatggatttggtactactactactcttttatctttctaaaagtgctcctctctatccttaatctccgttggctttgctatgttgttgcttattttgtcttggtgtctgagcccttggtaaattgctgtcattttaggtttgtctttggaagcataatagtatataagatgatggttgtgttcatggtttattctatgactttataatatttagcttctagttttacagacacaattttgtatgagtttggtttccttctattgtaccacccttggtttcccatgcaaatgaattgtgagattgaacttgctgtttgacatggaaaagctatgatacaatccattccaagaaaaccaatgctatattgtttattgtgcacttcgttgcatccaaaaccctggcatggtgtatcatttgtgttacaactcaaacattgtttgagttgcttatacagtcgcttatattgctctaaatgattgtctattttcccctttagaatgataagatcccagatacttcatcagcagatgcaagaaaaggaagggacattcaaggaataccctgggagcagataaacataacccgtaaaaaatacagacagtccagattagaacagtacaaaaattatgagaatgtacctaactctggagaagaagctatgaaggattgcaaaccaacagagaaaggtgggatatactatgagtttagacgaaatactagatcggttaaatcaactattctacattttcagcttagaaatttggtatgggcaacgtccaagcacgacatctacctagtatctcattactcaattcgtcactggtcagcattgagtggtgtggatactgaacttatcaacgtccaaggacatgtggcaccaagggagaagcatgcaggaagtttattagaggggttttatcagactcaagttagtaccttggcagtcaaggacaatttactggtagctggtgggtttcaaggagagctgatctgtaaacaccttgatcaggaaggtattagtttttgctgtcgaacaacttatgatgataatgctattacaaatgcggttgagatatttaatacctctagtggcgccgttcacttcatggcatcaaataacgactctggtgtgagatactatgacatggagagattccagctattcaagcattttcagtttgaatggccagtgaatcatgcttcgttgagtcctgacagaaaggtggttgttattgtgggtgatgatcctgatggtctacttattgatgcaaactctggaaagacagttcattccataaaaggacatcgggactactcatttgcatcggcttggagccctgatgggcgaacatttgctaccggcaaccaagacaagacatgccgaatctgggacgtgaggaacctttcaaaatccgtccatgtgttgaggggtaaccttggagccatccggtccatccgcttcacctcggatggccagttcatgtccatggctgaacctgctgactttgtgcacatctacgacgtgaagagtgactacaacaaaaggcaggagctggacttctttggcgagatatccggcacatcgttcagcccagacactgacacgcttttcgttggtgtgtgggataggatgtatggcagcctgctacaatttggccgcctgtacaactactcgtatcttgactccctgttttgatgtggatccaaacgggtgttgaactgttgggttttggtgtacctcagtgctctgaatgttgtcagcataaattaggtggttatccctaatcaggatattaagttgcaaagataattgaattaataaatgttgtaccgtgcccgatgtgtatatgtaaaaagaaatgtatacatgtgcctattgagagaccgagttgagatgtgacttaggggttgtttgtttgggattataatctattcagattatataatctaatttatttgttttaggggttgtttgtttgggattataaatataatctaacttatttgtttgtttgtaaaccaaaataaaaaaaaaaaaaaaaaaaattggagccctgatgggcgaacatttgctaccggcaaccaagacaagacatgccgaatctgggacgtgaggaacctttcaaaatccgtccatgtgttgaggggtaaccttggagccatccggtccatccgcttcacctcggatggccagttcatgtccatggctgaacctgctgactttgtgcacatttacgacgtgaagagtgactacaacaaaaggcaggagctggacttttttggcgagatatccggcacatcgttcagcccagacactgacacgcttttcgttggtgtgtgggataggatgtatggcagcctgctacaatttggccgcctgtacaactactcgtatcttgactccctgttttgatgtggatccaaacgggtgttgaactgttgggttttggtgtacctcagtgctctgaatgttgtcagcataaattaggtggttatccctaatcaggatattaagttgcaaagaaaattgaattaataaatgttgtaccgtgcccgatgtgtatatgtaaaaagaaagtgtatacatgtgcctattagagccaaaaaaaaaaaaaaaaaaaaaaaaaaaaaaaaaaaaaaaaaactccaaaagg

SEQ ID NO: 84745 - DNA, 310 bp, Zea mays
  Clone ID: MRT4577_177297C.1
tgttacctagcagcaatgggatgggtatctgataggcccttgagctgttgtaacgcttgtactatgttgtttgctcgttttggtagctttgtcttgcaaaaaaaaaaaatgttgtcagctacaattggtatggattatggaactattagtatatatgcaatacttttttgttgcttacctctaaaaaaaaaaaaaaaaaaataaactaaagggggggccctttctattgtagccacatttttctcccacttccttctaacttttaactttttcttttgatttctctaatttatacgtcattgcccttaat

SEQ ID NO: 84746 - DNA, 297 bp, Zea mays
  Clone ID: MRT4577_177298C.1
gcgcacaccctcaccatgagcatctccattgcataatccaaacaccagaagaccccaaggggagtggccgtgggtgctgctcttgcccttctagtgagcggatcaccactcctacacaaacatacactgattactggctgacaactgcgatgattgcacacatctaccgactaatttacatctgccagcttagaataaacagccgagtaagctgacacgttaaaagtatctcctactgccagcgcatgtaaacctgccagtgcacattcgtaacaacgatcctgtgcacatgtcaac

SEQ ID NO: 84747 - DNA, 231 bp, Zea mays
  Clone ID: MRT4577_177299C.1
gggacattggccattcattaaatatggggcaaggacaacatgctggccacctatccaaaaagaaaaaaaccaagggacaccacccttacatacctaaaccactttcattgggggtaccactataccaaactttcactcaaggaaaaagaaaccgaatgccccgctttttttggacaaaaaagggaaacaaaaagtcccaaaggggaaaaccaaccaggggcggaaccctgg

SEQ ID NO: 84748 - DNA, 313 bp, Zea mays
  Clone ID: MRT4577_17729C.1
atgaaggccaattgttacccacgccattgctagtacttggactgatgtctaatgttcggaggtgctgttggctgaagggatgtcaatgctgatgagggcatcataaacactacactctctatccatggcattaattgataccgacttggatataagtgcgatttaaactacctaactactagaagctggcctggttacaactgttctagaggacatgaaacgcgaggtattatatctaactgatgaacatgagagagaagggcatagctgatagtctacttgtgaatctcttaggtcacagctggtagcatca

SEQ ID NO: 84749 - DNA, 271 bp, Zea mays
  Clone ID: MRT4577_1772C.1
agcccaggcgtccgcggactcgtgggcaggttcgtggggcgcctcgtcgcagttgaagcactccaacttcgaggcagttcatcactgccagggcgttctctcgctcgagtctggtcacacgcatgcccagccgagctcatgcgtccctctcccgcggtgcctggcttcgtcgagtctcgcctccagtcatggccacgccctgttacgcacacgagcccgccccagtcttcatcttgctatggatggtcagcggaagtctctccccttcctg

SEQ ID NO: 84750 - DNA, 552 bp, Zea mays
  Clone ID: MRT4577_177300C.1
gccaaccagaaataagaagttacatttccagattctaatgtgaaaaaaaaaaaaaaaaaaaaaaaaaaaaaaaaaaaaaaaaaaaaaaaaaaaaaaaaaaaaaaaaaaaaaaaaaaaaaaaattaaaaaataaaaaaaaaaaaaaaaaaaaaaaaaaggtttgaacctggccgggggggccgttaaaaagggcaatttttgaaaatttccataaaactgggggccgttcaaccttccttttaaagggccaaattccccctatagggggtggtttaaaaattaatgggccggggtttaaaaacgtgggaatgggaaaaaccctggggtacccaaattaattccctttgaagaaaatccccttttcgccagtgggggtaaaaccaaaaaggcccgaaccaatcccctttccaaaaatttgcccaccctaaagggaaaatgaaccccccctgaaggggcccataaaccccgggggggggggtggttaccccaaggggaaccgttacatttgcaaggcccttagcccccgttcttttggtttttttcctttctttt

SEQ ID NO: 84751 - DNA, 387 bp, Zea mays
  Clone ID: MRT4577_177301C.1
atgcaggcggcatgcaaccgcaccgaaggggcgcaccctttcggcttcgacgcgtccaacatggaggcccaggcccagatgtcatgcaaccggcgcgccgccggtcgctacgtgcaagaaaccgcaccgccactcgcgccactaccacgcctcctcgactgcggaaccagtaccgcgactcgaggcaaccctgcgcatgacccaacagtgccaaccaggcacatcggtcacgggccagtcagccgcgggagaaggcgcaacggtcgatgcggccagaaatgggccgacagtaatggcggtggcaggcgagcgaaagcagcggtcaagtcgccagccaagctcacgtcccctcctgggacagcgggagagccctctcccacggcgtga

SEQ ID NO: 84752 - DNA, 272 bp, Zea mays
  Clone ID: MRT4577_177302C.1
gtgaaatagaagattgtcggcagaaacagcccaggcgttggcagcacggttagaacagctgcctgaggctcctccctgaaggacacctgcctgagagcagagatggaggccttctgttcacggcggattctgtgtcttaatcttgcgatgtgctttgcttgttgctgggcggatgatgtttactaacgatgaattctacatccaaagggggataggcacttggacccccattctccaaggcccgatggggcggtttcccatgggatgtaaaa

SEQ ID NO: 84753 - DNA, 329 bp, Zea mays
  Clone ID: MRT4577_177303C.1
attccaagatctctaggggagggtttatggggaaacgggggggccatctattatatcacctggagactaagtacttattacaggtaaatttattttttacgaatggcccttaaatagcagggtaaatgagttgcatttttacagggtatatttaccgctctgacccccactgaatttacatcacatttccactcattactcccggtactagcccccagaaatccgccttggttaactaaagagacagcccacccccagaaaattcagtccaggcactgtttactttctggaacacaaaacaaattggccagcggcattccccgaatttt

SEQ ID NO: 84754 - DNA, 275 bp, Zea mays
  Clone ID: MRT4577_177304C.1
ctgcaggtaccggttctgtattctcgtttttacccacgcgaatcgacacccctctcactcctccacccatggggggccgttaccccacctcccccatcaaaccctagccgccccctcctcaagcccttctctccaaggtgtcattcctttcccgctcggatctacgtcgcgttggtgcatgtctccaattggattttggtggagggaagaagaagggaggaaagggggaggattcacggtggtggtctcccggactcgctctctgggatttgccc

SEQ ID NO: 84755 - DNA, 258 bp, Zea mays
  Clone ID: MRT4577_177305C.1
ctgacgcgtgggctgacgcatgcgccgtcgtatacttactacttcgtctacatcttcgcccagcccagcgaaaacgtctacgcgattctccgtgctctcctaatccacaccgtatactccgcctcctgccgagacgacaggtacggcagcatccgtgactcaaccaacttactgctttcaacaacctccggctgcacaaagcgtacgtggctctccaagcgctgaaacactcgatcactcaagaccccatgaacttta

SEQ ID NO: 84756 - DNA, 573 bp, Zea mays
  Clone ID: MRT4577_177306C.1
gggctggcaaaggcgagccggccccggagacgaagaagggctcccctgcgccggggaagcaggacgccgcggaggaggctggcgcggacaagcccggcggcggcggcggcggcaagaagggcaagaagaacaagaatcccaacaaaccgctggactgcggcggcgaggccccggccgagaagcaggcgtcgccggggcccgagagcccgcacgtgcacggcggcgccttcccgtactacgcggcgcacccggtgctgagctgctacaacgtggcgcacccgagctcgagcgtgtcgtactacgcgcccgccgccgtggtgccgtacggcgggttcccgcccatggtgccggcggagttcatgtacggcccgccgggcatgcaggagtctagcatgctcaacgaggacaacgccaactcgtgcagcctcatgtgatgtctgtcacgcacgcgccgccgctacctacctacattgtcaaattaggcggtcaaagctcttgcttgttgaccagagattaattctttgaattgctcatcatttttttcttgtgaatttaaaaaaaaaaaaaaaaaaa

SEQ ID NO: 84757 - DNA, 313 bp, Zea mays
  Clone ID: MRT4577_177307C.1
acaatagggtttttctttttatcttttttttttataactgaatcgcggtcttttttctcctaaggccccgggggggttcctttgttttgcccgctaccaaaagaaaacgtttaacgggaagggcacaaatggttcaacccgtgtgtaaattttttcccagagatgggggatttttggggccccccatcccaggaaaccaacacccttttggggcccaccaaaatagatgccttcatgatcgagggaaaagaaagttcaccccttcccctttttttttcccaaaccttgacgggcggggggaccccaaaaaaca

SEQ ID NO: 84758 - DNA, 447 bp, Zea mays
  Clone ID: MRT4577_177308C.1
aagttcagctttgcgtgggactcgttcttgacacactaacacacaagtttcctcttattttatttttttttcttttttttttttttttttttttttttaaaaaaaaaaaaaaaaattttaaaattaaaaaaaaaaaaaaaaaaaaggtttatttttgggggggcccaggccaaggggcgaattttgggaatattttttaaaaggggggtcctttccgatatggatttagggggccaattttggccctttgggggttcccttcccgggtaattgaaacccttttaccaccccctgaatgggaaagcccggggtttaccttttctaaaccggtggaaaaaaaaattggttttccccaatttggttttcccaaaaatggcccaacttaaatgcctttgaaccctttcctaaaccggtttttaaaagggccccccctttggggccccttta

SEQ ID NO: 84759 - DNA, 319 bp, Zea mays
  Clone ID: MRT4577_177309C.1
agcagtggtaacaacgcagagtacttttttttttttttttttttttttttttttaaaaaacggacacggggcatgctcgaatggttaaccggacccagggtcacccaagcagaacacaacaaatccatgactgcaccttgagcccattgatggacaggcccggaaacaaaaaccaccaccatgggctctacatataggaggacgactaacagaccaccccaagtgcacaattaaaggagagcacgttcatgggaacctccccgaaatgccacctttggccacaggcgaatactgtgggttgtcaccactgtttaagggg

SEQ ID NO: 84760 - DNA, 197 bp, Zea mays
  unsure (1)..(197): unsure at all n locations
  Clone ID: MRT4577_17730C.1
agcagtggtaacaacgcagagtactttttttttttttttttttttttttttttgcacaatggcacaaaaatttcataacaactgagtaccactccacataacagatgcacatgacagaagttcattattcttgatagtgacacactggaacaagcaactgacactagttcaagtatgtgagattcttgacnnactag

SEQ ID NO: 84761 - DNA, 407 bp, Zea mays
  Clone ID: MRT4577_177310C.1
cttcgcccctacagatcgatccaaggaggctgtaaccagcgcacgccactgcggcgctaggaggtcgcataagctccgccccacgagtgggagtccttagcatggaagagatccggtggcagagcacgtctgtcggagattgtagttccggcgttctacctgtggatggcggaccgctccccgctgacggtgtatgactcggtggacgatgtgcccctggagctcgtgccctgcgcctttgttccagtttaccttcgtcgtcccaatcccaacggcctcgagtttgacaacctcttcctcgacatgaatggtatattccacccattcttacacctctagggcctgccggtgcccactatctacaacttggtgttcatgtctttatttgatttcatcaaccatttctt

SEQ ID NO: 84762 - DNA, 371 bp, Zea mays
  Clone ID: MRT4577_177311C.1
gggggggaaaaccttttaaagaggggaaaacgtttaattgggaacaatactttttttttttaatttaaatggggacatatcaggagattgttaacactgaccctcccccccatggggaggcgggacacatttttactcaattatcgccggtaaaagactcaactaattagctagcccgggggttttctacaacaaatatttttttcagggggggaccccccccgccacaacttaggggcatggagtttttttttgaaagccccacatcgccggagggggctggcctatttgggcccccaacaaccccggaacctggccgttttacgggtttttctgcaggatggactggaggaccaaccccaaaatcccct

SEQ ID NO: 84763 - DNA, 286 bp, Zea mays
  Clone ID: MRT4577_177312C.1
cggctcgagctcagttctctctctctcttgcacatccgccacctcggctggctcagctcagctcctaaacccgcacctacctctctgcctgctgctccggctcctgatcctgatttccccaatcgagagtccgagacccgagaggaagctaaggcagctgcgctagcagcagctgcaaatcgtcttcggcagatccggcgccgcctagttcgctcatgctcgcgacagcgcccagatcggtccgcttgctgcacgttcttggctgctgttgctggcgagacgcgca

SEQ ID NO: 84764 - DNA, 193 bp, Zea mays
  Clone ID: MRT4577_177313C.1
aattggccgggtccgacccacgccgtccggttctatgatcgcgagccgggcgcctctttttttttttttcttctaacaaacgccactttcttatttgatgggaacgccaccaaacactcgagataacaaaacgcctatttattgacactatacactcataagtaaacctaaaaggaggcgcaccaccaatgat

SEQ ID NO: 84765 - DNA, 1499 bp, Zea mays
  Clone ID: MRT4577_177314C.1
ttttttttttttttttttaaaatcaaattgcatctttatttactagcacggtgctgacaatgccatcccaagatcattattcccgcagtactagtgtatcacggcacaagttcacaatcggcaggatttagaaacctggttcgatggataccatttacggaagagaaacgcaagggcctaaaagagatctgatgactttgcaaagcacttcactctctcctcacccaccgctacaatggaaggcccaagtggaaactgaaaagggtgtccgcatagaactgagcttctgggctgcggtactcaaacacgggatctaatcaccacggtaacatcttggggcagttcgcacatcttgcagctggagaagatttggttgctggtgataacctcaacgctattaccgaagtgttgacaggctaacagtcaaggggacaacctctcgatgtgccacactgtgctcccatctacttctctctgcgagtattgtaaccggtcatgcagtcgagactgttgtccttgccagaactcaaaaagtgtcggtgtcaatttgtagccaccccaatattcaggttttggaatcaagctcccatcagaatatttttgttccaatttcttgtaatcctgttgaagaacttctcttccagcaattacagtactctgcttgctgactatggcaccaagctgacttccacgtgggcggctgtggaaatatttatctgattcagcttctggaaccttctcaactgacccttcaactcttacctgacggttcatctcattccagtagaaaaggagtgctgcgttagggttttcacacaagtcatgcgccttccggctaccataatttatataccaaacaaatccctgtttatcaactccctttaaaagaaccatcctcgaagaaggttttccttccttgttggcagttgtcaaagccattgcattgggctcacgcagaccggctgttactgcttcatcaaaccatttaaggaactgatcaaatggatcagacatcacttgactctcaagaagttcaggggaaatatagttctccctgagagatgaaatttcaacagatggagcttttccaattctcacacacattgatgtgccagggtaaggaggaagctgaagtccgtatttgtttaaaataggtggggggacaaaccttcccccaagaaaatggtgtgggccagtgaacttttttgcacagagcttaggtgcagtcaatgacaccagcatatcaggtttaatgcctccatcgacatctccctcttcaacatgccatccagaagggatatcaataggaacaattgctgggcgcttatctggattttgaatatcactcaatgaaacaagcatttggataagatgatcaaagggtggtctgggtgttccatgaaatgagaaaccaaacattgcatcaacaataacatcaaactcccaaggtaattcgttaggtaggtcttcgacgaatagaatcccggccggcctcgagg

SEQ ID NO: 84766 - DNA, 1596 bp, Zea mays
  Clone ID: MRT4577_177315C.1
gggtacctcgaggccggccggagttgattgccctcagtggctggtcagtggcaaaaaggaaaacttctaggtagcggcacatttggttgtgtgtatgaagctaccaataggcacactggagctctctgtgcaatgaaagaagttaacataattcctgatgatgctaaatctgctgagtccttgaagcaattagagcaggaagtaaagttcctaagccaatttaagcatgaaaacatagtgcagtattatggcagtgatattattgaagatcgtttttacatttacctggaatacgttcacccaggttcaattaataagtatgtcaaacaacattatggagcaatgacagaatcagttattcgcaacttcacccgccacattctaaggggtctagcatttttgcatggccaaaagattatgcatagggatatcaaaggagcaaatctgctagttgatgttcagggtgtagtcaaattggctgactttggaatggcaaagcatttaagtactgcagcccctaatctttcactgaagggaacgccatactggatggccccagagatggttcaagctacactaatgaaagatgtaggctatgatctcgctgttgacatatggagtcttggctgcaccatcatagagatgttcgatggaaagcctccttggagtgatcttgaagggccagctgcgatgtttaccatgttacataaagacccaccaattcctgaaaatttgtccaatgagggcaaagaatttttacagtgctgtttcaagaggactcctgcagagaggccaaccgcaagcgagctgttggaccatccattcatccgcaattcaagtcactacaacaaacatggttccatacattcatttgcagggattaaagtcaatgatacaacttacagttcaagagacaactggccagcttcgaagagtgactcaaacatgaaaggaaaaaataccaatgttgaaccaagcagagctgctaggtcatccgaatcaactttccgattggctccactaacaatccaggaagctactcctaacttctcacctcggccttttgtgaacagcatgcagtttacaagcgtaaaccctcagcctagtccattgccaaggcctaacgggaaggaagttttgttctgaccgtggatgctgcatgccatgtagagtgtcatttctatcaggcgcagttcggcctcaatgtgccttgcagagtcctgcgcagttaaaggatgttgggttttataagatcatctgtgtgaccacgccacattgtgactgctcatggagcactgcacatgcagcgtttgaccttaacttctaaccattttttagtaaggatacaaacatatgaattgtacagtttaccaggatttgcacgagagatccttgaaagcacaagcacggatgtaaattgtctccagaaattgttggtgtcattttttttggaagcatagaactaggactagctttatgtaaaactgaaagttcctttcagtcaacaggaattaggcgtagctctgtgttgcttttgctgctcaccaatgtaaaaatcattcttttgctgtatcactgattattcattttttggct

SEQ ID NO: 84767 - DNA, 258 bp, Zea mays
  Clone ID: MRT4577_177316C.1
gagggaagagggcatcaaggatgatagccggtgcccacttatcaccattaaatatactaaaatgcaatgaagcagtaaagagacgggctgttaacatttacttcagtgggttcttttccaacggaaaagtttgtacttttttttcccacgaaaattttcagactgatgatgaggacattaaaccaaatcatttttgctagcaatacgggtaaaatctgctttgttccggtgtggtttccagcgggggtaattcaacct

SEQ ID NO: 84768 - DNA, 1335 bp, Zea mays
  Clone ID: MRT4577_177317C.1
gggaaaaacgcaccatataccaaatctattatcttcacacacgggtgcatcatgtgaattacagtctcgagcagtcggagttcaatttcgtagagacagttcacagaacacttctaataagaaaagagtaacaccatccatagataggtgtctcagtttagtaaaaaaaatcgaaaattgtaataacaagtgcttagcattccttcattgggagataacaaatgaacatatggcatgcgatcaactaatatacaatatcatcatggaatcctgaagttcgctatcattggcgtcatctctcaaaaccatagtctactactacacaccttctgccttccctgttgctgcttttttgtcatcgtcatcactttccaatcccgaggtcgcatcaatcttatcgaagtcatcatctagcccatcatcatcaccaacagaagcctcatcgtcgctacccagatctcccagaagaaatacatccagatcatgttctggatttgttgaagaggtcttgattggcgcttttgtgtctttgggttcgaaagttgtagatgcctgggatgcttgcttctgggaatcccttttctcttcctctgctttcactttcagctcctccaaggatttcttctcgaacggggctatatagctgtttactagcaaaaaatatacccgccagaatttgcgctctttcatgtatcttgggcatagctcatatctgaacttcgatatttccttgactgccgagaggacaagtgtggcgtgcctggcctgccattcgctcagatcctgacgcacattcgacaccgttggcacatcagacatctcaggctcatcttgcagtgggaagtcgcggaaggtgcttatggtcatgtccttgacgaactcgcggaggtcgtcggtgatgccgtagcgctcaagctcggccgcgtcgggctccgacgaggcagtggcggcgataggtgggatcgcggggatgggtgggatcgagggtacggggatgtcggaggcgaggtgcttgatctggccggcgaggaggtcggcctgcttggtggcctcagcggcgatctcccgcgacttggaggcggtttcggagaagatctccttggacttcttcgccgtctccgagaccagcgccgacgagcgcttggccgcctccgcggagagttcctgcgaccgcttcgccgcctcgccggcgaaggcccgggccctctcccagagatccattgaggcagcggaaaaaaatctagaaggttatgggtcttctcaccgccgccgttgacacgtctccgttgacgtcggcgcgggacggcctgactggaggggtgttctttaaagaac

SEQ ID NO: 84769 - DNA, 128 bp, Zea mays
  Clone ID: MRT4577_177318C.1
gctaattctacttctacttcggaatcgccgccgctcccggcgcctcggattggcaactaccgcaagaggtcccggcggcaggatccgtggtccagcgtgcgatggcggcttttcctaccgtgcggggc

SEQ ID NO: 84770 - DNA, 1235 bp, Zea mays
  unsure (1)..(1235): unsure at all n locations
  Clone ID: MRT4577_177319C.1
gggaccctcgggccggccgataagcacctcgcttccgacatccccgtaccctcgatcccacccatccccgcgatcccacctatcgccgccactgcctcgtcggagcccgacgcggccgagcttgagcgctacggcatcaccgacgacctccgcgagttcgtcaaggacatgaccataagcaccttccgcgacttcccactgcaagatgagcctgaaatgtctgatgtgccaacggtgtcgaatgtgcgtcaggatctgagcgaatggcaggccaggcacgccacacttgtcctctcggcagtcaaggaaatatcgaagttcagatatgagctatgcccaagatacatgaaagagcgcaaattctggcgggtatattttttgctagtaaacagctatatagccccgttcgagaagaaatccttggaggagctgaaagtgaaagcagaggaagagaaaagggattcccagaagcaagcatcccaggcatctacaactttcgaacccaaagacacaaaagcgccaatcaagacctcttcaacaaatccagaacatgatctggatgtatttcttctgggagatctgggtagcgacgatgagggacctgttgatgatgatgatgacctagatgaggacttcgataagattgatgtgaccacgggattggaaagtgatgacgatgacaaaaaaatagcaacagggaaagcagaagatgcgaagtagtagcctatggttttacgattcgacagatgaccacaatgatagcgaactttagtattccaagatggtattgtatattagttgatcgcatgtcatcaattcatttgttatctcccagaaaagggatgttaaacacttgttttttttttacaactttcgatttttaactaaactcacacatcttatcgatgtttgtgactcctcttttcttattaggagttttctgcatatgtactagtctatctattgaattgaacttcagttgacgatgacaaaaaatntgcaacagggaaggcagaagatgcgaagtagtagcctatggttttacgattcgacatagggccacaatgatagcgaactttagaattccaagatggtattgtatattagttgatcgcatgtcatcaattcatttgttatctcccagaaaaggggttaattataaaataataattaaactaataagtattgtgagtaattgatatatacttttaatattttttataatatatatattg

SEQ ID NO: 84771 - DNA, 785 bp, Zea mays
  Clone ID: MRT4577_17731C.1
cgggtccggtaaaggcccgcccacccaatgccatcgccgccgtcgtcccggcagcggcggcggcgctgcagctggagtccctcctcccgcacttgtccacgctttcccactacaagcagttccacgcgcgcctccatgccttgggcacgctccactcctacccatccctccgcgcgcgcttcctcgaccgcctagcgctcttgccgcacgccgacgcgcttccgcacgcgctactcctcctccgctccctcccgtcccccgcaaccaacgacttcaacgccaccctgcgcggcctagccgcctccccgcaccctgcgcgctctctcctcctcctcgccggccgcctcctccctgctcccgccccgccacggcctcgcctcgatgcgctctccctctccttcgcgctgaaggccacagcccgatgctccgacgcgttcgccacactccagctccacgcgaccctcgttcgcctcggtgtggctgctgatgtccgcctgatgaccacgctgctggactcctatgccaagtgcggcgacgtcgcgtccgcacggaaggtgtttgacgaaatgcccgtgcgcgacgtggccacatggaacgcgctgctggcagggctggcgcaggggacggagccgaatctcgctctattgctattccgcaggctggcagggagctttcgggagttgccgccaagggaggagccaaatgcggtgactgttgtcgctgcactttctgcatgtgcacaacttggaaccttaaggatggattggctgtgcatgagtttgctc

SEQ ID NO: 84772 - DNA, 334 bp, Zea mays
  Clone ID: MRT4577_177320C.1
tcgtcttgctattaaagcagccggtcttccttcttatgaagctcaacccggtcgtcttcttccttttcctttatgatatcgccgggacccccggcgttgcgggcgacgtcttccacattaacttccccggcctggtgaaggggttcatgggggacgaccagctcggggaggcgctcgagggctccgacgtcgtcattattcccgccggggtgcccaggaaggccggcatgacttgggacgacctttttaacatcaacgccggcattggttaagggctctggactggcattggcaagcacttgcccaacgcttttggccatattatcaggaaccc

SEQ ID NO: 84773 - DNA, 200 bp, Zea mays
  Clone ID: MRT4577_177321C.1
ggatgtaccgacatcagtatgaaaagtgaccaagaacggacaaggggtcatgaacacaattgctggcggtgtagacacgggtggcctcacccaatacatttgtttccagtcaaaggggctctctaccacacgaaacacaggacctcattctccaatggggtataccttaaccgaacaaaacgcatagatgtcggattaca

SEQ ID NO: 84774 - DNA, 159 bp, Zea mays
  Clone ID: MRT4577_177322C.1
ggtgaaaaaaatggcacaactccttgacagatggggaacaaatacgggcgggaacttctcaagaaagttattagagcaaaatgaattaacggccgggcgttaactaagaaacagagggccgtacttgagggaaacaagggttgacgccacccttcctgt

SEQ ID NO: 84775 - DNA, 325 bp, Zea mays
  Clone ID: MRT4577_177323C.1
aacactaaatggcaattacaggactagacaattgtgacataatatgggatgtggaaccacttgcatcagtgatcatacattgctcgactgattaacagcagaagcagtgtgttcgcataccacacaccagatacactattacatgtactcgcacacatgcacggaacccagttgcactgtctaatgccagcaccttgttcattgtgacaatttagcagatgatcacacgacgtccttggtctggataacaacagctttctggggcaccgcacacatgaaccttcaactgatatcatctgtgctcctgccgacatatctgtctatc

SEQ ID NO: 84776 - DNA, 458 bp, Zea mays
  Clone ID: MRT4577_177324C.1
tgacaaagcaagcggccaaagaaaaattatttgcaggacatacttcgccactattgattctctcttgtaggcttttaagtttagctccaaacaacaaaattttagagctctagtttagagttctaaatttgagttaaagctctaaatagttgctgttgggcctatgcttcgtcgccgaaggtcttctaggaagaagcggctttcggctgaagctgtttgtataagatggccgaaggtccctcttcatgaagcttcggtattacaacataagataccgacttaaagatagaatgaccttttagtccataagggcttgagtcaatgttgtaaacttttatgaggggcatgcttgtaattcctcacaggctgtgtcctgtgcctataaatagcgaacagtattcctttaaaaaaaaacaaaattgctccaattacagggtcccgaacgataagctagcctg

SEQ ID NO: 84777 - DNA, 365 bp, Zea mays
  Clone ID: MRT4577_177325C.1
ttttcgcggtttctccccatgggggttttttattttgggttttctaactgggcgggaccatggccggtccaagggaaaattcccggggcggagcagccactgaattgaacttttgcaaaaaaattgggttggaatgctgccccagtgtacccagttagtgtcgttcttggtggtgatacggaatttcagccacagtagataccccagtggaaccgagggacagagagacttttagggccgggtgctcacgtgcattcttttgggggggaccaagtttgtcaaacctggtacccccttggaaacctccgggggtccggaaaggtttttgggtgggcttttaacataaattttctgggggggggtgc

SEQ ID NO: 84778 - DNA, 1948 bp, Zea mays
  Clone ID: MRT4577_177326C.1
gttcatctctgtgctgcttacaattggaagtgaaactgctgaaaaagagctaagaaggcagtcagcaataaagcgctcgattgatttgttctttgagtatccatataacaactttttgcaccatcatgttgagaatataattgttgcttgcctggagggtaaaagacctgaagttgttgagcatgttcttcatgaatgtgatattgttggtaaaattcttgtctcagaggggttttcatccttgtcgactgagtctaatgggcctactgttccctctgaagggaaaacccctccaagaattggaaatgttggtcacatgacaagaatagccaataaacttattcagttgggcaatagtaacaacacaatccaggctcacttacaggaaaataatgattgggttgaatggcaaacaaatgtgctggtcaaacgcaatgaagtggagaatgtttatcattgggcttgtgggcgcccgacatctttacatgaccgtggtagggacagcgatgatgatgacttccgggacagggattacgacgtggcagctcttgctaataacttaagtcaggcatttcgttatgggatatatagcaacgatgacattgaagaggcacaaggatcacttgaacgagatgatgaggatgtgtattttgatgatgaatcagctgaggttgtaatatcttctttgcgtctgggagatgaccaggacagctccctctttacaaattcaaattggttcacatttgatggagagagaggcattgatgatcgtttatctgcctctgttccttcatcatcccccaattctctggagacttcactagaggccgaggaagctgatgatggtaaagtcattggcactgaggatgaaatggaaacagtatatcttggaaatggtagtgctgaggaggtaaaagatgtagcagaatgtaatgaacagccaaattgttgtactgaggatgagcgattgaaaaatactgaagggattgaacggcatccagatgtttcaaatcactataccgacatatgtacaaatgaggctgcctctgctgcagcagaatcttcagccccatcagttgagatagtggcaaagaaaacagtagatgaaccatcggaggcagaaagaacagtggatgaaccggcagaatcatctttggacagttctgtctctatacctttgcctgctcctgttaatggtagtgagcctgccaactcggaagcctcttccgaacaagttgcccatgacactgatgtgcagcaaccagtcaaggaagctcctgatgaggacgttaatgcaaagaaaactgatgtagccaaagcaagcgagtgaattagcaacatgttggactgagctgatcagagcaattacttgcgaactgaaaacactggagtgtagcctgtgctcagctgccacaagatagcctgaagcaaactgctgtacaataagcaagtgattgttctgccatcaacggtggcatatcactgtacaaatgagcaccattgactaacgcacataagtcgccttgtctgaaactggtcattttctttgaaattcaccctccagttcatgtgctttggtggcagacgtcgtggcatggtatatggtacctgagaacattctttgggtggcaactggttttggctacttagtcttctgttgcctgtaatatgagatgtgatgttatttctagtctagctattgttgtaatttttttggactctacatgtgtcagttcgacttcgaacaatttttttataaagattcgtcactgcattaaaaaaaaaaaaaaaaaaaaaaaaaaaaaacctcgggccttaaaaacaccaactaataaaaaagaaaaggtcttatcacaggcgtgccttcactgaattgaacagaaaagaagtcactgagcgatctcggtctaactagcaaaacaagaagatctgttgctagaaaaactgt

SEQ ID NO: 84779 - DNA, 1122 bp, Zea mays
  Clone ID: MRT4577_177327C.1
acccttccggttaaccagaaaggctccttctttacaaattcaaactggttcacatttgatggagagagaggcattgatgaccgatcatctgcctctgttccttcatcatcccccaattctgaggagacatcactaaagactgaggaagctgatgatggtaaagtcattggcactgaggatgaaatggccgggtcgaaccacgcgtccggtagtgttgaggaggtaaaagatgtagcagaatgtactgaacagccaaattgttgtactgaggaagagcgattgaaaaatgaagaagggatggaatggcatccaaatgcttcaaataacgataccgaggctgaggctaccgcagagtcttcagccccatcagttgagatagtggcagagaaaacagtagatgaaccattaggtgtgggaagaaaattggatgaaccggcagaatcatctttggacagttctgtctctgtagctttgccagctcctgttaacggtagtgagcctgccaactcggaagtatcttctgaacaagtagcccatgccactgatgtgcagcaaccagtgaaggaagctcctgccgaggatgatgatgcaaagaaaactgatgcagccaaaacaaacgagtgaagtagcaacatgctgggctgagctgatcagagcgattgcttgtgaactgaaaactctgtagagtgcagcttgggcatccatcttgcttcatgtgtgctcagctgccacaagatagtctgaagcaaactgctgtacaataagcaagtaattgctctaccatcaaccgtggcatgccactgtacaaatgagcaccactgactaacgcacgtcagtcgccttgtctgaaactggtcattttctttgaagttcaccctccagtccatgtgctttggtggcagtcttcatggcatggtatatgatacctgaaagaacattctttgggtggcaactggttttggctacttagtcttctgttgctttaggttaactttggaactgtaatatgagatgtgattttatttctagtctagctattgtaattttttttcggactctacatgtgtcagttcgatttgaacatgttatttttttcataaagatttgaagacatcttggccc

SEQ ID NO: 84780 - DNA, 664 bp, Zea mays
  Clone ID: MRT4577_177328C.1
atatcctgatatttaaaaccattgtgcatgctcttgtgaaggtttcatcggttccattcatattttatgatttcttatccagttctttattccactggagacatggagtagattgtttgctattttttaatatgattttttgttcagctgctctttttttcccgaaaaacgcaggagaactgcgcctcattatattaagaaggaaaaaaaggtctaagaagaccaggtacaataagacagacttccttacggaggccgaaaaatcagaaaaccaaaataatccatctgagacagcaaactactactggtgtaaacgccctcctaggctaaacctcaagaaggggggcagactgataggaaagacctttagccctagccatttcccacatccatctttcctctagagccatcctaatggctaaagacacattaggaatccagttatcaaagacacatctgttgcggtggttccaaataatgtaggcctccaaagcaatcagagaattaagcccctttctaaccagacctctaaccgaagaagaggcttcttcccaccagctcatgaaggaggacaaaccaagttgaggggcgagcctttgaaggtcgaaagtcctcagcagctgaaaccagaaaatccttgagaaaacataggagaccagaagat

SEQ ID NO: 84781 - DNA, 339 bp, Zea mays
  unsure (1)..(339): unsure at all n locations
  Clone ID: MRT4577_177329C.1
ccttcnctttcnnnnnaanaaannnnngncgggaggaacaattgagggaccgggggggcaagacagcancgggggaacccngacaccaacaaacgaaacgacccaaannncnggagaagaaggggagacacccaaancacacgggacccccacagggaggggaaccacaacaagggccgcgacggnaanaaccaacgcacacaaacacngacacggcaccggcaccnccagcggacggcgggccaaccccgacggancaagcacangggcccaagcagcccccgcgcagcccaaggcagaggggaacccccgcaccggnagccgacggggcggccgacg

SEQ ID NO: 84782 - DNA, 580 bp, Zea mays
  Clone ID: MRT4577_17732C.1
gggccagctcaaccgcctgggctttcatcacaccagggagctgaagcatcacttagacgagcttcataagaagtgccccaagacaaagatcaggtgtggggattacgtcacggctacactggggtttggcgtctaccctggagaacacggatggagcacggacttgcgggcatgctgcgcgtcatgagggcaaggaacctacaacttcacactctgagagaagaagtgtggagagcagggctcgagcgtgtgctccaacccgttggaggccttcgagctgacactgcattccacatgaccgatgctgcgatcagaatggaacacgatggctcattgaatggcccgtatcctcaaccacccaattctcaagtcatcatcgagattactaagatgagcagtaataccgccgaatctgcatgcctgatggctagcagacatatatcccgagtgtataagacaatatatattctcagggataggggaacctatctgacactgtccattggaagatctgtataaactgcacccgcctagtactgatcccagccttgaaactcagacggttctgcctgcaagagct

SEQ ID NO: 84783 - DNA, 640 bp, Zea mays
  unsure (1)..(640): unsure at all n locations
  Clone ID: MRT4577_177330C.1
cgaggccggccgggggaaatggaactaaattagttacctatctgatttgtgcctcattttctccggacacattttctttcactccaattgtaggatgttcgctgactcttgccgcaggctcaggatcatgaaaggatcagatgcaattggacttggtaacttgtactcctattcagtttagtttattgccgtgctaattatagtcttagttggttggtggacatggtaggatggtacatgatatgatgatccaagtagcttgtgttgttagttgtacatgatacaacttttattaggacttcctcagaaaggagacataattcatggtccctgcatctgtggtggtagctctcttgggtaatatatttgccatcttcttgtacatagcactcaaaattaggtccaaaatcagaagcgcggggtgaactagacattatcagttgcattttgcatttagtactgttaccaacactagaaccaagtacgttatcgtcagtttggagtgcacataataatagggaaaagtcatgtatcaattatatcctggagatgccaagttaatagttaaatattgaaaattggaagatttgaatcgtagntgtcacttgctaancaggtattctaattcaactccagagtc

SEQ ID NO: 84784 - DNA, 2019 bp, Zea mays
  Clone ID: MRT4577_177331C.1
cgccgttgattgatgcgctcactcatctcacatgggtgggactctttgctcttggagcaccacctgtctagtgggagctactccagcctctagacaccaactccagcgcccccgtatggaacaacaactccaccctcactgtctggacagcaagattcattcacctgtcatatagtttcatcgatgaatctgaaacttttattgttcctgtgttgcccctatccaaaggtcatgttccttggatcaactgtaaggtcaaaagagacctttgttcgctgttgctacaaagaatgcagatttttcttccaatcagccaaggctgccatctgaaaagataaggcttgaagcttccagcagtggtgaatattcacgctttaatagtctgtctgaacatagtggaggaccaaataaatggttgaagctcaatcagcagtacaaccaattttgtagtgacctgacaccattggcacctattggttctatatcagaaaaaatcaatgtgcaatcttcagaagtgacaaatcggtctgaaaatggaattactatgaaccttaatgttaatgagacagatataatagacacaacagaacttgcagatcaaatacaacaaagtggggcaactaagagcctgcgtcaccacaaagattcaggaggtgctgaaaaccatgttatgcttgagtcacatgatgggcttgcagcacaaccaccatttatatttactgacacacaaactataccagaagatacaagtgcgttggcgcctatcacgtcagcccaagctaggcaacaggtactgtctattggtacttcacctgtgttagacggaacaccacaattgcaacctggaaaggagaatgacgaatgtttgaacaacagtggccagataggcgtagagacacagaacacaatattgttctctctacttgagatggaagaattacaagacaaggaattggaggatgctcaggagcatagacaaaaatgtgaatctgaagcttatcgcaaagcacaaagagctttacttgaggcaaatggaagatgtgcaattcttcgtagaaaaagggagatttgctcttcacaagaccatggtttaattgcagagaattcttctttggtgcaatctttgagtattcggaatcctgaagatggccttgcaatgccatcactgctcaattctcagattcatgtagttagtcagattcctgaaaatcagggtggtagacacaggctgtgtcctgaagaaccttctcagcagcaaattgataagcatgaagatgaagcacgtccacactattgtgataagcttgctgctagcacaactgatcccagctctgtgagtgttgtcaatgctgacagcatcctttcagattatatggaggatgatcttttattcccgactagacaggcaagatcagaatgtgctctggatgttgagaatcaaatggaagaaactatacatgtatatgcagaggaaaacagacaagtttctggtgacggtggtcaggattatgaacttttagaagcttctttgaggtctagatgtcgtcgtctctgaaccgaagcaagaacaagtcttgccccatatggctgctcgtgatcggcaaccgatgaccctaggcttgacggatgacaggtccactgcaagtgatcactgactttagtttcaagtcgtgtgcggtgtgtgtcgtcgctcgtcggtctgtcgcgccattcaatacaagaaccccctgtaaatcagactaataaataaatcagctgaaaggatcaaagggttcgagggaggctcttcaaaaattcataaacgtgttcgctcttcttctgtcagaggaaagaggccaatgctgtgtctataataaaaatcagcacatgggctcggaacatccaagccccgtcatacatatctcgacggtgtgatctgtagccgtaagtcatgcttaattaatttttcgaatgtacctaggtcgctctgttttggttgttcatattgacggcaactaaaattagtgtttaagtagttcc

SEQ ID NO: 84785 - DNA, 364 bp, Zea mays
  Clone ID: MRT4577_177332C.1
tcgcccgcccctcgaggggcatctacagttgtgtctgtaaaatccaccctgtgaccagctccttggcgcttagactgctttaccggtccgcaagagagagacgagggcgctttaaccgcccctccgtgtgtctccacaccacccttttttcttttggaccacatgctggccgccagtgcctccttctgccattatgacccgcgcagacgctggcctcgcttccaagggccgggcaaccgccctacaggctcgtcgaccgccgcgttggaagcaagatttgctggaacaggaactattctgctacagacataaagcttggtctttatgccccagctctgatgtaaaggggtgatctcgattttta

SEQ ID NO: 84786 - DNA, 2313 bp, Zea mays
  Clone ID: MRT4577_177333C.1
cttgtttgcgcctcgccgttgattgatgcgctcactcatctcacatgggtgggactctttgctcttggagcaccacctgtctagtgggagctactccagcctctagacaccaactccagcgcccccgtatggaacaacaactccaccctcactgtctggacagcaagattcattcacctgtcatatagtttcatcgatgaatctgaaacttttattgctcctgtgttgcccctatccaaaggtcatgttccttggatcaactgtaaggtgaaccttttatcctgatattatgatgtggttatgtattctattttctcaacagtaggagtacattctaaagatcataggttagaaatcttgcgccataagatagctgctaaagaaaatgaactaaaaggtcaaaagagacctttgttcgctgttgctacaaagaatgcagatttttcttccaatcagccaaggctgccatctgaaaagataaggcttgaagcttccagcagtggtgaatattcacgctttaatagtctgtctgaacatagtggaggaccaaataaatggttgaagctcaatcagcagtacaaccaattttgtagtgacctgacaccattggcacctattggttctatatcagaaaaaatcaatgtgcaatcttcagaagtgacaaatcggtctgaaaatggaattactatgaaccttaatgttaatgagacagatataatagacacaacagaacttgcagatcaaatacaacaaagtggggcaactaagagcctgcgtcaccacaaagattcaggaggtgctgaaaaccatgttatgcttgagtcacatgatgggcttgcagcacaaccaccatttatatttactgacacacaaactataccagaagatacaagtgcgttggcgcctatcacgtcagcccaagctaggcaacaggtactgtctattggtacttcacctgtgttagacggaacaccacaattgcaacctggaaaggagaatgacgaatgtttgaacaacagtggccagataggcgtagagacacagaacacaatattgttctctctacttgagatggaagaattacaagacaaggaattggaggatgctcaggagcatagacaaaaatgtgaatctgaagcttatcgcaaagcacaaagagctttacttgaggcaaatggaagatgtgcaattcttcgtagaaaaagggagatttgctcttcacaagaccatggtttaattgcagagaattcttctttggtgcaatctttgagtattcggaatcctgaagatggccttgcaatgccatcactgctcaattctcagattcatgtagttagtcagattcctgaaaatcagggtggtagacacaggctgtgtcctgaagaaccttctcagcagcaaattgataagcatgaagatgaagcacgtccacactattgtgataagcttgctgctagcacaactgatcccagctctgtgagtgttgtcaatgctgacagcatcctttcagattatatggaggatgatcttttattcccgactagacaggcaagatcagaatgtgctctggatgttgagaatcaaatggaagaaactatacatgtatatgcagaggaaaacagacaagtttctggtgacggtggtcaggattatgaacttttagaagcttctttgaggtctagatgtcgtcgtctctgaaccgaagcaagaacaagtcttgccccatatggctgctcgtgatcggcaaccgatgaccctaggcttgacggatgacaggtccactgcaagtgatcactgactttagtttcaagtcgtgtgcggtgtgtgtcgtcgctcgtcggtctgtcgcgccattcaatacaagaaccccctgtaaatcagactaataaataaatcagctgaaaggatcaaagggttcgagggaggctcttcaaaaattcataaacgtgttcgctcttcttctgtcagaggaaagaggccaatgctgtgtctataataaaaatcagcacatgggctcggaacatccaagccccgtcatacatatctcgacggtgtgatctgtagccgtttttccactgctcttcccagtaactctcagctaatggatgcaacagagtccttggaggagttgaagtagctagattactataaactctatcataatcccaactattctggtagattcaatatgactatttgaccactacattgggagttgttgcaaagtgcaatgtaataaataactttgtagctcaaattgtagcaattatgctacgactatatggtgagctgaaattgtcgctatttttgttt

SEQ ID NO: 84787 - DNA, 296 bp, Zea mays
  Clone ID: MRT4577_177334C.1
aaagcggtactgcgttaacaggatcgttttacagaacttcatgacgatggccatcgcgcgcgtcttgggcctttctctatcatctgccagcacctctgcaatgcacatgccctcccactgcgcggggctgcacggctcgtacggcgctggcccctgtctgactactatactagacgccggcggcctatacccttacgcgcatgacctcaggcacccgcactgcagccagctggcagcgtggctctactacgcacggagtgtacatactagcaccatataccatccgctccagcaac

SEQ ID NO: 84788 - DNA, 574 bp, Zea mays
  Clone ID: MRT4577_177335C.1
taacaagatatgtgacggagtagaagcaagggcggaacaagggaaataccatggagtgctagtaattccagagggactaatagaaagcataccagaaatgtatgcgctcattcaggaaatcaataatctccacagtagcaatgtcactgaggccgacattccgtctcaactttctccatgggccgctgccctgttcaagttcctgccatcgttcatcaggagagagttgatcctgcatcaggaatctgataactcagcgcagctatctcagatcgataccgagcagctcttggctcatttggtagaagcagaaatgaacaagagaacaaaagaaggaaagtacaagggaagaaaattcagctccgtgtgccacttcttcggttctcaggcccgaggatcgctgccatccaacttcgattgcaactatgcttatgtccttggccatatctgtgtgcagataatggcggctggattgaatggttacatggccactgtaacaaatctcaaggactccacaaacaagtggcgatgcgctgctgttcctctaacggcaatgatgagcgtgaggagacac

SEQ ID NO: 84789 - DNA, 176 bp, Zea mays
  unsure (1)..(176): unsure at all n locations
  Clone ID: MRT4577_177336C.1
ctctttcccaaccaaaccactcaaacgggcggtcatctcattattttgcgttgcttcacagcncaccacacatgacccttaaacatgacacatcatgctccctttgatatacagaatggcaggccacgctccatctttgccccctagctcaaccacagggccaacctatgcggaac

SEQ ID NO: 84790 - DNA, 291 bp, Zea mays
  Clone ID: MRT4577_177337C.1
cccacgcgtgcggcatgtgatgcgtctgtgtctaatcccaccgagcgctcactgacttggacggttcattcaagcgtatcggcggcggcggcgacgacatgcccaggcccgaccacgagcagaacgccagccccaacgtgctagcgtgcgacgcttgtgacggcagcgcatcatccactgcggcggcagcgcccgccgccatgaggcgggcgttcaccatcctcagccaagaggatgccgacctcgtccttggccgcgttctccatgagcatgagcgggcgttcatgatgc

SEQ ID NO: 84791 - DNA, 371 bp, Zea mays
  Clone ID: MRT4577_177338C.1
ggggtaacaagagccaaccggcctttccccggccattacacattttcagaagggaacaaccaacatctttcaacagaaacttagattggcagaaacccatacattgtctggcaaagaaacaaaaaccattgtccagacaacaacctgttacacaaaggagccaacaaaagatcctgggggacttataggcaagtcccccggggacataacatggtgccctagaactacccacacattttataattgaatttagaggttcctaacattctcaaatataggagccttgggagggggtaccttggtgcccctttttttgaaccctttcttttccttcccctgaggtggcaggtccataattgcctccatttggt

SEQ ID NO: 84792 - DNA, 782 bp, Zea mays
  Clone ID: MRT4577_177339C.1
ataaaacaaaaatattgcttggtagcttgtctttcaaatgctttggcatggttaattcattgcctctgctaatttgttgcataattatgattaattgttagccaaatgattttttcattaatgcacatcaatcaaagttctgcatattgattctgccacttgagtttgtgtagagactagcgcatattgactgtacatactgtggtatactatccgaatcttgtctgatctgcatatgtaaacacgtcttgaatttctactatctgatcaattatatactttgcctagtttaaattgacactatccttgcaccatttgttatacttctaatagtaatgaattttaatattttgaattttatgttgacatttagtaatatttttgaattttatgttgacatttagtaatatttttgaattttatgttgacttaagagaaaagatccttctttgtacggtataactgtcagtatatctataacattttctgttgggatctgcaggtcggctggtacgcacactgacaaaaagaaatagagagcatttcaagttcatggagctggctgccagagattatgttccagtgtctgattttccatacatgtagaacctaatagacatgtcaaagtattatgtatcgaaccagctcatgggattttgctccttccaatgcatccagggtttatgtatcgaaccaatttatgggatcttgctcttattctaatgcatccatggtttgtgaatcttttgctttgggttaaaaaaaaaaaaaaaaaaaaaaaa

SEQ ID NO: 84793 - DNA, 340 bp, Zea mays
  Clone ID: MRT4577_17733C.1
cctcttttttttttggtttaaacaacattcttttttttacatatttttaatatgcacgaccacgacaataatgaaccaaactcggaagaaagcgggtaacagcgggacaaacatcagaacccccgcgcagtttgcgaacaggccacgcgacatacaccacacatgcaatgatacagtgggtgggctaactaggacaaccggacgcaaacctaaattccaaacaacttggtgtaacccggaaaacaagccatgtttgcctcatatttaacaaaacgcaatgcaaacctccctcttacatgcataaatggtccacgctaataaaaggggctgtaaaccaggc

SEQ ID NO: 84794 - DNA, 449 bp, Zea mays
  Clone ID: MRT4577_177340C.1
aacggcgccggcaacagcattagcaacctaacccgcccaaccgacacacctcaacacactgtacagtgtacacccgaccggatcctcccagcacccatgggcctgtgcgtgtcgctcggcgggacatgcagcggcgaggccgcgcgggcggaggcgcccagctgcaagtgcggaacggcgctggtgctcatgcccagcggcgacatgcgggagtaccctttcccggagacgacggctcgtgcgggtgctggaggacgcctacggcttcgtcgccgacgacccggacgactgctggatcctgtgcgacgcggacgggatgggcttggagggcctcgacccggcggcggtgccctacgtggagccgctcttcgaggacaccaacttctgcgcgatccacggcgagcgccgcaacatcatgcccaaggacatgcaggtcgcgcgccgtattc

SEQ ID NO: 84795 - DNA, 312 bp, Zea mays
  Clone ID: MRT4577_177341C.1
tgcatggcgtccgggctcagcaccggccggatgcgctacgtgacgcggccgatcgcgttcgccgtcaaggcgccgtggaagatgctcaccgtcgtgccggggttctcggcgatgaagcagcccgtcgaggcgttcttcatgtccggcgccgccgacgggagcacgcatgcccacgacccgaacggcgcggggtacctcacccggccgcctctgatcgaggagatcatgatgccctcggtgtccgagcttgccaacatcggcgtccagttctgcccccacgcaggcgtactgtccatcatcgcgttcgacgcc

SEQ ID NO: 84796 - DNA, 188 bp, Zea mays
  Clone ID: MRT4577_177342C.1
ctcttgtaacatactattgaaaagaggagggctgaaacaaactttcaggggcgggactatcaaggaaaaaacaaaaattactctggagggcgcataaaagacagtttatttcaaagagggggggtctttgaaccctaaatgttcatcggaatatctaacggcaccaggactaaacctcactccttcaa

SEQ ID NO: 84797 - DNA, 314 bp, Zea mays
  Clone ID: MRT4577_177343C.1
gggacacaatggacagtaaaaataagcacaccgttctcccttgagatacagcgctccgtttaccaattataaggagaaggcccgcttatccccaatgaatgatttatttacatagaaatacttatccgatcgacccaaattaggggaaaaatgaatttaatagatcgtccacttttattacattggagacaaagaaaagttaaataaaacaaaaccctaataattgcttagtgcttataggaaggcgaatgacagtgttaaccccggcgaggctggcaagctgaccgaaatcatatgttggagctgaacggcca

SEQ ID NO: 84798 - DNA, 257 bp, Zea mays
  Clone ID: MRT4577_177344C.1
cattccttgggaagggggaacggaccctcctcaataaataaacctttcccccacgccttgggggtgcggccccccaacaattttctaaatctttcccgccaaaggcttgctaccccaaaaaagatatcccccgcacaaaaggccccccccccaaaaaggcccgggtaagaagggaaataacagccccccccgtatttttttatttgggcaaaaaaggggggggggggaaacacccccatactgccatgttcacccac

SEQ ID NO: 84799 - DNA, 622 bp, Zea mays
  Clone ID: MRT4577_177345C.1
ccggccgggacctctctcctctctgtcccgaccgagcaacagcggccaagcactcaagtgttccgcgttcggcactttggcttcgggattcctgacctagtgcagccgccaccacagcgctgcctctgtcgcgatagctccgcgtcgccgctcaacggaggccgacgaggcgacgagaagcggaggccgagcagtcgcacttgcaggtccagtcctgctggtccgcagtccacagttcgccctctaccctctgctctgggatctgtagtaccgtctgcttcggcctcagcactgccatccgcttcagcctctgcactaccgtccaaggcaagtcgctgtatcaccttagcccatggacgctccccatgccttgacggcttgacctccgatggagaagaagcaaggcaattaaaaaagagaattgatctttttatgggcgaagtgtcttgttagcatcaagtaagtggcgacatcacaacccctacaaggttgtgtcttaaaacaagaggataccagaagttggagtggttttgtgaaggcttttgcgaatcacttgaagcggtgggacttttgtgaatgattttgtaaagtgtttgcaaatatgtgcaaaacataataacat

SEQ ID NO: 84800 - DNA, 266 bp, Zea mays
  Clone ID: MRT4577_177346C.1
gagctcactatacggtggccgccctttttttttttttttatatttgggttcgatgcccattgaatgtgacaaggacaaaatcttgccactataccatataaatcacaccttgtgattcttctatgcaagggataaaacataaatagatatacaagagcctcaatctcattcatgatgggctggtttttttcttgcttgcgctgaatcgcaggaactgaagcggacacccttgcaaagcttacaaataccgctgatgccatcaagct

SEQ ID NO: 84801 - DNA, 809 bp, Zea mays
  Clone ID: MRT4577_177347C.1
cgaggaatacctgcagaacttgctggggattcactgctagcctcgctcgtagaagctgtaggcgtgaacttgcgtgccaggaccattcgactggactggactggctgatgcttccttggggtcgagaaactgagcactgaagcttcagatagtatgcctgataaagaccttgctggctgcttgttattttccgcgtcacaagcagagttcacaggggacaattgttgctcaaatgcctttcggtatagtgtcaggagatgtttctccaagcatatgacctctagctcgagcactgcgatctccttgattagctcctcagtcggctctggaatgcagttcacacttgatgcatgaacagcacaaggcttgtaacctagtgctttcccaagagcacggcgcatgacgaattgatcatccagtcgcttttcaaggacttggacctcacgcttcaaggagcatggaagctcagaagcactggacggcatcttgctggtgctattctggtcctcgagttctccggcatccttctgtcgatactgaccgtggtggcacctcggcgaagacgagtccgcggcgctatccatcatgatgagcgctccgatagaatcgcaatcgctgccgtgccgcctcacatcacaggtgaggtgagtgaaacatccgcagcgagtggaggtcggagttgttgccgaggggagttgatcacctgctagagccttgacctgcctggtgcttttgccttttgtttctcggtccagagttcctccctttccctgctcgaggtgaggtgagaggacaagtgaggagtgccc

SEQ ID NO: 84802 - DNA, 758 bp, Zea mays
  Clone ID: MRT4577_177348C.1
acggcaagcccgcgcagcagctcggcctcgactacctcgagtacagggtggcgcccgaggagagctcgctggccgccgagtacgggctcaacagcaccgtggtgcggaccccctgggtcatcagcagccgcggctggtgggagatgaagaaggtctacatggaccgccagaacgtcaccgtcaacgtcaagcgcttcgccgacctgctcagggcggcgcgtgctcgcctcaggaacaccacggcgtgcgccgccaagcccgcagcgccgctcaggtagacgctagctgctgattgggcttgggttaggtgtcaattactttagtcacacttgccgatttctttgtgctttcgtcctctttttggccgggggataaaaaaggagacgaggtcctgtaaatatgattgggggtacggttggctgagagattggtgggggatctatccatcgcctcctttcgcggtgcattcgtttggttcttggtgttgctggagggagcagcagaaggtgaagaataataatttatggcagggacggctctcctgaaacactttgttcacagtagatcataggggtatcagctctttttatttcgttgccctttctttcttttttttggttttgtcttctcattctttgggtgtccagatgatgtataagaaactacattctgtaacaaagatcaatagaaatccagactcttttacaaaaaaaaaaaaaaaaaaaaaaaaaaaaaactcgaaaggggggcctggtacc

SEQ ID NO: 84803 - DNA, 788 bp, Zea mays
  unsure (1)..(788): unsure at all n locations
  Clone ID: MRT4577_177349C.1
ctcccaaccgcacccagggaagagcgacggcccccgtcccccaagcgattccccatcgaggacctcccgcaggcaacaatagcgaggcagagggaaccgcggcacgacgggcgagccactcggtcggacgcgcgcaaggcgctgcgagagaggaaggcgagatggacgacgcaggacccgccgccaccattcgacacaccagtcgctcaagcaacgacgagaggagaagcgcaaggatgcgcgcggaggaaacgggaaccgcacggagccacacgtggatcctgacaactactcaggccgaactcaagctgtcagccgcgaaacccgtgacgacaacgaggtcttttagtanctccnagagcgaancccaggacaggaatcggagggaagaaagaccacgggcgagaaaacgaaaacacaaggacccggtagagacccactcgctgagcgagagtaagagcgcgagagaggaacaccccaggagcgaggacgggactaggggggggacaagagcaccgacgaagggcggaggagacgaagaagaggaccgatgccacggtgaaacacgagaaccgcaaggaagaaagcgcccatgagccacaggttgaggagcaaacagacaggggacggcagctggcatgcatgtcgtcccgccctggacagtgtggccgagctgatgagtacatccttgaggataaagagctcgagttctacatgaagaagctacagaggaagaacggcaagagcgctgcagcttagagcattctcatggattgtcttgcaccgaa

SEQ ID NO: 84804 - DNA, 520 bp, Zea mays
  Clone ID: MRT4577_17734C.1
attccacaagagctcctgccaaagccggaaaagagcaagctacacctagatgctcggacggagttactacagcgggggctacacgcactaccgctggcatcatccatacggagcgaagacaagcgaacagatccttgcacacatgcaccggactcagacccgtaagccagcatcaacaactgcaaccatcacaccaccaggaagaggcatcgctaagccatgtgaggacatgcggctactgctcatagcgggtgttgccatgcggcccttttggtacgacactatacttcgatacacgcacacttcggacccttgcatcatacaccactcgacatgacaactctacacatgatattacctgtaagctacggacagcaacagacgactacttgcatctagccaattgactgtgagcaaggcacctatgtgcctgcaacaactattgttgcaacagattattccacatgtgactcaactagctggggcaaaccctgtagcctactctcaacagctgcttgca

SEQ ID NO: 84805 - DNA, 706 bp, Zea mays
  unsure (1)..(706): unsure at all n locations
  Clone ID: MRT4577_177350C.1
attgggtacctcgaggccgnngccgggccgggaaaaaaaaaaaaaaaaaaaaaaaaaaaaaaaaaaaaaaaccataccccacggccacgcactcgagcaaggagttccagccgcagtgcgtcacgaaggcgcccgtggccgggtgcgacaggattgccttctacggggcccagcccgtgaccacgagccccttgtccccaacgccgggctcgaagccgtcgtcggagtcggacagccaccgctcgaactcggcgaggttggcgggcttcacaacccagatgaacgggcggttgctcgcctccagcccgggggcgatctccacgagctgcggctgcgacgagcgggccaggctgccaaagctcacgagctccatggaccggggcttcttctgctcgagctagctcccgcagcagacggccgtcgcgtcatcagagccagacgtcgcagacaacggcatgttgtgctggaggaagagaggccccacagcccatgtcttcttgccgatcgccgcctcatagacatcaacgaagaggggctcgagctctgtgaagctattgaccaccaggccatcggctctcgcgtttttagccatgacctcgtcggcggacaccttgccaaaacccagagaagttttccagcgaccacgccctcaaatctcacatggtatggggaagccagggacgcgcatggggcgcttgtggtcact

SEQ ID NO: 84806 - DNA, 574 bp, Zea mays
  Clone ID: MRT4577_177351C.1
ttagcaattccccaagctcttctggagacaaattaagttcaaccagggattgcagccagttgacagagatgcgcatgggtttccttttctactgatttgtattaatgcttgcttagtttgcgatggcgtcagcggcatctattgtatcgctgaaggcattaccccaggccactccgggtcatgtttacaactttcggaacaaatttatagctctggaagctcaatgaaccaaagtttcccactaactagcctaaaatagagtggccttccccatcccatcaaccctcggaaaatttaacgaatttaatacagcataggttaataggttagtcttacatcacaccatctggtgaaccggaatgagtttttgcgttaatcccaattgtccccatccgaaaaaccccaataatgtgcaggtatgccaggcctgtgggaatagtctgcgcctcaacggccgttaccaaaccttgggtttattaggaaaagggggatttggggccacctttgccgcagcggacgtggcactgccggggactcccatttgtgtggtgaagcagttacggccccaaaccga

SEQ ID NO: 84807 - DNA, 291 bp, Zea mays
  Clone ID: MRT4577_177352C.1
atgcccgtccgtccgtccctcctccaccatacgccatagccaacaagcttcctcgaccggccggcttcgtacgctcgtacgtgcagagccagtgcgcgcgacgtcgacctccttccttccacccggctgggctgggctagctagctagctgccttgtcctcctgtggctcgcggcgccccatgactccccaggcctgcgcggggtggccatgagacgacccggcggcgccgcccccgtcgtcgtcctcctcctctggctcgccgcgctcaccttcgccttccacggctgcg

SEQ ID NO: 84808 - DNA, 687 bp, Zea mays
  Clone ID: MRT4577_177353C.1
gggaaaaaaaaaacaaaaaaaaaaaaaaaaaaaaaaaaattaaaaaaaaaaaaaaaaaaaaaaaaaaaaaaaaaaaaaaaaatcggattcggttgggcgccccgacgcggtcccttgaaccccggtctccccttgccccaaccctagcttgtcactgtcgcctcctcctgttccgtcgccgccccgcccccctgggtgaacccactgtcgcccggcctagccctacaactcctgctccgccttttttgaagccctcgactcgcttcaccgccgcgacgggcccagtttccatcctaccgagacggaagcgtaggtgggagcgggcgggccagatccgccgcacatcgtcttgctcatcctctccaatggacgcggtcgcctccatgtgatgggctgccggtcgggcctcacgacggccatgtctgctccgtcaattaacgtcggcatcggcccagcgtcgccctcgtgcgccgtcgtcgtcgcttcggtggccgcgtgacgctgcctcgatggtccctgactccgcgcgggttcacctgcagccgctgcagggagagactgggtcgcgtctgcagttggtgactcggggcccctccctgtgtgatgctcgcctcggggtgcccttgtcaccatgcgccgtagatggtgtattgacgaccggctgctactggcctggtgggctccgcc

SEQ ID NO: 84809 - DNA, 549 bp, Zea mays
  Clone ID: MRT4577_177354C.1
gttctgatcatcgcctcttcttccagtatgactgcaatctgaggggaagggagggagggagatgggtcgtccgagtccagggtggagctcgtgcctccgccatggccccgtgctcctcttgccgctgctcctgtcagctctgtgttcttcctggagggcggccgctcaggctcaggctccgccgccgccgccgcagaccgagccgaccgaagcggcggcggtgaacgcgatactggggaagctggggctttcggcgccggcgtcgtggaacatcagcggcaacccctgcagcggcgccgccacggacgacacgccgctggacgacaacccaaacttcaacccggccatcaagtgcgactgcaccgaccagaacggcaccctctgccacgtcaccagactttggagaagatgaaccattttgttcttggttggatggagcaggaagataaactcgctggacgcggctggccccatccccgaagagctgcggaacctcacccacctcatcaaactgtacgtcctgtccacctctagcctcaagagtgttca

SEQ ID NO: 84810 - DNA, 423 bp, Zea mays
  Clone ID: MRT4577_177355C.1
cgcgcgctgcgccttactcgggcactacgcctacggcatgaacgggatcctcggctgcatgcggagccctgagctattagacaagctcggactcatcggcgcgtagcccaaggtcctgaacgaccacaacgaccaaggcgggctcgagctgtcggagcaccagtgggcgatcgacgcgatggaggccaactactccgtgtgggcgaccgggtacgccatgttggcggggggcgcggacaggccgactgctgtgcacggagttagccgcacatgtgttcaatatgcggtcggacatgtccctgcacgggggtcgcagcgggcgcaacaccgacctacgacgtgcgctgggcatggtgcggtgcccttgcgtggcggggcagaccagacgagacgtatacgggctggattttgtcaccgtctacc

SEQ ID NO: 84811 - DNA, 321 bp, Zea mays
  Clone ID: MRT4577_177356C.1
acaggacaaaaaactgggcgctttttatttatacttaaaattggccattgggcaaaagatttttttaagccctggacaacaggtcctgaaaatttgatatcatcgcaaaacctttttacacaatgccctccctttaaaacaaataaaatttttcccctcctaattggcgctagctagctagctttccattgggatccgagccccagtcgatcggcaggctccaaatttggggggcgcatcccgctcccagtttttgaaatccattggggcaaacccaaggacgttaaacgggtcacccatgtccagttttttttccgaaaa

SEQ ID NO: 84812 - DNA, 289 bp, Zea mays
  Clone ID: MRT4577_177357C.1
cttgggggctttttaaatatttttggggttatacaggcaccacttctgtttgtattgcacgcatttttttacacgcggaaaaaaagcccaacgggcccccgcctggtgaagcggagaagccgcaccctaccaggcccccccaataaaagccaaaacgacccttggcaaaaaagaggcccgggggtttaccaagtaatgaaaaaagggccctcccccgcaattaaaccctccatggccccctgcggggccaaacaaaagtcccgccccctgaagaccgccggggccatcc

SEQ ID NO: 84813 - DNA, 156 bp, Zea mays
  Clone ID: MRT4577_177358C.1
ccatggattggtttttctgattctactttctatattttctatcgccacatacacacatactatcactacctgcatatggcaaccaccaacacagttaatgtaccacatcctgtacatgtggcacttatctataacctcccacctaacttttatctc

SEQ ID NO: 84814 - DNA, 306 bp, Zea mays
  Clone ID: MRT4577_177359C.1
atgaagagcgccttcctcaacggaccaatcaaggaggaggtgtatgtggaacaaccccctggctttaaggatgacatgtatcacgaccatgtgtataagctctctaaggcgctctgtggacttaagcaagctccacgagcatggattgggatgaaggacgctaagcccgcgaaaaagccaatgggaactgacggacacttggacctcgacaaaggagcatttatgtccttacttattgtggtgctcaagttgtacatgtcatcctcgaacctcacaagtccttatgcaaatgatgcacatgtttag

SEQ ID NO: 84815 - DNA, 182 bp, Zea mays
  unsure (1)..(182): unsure at all n locations
  Clone ID: MRT4577_17735C.1
ttcccnnnctccgcgcccacctcgcattctcctaatccgcggccgtcgctcatgtttccaggggctattcgtctcatacctgcgagcggaccgtaaatgagatcaaggttccaaaggctctgttttgctgctcaagcaactatgccatggcactgttcctcacaacagctaaatctaatgca

SEQ ID NO: 84816 - DNA, 690 bp, Zea mays
  unsure (1)..(690): unsure at all n locations
  Clone ID: MRT4577_177360C.1
ggaccctcgaggccggccgggcccgcctcgccgccagtcagattcaccaccggctcccctgacaaccgcgtccgcgctgcaccaccaccgttcatcgaggaggaggggggacggagaccacggacatggagagatctcaacggcagcagcagccgtctcctccgccaccgtcgccgtcctcctcctcgtcctccgtctccgcggacaccgtcctcgtcccgcccggnaaagaggcggagggcggcgacggccaaggccggcgccgagcctaataagaggatccgcaaggaccccgccgccgccgcggggaagagaagctccgtctacaggggagtcaccagtctacctgggggcgtatgacagcgaggaggcagctgctcgtgcctatgacctcgcagctctcaagtactggggtcctgagactctgctcaacttccctgtggaggattactccagcgagatgccggagatggaggccgtttcccgggaggagtacctggcctccctccgccgcaggagcagcggcttctccaggggcgtctccaagtacagaggcgtcgccaggcatcccacaacgggaggtgggaggcacggattgggcgagtctttgggaacaagtacctctacttgggaacatttgacactcaagaagaggcagccaaggccaatgaccttgcggccattgaatac

SEQ ID NO: 84817 - DNA, 3741 bp, Zea mays
  Clone ID: MRT4577_177361C.1
ccccgcgtccgattttttttcttcaatctttggcgatggtggtccccttggcgccggtgatctgcatgtgcctgtgatctactgctggctgcatcacctcaatagtctacctgggggcgtatgacagcgaggaggcagctgctcgtgcctatgacctcgcagctctcaagtactggggtcctgagactctgctcaacttccctgtggaggattactccagcgagatgccggagatggaggccgtgtcccgggaggagtacctggcctccctccgccgcaggagcagcggcttctccaggggcgtctccaagtacagaggcgtcgccagacactcaagaagaggcagccaaggcctatgaccttgcggccattgaataccgtggcgtcaatgctgtaaccaacttcgacatcagctgctacctggaccacccgctgttcctggcacagctccaacaggagccacaggtggtgccggcactcaaccaagaacctcaacctgatcagagcgaaaccggaactacagagcaagagccggagtcaagcgaagccaagacaccggatggcagtgcagaatctcctttgttcgcttcaatctttggcgatggtggtccccttggcgccggtgatctgcatgtgcctgtgatctactgctggctgcatcacctcaatagtctacctgggggcgtatgacagcgaggaggcagctgctcgtgcctatgacctcgcagctctcaagtactggggtcctgagactctgctcaacttccctgtggaggattactccagcgagatgccggagatggaggccgtgtcccgggaggagtacctggcctccctccgccgcaggagcagcggcttctccaggggcgtctccaagtacagaggcgtcgccaggtgcttatactgcttatattattctactgtgttactatgtgctaatcttgattccagcacctacatctcgattgatcacctagtagcaaatggtagggtgtataaatctgctagctcaatcagcacatgcactgaccatggaatgatggaacacacctggcatggcaagaggctgtgcagctcccaagtgcaaaaaaatggatgtcacactggattgtgaaatggggtccaggctgcaggcacactaactcacaccggcgttctctagttgcattgggtgacagacacggcacaagatgaggtccaactgtaacctagaacgtcagaggcacacgcatcacctgggcgggcctgtggcacgtcacacacgccagccatgtcatgcatgactcatcacccacctggcattgtgcttctgtgcacctagaaaatgccagctctgaactgcatgcatcacagactactactaaaattgtttgtgaaaccagtgagtgcatcattcttcaaggatcaggatgcacgccttcaataagctaaaagaatgaatgttttttttcttcatgttcttgttgctttgatggtctaggcatcaccacaacgggaggtgggaggcacggattgggcgagtctttgggaacaagtacctctacttgggaacatttggtatggatggacagtcggcgtactaggtacatcccgcaatgatagtcgtcaagcgaatccaagacaccggatggcagtgcagaacccgatgagaacgcggagcctgacgacaccgcggagcccctcaccacagtcgacgacagcatcgaagagggcttgtggagcccttgcatggattacgagctagacaccatgtcgagaccaaactttggcagctcaatcaatctgagcgagtggttcgctgacgcagacttcgactgcaacatcggatgcctgttcgatgggtgttctgcggctgacgaaggaagcaaggatggtgtaggtctggcagatttcagtctgtttgaggcaggtgatgtccagctgaaggatgttctttcggatatggaagaggggatacaacctccagcgatgatcagtgtgtgcaactaattctggaacccgaggaggttttcgctttccaggtgtcctgtcttgggtaatccttgatctgtctaatgccacagtgccactgcaccagagcagctgagaactttcttgtagaaagcccatggcagtttggcgttagacaagtgtgtcgatgttctttaattctttgaatttgcccctaggctgcttggctaacgttaagggtttgtcattgtctcacttagcctagattcaactaatcacatcctgaatctgaagtggttgtgcttgtgcagtttatcactgagtttacatggcatgatcatggtaacgactagatcaagattcaagatccagaccacagatttgctttcacccccctattaccatcataaaagcctagtgacagaggaaaacacaaaggtttaactagttgcactgagactggatatgtccggtggctggcacatgtgcaagcaagcagcccaccgtccattcagattagttgagcagcctttgtctgcaattcagtatctcacattaagcataatctatgtgcatgctttttttttctttctttctaaaaccaacaaattatatacatttaccagaatctgtgtcaccaaacattttgtcttactttcgagaggcactactgtactctgagaacaagggcacttggacaaattttgcacttggacaaattagccaagcgtcatgtctgaacatctgtttttatccacccattcagacagactacttaaccattcgtccgcttctgcagacactcaagaagaggcagccaaggcctatgaccttgcggccattgaataccgtggcgtcaatgctgtaaccaacttcgacatcagctgctacctggaccacccgctgttcctggcacagctccaacaggagccacaggtggtgccggcactcaaccaagaacctcaacctgatcagagcgaaaccggaactacagagcaagagccggagtcaagcgaagccaagacaccggatggcagtgcagaacccgatgagaacgcggtgcctgacgacaccgcggagcccctcaccacagtcgacgacagcatcgaagagggcttatggagcccttgcatggattacgagctagacaccatgtcgagaccaaactttggcagctcaatcaatctgagcgagtggttcgctgacgcagacttcgactgcaacatcggatgcctgttcgatgggtgttctgcggctgacgaaggaagcaaggatggtgtaggtctggcagatttcagtctgtttgaggcaggtgatgtccagctgaaggatgttctttcggatatggaagaggggatacaacctccagcgatgatcagtgtgtgcaactaattctggaacccgaggaggttttcgctttccaggtgtcctgtcttgggtaatccttgatctgtctaatgccacagtgccactgcaccagagcagctgagaactttcttgtagaaagcccatggcagtttggcgttagacaagtgtgtcgatgttctttaattctttgaatttgcccctaggctgcttggctaacgttaagggtttgtcattgtctcacttagcctagattcaactaatcacatcctgaatctgaagtggttgtgcttgtgcagtatatcactgagtttacatggcatgatcatggcaacgcagccagtgcagcatagatttgttcgtttgaacagtttacaaggctgtaaccctagtaagctccagattaacgaaccctttgttttcccc

SEQ ID NO: 84818 - DNA, 1135 bp, Zea mays
  Clone ID: MRT4577_177362C.1
cttttttttcttcaatctttggcgatggtggtccccttggcgccggtgatctgcatgtgcctgtgatctactgctggctgcatcacctcaatagtctacctgggggcgtatgacagcgaggaggcagctgctcgtgcctatgacctcgcagctctcaagtactggggtcctgagactctgctcaacttccctgcatcaccacaacgggaggtgggaggcacggattgggcgagtctttgggaacaagtacctctacttgggaacatttgacactcaagaagaggcagccaaggcctatgaccttgcggccattgaataccgtggcgtcaatgctgtaaccaacttcgacatcagctgctacctggaccacccgctgttcctggcacagctccaacaggagccacaggtggtgccggcactcaaccaagaacctcaacctgatcagagcgaaaccggaactacagagcaagagccggagtcaagcgaagccaagacaccggatggcagtgcagaacccgatgagaacgcggtgcctgacgacaccgcggagcccctcaccacagtcgacgacagcatcgaagagggcttatggagcccttgcatggattacgagctagacaccatgtcgagaccaaactttggcagctcaatcaatctgagcgagtggttcgctgacgcagacttcgactgcaacatcggatgcctgttcgatgggtgttctgcggctgacgaaggaagcaaggatggtgtaggtctggcagatttcagtctgtttgaggcaggtgatgtccagctgaaggatgttctttcggatatggaagaggggatacaacctccagcgatgatcagtgtgtgcaactaattctggaacccgaggaggttttcgctttccaggtgtcctgtcttgggtaatccttgatctgtctaatgccacagtgccactgcaccagagcagctgagaactttcttgtagaaagcccatggcagtttggcgttagacaagtgtgtcgatgttctttaattctttgaatttgcccctaggctgcttggctaacgttaagggtttgtcattgtctcacttagcctagattcaactaatcacatcctgaatctgaagtggttgtgcttgtgcagt

SEQ ID NO: 84819 - DNA, 348 bp, Zea mays
  Clone ID: MRT4577_177363C.1
aaaccctcatcccctttagggggccaaaaacaattacttaaaaccacggggttttgaatttatgatacaagacgaaaagaatggggggcccacgtccttcatgcgtttataccccacatttttatttgtccagaacaacacttggtcacactttttttgaccactggtaaaccgctccgggggttttttttaaaccttaaagccaggggttactccaaaaccctcccttaaaaaaagagctgaacggtttcctactggtcgctggacaagcctgggcgagcgcccaaacattggttttttggaggaacttttaaccgtgcaccaagatggggggaatggtttgcaaaa

SEQ ID NO: 84820 - DNA, 1719 bp, Zea mays
  unsure (1)..(1719): unsure at all n locations
  Clone ID: MRT4577_177364C.1
cggccgggcccgccttgccgccagtcagattcaccaccggttcccctgacaaccgcgtccgcgctgcaccaccaccgttcatcgaggaggaggggggacggagaccacggacatggagagatctcaacggcagtctcctccgccaccgtcgccgtcctcctcctcgtcctccgtctccgcggacaccgtcctcgttcctcccggaaagaggcggagggcggcgacggccaaggccggcgccgagcctaataagaggatccgcaaggaccccgccgccgccgccgcggggaagaggagctccgtctacaggggagtcaccaggttcgtccatctgcaaacaagcatccaatcaggtgctgctgagcagtcaacgcacgcacacagcctggctgccgagcagcaggcatccaatcacgtagttcgtcgaagaacggttggttggtgcggntcctccatctccttttttttcttcaatctttggcgatggtggtccccttggcgccggtgatctgcatgtgcctgtgatctactgctggctgcatcacctcaatagtctacctgggggcgtatgacagcgaggaggcagctgctcgtgcctatgacctcgcagctctcaagtactggggtcctgagactctgctcaacttccctgtggaggattactccagcgagatgccggagatggaggccgtgtcccgggaggagtacctggcctccctccgccgcaggagcagcggcttctccaggggcgtctccaagtacagaggcgtcgccaggcatcaccacaacgggaggtgggaggcacggattgggcgagtctttgggaacaagtacctctacttgggaacatttgacactcaagaagaggcagccaaggcctatgaccttgcggccattgaataccgtggcgtcaatgctgtaaccaacttcgacatcagctgctacctggaccacccgctgttcctggcacagctccaacaggagccacaggtggtgccggcactcaaccaagaacctcaacctgatcagagcgaaaccggaactacagagcaagagccggagtcaagcgaagccaagacaccggatggcagtgcagaacccgatgagaacgcggtgcctgacgacaccgcggagcccctcaccacagtcgacgacagcatcgaagagggcttatggagcccttgcatggattacgagctagacaccatgtcgagaccaaactttggcagctcaatcaatctgagcgagtggttcgctgacgcagacttcgactgcaacatcggatgcctgttcgatgggtgttctgcggctgacgaaggaagcaaggatggtgtaggtctggcagatttcagtctgtttgaggcaggtgatgtccagctgaaggatgttctttcggatatggaagaggggatacaacctccagcgatgatcagtgtgtgcaactaattctggaacccgaggaggttttcgctttccaggtgtcctgtcttgggtaatccttgatctgtctaatgccacagtgccactgcaccagagcagctgagaactttcttgtagaaagcccatggcagtttggcgttagacaagtgtgtcgatgttctttaattctttgaatttgcccctaggctgcttggctaacgttaagggtttgtcattgtctcacttagcctagattcaactaatcacatcctgaatctgaagtggttgtgcttgtgcagt

SEQ ID NO: 84821 - DNA, 353 bp, Zea mays
  Clone ID: MRT4577_177365C.1
gggggggaaaccaagaaagatgacaaaaaaattccattcaaataaaaatctgggttccctagccactatacccttaagcttttagggcccccagcttacaagcaacctggaggcctggtgttttaaattaccggctcacccacaagtttttcatcgaaataagcgccgcttttcctttattggacataccatacaagcgtatttacatgggcctgcagggtgatctgttccatataaacctacaaccgcatgcgacccaaatattggccaccacggaaagcaatgtccccacctccagcaagagcaggcggccggcccgggaaccatcacttggtgaggaaccatttcgcccc

SEQ ID NO: 84822 - DNA, 2039 bp, Zea mays
  unsure (1)..(2039): unsure at all n locations
  Clone ID: MRT4577_177366C.1
aagacaacaacaacaacaagntcaacaactatctcaacaagttcagatgatgcagggaatggtgatgcaggtaataattttagtaatccgctcaaaatttgcccaatctcagaatttgcccatttttttttttttctcataatggtataacacacattttgtatataagttattgtagtatactaatattatatattcccgttgcaacatacgggcattcatctagtaaatatagaatggtgaaaacaaaggttccttaatctggagcttactagggttacagccttggtaaactgttcaaacgaacaaatctatgctgcactggctgcgttaccatgatcatgccatgtaaactcagtgataaactgcacaagcacaaccacttcagattcaggatgtgattagttgaatctaggctaagtgagacaatgacaaacccttaacgttagccaagcagcctaggggcaaattcaaagaattaaagaacatcgacacacttgtctaacgccaaactgccatgggctttctacaagaaagttctcagctgctctggtgcagtggcactgtggcattagacagatcaaggattacccaagacaggacacctggaaagcgaaaacctcctcgggttccagaattagttgcacacactgatcatcgctggaggttgtatcccctcttccatatccgaaagaacatccttcagctggacatcacctgcctcaaacagactgaaatctgccagacctacaccatccttgcttccttcgtcagccgcagaacacccatcgaacaggcatccgatgttgcagtcgaagtctgcgtcagcgaaccactcgctcagattgattgagctgccaaagtttggtctcgacatggtgtctagctcgtaatccatgcaagggctccacaagccctcttcgatgctgtcgtcgactgtggtgaggggctccgcggtgtcgtcaggcaccgcgttctcatcgggttctgcactgccatccggtgtcttggcttcgcttgactccggctcttgctctgtagttccggtttcgctctgatcaggttgaggttcttggttgagtgccggcaccacctgtggctcctgttggagctgtgccaggaacagcgggtggtccaggtagcagctgatgtcgaagttggttacagcattgacgccacggtattcaatggccgcaaggtcataggccttggctgcctcttcttgagtgtcaaatgttcccaagtagaggtacttgttcccaaagactcgcccaatccgtgcctcccacctcccgttgtggtgatgcctggcgacgcctctgtacttggagacgcccctggagaagccgctgctcctgcggcggagggaggccaggtactcctcccgggacacggcctccatctccggcatctcgctggagtaatcctccacagggaagttgagcagagtctcaggaccccagtacttgagagctgcgaggtcataggcacgagcagctgcctcctcgctgtcatacgcccccaggtagacttgcctgcctttcttcttgttgtggagcgcggcgaggcagtgcttgtcccagagatgcgcctcgaacctgcccgtccacctgtgcctggtgactcccctgtagacggagctcctcttccccgcggcggcggcggcggggtccttgcggatcctcttattaggctcggcgccggccttggccgtcgccgccctccgcctctttccgggagggacgaggacggtgtccgcggagacggaggacgaggaggaggacggcgacggtggcggaggagactgccgttgagatctctccatgtccgtggtctccgtcccccctcctcctcgatgaacggtggtggtgcagcgcggacgcggttgtgcaggggagccggtggtgaatctgactggcggcgaggcgggggaggaggaggaggaggaggaggacggggtttttatagagcggtggcggtggggggtttttgcgttgcgcctctgtgccaactgccattgttgttgcgtggcgcctcac

SEQ ID NO: 84823 - DNA, 1598 bp, Zea mays
  Clone ID: MRT4577_177367C.1
ggtaccctcgggttcggccgggagtccactccaccaccgttcatgcatgaccatggagagatctcaaccgcagcaccagcagtctcctccgtcgccgtcgtcctcctcgtcctgcgtctccgcggacaccgtcctcgtccctccgggaaagaggcggcggagggcggcgacagccaaggccaataagagggcccgcaaggacccctctgatcctcctcccgccgccggggagaggagctccgtatacagaggagtcaccaggcacaggtggacgggcaggttcgaggcgcatctctgggacaagcactacctcgccgcgctccacaacaagaagaaaggcaggcaagtctatctgggggcgtacgacggcgaggaggcagcggctcgtgcctatgaccttgcagctctcaagtactggggtcctgaggctctgctcaacttccctgtggaggattactccagcgagatgccggagatggaggcagcgtcccgggaggagtacctggcctccctccgccgcaggagcagcggcttctccaggggggtctccaagtacagaggcgtcgccaggcatcaccacgacgggagatgggaggcacggatcgggcgagttttagggaacaagtacctctacttgggaacattcgacactcaagaagaggcagccaaggcctatgatcttgcggccatcgaataccgaggtgccaatgctgtaaccaacttcgacatcagctgctacctggaccacccactgttcctggcgcagctccagcaggagcagccacaggtggtgccagcgctcgaccaagaacctcaggctgatcagagagaacctgaaaccacagcccaagagcctgtgtcaagccaagccaagacaccggcggatgacaatgcagagcctgatgacatcgcggagcccctcatcacggtcgacaacagcgtcgaggagagcttatggagtccttgcatggattatgagctagacaccatgtcgagatctaactttggcagctcgatcaacctgagcgagtggttcactgacgcagacttcgacagcgacttgggatgcctgttcgacgggcgctctgcagttgatggaggaagcaagggtggcgtaggtgtggcggatttcagtttgtttgaagcaggtgatggtcagctgaaggatgttctttcggatatggaagaggggatacaacctccaacgataatcagtgtgtgcaattgattctgagacctatgcgtggcgtgcgacaagtgtcctgtctttgggtatacttggtttgtccaatgccacggtgccactgctgcgagtcagctgaacttcttgtagaaagcacatggcagcttggcattagacaagtgtgttggtgttccttaattctttggatatgctttaggcattgactaaccttaagggttcgtcactgtctcgcttagcttagattagactaatcacatccttgaatctgaagtagttgtgcagtatcacagtttcacatggcaattctgccaatgcagcatagatttgttcgtttgaacagctgtaactgtaaccctatagctccagattaaggaacagtttgtttttcatccat

SEQ ID NO: 84824 - DNA, 399 bp, Zea mays
  Clone ID: MRT4577_177368C.1
gccgaggtgctacacagcttttttttttttcttttttttttttttttttttctttttttttttttttttttttctagaaggggccacctaaagaaaaataaaacgaggcatgattccctaaggaggcataatggcaccagccccaacgagcaaggggggggggggggggaaaaaaccaaagggaaacaggggggggcaaagcaaaaaccgaccccagcggggtccatatgaaacaccgggagggggcccgcgtgaaagcctccagccccccggactatccttaaaaaccggggcgccacggggatccccactgcaaccggggcatcggggcaagccaaccaaagcagacgttgggccaatggagccaataggcgggctgccctccatgaaaggaacccc

SEQ ID NO: 84825 - DNA, 223 bp, Zea mays
  Clone ID: MRT4577_177369C.1
aggcaacttttagtctggtatgacattacatgtccataaatacattctactaggtgtcaaataactgtattatagaagcgcgtttggtagatataggtgtttgcgtgatcataggaatagggcacaaagcacaaaaacattaagctataccaaaggagcgggaccctcagaatcttattcgctttgcctacttgtgctctatcattttcagacatctgagcca

SEQ ID NO: 84826 - DNA, 310 bp, Zea mays
  Clone ID: MRT4577_17736C.1
accggacgtgctgggaaatctggtcttgcgactgcattcttcaacgagagcaacactacgcttgcaaggccattgagtgatctctactacaagggcttcctcgccctgcaggcgcaccgcgcgcgcacgggctgtggtgcgaggaccgctccgcgccggccttcctcctccagagccgcgcgtccgaagtgttcggcgtcgacatccaccccggcgcgcgcattggctcggggatcctgttcgaccacgccacgggcatcgtcatcggcgagacggccgtcgttgggaacgacgtctccatcctgcacgg

SEQ ID NO: 84827 - DNA, 337 bp, Zea mays
  Clone ID: MRT4577_177370C.1
atgtatgtggacgtcatcaaggactcgggtggtccaacaaatggttttgggggaagctccattactcctcctatatccactacatcacaccatcatgtctccaagaactctcctactaccacattgtcatgtacttagggcactatctctcactcctctagacacgtatcactccgctactcccctttattacacctggatcctttccttacacctataaaaggaaggaccaggtcctttttatataatgttgtccactcttgacctataactgtacaagctctcttttggggccattctctttactaatcaacaaaaacgcttgtaacccccctac

SEQ ID NO: 84828 - DNA, 366 bp, Zea mays
  Clone ID: MRT4577_177371C.1
ccccgcgtccggcgatgttggcggcgtcctcgtcggaggagtcggaggagctctcgtcggagtcccactcgcggcacacatgggcatcgccgcccctcttcttgtggtctgtagaaaagagcctcttgctagaaccatcagcgtcgaggtctactactttctcgatggcttgggcgagcagtgccccagcacctgtcaccatcaccgacatcagcctcgctgcagacgacaagaccgacgagttgttcgccaaaatctccctcaggctaggcccccaccgcttctcgtctggaccccgatagggctctcaagcttgctgaacacgaagggcgaggaggggtgggcaccttttcattctccgacaac

SEQ ID NO: 84829 - DNA, 260 bp, Zea mays
  Clone ID: MRT4577_177372C.1
atttattttcatgaccttctcttgctcttccctgcccatctgcaaggcacggaggatggggcaacgatcctgcaggctccgaaacagcaacaactggatctatatcattgaacgatccaaactttacatatataccacgtagctgacatgtcattgactcatgtgaacctacatcctagagacactaacatggcatggatccaaagcggtcatctttgacaggtataggtccaacagccccctatgtaaaatgcatggag

SEQ ID NO: 84830 - DNA, 620 bp, Zea mays
  Clone ID: MRT4577_177373C.1
aaacctcgactggctcgctctccctgcgaccggtggcgacggtctccgcctccagcctccacctccgttcggtgcatctccgtccgacgaccggatagcgccgccccccgcgccctccctcaagagaaccgcctccacagtccgtccctccggcagcagcgacggcgacggaccgggcgtcatccatctcccctctgcctcaaagcttctatcacctccggcgacgacgatggccaagaggtcaccctcctttcaccaaggcgctgtatcatgagctagcagagtatgtgcatctgtgctcctgccgctccacttccaggtgatggcgtcgggttggtcagagagggtgaagctctcaagttcccgccaaagtatcaggtttcctaaagatagcaaataaaaatgttcaaagaagttgatgctggaagtttcagtaaagtatctatttcaacagcaaaactttttgctatggacgtgtcacatatgggcatttttttaatggagctaaatgcttattcttgctggatttttaaccgtagttagtatttaaaaaaacatgattagcacaataaattttatcctcagtagtgttgtgtaatttgtgcgactcgaccgcataa

SEQ ID NO: 84831 - DNA, 761 bp, Zea mays
  Clone ID: MRT4577_177374C.1
atattttccggagggatcatctccgctcgtgcttggggggcgtcttctgaggcgcaggctcttccacctccgttcggtgcatctccgtccgacgaccggatagcgccgccccccgcgccctccctcaagagaaccgcctccacagtccgtccctccggcagcagcgacggcgacggaccgggcgtcatccatctcccctctgcctcaaagcttctatcacctccggcgacgacgatggccaagaggtcaccctcctttcaccaagatgcatgaacatgagctcaatacttaatacgacaggtatatgacatgagtaggccttgcatgatcaagaaaaccaatgatacaaattgcatctgtcggtaaacttttgtcgatgaacttccaggcgctgtatcatgagctagcagagtatgtgcatctgtgctcctgccgctccacttccaggtgatggcgtcgggttggtcagagagggtgaagctctcaagttcccgccaaagtatcaggtttcctaaagatagcaaataaaaatgttcaaagaagttgatgctggaagtttcagtaaagtgtctatttcaacagcaaaactttttgctatggacgtgtcacatatgggcatttttttaatggagctaaatgcttattcttgctggatttttaaccgtagttagtatttaaaaaaacatgattagcacaataaattttatcctcagtagtgctgtgtaattttgtgcgactcgaccgcataacttattgttagc

SEQ ID NO: 84832 - DNA, 488 bp, Zea mays
  unsure (1)..(488): unsure at all n locations
  Clone ID: MRT4577_177375C.1
aattcggcacgagggatccacacctagttcgttccgctgagatcatctaaaagttgttgcccgggcgacagaggaagaagataccacatgatgatgcggtagtacgaaccacacctgccgcaattacacgtgaggcaaagaccgccgccagcagctcggcaccaacgccgggactaaccgcgcccaccacacacgccagcgccaagaagcttcacaggtaccagcccggaaccgtggtgctactgcagatcctgaaggaccagaacaacatggagctgctgatgctgaagctgcccttgcagctggctgcggccgcgagatcgcgcacgactacaagacagaactacgactacaaagacgcgccttgctgtatctcnacgaggcacgaaataagatactgtgaactgctctcgccattatccatggtctgtcgcttctcgcctgagtctgctggatctggggttaggatgaacgtcctcgcggcttca

SEQ ID NO: 84833 - DNA, 207 bp, Zea mays
  Clone ID: MRT4577_177376C.1
ccctctcgtacctgagaagatactcttcgcggacaagcaatactggaccgctgcagaggctagcatctaacattattcgtattttatttttttctccagtcactggggctagatctacaaggcgattatatattatagatctaatctggctataatttacgtataaatccataaccaactagatcttcattctgtatttatgaggaa

SEQ ID NO: 84834 - DNA, 599 bp, Zea mays
  Clone ID: MRT4577_177377C.1
aagttgagccagactcaattgcttctgttccttctggggctggcttggcttcttgagtttcctaaaaggccttcctcggatgcgatagagatagatcgcttttctttttaataattctttccccgcaagctcaacagcggaaccggaccctggccttaatggatcccaatctggcctgccccaaagaatggactgtgccaattggtcacttggctgagactaccatatttggaaacctggcctagattagaaggatgccaacaagggatagttccggcactttctctacttcaatacctgcttcttcgcctgtccaaaactaatatctctgttggaaccagtgctgggattcatcttcctcatattcattcatctacctcgcgccggagaccttcacaagctcactagtatagatcagatctatctggccaaaggataaactagtagctatatgaaaacctgcacccgcccctgctctgtaatgtttcccgaggaactgctttcagtatcgatagaagctcgagtgttcacatgcataccactactatccagcatcaactggacctgcacctaagagaaagagagcgcagatcactcac

SEQ ID NO: 84835 - DNA, 427 bp, Zea mays
  Clone ID: MRT4577_177378C.1
attattgggtttttttaaatatttatattcctttcacacaatcataatttttttaaaaaaattttttttctttctccaaaaacgaaaaaaaaaaaattttatcccctcccaaccaaacacctctttttttttagatcgctcaaaaattttcacaaaaaaccccctttaaaaaaaatacaccccaacccccaacgggaaaaaacccccgaaccttacatcttctagggggtgccaccaaaaaaaacacccccgaccaatattcccaccatcaaaaaaagctcaaacgtaaaaggcccctcacaaaagggggcccccccacccggtctatattacaaccccccgggcagaccctcaaaaaacaccccacccttcatagtttctaccaaaaaaaaccccccaatttaaaaagcctcccaatccccccacc

SEQ ID NO: 84836 - DNA, 112 bp, Zea mays
  Clone ID: MRT4577_177379C.1
aaagacggccgaccgcggagaaaagtttagtgcacttctagacacgacttgtgagctacatagtcaggcccatgagttcaagaaacagggggtgtagattcgtcggaagaca

SEQ ID NO: 84837 - DNA, 292 bp, Zea mays
  Clone ID: MRT4577_17737C.1
ccgaggagaaaggagatgagatctcatacatggttgatccacaggagatacctatgacatcgtccgaaaaggatcatgacacgtcctatgaccatggactgctcttgagtcagaggccaaggttccatcggctagccggctgagagaatgttgggacactggcctaacattggatggatgacagacgcaatcaccactcgagaagtaccagatgcattggacccgggggctctgattttgggagcgccgtggacaccaaaattattagaagggtaccagctagtagtttctt

SEQ ID NO: 84838 - DNA, 228 bp, Zea mays
  unsure (1)..(228): unsure at all n locations
  Clone ID: MRT4577_177380C.1
nnnnnnnnnnnnttttntaaganngcaagaggggnnccngggccaggggcgnggtaaagggaccaggaggggccccgcgccacgaaaaaggaggaacgacccgcccacaaccaacaagggaaaccccctacagagcacacacaaaccaggggcnacaacagagacaccaanccaagggaagagccacgcaacaagcacgagcccacaaggcgnngcagnaacacgaaa

SEQ ID NO: 84839 - DNA, 1123 bp, Zea mays
  Clone ID: MRT4577_177381C.1
ggagaactagcaatacttgaagatgaacaaccatatttccattctagtgattctcatcgtcgatgtgtctgttgtcctcctgctcaattcccatgtagggttatgcagctgctacaaccgcatctttagttttggtgacgataccatggacactggaaatttcattcacttgattgggaaggccccatctaagtacaaggaagccccctatggcaagacattttttagacatgcaactggccgcatttctgatggtcgtgtcctcattgatttctatgcggaagcactaaaactgccaatgataccacccattttacctgagaagaactctgggtgtttcccacatggcgccaacttcgctgtgtttggtgccacggcacgtggcaaagtcttcttttcagggagcccctggtgtataggcacacaaatgtactggtttgatcaattggtagatcgtatagctcccggagatggtaaacctcccaaggatggaaatatcatttcagatgtcatcgcagacataagccatttcatcgaggagcttattgtcgttaatggggcgaaagcattcgtggtcgccaataactttcccgttgggtgtttggcatcatacctaagtaggttccacagtgacgaccatgaggactacgatgagcatgggtgccttaagtcgttcaatgagttctcccaaaagcataatgagcaactttattctgccatcggacaaatcagatactcttacccaaatgtgaaggtaatctatgctgactactacaacgccaccatggaattcatcaagaagcctagcagatttggtattggtgatcctctagtagcatgttgtggcggcaatggaccataccacaccagcatggagtgcaatggcacagcaaagctttggggtgacccacaccactttgccaattgggatggcatgcacatgacagagaaggcatacaacatcattatggaaggggtgttaaatgggccatttgctgatcctccatttccacttagttgctaggattgttacgctaggaattccttacaacatgtagccaatattttttataataatggaagtattttggatttatactacttcaaggaagaagtaactttc

SEQ ID NO: 84840 - DNA, 358 bp, Zea mays
  Clone ID: MRT4577_177382C.1
cttgaagatgaacaaccatatttccattctagtgattctcatcgtcgatgtgtctgttgtcctcctgctcaattcccatgtagggttatgcagctgctacaaccgcatctttagttttggtgacgataccatggacactggaaatttcattcacttgattgggaaggccccatctaagtacaaggaagccccctatggcaagacattttttagacatgcaactggccgcatttctgatggtcgtgtcctcattgatttctatggtaaacctcccaaggatggaaatatcatttcagatgtcatcgcagacataagccatttcatcgaggagcttattgtcgttaatggggcgaaagca

SEQ ID NO: 84841 - DNA, 583 bp, Zea mays
  Clone ID: MRT4577_177383C.1
gccttggccgccaccccctctcactcctccacccatttgcagccgccacccacctctcccccatcaaaccctagccgcccctcctcaagcccttctctccaaggtgccattcctttcccgctcggatctacgtcgcgttggtgcaagtctcccggtggtttttggtggagagaagaagaaaggaggaaagggggaggattcaagatttctgcaggtggacgaacagcagcagtagtagcagtttctggggatttttcgtgggaaattagaggtggtggacttccggatcgtacttagggatttgcccaaacttccggtgaaggcacatgatctttgctttgggataagaagggatgtagcagcacgaccactacacctttaaataaaggaaccactgcttaataatgatgttaaacagggagggtctaatctgagggattaatatgttttagcctttcttggtagttaaacagatttttggggtggactgagttacctatctttttatttggtcatgaatgttcattaccacctctgcatttttattatactatgtgaattagctttcctttatatcctgtat

SEQ ID NO: 84842 - DNA, 678 bp, Zea mays
  Clone ID: MRT4577_177384C.1
cctcgagccggcgggaaaaaaaaaaaactataattctctcgaaggcgaaagctatcgctccgaccctacttgctctctacgtagctagctactcctccttcctgtagctgctctgcatatggactgctcacctgcaccgcggcgtcttcgaccgtcactgatattgatgatgatagtgtcatgaacagcgccggcgccgatgtcaaccgcggccaacggaccatgcacaggaaaaaaaaggctgcacactatacgcggcaccacatacgacaacacgatccaagctactctcacgacagtaaggagcaacaccatccctgcaagctacgagacgaacatatttacggacaatctcacaatccagtccttgaaccccaaagcgactccttccatctcagcaatacacatgcttcggcgaccgcatctacacagactaccaagctacactactgtctctccctgggatcttacccaattggacctgactacatggacaacatcaagacgattgacaaggagatgctgacagcagtccggctgctgccagggcaacagcaccggtcaacgaagacaacgatgacgatatttcagagattggtcctggatacacttttgtagaagttgctcaagacaccaaccactgatcttagggtctatatatctccatgtactgcaaca

SEQ ID NO: 84843 - DNA, 1219 bp, Zea mays
  Clone ID: MRT4577_177385C.1
ggtaccctcgaggccggccgggagcacatgtaagggagaactagcaatacttgaagatgaacaaccatatttccattctagtgattctcatcgtcgatgtgtctgttgtcctcctgctcaattcccatgtagggttatgcagctgctacaaccgcatctttagttttggtgacgataccatggacactggaaatttcattcacttgattgggaaggccccatctaagtacaaggaagccccctatggcaagacattttttagacatgcaactggccgcatttctgatggtcgtgtcctcattgatttctatgcggaagcactaaaactgccaatgataccacccattttacctgagaagaactctgggtgtttcccacatggcgccaacttcgctgtgtttggtgccacggcacgtggcaaagtcttcttttcagggagcccctggtgtataggcacacaaatgtactggtttgatcaattggtagatcgtatagctcccggagatgctgccaagaagcaatttctaagtgattctcttgtcattatgggtggaattggtcaaaatgactactactcatatttcatcaaaggtaaacctcccaaggatggaaatatcatttcagatgtcatcgcagacataagccatttcatcgaggagcttattgtcgttaatggggcgaaagcattcgtggtcgccaataactttcccgttgggtgtttggcatcatacctaagtaggttccacagtgacgaccatgaggactacgatgagcatgggtgccttaagtcgttcaatgagttctcccaaaagcataatgagcaactttattctgccatcggacaaatcagatactcttacccaaatgtgaaggtaatctatgctgactactacaacgccaccatggaattcatcaagaagcctagcagatttggtattggtgatcctctagtagcatgttgtggcggcaatggaccataccacaccagcatggagtgcaatggcacagcaaagctttggggtgacccacaccactttgccaattgggatggcatgcacatgacagagaaggcatacaacatcattatggaaggggtgttaaatgggccatttgctgatcctccatttccacttagttgctaggattgttacgctaggaattccttacaacatgtagccaatattttttataataatggaagtattttggatttaaaagg

SEQ ID NO: 84844 - DNA, 202 bp, Zea mays
  Clone ID: MRT4577_177386C.1
gtcctatcccattcctcattgataacaaacagcccagccgcgaagtacactcatagcgaatgccggcaccaaagcaccatctctaaatgccgagcaacactgaggtaccaacccacgaacgcaaatccaacagccgagaacatgagcagcgtgatgacacccttgggcagccaacctatttgaactgctacatccagaatct

SEQ ID NO: 84845 - DNA, 205 bp, Zea mays
  Clone ID: MRT4577_177387C.1
cgctagctcgtgtattcaagcacaaaaaacattcctgctaatgctactgatcagctgtgcgtggcgtgaggacctctatgacagcaacgacgtacacaggtagaaaatgattctttacaaccgccagctacaatataaccaccaccagctcataaacgttcagtttaaactcccccactcaactttctactttgggaggtaaagt

SEQ ID NO: 84846 - DNA, 903 bp, Zea mays
  Clone ID: MRT4577_177388C.1
cactgagagagaagaatcatgtctctggtgtttctacctgcgtggtgtctccccttcaaggtgtgccctcttccctgtggttctccctgattctcacagcgaaaacagtaggggaagccctaaacaaaccagttcttgaggcatttggcaatgcaaaaactatcaggaacaattcaagtcgttttggaattttttgttgagattcagtttgatgcaaatgggaagatatcaggagctgctataagggcctatcttgttgaaagatcccgtgtctgtcaaatatctgatccagaaagaaactaccactgcttttgcatgctctgttctgcaccatcagaaggcagggagctagaggaggaggggagctggcgagccaggcaaaggtggcgtcgcgcgcgtggccgtgctgtgacagctgcggggggtgcaccaggtcagagccgccgcggtgcaagtgcctggacgcggcgccccgcgggtgccacccggcctgcagggactgcgtcaaatccagcctcaacgccgactcgccggtgtagcagtgcatggaccgtgtccccagcttctgccagcgctgctgcaccgccgccgccgcgcacaaaccaaccgcgcggggccgtcgagccagccgacgactggtttctaattgcagcttggtattattgacccagcaacctttttgctcacccaccctctcgctcgcccgccggcgaatcatggcttctcgagtctttaaactttgaagccaaccgtggattaggatttttgtttgtgtgtgtttgtgtagactgtaactgtaaatagagatgaggaatctgtaatctggtgagcgagcaaccaatctgagcttaggttgtccgtctgtggtgtggtgtccttcttcttctattctgttttctttcg

SEQ ID NO: 84847 - DNA, 135 bp, Zea mays
  Clone ID: MRT4577_177389C.1
gcctacgaggctgaccgtggcctgtgtcttggcggggtccccggccgtggcgatcggcgtgaggagggacgtctgagtggtaccctcacaaggacgagggcgtagatgaggattacatacgacgggatccaggtg

SEQ ID NO: 84848 - DNA, 864 bp, Zea mays
  Clone ID: MRT4577_17738C.1
ctcacatccttggtggatcaagtgacggaagtgtatacttgtggcaggtggatcaacctgaaagtgctcctatagttctgaaaggccatgaaggtgaagcaacatcggttgactggtgtgcatcagaggttggaaagatagcaacatcttctgatgattccacggtacgtgtgtggagtaccatgaaaatggactgtacaaatgtaagctcgccaacagtgatccgtaagcggataacagcaccaagcaccgagtaccgaaggtccattacccatgagcctgctactacatcaagagacggagttgtctgcactagcggtgatggcgaattgcaaagcggttgccactctccccttcaacctagagcactgcacttcggcactcctgaatcttcaaagaagagggccttggcattgttcgaggaggaggcacttgattcaaggaagagcccggaagcacagacgaacagcccctcttctgttctgagcccgccgccgtcgttgaaacggagaacgattcgagactattttgccagtgccgcatcttgaatcctgactgacaaatagctggtccccataatttttagtggtcctgacccatgagtactacggctctccttaactaatggtgaaacagctgcaatttttgggaaatccttctagctctagttcaaggtcatcgatcttttggaaatgcggctgtacataatttatcattacagaattgggagaaactattatgtaattaaatttctcctataattgccgcataattaagttatcaaaagtcattttaataccgtgtatagcaatttatctatatgttaacctaaaacactgcttgtagtgtagactatattgttca

SEQ ID NO: 84849 - DNA, 330 bp, Zea mays
  Clone ID: MRT4577_177390C.1
cgccagaccattcgctttcctcgcttagccctccgctctctgcatcacggaaagaaatggcccagtccccagagcacacggcgaaccagctagctccgtcaaggcgcacaagagcggcaatgagaacccctcgcgccaccgcccagacctcctccacggcgatgcaccccaagttcctgaggaccctgacgttatcctaggaagggcaacaaaaccagtgggacaggttgaagctgaggagtcggaaggaaagcatgtcttcctttcgtctgtgtttcatgcacatccagaggtcaggacgctgcggttttgctaaagctggtactctgg

SEQ ID NO: 84850 - DNA, 150 bp, Zea mays
  Clone ID: MRT4577_177391C.1
gtctcactaaagaaggtaaaatcattgatcccacgctaaacaaggggatcatgtatatacatacactaaatcataaagcattggcacttgcggaactctcctccatgccccggggaaggggggttgaacaatattttactaaacaaaatt

SEQ ID NO: 84851 - DNA, 262 bp, Zea mays
  Clone ID: MRT4577_177392C.1
ggtcaccggaaaggtcttcatttgatttttctggcaaaaacgggtgcgcatttattttgatctgcaaggaaaatctaatgctctttcaactttcaattgctatgtttccgctaattggaccacctatctacaatccctattttggggcttaggctttacaatgtttttgctggccttgcattggaactcacgggttgcaacctttttgggctttgtgtcccaagttgtagatccttttgcaaagctttttttcttttctacc

SEQ ID NO: 84852 - DNA, 274 bp, Zea mays
  Clone ID: MRT4577_177393C.1
gctgccgccacttgtgacgcgttggccatcccgcgcgacccggcgttgtggcccgactcgcccgacggcgttcatccagagcggttcctgggtgcttccgccgctgtggacatgcgctgtgcgcactttgagctgctgtcgttcgggtccggccgactcatctgccccgcgtacgatctcgccatgaatctggtcgccgccggcgtggcgaacctggtgcacgggttctcgtggcggctgccggaccgggtggcggccgatgaccttagcattg

SEQ ID NO: 84853 - DNA, 291 bp, Zea mays
  Clone ID: MRT4577_177394C.1
caacagaccctgtctctgaaaaaagggaaaaataccttgtgagctgtctacgtgtactctatgtctcaggagactcatatcctgtaatttttctaaatggcgtctccatgtggtctttcatgaatgtttgtctggtattctctatccttttactttcaacttttctttaccttctactgaaattatgtcttttgtaaacagcccatgattatttatttagttatctatttttacccccctgcactatttgtcttgtaattggagtgtctgagtccattatgtttaatgtaa

SEQ ID NO: 84854 - DNA, 613 bp, Zea mays
  Clone ID: MRT4577_177395C.1
cagtccatctcgtctcgtcccagcaaagcaaaggcagccatgccccacagtctcttcctgctcgtcgtcctcctcgccgccgcgcaagccagcgcggccacgccgcggcagctgttcctcgtgagccggccgcccatcacgctcaccaaccaccacggccagctgctgacgggcaactactccgtcaacctgctctggtacgggcgtttcacgccggcgcagcgcgccgttgtggccgacttcatcctctccctctcggggacggggcaggggtcggggtccgtggcggcgtggtgggccacgacgtcgcggtaccatcctggcgcagcacggctgtcgctggggcgacaggtgctggacccgtcgcgctccctaggccgccgcctctcggagtcgtcgctagcgtccctggcgacgcgcctggccccgcaccgcggctccgtggcggtcgtggtgacggcgccggacgtgctcgtggacgggttctgcctctcccgctgcggcctccacgcgtcgtccccgaccccgaacgccacccgcgggcgtggccgcgggcggtacgtgtacgcgtgggtggggaaccccgcggagcagtgcccgggggagtgcgcat

SEQ ID NO: 84855 - DNA, 194 bp, Zea mays
  Clone ID: MRT4577_177396C.1
ctctagctctgcgtgcgggtttttctcttccctctacattatatcacctccatcctcaataattccatccatatccatatctactttttccatacaaacaacttatcttctctatccctatagcacaaagctctcatatctctacatccatttttctcttcatagtgatgcatcatcgcatctataacaatatc

SEQ ID NO: 84856 - DNA, 720 bp, Zea mays
  Clone ID: MRT4577_177397C.1
aatataagcgctttccaggccgcgtactagaaaatcgggatggacgttgtattttggatggtgggctaagcggcttgagaattaagcaaggtgtttgggtggacttatggcttagtttcaccaataagcgggaaataagcagatacaaacagggccttagtgaaggtaagcagtaggcccatgaacaatggattgtcaatacctttttcttcatatgcatttggactttggagatcattaccagtgcctgcttttggcaattctttcctaagtaaatatggcacaactactttctcttatttgtagaagcaagcttgatttgaacatcatctgtctagatcatttttgtcgcactatttgcctattgcaggaagacttcatcggacttgttaattatgtttatgtcttcctggccaaccattttgctttcttgtaaatatcagatggttccacaagaaaggcttttgtcgtgttggtcaggaaaactgggtgagctatttactaagttgtggcctaggaaagatcttatgttcttactaatatgatgtacgaacgctggataagttgtgtaagttggtggtgtgctcagtaggttggtagaaaaggttgtggtgtgttggacttttaagcagagtctcaaattatgttatttgagcatgtgtcacttggtccttgaacttgcctgtgatgtaccaagtttgcatgtgaaatttaatctct

SEQ ID NO: 84857 - DNA, 225 bp, Zea mays
  Clone ID: MRT4577_177398C.1
ttttctttcctctcctggtgctaccctttttggcgcgctagtttagagtccgcgccggcggccaaaaacaaagatggaggtcgtctaaggcacaaagctgaagggaacgaaacacatacaggttttctactgttaagaatgcgaggagctcggcctcaagattcccaagctctacaacgccgttcagctctaatgcattaactgccggagcttcaaagatggatt

SEQ ID NO: 84858 - DNA, 201 bp, Zea mays
  Clone ID: MRT4577_177399C.1
ttcggctcgaggaaatgcgccctgtgaacgccgctcgcactgctcgggtctctctgtattcctaccctatgaagcaatgtgctgccagcaggctaccgtggaccgtgcattgctgccccttcagctgaggcttgagcgctatgactgtcgccactgggaccctgctgacaatgaccgcgatcagccacgataggcacaacc

SEQ ID NO: 84859 - DNA, 396 bp, Zea mays
  Clone ID: MRT4577_17739C.1
ctgcaagcagaatagctgcacaacttctttgaacataatcgaggtttaacgacggtagggctctcatactgctgacttgatgaaccccctgctttctttatctaaacaatgctcttgttgatgactggaatgctgctgctaagcgagggaagagaaagggattccttctcaccattcttgggcttatataggagcaagagtgacaatgctgcaacaagcactgctgcagcgtcattaccgaccgctgccgtatccttgttcctttccggaccggcgttgcgagaggcaaattatagctatatgcatgacactgactgacgctcaatcatgcgtatagaggggccaaatcaccctatagtgtgcataattacaacagagtcggccgtccctgtacat

SEQ ID NO: 84860 - DNA, 259 bp, Zea mays
  Clone ID: MRT4577_1773C.1
ccaaaaaattctgactagctttttcaatttatttcaattccacggggttttggacatggttcatcgcgcccaaccaaaaacattcccttgggggggactggggaggaccacccccccccttgggagggccccagctcaatgcttgcttattccaagaaccacccgttcggacatgggccccttttttgagcaaaggggaacaaaatttcccccaattcctgtttgcccgaccgaacaaggggcctaccccacttaaggg

SEQ ID NO: 84861 - DNA, 348 bp, Zea mays
  Clone ID: MRT4577_177400C.1
gttggggtggaaaatgtgggggggttttttttaaaaaaagaaaacagaggccataatagcgaagcggatttaacctttgagagggacaccacttgattacatttcaggggtagcgaacccaaaccaaattttactccctcccccatcgcaatagtttttgaaacaaaataaggggacccttgccaaccaccggtccccaagtttatctgataaatgatggcattttcctagattacgggcccccgcccataggggggccgtgcttgttccaaaaccaatccccaataataacgcgtttttccctaaggggcccagggccctttattgccccggcccggaagatttcct

SEQ ID NO: 84862 - DNA, 445 bp, Zea mays
  Clone ID: MRT4577_177401C.1
cacccgggaaggtacgcgggtcacaaaaagaagcaccatttgccgcagaggatgaatggcgcaaggtcatatgaaattggtgttgacagtccttacgaaccactgtatttggaaagtaaatcaggaaaccagcaactcttatcgaatggcaaacaaacagacttcctctccattcctataaaacgcatccgcacagcagctaggcagcgggttgtgagtccatttcctgctggtgtttctgggacccctcaattcacgaataaaacggacgcatctagtggagatacaaactcctgtcaagatgatcaaagttcattacatggagggtcattttctaggaagaatgcagatatagggtccactgttgattttgacaggcaattgttgtatgatggtagtgaggtgtcgacaaaatctaaaaaaaaaaaaaaaaaaaaaaaaaatc

SEQ ID NO: 84863 - DNA, 592 bp, Zea mays
  Clone ID: MRT4577_177402C.1
aagttactcttacttttgcgaaacaattgcgggcgcacaacgaggcaaagagtattcgcataacctttgtttcatttacctggaccatgctgctgcaaatcaagaataagcctcgacaacgctctcatacagcttttacattgggtacaaaatgaaaaaaaaaacatgactgctagtcctggcccatgcactgggctgtgtccgtccagggccaagctgtaaatctgagtcatcgctttccttcccccttccgcgacttattcacttggtttggttcagggtcactcacagtccgagctggaacaggaggaccatgacttactactgctctaagagcgtgcacaattgctcgattagtgggcgctgccccttgctgttgcgacgtggaaggctgatgcggattccaatcacaagcaactgaggcagaaacacgctcttaagatactctcattagtatctggctcgtacaaggggctggttcaggcttgacatttaggttggcagcaggtagacgggggtggttcatctttatgggcctatggctagacctttgggaaaccgaatcaattccaattactgcttcaagactgct

SEQ ID NO: 84864 - DNA, 450 bp, Zea mays
  unsure (1)..(450): unsure at all n locations
  Clone ID: MRT4577_177403C.1
attcggctcgagcgcaggcagctgggcaggctgttgcacatgtacaagcagagccttgccgaggaggccttcctggccggaggcaggtttacgctcggcgacctgtcccacctgggcaacgcaaaccgtctcggcggctaccggaggcgcgcacgcatcatggagccgcgcaggaccgtcagcaggaggggggacaccgtatcccgccgcgactctagggtcagggtcaaggagtcgcagcgcccgccggccgcggaggcccccttttgatgtccatcgaccgcaaattaaggggggggcctctgctcaagcctacgcgtgcggttactgaataatttttgaataaatcaacgccactgccccatatacgtcattggcgattgttcattgctgaataacatgcacaacagcatatgatgcttcttggcgngaaaaaaaaaaaaaataaaa

SEQ ID NO: 84865 - DNA, 502 bp, Zea mays
  unsure (1)..(502): unsure at all n locations
  Clone ID: MRT4577_177404C.1
cccacgcgtccgtaggattatttctcagacgcaattctagagctctaccgtcgacgatatgtacatgtcgatttcttttcttcccggccgaccggccggccggctaaaggttaaagccgacgacggatcgggtgggctcgctgacgcaaccaagggacaccgtgcgtgcccacggccggcggcggttcccgtcacgtcacatcacggagcaggcgttggggttctcgtcgctgaagagctgcggcggcgccacgtcgaagcggtacgggtacggcgggtacgccagctgcaactgctggtagtggtgggcggggttggcgaggcccacgccgtcgccattgccgtagtaggacgggtacgggtagtagccggcggggggcgggggctgctgctggtacgccgccacgtacccgtacggaacccggnggcggncacgtacccgtacgggtacggcggcgccacgcggtacgtgctcacccccgccggcgcggccatcaacgcc

SEQ ID NO: 84866 - DNA, 574 bp, Zea mays
  Clone ID: MRT4577_177405C.1
gcatcaaaaccgctcgaaaagacaagcagactttaaaccccccacacgctttgggggggcgggcgggcgaacatctctaaggagcacacagcagtcgattttaaactgcagctacagaagtcacgccagaagacacaccctgagctgctgccctagaccggctagcgatcggacgccacacagcatcacccacagagccatcgccgcggtggtgaagggccccgccatttttttcacctgccacctaaaacgtatgagcccgctccaccctcacaactacatcctgatgaacgcggtcgcagcggcgatcctgctgcacacgctgctctacatgccggcgccagtcttccccgagaacaccgtccgtaccaccttagactgcgacgtgcactatcacccaatacccggcgccatgaccgtgcacaacccccacgcctacgaataaaccctgaagaacatcaccctcacagacgatgcacaggcacgaaaaacatcaacttggacggcaactcactcatcaacccgcaggacaacaaccgctacacccgcgtcttgttgtccaacaacacgatcc

SEQ ID NO: 84867 - DNA, 441 bp, Zea mays
  Clone ID: MRT4577_177406C.1
cccacgcgtccgcccacgcgtccgcccacgcgtccgcccacgcgtccgcccacgcgtccgggcagctcgagcacggcgggcggcacgacaagctacacagagcgacggctggcgcgagtagcagcaataggggcacgacgataaatcgcagaatcagaggtcggaggggagcgaggagcagagcaagtgaggaaggggaaggcgagctcgcaggcgcactacttatgggcgtccggaggagggaagacgagtaggcgatggtgcttcagtgtggccgacgactcttccgtgccagcaggcacaattacttggagaagaaatagacgaagttaatggaaaggaagagaaacggacgacgtccattgagaaggagaggcgagcggacggagtgaaaactcgtgtcgcggcaacgcatgcatgtggtgcgagcggcggtgcgcg

SEQ ID NO: 84868 - DNA, 378 bp, Zea mays
  Clone ID: MRT4577_177408C.1
aattcggcacgaggcacccgcgctctcttggtggccaggacagaagaacgaagaggaggccaacgccctccggacaggcgaacatcccctaaacacgtgacatcagcataggcgctcttgtcctgaccttcttatccgcacccctcggcctactatgtgacttgcactaccgtcttacaatgaggtggccgctggcgatatcaactgggcggcggcaactgcttcttttcggacttctagtaactgtataaccgataacaggagagatctgcgtactgatatgatgaacgctaaagaatgtacatcgaatattgtactcgcgagggatgcacagaccaacaaaagggtaccggcggttgttttctacatgatagagat

SEQ ID NO: 84869 - DNA, 280 bp, Zea mays
  Clone ID: MRT4577_177409C.1
tcttacacccactcgtgcgctcacactacgtacatccctttagcctgcgacacccttcctatctacctccgaccacttcaaacacgcaagtaacaatccacattaacgtctacaccactaatgctcctcaacaacccctgctacttgaccgacaatcatcactccagcaagatctagacttctgccgctaccccatacgagctacagctccaccttgcagctgcctacacctcaatccactctacctactacttccaaccttacttctccatttccaccc

SEQ ID NO: 84870 - DNA, 159 bp, Zea mays
  Clone ID: MRT4577_17740C.1
cccacgcttccgaaggccaagggttgccagtttaatttcttaaggtaaggtaccaggagcgggaccttgttaaacggttgccttgaaattttgaacctttgtaatatttgaggttttgggggttccctgtttaaaaattttgggttcttgaacccagtt

SEQ ID NO: 84871 - DNA, 2050 bp, Zea mays
  unsure (1)..(2050): unsure at all n locations
  Clone ID: MRT4577_177410C.1
acccatcctccccaacgatgacggcggcggcggcaccggcggtcgctagcagggtgtgggagggggaggcgaaggtgngncggccgggtccaaaaaacgaatcctgtcccaggcgagtccctacacgtctccccgtctcatcccatgtcatgactcagcaccacctcccccatcctcctctgtcctcgtataaagcgccgcagtccacgacggcgacgccgcccatgggagctggagcaccagcacacgccgctgccccggctctgcgccgcgaaccctagccgaccgcctcatggccgccgagtcctgcggcagccgcggcgcctcgcccccgccgcctccctccgctggcggcgcggccgggaggcgccgcaaggcggaggcctacgccgaggtgctccgccgcatccgcgctggcgccggcggctacggtgctgcccgccccgggttggaggacgagctctgggcccacttccaaggcctacccgccagatatgctttggatgtcaatgtagaacgggttgaagatgtcttactgcacaagaaattgctggagcaagcccataaacccatgaatggtctggtctttgatgttcgtcctgcacagggttttactctggaggaaagcactggatttgagtccacaacttcctttaagcaagaagaacaagatccccagtcctcagtattcacatcaagagatcaaaggcctttgcatgaagttatatttgcatgtgacgataagccaaagcttcttagtcagttaacctctctcctcggggagcttggtcttaatatccaagaagcacatgcatattcgacgagtgatggctattccttggacatctttgttgttgatggctgggagtatgaggctgacattctccaaagtgcattgagggaaggcgttgataaaataaagtacagagcatggccgttggtaccgtcgatgtctgctaggatggatcaccaaccattggaggtttctccttcatctgactttgtccagataccagctgatgcagctgatgtttgggaagtcgatctcaggcttctcaaatttgaacaaaaattagcgtctggatcatttggtgatctataccatgggacgtactgtagtcaagatgtagctatcaaagtactcaagcctgagcgggttagcgttgatatgctacgtgagtttgcacaggaagtttatataatgaaaaaggttcgtcacaaaaatgttgtgcaatttattggtgcatgcacgagacctcctgttttgtgtattattacagaattcatgcatggaggcagtatttttgacttcctttacaatagacgaggaaattttcaactcccggatgtgattagaattgcatctgatgtgtccaagggaatgaattacttgcatcagattaatattgttcatagggatttgaagactgcaaatcttcttatggatgatcaggttgtcaaggttgcagactttggggttgcaagggttaaagaccagtcaggagttatgactgcagaaacaggaacctacagatggatggcccctgaggtcattgagcatttgccgtatgatcatagagcagatgttttcagttttgggatagttctttgggagctgctgaccggaaagcttccatatgaagacatgacacctcttcaggcagcagttgctgttgttcaaaaggatctgaggcctactattgctgttgatactcatcctatgctcgctgagctactccagagatgctggcagaaagatcctgctctaagaccaacatttgcagagattgtggatatattgaactctataaaggaggcggttcggagttctgtgcatcacaaaaggcattcatgtcgatctcactccgggagaagacgaggctgttgatgtgccagttttatgtggtgccgcacgcccttttcattttatttttgtagtcgagcgataacttcagaatacggccagaagagcttactgtgttcattccgagaggttttggtaactttattttttttaatttggacttatgcttcaaggattttcatcgtt

SEQ ID NO: 84872 - DNA, 322 bp, Zea mays
  Clone ID: MRT4577_177411C.1
attcggctcgaggacacctgcatgtttttatgggaccatcatgggagaaatctccgtgggtaatcagaagggcatacggccactgtcatatcagtgtcctggcatgcaaggggcaataagagcgctcctggaggacgagataatgctaggactgtgagctgctgcatcaaagataggtgtacaactagcatgtgagcactacggtacaaccacagctaaacaggccttgcctatgaaagaggaacaaggtacgcttacaaaggatatgggacgatggatacagacgttgacaatatacacagggactttcacgatgcaagct

SEQ ID NO: 84873 - DNA, 638 bp, Zea mays
  unsure (1)..(638): unsure at all n locations
  Clone ID: MRT4577_177412C.1
cctctgtcctcgtataaagcgccgcagtccacgacggcgacgccgcccatgggagctggagcaccagcacacgccgctgccccggctctgcgccgcgaaccctagccgaccgcctcatggccgccgagtcctgcggcagccgcggcgcctcgcccccgccgcctccctccgctggcggggcgggcgggaggcgccgcaaggcggaggcctacgccgaggtgctccgccgcatccgcgctggcgccggcggctacggtgctgcccgccccgggttggaggacgagctctgggccatgctttggatgtcaatgtagaacgggttgaagatgtcttactgcacaagaaattgctggagcaagcccataaacccatgaatggtctggtctttgatgttcgtcctgcacagttttagggttttactctggaggaaagcactggatttgagtccacaacttcctttaatcaagaagaacaagatccccagtcctcagtattcacatcaagagatcaaaggcctttgcatgaagttatatttgcatgtgacgataagccaaagcttcttagtcagttaacctctctcctcggngagcttggtcttaatatccaagaagcacatgcatattcgacgagtgatggct

SEQ ID NO: 84874 - DNA, 376 bp, Zea mays
  Clone ID: MRT4577_177413C.1
taactgggatggtattcccaaatcaacacaatatccagaactttggtccttttctgcttgcaaagacattactgtgctacaagcaagaattgttgactcccaagaattgttccatgcaccattgtccattgaagcctttgttcaactttaagagttgaatgattgcttggataatcttccacataataatcacaaagacaaatggagctgctctacttcttctagcttatttttctcgcaaaagatttatgctcatctgatgggtaaccagtggacacatcccattttctcttggttgtggaaatccaaatgtcaacccaagcacaaggtgttcttttggctactactgaaagacagactaaataccagagctttt

SEQ ID NO: 84875 - DNA, 1998 bp, Zea mays
  Clone ID: MRT4577_177414C.1
taccagctgatgcagctgatgtttgggaagtcgatctcaggcttctcaaatttgaacaaaaattagcgtctggatcatttggtgatctgtatgttcaagaagcaacttgaagtagtaactcttatttatatgtaactgacttatttgatgtgccatcagataccatgggacgtactgtagtcaagatgtagctatcaaagtactcaagcctgagcgggttagcgttgatatgctacgtgagtttgcacaggaagtttatataatgaaaaaggttcgtcacaaaaatgttgtgcaatttattggtgcatgcacgagacctcctgttttgtgtattattacagaattcatgcatggaggcagtatttttgacttcctttacaatagacgaggaaattttcaactcccggatgtgattagaattgcatctgatgtgtccaagggaatgaattacttgcatcagattaatattgttcatagggatttgaagactgcaaaccttcttatggatgatcaggttgtcaaggttgcagactttggggttgcaagggttaaagaccagtcaggagttatgactgcagaaacaggaacctacagatggatggcccctgaggttgattttgccaaattgcttgttattaaacattgagaaactcttacattaaaagcagcgtatgtgaaattcgttttagtgcttaaaaatgtggtttcatatcaagcggattacatattagttgtgcagtctgcagacagaatgcccaaaatgtgagaatttattccccctagaccaccttgatagttcgcatgaagcagcaaatttgttggggttgggggcctcagtgttatacctaaaagtttacttagttcctaatgtcacttttcaaaaaaccaagattaatttttttgagcagcttgcgatgcctcggctattgcaacatgactattttttttattctgtgtgatctacatcaatgctgcttcaccaagccaacaattctagcatcgaatatgattcgtttacttggtctgcagttggtgttactgttcctgtattgagctataaagtaccgggaaaaatcatttttatctgaaagtactttggaaaaaaataatccaagaaccttttgtgggatcaaatcgctatctcagctttagagtaaattagtgagctgtcaaactgaaggtagtccagcaaatgtttatcatttatttttagtttgccttcagtaatgcataacatataatttattggtatgctgggggtcaatgagctccttagctgtgatatgaatgtgccatcttcacaatgccatcagccttgtaccacatagaagtcaaaactagcttttgtttatgcatcacctcgttctactaaaaaaactgtgcaggtcattgagcatttgccgtatgatcatagagcagatgttttcagttttgggatagttctttgggagctgctgaccggaaagcttccatatgaagacatgacacctcttcaggcagcagttgctgttgttcaaaaggatctgaggcctactattgctgttgatactcatcctatgctcgctgagctactccagagatgctggcagaaagatcctgctctaagaccaacatttgcagagattgtggatatattgaactctataaaggaggcggttcggagttctgtgcatcacaaaaggcattcatgtcgatctcactccgggagaagacgaggctgttgatgtgccagttttatgtggtgccgcacgcccttttcattttatttttgtagtcgagcgataacttcagaatacggccagaagagcttactgtgttcattccgagaggttttggtaactttattttttttaatttggacttatgcttcaaggattttcatcgttaaaaagcttagaggtgcatatccacgtttacatttggcatgtatctgtatctcgtactcgttttcttaagtttggcaggcaaccaagattttaatgaaaatctttaaccatt

SEQ ID NO: 84876 - DNA, 493 bp, Zea mays
  Clone ID: MRT4577_177415C.1
aataaaaatctggtttaaaacaaaagcgaggagaagagcaagggaaaataaacgaatcggcggcgccaaaaaaagagctggccccacttacccggcttacaggtcgcacccaactgccagctaaacaacacaaggagccaagagggaaccacgagcccagcgggaagctaacacccaccggggaactgacaaacagctggcaactggacaaccgccggcactagggacacctccggcccaacggaaacatcggagcaagggcattccaagcactaaggccaaataaaacacttacatccgagcaaacatctggaaaccaagggcgtccaggaaaccaagggccgccctgaagccgatacacgagccgcccccaagcgggaagacgccccccacaaagaagaagccatcgccaaaaaaaaaccgcgcgccaaagaaccccaatgaaacccccgccgccaaggaaaccttcccagccgagaagccctacccaaac

SEQ ID NO: 84877 - DNA, 453 bp, Zea mays
  Clone ID: MRT4577_177416C.1
taatatatgcatggtcataataaagttttggttttaatgaatctaaaaaaaaaaaaaaaaaaacaaaaaaaaaaaaaaaaagaaaaaaaaacctaaacataggccagtattagaaagaaaacccgaaaaaaggctttaccctacacaagacaaaaacaaaaaatggcttgacccttcccagtgggcccattaaaagggctattccaccctccctgccgatccttcccacagctgcccacgctggttcccaagtgcaagaatgatggccccctactgttccctagagaaaatgcacttccagccataatttcccaacatatcacaccccgagaccaaaattgcacaacacgcctcgtgggcgcgcaataaaagtcctgccacccccacataaaaagcaatggcttctagccccccacattaactagaaaaccctttcggacacggaggtaatgc

SEQ ID NO: 84878 - DNA, 339 bp, Zea mays
  unsure (1)..(339): unsure at all n locations
  Clone ID: MRT4577_177417C.1
gcgcgacacttagcttctcggcttcgggtaggtggaagcgtttcatccaagcccaccatggaataactggaagggtcggcgacgacggcctcgtctgtgatggtctacttcggatactgtttgacccatgcgcttctcctggacccgatgggcatcacgttgtgccagacgatgctgttgcccttcttcaacttcgtgatgttccacatgccaaacacccacctggcgtccctgaagaacctcaccganactaccccggtcatgacaggcgcctgcaacttaactggggacacgactgaggtcgcggaccaagcacctatctgactcgttccggtgcat

SEQ ID NO: 84879 - DNA, 152 bp, Zea mays
  Clone ID: MRT4577_177418C.1
aggtcaaacttttttttgaaattttttccactgcacgctagcccattattggaactaggagcgcacccctaaaaaaaaccttatttgaattcttcgacccacgggcgtaattgggtaactcacacaaaactcgctcggttccccacaaaaac

SEQ ID NO: 84880 - DNA, 489 bp, Zea mays
  Clone ID: MRT4577_177419C.1
ctgctcgagcggatgaagcacacacttatgctgccagtgcatgcctctaatgaagagccaatcgtttcagcatatatctacacacatatatatatgctctggtagaaagacaccactggtcgaagaccggttctacgagctctgtatatcctgccagcaggaggtagaacctctaccccagtagcctacttggaactctagcacgatggccagggagcagcaccgacaagtttgcgctgaaccaacagaggcggagctccctctcaagaagagcatcatgtgaatctccagagtggatccggctgctgagatagcgagctgaacgactgtttacgacggtctctgtgctaatcaagagcctcgaagactgctagacaaagacgatcagtcgtcaacgacaatcacaactagaagttgttacttatacacgcacgaagcttcagtttacttagatggactacgttccatacactagaccaatacgttagc

SEQ ID NO: 84881 - DNA, 215 bp, Zea mays
  unsure (1)..(215): unsure at all n locations
  Clone ID: MRT4577_17741C.1
gggcggcccacgcctccggnttataaaaacactattcaacgcactctagttatggatttgatatcacaacacacggggggggtgcctttttctccctctaactactaatcgcggacctgaggtcctctattccaaatgcggactcattaaccataaccaacaactcctcctccccttatctttctctgacactctattggtatatataacccaaa

SEQ ID NO: 84882 - DNA, 858 bp, Zea mays
  unsure (1)..(858): unsure at all n locations
  Clone ID: MRT4577_177420C.1
gtcttctcccgcacgacattcttccagcttctagaggaaaatccagccaccgtacctgactgcgtgatattttttggccgccgctcaccgccggtgaagattccgccaccgttctcccctgacgctcggccttatctcttcccctctgctcactagcgcagttcgctgctcctccctcctcttcttcttccccgtgcacccagccattccggtgtccggtccagctcgctcgctcatcctcgagtccggccgggttctcgcgcacgctccttctgctcgccggccgtgagctcgtccatggcagctcccatcgtcgcgtcccggccaagtcctcagctcggccctgcctttctttctccctcggctcgccccgatggcgctcggccgagctccctggcgcacgtcccggtcgcagttcggatctccgtggcgccgcgtcttcttctctgccccgcaatccatggcacccggttggagctccttcctgcccggcgcgtgcccgcctccctgctctccacgccgcgccgagctgccagctctggtgtccggccgagcttctccccgagcccggctctgccccaggtgtccgcttgctccaatcgcgcgcccctggtccaagctctgcgcgcgcggtcctctgtaccctgcgcgtagccggtttctctgttcgccgccgatttcgccattgaattttcaagctcgccaacgctccagctcgttgttgtcgccaagtccgaatatcacagctcattctagtggtcgtgagttcttcccagtacgcgtgcgtcctcctgttcgctgtcgcgactgccgtncaatcatcggagtttcccaaaaaaaaaaaaaaaaagggcccta

SEQ ID NO: 84883 - DNA, 240 bp, Zea mays
  Clone ID: MRT4577_177421C.1
tggcgcaagctgacaaatgttcactcgtatgccactaactatcttggatcagaccatgttccacgccctccatattgcgagcaactggcggatggcatgggcaaacccacagacagaaggagatgctcccaaaacagatagagagggccttctggatgtttatacgtcccttgccttcggaagctcactatttgcgttcatgagaagccctcttgtgcctaccatcggactaccactgcc

SEQ ID NO: 84884 - DNA, 315 bp, Zea mays
  Clone ID: MRT4577_177422C.1
tgtatcctgttgtcaatgaatgggtatataatttgcccaatgaaaaaagtacagcatactgcatacaactccaccacgtaatcgagatgacctgcaaggtacgacaagaaccggaagaaactgtagcatttactactatactatagtacgtactagctgtagctgtatcgactaccgagtacaagacagtagcaagacggctacaccctgcacctcggaagaagtacatctgagacatatgaggagcacacgacagcaggctatctagccgaaacacggcggcgatcaccaaccacaggccgctcttcgcccgtt

SEQ ID NO: 84885 - DNA, 364 bp, Zea mays
  Clone ID: MRT4577_177423C.1
gcaattgccggggtctaggtggggacagaacatgactctggtttgtaccagggacaattatattgcagcgagaagtcagcatggagtgtgctgatgagaaggcacttgatgctggactcgataataggggaggagtacatggtggccactactatgctttaattcggccgacactctcggatcagtggtacaaatttgatgatgagcgggttacaaaagaagacactttcaagacctcttgcagagctgtatcagggtgacgaagaggggcctcatattaaccctggtttcaataccacgccatttaaattcacaaacgattcgagttcctttcgatgaagctctcaacgatcgggcctgggct

SEQ ID NO: 84886 - DNA, 523 bp, Zea mays
  Clone ID: MRT4577_177424C.1
gttgagggctggcccagaattggccttcacattaaattccgggtcctggcctggtttccccaattccgttcaaggcaacatggcgtttttttttttatcggatgatcactatttaattcattgggcgtccgatttgcttacttggccacaacctcggcaatgttcctgtccaagctgccgccttccttgctcgccgccttggccttcgccatccacacgtcggcgctcctcctgaactcggcgctcttgtcgccgtccatcacctcctcgacgcgcatgaccacttggcccctccgcacgaggccgaggctgtcgtcgggcgcggccggccgcgcccgaacgcccacccgccacacggcctcgacgtacctggcgttcatcggctggtccgtccactgcggcacggccaccatgggcacgcccgtcaccagcgcctccgctgtggagttccagccgcagtgggtcaggaagcaccccacggcgcggtgcgccagcacctccagctgcgggcaccacggcacca

SEQ ID NO: 84887 - DNA, 526 bp, Zea mays
  Clone ID: MRT4577_177425C.1
ttttttttttttttttttttttttttttttttttttttttttttttttttttttttttttttttttttttttttttttttttttttttttttagggaaaaagggccccaaattggcaagccaacaacctaaggaaaaaaaaacaaaccgggccccaaaaaggaaacttgaaaagacaggacagggtttactgaaaaaaaaaaaaaaattttgcactaaaaaaaaaaaagtttttaggggttggcccccaaaccccactaaaaaaaaaatgttttggggaaaaacgaggggggaaaaaatttgcaggcccccattggaggaaaaaccccaaaaaaaaaaggccttaaagggaaaagacccgggaaagcttttggaggcgggtaaaaaaaaaacccccttgcttgaggggcccccgggaaaaaacattcccctcaaaagggggggtgggccccaaaacccccgcaaccttaaaaaatttggaggggaacttcccaactgcaaaaaacccggaaaattcctgggcaatg

SEQ ID NO: 84888 - DNA, 650 bp, Zea mays
  Clone ID: MRT4577_177426C.1
gtgagtcctagcgccgccaaggggccaggccaccaccgctcctgaactgcactgcgctctcctctccgctccaccagcggctgccgggcatccaagtccagtcgacacacagagaggataagccaagagcagccggtgggtgcggggtgaaccgtctgcctggaccgaggtttacgagtgagatgacggacgccggcgctggttccggcctgcagacgccggaccaggtccccaggggagcgggagctggtgcggtcgttgtggtggcccttcgcgccgccgccagggagatctccaagacggccgccgtctgggcgctgacgcacgtcgtccagcacggcgacagcatcctgctgctcgtgctcatcccgccgccgagctcaggcaggaagttctggggcttcccgttcttcgcggggagctgcgcaagtggacacaaggcagtgctgaatcagaggtcggatgtggctgagctgtgctctcagatggtgcggaagcttcgcgatgtgtatgatcccaacaacaagatagacgtgaaggttaagatcctgtccgggtcacctcccggcgccgtggccaaggaatccaagcgggtgcaagcagcctgggttgtgctggacaagagctgaagcacgaggagaagcgctgca

SEQ ID NO: 84889 - DNA, 349 bp, Zea mays
  Clone ID: MRT4577_177427C.1
tcgcggtccgttacaatcctctataatggatcatattaaaaaaacaaaaaaaaaaaaaaaaaaaatcacccatgaaattcatcacacaaaaacaaaccaaaatcacagttatctcagaccaccgcccgctttggaaaatgctcaacaaaagcggggcgacacgctccagcctcacgacgaggaaacatgtgcatcaaggccagaggacagatgttcctgtgggactggttctaccgggtgctggcctctctcagcctgtggcaggaggaagccatgattttcttcctctaactcgacttcaccagcaacaccattctgctccacatgctcaatgacaagcggttggtgc

SEQ ID NO: 84890 - DNA, 105 bp, Zea mays
  Clone ID: MRT4577_177428C.1
aaatattgacacggtaatatataggccatattatagtgaagatcattagtattaatggcctcgtttaatcattccatattgaggaaagcctctgcatataaacat

SEQ ID NO: 84891 - DNA, 684 bp, Zea mays
  unsure (1)..(684): unsure at all n locations
  Clone ID: MRT4577_177429C.1
catgtagcaccgcaccgcgtcaaacaaatatcctctggccgacaagagaaggccaccaccgtcgtcgtcgtccttaattgttcctgcgtctcccaacttttccttccaaacagcggtgacctccaccaccacccaagagccgagcgaggagaagagaagagatcggccatggctgcggacggcgagaggtgggtgggcctggcggtggacttctcggaggggagccgcgcggcgctgcagtgggcggcggacaacctgctccgctccggcgacaacctgctcctcctgcacgtcctcaaggaccccgactacgagcagggcgagaccctcctctgggaggcctccggctcgcctttgatccccctctcggagttctctcacccttcaactgcaaagaaatatggggtgaagcctgatgctgaaacgctggacatgctcaacactatagctaagcagaaggaggtctccgtggtttcaaaagtcctgtttggagatccccgcgagaagctgtgccaagccatccatgacatgcccatcagctccctggtcattgggagcaggggccttggcaagctcaagagggtgctcttgggcagcgtcagcgattacgtcgtgaacaatgccgcctgccnttgtcaccgttgtcaagccagcgagtaaccatgcctgatctcatcatcgcaa

SEQ ID NO: 84892 - DNA, 388 bp, Zea mays
  Clone ID: MRT4577_17742C.1
gaaacaatgtaaagcatttggcaagagttgggtactgagcacgacacgaaacacccattaacaacaaaaaaaaaaaaaacactactcgctgtcttgcaagaactggttcgagcatgcgtgtcgcatttgccttcttgcccggttgcactgcttcgttacaatctccatgccatgagctactgtgtactgcgggtcgaaaacttgacaaggatctcctgccagcgaattccaccaactgaaaacagaagggctcagacttcgtcagaagcatcatcctccgcgtcctccagctgctgcttcggcgggagcgtgccctcagtattccttgccgggggcgggtttttttgcaggctttggtttaagggcctttgaacccttttttttcttc

SEQ ID NO: 84893 - DNA, 424 bp, Zea mays
  Clone ID: MRT4577_177430C.1
ccggcgcacttcgtgctgtaccaccagcagacgcctgccaggctcgattccagcgggctcttacacgatctacatagaagatcgacagggacaacgacgaggagctgagctgggagctgagcgggatcagcatcgggttcagcgtgtgcagctgaacgcgcacgagcccgcgcacgagaggcagccagacaatggatgtaaccacgggaagcacaccctgaatcatatgacttacaagaggataggcacatgtatgcgttcaggggaggtctgtgtgcaactgagacgtcaacatacacagttgaacatcacagtgaagataagacactggtaccatgtcagggaactctgaacgctagatggaccgcgtgatggtccagactcacaataaaaccgacaagagagcgggcctgagtttgtgcct

SEQ ID NO: 84894 - DNA, 433 bp, Zea mays
  Clone ID: MRT4577_177431C.1
ggggcgaaaagggaaaaatattttacaagggttgcccaaatttacaaaggagtatctgattcttaaaatacaaaattttttacaaggggaattgaaaaatttctttaaagttttttcataaaaggggtttcagcttcattatcatccaccaaagcttcatatcattggttttcgggttcggcatccggcttaaggggacttcgagctttgtaaccagctaaactttgcccacccttcggttaaaattggggtaaaaaactggttcctatgcttcgagccaggctggggaaatcaaataaaacccggggggaaaaaccgaaatttgggctattaaaaaacttcccatgcctgcaaccaattttcatgaaggcaatagctgggccccgagaagcttgcaaaacacaaaaatcgtcggggccagctttaactttat

SEQ ID NO: 84895 - DNA, 418 bp, Zea mays
  Clone ID: MRT4577_177432C.1
tttttattttttttttttttttttttttttctttgtttttcggttttttgggtttcttttctatctcttttcctttttttgcagaagggcccaacgtgttttttttgcctttggaaccaaaatgggtgcattgttcactttcgccccccccccatctttaaaattaccaccttcaccttccgcccggggggcgcgaccagggttttgcttcattatttttatccaggtggaggaagggcttttcccatcctctggtggagggccactttttttttgtaccctaacaataaaacgacgactaggatgtggacgatgggtccatcaagcactatgttttagagggggaacctcggggggaacccctttggtttgctgggtccagccaccacgattgttaccacccccctctttttttggg

SEQ ID NO: 84896 - DNA, 107 bp, Zea mays
  Clone ID: MRT4577_177433C.1
atgcctgtggttaccgtcgattatgatcactctatcgctgatggtcccaatagtgcctgggaagaatacagagtttctttgccgagtttaaagtatttaggggaatc

SEQ ID NO: 84897 - DNA, 465 bp, Zea mays
  Clone ID: MRT4577_177434C.1
aaaaaaaaaaaaaaaaaaaaaaaaaaaaaaaaaaaaaagaaaaaaaaaaaaaaaaaaaaaaaaaaaagtttgtaccataggccgaaaccacccttaagggggttttctgtggatctccaccaccctgggggccagttctagcatttttcttaagggcccagttcgccctatattgattctaataggccctaattggcctttgttgtgcacctttacaattgggtgacccctgttttaccccaacttaattgggtaaaccctatccccctttcctaaattggcttaaaaacaaaaaggctttcaccgattgcctttttaaacagtaggcccgcctgaatggccattggacacaccttgtaacgctgaattaaaaatggccgctcctttggttacccccttaatgaccgctacatttgggattaccctaacgcccacccttttatttttcttccctttatttctcgc

SEQ ID NO: 84898 - DNA, 236 bp, Zea mays
  Clone ID: MRT4577_177435C.1
gccggcccggacacttcctggctcgttcctcgcatgcgtttttttttttgctctctataccacacactggaggggattcgtttgttcgcacgcgattgctctccagctgctggcggtgtgccgttaatctaaacccaccaaaagcactgccgcctggcggacgaaacgtggccaccggcggcgtcttcggctgtagggacgtcatgttcccttcagaggccaggctttctatgatg

SEQ ID NO: 84899 - DNA, 663 bp, Zea mays
  Clone ID: MRT4577_177436C.1
gccatgtccaagcctaacgcattccctgccattcctctcccgtggcctcctccgctccccgtaggggatccccaaacaggaatagcagagaggtccgtgctataccgcgataaggaagccatggactacagggaggctgggtgacaacatctccaggcacccatcctctgcatcaataactgtggctttttccaaagcgcggcagaccatgaacatgtgctctaagtgccacaaggagatgataactaagcatgatacaggccaagctggctgcctcctatatcgacagcatagggaacggcagcgacgccgtcatggagtcggttgttgctggcagcaacacagtagtagctgctgcccaaatcgagtcgcatacaatgaacgtgcaccaacccgctgatggtgccggacccaccgaggtagtggcgtggatctccaaaggggggaaggtagggccgaaccggcgcagtgcctgcatgaagagggatgggctcacggcattcaactggcgttgagctaacttgtactgcgcgctccaccgttactccgacatgcaccactgcaagttatactaccgcactggtgccagcgacgccattggcaaagctaatccggtggtgaacgcagacaagctcgacaagatctagggggggttccctacgg

SEQ ID NO: 84900 - DNA, 371 bp, Zea mays
  unsure (1)..(371): unsure at all n locations
  Clone ID: MRT4577_177437C.1
accaaacaaccnggacancaanaagaaacaaggacaaacgcgagacagaggccanccnaccggaggnncggaaaaccannnggggcnnngaaanggaanangcncaagcagaagaaagggganccaaannaagggannangcccggaggggggngcaaaggaaagcnaaagaggaancnagcaaagnangganccanangaaagagaggggcacaacagngnnnagccangacaagganncaannccaagggncnggacaggaaaggaagangnncangcganagcaaaggaagcncgagcngcggcncncaaaccccgggcnggaagggcggccanncgcnggganganngagccagaagganggaaagc

SEQ ID NO: 84901 - DNA, 390 bp, Zea mays
  Clone ID: MRT4577_177438C.1
ggaaagccggcccgccggcacggaccgggccggaccggccggaccgacccagactagctcctcgaccaccgcaacgagcttttgttgcgacgacgacgaccagccgccacatccacatggcggacgacgcccagggcggcggagcggacgaacgctgcagaaggcccgcgccggaggggaacaacaacaggaaacagcagcaaaaaccccgcaggcagaggagcaaaaggagaaatccgcacccacgactccggcagcaccgacgacacctatcgcacccacgactgcggctgcaccgacgacccctgctgccaccccggacgcgccagcaaacccgccgccggctccgacaacgccagcgcccaccgtcaccccagtcgcgccagcgaa

SEQ ID NO: 84902 - DNA, 612 bp, Zea mays
  Clone ID: MRT4577_177439C.1
acctcgaggccggccgagacggtgtctttgggtgagacaccgcgcatcaacgagaggggcaaacaagattgttactgtgatttctcgtccgagcagcggaggtatgatagagacgagagcatgggcgaccacaaggaggagcctgtggcgaactctgtgatgaataagatcaccgagaaggtccacggcggggactcgtcgtcgtcgtcgtctgactcggacgacaactacaaggagtcctccatgccgtaggaggggcaagacatgaacgacaagatttaccgccttttcgggcgcaagagggccgaccactccgtgctcggcggcgccgagactgccgatcttatcctatggaggaacaggaagatctctaggtgggatacttggtggcgccaccaccatctgactactattcgatgtcatgaagtagcatctcgtctccttgctgggacactgtatgatcgtctcgctgtacattctcttgctgtggaccaatgcctgcacttttattagcaagtccctctggattattgctgaggtcaaatccctgaggatgtggctgctaatgctgccctgtgactgatatatgagatcaaattgcgctctggtacc

SEQ ID NO: 84903 - DNA, 1488 bp, Zea mays
  unsure (1)..(1488): unsure at all n locations
  Clone ID: MRT4577_17743C.1
atacccttctcgtctccgcccagcagcaacggcacccaccgaatccgcccctccctctttccgttccgcctcgttgcgctcgctctcgctgcgccgcccgccccacctcacggagctcacggcaacaccggcagggaaggaaaaggaaagccgaggaggcgaggagagagagatacaaggcaggcagccaggcacaggcagcccgcggctggctacggggccaaaacccttacgcgcgacgcggccccctcctcttcttctctctcccaccaccgccctccccttgccatttttgccgcaggagccgccgccatccgatccggaagagggaggaggggggagggaggaggatctgtgtcccgattcgattggagctctcgtccccggcggtccaggatggtgcggggcaagacgcagatgaagcggatagagaacccggccagtcgccaggtcaccttctccaagcgccgcaacggcctgctcaagaaggcgttcgagctctccgtcctctgcgacgccgaggtcgcgctcgtcgtcttctccccgcgcggcaagctctacgaattcgccagcggaagtgcccagaaaacaattgaacgttatagaacgtacacaaaggataatgtcagcaacaagacagcacatcaggacattgagcaagtaaaagctgatgctgagggcctggcaaagaaactggaagcacttgaagcttacaaaagaaaacttttgggtgagaggttggaagaatgctcctttgaagaactgcacagtttggaagtgaaactcgaaaagagccttcattgcatcaggggaagaaagactcagctgctggaggagcaactccataagctgaaggagaaggagatgaatctgcgcaagagcaacgaagatttacgtgaaaaggtaatgggggcgaaaacattttgcagacgctgcactgcggcaagcggcatgccaacaacccaagaaaacagtgcaagaagcagccgccgccgccgccgcctatgctgatggctcctccgccgcctccagcgccggcagccatcgatcacacggggccgaaagatgtcgggatggacgtggagacggagctgtacataggattgcccggcagagattaccgctcaaacaacaaagacatgactgcacagtagctgtcaggtcaggtcaggtcaggccagccagcagtgcagagaataatcttagatctgtggtgcggagaactggagatgcaagccaagcccaagccaatcaacatgataaggatcatgagtgtcgcgtcgtgttttacaaacctgtccaccgtccgtcaaaggcacatgcgccagaacgtccgtcagagaacacttaccccctcatctccctctattagctagctgctccggcctgctcatgtcgaaaccttctgttcaagtatgttctcctcctgatgaaaaaaaaaaaaaaaaaaaaaaaaaaaagtcnaacaaaaactaaaaaaactcaaaa

SEQ ID NO: 84904 - DNA, 1129 bp, Zea mays
  Clone ID: MRT4577_177440C.1
cgggatcctctccgtgtaggccgcgggattccgtgtccctctccaatccggcgtagccatcgtcgccggatacaggatccggtccccgcgatggagccctcaccaacctcctcctcgccggctgtggcgcgccggttgtcgccggagaccgcagcagcctcgccggaggccgaggaccgcaaggacgatgttggtgtcgatggagatggcatggcgacgtcgtcggttgcgagtgactccgattacgagacgacgcagatgtgtgaccttcttaaatctaaggttggatcactcgagttccttcaaaagctcaatggtattcagaagtcagtagatcagaattgtgcagttgaacctgatacatcatgggatataataaagtcggatttgtgggaagatggtgactcagatgatggatatgttcttgttaaacaggaagatgtggttgatgggatcacttcctttatggctgcatgcttgttatcacttaaaagaaccaaggacctgcctcctgatcaacttcagaaagcacttaggaagatgttttcagctgaaaagaagaaaagtaaaatcagaaaggcttgggatggaactaaactcatttataatgttacttcatggggcgccactgctgttgggttctacaataatcgagcattacttacggtcgcaagtacaacatttcggacttcctgccgtgtgatatccaagttcctttgaatattgtgtagggtatgttagaactgcttgcgtctgcttttccgttcttcagctaataaaaaggtagcataaagtcggaatccatttacttaaatctgtcctgtttgccagcgacatcaagatttcgcagtcgagttcgactgctaattacgtattctcttcattttttttatttgtcgcggtttagttcaaaaatgaacaaatattagcatttagcagcgcctctagtccaaagcagcgttggtattgcacaactgtaaatgttgccttgcattgaacaaacttgcttccgtgccagaattttattttggtcacctgaaattattactttgtactattttccgtatcaaacaaaactaaaatccttgatattgaaaaaaaaaaaaagggcggccgccaccgcggtgga

SEQ ID NO: 84905 - DNA, 260 bp, Zea mays
  Clone ID: MRT4577_177441C.1
ctcgactatagaaggaaaattatccacaatcccgagcgcccgaactcgtgggtgggccataggcgtatatttacacatgaccgcaggcggtgatcgtgttgaccgtagcgggattgagctacttgataaccaggggcaagaaaacgctgacaacttccacgcgctgctcactggagagaagggcgtgggcaagtacgagaagccgcttcactagaagggctccacctaacaccgctttattcacgacatgatgtgacaag

SEQ ID NO: 84906 - DNA, 1212 bp, Zea mays
  Clone ID: MRT4577_177442C.1
ccggtccggttttccttggtttacccacgctaccttccgagtcttcgggccggccgggttcgataacccaaacaaaccaatcatcctctccgtgtaggccgcgggattccgtgtccctctccaatccggcgtagccatcgtcgccggatacaggatccggtccccgcgatggagccctcaccaacctcctcctcgccggctgtggcgcgccggttgtcgccggaggtaaggagggtgccgaagcgggcgctggaggagttgttggagcaggtccagcgggctgttgagatgctgcgcgatgccgacgctgatctcgccatctctctctcggaggagaccgcagcagcctcgccggaggccgaggaccgcaaggacgatgttggtgtcgatggagatggcatggcgacgtcgtcggttgcgagtgactccgattacgagacgacgcagatgtgtgaccttcttaaatctaaggttggatcactcgagttccttcaaaagctcaatggtattcagaagtcagtagatcagaattgtgcagttgaacctgatacatcatgggatataataaagtcggatttgtgggaagatggtgactcagatgatggatatgttcttgttaagcaggaggatgtggttgatgggatgacttcctttatggctgcatgcttggtgtcaattaaaaagaccaaggacctgccccctgatcaacttcagaaagcgcttaggaagacgttttcagctgaaaagaagaaaagtaaaatccggaaggcatgggatggaactaaagtcatttataatgttgcttcatggggcgccactgccgttggggtctacaataatcgagcattacttacggtcgcaactacagcgtttcagacttcttgtcgtgtgatatccaagttcctttgaatatcgtgtcaactactagggtgtgttagaattgcttgcgtgtgtgcttttccattgttcaggcagcataagcttgagaccatttgtttagtctatgctgatgagttcgactgctaattatcagcacctcagtccaaagcagcatttgtattgtacaactgtaaatattgccttggtttgaacaaactgtcttttgtgccagaactttattttggtcatccgaaatgatgattagtctgtactagtttccgtatcaaacaaaacgaaaacccttgatattctaaaaaaaaaaaaagataatag

SEQ ID NO: 84907 - DNA, 1216 bp, Zea mays
  Clone ID: MRT4577_177443C.1
ttcagttgtgatgttattagcactcactttgtttcaaattctaagtcttctgttgttttttatagatatgtatctagatataaatatatgtttagacgaatcgcaatagtaaggtttgtagagaaaacagaacaacttacaatttaaaatggagcgagtagtcagtgccgggtccggaaatagtggcacagaatcagatatttgaacgttcctgattgttgtaaataaatcttttcaagatgttgcaaaaacagtatgttgttagtttaggcgaagtcatgtctgcagactgcagagtatccctaatatgtatctctagcttcctatctggaacgtgggctgaacgacctcatggtcatggcccttatagaaacctttggagtgacaaagtagagacataattttccacatggtttgttgtgttctgaagctgatctacaattaaaataacttgcttttacctagcagatgtgtgaccttcttaaatctaaggttggatcactcgagttccttcaaaagctcaatggtattcagaagtcagtagatcagaattgtgcagttgaacctgatacatcatgggatataataaagtcggatttgtgggaagatggtgacccagatgatggatatgttcttgttaagcaggaagatgtggttgatgggatcacttcctttatggctgcatgcttgttatcacttaaaagaaccaaggtagctattttcttcacttgatgggatcatcatggtgagcgaggagttcatgtctctgcatgttgtatgggaggtgcttttatatatttaatgtgtgaattccatgtttgtgtaggacctgcctcctgatcaacttcagaaagcacttaggaagatgttttcagctgaaaagaagaaaagtaaaatcagaaaggcttgggatggaactaaactcatttataatgttacttcatggggcgccactgctgttgggttctacaataatcgagcattacttacggtcgcaagtacaacatttcggacttcctgccgtgtgatatccaagttcctttgaatattgtgtagggtatgttagaactgcttgcgtctgcttttccgttcttcagctaataaaaaggtagcataaagtcggaatccatttacttaaatctgtcctgtttgccagcgacatcaagatttcgcagtcgagttcgactgctaattacgtattctcttcatttttttt

SEQ ID NO: 84908 - DNA, 405 bp, Zea mays
  Clone ID: MRT4577_177444C.1
ggcgaagatagggcctcgggcgagccggaaacatgttcgccgctggaggggggtctcgggcgaggcggagatcctccggggtcggctgcccttgtccgaggctaggctcgggcgaggcgtgatcgagtccctcgaatggactgatccctgacttaatcgcacccatcaggcctttgcagctttatgctgatgggggttaccagctgagaattaggagccttgagggtacccctaattatggtccccgacaagagggctcctagattccgtcatcttatgcgctacatagcttatcatgtacaagggttaatggacggtatttctcaccgtgaccactcggttagccggtaagaactgagcaactaataaggactgaaactgctcacgtgctctgttgtaagcata

SEQ ID NO: 84909 - DNA, 287 bp, Zea mays
  Clone ID: MRT4577_177445C.1
ggcgcaggggtctcccctccattacagcagacaggcccgtggtccggcgtgattccccggtcgggcgacacaggccgagtcacttgctcggccgtagccgggcgtcctcatcgggggatgcgtgcgcttccacatcctggccaggactgaaggagctcggtccagcgagctcccgggaggtgtgtggacatcatcgctgacggggaatgcgagccacgagcctgcaggcctcaaccatggctatggtgcacatgctgaccgtcttccaagggctctcagagcatcag

SEQ ID NO: 84910 - DNA, 1306 bp, Zea mays
  unsure (1)..(1306): unsure at all n locations
  Clone ID: MRT4577_177446C.1
attcggttcgaggccgccactgctcatttctccatgtcgtgccctccgaattcccaaatcctatggcggtggcgcctttgcccccaaccccgcgaggtcgggagtccgtgactcatcttcctcctctttgccgggctgcacgtggagtggagatccaccagaccacacatgatcgcattgcccccaatccagtatgtaatctgtaaccctagctttgcttaccgggctgcggtacccactaccggacggacgggcgcacgcactgttgggctgcaacacccaatgcacggacgcacgcaccagcaccacgcactgcatccacatccacagattggccggaggaaactgtgatctgctctaatggctagtgaaggcgaagctttacctccacgaaagcatatgttgacgggattgcctagtgaacatcaaagtaagaacttgacatcgccacctcatgcaaatacgagtcaaccttttggtgtgtccgcatatcgtcaacacctgctgcaacatctcatgaataaggtgcaaatcctagaaggaattaatttggatgaggatgatccttcaaagttgaagcaagcaaagaagtccacttcaaatgtttggcagtattttgagaagtacgaggttgtcgtagaggagaatgaccaatctgtgaagcaagtttgggccaaatgcaagtatctgggatgcaaaaacaagactagcaaagctagtgctgaaagtagtagaggaacaactgcattttggtctcatttgaaaaattatcataagattgtgaaggggcaacaggagctcaaggcagaaaaggatcatggcacaagtatatgcattgtccagccatataaatatgatgaagaaaccagtttgagaaagttttatacaactattatcatgcatgagtatccatttaacattgctgagcatgaatactttgtggaattcattaaatcattgaagcctacctttcctatgaagtcacgtgtcactattaggaaagaaattctggaactctacttgcatgaaaaggatgtgttgtataagtatttcaaaaccctcaattgtcgcatgagtgctactatggacatgtggacatcaaatcagaataaaggctacatgtgtgtcacagtacattgggaagatgatgattgngaaatacagaagagaattatcaatttcctccatgtttcgggtcgacatagtggtgagaatatgtctcttatcctcagttcatgcctattgaaatggtttatagagaagaaaatgttttctttaaccttgnacaatgcttctgcanatgaag

SEQ ID NO: 84911 - DNA, 733 bp, Zea mays
  Clone ID: MRT4577_177447C.1
gcacgaggcggcagcggtggacaatttggctggttggatcttatttgtgcgctcgtattgtatgttttatgcagagtcggaaggacgtggagggtcgctcttagtcatcaagaggttgtgaacttgtgatgacaaaaataacatcctgctgataacctcaaatggcctgtctacgagatggaaaatggcctgatgataacctcaaaattttctccattatgggcaacaactattgagcagccaagatatcaacaacgaagaataaccaatttcgaattcacatcaatcaacaataggacctgtccctgatcaacttcaaaagcgcttaggaagacgttttcagctgaaaagaagaaaagtaaaatccggaaggcatgggatggaactaaagtcatttataatgttgcttcatggggcaccactgctgttggggtctacaataatcgagcattacttacgatcgcaactacaacgtttcagacttcctgccgtgtgatatccaagttccgttgaatattgtgtcaactactagggcatgttagaattgcttgcgtgtgtgcttttccattgttcaggtagcataaagtttgagaccatgtgtttattctatgctgatgagttcgactgctaattagcaggaccttccagtcaaaagcagcatgtgtattgtataactgtaaatattgccttgatttgaacaaatttgttttttgtgctagaactttatttcacg

SEQ ID NO: 84912 - DNA, 883 bp, Zea mays
  Clone ID: MRT4577_177448C.1
ggtaccccctcgaggggccggccgggtggagctggataaatttaatggtgtcatgaaaaagatgtatcaatgctatgtctctactacaccctcaacatcatctgttgcaccttacccaacttcaacgggtgacatgattaagtcaagtattgatgaagagcttgatagctacatatttgatggacaaggcccatgatgattctattgacacaagtgacttagaaaaatatttgatagatccaaatattaaagattggtaaaaataatcagcatacttttgacatactagcctggtggaaagcacacaaagaagaatatcctatcttgggccagcttgctcgtgatgtcttagctatgcaagtgtcaacagtagcttcagaatctgcttttagtgcgggtggtcgtgtacttgatccatttcgtactcgccttgaccctaccatggtagaagcgcttgtctgcaccaaagattggatagctggagcaagaaaaggttccaaggctaagagtgttgctattcctaatatggtttgtgaaatggaggaacttgaggctcttgatagaaatctttcacttgaggatgaagacctagatgatgatcatgatgatggaccagaggcatcgttgtaagcttgttgatgaagacctagatgatgataatgcaacatgaatgctctgaatgttttcattgtacttgttgcgtaatgctttgtgatcttgcgaacttgggacttgtggacttgtggttgtgtactttgtgatctgtgtgatgaacttgttatattgtgaacttgtgatctgtgtgatccacttattatattgtgaacttgtgatcaacttgttaagtttcttggtttcttcccccttcggtgcttttctttct

SEQ ID NO: 84913 - DNA, 1252 bp, Zea mays
  Clone ID: MRT4577_177449C.1
ggaaagccttaaccgacaggcgatacccacggcacgggcccacttggctgctttttcaagctacacgccaatccaacgctattacgcaacgattagccaaacagatcagatttcatcttctacttcttcgtataggccgcgggatcccgaatcccaatccgtagtcgccaccgtcgccggctacagggttcggtccccgtgatggagccctcgtcaacctcctcctcgccggctgtggagcgccggttgtcgccggaggtaaggagggtgcggaagcgggagctgaaggaggcgctggagcaggtccagcgggcggttgagatgctgcgcgatgccgacgccgatctcggcgtctctctctcggaggagaccacagcagctccgccggagggcgaggaccgcgaggccgatgtcggtgccaatggatatggggcggagacgtcgtcggttgcgagtgactccgattacgagacggcccagatgtgtgatcttcttaaatctaaggttggatcgctcgagttccttcaaaagctcaatggtattcagaagtcagtaggtcagaatggtgcagttgaacctgatacatcatgggatataataacgtcagtggatttatgggaagatggtggctcagatgatggatatgtactggttaagcaggaggatgtggttgatgggatgacttcctttatggctgcatgcttggtgtcaattaaaaagaccaaggacctgccccctgatcaacttcaaaaaggtttctttttcttccctcaattaagaggaacggtgaaataaatttttttattggatattctgatgttaaactttttgactgttcatattccagtgcttaggaagacgttttcagctgaaaagaagaaaagtaaaatccgaaaggcatgggatggaactaaagtcgtttataatgttgcttcatggggcgccactgctgttggggtctacaataatcgagcactacttacggtcgcaacttcagcgtttcagacatcctgccgtgtgatagtgtgatatccaagttcctttgaatattgtatcaactactagggtatgttagaattgtttgcgtgtgtgcttttccattgtttaggcagcataaagcttgagatcatttgtttagtctatactgatgagttcgactgctaattagcagcgcctttcagtccaaaacagcatgtgtaatgtataactgtaaatattggcttgatttgaacaaacttgttttttttgccag

SEQ ID NO: 84914 - DNA, 766 bp, Zea mays
  Clone ID: MRT4577_17744C.1
aatctccttttcctctgcccgccgctcgcccggaacctccccgtcgccgccgccgccgccgctcgcccgagacctccccgtcgtcgccgatctcccggagccaccgcacctccgctcgtcgcgccgctcgtatcctcctcctccgcctcctcgccggagacaacatgtcgacgcttgccgcggcgagggccgacaacttctactacccgcccgaatggagcccgaagaagggtgggctgaacaagttccacggccaacatgccctcagggagcgggcgaggaagctggatcagggcatcctgattataagattcgagatgcctttcaatgtctggtgtggtggatgcagctccatgatagggaagggagtaaggtttaatgctgaaaagaaacaagttggaaattattactctaccaagatatggagcttcagtatgaaatcaccatgttgccagcatgagatagtcatacatacggacccgaagaatactgagtatgttataatcagtggggctcagcggaagactgaagattttgatgttgaagatgcagagacgctcctgctccctgcggatgaagaaagagacaagcttgcggatcccatgtataagcttgaacaccagggagaggatattcggaagaagaaagaagaggagcctgttttagttcggcttcaacgcctctctgatagccgtcattctgatgattattccctgaacagaaccctccgctaccgccttaggagccaaaagaagagagttgctga

SEQ ID NO: 84915 - DNA, 1500 bp, Zea mays
  Clone ID: MRT4577_177450C.1
cctcgacccgagccggccagcccggaggtaccggcaggcggcggcacacaggcaagcagtcaagcaccagccgccaccgcccaccgccggtcgccagtcgccactgctccatggcgtgcccccaaatcccgtgacgggctgacggcgtgactcatcttcctcctctcctctctgtaacagtaaaaactgtgatccgctgtaatggctagtgaaggtgaagcttcacctccacgaaagcgtatgttgttggagttacctagtgaacatcaaagtcagaacttgacatcctcacctcatgcaaatacaactcaaccttttggtgtgtctgcatcatcatcaacacctgctgcaacatctcatgaacaaggtgcaaatccagaagaaggaattaatttggatgaggatgatccttcaaaattgaagcaagcaaagaagtccacttcaaatgtttggcagtattttgaaaagtatgaggttgtcgtagaggagaatggcaaatctgtgaagcaagtttgggccaaatgcaagtatccgggatgcaaaaacaagactagcaaagctagggctgaaagtagtagaggaacaactgcattttggtctcatttgaaaaattatcataagattgtgaaggggcaacaagagctcaaggcagaaaaggatcatggcacagtgcgggtggtcgtgtacttgatccatttcgtactcgccttgaccctaccatggtagaagcgcttgtctgcaccaaagattggataactggagcaagaaaaggttccaaggctaagagtgttgctattcctaatatggtttgtgaaatggaggaacttgaggctcttgctagaaatctttcacttgaggatgaagacctagatgatgatcatgatgatggaccagaggcatcgttgtaagcttgttgatgaagacctagatgatgataatgcaacatgaatgctctgaatgtttttattgtacttgttgcgtaatgctttgtgatcttgcgaacttgggacttgtggacttgtggctgtgtactttgtgatctgtgtgatgaacttgttatattgtgaacttgtgatctgtgtgatccacttattatattgtgaacttgtgatcaaaaaaaaaaaaaaaaaagcggccggtagatcatggttgggacatacagaaaggaattatcaatttcctccatgttccgagtcggcatagtggttccaaggctaagagtgttgctattcctaatatggtttgtgaaatgtaggaactttaggctctggctataaatctttcacttgaggatgaaggcctagatgatgatcatcatgatggacctaaggcttcgttgtaagcttgttcacgaagtcctagattatgataatgcaacatgaatgctccgaatgtttttattgaacttgttgcgtaaggctttatgaccttgcgaacttgggacttatggacgtgtggctttgtaaactttgtgatatatgtgatcaacttgtgattgtg

SEQ ID NO: 84916 - DNA, 561 bp, Zea mays
  Clone ID: MRT4577_177451C.1
ccgtcacctcacttgctcacctttgacattctcaaaaaatatcacgcgcctacatcacaccttcacaccaccacacccacacccgtgccagtgcaactagacagatcccaaagcgcacaagcaaccatgtctcctctttccgtgcccaaaatcttcatggctggcggtgctgtcggcttcggctactacctctacatgcgccaatactggttccccaacccctacaagaccagggcgtgcagaacatcgaggaccgcttctcttccggcggcgcctcgcccacacatactcccgctgttgcgagccagcgcggtagctccatggccaacgacggaagacatggtggtcccagcaaaggccctgactcggagtacttcaaggcaaacattagcagtcagcagagcgagcccgtctggccagacaagttctacgagcagcagtacaacaaccccaagggcaaataagcgctttttgattggactgtcgagagaatacatatgagcttggaactgtgttgctggagtgcgacagataccgtgtgcatggcatcattggcgtttg

SEQ ID NO: 84917 - DNA, 180 bp, Zea mays
  Clone ID: MRT4577_177452C.1
cgcactcgttcagggattcatgtttagacggtcgatgccggcgtgtgcaattgaggtgctgctcataagaactcactacctggcttacctaacagttagtaccagaaacatatgcactggggttttccagttcaattagcatgatttcttatgggcgcatggggtccatttcccaaagtg

SEQ ID NO: 84918 - DNA, 1077 bp, Zea mays
  Clone ID: MRT4577_177453C.1
gtgcggcgctcaggcgccacgcgtccgcccacgcgtcccggcggagggaagcgtcgtctaaattccaaccctaggccatggcgaatgcggcctcatccgcatcgtcgccgggggcaggttcctcctcctcgcagcaggccggtggagacgggggaggggacgcgcacacgccgcggcagcggcagggccggcccccgcgcgccggctccgacccgctcctcatcgtctgcggctgcttcagcgtcgtcacggtcgccaccgcgctcctctgcgtcgccgtcaacgtcgtctccgccgtccagtccttccgcgccggcttcgacatattcgggggcatattccggtgctacgcggtcgtcttctcgctattcgtcgccgtcctcgagaccgagtgggggttcatcatccgtttctggaagatatttgaatactggcctgcacggggaatgctccagatctttgttgctgtcatgacgaaggcatacccaagtattgaaaggaatgatctcaaattgctccaggagattgccagctacatgcttcttgcatgtggagctgtctatgttgtctcggggatattgtgcattggtgtgctaaaacgttctaggcagcagaaagcaatatcacgggagcaagcagccaaagacctgcaagagttggagaaacggagagaggaacttgaggcattgttacttgctgaacggtcggagttggtttgaaggctgaccaccgtgatctaacaatttatcttctgttgtagataaatgctttcttttttctttttctaatgatagcatactgcttggtcatggccctgagtcattcatccagaagtcacttgattgaagtgtatcttcttctttagtttctggattgcagcttccctcttggtttcagctgaattgtgggcttcttggtttcagagcattgtattgattcatcgtctggggctgtaagattgcagcatgaatttgatgtagcaccctgacttgtgtcgtccaatcctgtcgtgtacgcataaatgcattgctgaataattcacctgatttttgcaaaaaaaaaaaaaaaaaagcggcc

SEQ ID NO: 84919 - DNA, 189 bp, Zea mays
  Clone ID: MRT4577_177454C.1
attaaaacataactatttataaaactcgtaatcccctaccagcccggacggtataggtcaactttataattttatatcaccacagtgcatttacctccaatccgtcaaggaacccactgcccggcccctaaaaaaccaaggctacccagttctcccatgcagaatgaaaactccctgccaaagaccttc

SEQ ID NO: 84920 - DNA, 1386 bp, Zea mays
  Clone ID: MRT4577_177455C.1
gtctaaattccaaccctaggccatggcgaatgcggcttcatccgcatcgtcgccgggggcaggtccctcctcctcgccgcaggccggtggagacgggggaggggacgcgcacacgccgcggcagcggcagggccggcccccgcgcgccggctccgacccgctcctcatcgtctgcggctgcttcagcgtcgtcacggtcgccaccgcgcttctctgcgtcgccgtcaacgtcgtctccgccgtccagtccttccgcgccggctccgatatattcgggggcatattccggtgctacgcggtcgtcttctcgctattcgtcgccgtcctcgagaccgagtgggggttcatcatccgtttctggaagatatttgaatactggcctgcacggggaatgctccagatcttgtaagtgtttttttacttctgtatgaccatatattttcttcttctaattttgtttccaaaactcagcactcaatctgtgtttatatatttgaatgcacaattgagtaaaccacttatgcttggtgctcgcatgctcactgcataagattttgttttaatcttgagaaaggggatattgtgcattggtgtgctaaaacgttctaggcagcagaaagcaatatcacgggagcaagcaaccaaagatctgcaagagttggagaaaccgagagaagaacttgaggcattgttacttgctgaacggtcggacttggtctgaaggctgaccaccgtgatctaacaatttctcttctattgtagataaatgctttctttcttctttttctaatgatagcataggcattggtcatggccctgagtcattcatccagaagtcacttgattgaagtgtatcttctttagtttctgtgagtatggatcctttgttatgtttataccaagttaacagattctaaattgtctctactctacatattgatgtggctttgcattcaactactcgaaaagtgaagatgaccttgaacagtttcatttggccttattaccagaatacttgctgtgagataggctaggaagagcagttagttgcaggttcgatcgcagtcgtagtcaaggtgttcgcttgcttgccacgccgacaagacgggggctcgcatcgcatccctaaccttggagtcttggatcaatctagcgatgtccggggctgtgatgccatacccgccgctggtgcgtgcagattctcgggctgtacatgtgcgtggatatcatcgtcgccaacgagctaatgcgcgacatctccggcggtcagaagaagcacctcaccacatgggagatgctggtcggcccaaccaaggtgctattcatggacgagatctccacgggcctcgacagctccaccaccttctagattgtcaagtgcatcca

SEQ ID NO: 84921 - DNA, 452 bp, Zea mays
  Clone ID: MRT4577_177456C.1
agagaaccagcaagattcactccatcacggcccagaactaaaaacatgcctgttttcaaatacgaaccaggcctaaataggttattactattattgcagccctgtttatttaatcaacacccctagttgctgtgcttgcgatatttgcaagacactccatgttgagttttattgattttaagtaaggccacgcgttttacaaccacggcgggctctggatttgcccgcctgcatgcattgtttccttcatacacaggaagggtctgactgagctcttttggtcatcaggcgacgaactggttgtccacgttgatgggggccatttgggattcctgggcgctgggggggatttttttgaacaacctcttggagttcaagttcaagccgccggtggtggacttgtacaccatccttgccacgatggtagcccccctcgcacgggtttttaccct

SEQ ID NO: 84922 - DNA, 524 bp, Zea mays
  Clone ID: MRT4577_177457C.1
gccctctctcgagtttttttttttttttttttttttttttttttttttttttttttttttttttttttttttttttttaaaccctgaccaacatgagctggtgggggcacccgagggaatcaacagggttctttccaaagggaaagcaagtttacaagctaaacagttaggcatatatctgcaaacataaatgattgggcgcttacttcactccaaaatcacaaaagggcttggggctaggctcttgcccttttggggctgcaatcggggcatttggagggcttgaggggctcaactcgggcaggcgggattttgacacacttcccatggaaccaccggtcgcatttttcacaacaaatccaaaattcgcccttgccgtcttttgttccacaggacccacaaaagggggtaacaccctcttcctttttttaaaactcttaaccggtctaataattttcatccttagggggccccatttttggcgccttcaaaagaaactcgggtcttggtggcattttcaaact

SEQ ID NO: 84923 - DNA, 404 bp, Zea mays
  Clone ID: MRT4577_177458C.1
atggaaaaaaggactttttccctttgggggggcggggtcctttttcctttttttacaaaaacagacccttttacaaatttcccagcccttccatttaaagaacacaaaatcctaccaacttttattccattttgacccttggccatctaattttttggtttacaaacacaagcccaaaacccttcttgctttatgggcgaacttgtacctagctaaggcgtgaccatttaaaagctcaacacaattatttggtcaggggagggagcaatggggcaggactgccacaatccttaatccagtttgatgccttgggggaaacttctgtggggcaaaaaaaaccactgacggggcccaatattttttgggcaaacaactcccccgacctaaatccaaccttgtctaaa

SEQ ID NO: 84924 - DNA, 127 bp, Zea mays
  unsure (1)..(127): unsure at all n locations
  Clone ID: MRT4577_177459C.1
gcgttcgacccagggtcccaacgcacacttggcgagngcgtacggcagtccacggttgtagcccatgtgctcctggctatgtgctaggctcgtgccacaataaatgctacggcgtcgcaccctcgcg

SEQ ID NO: 84925 - DNA, 402 bp, Zea mays
  Clone ID: MRT4577_177460C.1
caaaacttgagcaattgtatattgacagtgccggcctaagtggtccggtaccgtcatcgttttctagactaacaagaatgaagacactgtgggcatcagataatgattttactggggaaataccagattatattgggagctggactaatttaacagaactgcggtttcaaggcaattcatttcaaggtccacttccagccactctttctaatctcgtccaactaacaagcttacgaataggtgacattgtaaatggaagttcttcaatgatattcatcagtaacatgacatctttgaacacattaattttgaggaattgcaggatatctgatagcctggcatcagtgaacttttcacagtttgcaaagttaaacttattggatttgagttttaacaatatca

SEQ ID NO: 84926 - DNA, 676 bp, Zea mays
  Clone ID: MRT4577_177461C.1
actcttctctagggttttaccacgcagccccgccgtctccctccgtcccccgccgccccgcctcctccctacccggcaggccaccaccgagctcgacccagcggccatggccgggaagaagcgcaagtccaccgagaagcagcctaagggcagccgcctgccgctcggcgccgacgccgacgcggtggccgacgccggcaagcgccgccgctctggcgccgccaagcgccaccaggccgaggaggaggagtccgtgccctcctccatcagcgccaagatcctccgcgaggccctcaggcagcagcaggaggagggcctcgccgactcccgccacgccgccgccgccgccacacctgccgccccagctgtttctgcagccccgtccacgtccttccccgtccctgctgccgacggcggcgacgatgatgacgaggacgtcgacgagttcgacggcttcgacgccctgagcgagtacgacggcggcgtgccggagatcgacgaggaggacgagaaggcccttgccgcattcatgtccaaggacacctcctccaagcaatcgcttggtgatatcatcctccagaagatccgagagaaggacgccccggtctcaacagaagcacggcctgctgtcaagttggacagccgaatcattgaactctataaagaggttggccag

SEQ ID NO: 84927 - DNA, 307 bp, Zea mays
  Clone ID: MRT4577_177462C.1
atcacacttgactggagtttcgaacaaacaaaatgccttacaataagtttaactttgcaaactgtgaaaagttcactgatgccaggctaccagatatcctgcaattcctcaaaattctgcaatgaagcatgccaagagtatttgacttaataccttgattgcactatataaaatatcaagacatagtttgagtcattgattgatgacaaagttatccatacaatgtgttcaaagatgtcatgttactgatgaatatcattgaagaacttccatttacaatgtcacctattcgtctgcaccacagaaa

SEQ ID NO: 84928 - DNA, 186 bp, Zea mays
  Clone ID: MRT4577_177463C.1
cactcattcgttgtacgatataatttcacaactaatatattttcacccttccttcatttctaatgggggtggtttttatgccacatcggcatgatatatactaaatctcacttgctacactaatcctccccttaacttcgtaatcaacagactaaataacagctcttacaccatctgatactagat

SEQ ID NO: 84929 - DNA, 435 bp, Zea mays
  Clone ID: MRT4577_177464C.1
cggacgcgtgggcctgaacaacgcctactgggactcgagcaacaagtagtggacgaccgcggcgaactatgaatactacggccgcggccagttgaagatctattggaactatctctacgtggcccggcgggagggacatccagcttcaacggacctcgacaaccccaacaattggtgcatgacgccaggatcgcgttgaatacggagctctgatgtctgaatgaacaactgcaccctgtgatgcctgacgattcagccccaccataatgtgcatcatcagacccctcgagagcaactagaacaaccctgaccatatgaacgcgcgcataggatactacaaacatactgacagcagctccaaagtcagacccaaggcccatactcaatagctacgtgaactattgcacattagacccatagatactgctaatgcta

SEQ ID NO: 84930 - DNA, 170 bp, Zea mays
  Clone ID: MRT4577_177465C.1
tctctgatggttgtttaggaggtgtggtctcaatacattgcaggcctgtgggtagaactgtctcagagggggaataaggtttcggtgctaatttgttttttttcaattcatgtgttgggcggcttggttcgtatcggtgcttttcatgttaaacaggtactcttggcatg

SEQ ID NO: 84931 - DNA, 251 bp, Zea mays
  unsure (1)..(251): unsure at all n locations
  Clone ID: MRT4577_177466C.1
ctcgaattccgttgctgtcgggccatttccctaggcctcggcctaggaactgactcgcgccacaacgacgtggaacatttccacgcgaaggcgagggggagcccgnggagggagngtgtgtgcgaattcgtgcggcggcggcacactagggcgacacctgcgactcctctccgccccctacgtaggaggtaagagctaggatagtaaatgcacttggaggtggacaagagaaaaaaacaaagcttgactgc

SEQ ID NO: 84932 - DNA, 184 bp, Zea mays
  unsure (1)..(184): unsure at all n locations
  Clone ID: MRT4577_177467C.1
gctcgagcggccgncagtgtgatggttatctgcagactttgtccttaatatnaaaacaacgcaaagtacgagggcatttaaggtatcaagagnagngaggattggtactggatttttagattttgtgggtgtgttttctctttcgttccacattttggagtggagtggtggctctttattttct

SEQ ID NO: 84933 - DNA, 470 bp, Zea mays
  Clone ID: MRT4577_177468C.1
gggcactcctttccctatgactactgacatcaccgtattttgccgcgaatgcaacacagagtgcatagagggctcgcaccctgtcaggaacagtgaggcaactgggcagcctatctaaccgcttgtgagagaacggggtgctagcacatgggcacgggagcagcaagccgctatcttagaccttgatccgcttatttttgacagaacttcataaacacttgccttggcaaaagctgagttgtattgtccacatggtatgtgccgaataaagttttctgagaggacaaaggaatctaaagcaaaagcaggggaaatatactgtgccctatttaccaacacaaggatccagtgcacaaggcagaatattggagagtggaacccctgctagcgtgactgccaattgaacttaaccctgcccacgtttgcggagagcgcgcatgcaatttgctgctatatgacaagaacctatt

SEQ ID NO: 84934 - DNA, 668 bp, Zea mays
  unsure (1)..(668): unsure at all n locations
  Clone ID: MRT4577_177469C.1
gcttacatcaacactcattctatccgngaaatacatcaccatgcttatggccacaatgaagcataaacaagatcctaattatcgacatctaaatcgaatagaaagtactaacgacactgaaatacaaaaaaaacaatctaaattatgacattcaactggggtactttctctgtcctctctcaaagccgcaccttagaatgagatagcaaatatgaagacaagacaggggcacaaacagaactggaaaactacatacatagattaactaccaggtaaacaaacaaagctgtggatggtaatatatgtatatcatatgtgataatttccttttaaatatctctaaatcacctaaccagtaatgagatcccttatctgtaaaaacgaagcttctgtagttccaggtaaagaaaaataaagagtaaggcatcatgtgaacttaaacagaaatactaccatttagcacggctaacacgttttcaaatattaaatatttgaattcaatgtttctaccctgcctctattataatcttttcttctaccatagtaccatgtccaaactatatgccatatatttctctgccatcgacagattaaatgtaaaacataactataaactaatatgcaatttattgccaaaaagatatgctaatgctagtactcaaattatt

SEQ ID NO: 84935 - DNA, 788 bp, Zea mays
  unsure (1)..(788): unsure at all n locations
  Clone ID: MRT4577_17746C.1
ctcgnagccggccgggattttntggttgctgccccctttcccttccctagaccagatcctcgccccgttttccacttttgcctccaccgccggcccaattcggataacaagctccctccgcctcgccgcgtctcctcccagccgcaggagccgccgccatccgatccggaagagggaggaggggggagggaggaggatctgtgtcccgattcgattggagctctcgtccccggcggtccaggatggtgcggggcaagacgcagatgaagcggatagagaacccggccagtcgccaggtcaccttctccaagcgccgcaacggcctgctcaagaaggcgttcgagctctccgtcctctgcgacgccgaggtcgcgctcgtcgtcttctccccgcgcggcaagctctacgaattcgccagcggaagtgcccagaaaacaattgaacgttatagaacgtacacaaaggataatgtcagcaacaagacagcacatcaggacattgagcaagtaaaagctgatgctgagggcctggcaaagaaactggaagcacttgaagcttacaaaagaaaacttttgggtgagaggttggaagaatgctcctttgaagaactgcacagtttggaagtgaaactcgaaaagagccttcattgcatcaggggaagaaagtgcaagaagcagccgccgccgccgccgcctatgctgatgggtcctccgccgcctccagcgccggcagccatcgatcacacgggggccggaggatgtcgggatggacgtggagacggagctgta

SEQ ID NO: 84936 - DNA, 639 bp, Zea mays
  Clone ID: MRT4577_177470C.1
gtctgtacagtcctcctgtactctaccctcttccctccttttgccttattgttttactaaaatttgcctcgctgtaggggattcccctgcagttttcccggtcaaaaaaatgatggtattcatttgtctcagactaagtatgtttcagatttgctcaacagagttggaacgatgaattgcaacccaccacaactcaactcggtacttcatagaaattaaagattggtgaaggcgagttgctagagccagaagatgcaacaagatacaggagcattgtgggtgttttacaacacttaactctgacacaacctgatttaagttttgcagtcaataaggcatgccagtttttgcatgcacctaacactcatcaatgagcgttgtcaagagattcttagatatgccaagtttactcttcaacatggtctaaaatagtaaagtctcctatgcatgtgagtgtcttttctgatgcagatggactcgtgacattgatgataggcgctctacaagagattttgcagtatatcttggtaaagattttggtgtcttggtgtgctcacaagcagcccacagtctcaaggtcaagtactaaaagggcgtacccagtgccgtatattggagagcgaatgaacagtagtcgct

SEQ ID NO: 84937 - DNA, 389 bp, Zea mays
  Clone ID: MRT4577_177471C.1
ccccctaataaatccaaccttacacaaactcccccagggagggctaaagggggggaagggcggcaacaccaaccagggaaaggagccgaacaacaggagcccagacggcccccaacaggggaggaccaaagacccaacaggcacagggggggggaaaacaacccaagaacaaacacacagcagagaaaccgggcaagaggcagcgggcgccccccggcagaacagaggagccgagacagggaaggacaggccccaccggccacccgcggaaggacaaaggccggagggagaaaagaactccccgccggtccagagatggagcccacaccggcgccaggggggcccagcccaccggaacaaaggagaagggaacaccattcggggccaaa

SEQ ID NO: 84938 - DNA, 371 bp, Zea mays
  Clone ID: MRT4577_177472C.1
gtgttctacatttgtctggtgtttgttgttttccctacgggagggcgacggcttaccttctagaaaaaaacgagcagcgacatcacactagacctccacattgaacgacgagcgcctgcaccgagcgaaccttgcgctccaagcctggtgcccgcgacatgtgctccgaccccaataacgaccacggcaggctgggtaggagcagaagttagctctctacttggagatacgaccctaccggcattatacgacgctaacaccactcgacggtgtgtggcatatacctcgaccgcagcgacatcggggtttaccccaccgaggggctcagcgagcacagcgaaagccccttctgtgacattaactgcaaccgc

SEQ ID NO: 84939 - DNA, 502 bp, Zea mays
  unsure (1)..(502): unsure at all n locations
  Clone ID: MRT4577_177473C.1
aaaaaaaaaaaaaaaaaaaaaaaaaaaaaaaaaaaaaaaaaaaaaaaaaaaaaaaaaaaaaaaaaaaaaaaaaaaaaaaaaaaaaaaaaatttaaaaaaaaaaaaaaaaaaaaaaaaaaaaaagttttgtccctccccggggggcccccggggggggtccaacaaaattttttttttttaaatggcccccccaccaaggggtggttgaaaaacctgggggggattcgcctgggccttggggtgaaccatgatgggaaccgggtgtggcacattattttggaaaacggggtccaagggcctttggggctttttttttgggaactttttgctgggaaggcccttgggggactttttgctgggatttttaatgggggacttttttttgggggttttttttgggggctttttccttggcttggtttgagggggaagggccaacattttttgcngcgtgggggccggcccccccttaaagttggaaggcccttgttgttttttgcat

SEQ ID NO: 84940 - DNA, 353 bp, Zea mays
  Clone ID: MRT4577_177474C.1
cccccacgcccccaaaaaaaaagggggggatttataaaggaactcgcgcccaacccccacacggaagcattgaagcgacctactgacacagagcaaggtcaacctcctacatcgggagcacaatggccgacccgacaacaagaacgaagagccctacagcagcaattagccggaacaagatacacgcacgggggccgaccaagtctacaacgactagggaaaaagcaccatcggtggcccacgaccacagacatcgatggatggaaccacgatccatttgctgaatagacaggtgaagtgagaacaccatagctagccttaagagtaaaaggctaggaaatgcccctagccga

SEQ ID NO: 84941 - DNA, 356 bp, Zea mays
  Clone ID: MRT4577_177475C.1
gggaaaaacttaaatataggcattttttttttttttttttcattttacccaggcgtcgactcgggggacacgggtaagtacagcacaacaatcacacttgctgggggggaaaattaaagcaggcaaaaggcgggggaaatacaaactggtcataagggatgcatatataacgacccatgggtaggggcaaccaacgacaacacgctgtccttggccagcctttggtatatttacagttcacgcctccgggtgtccttggccgggggggggccatcgatctagcgggtgaagggggcaaacaatcccagtttgggggggctggctttaaacacgtactggtggtaccccggggggat

SEQ ID NO: 84942 - DNA, 224 bp, Zea mays
  Clone ID: MRT4577_177476C.1
ggcacatacaagcacaattcagactcacaatggccgccaaaatattcgcgtcgggtgctccttgctctttctgcaatagctgctaccgtaacctttttcccacagtgctacacaagctcctatagctcgctttctttcatcattcctcttaccagctgagtattcaagatttcaaaacccaatatctcaaccctacaagatgcaatcggcgatcatcacaggca

SEQ ID NO: 84943 - DNA, 299 bp, Zea mays
  Clone ID: MRT4577_177477C.1
ggtggtgtgcacattggaaaccatggtgttggacgacgtccaaccgataatcggtacttggaatagaggtacattcgtgatcaaaaatcgttacagaactaactaacgtatggtctacaatgatataccgagcataggattgcagatctgatgcgaacgtgaagcgagaccagaatgcgtacacatacataaatgtggcttgactatccacattatacaaggggatggtgagatgcaagcacgaggccaataccaattgtgccatggatggaccccctgggtgagactaactctaacat

SEQ ID NO: 84944 - DNA, 368 bp, Zea mays
  Clone ID: MRT4577_177478C.1
agtgttgctggtacaaataagcttttgaatagaatttacatggtatctttattaattttctgtgttgtacatagtactcagaaaacatttgtttatctaatccgactaggatttggagtaacttctcaactgagacggcacctttttgtgtgaggctgctgtcttgaccagtgtccatacacttttatgtttggtcatgttaggtggctcatagctgagccattacatgttagatgaggtacctttcctgggtgtttgaaatggttgccattgtgacaaatactactgtatattgcatggtttctgttgatcatgatgttgggagatttttccttgcccagtacttcatgcagcatagagacccactt

SEQ ID NO: 84945 - DNA, 277 bp, Zea mays
  Clone ID: MRT4577_177479C.1
ttggacccgtgggcggccgcatgggcaaagggttctcttaggcggagtctccggatggacccacccacctattctcagtggcggcggcagccttggccctaatctcatcgtctgctcgtgcttctccaggtcctggaaggcgccagcagacaacagaccctcgatattctcagccatgtcagaggactgaacccaacgctcctgctgcgccgggagagggaccgaactgtcgacggcaggggaagcacgacaagcctaagccgcgggacgaggaccc

SEQ ID NO: 84946 - DNA, 209 bp, Zea mays
  Clone ID: MRT4577_17747C.1
tagcgactttattacatccttgtgcctatgtctttcggcaattatgttaaaacctttgtcaaattaatgaaattaaacagattgactctctcgttaattcaccccacatacccacaaaaatctgaactattaaccatcaatggtgatcttaccattctttttttaagaaacctcataaatctcttttataacccatatacacttaatta

SEQ ID NO: 84947 - DNA, 248 bp, Zea mays
  Clone ID: MRT4577_177480C.1
ggccgcaagctgacattgccgcgccgccccggcttccttcgtagcccgcgtgggggtccgcactctggcgagagcgagagtatggacaccagtgaagcctgctttgcgggcacgcgaagggaaggaccggctccaggggtcaggttacccaaagtagactgatgttacttggatgacccgaaccgtgttatcatgaggaacgggggggaggccggtgcaagtggctaacatactcccactgttgcgcg

SEQ ID NO: 84948 - DNA, 379 bp, Zea mays
  Clone ID: MRT4577_177481C.1
gcaagaagtggtggctgccacctcctgtcgtgcacatcgtttgttggaatgggagatgtggcggatcaagaagctttcgaatgggtacgtggtgtgcctaaaatagtgaaggccctctgcattatcctcaggctttctgacgatctcaagtcatatgagcgagagaaaatgaactcgcatgttgcttcgacgatggaaagctgcatgaaagagcaccaagtcccactcgaagtggcacgcgtgaagatccaagaaacgatagatgaaacctggaaggatttcaacgaggaatggctgaacttgaacacaaacagtcacctgccgagggagttgctcgagaggatcttcaacctgacaagaacaatggtgtatatatacc

SEQ ID NO: 84949 - DNA, 174 bp, Zea mays
  Clone ID: MRT4577_177482C.1
caacactaaaaaccaagtaggcatcaggtcaatgactcgatagtgcacacaacaactcatgatgtcatcgcagttccgacatcacgcacgcacacgaagcgctggctgcacaacggaacggagatgtatacatgtgggctcgcacgacccacccggccaccggataagtaaccg

SEQ ID NO: 84950 - DNA, 226 bp, Zea mays
  Clone ID: MRT4577_177483C.1
ggacctggtgagacgccacaaacacttacatgcatagttcaaaatttaatgaatcgcgttcccatttaataatagctcgtgcgctaagcctgacacacgcacatccatcatataatttttgaaaataaatacataaataaattttaacatactctcttgatgttttctgcaatgctgcaaggcttgcaagtaagaaatgctattcaattcagagtggttcctatgt

SEQ ID NO: 84951 - DNA, 838 bp, Zea mays
  Clone ID: MRT4577_177484C.1
ttgggtacctcgaggccggccggggcgtcactgcttacctaacccgacccgaccagaaaccaccgcgcactgacgccgcccggctccgtctccggctcccgctcccgctcgaggtcgaggcccacgcagcaatctggtcttctggaaatctccatcaatccgattccgaacggcagaaaattttcccttcccccggccaccaaccaaccaaacccgagcaaccagcctgagccacctcccatgcgccgcgccgcagcctgaggaggaggaggacgcggtggtctggagagggatggagggcgggtcatcgctgccgcccttcctgagcaagacgtacgagatggtggacgacccggccacggacgccgtggtggcgtggacgccgctggggaccagcttcgtcgtcgccaaccaggccgagttctgcagggatctgctccccaagtacttcaagcacaacaacttctccagcttcgtgcggcaactgaacacctacggctttaagaaaattgatcctgaacaatgggagtttgcaaatgatgatttcattaggggacaacagcaccgactgaaaaatatacacaggcgtaagcctatattcagccattcatcgcatactcagggttctggaccattaccagataccgaaaggagggattatgaggaggaaatcgaaaggcttaagtgtgacaatgcagctctgacctcagagcttgaaaagaatgcacagaagaaacttgttacagagaaacgaatgcaggagctagaagataagttgatctttttggaggatcggcagaaaaatctgatggcgtatgtcagggatattggacaggca

SEQ ID NO: 84952 - DNA, 2390 bp, Zea mays
  Clone ID: MRT4577_177485C.1
gcccacgcagcaatctggtcttctggaaatctccatcaatccgattccgaacggcagaaaattttcccttcccccggccaccaaccaaccaaacccgagcaaccagcctgagccacctcccatgcgccgcgccgcagcctgaggaggaggaggaggacgcggtggtctggagagggatggagggcgcgtcctcgctgccgcccttcctgagcaagacgtacgagatggtggacgacccggccacggacgccgtggtggcgtggacgccgctggggaccagcttcgtcgtcgcgaaccaggccgagttctggagggatctgctccccaagtacttcaagcacaacaacttctccagcttcgtgcggcaactgaacacctacgtaagcccccaccgcacagcacgatcattcattttcttcgccccatctccctctctgtccacctgtggttttgatcaatcggggtgcgtggcggcgtgctactgtcagctatgctgttgcccctttgcaaaactccacaagttggcatttatggggcgaatcttgttagccttgtagtagaacaattgtttagggtatcgtcttcggtcgaatgaactgtttccttgttatagcatagcgtgttgacaacttggcgataactttaaattacatgtgtccactatatatctagtatatatgctcaattatcttgttgagatgtttttccttttctaaatccaactagagttagtgtaccttttgacaaatgaagtgctgctaacggtaaacactgttgaattggcatctttgttgacacccaaattaaatccaatagaaaccataatgatttcggatggttacttttgatttatgagccttgatgggtcaaatttctgtgatgttgtgttaatcgttttcctgcttcttcttatgtagggctttaagaaaattgatcctgaacaatgggagtttgcaaatgatgatttcattaggggacaacagcaccgactgaaaaatatacacaggcgtaagcctatattcagccattcatcgcatactcagggttctggaccattaccagataccgaaaggagggattatgaggaggaaatcgaaaggcttaagtgtgacaatgcagctctgacctcagagcttgaaaagaatgcacagaagaaacttgttacagagaaacgaatgcaggatctagaagataagttgatctttttggaggatcggcagaagaatctgatggcgtatgtcagggatattgtacaggcaccaggatctttctctagctttgtgcagcaacctgatcatcacggaaagaaaaggagactaccagtacctatctctctctaccaagattctaatgctaaggggaaccaggttgtgcatgggggcttcatcaccaacccaccagcttgcagggaatcatttgacaagacggaatcttcattgaactcgttggagaatttccttcgggaagcgagtgaagcgttcaatatttcatatgatgatggcctccctggccttcatctgctgtcgttatcacagagctccattcgtccggagaaagtgatccccatgtgccatcacctgtctcaagaatgcatacatcttcggctggtgcgggagattcgctctcttcccgcgatttaacagagtcaactagctgcgctgagagccctcgcctccctcagatccaaccctgtacagattcacgaactaaggtgtctgagatcgatgtcaatcgggagcctgctgtcacagaaactggtccgacaagggaccaacctgccgaggagcctccccacgtagcagctggggtgaacgatggcttctggcagcagttcctcaccgagcagcccggtcctgatgtacaccaggaggcccaatcagaaaggagagatggcgatgatgataagggcgatcagacgaggataggggaccgagaaaatttttggtgggggaagaagaatgttgagcagatgagagagaagctggggcgtctcacctcggtggagaaaacctgactgtatttcttgtagctggaaaaaaaaagttagcacagaaacacatataggacgctggtgcctctgactgacatgtactttgcagtgtatcatatatcttcgccaccagatatgctgactgacatcgacctcgtagtcgtacttcttccacctgtacttttgccgagtttacagtgagatttagttgttgctatactttttttttcttttttcttttgagatggactagtcgctatacttctgttaggagttctgcattcgtacttggttagtagacacttcctggtactgttgtccaacgacgtggttatatatgtagatgatgataatattcacttcgttgttggatagtacaaaaaaaaaaaaaaaaaaaaaa

SEQ ID NO: 84953 - DNA, 1487 bp, Zea mays
  Clone ID: MRT4577_177486C.1
cattgtttttctcgtttctgaacagagctttcctcgataagaaaagaaaaaaaaaaaaggccggccaggggttgttcttcttcctaaataataaattctagggtttgcctcttccctctcggctctcgctcccaccaccaccaccaggcagacgcagatcggcggcgggataggctagcaatgatccccaattccgacttcctctagactgcctggcggtcgaattccgattcgattggagtagggaacgagaagggaacaaatacaccggcaccaccaccagaccagacagcacgtgcctccatactatggtttacgccccgtgccgctcatcgacgccgccgtcttcctcgccgatgctccacaagaacctccgcgccctcggacccggcttgaatcccttggctcccttcggcatgggcaactactcccgctagccgtttcctcctatccctctttctccgattccgatctctgagtgcttccgcctccgcccccggccgcttcctccatcggaaccgatccccgctattttactcccgttcgtttcattgttccgttgctttggatctgagtctcgagatcctcccctgtcctgctgctcgaggagccgccaaggataccaaaataccatggtgcaggtgcgcaggtcgctcagcatgagccgccttcggagctgccacgacgcggacgaccgtggctggaacccgctccatgttgctgctcgcaagggagacctcaaggaggtccgacgtctcctggatgagggggggatggatgtgaatgcacctgcatggggaccaaaatgtcctggtgctaccccactccatctggctgctcagggtgggcatgttaaaatcatggatgaactactggagcgtggtgccaatattgatgctcgaacaaaaggggcatgcggctggactcctctacacattgctgccaaggaaaggaacaagaaggctgtgagattcctgattgagaatggagcattccttcctcctgagatgaatgaccataggttcaatccccccctccattactgctctgggttagaatgggcgtatgagatgaagcgcatgcaggatgaaagcgattcgcctggcgaaacttcgttgagctcggataactagagagaaagcagcaggtgcatgcagcttgagaacgatgaagttaagtcaagtcattgagtacatttgcttgatgtctggatgatggagatgttctgttctgtgactttagaataattgttgagtggtacctgtaatatacgacgagtgatttgttgaataataatcatacactagtgtatagcgcgcacatgcgcgcatgccgttctgtggtgtaaaatcttgttataagcatgtataacttgatattgtatcgtgaacatgcatatatgcagagtagtcattattgagacaagaaaaaaaaaaaaaaaaaagcggccaaaaaaaaaaaaaaaaatcgaagcaatagcgtccagc

SEQ ID NO: 84954 - DNA, 408 bp, Zea mays
  Clone ID: MRT4577_177487C.1
ggctctcctacccttgtgcggctacctaaacagtttaggttttcacgctggccgtggcatttgttctgcaccgagttgtgtcttcctgcatgactctggctgatgcgtatggcggcatgaactgtcggaagtatatgacgtattgacaggaatcctggaggactaccagactgctttggaagtgtagtagtgctcgtttgacgttggtgctgtggttcgttccacgtaccgtgtatactgatttgatacattcatatctcaggcgatgaaagaattctgaccgcgctattatccgtatgctttggtgtctcaatcgttatggcctaaagcggcattgcgccagcatttacggaggaggtcgctcgagctgtaaacattgtacatggcgtgcataccacaggaatacat

SEQ ID NO: 84955 - DNA, 234 bp, Zea mays
  Clone ID: MRT4577_177488C.1
attcaatttctcagtatcacagttgcagaagatgctcatatctatgtagtatgcctttccattttctgtactgtccttgcactgttgacaatgttcatgtgattttttttatctggataaacataggacggcacttatttcttaatgtggattgttacggttttagtttttccctaataaataataaattaattattgttatcgttttcattttgacataggcactaaggagaa

SEQ ID NO: 84956 - DNA, 582 bp, Zea mays
  Clone ID: MRT4577_177489C.1
ggaattccccagggtccacttcgctcgcaaccttccccagccatggcgaccgcgacgcggaggctgctccccgcgctcctcaagaccctagctccagccggcgcgcgcggcctctccaccgagaaggctgttggtgcagccgccgtcgtcggcagccacaccgctaagtggatgcaggacacgagcaagaagtcgccaatggaattgatctggaggcacctaatgtgtgcaaatactgtggtctccgttatgttcaagttcaccatcactaaattgggaagatactgtcgtctaccgctgcagaagctgagttgaggagtttatatgcacacacatttgttccacaatgttctgtagtgtactttgtactatgcttgcgggcaaagtattacctttgatgatcatcctcttctcgggcgatcttttattaatcctgtcttagtatgggttcatttttctacagatgaattgtgctcctttttcagaatatatacaagctgtgtgtattgaacttttactctgaataagcatggaactaattctgagggcagaaaaaaaaaaaaaaaaaaggcccctagggcc

SEQ ID NO: 84957 - DNA, 1417 bp, Zea mays
  Clone ID: MRT4577_17748C.1
gccgcgcgcccggccaaaacccttacgcgcgacgcggccccctcctcttcttctctctcccaccaccgccctccccttgccatttttggtgagtgccccctttcccttccctagaccagatcctcgccccgttttccacttttgcctccaccgcccggcccaattcggataacaagctccctccgcctcgccgcgtctcctcccagccgcaggagccgccgccatccgatccggaagagggaggaggggggagggaggaggatctgtgtcccgattcgattggagctctcgtccccggcggtccaggatggtgcggggcaagacgcagatgaagcggatagagaacccggccagtcgccaggtcaccttctccaagcgccgcaacggcctgctcaagaaggcgttcgagctctccgtcctctgcgacgccgaggtcgcgctcgtcgtcttctccccgcgcggcaagctctacgaattcgccagcggaagtgcccagaaaacaattgaacgttatagaacatacacaaaggataatgtcagcaacaagacagcacatcaggacattgagcaagtaaaagctgatgctgagggcctggcaaagaaactggaagcacttgaagcttacaaaagaaaacttttgggtgagaggttggaagaatgctcctttgaagaactgcacagtttggaagtgaaactcgaaaagagccttcattgcatcaggggaagaaagactcagctgctggaggagcaactccataagctgaaggagaaggagatgaatctgcgcaagagcaacgaagatttacgtgaaaagtgcaagaagcagccgccgccgccgccgcctatgctgatggctcctccgccgcctccagcgccggcagccatcgatcacacggggccgaaggatgtcgggatggacgtggagacggagctgtacataggattgcccggcagagattaccgctcaaacaacaaagacatgactgcacagtagctgtcaggtcaggtcaggtcaggctagccagcagtgcagagaataatcttagatctgtggtgcggagaactggagatgcaagccaagcccaagccaatcaacatgataaggatcatgagtgtcgcgtcgtgttttacaaacctgtccaccgtccgtcaaaggcacatgcgccagaacgtccgtcagagaacacttaccccctcatctccctctattagctagctgctccggcctgctcatgtcgaaaccttctgttcaagtatgttctcctcctgatgaattccctgcccggcatgcattggtgagcttcttctcgagaagaagtgggtggggtggggacactgtcgttcatatttggcaacacaggtggctgctccggcctgctcatgtcgaaaccttctgttcaagtatgttctcctcctg

SEQ ID NO: 84958 - DNA, 559 bp, Zea mays
  Clone ID: MRT4577_177490C.1
ggaccaaatggactactttttttcttttacatttcagaaagccattcacgccattgattacactggactctgccacccacggtgaggcgagacacattactactcaatcatcggcgctaagagactcaactatctaactaaccagcggctatactacatcacatagcaccttcactggggcacaccgccggccttagcgtcagggcatggaatcagctgcttcaggccgcacatccacgaactgagctgagctatttgagccgacaacagccccgaaaactgtccgctttgcggttggtgctgcaagacggactggaggaccaatccgaacatcgcctgttaccggggctgcggctccacctacctgagctggtggcaacactgctgccgcaacgactggcactgaggcgagcattagggcgtaccacgtcgggctgcactgatgcctcaggaactcgacgcactggcccaggatcggggtgctgccaacgccacaggttccctgcagctggcacgggcttggatgcagctgtaggcacgggcatgggtgcggctgggg

SEQ ID NO: 84959 - DNA, 288 bp, Zea mays
  Clone ID: MRT4577_177491C.1
gctgaagacccatttccagaggaggtcttccctgcagtgcaaggcaaaaccaagaggccgtaggacctgaagatcaagaacttggccccgggttcggtgctcccgcgggcactggttctcaaagccttctccagcagctcgctggacgcgtcctctgacagctcgcccgtggcttctccttccagtcccaaaagaaatttcttcagcagacatcagtctttcaccacatagacagagaaaggcaagcccagccgagaaattaaaaagcactccatgtctttcaccttt

SEQ ID NO: 84960 - DNA, 762 bp, Zea mays
  Clone ID: MRT4577_177492C.1
ccggccggggtctttctctttgttctttcccgaattccccagggtccacttcgctcgcaaccttccccagccccagccatggcgaccgcgacgcggaggctgctccccgcgctcctcaagaccctagcaccagccggcgcgcgcggcctctccaccgagaaggctgttggtgcagccgccgtcgtcggcagccacaccgctaagtggatgcaggacacgagcaagaagtcgccaatggaactgatcaacgaggtacctccgatcaaggttgatggtcgcattgccgtctgtgaaggggcttctgaaggtgttggacttggccacccaatcgagtacatctgccttgatctggaggcacctaatgtgtgcaagtactgtggtctccgttatgttcaagttcaccatcactaaattgggaagatactgctgtctaccgctgcagaagctgagttgaggagtttatgtgcacacgcatttgttccacaatgttctgtagcgtactttgtactatgcttgcgggcaaaatattacctttgatgatcatcctcttctcgggcgatcttttattaatcctgtcttagtatggtcatttttctacagatgaattgtgctcctttttcagaatctatacaagctgtgtattgaagttttactctgaataagcatggaactaactctgagggcaatttaatctcagaagttctagttttctggaaaaaaaaaaaaaaaaaaagaaaaaaatcggcgctccagctttttgtt

SEQ ID NO: 84961 - DNA, 1056 bp, Zea mays
  Clone ID: MRT4577_177493C.1
tcgagagccccacgtaactctgaggccggggccgcgcccgaattccccagggtccacttcgctcgcaaccttccccagccatggcgaccgcgacgcggaggctgctccccgcgctcctcaagaccctagctccagccggcgcgcgcggcctctccaccgagaaggctgttggtgcagccgccgtcgtcggcagccacaccgctaagtggatgcaggacacgagcaagaagtcgccaatggaactgatcaacgaggtacctccgatcaaggttgatggtcgcattgccgtctgtgaaggggcttctgaaggtgttggacttggccacccaattgagtacatctgccttgatctggaggcacctaatgtgtgcaagtactgtggtctccgttatgttcaagttcaccatcactaaattgggaagatactgccgtctaccgctgcagaagctgagttgaggagtttatgtgcacacacatttgttccacaatgttctgtagtgtactttgtactatgcttgcgggcaaaatattacctttgatgatcatcctcttctcgggcgatcgtttattaatcctgtcttagtatggttcatttttctacagatgaattgtgctcctttttcagaatctatacaagctgtgtgtattgaagttttactctaaataagcatggaactaacgagggcaatttaatctcagaaaaactagctttctggagttcaaaaaaaaaaaaaagtctacccctcgaaaattgagaagataatgctgtccacccctgcaaaagctgagttgaggagtttatgtgcacacacatttgttccccaatgttctggagcggactttgaactatgcttgcgggcaaaatattacctttgatgatcatcctcttctcgggcgatcttttattaatcctgtcttagtatggttcattttccccaccgaatgaattgtgctccttttcagaatctaaacaagctgtgtgtattgaagttttactctgaataagcatggaactaactctaaggcaatttaatctcagaagttctagttttctgg

SEQ ID NO: 84962 - DNA, 1180 bp, Zea mays
  Clone ID: MRT4577_177494C.1
ggtaccctccggggccggccggggagcggtgcccacggcccattgccacaagcccacaaccgacggggagagagcgaaaaacggggcgaccgagctagctcgccgtcgtttccggctcccctccctcctcccataccgttgccctacccccactaccgcgccccgcggccccgccgggtcctcctccctccgctcgctcggaaccagaggcctcgcgacgtctcgcgccatgcgggctcgcgatctccggccgggcacttcgctcgcaaccttccccagccccagccatggcgaccgcgacgcggaggctgctccccgcgctcctcaagaccctagctccagccggcgcgcgcggcctctccaccgagaaggctgttggtgcagccgccgtcgtcggcagccacaccgctaagtggatgcagtgacttgcagttctggcagacacagcttctatatgatattttgtttatcgtgccttgtccacctagctatgtgccttcaaggagctggaaatggagtcaatggtttttttccctgcagtacctataagcttaacatgtagtgggtgcacttttaggacacgagcaagaagtcgccaatggaactgatcaacgaggtacctccaatcaaggttgatggtcgcattgccgtctgtgaaggggcttctgaaggtgttggacttggccacccaatcgagtacatctgccttgatctggaggcacctaatgtgtgcaagtactgtggtctccgttatgttcaagttcaccatcactaaattgagaagataatgctgtctaccgctgcagaagctgagttgaggagtttatgtgcacacacatttgttccacaatgttctgtagcgtactttgaactatgcttgcgggcaaaatattacctttgatgatcatcctcttctcgggcgatcttttattaatcctgtcttagtatggttcatttttctacagatgaattgtgctcctttttcagaatctatacaagctgtgtgtattgaagttttactctgaataagcatggaactaactctaaggcaatttaatctcagaagttctagttttctggagtaaaaaaaaaaaaaagaaaaaaaaaaaaaaaagaaaaaaaaaactggccctcgtggccgcgagttccgtgcttcctttaattcagattttttcaagcc

SEQ ID NO: 84963 - DNA, 564 bp, Zea mays
  unsure (1)..(564): unsure at all n locations
  Clone ID: MRT4577_177495C.1
gcactaccactttatgntctatattatatatatgtccatgcatgcaatgcatctcgtcgtctatcgcatgttgttgttgttgttgttgtttttcgatgatcctgtctctgttataaatatcattattattacagtnaaaacaaaaaaaaaaaaaaaaaaaaaaaaaaaaaaaaaaaaaaaaaaaaaaaaaaaaaaaaaaaaaaaaaaaaaggttttttctccaggagcccccaatccgaaccgccgacggggtaatttgggccgccaaaaaatccctccgcctgccaaaaaggcccggaaccgtttgattaccgaacggggaaaccacggaacccttcgggaacacctcgccgttgccattgccaaatagtgctccaaaaaggtacaaaaagctcgttataaaaaacaaaagggatcacggcgcaagaaaaaaaaaaaggaatggaaaatgtggaagcggcgaaaaaaaaagcgccttttaaaaaggaggcccacacggataaggaaaacggattaccggagcgaaaaataaccgcatctttttcctcccgggaataatttttc

SEQ ID NO: 84964 - DNA, 266 bp, Zea mays
  Clone ID: MRT4577_177496C.1
acctgatgttggaggactgcacgaccgcactcaccacacccaagaagggctctatcatcggctgtccaggcattctatcgtgcctgctgatgactagacggaccctgctgatgctactctcttagcgcctgttgacgctaccactgagccgacacgggagatctctaagcttggtgtttatgctgctggcaccccactgggttacacattaagactgctctctccccacctgctggaggaggatcatgtcaatactgctcgaggtg

SEQ ID NO: 84965 - DNA, 393 bp, Zea mays
  Clone ID: MRT4577_177497C.1
gtgggtgtaatcctttactacctttctgggacatcactacccaccaaataggtctggaatttttaagctgaaatgcacatttatttggcgtacttatcaaacttacatgaaaaaggtcgttaatactttttaaaccaaatgctccccgtacacaacctttttttacttatgaacaccgcccgttttttcccggcaaaaatcaacaagctttactggagaatataacctggactcctaaaaaaatgcaacaaatacacgggaatgctgggaatttttgacaaccatgtgaagggggggctgatatatttcatttgtgcaaaaccttaagatgtaaaccatctttcaaacaaaggttcctggaattagagttgcatttttccacttaccaaaaca

SEQ ID NO: 84966 - DNA, 136 bp, Zea mays
  unsure (1)..(136): unsure at all n locations
  Clone ID: MRT4577_177498C.1
gcactgcactctactgctcaggtcggnaggtttctgtgccgactgccgagcgagaacgagaagacatgaggaagccaaaaggagaaccgagttcgggagggagcggntggntttggttttttctntgttttttttt

SEQ ID NO: 84967 - DNA, 575 bp, Zea mays
  Clone ID: MRT4577_177499C.1
ccggccggggtcaccatccgctccttgagttgctcgctggcccagtaaagatatatctatctatcggcatcgagcaattataatctcacagaataataaaaatgatggggcaaggctcacggctcgtcctgcctcgccggcgcggcgctgctggccgtcggtctcctcccgcaagcgctgaggaaaggtacgggaggcaggtgacacggtggcgccgtcaacccgcaggtcgacggcatctgatatcacaccccgataccggaggagggcacgttcaccaccggggggtacgcgcccaagatacccggtcatcgacaacctgtgcgtggtgaacatgcaagaggacgggatcgccgagcgcaccgcgcatgagggcaagctcgtcatgaagtcggtgctgaccatcccgacgcaggagaagcatgcggtcacgttctagctgacaccatgtacatgaacacacaggacaacatacgagcggcgcagcgggacatcaagttcaaagacaccgataccgtcaagatcatgctgcagctcgccgactaggacgtcgactcgagagaccgccccttgac

SEQ ID NO: 84968 - DNA, 387 bp, Zea mays
  Clone ID: MRT4577_1774C.1
gggaaaccaaacaacattcactttggcgggggttggggtaaatcccccgggggggaaaaaaaccatgtttttgttcttcgggcccccccccccccccccgggtgggcacctgccctttgcccttttttgtaccctgggcggggggtttgtgaatgtaagaacccccccccctggtcccttttttttaccaaaccggggggtgggtgggcctatgaaaattccttttgtcaacaagtgtacctttaaacatgggcagggtcccaacccttgtttgggaacccccccggaccccccttggttgttttcgggtcccccccccttcaaggtccacatacacttggagttttttggtttcgcaaaaaaccaaatttttttttttgggggggt

SEQ ID NO: 84969 - DNA, 652 bp, Zea mays
  unsure (1)..(652): unsure at all n locations
  Clone ID: MRT4577_177500C.1
ccgggacacacacacacaagacacaacacaactcgtaggcggggagggtcgctcctcttcctctccccggcagggcgccaagggagacagagagagatcgccgctcctcttctctgcgtggggggggcgggtgaccgccctcctggagcgagatctcgctgcactccctcgagatctgggcacagatctatccgacaagatggggaanatctgcggcgtcggggctggctatgtggggggcccaaccatgggtgtgattgcgctaaagtgcccanacattgaggtgtgggttgttgacatctccaanccccgcgtggaggcgtgggacagggacaccctcccgatctacgagcccggcctcnatgatgtggtgaagcagtgcaggggcaggaacctcttcttcagcactgaggtggagaancacggcgctgaggctgacatcatcttcggctcggggaacacccccaccaanacccgtgggcttnganctggcaaggctgccgacctcacctactgngagagcgcggctcggatgatcgccgatgtctccaaggctgacaagatcggtggcgagaaggccaccggccctggcaagacccggggggctattgagaagatcttgacccacaacaggaggggcatcaactaccag

SEQ ID NO: 84970 - DNA, 479 bp, Zea mays
  Clone ID: MRT4577_177501C.1
ctttctttaacataactttttcattaaaatagttgtatgtgcttggtacaaaaccttggaaaatacagaaatgtaatggaaaaaggaagaagaaaaactaccatccattattttctgtccctccctcctcaatctccaggaggattacaattaaccacagttttccctttatttttcagagttgggattctccagtatgaatatttttgctctgatttttaaaattaatatagcttacacttttcccaagacatactaaactgctctcaaatattttagtggctacatcatatgtaattgagttaatctactacaattttgttaatcatttccttgttgtttggatgttaattgttaattttttctttttttttttagtcttaaacctgtgtgatcatcatagtgccctcgtgaggacgtaaaccaaaaagtgagctccacgagcccgaaatcaactccggacccgtatggagcaggag

SEQ ID NO: 84971 - DNA, 419 bp, Zea mays
  unsure (1)..(419): unsure at all n locations
  Clone ID: MRT4577_177502C.1
tttttcaaaaaaaaaaatgaggggatcaaatagnaggcacgctacgttggtagaaagtgtagcatgccaacattcctacttcaccgtccaatccaatcccatccacccaccagttcgaagcggaggcgaccggcaacctgcggcggtgatgtcaggcaggggcaagggcggtaagggggggggggggggcggcgcgaagcgtcaccggaaggtgctgcgcgacaacatacaggggatcacgaagccggggatccggaggctggcgaggaggggtggagtgaagcgcatctccgggctgatctacgaggagacccgtggagtgcttaagatctttctgaagaatgggatgcgagactctgtgacctatatggaggacgatcgttgtaaaaacgtgagtgatatggatgaagtgtgggggt

SEQ ID NO: 84972 - DNA, 539 bp, Zea mays
  Clone ID: MRT4577_177503C.1
aattataacctttttgtcatatttttttccacaaaacacaaagatcagctgtcatgtatacattgacaacacattcaagggatcacaatttgccaatccaaacttttttacgcgtgagacagaacatacccaacatggtaggcatgtcaaactgtgaacctctccacacagaggagccttgacggggccaaactttgtgaaaagttccaacttccgctcacgccatgtgcttgcacaaggaacaaaaactggcctgaccccaaccttgtctacggcccttcagttcttgcaatgcaatgacacaagcccacttaacaacctttgctccaacacttttaataagtttgacaactgcacataaagtacacacccgtagcaataagaccatcgattacaatagcccggtcggtcctctgttcagatccaacatgcatttctatcctggcagtttcatattccaaaaaatactcttaggcgatcacctttgctggcaacttttatcttttccttaaaagcacaaaatttgcgccaatggctaa

SEQ ID NO: 84973 - DNA, 416 bp, Zea mays
  Clone ID: MRT4577_177504C.1
ggcgtactcccccgcctacgcctgcaacaaaaaacttgccaaacgcctgaacgaaggaggaggggcgagacatcgcaaaggagctcttaatgacctcctcgacggcacttcatcatccaaagcgaacaagaacgacgacgaggagcactccgccagcaccgctggactcttcatcttcaacctctccgtcggcacatcctccccgcagagcatgcccggcatcctggacatcgccagccagctcgtttggtggcagctagtgcgcgccctgcagcaacgccggcgactgccttccggcgcccatcttcctgcccaacagctcggccaccttcgcgcgcctttccctggggtgaccagaagtgcaagctgctcagcgagaccttgccctgcgacgaggacacctgcgattacatagc

SEQ ID NO: 84974 - DNA, 327 bp, Zea mays
  Clone ID: MRT4577_177505C.1
catcgtaatcaccttggacattttaccaaaacctctggctcctcataatacttgctggtatcattacaatctcgtagttttacttgttgggcttgacttcctactatttataaacacaatacccagaagtctttatgtggtgtcaaacatagttttcactaaaatttcataatcgcctttccactagctacctcatatttttgaaacgcaacttgtgactttacccaaatgaaattaatcatatctccattgcatactccccccataaatattcccaaaatttctttaaagattgattttatcatcaataagcctcataatatccac

SEQ ID NO: 84975 - DNA, 258 bp, Zea mays
  Clone ID: MRT4577_177506C.1
ttctatatcgatagcgagcggtctatatgaaccaaggatacttacgcacgcatgcatcctaattcctattttatagattgacctaaattaaattaactgaccggccgtttacaaccaacggactgactaaacaatgccggtacccaacttaattaatttgcttgacatacatctttcttcagctagcttaattaataacaaacaggcaccgatcgatcttccttacaaacaggcaccctgaatgaataatgaaacgca

SEQ ID NO: 84976 - DNA, 194 bp, Zea mays
  Clone ID: MRT4577_177507C.1
gcttggacaaaccggcaaaattttcaacaggcaaaacaaggtattcttcagagggggggaaacgcacgttgccacagtgacccctcaatcattgaaaatcccgtggccccaaggtatcaaaaaaaaatggattacccccggaaaatataaaagggccgttataaatactgtcacaggaaaaaaaaaattgaagg

SEQ ID NO: 84977 - DNA, 505 bp, Zea mays
  Clone ID: MRT4577_177508C.1
ggccgcttttttttttttttttttcttttttttttttttttttttttttttttttttttttttttttttttttttatattttttatttttcttaatggtccatttccacctttgtgctgtaaaggaagggggatgcagaaacgacacagcccccactaaccagaaagggaatcagcacacagacacggggggaatttgaacgcggcaaaaaaagacaactcccccactaggcggggcccgccgtgccacggaggacacgacgagaacccgttcacaaaagaaaaggagacctagcgacctatgccggggccatgccgagctgatgtcggggcagaggcaccagcgcgttacacgccaatcgccaggtgacaggctgacacaaccagcgagatcggccgacgaacgcggtgggctggactcacccaacagacggctcgacaaaaaacaaaaaaacaggggccgacgataaaaaaaagggcgctgcgaccacaggagtggcagcaac

SEQ ID NO: 84978 - DNA, 383 bp, Zea mays
  unsure (1)..(383): unsure at all n locations
  Clone ID: MRT4577_177509C.1
ttttnattatttttttctaattttttttatttttgggtgtttttttttttttttttggggggggcccacaaaaggcagaattgggaaataaggtttcccccttaattcctttaaaattccttaaaccccagttaaacctattacccacttttggttaaactgggttcgacatgacaaatttccacttttagattggtgcccgaagagatttttgtttgcaattggtggctaaaatatgcctccgggtaactccccttaaaaataacccaattttttttgggcttcattaagggagcagtattggcaagctacaatgtttttggcttggtcattttaaaacctatccccttatttggagggggggaatactggagcccgttttt

SEQ ID NO: 84979 - DNA, 222 bp, Zea mays
  Clone ID: MRT4577_17750C.1
tccccctgccacccttacgtaagctcggatttcggctctagcaattgtcgggttcttcacttatgaggaattgtttcagatcacaaatggcttctcatgacagaacctgctagggaaaggtgggttcgaatcattgtataagggttgcttggccgatgagacagaggtcccggttaaaaaacagaaagactgcggtggtctaggggaccgtgattcccatgc

SEQ ID NO: 84980 - DNA, 386 bp, Zea mays
  Clone ID: MRT4577_177510C.1
agcgcctccaccctcctggccgccttactccctctgaggtcgcagatccgtccggttagacgaagccgcccgcacccatggcctccggtgagctcgcctgcacctacgccgccctcatcctcagcgacgactgcatctccatcaccgacgagaagatcgccaccatcgtgaaggcggccaacatcaaggtcgagtcctactgaccggcgctcatcgctaagctcctggagaagcgcagtgctgtggatctaatcctctccgctgcatctggtagtggcgctgctgcagatgcacatacacgtggcattggtttgacgtccgcttcacaatatggtgattgacctaaaaaaactgccctgatgtggtgaatcacatcatctccattt

SEQ ID NO: 84981 - DNA, 332 bp, Zea mays
  Clone ID: MRT4577_177511C.1
gcgttatttttgacttccccaagccagggatcatgttccaggacattacgacgttgctgctcgatcccaaggcgtcccgtgacaccatggacctgtttgtcgagcggtacatgcaccaacggacacggtggttgctggtgttgaagcttgagggggcattttcggctctcctatcgctttagccatcggggcaaaatacgtgcctttgagggagccgagatggttgccaggcgaggtgatctactgagagaattcttcggaatgcgttgctggctggagactacagacgtgtcggatctgcacaggccatctgctcatcgtatagctgatgc

SEQ ID NO: 84982 - DNA, 633 bp, Zea mays
  unsure (1)..(633): unsure at all n locations
  Clone ID: MRT4577_177512C.1
aattcggcacgaggccccaaacaaaaccctaggccaccattctgaccaccaggcacaagcagagcagaagcagacatggccaccattccgaccaccgattctggcctcgtcctcagttcctccgctctcctccggaggactaggagggccgcctcatccgtcaccgccaggctgccagccgtcgcccgccgtcgcccgcagctcctcgtgcgtgcctccgccaaggagatcgcctttgaccagggctccagagccgcccttcaggccggcgtcgagaagctcgccgccgcggtcggcgtcaccctcggacccagaggtctattctttcctcttcatcttctctcgtgcccgtgccgtgccgctctgttctactttttttttaaaaaaaagagaatatctcttctctgctctctttctgaaaggagaatatctctgcttttaagaaggccaattcatttaagaggcagacatacacattgnggattccactcctgctcacagttcagaacaaaagattgggcanaccaactctncaaaccactctgcattgtctacataatgtcagaacaaggctcgttcaccggctcattcttactcatccactcaatcaagcnatggaccctctgctttcgt

SEQ ID NO: 84983 - DNA, 543 bp, Zea mays
  Clone ID: MRT4577_177513C.1
ggtttttgggggttttttaaatttttttttttttttttttttttttttttttttttttttttttttttttttttttttttttttttttttttttttttttttttttttgcaaaaccaaaaaacaccattttttccttaaaattaatttaggggagaggggggacaaaattaaaaaaatccatcgacccaaaatccaagctggttaaaacaagggtcttctggaccccaggataaaaaaaacactaaaaactgaaaaaaaacgacctttcaataaaaaacacaaatgggcaacaacaaaccaaaccaaccaaaataaaccctttgaactagggaaaaaatcacgggagcaaaaaaaaaaaattggccccccgggccccacccttaaattcctccaattcccctggaagttgcccaaaccccccccaccgttgccaccccccaaacccccaccaccaccaccgtaaccaccccccccacctaaacccccccccccaccccctaaacccccgcccccattaagggcccccccacccccgaaacccc

SEQ ID NO: 84984 - DNA, 2172 bp, Zea mays
  Clone ID: MRT4577_177514C.1
atggctggcgagaagaagactgtcgacccgatgttgtccgagttttacgaagctatggaaagaaccaatgcagaaaagattgcacatgagacactagctgggatatctgaaggttccagtgatagtgaagactttgatgtagaaagtgacaatgagggtgccgaagatcggcgctggagaccaagccatgttgtcttcaagaaatcaaccatcaagcaaggacaaattgatgcaatgaggggaaggtacttccgtgacatttctattgtgagggctggaggggaaaataatgtccctctgcccgaagctgacgaggtggtcgtttatagaagcttcatgaaagcagggcttcggtttcctttggataagatgctggtcgaagtcctgaaaactttcgaaatttaccttcaccagcttactcccgaagctatcatcaagatggggatctttatttgggccatgaggagccaagggttagaaccaaatgcaaaatgcttctgcaacatgcatgaattgtcttatgacacgaaggccaccggaaaagagcaatatcacaacaactttggttgctatggcttcgtaacccgctctgaggtgagcaacccagttccaacatttcgcaagagatggtcggggacctggatgcaggagtggttctatctgaaaaatgatctggttgaaagggaagacatcaaggggattatccaacgtcctatatggtctcacttcggcattaggaggccatcccttgcccttggtaatgacatacaagcatgccaagctgcttttaacacaccactcggaagtgggtgggagatgccgaaggaggctgctgctgggtctagccaaggtcgcttaatttacttgaagtatacgttcaaatacatgaaccaatttgatgagccaaacgacgactggctagatgccattgaagcaaccagtgatgaattgcttggtgcttattcaagggccgaagatgacgctatgacagtggccttcgagggtcgagacaaaaagaggctgaataggttttttgatgtcttcggaacaagccgaagagctaggactaaggaaatcggcagagcaaccgaaggctttgagtctgttgcaagagacggagctaccgaggtatcaaggattgctacaataacttcgaagaggaggaggatggccagcgtactagatgctgttatagaatctgtaaaggtatcgactcctgcctcagcacctgatgcagagggcgaagccctaaagaaatctagcgaagctagcatggtgcaggctactgttgaagctggaccgtcagtccctgctgaagcaagatcttcgggggctgctgaagaaggtaccaaaacaagaccttcggaggctaccgaagcaccattaatgttggaaaaagaaggtgctgctgaagaatctgaatctcttgcccccggagcgcctaccgaggaattggaattcataggcttaattctaagcaaggctttaaagggccaaaagaacaccgaagatgaaagatgccaattagctcttggaaatcttcgatcagagattatcacactaaggaatgaagctcttgagaaagacaaaatattgttctccttagtggacaaacttaaaacttgcaaagccaagcttagtgcccacgacgaagcccatagagttgaagtcgaagatttgaagaaaaaactttcagatatgaatgaagatttcaaagttgaaaaggctaagcaagaaataagtgaaatggaaagggccaggaaactgaaagatagctttgtaaaggtgggagcatactcttcggagcaaaaaattatctatggtgatcccgaaggggttatccagtggatcggcgaagaggccgaagcttttgaagaaatactcggcgatcgtggggacttctgtgccttcgccggtgcacgagggcttgcggcaattttagagaaggctggttgtgaacatgtcaaggccgtagcccaggcagaagctatcttctcagctggcgacaccaaagacccttcggccgaagcctctgtgctgggcgggaaattctacttcgatgtttggatgaagggcgaccgtgagatgtcctatgaagccattagaaagaacgaaaaagaatctcacgacgcccaagaagaggcaaagcatgctaaagaagttgcagaatga

SEQ ID NO: 84985 - DNA, 593 bp, Zea mays
  Clone ID: MRT4577_177515C.1
ccatctctaagagatatagagagattgttggctgagaagaggatagatagctagattgatatagctaggcagcagcagcatctcctccaaagattcaacacaagaggaagatcacaaggaagggatccaagatgcaagactgggcgccggtgttcatctcgctggtgctcttcatcctgctgtcgccgggcctgctgttccagatgccgggcaagtgccggatcattgagttcggcaacttccagaccagcgccatctccatcctcgtccacgccatcctcttcttcgccctcgccgctatcttcctcatcgccgtcggggtgcacatgtacctcggctcgtagctccatggatccatcggttactattagctagccacccacccagctcgttgatcatatgcctgcaattcctgtctgccgatgcatggtcgatcacctagcagcagctagctactagtatattactctctaagtatgcccgctctagttgaggcttctctttctccatacatgtattgatcataataatgcaagtatcatccaatgtttctttctgtcttctaattcataaatgaattcagttcttctgtt

SEQ ID NO: 84986 - DNA, 622 bp, Zea mays
  Clone ID: MRT4577_177516C.1
gaaagagcagagccagcaggtgaaatctgagccctccgagaatgaagctgtgaatgtatctggccttagccactcttctacaaatccttgcaaaggtttattttcatatagcttgaaattttcaatggatttaaattacacgccttctttgcagtattcaattttttgtttgatcgcaggcggcgaacctatcgaagaggatgtggacatctgtggcaattcctcacctatcatgctagacaaagatgcacaaatcaggaatagcaagtgtggtagtccaagtagttccagcagcgactctgaatcatcttctagcggtctgtgtctcatggtgtttatctgcatctctttatatcattatagacaattcttgtgtaaagaaagtgatgcttttcttcccagttttgtattgtaaattctttgagaacatggatattatctcttcatgtgtttaaaaaaaaaaaaaaaaaaaaaaaaaaaaaaaaaaaaaaaaaaaaaaaaaaaaaaaaaaaaaaaaaaaaaaaaaaaaaaaaaaaaaaaaaaaaaatataaatatgggggggccccccactttttgacctttcccccccggatttaattccggccccgtcccctgggggct

SEQ ID NO: 84987 - DNA, 655 bp, Zea mays
  Clone ID: MRT4577_177517C.1
ctcgaggccggccggagagcgagggcgcgcattactctgcagcgcggacacgcccggcacggcaagccagccactcttctcgcgtgaagctgccaggacgagagagagaagaggaggattagcttagccattcttgcggctgggcaaggaaactgctgaagccactagccgtgaggaagtccagcatcgtgaggaagcagcagcaggggggcagtggccgggcgggatgacgggtagggaggccgtggcggcggaggcggagctggatcaggactcggcggcggcggcggcggcgcccgtgctgctgagcccgctcagcgagacgctgtggcgcgacagggcggcggcggcggcgggcggggtcctcgtcggggacgtgtcggcgcgcctggcgtggcgcgacctgaccgtgaccgtcgcgctcggctccggcgacacgcaggccgtgctgcagggcctcacggggcacgccgagcccggcaccatcaccgcgctcatgggcccgtccggctccggcaagtccacgctgctcgacgcgctcgccggccgcctcgccgccaacgccttcctctccgggaccgtcctcctcaacgggcgcaaggccaacctctcctttcggggcgcggcctacgtgacgcaggacgacaccctgatc

SEQ ID NO: 84988 - DNA, 325 bp, Zea mays
  Clone ID: MRT4577_177518C.1
ctcaaccattcttctccttgtgatagattaggtgcgtccaagtttagttacagcgcatcaacaaagccggacagttttggccgaaaaatgtcaaagtgaaaacgacctttacccccagttacataccctaaaaccaagaattagcgggcagtggtccgaaatcccagaggctgcacttttcagcataactttaggaaaaatgtcttcccactccgaacaacagaatacacggtccagtcgcaccagagttgggtcgtccctctcattggaacaagtagacttacgccccactaacgataattccttgatctcgcaatcatcaata

SEQ ID NO: 84989 - DNA, 254 bp, Zea mays
  Clone ID: MRT4577_177519C.1
ggaaacatcttttttccttatatattattcctttccatttcaatggttcattcagggcattgctcacactgccacccatggagatggaggaccccccgcgctccttccctctatgtcgcctgtggcaaatgctgccattcaaccaacttgcttcgccacccctctcagggcgatccctgcacctcctcatcgcactggccgtcggttacacctgcctctagaggtccctgttttccctataccgatagctcttg

SEQ ID NO: 84990 - DNA, 715 bp, Zea mays
  Clone ID: MRT4577_17751C.1
tccgcgccacgccgtgcgcccgcggcgcggcactgtacaccctggcgcgtcacgccgcgggcgtcacgctagcgttcctgccggaccttctggctgagacactggtctactccgtgtgcacatacttacatagtggggctctgctcaagagcgggcgcccgggcgcgtcgttcgtgctgttggtgtgggcggtggtgctacggggggccatgaccgtgctgaagcaagcgctcgttcgcgccaacctacatcgcgggcatgtccctcgtatccgtgtcgctggccgggttcttcctcttctccggctacttcctgtcgcgggggagcatgccgtcgtactgggtgttcatgctctacgggcagccctacaagtacccgctggacgcgctgctggcgaacgagtacacttgcgcggggaaccggtgcttcggtgtgggcggcggcagcgagtgctcgcagacggggctcgacgtgctggtggagaaggggctgacggcggaggagcggtggaccggcgtccaggttctgttcggcttcttccttctctaccgggtgctctactgggtggtgctcagccggcgagcgtccagggcgaagagatgatgagatcagaatcagatgaggtgaggtgagcagccggcgaacatcggatgctctcgcctccatgtactacgtacgcatgcaaacaagcttagccagctagcagaggtatgtc

SEQ ID NO: 84991 - DNA, 1260 bp, Zea mays
  unsure (1)..(1260): unsure at all n locations
  Clone ID: MRT4577_177520C.1
ccggccgaaaagaaatgccgacgatgaaggtgtcggtgctggcgctgtggtcggcggcggcggcgctgctgctggtgctggggtactacaagaagacctgcccgggcgtcgagaacgtggtcaagtaccacgtcgccaaggccatcaaggccaaccgcggcgccggcgccgcgctcgtccgcctcatcttccacgactgcttcgtcagggggtgcgacgcgtcggtgctgctggacccgacgccggcgaacccggagacggagaagacggcgccgatcaacatcgggctggcggcgttcgaggtgatcgacgagatcaaggctgcgctggaggagcggtgcccggggactgtgtcgtgcgcggacatcgtggtgtacgcggcccgggacgcgtcgagcctgctgagcaacgggcacgtccacttcgcggcgcccgcggggcggctggacggcgtggtgtcccgcgccgccgacgcgcagcgcgacctgccggactccaccttcaccgtgtccgagctgatccgcaacttccggcgcaagaacttcacggtggaggagctggtgatcctgtcgggcgcgcacgccgtcggcgtcggccactgctcctcgttccgcgcgcgcctgtcggcgccgccggcgcagatcgtgccggcgtaccggaacctgctgtcgggcaagtgcgcggcggcggagggcggcgccgacgaccccgtggtggccaacaacgtgcgcgacgaggacccgcgcgccgtcgcggcggccttcccgtccttcctcgggaagctgcgcaaggccagggactttctggacaacagctactaccacaacaacctggcaaggatcgtcaccttcaactccgactggcagctgctcacggagaaggaggcgctggggcacgtcaaggagtacgccgagaacggcaccctctgggacgaggacttctccgacgcgctcctcaagctcagccggctgcccatgccgccgcacagcaagggcgagatcaggaagacgtgccgctgggtcaaccaccactgatcctccatccatggattctctcctgtcctgcactgcatctgcactgcaccccggaggccgggaatataccagatgggtcttcacgccgatttgtttcgatcttctttcattttgttgctgtttgtttgtttgatgattatctgatgatatgcatgtgtttttttatgcggttgatctcttggtgnatcttggtctttcctggatggactatgggcaacagtaaata

SEQ ID NO: 84992 - DNA, 436 bp, Zea mays
  Clone ID: MRT4577_177521C.1
ccagggactttttggacaacagctactaccacaacaacctggcaaggatcgtcaccttcaactccgactggcagctgctcacggagaaggaggcgcttgggcacgtcaaggagtacgccgagaacggcaccctctgggacgaggacttctccgacgcgctcctcaagctcagccggctgcccatgccgccgcacagcaagggcgagatcaggaagacgtgccgctgggtcaaccgccactgaggccgggaatataccagatgggtcttcacgccgatttgtttcgatcttctttcattttgttgctgtatgtttgtttgattattatctgatgatatgcatgtgtttttttatgcggttgatctcttgttgtatcttgttctttcatgtatgtatggactatgggcaacagtaataaaacaaattaaacgttggag

SEQ ID NO: 84993 - DNA, 408 bp, Zea mays
  Clone ID: MRT4577_177522C.1
ctcgaacacgcaggagatctgcgtatcattccattaataggtagaagaaggtacaacacataacaacacaacacacacatgacacgacacacacatgacacaacacgatacaagacgcaacacagcaaccgcacacaaccactctgaacaagacactagactatccccctgggtcaagcataaacataagagttgaaagcaggttgaaccctctcgccccggcactacaccacatcctgagctcatcaccagcgagggtgagagcactcgccaggcacggcgacctcccattgaacacacagtcgttgcgatgacgccaaaggctccaagcgccaagaataactagagaattgaagcccgattgaagatacggggaatcttctccacagccctgctcaccagtcataa

SEQ ID NO: 84994 - DNA, 404 bp, Zea mays
  Clone ID: MRT4577_177523C.1
attccacacaaacaaacaccccgatgactccaaaatcaaaactgccagcccctcaccggctcctcgcatggctgctccgtgtgcagcaaccgcacactgcaccagcgagccgtcgacaccatcgaacctcatctgcattcgtggtcgctacgccctccgacgccaaggttctctggaggacatggttgttggagtgacttagccgtccatcttggggccgggttggacagtcgagtgggaccctacctcagctgaggaggagcgtgaggagtgatgggagaggcttccccatctctccatttatcgttagtttatttctgttgcatttcgaacaatgagtactacttttgctaaaactccgatgatgatggggggaatttaatactccctaaaaatttttttaa

SEQ ID NO: 84995 - DNA, 1464 bp, Zea mays
  Clone ID: MRT4577_177524C.1
gaccctccaggctggccgggaaaaggccccgggccacgcaacgacgccgccggccacacgcacactgccacacggagctagctagcttatcgatcctcttctcggccgcccgttaattaggtagccaacagtatctatccaggcatccagctaggtagccagccagcgaggagccgccgttgcttcctagctgcacctccgcgcgctgtctgcaggccagtcggtctcgatccccggccgggagaagaagacgacgccgacgatgaaggtgtcggagctggcgctgtggtcggcggcggcgctgctgctggtgctggtggcgcaggcgccgtcggcggcggagggctcccaccacggcggcgcgggcctcaagctggggtactacaagaagacctgcccgggcgtcgagaacgtggtcaagtaccacgtcgccaaggccatcaaggccaaccgcggcgccggcgccgcgctcgtccgcctcatcttccacgactgcttcgtcagggggtgcgacgcgtcggtgctgctggacccgacgccggcgaacccggagacggagaagacggcgccgatcaacatcgggctggcggcgttcgaggtgatcgacgagatcaaggctgcgctggaggagcggtgcccggggactgtgtcgtgcgcggacatcgtggtgtacgcggcccgggacgcgtcgagcctgctgagcaacgggcacgtccacttcgcggcgcccgcggggcggctggacggcgtggtgtcccgcgccgccgacgcgcagcgcgacctgccggactccaccttcaccgtgtccgagctgatccgcaacttccggcgcaagaacttcacggtggaggagctggtgatcctgtcgggcgcgcacgccgtcggcgtcggccactgctcctcgttccgcgcgcgcctgtcggcgccgccggcgcagatcgtgccggcgtaccggaacctgctgtcgggcaagtgcgcggcggcggcgggcggcgccgacgaccccgtggtggccaacaacgtgcgcgacgaggacccgcgcgccgtcgcggcggccttcccgtccttcctcgggaagctgcgcaaggccagggactttctggacaacagctactaccacaacaacctggcaaggatcgtcaccttcaactccgactggcaactgctcacggagaaggaggcgctggggcacgtcaaggagtacgccgagaacggcaccctctgggacgaggacttctccgacgcgctcctcaagctcagccggctgcccatgccgccgcacagcaagggcgagatcaggaagacgtgccgctgggtcaaccaccactgatcctgctcaagctctgcacccggccggacggaaatataccagatgggtcttcacgccgatttgtttcgatcttctttcattttgttgctgtatgtttgtttgattattatctgatgatatgcatgtgttttttt

SEQ ID NO: 84996 - DNA, 370 bp, Zea mays
  Clone ID: MRT4577_177525C.1
caagtgggtgattaattctataaataagattcggggacgatttattcggaaaggtagaaaggacgtaaatggtggcaattgccttgtgtcgtgggacattgtgacaaggcctttggatctcggtgggcttgggatttctaacctgctgtaccagagttgggctctgcaagctaaatggctatggctagaaaaaactgatcctaccaagccgtggtctggtttggacttgcctattcaacaaattgtcaaaagattctttactgcttctattgtttctctgattggtaatgggcataatactttattttacacagatcggtggttggatgggtcttgtatacaagattttgcccctgctgttcgagctaat

SEQ ID NO: 84997 - DNA, 1500 bp, Zea mays
  Clone ID: MRT4577_177526C.1
aacgcaacgccgccggccacacgcacactgccacacggagctagctagctgatcgatcctcctctcggccgcccgcccgttaattaggtagccgacagtatctatccagctaggtagccagccagcgaggagccgccgttgcttcctagctgcacctccgcccggccggccgaagaagacgccgacgatgaaggtgtcggtgctggcgctgtggtcggcggcggcggcgctgttgctggtggcgcaggcgccgtcggcggcggaggcctcccaccacggcggcgcgggcctcaagctggggtactacaagaagacctgcccgggcgtcgagaacgtggtcaagtaccacgtcgccaaggccatcaaggccaaccgcggcgccggcgccgcgctcgtccgcctcatcttccacgactgcttcgtcagggggtgcgacgcgtcggtgctgctggacccgacgccggcgaacccggagacggagaagacggcgccgatcaacatcgggctggcggcgttcgaggtgatcgacgagatcaaggcggcgctggaggagcggtgcccggggacggtgtcgtgcgcggacatcgtggtgtacgcggcccgggacgcgtcgagcctgctgagcaacgggcacgtccacttcgcggcgcccgcggggcggctggacggcgtggtgtcccgcgccgccgacgcgcagcgcgacctgccggactccaccttcaccgtgtccgagctgatccgcaacttccggcgcaagaacttcacggtggaggagctggtgatcctgtcgggcgcgcacgccgtcggcgtcggccactgctcctcgttccgcgcgcgcctgtcggcgccgccggcgcagatcgtgccggcgtaccggaacctgctgtcgggcaagtgcgcggcggcggcgggcggcgccgacgaccccgtggtggccaacaacgtgcgcgacgaggacccgcgcgccgtcgcggcggccttcccgtccttcctcgggaagctgcgcaaggccagggactttctggacaacagctactaccacaacaacctggcaaggatcgtcaccttcaactccgactggcaactgctcacggagaaggaggcgctggggcacgtcaaggagtacgccgagaacggcaccctctgggacgaggacttctccgacgcgctcctcaagctcagccggctgcccatgccgccgcacagcaagggcgagatcaggaagacgtgccgctgggtcaaccaccactgatcctgctcaagctctgcacccggccggacggaaatataccagatgggtcttcacgccgatttgtttcgatcttctttcattttgttgctgtatgtttgtttgattattatctgatgatatgcatgtgtttttttatgcggttgatctcttgttgtatcttgttctttcatgtatgtatggactatgggcaacagtaatctctactaacaattaagggagcagtgtagactgcccccgcctgtgcccca

SEQ ID NO: 84998 - DNA, 902 bp, Zea mays
  Clone ID: MRT4577_177527C.1
cccggggtttaaaggaaacttgcatcaccttattctctaattctcctgtcatgctaatcaaaatacaattttaacttgctaccaagcatggagtagtgaatgcaattttcactaataaaatatagtaaaattcaaaggggtgttaagtatcattcattcatccagccccccccccccccaagctaactgtcagtaatgtagaaacatatagggactggagttcctagtatgtagcccaatttatggcctagttgatgtaacattagaaaattggcaaaaatatcacagtattgtgcaacatattttgttaacttgatttttttaatttgtttcatgacatttttctttgatgtaacaaatggtggacctaaagtccaagtattgatttaacttttgatgttttgtaatgctgtcgttatgactatgccactatgataccctgttttgacttgacacttggcagtgaatactccctttaggttatttgtaactgaatttattaaaattctccaaagaatttgaattgcaataccttctaataaggatttccttacgtggaagctacatttcctaaaataaacatgttcctaataaacattaaataaaatgatttctatttagtcatctatttgttgaatcatatatttgagttaaaaacatttcttgaaataaaattatacatttatttattccaaaataacaatggatatttatccttgaattaacttttgattttgtaacacattcaaggtactacttatttagagggaataatatttcatattttgaggcatttgactaaaataaataattgatatgtaaaataaaataaaccatgcatttcatgctgagctcttctttgattgtgcatctaatttggtgatcaaactgtatttgaattt

SEQ ID NO: 84999 - DNA, 1885 bp, Zea mays
  Clone ID: MRT4577_177528C.1
cattgggtacctcgaggccggccgggctcgtgcttcgctgcccactttctccacttcctcctcctcgcgagctcagctcgcgcaccgccgcagacagcgccgccgccctctcctcccccccttccgctttgccgccacccactgctgccggccgccgcaggcaccccatggccccgaccgggcggctcctcgcggtagccgccctctccttcctatgtctgcaggggccgtggggagattcaggcagcgcatttgctcagagccagccgccgcttcaccggaccgttggcgcagaggcaaatgacggcggcggcctcatgccggagctcccgcccagcggcctcatgcccatgccggagctctcacccagcggctctcccacgccatttgtccccttcctggcgcccgctccgctcgcgccattctttaacaacagcacgccaaagctctcaggaaaatgcacgctgaactttaccgctgtcgacaaactcatgaccaccacggctgtcgactgcttcacctcgtttgctcctttcctggccaatgtcatctgctgcccgcagcttcaggcaacactgaccatcctcatagggcagtctagcaagcagacagggtctctcgcattggatcccacggtggccaactactgcctgtccgatgtccaggagctgttgctgagccaaggcgccagcgacaacctccacagcctctgctcggttcacctctctaatgtaaccgagggatcctgccctgttagcaccgtcgatgcgtttgagagcgccgttgattcgtccaagcttcttgaagcctgtcgcaagattgactctgttaatgagtgctgcagccagacatgtcagaatgcgataaatgaagctgcccagaaaatctcgtccaaggatgcaggtttgacgagctacaccgggagtcccaagactgacagctgtaggaatgttgttctgagatggttgtcaagcaggcttgacccacggtccgcgaaggaaatgctgaggcagatttccaactgcaatgtcaatggagtttgtcctctaagctttccagacacaagtaaggtggcaaaagagtgtggtggaacaatgacgaacagtactgcatgttgcaaggcaatgttaacttatgtagcccatttgcaaaagcaaagcttcataacaaacttgcaagctttaaattgtgcctctttccttggggcaaagttgcaaaagatgaatgtcagcatgaatgtctatagctcttgtcaaataacattaaaagatttttcactgcaagttggatctcaagaatctggatgcctccttccaagtatgccctctgatgcatctttcgacagcacttctgggattagcttcacatgcgatctgaatgacaacatcgcagccccatggccatcttccatgcaagcaccatcttcatcgtgcaacaagtctgtcaatatcccagagcgacctgctgcgacatcggcacaaagtggtgtgaaccacaagaacctaaagctaagactgcttgcctctttggtctcccttcttctggtgctcttggtacaagtttagcaaggtccagttgccctattatcgcgatgattcgttcaggagagctaactggaagtcagtgaagcgctgagttttttgcgatctcgcggtcgcatcgaagtgttgtaggtttcacgtgtattttattttattttattttttgaatctcctggtagcaattagtgtagtttgttgtaaggaatatatgtataatataatgatagtagtaacttatattcatttgtatagcgagaaagaacgtctggtggacggattccagcattgtttaacacaatgtttattgtttactaattgatgtgtttgatgttgatagacggatc

SEQ ID NO: 85000 - DNA, 176 bp, Zea mays
  Clone ID: MRT4577_177529C.1
agtggtggttaagcgaagctcgtgcttcgctgcccactttctccacttcctgctgcctcgcgagctcagctcgcgcaccgccgcagacagcgccgccgccctctcctcccccccttccgctttgccgccatccactgctgccggccgccgcaggcaccccatggccccgaccgggc

SEQ ID NO: 85001 - DNA, 190 bp, Zea mays
  unsure (1)..(190): unsure at all n locations
  Clone ID: MRT4577_17752C.1
cccgttccganccatnatggctttccctaccgtagtcttacggggcggggggggggctgaccacctcatgtgcgggctggacgccggcaagcggctgatcacccccgggggtcgcgtgctgtagctcaccgtgctcgtcatgcgagtgcttacggagtagttcaagatcgatctccacacccacataccc

SEQ ID NO: 85002 - DNA, 2014 bp, Zea mays
  Clone ID: MRT4577_177530C.1
ccggccgggaaacgatttcgtggtgctcgtgcttcgctgcccactttctccacttcctcctcctcgcgagctcagctcgcgcaccgccgcagacagcgccgccgccctctcctcctccccttccgctttgccgccaccccatggccccgaccgggcggctcctcgcggtagccgccctctccttcctatgtctgcaggggccgtggggagattcaggcagcgcatttgctcagagccagccgccgcttcaccggaccgttggcgcagaggcaaatgacggcggcggcctcatgccggagctcccgcccagcggcctcatgcccatgccggagctctcacccagcggctctcccacgccatttgtccccttcctggcgcccgctccgctcgcgccattctttaacaacagcacgccaaagctctcaggaaaatgcacgctgaactttaccgctgtcgacaaactcatgaccaccacagctgtcgactgcttcacctcgtttgctcctttcctggccaatgtcatctgctgcccgcagcttcaggcaacactgaccatcctcatagggcagtctagcaagcagacagggtctctcgcattggatcccacggtggccaactactgcctgtccgatgtccaggagctgttgctgagccaaggcgccagcgacaaccttcacagcctctgctcggttcacctctctaatgtaaccgagggatcctgccctgttagcaccgtcgatgcgtttgagagcgccgttgattcgtccaagcttcttgaagcctgtcgcaagattgactctgttaatgagtgctgcagccagacatgtcagaatgcgataaatgaagctgcccagaaaatctcgtccaaggacgcaggtttgacgagctacaccgggagtcccaagactgacagctgtaggaatgttgttctgagatggttgtcaagcaggcttgacccacggtccgcgaaggaaatgctgaggcagatttccaactgcaatgtcaatggagtttgtcctctaagctttccagacacaagtaaggtggcaaaagagtgtggtggaacaatgacgaacagtactgcatgttgcaaggcaatgttaacttatgtagcccatttgcaaaagcaaagcttcataacaaacttgcaagctttaaattgtgcctctttccttggggcaaagttgcaaaagatgaatgtcagcatgaatgtctatagctcttgtcaaataacattaaaagatttttcactgcaaggtaagttattcaagacttatcaattgattacgcataagggtcatatttatcttctggctctgcattttgtggcaactgaactgatgaagtatttatttaccttttcaaccggtgtgtttgaatgactggcccctactggatttgcaaacagttggatctcaagaatctggatgcctccttccaagtatgccctctgatgcatctttcgacagcacttctgggattagcttcacatgcgatctgaatgacaacatcgcagccccatggccatcttccatgcaagcaccatcttcatcgtgcaacaagtctgtcaatatcccagagcgacctgctgcgacatcggcacaaagtggtgtgaaccacaagaacctaaagctaagactgcttgcctctttggtctcccttcttctggtgctcttggtacaagtttagcaaggtccagttgccctattatcgcgatgattcgttcaggagagctaactggaagtcagtgaagcgctgagttttttgcgatctcgcggtcgcatcgaagtgtagtaggtttcacgtgtattttattttattttattttttgaatctcctggtagcaattagtgtagtttgttgtaaggaatatatgtataatataatgatagtagtaacttatattcatttgtatagcgagaaagaacgtcggtgtttctaaatgtgcatgagggaatgctgttgtctggtggacggattccagcattgtttaacacaatgtttattgtttact

SEQ ID NO: 85003 - DNA, 189 bp, Zea mays
  Clone ID: MRT4577_177531C.1
aaatatgtatattttcctgggtgatgtctgccctttccatgaggaacttgataaataagtcattgaagggtattcttatctgggatgtttgttctgttgtcaaatcacttaaacttttatgtgtacagaatcgaatgaaagtacttttcaaattcttcattgacgtccaaatgtgattagcatcaagta

SEQ ID NO: 85004 - DNA, 233 bp, Zea mays
  Clone ID: MRT4577_177532C.1
tatctggcaggaagcggccttagcgtgttttttgtcgttgtgcttaactaaaaaaccaacttttatgatgctagaactagctgttttgcaaatgtaacgattgttctcgttcgcttatagcttagtatatgcatcaaaaggagtactacgcggttgagcacctagggcgagaccaggctgagggtgggtcgtgacgatgctcagggcgatggcggccgattggggggcgtttt

SEQ ID NO: 85005 - DNA, 212 bp, Zea mays
  unsure (1)..(212): unsure at all n locations
  Clone ID: MRT4577_177533C.1
gaagcgagcgagcgagcagcagtaggcagcggcgcgggctaggagcattctcagcgcccancanccctcgtcggggggcggcagctgctgcttcaccagccgtcgtcttttcccgtcttctctgcctatgcctctccccataacccccttacatttttccacccgacctcgctctctcttccgcttgctcgccacttatttcgttcctgacc

SEQ ID NO: 85006 - DNA, 367 bp, Zea mays
  Clone ID: MRT4577_177534C.1
ggcaagagctgcaggctgcggtgggtcaactacctgagaccagatctgaaacggtgtaagatcacaccccaagaggagagcgtcatagtccagctccatgctttgtgggggaacagtactgtactgtacgtcgtacgacgtgcataagcaggtggtcgacgatcgctcgcagcctccccggcaggacggacaacgagatcaagaactactggcggacgcacttcaagaagggcaagccgtccaagaacgttgagcgcgcgagagcccggttcctcaagcagcgccgggaaatgatgatgcagcagcagtctcttggcggcagcacctgcacctcgacgagggcggtgaccagcgccgcggcgcgtgc

SEQ ID NO: 85007 - DNA, 346 bp, Zea mays
  unsure (1)..(346): unsure at all n locations
  Clone ID: MRT4577_177535C.1
tcccacgcgtccgcaccaccatctaaaacgtgttttctacccatcccattatcttcccccgtgctacagtcaccacattctgatccgggctanactcctatatccttcatcttaaccatctccattccttcgattccatccatccctaatatctcaacaccttccactctcttcatacatctctctctttctctattacgactcattatccatctcttctttacttttactcttcctcctcttcttctcttccaacgtactaactcaactcacctcttccttcaacataccttttctatcccataacatctttcaatacatctccttatctacaattattaactta

SEQ ID NO: 85008 - DNA, 330 bp, Zea mays
  Clone ID: MRT4577_177536C.1
atcagtcgccattatacccacaagctgttttaaacattaattccttcatgcaccatcagcggtggttctcattctaccggcagaacgtggcaaacattgacgccttcatacatcaacatcactagctgccatttatccaacatgctttcactaatcctaccaccttattccaaccatacaccattgatgatcccatcttctagattatataccacttatacagtaatggtctagttattatgctaataaatgcgacctctctgttataatatcttacatatctatatcttaaaatgaaatacatgtaatatttgctattatatatattct

SEQ ID NO: 85009 - DNA, 395 bp, Zea mays
  Clone ID: MRT4577_177537C.1
aaaggcaaaccaataaactgcatgatgtaaattctgtcgactttctttatctaacccatgggcaacactacagggagggttatactgcaagccgctatcctaaaaactgtatccacttgctatacgctactactaccgaacctgactagcagcctacttccaccaagtaccaatgacatgtccaatgaacctgcaaaacaaagaagtcgggttggataacctggtggccaccatgaaagggtggagacggcaaacgaaactagaaaccgtggagaagatcgaggcggggccataaactcggtgtcaggttttttttgctgcgttgtttgcttcaactgcacatagagggtgaatttcccccctcaccttcttttggttttgatgacccggcaata

SEQ ID NO: 85010 - DNA, 474 bp, Zea mays
  Clone ID: MRT4577_177538C.1
tccaccgcggtggcggccgcccttttttttttttttaaaccaacagggaagacaggtgatcctattacccaacaattttttttcaaccctttgcatcagctgtttgttgcactggcacaccctggtaacctataatccaaacatgccatgatgcataaagaccctttcctcatgaaccgggggcctccgcatcttgtgcctgatatatataccgagcgaactatacctggttacaaactatgctattgtttttggacctgaccatgtgcgttcatggcttgatttttctgtgtaggacaagacgacacttgatggtcactgactgactatatgcttgacaaggtggacccagtgagcacagctgacccaccaaaacgactgctttgatcaagttgatacaagagcctgtggggccttgaccttgcctatgattcaaactcgagcccagctacacaagccctggagatgtggtct

SEQ ID NO: 85011 - DNA, 367 bp, Zea mays
  unsure (1)..(367): unsure at all n locations
  Clone ID: MRT4577_177539C.1
ccgnaacaaaatgcagggccgacaagcccaccacactnactcccccccctccctttttttttttttttaaaaaacaataaatcggtttgtttatatataagttgtctgataaagaatcaccntacattattaataaaaaaatctctcaattccatgcaaaccttaaaaaaaaaaataacccacttttatacctaaccatctcaaatacaatacatttaacactttcctccttttcttccgattacaccctgaattcttccatctaatccaaatttatatacattaaaaaatcaatccaattaccaatcctaccaacccataaattcgatacaaacaaacaaccctctaccgtaaaaaatctattaat

SEQ ID NO: 85012 - DNA, 308 bp, Zea mays
  Clone ID: MRT4577_177540C.1
gttaatgccagtacaaaaatacagttgatgacttgacaaaatggctacacctagggcttgaaggtttgagtttttccaacagtaacaagggaaagcatgcttccacctggagccgagtccaagcacacagccagtcctgcacacgcatgcgtgcaaacagggaagctcaagcatgaaaagaggaaagaggctgttaaaatttgggaagaagcccacaattattcccaggagaaaaaagggaaaaaacaggctgatttccttggtagggggtagaattactgatttacacttaggatttattgttattg

SEQ ID NO: 85013 - DNA, 341 bp, Zea mays
  unsure (1)..(341): unsure at all n locations
  Clone ID: MRT4577_177541C.1
caagagcaaacaacgcacgcactttacgtcaaactagaattcgcctccccaaggtattttaacgtcgtgcatacacacctgagcccgttcaatatttttgccggccccanaaacaaccacacaaaaacctaccaaaaccatatatgcactacagaactcgatgtcattaccaacatcttctactacttactggtgcacaagcaccgtttcagctgacattaaaaactattcaaacaacatcaacaactctcacgaaaacccttacaacaacaacaccacccttatagactacacagccacccaaagcgccatcatagactttactcactcgctataactac

SEQ ID NO: 85014 - DNA, 165 bp, Zea mays
  Clone ID: MRT4577_177542C.1
tctgcgtacacggtatccctcttcctgtcagtagtagagtgagagtgaggcagcaaaaccaagacaaggagaaataaggagatggccaacaagaaggagaaggcggtgaacttgtcgggcaagccacggaactcgaactacttcaaccgccccaatgacaagaag

SEQ ID NO: 85015 - DNA, 360 bp, Zea mays
  unsure (1)..(360): unsure at all n locations
  Clone ID: MRT4577_177543C.1
ttccactataatcctccctcttttacatctttatttatcacaatctcctatgctagcaagcgatctccgtggcngattcattcacctacaatgagctctataacggcttccttttgtatgtcaagggaaattncttcacccaatgtcctcttgatgttgacattctttccaatccatcctcctanggtttttatgactaaaacttttatgacacatctgtgaatgtggcttatatttttcacacattccctctacagaaacaacctccttcatacaataaatcatttgtatctttacatcaaaaaatacatcaataatctcacttctattttcgaaccacaaaaaactgattatttcaaa

SEQ ID NO: 85016 - DNA, 417 bp, Zea mays
  Clone ID: MRT4577_177544C.1
tccccaaattcgtgtcccgcacatctgctcgtttcttttcgaacctgatggcgctcgtcgacgggggtgccttcggcgcgtccacctccaccgtggccgctgcgcccacggtggagcacctgttgttcctcgtcgtcctcgacggcgtctagacgcccatccacgaggggacgctgtacggaagcgccggtggcacagtcaccgtcaccggccctggccagctctccgtcgacggtctctagagcgtcctggtgcgcggcggctggaccgggaccggcgccgtgcggttcacgctctgcgccgacgcggctgccgaaggcgtctgcgcggcgtgcttcgagcggtgcggcgcggcccgcgtggatggcgcgcgcgaggtgtccgtgtactcgtgccgctccgttgaagtggaactct

SEQ ID NO: 85017 - DNA, 110 bp, Zea mays
  Clone ID: MRT4577_177545C.1
gagggccaaaatgcaagatgggcacgtgcatgagccatgaataaaggacttggaagcaaagtgtaagcattaccaaccgttgtattatataaaggaaaaccgcccggggt

SEQ ID NO: 85018 - DNA, 402 bp, Zea mays
  Clone ID: MRT4577_177546C.1
gacagagaaggaaaaaaagggacttattgatctccacggggagataccagcaagggatttttttattacagggggccgttttcattttttttagagctacttatacagggacggaagtacccaacaggagtttttttcttggagttttttaccagaaaagcctacacaggacagaaacattttgggcggtcactggtactgactgggaaggtggcctttcttgacgatgtagttttgcaccgggaagttcttgcccttgaaatacctattcaggatgttctttaaaccatccgaataccggaggtgggcattaattgtagtcccagaaatttgaggggttatgggatggttaggtatgtagggacaggggtgatccttagggggtggttgtgggaaccacac

SEQ ID NO: 85019 - DNA, 545 bp, Zea mays
  Clone ID: MRT4577_177547C.1
cccagcgtccgtagggcggcacggaagaaatctgacatcccctgcaaaaaagcataaccaggtggtaagcatggtgttttctgttgtagttctggatcaacagaataataatgatggaaggaggatctggacacgtgctgagccttttgctgtggccttgtgagcagggaaataaacggagctgtccgaggcgctttaagcctagctatgaaaatgttattgacataggtgtaaatgtgtctatatatcagaacctattttcctgttccaatacttacggtgttccattatctagtgctgaacctatgagcaacaagaccgaagctggtctggacttcaattgtgagaactgcgtgttaagcatttagaacaataaaaatcgttcatatgccctggacaatgccacctgtactagaggatgtacatcgataatacaaacgatgtgattatcatctttggttatcaatatgcccatctcttgacacgcttgattctcatcgcctgcaagagatcaagcggttctttgaagatataagaagaatgag

SEQ ID NO: 85020 - DNA, 745 bp, Zea mays
  unsure (1)..(745): unsure at all n locations
  Clone ID: MRT4577_177548C.1
aaatccatctagtttcttcactaaaacctcacccatcctctccttgtggctatcaaattcgacagtagagtgcctttcgtccaccagcacagagccataccgagtcgggcccgtgaaccaccattaacgatgccgtgtgtgtgaaggagtgccgccgacgtcgaacacgcgcttcaccatcgctccaaccttcgtggcaagattggatggaagggaggttctcaggaaaggtttgcgttggatcccgtgggctcaagggtggtcagatcagtgacgattgctcgtcgtggttcaagcgccgctgcggggtcgcttggatacgtggtcctcgtaatccgagtctccgacgcatcaacccaaggtattacgtcatccctctagttcacgctcgattccacatcgtgtagcaccaaatatgatcgagtttggggtttggaagcgatgttggggcgtgttcgccagtgagccctccaccgggcgggtcgtggcaccgcgactctgcttagttagaggtagggggtgagctcgcgaccatcgaatctgtgattgacgagtatgattagatcgagcgtaccgcttcagggattatatccgtaccgttggtccagatgtgtggcctggattaaatcatgttntcattaaatctaaatctagatcgtgttttcattaaatccgtacttgaagacatgttacgagcaccgtgttctggaattcccacagaaatgggatgaattgtttaccattg

SEQ ID NO: 85021 - DNA, 259 bp, Zea mays
  Clone ID: MRT4577_177549C.1
ttcgaaggcagtgatgagagccgaaatgggggaaactttagccggcatgcaggcgcttcccgaagccgagcagaggaacccgaaccacgccaggctgcccggagtacaggaagccaagaacagacgggtacacgacagcctgaaaaggatggaggagaaggcccacagcctggacgaggtaaccagaaagctgtgacaggaggtggcagaaaaccgcgcactcgccaggccgccatcgggcgaaacccaagaagcacca

SEQ ID NO: 85022 - DNA, 576 bp, Zea mays
  unsure (1)..(576): unsure at all n locations
  Clone ID: MRT4577_17754C.1
tccaaaattgggggctctcaaatacccccccccaaacaagtcggangatctctaccctttctccccctttaaaagaataaatattcatcctttggactaaataatttattccaccnccggcggcggcccccacccaaaccccccagcctcttccccccaatttgttggtcccccccaccaatttaacccataaaaattttttttgacgctcccggcgcaagggggttaaggagaaggtnaatttttggtggctttcttggacaacaaaaantattttcctttggcttttgaaggcccccaagcccccacccaaggccccaaggtgtttttttttccaatantttaaaacaccccctttgggtaccaaggggggccccccctccttcttttttggctccccaacgaccccgagggggggggctnaaccaataattatttttttttttgggggtcttaagaacaaacaaataannaaaaactacccccaaaaagnacgttggtncccggtgggctatccccctttagaagaacaataaaccccccccaaaggacaaaaaaaacaattttttgggcccc

SEQ ID NO: 85023 - DNA, 1578 bp, Zea mays
  Clone ID: MRT4577_177550C.1
ccgaattcagcacatgtgccaaaccgagcaacgaaaaaaaggtatcaccaaccggtggcggctgtcaaaaaacctactccaccttccgccgctataaaccctacgaagagcggaagagggtaaaagggtggccagctagccgaagaaacacccagacgaagcggccgtttttggcatctcgtatgtgcaacttcgctggaaccctcctcgactgattttaccgcacagcagaaaaggagataaaacacgacaaaaattgaaggaaaacgcattcacatcttctcttcgtccgccgccgccgcctctcttcattggtagcaccttaatccgaccccagtccagcccgccgccatggaggcgctgacggccacggacaaatgcttctccccggccagggcgatgttcccgatgccgattgtgaggccacctgcatcaccagaccatgccagtcagtatctggaggacttgttgcaggagcaacagaagctcgggccattcgtgcaggtgctcccaatctgcggcaggctgttgaatcaagagataatgagaacatcaaacctgctttctaactttggagttagaggaaatgagaggttgccaccaattgcaagtccgaaccacatgcatccattgccccggggacctgatttctgtggaaacggtttcggtccatggaatgagatgcatcctgagagaagtggttttcctaggggagccatgggttggcaaggtgctgtacagaaccattcctcctacattgtcaagaagatcgtgcgattggaagttccaacagatgcttaccccaattttaacttcattggccgtttgcttgggccgaggggacactcactaaagagaatcgaagctactacaggttgccgtgttttcatcagagggaaaggctccataaaagatcctgtgaaagaggaacagctcaagggaagacctggctatgaacacttggatgatccaacacatatcttgattgaggccgaattacctgctgatgttattgatgctagactggcacaagcacaggagatactagaggagtcgctgaaaccagtggatgagtcacaagacaacatcaagagacaacaacttcgagaacttgccatgttgaactctgtatatcgagagggtagcctgcatcagaacggcagcgcctctccgttcagcaatggtgcacaaaacagtgacagggaggagattcagctctgatccttcccggaaactctcgcgttagtcctgctctcatgacagacgtagcttctctgatgctcaagctcccgtgatggtattggaattcatgccattgctaactggtgaattttgatatcccttgtgacattgacctgcggatgagaagactagcgagaaaaaactcccccatggctgtgtacttaggatatttcgtttattgcttgcgcccactattagtgcagagatgtctaagttctagtattttgagctctttgattatctataaagttatgactccgcaaagtatttgattatgatagtatttgtcgacataaaatttatatcttaagacgcaaaaaacccccccccccaagc

SEQ ID NO: 85024 - DNA, 207 bp, Zea mays
  Clone ID: MRT4577_177551C.1
tcattcgggtcggttggcttctcctgaattaccggctggtgtctacgtgctggctagcgggccatatggaagagatggttgcatctggcgttaattaccgtcattgctgtggcctgcttgaaagtgccatccactaacacttcctcaccacctacttgcccacctactgaaaggtactggcggcggagatcaatcaggatcctgaca

SEQ ID NO: 85025 - DNA, 444 bp, Zea mays
  Clone ID: MRT4577_177552C.1
ttttttttttttttttttttttttttttttttttttttttttttttttttttttttttttttttttttaaagggacaaagcaaaacctttttaagcatatgttatggacaggcccggttcaaagcagcaacagcattacaagctttgactagcccaaaaaacatatgaaccaattgaccgataaaatacaaaggagggagtaaattttgcatgggggtatgccaaaaatacataaaaaacccagccagggacacatactattatcctcccccaccctatagtaaaagcgggttcaatgaacaaaaggcatttctatttatctggggctgggggatttataaagctcccctgcccaggaaggaaaagtattaaaaaaatcggttccgggagccaaaacttggggccccataaaaaccactttttcctctcacacctctgtggggg

SEQ ID NO: 85026 - DNA, 279 bp, Zea mays
  Clone ID: MRT4577_177553C.1
atataagctggcctgacgaatcagtgcaatggtgagcactaccatggccctctcttacacagtcttcaagcatgcaaggtaattgaacgtgcaactggtagtcatcttctgaaaggcccgcgggaccatgctgcagggactgcaagatcaaggcataatccccaatgctatgctccttgcagtctccagtggtctcggctccacgatccgagtcctgctagccttgtatcgctgttgctggcgctgctcttctaactgtcagcacaattgccacacgac

SEQ ID NO: 85027 - DNA, 463 bp, Zea mays
  Clone ID: MRT4577_177554C.1
acatcaccgttaaccagcccagtcccgtggcggtggcggtggtggtagcggctacggtgggggtcgcggcggccgtagacgttatggaggcgggcgccgtgacagtgcttatggcagaggtagagactacgagtgtcggccccacagtcgcgttggtggctcctgatgccgccgattgtacagggggagttacgaggaaaaaccatgtccgtactgcggacggtgctccccattatgtggcgactattttacggtcccatcctggcttgtagaacattatctaaattatctttagtttcaactgaccgctcgttactttaactgggggaaacaaaattgtacctactatttaggtgcattctcctctgctgtcgctaggtactgatgaagtataaaacgagatgagagacaatgttctgattcataggtcacttctattaatatacaatggtgttcatttttt

SEQ ID NO: 85028 - DNA, 433 bp, Zea mays
  Clone ID: MRT4577_177555C.1
ttttgttttttttttttttttttttttttttttttttttttttttttttatgcggggggtatgcacgggttatacatttttggtagacagggtcaatttattggtgggctggtacatacatgcatgggtgcacattgggcagcagttagcttacaattagactttggtgtttccaaaaaggagggccttcttttaaactgggatgatttgggttggatattaccagcagggaaatacaatattttgcaaaagcttggaacccttggtgattttttactgacccttggggtagtttgggggcgtcggcagcagcggcatatgcatatgcgtgcacactttttttgggtttccccttgcccacaggttttggaggttccctttttttatccaagcgcgaacaaggggccaagagtgaagggccccatttacaaaa

SEQ ID NO: 85029 - DNA, 321 bp, Zea mays
  Clone ID: MRT4577_177556C.1
cccacgcgtgcggcctggcggcgctgctgcgtgctgctggcaacctgctgacagccggggacgacctgttgctgatgcacgctatcaacgcacccgactacaaccagagccaggccatcctctgggaatccaactgctccccgttgatttccctcttggaactctctgaccctatcattgggaaaaaatatggagcaaatcctgacatataaaccttggacatcctgaacactacagctacccagaaggatatcatgatggttgataaagtcctgtggactgatccgcgtaagaagctctgtcaagttatgcatgataccc

SEQ ID NO: 85030 - DNA, 311 bp, Zea mays
  unsure (1)..(311): unsure at all n locations
  Clone ID: MRT4577_177557C.1
aaaaaaaaaaaaaaaaaaaaaaaaaaaaaaaaaaaaaaaaaaaaaataaaacaaccaatttgagatatccagagcattaggtacactacagttcntcctattttctcttcctttttttattttcaattcttttcaccctcctttccttaatatcaccttttctttaataacacctaaatctatcatcttccccccctttcacaacattccccttttaaaaccctctgtcttcccaaatttaatcttctcgatctccctccccttttttccatcattcttaatatcaattatccccccccctttcccccttc

SEQ ID NO: 85031 - DNA, 445 bp, Zea mays
  unsure (1)..(445): unsure at all n locations
  Clone ID: MRT4577_177558C.1
ataagatgcatataccctcatttcatttcttaaccaattcaattcctgcatgtacagacgttgtcatcgcatgattaagggggattgcatgattaatggtaagtaacaatgcagtacctaccagatttgtgcacctgtttagtgcaaaactatcattctgtcccgtaaaatcccttatatttgagtatagtcttttaatgcttctatacaatatattctaggacagagggtgtattctaaactctaaacagtcttctttgtaattttaacatcatctagaattctcttgcagtcttactgcacacttaaaagtattgcttatctttaaaaaaaanaagnttagatcttatagccaatttgttttcaactttcaaatcataacttctcatagagactgctatactgctctctatttcttggtaaatgaaaaatgtctatgaaacta

SEQ ID NO: 85032 - DNA, 826 bp, Zea mays
  unsure (1)..(826): unsure at all n locations
  Clone ID: MRT4577_177559C.1
agtggttntaatggtcatttctggggtttttgcaacaaacgataaacacgattggagtttgactcaatctgaggttgctgctgttgtatatgctggtgtcatggcatctgctcttaattatgtcctattgacatggtccaacggaatactgggacctgctatggtggcactttatagccctcttcagccagtggtctctgctctattgtctatgatttttctgggaagcccaatttaccttggaagtatttttggaggacttctaatcatctccggtttataccttgtgacctgggcacgccacagagaaaaactggcaagtattggagtaccttatgtaacatgtgtatcggagtcactcgatggtccttctcatgttgcaaagactgtgcccttcatatctctttcaaggctgtgggatgtgccacatgagtcttgagaacttggaggtgtttgatctatacaacctttaggtacccctcttactgaaactatggatacagaaaacacccataaaaaagggaaatgccccagaaaataatattgatttatcttgtaaaattgtagtctgcccttctaggagcagttgggtttgtcactagagacatttgacaggctaggtttatgtccgttggttttgtgagacttaacaactctaatgttgttggacggaccctgacaccaaacacaatgtgagctccactggggaaccgaagaaaaccagcatgcatattctgttaattcccacgtatacagacatctaaatttgtagctatacaccgacatcgattcaaagagcagtcactctgcacaaaaaaacccaaag

SEQ ID NO: 85033 - DNA, 1144 bp, Zea mays
  Clone ID: MRT4577_17755C.1
gtgtgttttttttttttttttttttttttttttttttttttttttttttttttttttttttttttttttttttggacgaaaccgggcgacgcggggctggatctcaggggatcgggggaaaaaggccactttgccacttacaatgccccggcgggttttaaggcgtctgcaaaggattcaacaccccccccgttgggaagggagctttgagggggccccccggggggcgttggccgggcgggctgagccaatggcacgggcccttggggggcgaaccccctaacgtgggtcggggcgggcggggaacaaaggcccccgttgctagcttggattctgacttaaaggggttcaatcataatccggcacacgggagcttcgcgccactggcttttcaaccaagcgcgaagaccaattgggggagagaacgggtcctctcggggccgggcgaagtactcggaggggtcgtgggcgtcgcagggaaaactgcacgctgacgaagcggaggcgccgccgacgcggatgccggtggcgaggtagcgctggtggttcccggagagcgtgcccgggacgtggatgggctcgtcgcagtcccggcagaagagcgcccggtcctccacgcagaagatgaacgccgctttctcctggcagacgtcgcagcgcgggaggctggcggagagcgcctcgagcgggaggcgctggtgcttgctggcgaagtggcgagcttgttggcggcgtggatctcgacgtcgcagcgcgcgcacagcgcggcctcgtcagcgcagcacaccacggtggcagccgcgccctcgcacgcgtcgcactggatcttcatggccgctccacctctctgtctgcggtctatactcccaggtccagctcgctatcctgtcctgtcgtctcgcaagtcgcaacaacgagggaggcaaagacgaacaagataaggccactgactgcgatggaggaggacgagcttgcgcgcgtgagcacgcaactggagcaatcagtgagctgccgctgccgggcgagcttgtggtggaggactcgccggggagacttgtggccaggggctcccggctcgtctccccgtgtactagctacacgccggaaccacgcttggacgcgccgattttgatgtgatgtgctc

SEQ ID NO: 85034 - DNA, 321 bp, Zea mays
  Clone ID: MRT4577_177560C.1
ggaccatctagcgtcatatcaagttgcattcattgggcaccatagagcaacaatggcggccacgatattatgcctcctgatgctcctggatgtgtttgtatgtgttgctaacgcgacaattgctcctaaatgcttacaggctcctttagatgcccttatttccccataccttccatcaaagattgcttcaacacgtgaaaacccagctataaagccctacaggctacagcaagcagtcgcataaggcaacataccttgatcacacatgtttcaacactagccaggcctatgttaggggcacacatcgttacagaccatcag

SEQ ID NO: 85035 - DNA, 825 bp, Zea mays
  Clone ID: MRT4577_177561C.1
gggtacctcgaggccggccgggcgctaattgatgcttatgcaaaatgtggtttcactgagctcggatactgggtgttccgccaagtacctaataagaactcagtcatgtacaacacggtcatatcaaaccttggatctcacgggtttgcaactaaggctattgaagtcctagatgagatggttaatgataagctcaggcctgatagtgctaccttctcctctttacttgctgcttgttgtcatgtggggcacttggaggagggatggaagttgttcaggagaatgagggatgagttcaagatagttgttgaaatggagcactatgtgtacatggtgaggcttcttgcaacatttggccagctgaaggaggcatatgatcttatacagacaatgcaaatccaaccagattgtggtgtgtggggtgcattgctttggggttgttgtgtccatcgtgattctagcttcggcaggattgttgctgaaaagctatgtgaactcaattcagacaaagctgcttacagggttatgctctcaaacatgtatgcctcacaagagatgtggtgggatgctgaggaggttagggatgagttatcaaaagaaaatatgtacaagaacacagggacgagttgggttggtgaagtaaaaaaatgatggttggcatttgtcattgagaaagcatgtcagatatcaagtacatatgaactctatattgttatattccggtagagatgaaatcttgtgaaaactcaaacatgtactcgttggattttagcttaaccagttttgtactcagtctttcccttatatcatggggagttcatttgc

SEQ ID NO: 85036 - DNA, 456 bp, Zea mays
  Clone ID: MRT4577_177562C.1
ggaggcagaataaaaaggggggggcccataaattgaataaaataagccaattttaaaaaccaccaatagtacaaattaaaaaaacttgcgggaatgaaaaaagtttaaataaataaacaaaaaaaaaaaagggcaagggaacacggccactgacaattttaaacaaaaatggaaatggaaaaagggccccatgcccggccttggtaatggaattttaattttaaacaaatttggggtccgtccgtccgtccttaaaaaaaaagcacggttttatttttaaaaaaggcaaccaaagaacgggggaaaggcccgaaaaatttcaaccaacggccctggccccggggggcccctttggcgcggggtcttcgaaacccgccaacccggagggagcgtccgaggaccccccctttttgggtttcccctggaacgcggcgggcccggggggggcccccttgg

SEQ ID NO: 85037 - DNA, 2188 bp, Zea mays
  Clone ID: MRT4577_177563C.1
tggaccacaccttccgtggcgggccccgagggccatcagaccggcggcactcggtcgccttcgtgagttcgtccccccttccgttgacgggacgcgcacaagcgcagccgcagagcacactccactgcggccgaagcaaagcaaggcggcggtattagtccttagtaggcaccagcggcttgctccgcgtcgtcatcggtagcgcgcggtcgcgactggcttctcgtagcagcttatctacagtaataatcacaagagcctactaggtggtgggagcagagcagcacttgcaattgcaaccagcaagcgcaagagaggagggggctcaagagtcttgacgcgtctagccttcgcagaaaagggttcaagcgagaagaggggggggagagggcacgggttcagagctggaggagatggagagcccgcgcagccccgaggcggagatcggccaccgggtggaggacctctgggaggtggcggagccgcagctctcgccgtcggagaagctcaactcctgcttcgaggacatccccgtcgcgtccttcccgcgcacgcacccgtcccaagtcattgagattccttcagatgcaagtcttgctgaaactgtagaaatattatccaaaaacaaaatcttgagtgcacccataagaaatgttgaggctccagaagatgctagttggatggacaaatacatcggcattgtggaatttgctggtattgccatgtggttgctcagtcagtctgatgctgcagttaatgggacggttggttcgggaccaggatcgcctgtctccagtctagtttcgaggttgggttctttcacattcagaaggacatcatctggaagattagaaactgctactgattctgaatcagacgaagcagcatcggttggtgggagcttttttgaaaccctgacttcctctgaattctacaagaatacaaaggttggcgatatctcagggagcttccgctgggcaccatttcttgcactgcagacatctgacacattccttaccatgttgctgcttctatccaagtacagaatgaagagccttccagttgtagaagtgggaggagataagattgagaacattatcacacaatcctctgtcgtacacatgcttgcagagtgtgttgggctctcctggtttgagaactggggaactaagaaactctctgaactggggcttcctgtcatgaaaccatcgaaacttgtcaaggtaagcgaagatcagccagttctgaaagctttccaactgatgagggaaaagggagttggtggcttgccagtcatggacacaagtggagcaaatgccattggtaatattagcatcagagatgtccagtatcttttaactgctcccaagatatacaaagagcacaggtcaatcacgacaaaggatttccttagtgctgttcgacaccacctccaggagcagcgtgaggcctcaccgttgctgcatgatgtcatcacttgcaaaaaggatgatacaatcaaggacatcatactgaagctggactctgagaagatccacaggatctacgttgtggatgacaaagggaacaccgagggagtcatcaccttgagggacataatctccaagctggtgcatgagccacgccattactttggggatttctttgatggtgttgttcccctgcctgcaaacagcaccgtatgacacatcttcgcggtccaatcacactgatgtatctgtgcaaatgtacattttgagctattctcttctgaagttgcttctagtgtattccttttctcagccttctcggttctcaggtaaacagaccattgcctacatggagaaaaggactaatgctctaatggatggatggcaatgttgtacattgaataatctgtgaacttacctgagtttctttttcatgttctcatgatggcaattgttatctgtcttccttcttgctgaagatgctgttcactaaattcagctttgtcatgctgcaaagcaaaattctgcgggagaagatgtattttatcttgtttttaaccttggagtcagactctttcgctgtcataaacctgggtaacttcatcattcccctggtggagtttactacatgtggtagggtcaaccaaaatatcctcgtgctgcagtgcatccataatttttttccgtcgtggcagcataacgaggtactccctttgaag

SEQ ID NO: 85038 - DNA, 954 bp, Zea mays
  Clone ID: MRT4577_177564C.1
ttttccaagatccatgcgtgcctgaacaaatgcaatttatcaactcataaatcagcgagcgttacttcatttcaaagggaacttctattctgaggccgtatatcgtgaaacaactcaacacaaaacacacaatctagtagtgcctcccctcgatgtctctccccctgcccctaacttcatcaacaatcacaatttcgagctttttttgcaactgctcgatttatgaagtgtacagacagctgaaagccctaagcgacaataatactttatgctttgcaaagaatggctctatctcacttggtgtacaggacatcctcccatgggtggcggtagagtggctgcttaagcctcttctggtcgaaggtgtgcccgatcaggccaattgaacgtgcaaggacaaagagaccattaagataaccaatttccacaatctcgtcgatctcctgtttggtgaacattccgcttccagacagaagatccaaaaaaagtgacccgatcgcaccatcgacattcataaccaaattgtttgcttttgacaaggtgtaggtctcaacctgaacagcgtattccatgtacttgactgaagggaaatgcgtgtgagcatatttctgtagaagctgcacacgcttatccctgttgtctctgctcttaatcctgtgaccaatcccaggcacacggattcccttctttttcatgccttcaacaaactcgtatggtgtgaggcccctatcacatgcatctttgaagtatcgggctgcatcatcaattgctccgccaaaacgggggccaattgtcaataatccagacaccaagctggaaacaaggtcctttccagccctagcagtaactatagagttatgagcaccatgctacgcggggaccatggtccgcacctgtgtatctggtgctcataactctatagttactgcaaggtcctttccagccctagcagta

SEQ ID NO: 85039 - DNA, 357 bp, Zea mays
  unsure (1)..(357): unsure at all n locations
  Clone ID: MRT4577_177565C.1
tggtgaaggcctgtgattcatctttctgttcaacttggaggatcatctaaaaacgatggacagaggcatgcagtctatgtgactcgatcaattgccatgcattaatgattgaccagatgctggagctaggatacaacacctggaggctcacaatgaacgcgaagaaacatgtcaaaaagtctatattgatcagcctcaacctctatgggtccatctgtgtcaacaaactcgtatactacgaagcctgacactagattntgactggaatggaaacatttgtatcacatccgactgagctggggaggactcacttctactacctaaagggtgtgacaatggtcagtcttacctagacag

SEQ ID NO: 85040 - DNA, 1381 bp, Zea mays
  Clone ID: MRT4577_177566C.1
cgggtcgagccacgcgtcctactgctagggctgccaagagtggtggtgagttggaatcagcacaagctaagaatcaggcactaagggaagctggtgcagttgtgcctacatcatatgaagctctagagagtgcaattaaggaggtatttgacaaactggttgaggaaggaaaaatttctcctgtgactgaaattacacctcctcccattcccgaggaccttaaaactgcaattaagagtgggaaggtccgagctcctacccacatcatttccaccatttctgatgacagaggcgatgaaccatgctatgctggtgtccctatgtctacaattattgaacagggttatggagttggtgatgttatttctcttttgtggttcaagcgcagccttcctcgctattgcactcagtttattgagatatgcgtcatgctttgtgctgaccatggtccctgtgtatctggtgctcataactctatagttactgctagggccggaaaggaccttgtttccagcttggtgtctggattattgacgattggtccccgtttcggtggagcaattgatgatgcagcccgatacttcaaagatgcatgtgataggagcctcacgccatacgagtttgttgaaggcatgaaaaagaagggaatccgtgtgcctgggattggtcacaggattaagagcagagacaacagggataagcgtgtgcagcttctacagaaatatgctcacacacatttcccttcagtcaagtacatggaatacgctgttcaggttgagacctacaccttgtcaaaagccaacaatttggttatgaatgtcgatggtgcgatcgggtcacttttcttggatcttctatctggaagtggaatgttcaccaaacaggagatcgatgagattgtggagatcggttatctcaatgggctctttgtgcttgcacgatcaattggcctgatcgggcataccttcgaccagaagaggctcaagcagccactctaccgtcacccatgggaggatgtactttacaccaagtgagaaagccattctttgcaaggcataataaagtattattatcgcctagagcttccagttgcctgtacacttcattaaatcgagcacttgcaaaaaagaaagccagagagaggaagacgaacatcactagtcagcactagattgtgtgttttatgttgagttgcaaattcaggtcctgatttttgtcctgccttgaaccgttagacgatggcctcagaataaggatgctccctttaaatgaagtaacgctcgctgatttatgagttgattccattaaaaaaaaaaaaaaaaaaaaaaaaaaagcaagaccatttgcacagacccgcattaggaacgtaggcattttcaat

SEQ ID NO: 85041 - DNA, 871 bp, Zea mays
  unsure (1)..(871): unsure at all n locations
  Clone ID: MRT4577_177567C.1
ggccggccgggacacgctccattcttctccctggcgcgcctgctcctgcgcgcatccctctgccgaccgcgcccactgcccgctccctacgcgccaggacctctaccgagctccccatggcggcttccccatgccgcgccctagcccctgctcctccccgaagcttgcccctccatggcgccagatcccctgcaagctcgcccaagtcaccgccttcgaagctccctgcgcgcgctgcttcttatctgctcctccagttgcgccctgcctttctctctccctcacggtttctcttctccgtgagctcctccttgcgcacccagcgccgcgctcctgctcgccatagcgctagccgccgtcgtcctcctctggtgttcgctcaccacggcctccctcatcttctccgggtccggccatagctgaccgccgttgctcgtcttcttggccgtcgcgcccctggtgggtgagctcgctgagctccctctcccgtggatgctgtggagtttccccgccgcgtccatggttctgttaggagttcgccctggcccgcgcttccggcatcgcgcccagccgtgcctgctcccctcgccacgcgcccttggctcggtctctgcttctcttgtgtcgcgcgccgagctccatccatggccggagctccctactcagttctccagtctgcgcgtcgtggcttttccccaagctcctgctcggctgcgctctctgctcgctcgcatcttgccgaaacccttccttggtggcacgccctccgngctccgtgtgcgcgcgctttgctttctacgcgctagccatagcttggagatccctgcgcatctcctcccatggccgcgagcgaggcacctctgcttgctgc

SEQ ID NO: 85042 - DNA, 521 bp, Zea mays
  Clone ID: MRT4577_177568C.1
gatcgggtcacttttcttggaccggccatctggaagtggaatgttcaccaaacaggagatcgatgagattgtggagatcggttatctcaatgggctctttgtgcttgcacgatcaattggcctgatcgggcataccttcgaccagaagaggctcaagcagccactctaccgtcacccatgggaggatgtactgtacaccaagtgagaaagccattctttgcaaggcataataaagtattattatcgcctagagcttccagttgcctagcttccagttgcctgtacacttcattaaatcgagcacttgcaaaaaagaaagccagagagaggaagacgaacatcactagtcagcactagattgtgtgttttatgttgagttgcaaattcaggtcctgatttttgtcctgccatgaaccgttaggcgatattgtattggaaaggatgcttccgttattgtttcacgatataccacctcagagtagaagtttccagtaaaaatgaactctgatttgttcgtcgat

SEQ ID NO: 85043 - DNA, 235 bp, Zea mays
  Clone ID: MRT4577_177569C.1
aatagcccggtcgacgagtttactaggcggcgggcgatctttttgttgtgaatcaacacgagtaaagtatccacgcatcatacatagatcagatggacgggtgtaacgtatgaaacattacattcgttgctaacggaccaaggtaaggcgtgactactatatgatacaagaatcacagcaagagagtgcctggtctcactaagagtgacacagcggcggctcgagcctaattacg

SEQ ID NO: 85044 - DNA, 3123 bp, Zea mays
  Clone ID: MRT4577_17756C.1
gcacgaggagagaactagtctcgagttttttttttttttttttacatcaaactgacctcatttatcaggctgaaagcatggccctgccttttataattacatatgtgtccaacgtaagtgtcagtgcatcccatgatggcatacatacatattttgcgtacatacacatcacatgactggataattacatatgtccaacgtaagcgtcagtgcaccccatgatggcatacatacatattttgcatacatacacacatcacatgactggagaatcatgcagagatctctcatctcattctcagccaagatcaggaacgatgaagtagtcctcgtcgtcgtcgtcaggcacctccatccgtgacttcttgaacaggcgcgccccgttcgccttgtagaacccggcgttactcactggctgcggcgaggcgaagaactccgccatggcagttttagctggcgaatgggcgtggaacaggtcgatgtcctcgaaccactccagctccttgagcccaagagacgagtctttcttgtcgctggattcgtagtccgacagctcgaggaggtcctcgacggcccaaccggacggtggcaggaacggcgaggacggcacctcctgcggcagcgcgtccttgaccgtccttgttttggtggtcgtcccggcagctggcgcgctgacgacggccgtgggcttggagcttcccttgggcggcgccggcgggaggccctcggcgctggcgccgcagacggagctgaagccgacgcggatgccggtggcgaggtagcgctggtggttgccggagagcgtgccggggacgtggatgggctcgtcgcagtcgcggcagaggagcgccctgtcctcgacgcagaagatgaaggccggccagtagcgaatctagccgataatatgatcggggtcgtcaagagcagctttgctatatcatataaatttttatgaactttaacagtattttactaaaggatttataaaatttatcggggtcggctgaccccgataaacccccctagattcgcccctgaggccggcctctcctggcacacgtcgcagcgcgggaggctggcggggagcgccgcggcgtcgccgagcgggagccgctggtgcttgctggcgagcttgttggcggcgtggatctccacgtcgcagcgcgcgcacagcgccgcctcgtcggcgcagcacaccaccgtggccgccgcggcctcgcacgcgtcgcactggatcctcatgccgcccgcccctttcctacgtaatccggagcttccagtggagacaggcaggccagcagccgcctaaaaaaatcagcatgggaacgcggacgcgtgggcggacgcgtggggcgtggttggcgcgtataaatcgcgcagcgcgcctaacggaaggcgcccgccgctgggccatgcgccccgggacgctggtgggcgtggataccgacgtcgcagcgcgcgcacagcgcggcctcgtcggcgcagcacaccaaggtgaattccgcgcgttcgcacgcatcgcaccaaatcgtcatcgcccttggatcactctgtggtggctctatactaccgtgtgcagctcgctaacccgacgcctggtcttttaagtctaaacgagatcagggacgatgaggtggtcctcgtcgtcggtgacctcggtccggcccttcttgctctggcgcaccccggcgacggcagtggcagtggctttggctggcctgtagtacgccgcgtcgttcgcggcctgggttccggaaagctccggtacctcggccaatctcctgccggctttcggcgtctgctcgtggaagaggtcgatgtcggtgaaccactccagctccttgaacccgagcggggactccttgtgcagcttgtcgctggactcgcagtcggagaactgcaggagctcgtcgacggcccagccctgtggcaggaactgcggcggcgagggcacctgctgcgccgcggaggagacggcggccttgggcggggcgtggtggtcggagtcgtcgtgggcgtcgcaggcgtcactgcacgctgacgaagcggaggcgaagccgacgcggatgccggtggcgaggtagcgctggtggttcccggagagcgtgcccgggacgtggatgggctcgtcgcagtcccggcagaagagcgcccggtcctccacgcagaagatgaacgccgctttctcctggcagacgtcgcagcgcgggaggctggcggagagagcctcgagcgggaggcgctggtgcttgctggcgagcttgttggcggcgtggatctcgacgtcgcagcgcgcgcacagcgcggcctcgtcggcgcagcacaccacggtggcagccgcgccctcgcacgcgtcgcactggatcttcatggccgctccacctctctgtctgcggtctatactcccaggcccagctcgctatcctgtcctgtcgtctcgcaagtcgcaacaacgagggaggcaaggacgaacaagataaggccaccgactgcgatggaggaggacgagcttgcgcgcgcgagcacgcaactggagcaatcagtgagctgccgctgccgggcgagcttgtggtggaggactcgccggggagacttgtggccaggggctcccggctcgtctccccgtgtactagctacacgccggaaccacgcttggacgcgccgattcaggtttttttttttgggctcactcggcggaacgggccctgtcactcccggtattgcctttttacatggttttgttattgatttgaagaaaatttggtcagaactcaggaccgtttgtagtacttgtcactcgagctctctgtacccaagtgaaagtgtcaggtgttgaggaaatgttatgttaaaaacatcggagatgtctcttagactgctactagtcggttgcccgtgcgttgcgccggtttacataatacctcacgtaaactatccataaatttttttaagattttcaaccggcgcatgtgctaaccgcccgccccaacccacgttagggcgttcgcgccccaagggcccgtcccattggctcagcccgcccggcagacgcgcctcggcgggccgcctcgaagctcccttcccaacgggcggcgtgcttaaaaaacacaaaataatgtacac

SEQ ID NO: 85045 - DNA, 496 bp, Zea mays
  Clone ID: MRT4577_177570C.1
gcaataatggccggcgcccaagaagctggcgacgcccctggtcatcagcagccgtgcgcgcggcgcgtgctggtgttcccgctgcccttccagggccacatcgacccgatgctgcacctggcgggcgtgctccacgcgcggggcctcgcggtgaccgtgctccacacgcgcttcaacgcgttggaccccgcgcggcacccggagttccagttcgtggccgtccccgacggcacgcccgccgacgtcgccgccacggggaggatcatcgacatcatcctggccatgaacgccgccatggaggcgtcgccggccgtcggggaggcgctgcgggcgtccgcggtcgcggggcaggaggggcggccccgcgcctcgtgccttttcgtcgacgccaacctccttcgccgtgcacagggcggccaaggcgctcggactgccacgctggtgctgcgcaccgggagcgccgcctgcctggctgcttctttcctacccatgctca

SEQ ID NO: 85046 - DNA, 271 bp, Zea mays
  Clone ID: MRT4577_177571C.1
tagctttctattcttcaactatcttcaccatataatcgagacaacttcaaagatcttaagaaatcaacaagatacctaaaaaaatccaattactatatactagataacatccatttaccaataatttttccttattatatatacgcaacatcctaaagaaaagagacactctgttcaaccaccatccgaattcacaccgatactccaagaccagcagtctcttctactcttcgttgttgtcgcgtacacaccacaaattacctactggatt

SEQ ID NO: 85047 - DNA, 568 bp, Zea mays
  Clone ID: MRT4577_177572C.1
tatagaaggtcgctcgccaccgaggggaatggcggcgccgccggacagcaagtctgataaatccccagaggagctcctgtgcgcggcggcggaggccggtaacgacgatgctatcgccgagatcatttcctctggcgccgaccccacctacttcgacgcctccggcatgacgccactcatgcgcgcggcctccggcggccacgccgctgccgcgcggctcctgctcgatgccggcgcgccctggaacgcgctctcccccgaaggtctctccgcgggtgaccttacctccgaccccgccacatacgacctgctcctcgaccacgccctgcgctccgagctcatcctcggcaccgtcgcccgccgccaggcggcctccgcgaactcctccgacggcgtccccgccgagacctacctcgactcgaggatttcgttcagcgaggaccgggtgatggatgcggagagcaaggcggtgatgatggagtgggagcgtccgctgatggaggcgcacgcgcgggcggtgtgcgccgccggcggcggcaaggtgctcaacgtggggttcgggatgggg

SEQ ID NO: 85048 - DNA, 1293 bp, Zea mays
  Clone ID: MRT4577_177573C.1
aaagactccaccagttgcccccgttctacacgtcctaatccacagcacaccacacgggatgggtgggcggaccctcaagcaaaacctcataccgtctcgtcctgtagatgctcgtcccctgacgctaaaagagaaaagcacggcataacaagtaaagcgagttcagaaatcatcacaaccaattgtgagaaaaaaatgactagtaatggtgatcttagtctaagcgccgccatggtgcaatcttctgatattcctgaacaagagtttatttgcaaggatggaatgctctccagtcaggtgggtcagtgcagtgaaacagttactgtaccaagcgatgaagacaagttcacagtgcgcgaactgctttcatcagtaccagatctttcttcctttgtcccaacaacaatgatgaacactgagccaggaagaggtcccactctcacccagtcatcatgagaaaccatcgggtcctcatttaaatcctcctccagttgaggacattatacatgtcataagccacagcagtttccatgtgaatggtgagcaggcagtaaaagaaactggatcagagagcattgatgttgacaaacgtcttaacatggtaacagaagagataggtgtaagaagcaccgagccaaaccacataccttctggacctatagattctgatacggtgaagccaaatgtagtagaagctaatattacctttcagaaaccatccagtacagatgccataaaattgccaaccataccggaaggaaattttagtactctggagaccaacaatgggtttaagcaggaagcagctccggctaaggaaatactagatgtgacatccttcaggcagcgagctgaggctctggaagggctcttagaactttctgcagaattactggaacacagtaggctggaggagcttgcgattgttctaaagccatttgggaaggccaaggtgtcccctcgagagacagcaatatggttggctaaaagtttcaaaggcttgatgaatgacgaagcaagccgcagttcaacgtgagtacgcgtagcttttgtgccacccttttttactttggttgatttctgcttgtgctctgaagatgctatggttgtcttgttcatatctggcttattggtatcgtgtctccgctgtttccatttcgatagttattcattctttacagcacatgttgtaaatagcccagatttgtgaacagaaaataatacatgccagaaatggtgttaatttacatggttgaagtaacagagactaatttgatcaattattgttgtgcc

SEQ ID NO: 85049 - DNA, 245 bp, Zea mays
  Clone ID: MRT4577_177574C.1
gggagcaagaatagaagtgtttagagggctgtgcagggcggtatacacaaggacgaatgctacaaaatggactgtatacaggggctagaattaataaatgaacgcgactggcactgtaacttattcgttgcatgattgaactatgacactcttatctataatgtaccaacaccaggggacaggcgataggggggctaacagaggctggtcgactaccataggcgtactcaccagcttcactgctg

SEQ ID NO: 85050 - DNA, 157 bp, Zea mays
  Clone ID: MRT4577_177575C.1
tatctgttccaaggaatgcaccaaggaaagggcaccgacatacaaaccgagccccacatagcgtaaactatgcctgggctctaccgagtcgttcatggcatccatgaattccacccaaaattagaacattgggtgttctggaggagacatcagagat

SEQ ID NO: 85051 - DNA, 256 bp, Zea mays
  Clone ID: MRT4577_177576C.1
ctgcaaagaagaaaactccagtgaagccaccaccttcaaaaaagcgtaaagttggatctaatgttgaagcccctgcaaagactactggtgttgatgatgctgaggatgaggacaggatggatgaagatgccaagacgccctctaaaggagctggaaggggaaggggaagaggatgaagatgagtagcaggagctgcccctggggggcacaggtagaagaggtggtagaggttttatggtttttggtgatgagaaag

SEQ ID NO: 85052 - DNA, 277 bp, Zea mays
  Clone ID: MRT4577_177577C.1
gatggtgagccagtgttgcgtccgggcgttcaggcctatctgcaatccactggcgggcgagcccgatattactgtgtcgtcggcgccgtggaccccggttttcttatgcttttcttttggtgggagacgcatacattctgcgagggatgggttgcagacactaaagtgattgctgtagattctataaggacgatgtgaaggcgagcaaacttttgatcttgatacaatatgataatatatgacctgttgtatgtacgtgccagcggctgaaaaacct

SEQ ID NO: 85053 - DNA, 388 bp, Zea mays
  Clone ID: MRT4577_177578C.1
acacctgaccaagacgaattttatacatgctacggtagaatgttgtccctgagcgccaaatatgtttttaccagaagagctagagatagggggtgtttgaatgcactagaatagactacctacacaaagcagtttgatgctatatggcgatgtggcaccccacaatcgactgagggccggaatggagccgtagcctgaatagtaagtttctactgtataacttcaaactcttaaagcaagccgactccgccttacagcctcaatgtggtgtccgcttgccatgtggagcaagcttcagacgacctctttgtcttcttcttggtgaggaacttgccgcagttcgcgcccttcacagtgaacttcgtcaacagttccttaacgagtttct

SEQ ID NO: 85054 - DNA, 388 bp, Zea mays
  Clone ID: MRT4577_177579C.1
cggacgcgtgggcggacgcgtgggctcgatggggcacagacatgtttacttatggatcatactcatatgtggctattggggcttctggtgatgactacgacattttggccgaaagtgtgcatgatagagttttctttgctggggaggcaacaaataggcggtacccagctacaatgcatggagccctgcttagtgggtatagggaggctgctaacatcttaagggcagctagaaggagagcaaaaaatgtgtactcacctgagaaaatggatattaatgttgatgtagaagtgggtgttaatggtgaagtagaagatactgttagagatagctgcattgatttggacgacctatttcggtctcctgatgctgcttttggcggggtctc

SEQ ID NO: 85055 - DNA, 639 bp, Zea mays
  Clone ID: MRT4577_17757C.1
gggaccctcgagggcgggcggggcggggatctaaactgtatttgtctttgccttcatttggtttttctttctttcttcttcctctcgggtcccctcagccaacagaggtaatgtgtacggcgacaggaagaagatccacagagacaatgggttgtatccctcctagactgaggagtaccggtgctaacgtttacttctgatgctgtacaacggtaagcagcatctgcacgacggagctgacggggctgcacagcaactctgctattcagatggatgctaccgccacgacgaaggctgttggcatgcctcctccgtagcggatgccggacgcttttacgaagatccatgtgacactcgacatggagctggacaaaaagttcagggggaaggatggggcaattgtggctacaaagaggattgaggggctccccaacaacgggtcatctggtctgggccctcagaccagcacggtgactgctgatcacgatgccaacctggaggatgtggaccagccagctgacatcgtgtacaagcgggtgatacaccggctgcatgactacaacatcatccagatcttcatggacccaaacgacagcaacaacactgaatacgagctggagacctgcgctgcggactacc

SEQ ID NO: 85056 - DNA, 868 bp, Zea mays
  Clone ID: MRT4577_177580C.1
cgcaaagccctttttcaacgagcctggctacgctatgcatgctaacacggctcacggggagaagaaatcgctggcatataacgaggacacgttcctgctatcctgcaggacgatgttgtattctcttcgaaatccaccaaagaacttcgaggatttcgttgctggccatttccgccagcatgggcgcaacatccttgtcgcttgcagagcctacctggacggtgcccaggttggatgcctatcgggcgatggagtgcaggacgttgatgaaggcgacacgagctgctcggtgaggttcaagcagtcactgaagaaactcgttgaggagctgttgacggagttcactgtgaagggcgcggactgcggcaagttcctcaccgaggagaaggcaaagaggtcgtctggagcttgctccacatggacagcggacaccacattgaggctgtaaggcggagtcggcttgctttaagagtttgaagttatacagtagaaacttactattcaggctacggctccattccggccctcagtcgattgtggggtgccacatcgccatatagcatctaactgctttgtgtaggtagtctattttggtgtttgaatgcactagagcctagttagctgctaaaattagctgaagacaaccaaacattatatctgttcagctattagctaattttagcaatttagctaacaattagctagttatttgttagttagctaattttagtagcattttttagccaacaaactattggttctagtgcattcaaacaccccctatctctagctcttctggtaaaaacatatttggcgctcagggacaacattctaccgtagcatgtataaaattcgtcttggtccggtg

SEQ ID NO: 85057 - DNA, 456 bp, Zea mays
  Clone ID: MRT4577_177581C.1
gatgagggcacgacgcctttgcctgtcccaggcacaacaagacacttgtagtaaaacgggacgtgcctttgcctgtagccccacttggacaaaaaaatttcccacattaatttgggggcatgatcggacagaaggaaaacgtactgtactccttggccgccacttataatagtacaagcttattgcccttaactaatggtttttttacacaaacccaagcaaaggaaaccgggcttttaacgggcgaaaaacacccaacccccggggggggggggggcctaattcttttcttatagcgggtggggtttttggggtgggcctgggcctgggcctggattttgggtccccttcccgggtttgttcccaagcccgaccttttttaacagggccaggcccttttttgtgacctgggcgaacttgagaccttgccccggatgggggggccccttcccgggt

SEQ ID NO: 85058 - DNA, 2265 bp, Zea mays
  unsure (1)..(2265): unsure at all n locations
  Clone ID: MRT4577_177582C.1
agcttgtatcatatcatatanaacaagaatccccaccacgcagttgcactggcacgattaacaacccactgcatgtcaagttcctgaagaacatgttacgggtggtcctcaataacttgggccccaacctcctcctccccggcaacgcccggcttgtccccaagacaacccctgagaagtacaggccattgggtacctcgaggccggccgggatctcttcgacactctcacatgcatcgaagattccgctgacactaaaaagatcgaaatggcgccgggatcgtcgtcgtctcgtaaggccaaggccctcaaggcatcgtaccggctcgtcgccgacaacttcctcgccgtcctcgccatggtttctgtcgtcgccgtgctcttcgctgcatggccgatcagcatcgaggaccttgcctgccggctgcacgcggtgcggccactccacgtcctcacggcggcgatcctgacggcggccctcgcgaagctgaggcgcatgagccggccgagcgacgtgtatctcgtggagtacggctgcttctggcccaagccgtgcttccgggcgccgttcgcgacgtgcctggagcacgtgcggctcttgccgtacctggtcaacgaggacgacatcagctggggctggcggctcctccagcggtccgggatcggcgaggagacctgcgtgccgtacgcctaccactacctgcccccggaccgcagctttagggcctccctggacgagaccgagctggtcatcttctccgccgtcgacgatgtgttcgcccggacgacggccgtgacgcccgcggacatcggcgtggtgatcgtgaactgcagcatcttcacgcccacgccggtgttcacggacatggtcgtgaacaggtacaagctgcgcgccgacgtgcggagcgtgaacctgtccgggatggggtgcagcgcggcgctcatctcgatcggtctcgccaggaacatgctgcagacggcgccgccgggcacgcacgcgctgatcgtctccacggagatcctctcgtcgcagtactacgtcggcacggagcgcgccatgctgctgcccaactgcctcttccgcatgggcgctgccgccatgatcctttccaacaccgcggcccgaggcgcgcggttccggctcgcccgcgtcgtgcgcacggtggcctccgcgcgggacgccgcctaccggtgcgtgttccaggtggaggacgaggagggcaacacggggatccggctctccaaggacctcgtgcccactgccgcccagaccctcaaaagcaacatcgtcgccttcgggcccctggtcctgcctgcctcggagaagctcctcgtcgctctgtccatcctgaggcggaggctagtacggagcggccgggggagggtgtaccgcccggacttccgcaccgcgttcgagcacttctgcatccacgccggcgggcgcggggtcatcgacgaggtgcagcgcggcctcggcctctccgacgaggacgtggaggcgtcgcggatgacgctgcaccggttcgggaacacgtccagcagttcggtggtgtacgagctggcgtacatcgaggccaagggcagcatgaggaagggagaccgcgtgtggatgatctccttcggcgccggcttcgactgcagcagcgtggcgtgggagtgcatcgagcccgccgccgacgctgctgggccgtgggccgactgtatccaccgctacccagtgcagctccctaaattgatggaggcccttgattgaatccgtacatgtagacgtgaagtggcataatcaatcaatgttgtactgtatctttaatgtccaaatctgtcatcaacggacgggacatgtgattttttaacggactagttccaaataaactgttactgatctttcaattgaaaaaaaaaaaaaaaaaagcgggtcgccaaggacaacatctgatcaaccccttcttctggatctggggcatgctgcatcatgctggacatgaacatgcccaaggcttccgtcgtcgtcgatgtcgtcgtccttagtgccgggctgtcggccgccgcccaacatgtcgtgctctgtctatgatcgatctcttggaaataatgtagccctacccctacggtgtccaaaacgcaagtagagtatggcgcgtttgtgtttgttaccactgcacttgtttaccacgctgcactgcgtttgtgtttgttaccactgcacaaagttaattaagagccagttacgattaaaaaaaaaaaaaaaagggccggacgcgtggg

SEQ ID NO: 85059 - DNA, 464 bp, Zea mays
  Clone ID: MRT4577_177583C.1
gtacgtaagctggatccttaatcggccgccttttttttttttttttatttcccaaggaaactttacgggaggtacacattaaatacaaggcttctcaaatgagagaacattctactgtcataaggcaagaaaactacatctaagtcaaattcaagcatgcatgtatgctccactgctccagaacgctacttcgggttatactatgtgcgccatcaattattcactcaagacaaagaggcaatttacaaaaaaccaacaaagtggttgaaaactaatataaccagtttagggtgttgtcatccacaattccttgatttattaagaaattattcctgctgatttctcaagatatttactttaatacctgaaaattctgcatttttgacacatcagtcaaaatccttggcccagatctttttctttgggtaatgaacacctgactttattttttaaaaactttttga

SEQ ID NO: 85060 - DNA, 583 bp, Zea mays
  unsure (1)..(583): unsure at all n locations
  Clone ID: MRT4577_177584C.1
tgtccgggatacgtgccccggctcgcctaccccaaattcctactccaccgcgccgggccgaatacctagcccgcaccaaaaacctccaccgcgtctgattcccatcgcctgcgtagccggcatcctcgccccagactcgcccgtcttgaaatcctacaccgcgtcgcgccgaaaaccttgcccaccgtcaccacgccacacacgctctggtcttcgttgccctaaccacacccttccaacgacgggggcgctaccgaaacgccgcacatgctctccgcatcttcaccggtcgtcgtcctaactgcgcccttccaacgatgaggtcgctaccaaagcgccgcgcatcctcctcgcatcttcgtcgcccctgcgccgcgccgaaatcctcccccaccgcgcccttccatcgacgaccatggcggactacccacgcatcatgcacgccccgccctccgtgcctgtcctccggggccagcgcgctccccttctcctcaccagactccgncgncgcgggtctggttgcccacctcaactccgaggaatgaggactccggcatgctcgctccggagacaccggctttct

SEQ ID NO: 85061 - DNA, 449 bp, Zea mays
  Clone ID: MRT4577_177585C.1
gaacaaaaatgggggagactttttgggaaacaaaattttgacgatgaaaaaattaaaacaaacccctttttgggttggagagaaaaattttttggggggggggtgtgcgggccctaaaaaccaatgtgaaattgcctttttaagcttggggggggggatcctttggggggtggggcccatgccccccccccaaaagcgggagggccccccattttttaccttggggttccatcccccaacaatggccaaccgcagtttatttgttttttatcaacaaattttactggttaaagaagggggaaaagggggaggggggccattactaaattttaagcttcattttttcaggtatgaaagcctttacatccctgcatttaagaaccgggcagtttccggggttgaattttttgagggggggaacaggagtttccacataaagagacactttt

SEQ ID NO: 85062 - DNA, 182 bp, Zea mays
  Clone ID: MRT4577_177586C.1
aatctcgagcaggtagattttagaaccgagcacataacacagtgggcgcagtaccaggcgggaaacggcggtttgaattatttatttaccatgctggaaacggtggtttgaattgaataagacaaagtttttgaaaaaaaaaaaaaaaaaaaaaaaaaagaaacaactaaactacacaaaaa

SEQ ID NO: 85063 - DNA, 345 bp, Zea mays
  Clone ID: MRT4577_177587C.1
ctggggggcccccctgaacaaataagtcactaacgggttcaaagacaaaattttgggttacaattgggggttggggctacaatagggccggggacaccagaaacactttgcaataaactttgtttattttttacaagcaaagactacaagtttttctccctatataatttaaggcccaatcaaaacatcaggggtccctacaagttttaatcccagctttttatttatttcccactttcggggtgtaataaacaagaaaggggcctcctaaaggagtttaaacaacttttgctttaaaaaaagaattcatgggtgtgaccttaagggtttgggctggcttttaag

SEQ ID NO: 85064 - DNA, 122 bp, Zea mays
  Clone ID: MRT4577_177588C.1
cgtggatttcttttttttacacccaatgtctgcttggagcaaaatattaccagccttctgcccgtcttcaggcgaacctgaaccggtccactggctcctttctgaaagccccttgggaacac

SEQ ID NO: 85065 - DNA, 576 bp, Zea mays
  unsure (1)..(576): unsure at all n locations
  Clone ID: MRT4577_177589C.1
agccgttccanacgcaagccaccgcaaccgaagcgcgccagcgccgccgcccccgcccccgccggcncagcgacccccgcaagggcgcaaaaggccaaccgagcgccagcgcccgacccccggcacggcccagcggcgcggccgcaagaagacggccgaggccgccgccgacaccaagccggggcgcggaccgaccaaggcgaacggcgncccgagagagaccaccaggacggagacgcaccaccccaaggccgccgagcccacccggccggcggggagcgccagggncaaggacancgacaagaggaaccgcgcccgaggcggcgggattttcgtgatttatcccccccacccgccaggccgtcgtcaaagggctcgtcgcctactaccacaagcacgacgacgaggccgccaagaaggaggaccaggacatcttcacccggtacaagcgcacccttctcgacaccgaccaccagcgctgcgagccgaagaagtgcggcggtcgtggcgcccgcgccaggatccagaagtcctaccgatgaaagctcgggtgcccgctcttgacgcacgttgcct

SEQ ID NO: 85066 - DNA, 263 bp, Zea mays
  Clone ID: MRT4577_177590C.1
caggattctcaaaactgtaaacatctgcaggatgaccaggaataagaagacacagtgtcctcaagggtgatccagaaacaaaatggcagcgggccgatattcttcacaggatccgcataaaacttatcaccaagttggaaagcaaggatcagtgcagggccccaaaggtgaccttcttgggcctggtgaagagcctctttccttctaccagaaaccaagagactgtgaacctcctgggcagtagtctgaatctggctttctga

SEQ ID NO: 85067 - DNA, 773 bp, Zea mays
  unsure (1)..(773): unsure at all n locations
  Clone ID: MRT4577_177591C.1
gcatcgcccgcgctggcatcgagctcttcactgcgatgcgccgcgcgggcgccactcccgacgccttcaccttcaccttcgtcctcaagtcttgctcccgctgccattcgcctggtcggttaccttctgacctccacgcccaggcgttcaagcatggttgcctcggcgcgggtagcgagcacggtcatgtccacaatgctttgctgcacgcatacgcgtctcggtccgcagtagacgacgccagcagggtgttcgacgaaatgcccgtccgggatgtggtctccttctcggggctacttacggcgcacctaaaaaacaatcatctggactccgcgcgcatggtgttcgaccagatgccacaccgtgnacgttgtttcctggactgccatgatctctgcctatgccagggcttggcgcccacaggaggccctggcattgtttgatgcaatgacagtgcagccagatgaggtgaccatggcgagtgttgtttcggcatgcactgcacttggggaccttgagactggtgagcgtctgcggcaatatgttgattccaatggctttgggtgggatggtttcactccgcaatgcgcttatggacatgtatgctaagtgntggttgcctaactgaagcancgtgttttgtttgatgggatggcgataaggagcttggcatcttggaatacacttatctcagcatatgcatcacatgggtgatgtgggaaaacacacttgcttttgtttcatatgatgcntggctgatgacaattatctga

SEQ ID NO: 85068 - DNA, 802 bp, Zea mays
  unsure (1)..(802): unsure at all n locations
  Clone ID: MRT4577_177592C.1
cctcgaggccggccgggatcttctctcccgctgtcgtacgctaggattgcagtcaacctgttcttcattctacgtgcttcaaaatggcttctgcgaccggaatcccgcctaattccgctgccgcgcgcggccagagcgaagaagagccgctcctcggcagaagaggcgatgcaagccagatgcagggccagccgctgtatcacaacttgtggattggtactgcccccatcgcccaggccggtatctggattctcgccgccatagtctggggcgccatcttctccaacaaactcatcttcttctccgcgcatccacttctcaactctgccggcttcctcctcgccatccaagcagcccttatcctgcaacccacgcacacgcccgatcaaaagcgcaccggcacactcgcccacttcctcttccacgtcgtcggcgcatccgccctaaccgccggcctcatcatcatcgaaatcaacaagcaaggtcccggccacgagcactttgcctctgcacacgcccgtctcggtctcgccttttacgttctcgtatatctccaggcgcttgttggcttcacccagtactacgtgccccagctgtatggtagtgttgagaatgctaagagcatctacaagtaccatagactgtctggttactttatcgctgtgctgggtctagctactatttgtgcggctacgtggactacgtataatatctatgtggggcatatgcagcattgggcggtgattacggcgagtgtgcttgtnctgggttggtgtggtgcctaggattcggcttagcaagt

SEQ ID NO: 85069 - DNA, 152 bp, Zea mays
  Clone ID: MRT4577_177593C.1
ttcccggaaaaagcctccattcccgagtctctagccaaccgcatccagtccaccccatccccctcgaccccgacaaccccgagtccctgacccgatgggcgcccaaggggccgagcaagaaaagcccagcgggagaaagtaagccccggcgg

SEQ ID NO: 85070 - DNA, 571 bp, Zea mays
  unsure (1)..(571): unsure at all n locations
  Clone ID: MRT4577_177594C.1
ggagtctngttccagtacccttatgttccgggccaggttctcgcaaatactaatacctttgatctctcaagatggtgtcgcattcgtattcccctggctcaagcgggcgatctggaggttccgatccaaaacaagtggtgggaaacggcttctcgtatcactactacaacatcttgaaccagtccgcgacacataggaatacgatgatgatgggaggacagatggcgcacaccgcctcaggaggagcgcaggccaagacatgggaacagtgatgagctatggatgggagtaaaggcagagataggggacctggttattgaacgaccacacagcagggggtggtgccctgatgaattcctctgtggaggatgctaccggttattcatgagatgtcttgaccagcacgaacagccgcgagcacatgcatggacgtagaacctcttcttcctagattgatacgagaacgattactatgaaggtgaagtaatactgcgctaagtagcggacgtagaacaggataagacggctgagaacgacatagaaattctcgatgttgtggaccccctgacaa

SEQ ID NO: 85071 - DNA, 522 bp, Zea mays
  Clone ID: MRT4577_177595C.1
tgagatctcttttccataacagaatgcactgttcttgctacgtatcctagagagtgagatgctcttgcgtgattgactcttcttggctgaccgtgacagacttcgagtggaggtatttctgtgtctgtacttcaacgacatgcagtatcatatcaaatcgacggaagacggcctctcatgcgccttcgttatatatatctgggcttaggtggagaaactgggcgcatacgatagcctgatccatttctcccaagggccaaagatctcctgcgcgtttatgggcaagcacggcacaggcacgcgtgatcacagctcatctgacaattggctcgatggagacgatatctgaggcgaccatcggagacttcatctcgtgcctgatgaataacatcgctatggtctacggtgaagtcagcagtgtactattgctgaacggagtgaatcaggtcccttccgagaagcttactactgcgtgtgatccaactctcctctcgagtcctcctcgtactaccactgctcgta

SEQ ID NO: 85072 - DNA, 2110 bp, Zea mays
  Clone ID: MRT4577_177596C.1
aagctgggccgagtatgtgcgtctagaacctcttaaatttcggggggagctggaagccagaaaagtctcctcttccttgctccgttcatccgcccctcaccgtcgcccaatctcacatggctcggcgtctccacggccaatccgacctcaacgacggcgcgcgcctccgtttctccacctccaactccagctccagctcttcctcccggttcctcctcgccgccccctccgacgacgcctccctctgtcggatccaccgctgaccgcgcgccgctacgcctgcgcctgatcaccggctggttcttggcctcttcgcttcctggaccgcccagacgtctccatgggcaagagtaagaggaacaagggcggtcgaggtggtggtggtgccgatgacaagcttgacggtggtggcgatgccgatagcgtgacctccatgtccagtgggctgtctgaccttcagttcgcgcaggccacagagcatattagctcgcaggaattcgttcttgacaagtacgtcgacgctctctatgagaagaggggatccacaagagaggaagcattgggctctcttaccgatgcttttgaaagttttgtgcttcttggtttagtggaaaacaaatatgtcacactattgagccagttcatcaattcaattaaaaggggatctgtaaaagaggtgtgtctggcttgtcgctgcattggcttactggcaattacactaggtgctggaagtagttcgcacgaaataatggatgagtcacatccacatcttttgagagttctccaaacttggcctgatgcacaaaagatgatctctgcacttgattgcttagcagttgtcacatttgttggtgcaactgatcttgctgaaactcagctatctctgaaagccatctgggatgtgatccatccaaaatcaggatcaaatgtcggcgtagtcagaaaaccgaagcctcctttgttagcagctgccgtatctgcatgggcatttcttttaacaactattggttcatctagaagaaatactgattcttggaaagagccaattacatttctctgtagccttctagaagcagaggaccgtgctgtgcggattgctgctggtgaagcattagctctgtgttttgagctaagactgtttgatgtttcttctagtgacgaagctgatgttgacagttacactagagaggctggtggttctaagcatcaacttttcttgaatatgcaagcattgaaggccaaactatctggtctagtctatagtctatctatggaggcggggggcaggggtgctgacaagaaaaatcttaatgatcagagagacctgttccaacgaatctcagattttattaagagtggtgagtgccctgaagaatcacttaggatttcaggcaagaatggcattttaagagttacatcatggcgtgaatcaatacagttgaactatatgaggcggtttcttgggcggggattcctgaagcattcacaggacaacgatttgctgcatgaggtctttgacatcaaaattgatcgtactgaaaacatgtcagccaccgaaaagaaaatgttcagatccggagaagagaaaggaagagctctgaagttgaataaagagcgtcgtctagctcaggagaggaagcagctgaatatcttgaacgagcaatatggatagaacctagccggaagactggagttttgtacagtcgaactgttaccagatggtgagtgctgtgtgtgtgtatgacggtattgatgcatttgtgaggtgtattgctccggtggcggtactacaacacagttttgcataccgaggagcagaggcatgtacagcgtcatgtgttgaaattgctccgaaatattattgagttttgtagaaagtgccgtgtgccctgtgcactccctagtgtttcctctgcatgcgcaaaggagatcttgagttcagttaatcacaattgtacagttccatagggtagagatatgaggtgattgtgaataacacagaggtcgtctagcctaagggcaataattggcgaactcttcctctagccgcaataattggtctgcaagagatttcgaaatgcgttcgctctcgttcgtcctgagctttttt

SEQ ID NO: 85073 - DNA, 471 bp, Zea mays
  unsure (1)..(471): unsure at all n locations
  Clone ID: MRT4577_177597C.1
ttcctctcgctcccgttgctcgcctcgcgtcaaacctttagcagggagttgatttatgcgctgccgccatgactaagncgctccctgcgggggtcgaggctcctatcagcgatgactggatggntcgaaaggaagctcctagcctgcggatggtcgaggttgacacgagaggattgtgatgagtttctttctttcctgcaccactttttgggggggggtgnncanttttttttttttangaacgcaancacttaccacttaaaaanttcttctgacacttttgcctgcgctcactcatgccctgcgccttctagcgtctggtgttggggctgccacccgngtcccaggtgtctattccgtcgcaggaccgtttgtctgccctgcgtgagaagccgagcttccgccttccgaggagcagccgtgcctgctgagctgaactcatcgtgcgttgtgtgttcttccgttgaatct

SEQ ID NO: 85074 - DNA, 761 bp, Zea mays
  Clone ID: MRT4577_177598C.1
ctagtgacgaagcttgatgttgacagttacactagagagtctggtggttctaatcatcaacttttcttgaatatgcaagcattgaaggcccaactatctggtctagtctatagtctatctatggaggcggggggcaggggtgctgacaagaaaaatcttaatgatcagagagacctgttccaacgaatctcagattttattaagagtggtgagtgccctgaagaatcacttaggatttcaggcaagaatggcattttaagagttacatcatggcgtgaatcaatacagttgaactatatgaggcggtttcttgggcggggattcctgaagcattcacaggacaacgatttgctgcatgaggtctttgacatcaaaattgatcgtactgaaaacatgtcagccaccgaaaagaaaatgttcagatccggagaagagaaaggaagagctctgaagttgaataaagagcgtcgtctagctcaggagaggaagcagcagaatatcttgaacgagcaatatggataggacctagccggaagactggagttttgtacagtcgaacggttagcagatggtgagtgctgtgtatgtatatgacggtattgatgcatttgtgaggtgtattgctccggtggcggtactacagcgtcatgtgttgaaattgctccgaaattttattgagttttgtagaaagtgccgtgtgccctgcactccctagtgtttcctgtgcatgcgcaaaggagatcttgagttcagttaaaaag

SEQ ID NO: 85075 - DNA, 290 bp, Zea mays
  Clone ID: MRT4577_177599C.1
aaacttcaagcaaattggaaaaagaaacttgtaagaaatcacaccctattctatatgtgtcttctaaatctactccagagacccagtgccctcaacagtaaagacttttctttaataagagtacggtgccacttgcctcaaaagttactatggtgcttaagattgtcttgatctgacatatatcaccttctgggttatttactcattgtgccaggacctggcattttcatgtgcctttgaccaagtgttcagaatttgcttgactctaacctggagagcttcttaagtga

SEQ ID NO: 85076 - DNA, 398 bp, Zea mays
  Clone ID: MRT4577_17759C.1
tttcttttttttttattttttaacacttgattaacattattgagctttaactagcaatccattcttgttacattttttatttaaacaaaccctttttagttcaattcatccaggacaactatttgttttgtatataataatactacatttatagttcccaacatgggtatctaattttttctaacgcctaatacttgatcttcttaataccattaaaataaatttaggtaatgtctttttagtgttcaccattcttgtattattcgatttctatatacgcattatcctttttggactcaccaacataaaatttgtaggtctttagcttgctaaagaaaaacttggttgtaccctcgataccctttttgaacttattcgttttttttgcttcaacacat

SEQ ID NO: 85077 - DNA, 490 bp, Zea mays
  Clone ID: MRT4577_1775C.1
gcacgagggagatcgccgaggaggaagaggaggaggaggacgacgagcggcggcaggggatcgtgggcgaggagcgcgcgcgggacgtgacggagcgcgccgaggagctggcggcggcgtgccggacgctcgaggacgggctcgcgccgctggagcggcaggtgcgcgcggtgttccaccgcgtcgtcgcctgccgcgcggaggtcgtccgctgcatggagctcagcgcgcgcgccggcaccgccaatgccgcgtccgcgtcaggcgtgccgccgccgcaccagcactccttctgaggcgacgatcgtcgacgaattgcttgcttgctttggggggtcacaaattattctctccccccattgccctgtactgtaccattctttgatttgtactgctaccctgccactgccagtaaaacaacgcctctcttgcttctcatgccctgtagatgatgagcctgctgtatgtaaaaaaaaaaagaactaacatc

SEQ ID NO: 85078 - DNA, 339 bp, Zea mays
  Clone ID: MRT4577_177600C.1
ggggggggcagctcgatcaactcatcaagcaaaaattgaactgggggccccaacaacataagatttggccacacaggggcagggacacaacgggagcacgttctcgggagacccaaacagcagatgtacaaagctactcacatactggctggggggggggaaatctgttttccacaggcaacaaatacctataccagcgcgcgggggggaccgaacgaccccgaatccccaaaattcggcacactggttaaagagaatcagaattttttttccccccgaaccactggggggggggggcgccgttgcctttgctgatgttgggttgtgccggcgctctgg

SEQ ID NO: 85079 - DNA, 368 bp, Zea mays
  Clone ID: MRT4577_177601C.1
atcttaaagcgcccgtttttgttacggggttgcttttccattcaaacatcacacacgtttacacttatgaatcatcatttcacatttaatttacacgacttcacatttagcttacacaacttctttatggccagtcttatcaaattatatcatgaccaaaagagaccttacattttaagctaagcatgagacatatcaaattaaatattgttcaaaaccaatccaaaaaaagccattcaaaatcaatctatcaacttttacaggtatttaaaatgtacactcatattctattatatttgccttcaatattcattcaaagaataagtgctattcgcctgatactatctattgcgtagcaataattattg

SEQ ID NO: 85080 - DNA, 368 bp, Zea mays
  Clone ID: MRT4577_177602C.1
attacaaccaatctcccaaactgattatcatagttttaccgaggaatgttctgagaagacaatttctctgtcagagaccaagcatactctgtttgtgcagactgattcccagttcttgcagtgaactttttgccataaaaaatctccacttttttttcccaacggcaaaatgaacttttttgaagaattacaaaaaacaaaaagtagcacagaaccaatttcacaattatgttctctcatatcacatggatctctataggacgtacatagcttctgattttcatttatctgagcacaaattctattaacagaacagaggaggaattcaggagtgggcatgtggaggattcactcaacgtgccctatct

SEQ ID NO: 85081 - DNA, 263 bp, Zea mays
  Clone ID: MRT4577_177603C.1
aggtctcggccgggtcttatgagcctgtagccgcagacatttgactaatctgtcttactcacagcaagttattgacctatagcatttttcttgtatgttggtgtatcttgagtctgttttgacttgcaaataaccctcacttataataaatagcttgttcttcttgcaagtttaattttaagattctgaagaactaccactaccaagtagtagcagttccaactgttggggtcttgacttcgcgaatggatcgcatgtaccta

SEQ ID NO: 85082 - DNA, 1673 bp, Zea mays
  Clone ID: MRT4577_177604C.1
caggaattcaggcgcctgcgccaatgtgttacatatgcaatacgttcgcttcagcgtaatcaaggaaagccttatttttttttattttagaacaacaaaagcttgggacggcacggctgcatgtagtgacatttacaaccatatgcgtttattgcacagaagtcactagaatatctatctgggtaaaaataaaacaacagagccgacgggaacagccatacgaatatctatctatctacaggctggctgaccaattcagtccagggttccaggcccgactggactcgcaacagcaggctgtacctgtatggctatatgcttgcaatcgcttgtttgatttttggttatgtcatggttgtccagtggaacactgcatttgtgtggaatgcactgcaatgcttcggtgaagctccagaaggacagacaaaatcattaaccagcttcatttcgaggcatcattgttccaagtgaaggaaaccaccatggccacgggcatttgtgaacttgtacagaggtccaaaagcttcatagccaccatacacagggtcttcagacagtaaaagaggtgtgtccaggtcaacgaaactaaagcaaccaaggccagcagctaaatgaccagcaaagcccatagcaatcctagtctcgaccatgccaccgatcatcagagcagtattggattttcttgcagcattaattatttcaagggctccaagaacccctaactttgccaacttgatgttaataacatgggcaatattcccttgtattattttctgagcatcaagcaaactccgacagctctcatcagcagcaacagcgactttgtatttctccatggccacagcgctgacatctcggagaccttcccaatcatctctgtgaactggttgctcgaagagcacaggggtcactcccatttcatttagtctatcgagaacctcaattgcttgatttgctgtgtatccctcattcgcatccaaaataaacgagcaatctggatggacaagtcgtatagctttcagaacttctatatctgaattcaagttcttcccgaccttgagcttcagagtttgaaacccttgtccgcggtattttgcagccaattgagcagcttcatttggggtcacgattggaatcgtgatgtcagttgtcacactatctgatgctcctccaaataatctccatagaggtatgccaatgctattagcaacagcatcaatcagcgccatctccactcctgctctggccgaggcgaaggcgtgtcccggaagcacactggcgaggtcctggagcaccgcgccgaggggcgccgctggggcgtcgacgagcgctgcgcacgcccgtcccgcggcgtcgagcgctgccggctggtcctcggccgtgacggagggcaacacgggcgcctccccccacccgacagcgccggtgcggagctcgacgcgcacggcgacgttggagaccgcgacgaggcgggaggacgcgatggtgaagggcgcggcgagcgggacgtcgagcgcgcgcgcgtcggccgccgccacgtccacggagaaggtccccttgagcgcgtcgaagccgaacggctccacgggggacgccggtgtgggcggggactgggacggcgagatggcgcggaggcgggtttctgggccgacgcggctggcgccggctcgagg

SEQ ID NO: 85083 - DNA, 166 bp, Zea mays
  Clone ID: MRT4577_177605C.1
cccacgcgtccggcgacgcttgccgaaatagtgtaccacaggtgcgaaaccaacactgcagcagacagaatgactgcattttcctgacctgaataatacgttgattgtgcgtagtaaagctgtgacatccatcgttgaacagtaccgatcagacaaccggacagga

SEQ ID NO: 85084 - DNA, 224 bp, Zea mays
  Clone ID: MRT4577_177606C.1
tattcgtctgttcctgcagctcatgccacggggacccgtggatctagcacaggtggctggtcctacctaacttactgttagaccatctgtatgtcttcaacacagcgacagatccaagtgcaccatccttgcataaggtgtctaaatctgaggacattacttaaattactgttctagccttttcttacacgaattatttccattacctttacaacataatgatt

SEQ ID NO: 85085 - DNA, 322 bp, Zea mays
  Clone ID: MRT4577_177607C.1
aacctcggaattcggctcgagaaatggtggaaggttcgacgcttatttgtttttttggcacacatgactacatggctggggagcgtgcgtattctctaaacgccactgacaacagccacgtttacaacttctgtgtcgcactgctagagttgcttacaggacatatcccatctcattcaacattttggcggagaaaaatacatctgctacctgggtctcactccattcggcagacaaagaccctgctctcgttcttgaccctaaagtcagcaacgatgcatcggatcacaattacatgatcaaggcgttgcatattgctatt

SEQ ID NO: 85086 - DNA, 577 bp, Zea mays
  unsure (1)..(577): unsure at all n locations
  Clone ID: MRT4577_177608C.1
cttgaaaacgcaggaggactgtgtctcattatattaagtagaaagaaggataagggtctggaaaacagaccaggtacaagagcctccttacagaggacgaaagcataaaaacataaagggactcagaaggaacctagagacaacaatctcacggcaaggacagggagagaaaactagaattcagggtgctgggcagccaaaaaggacatacccttggccccagccatctcccatctcattctctcctcccctgctaacctaagagatagtgataaatttggagtccagccataaaaaacatagcgattcagagagttgaggcccttcaaagcaaggccattcacaccctcagagatctactcccaccagttcataaaagatctgcatccaggctggggggctaaattttgaaagccaaatggcctaagcattgagttaacatagttagctgntatatttgagttcttcggtttaagtttatgttgatcgatttaagaggtgagctgaatggttattttatggaaaagaattagtttgatccatctagctgtgctaccactatttttaaaatctgcta

SEQ ID NO: 85087 - DNA, 230 bp, Zea mays
  Clone ID: MRT4577_177609C.1
cgttcgctcatgctcccattccacgtcagattcagtatcatcactttctcgggggtggggaccaatatgtgagcccttcttatagctccttgctcttatgtgtatgtacttgctaattcgacagttgtctctcattgctcacagactaccaactggtccacaacttctcatatacctaccatcaatgatctccattacaatatgataacccatctgtacacgcatatatg

SEQ ID NO: 85088 - DNA, 271 bp, Zea mays
  Clone ID: MRT4577_17760C.1
tgaagctccacaacatcaacccgtcgtctcgaaagatctccgtcgccgttgccacgccggtcctcgtcctgctggcgttcgccgtcttctcgctctacgacatcaacttcgctgatagttaccagtacatactccgcgcctcctctgcgtcgtcgtcgtcgtctacgagagaccgtagtctggccactaccccttcgtcttcgacggttccggacacgtcgtcgtcgtcgtcgtctccgatcaactcctcctcgtcttcgacgtctccggc

SEQ ID NO: 85089 - DNA, 475 bp, Zea mays
  Clone ID: MRT4577_177610C.1
ccggccgggataaatgtaccattcaccggagactacgactcaaactcctattgcgaatatcatgggtctcgtatcgcaagagcaagtgcagtgctgctgcgtgggactatctttctgtgaagcgaagcctgatgtggacctcccaaagatcccccccgtcaaaacatcacgacgccactcatgggagtgattcgactagatgcctcatgaacgtgtgatcgcacaagcacacatgaagataggccccagacgacagtggagtaggctttcatcaccctgcacgataataatgcccctttcctcacgatgcaagcccgcggtgacgcacctcttctccaccacgtgcataggatgtgcatcctgcttccagattgagtgtcgacaacgcagcagagtgctctggcaactccgttgggttgcatcatgtaccgacatgaactacaagaccgttgatcattatcactgcgacctattg

SEQ ID NO: 85090 - DNA, 109 bp, Zea mays
  Clone ID: MRT4577_177611C.1
aaggttggtttctttgggctaaggcggccctcctttgccatttatggcaccgggaagatccataccaggctcagcctcttttgctgacagcgataaatgatggacagct

SEQ ID NO: 85091 - DNA, 402 bp, Zea mays
  Clone ID: MRT4577_177612C.1
gaagctcggaattcggctcgagggcatgtatagcccagagctccgacccgagagacaccagaaacaacaggggggcgtacaaaaacacggcgggggaggcgacccgcgcccagaacggaccggccagcaagggcccgctggcgggcacgacgacaggggacctgggcgccacgagcgccacccagacgcaagaccccgcagcgacccgcggcacggccaaagccggcgcgcacccgaccagcggcgcgggcccgacaccggtagccacagccgggaagcgcgccgggcagccggacgcagaacacccggaggcgcgcgccacccacagggccagcaggaagaacagaaacaccgtccgccagagcctcaccaggaaccccgccagcatgaagcgggcccaag

SEQ ID NO: 85092 - DNA, 610 bp, Zea mays
  Clone ID: MRT4577_177613C.1
tttccccccccccccccccccccccccccccgcccccccccccctcctttttttaggttcaaaactggggcaacatttttggagcttcttttgggacatttctttacacctttcacgacattgaaaactatataaactcttgtttttggaaaactatagcttttttaaacatacgacgagaagaaaaaaaccttttaatgcccgggcaactacaaacgttgtccaaatggatcagtctgaaccttggcctcacgcattcaaactttaagagtttccggagaccttagccgggggttttgccgacgtacttaacagtcaaaaaggaacgtggagttcggagggatgacccacgaggggggctcccaccctttggacccagcacccttttcgccgtaggccaacccggaggcagctttagagaccgcttacccccagggagcattggggggatcccttctgcgcaaacaataccctgaacccatcctttgatcacctttccgacgccaacgaggaaggggagcggcttcccgcgcttgtagttgctgtcaaacaccgagccgtactccagcctccccgtgaaatgcgccctgatgagctgtccctcctgggc

SEQ ID NO: 85093 - DNA, 220 bp, Zea mays
  unsure (1)..(220): unsure at all n locations
  Clone ID: MRT4577_177614C.1
tgggacttaaacccacaaacacttagttaacagctaagcaccctaatcaactggcttcaatctanttctcccgccgccgggaaaaaaggcgggagaagcccggcagtttgaagtgttctncgatttgcaattcatatgaaaatcacctcggagtggtaaaaagaggctaaccctgtctttagtttacagtccatgttcactcagcntntttcttntttaa

SEQ ID NO: 85094 - DNA, 840 bp, Zea mays
  unsure (1)..(840): unsure at all n locations
  Clone ID: MRT4577_177615C.1
attgggtacctcgaggccggccgggataaatctgtagccagcagaaaattcgggcggaaggtcggcagcaggcgcatagatgagggtgagagcattggcggtagcgcttgacgagcgacgagtaaaccctaacgctttgattgcgggcggcgtcgtttgagacactcccgagtcgatccgcctacatgcctatgaatcctcctcccccgccgcctcctgggtcggcgtcttcggctccggcggggcccagctacttcccgctccctttccacctgcagcagcaccagccgcagccgcaggtgccgccgcctatggcggcgagcagctaccaacagtaccagcaacagctgcatcaggcccatcagctcttccagcgggacgcgcagaccataacccccgaggcgctgcagagcgtcaaggctgctctcgccaccagcgacgtcctcgaccccgccgccgccgcgaacgccaggccctccgatccctctaccagcaagaagcccatcccccgccgcgctgccggacaatcctgggaggatcctaccctcactgaatggcctgaaagtagctaacataacctattaattcagtttcctttgtgtttaatgcatctcccttatttcatttgcttgtgtctcaactcctaacaatttgcagacgactaccggctgttctgtggagatctaggcaacgaagttaatgatgatgttctatccaaagcattctcacggtttccatccttcaacatgggcaagggttgttnagagataagaggactggcaagactaaaggggtatgggatttgtgagcttttcaaaccctactgacttggctgcagca

SEQ ID NO: 85095 - DNA, 1635 bp, Zea mays
  Clone ID: MRT4577_177616C.1
cattggtgacctcgtcgccggcggggaggcttctgctccacctaaatagatccgtagccgtagcctaggcgcgcacattgcagaaagatcgagcggaaggtcggcagcaggcgcatagatgcaggggtgagggcacgggcggcagcgcttgacgggcgacgagtaaaccctaacgctttgattgcgggcggcgtcgtctgagccagtcccgagtcgatacgctgtcatgcctgtcaatcctcctccgccacctcctgggtcgtcgtctttggctccggcgggggccagctacttcccgctccctttccacctgcagcagcaccagccgccgccgccgcaggtgccgccgcctatggcggcgagcagctatcagcagtatcagcaacagctgcatcaggcccatcagctcttccagcgggacgcgcagaccataacccccgaagcgctgcagagcgtcaaggctgccctcgccaccagcgacgtcctcgaccccgtcgccgccgccaacgccaggctctccgatccctctaccagcaagaagcccatcccccgtcgcgctgccggacaatcctgggaggatcctaccctcactgaatggcccgaaaacgactaccggctgttctgtggagatctaggcaacgaagttaatgatgatgttctctccaaagcattttcacggtttccatccttcaacatggcaagggttgttagagataagaggactggcaaaactaaaggctatggatttgtgagcttttcaaaccctactgatctggctgcagcaataaaagagatgaatggaaagtatgttgggaaccgccctattaaattgcgtaagagtaactggaaggagaggacagatgttgaggctctggaaagacaaaagaatcatgtcaagaggaagcctaaaattcccaagaagactattcttcacaagtagagatacaaaggccctaccgagggtgaatgccagctcatgtgctgccttgggatgatgctaccttctggaatctctttactctctgcaatgctcggggtggaatcacgcaatgctcggggtggaatcacacgcaagggctgttgtttcatgtaaggtgtagtttggaaacttaaattcttttgggatacctgtcttttatcaggatgagtaacccagggatataatttaaataagacatttagttatttaggagatggtttctctctctggtttgacttccccttccaaactaggtctaaggccatcttcagcagatcgtgtaaatggacgtgtaaagtactgttttgcattgtatattgtaatatgaagtgaaaaaaaaaaaaaaaaaaaaaaaaaaaaaaaaaaaaaaaaaaaaaaaaaaaaaaaaaaaaaaaaaaaaaaaaaaaaaaaaaaaaaaaaaaaaaaaaaaaaaaaaaaaaaaaaaaaaaaaaaaaaaaaaaaaggccccctggggccgggcccctttaaaaaaaaggggaccccccgggggggggaatttcaatttaaagtttttcaaaccccccccccccgggggggggcccggaccccatttccccctaaagggggtgatttaacccgcctccctgggccgcttttttaaacggggggaggggaaaaccccgggggtcccccaa

SEQ ID NO: 85096 - DNA, 1488 bp, Zea mays
  Clone ID: MRT4577_177617C.1
gtgcggggctcctcgaggccggccgggaattcatcacggcatcacccccaatttcttctactccaccgaaacataaatccgtagcctggtcttctgcttcgcagaaagatcttgcggaaggtggcagacgcatagatgagggtgagagcatttggcggtagcgcttgacgagcgacgagtaaaccctaatgctttgatcgcggcggcgtcgtttgagacactcccgaatcgatccgcctacatgcctatgaatcctcctcccccgccgcctcctgggtcggcgtcttcggcgccggcgggggccagctacttccctctccctttccacctgcagcagcaccagccgcagccgcagatgccgccgcctatggcggcgagcagctaccagcagtatcagcaacagctgcatcaggcgcatcagctcttccagcgggacgcgcagaccatcacccccgaggcgctgcagagcgtcaaggctgctctcgccaccagcgacgtcctcgaccccgccgccgccgcgaacgccaggccctccgatccctctaccagcaagaagcccatcccccgccgcgctgccggacaatcctgggaggatcctaccctcactgactggcctgaaaacgactaccggctgttctgtggagatctaggcaacgaagttaatgatgatgttctatccaaagcattctcacggtttccatccttcaacatggcaagggttgttagagataagaggactggcaagactaaaggttatggatttgtgagcttttcaaaccctactgacttggctgcagcaataaaagagatgaatggaaagtatgttgggaatcgccctattaaattgcgtaagagtaactggaaggagaggacagatgttgaggctctgcaaagacaaaagaatcatgtccaaaggaagcctaaaattcccaagaagagtgttcttcacaagtagagatatataggccctaccgagggtgaagggcagctcatggatgcgttgctgccttgggatgatgctacttctggaatgtcttcactctctgcactactggggggcggaaatcacgcaagggctgttgtttcatgcaaattgcaacgagctactgctgccatctgatgcaatttgtgctccgttttactgtttcccatagtttgcgttcatccatttgtggtgttggagtactgtcatggctactgactaaccaagccgagctgaacaagaaccaaatggaattttcagtttgggttttagcaagtaatagcatgacgtgttgtactatcgaaatagattccaaatcaagattatgtttttgtccacggcatcgccggccgccagcgtctaggaggccaggagggcctgcacgtacttgagctccagtcacttttccacccttccccccccccccccccccccccccatcacttccttaaggccctgcagctccagattaatttgatttgtattagcaatttatcctctttttc

SEQ ID NO: 85097 - DNA, 535 bp, Zea mays
  Clone ID: MRT4577_177618C.1
ataaatgattagtaaaaaaaaaaaaaaaagataaaaggaaaaaaggaggggggaagagaaaggaaaaaaaaaaaaaagaaaaacaaaggaggaaaaaaaaaataaaaaaaaaaaaaaaaaaaagaaaagaaaaaaaaaagaaaaaaaaaaaaaaaaaaaaaaaaagaaaaaaaaaaaaaaaaaaaaaaaaaaaaaaaaggccaaacaaaaacctggcaaaccaaacccaaaagagaacaaagttaatgaggtgggcgttctaacccccggtttgggtagggaaggaacgggcaaatcaggggatggaaaaggcggggggggggcgggcccggagcctcctcttgatcaggaaggttttgatcaaaaacatagagaaccacgacaccgtgggggaaaggggaggcgtgggaaaacaaacgaagggaggaccgggaaaggaaagagggccaggtgaccggacagtaaataaaattagaaaaaagcgaaaaaaaagaaaggggtaaaaagggggaaaaaaaaatgggccctgaaagat

SEQ ID NO: 85098 - DNA, 212 bp, Zea mays
  Clone ID: MRT4577_177619C.1
cggctccgtccgccgtggacgcccacgccctttccccttccgtcgaggccgccgacgggtccgggctcgtacgccgtggccgacccccactcctactctaaaggccgacgctgttgccctcgcctgagttccctcccaatttccatagattgtacattgttctaaaagcttgtgaacgataatgtatccttgatagatttctggtattattc

SEQ ID NO: 85099 - DNA, 1694 bp, Zea mays
  Clone ID: MRT4577_17761C.1
ctgttaaaaacatcagtgtctctcagactggtattagcatagcaacaaaagtggcttaatagatgttcagaattgagcgacactacagtcaaagatgcacaacacttgacactagcttgtacacagtaaaattcttctggtacacatcaggagaagaaacaaaactcctgcgctctcttatttaaccccactcgggcgttgtaagtggctcagtggccttgctgccacggatccgtgagatcttgccctggcgaacccggatgccgccaaagaaaaaaatgatggccgaactgtaatacgccgaaaaaattaaccgactgaaatccgaaaaaaatcggcacctccgccaacgtaaaaaagacctctggcgcaccccggcgccggcagtggcagtggctttggctggcctgtagtacgccgcgtcgttcgcggcctgggttccggaaagctccggttcctcagccaatctcctgccggctttcggcgtctgctcgtggaagaggtcgatgtcggtgaaccactccagctccttgaacccgagcggggactccttgtgcagctgcaaaacacacacacacacaagaccatgcatgagacggtgggtgcacgcaggcaggttgttggtcatggaccggagcttgcgctatcgtcttgccttgtcgctggactcgcagtcggagaactgcaggagctcgtcgacggcccagccctgtggcaggaactgcggcggcgagggcacctgctgcgccgcggaggagacggcggccttgggcggggcgtggtggtcggagtcgtcgtgggcgtcgcaggcgtcactgcacgctgacgaagcggaggcgaagccgacgcggatgtcggtggcgaggtagcgctggtggttcccggagagcgtgcccgggacgtggatgggctcgtcgcagtcccggcagaagagcgcccggtcctccacgcagaagatgaacgccgctttctcctgcgagcgcgcgcggggcggggtggtggcctcgttgttagctcgtgcctgcctgccttgtgccgcgtgtggcgcatgcgcaatgcgctggtgatgtacgtacctggcagacgtcgcagcgcgggaggctggcggagagagcctcgagcgggaggcgctggtgcttgctggcgagcttgttggcggcgtggatctcgacgtcgcagcgcgcgcacagcgcggcctcgtcggcgcagcacaccacggtggcagccgcgccctcgcacgcgtcgcactggatcttcatggccgctccacctctctgtctgcggtctatactcccaggcccagctcgctatcctgtcctgtcgtctcgcaagtcgcaacaacgagggaggcaaggacgaacaagataaggccaccgactgcgatggaggaggacgagcttgcgcgcgcgagcacgcaactggagcaatcagtgagctgccgctgccgggcgagcttgtggtggaggactcgccggggagacttgtggccaggggctcccggctcgtctccccgtgtactagctacacgccggaaccacgcttggacgcgccgattttgatctgatgtgatgtgctcactcggcggaacgggatgatggcctggccgtaagagctttagttggctgatctgatttttgtgaatgtatacatccatatccacgtgtcttaatatatgcacacttttaggctgttgt

SEQ ID NO: 85100 - DNA, 519 bp, Zea mays
  Clone ID: MRT4577_177620C.1
ggccgcgggtttttttttttttttttggcgaattgtgtcgtttggcaacacgaatgatcagtcttttaccaagatcgctgggggacgaatcggctcgtacacgaactagccgaacaaaatatactggttaagccgtttttacactagcttgttcatcgtgccgcttaaaagcgaacaaacagcataaaggacagatggcacttctacatgcctccgccgacactggggccggacgcgagatacgcctacgctcgctcgccgcggatgcggcggacgagctgaatgtgtttgggcatgatggggacgcgctttgcggggatggcgcaaaggttggtgacctccctcaggccgacgaggtaggcctcggcggcttactggatggccaggactgagtggccctggaaccgcatatccgtcttgaagtcctgagcgatctcaccgaccaggcgctaggagggcaactttcgaatcagaagctgcgtgctcttatggtacttgcggatatggcgcagtgccacc

SEQ ID NO: 85101 - DNA, 356 bp, Zea mays
  Clone ID: MRT4577_177621C.1
accacgcgtccggtaaaaccatcggctgctactacaagaataagagctcaagagtaggaaccatcaagcgtgagaccgtgaccttgcgattgcaagctgagatcaaccagatggtctcactcatgatcaacaccttctactccaacatggagatcttgctacaccagcttatctgcaactattacgatgcgctggacaatatcaggttcgagagtctcactgacaagagcaagctccatgcgcatcctgagctccaaatgcaccttgtcccagacaaggacacgaacacgctctgcatcatcgactgcggcatcggcatgaccatgtacgaccttgtgaacaacctctgtaccatc

SEQ ID NO: 85102 - DNA, 378 bp, Zea mays
  Clone ID: MRT4577_177622C.1
cacattatctaccgtaaccgaggagaccaaactggcaagagaaacacaagcgtcacgttcaacatgctttacatggacaacgaattcaagctgctgggccactgcctgcattcattaaactgaacggatagaatacatggactggcacagcatgctgaatagcctcaaattaaatcaacccagaagacttacgcacctttctgttttctcagaactgtttcctcgcgtcccccacgataaactgtgctgcgagcaacttttgacacttctgaccgcactgtttgtcaaatcagaacactgctaacgcttgacgagttaactaagatagataggggaactgcgctagacaaaaaaaaaacaccagggccgaccctctaa

SEQ ID NO: 85103 - DNA, 634 bp, Zea mays
  Clone ID: MRT4577_177623C.1
ctgtgcggcgctcaggcggctgttctgactacaccatttgctatgtgcgatgtgctcctgccccgctcgtgtgtgctcgcctctcctctccttttccccctctctgtcttcgccacatatcgtgctggaaccatgaatgacatgcgtggttggatgacagatgaagcgatgctggttcggagcaacccacctgtctttcgccggtgcgccgcagagaacgacctcgaggccatcgagctcgcgcgcttcgcgggcccctaggaccacagccgcacctaaaactatggtgtcccccgagatgctggagttcgagatgcaccattatcgtgaccggcaccctgcaccacttccccgcacccgttgacccataggaggcgaatataagctgtatcactgcacggcgtgttacaacgcgtggaatgacttcaccctgctgcagaccttctagctcgtcttagacgccgtgcccgtttgacgagctgaggtttttcgctggaggctggagcacatcgatgctatccaatttaactggcatccctctgtgaaaataggatattgtgaataaaccaatgtcgtacccacatgcattgtaccctagtgagatatttgacctctgttatacaatgagacgtgc

SEQ ID NO: 85104 - DNA, 159 bp, Zea mays
  Clone ID: MRT4577_177624C.1
aattcttgggtcgacgagtaactagccggcggccgcccttcactttggggtttttttagaaatgatcttcggaattccccacaaagtagcgtgcatccaatcacaatattaacacaaaacactcagtcttaaactttcacacatctctaccaaaattta

SEQ ID NO: 85105 - DNA, 553 bp, Zea mays
  Clone ID: MRT4577_177625C.1
ggaaaccgggaactaggtttttttttaagggggggaatttttaaaagacaatttgcttacccctgggtttacacacacaggggcatacactaagccactaaggggggttttttactttaggtgagcaaagtttggacacaaaaaaaatttactcaattttgctgggggggggtttttttcaacttttttttgttggattaaagggggggccatggggggggaaaagcaaaaccaaaatggggccttggggacagggctaaggatttccacctaagaatgctccagaatcctcaaaattttagggaacgggggacggacataaggatttggaccccaccccctggtaataatctccccgggggggggcaggcactcctggggtatatttgggcggacccctttgttaaccaaaaaaaaagcagtttgcattgtttattttttaacaaaagggggcttgccatttatgacctcccacagcaaaaggccaaaggtggaaaataaactttttggagatatggcctatgctaaatatttagtggggccccccaacggt

SEQ ID NO: 85106 - DNA, 1364 bp, Zea mays
  Clone ID: MRT4577_177626C.1
cattggtacctcgagccggcgggtctcgtcgatccgaaccaggcgtggagggcagctgttaccagattgcaatctattcccgagcttcgaggaatcgacgatcaagatttggtgaaccaccggtcctgagatcaagctcttcgagtcctacgagatcgaagaccctgagcatctgtttggtgaaggcaagtgtcctctgacctattatgtcccatttactttataattcatcaaccgcataccatgatcaacttaaggattgactagctttgtatttacctcacccttgattaccttttgggctactatggttagcttcatgctattgctttactttaatcaatgaacatgatgagatacaatgatgatactatgattttattctggacatgatgatatacttgtggcatttaggggactcgggctgtttcccgagtacctctccgtaaggacctgttcgttgagagaccacccgggataacagtgcaaccatgagggtgaaatgagatgcccttagctaattaattagaggaactagaggtgtagttgcttcgccgtcgtgccgtcaatggggtccaggcacagtgcttgctctgccaaggggggggtgccgaggttctttcgttttgcttttgttagtcaccctcctgcggagaggtgtactgcgtttgtatgactggcgaaacctaaagagcagctatgcaccaggggagtctttgtaaaggctacgtagtgaaaccttgtcgactcaccttggcagtatatgagggtttgatcgacccgaggcataaagtgtcacacccgggttttaggggcaccaagacccgggcgcgaacataatcaccaagtgtgctgggaccaagtctcacacatatgatgaatcatggcacaggatcaaatgtcacatctttactatataataggagttctatacaaaataaataaataattacattataaggagacaacggtccagcaacccaaagttgactgggagacgacgacctagaactctcatggacacatcgcagcatcctccatgcgcctcatcctgtggtacctgatcttgaccgacggtggagcaatggagaacctgcccccatggtgagatgcggcccgacggtgatgtccacgaaccggtgagcaattcggcctccaccgagagtcttctcctcgctcaagtgccacagatgtcatctatgtaccccagcgggtcgcccagaccatgcgactgaagcccgagcggcgcatgcgcagggttgcaaccgcggcggccaaatcttctcctctcttcgctctctctctattttcctgcctgcgcctgatcctttactgtggtcgagggccgagccgatcccggccgg

SEQ ID NO: 85107 - DNA, 317 bp, Zea mays
  Clone ID: MRT4577_177627C.1
ggggcggcaaaaatcaccatttttggcttaggattaacttataacaaattttgtaacaaggggggaacgcaccaatgcaaccgggtcccagcagcattatcagcctgctgaaactttttttaaacacagttctttcaaatgccacacagccaacttgcaatcaaaaacactgatggctatcaaccggggttcgaacgaacaaaaaccccaagggggagggccaaatcccggttgtcaaaaaaaaaaaattccgcgtataccccaatgttcaggcgctagggattatccccgaattggcgcaccccgattccctgggg

SEQ ID NO: 85108 - DNA, 489 bp, Zea mays
  Clone ID: MRT4577_177628C.1
ggtgcctgtaccgttatgaccttgcaaatgatggagaaaatgccatcagagacttttagacagtatgcgcagagatggagagacgtctcagctcaagtggaacccccattaacaaaaacggagataaccgttctctttatcaatacttacaaggcgccgttttatgacaaattagtgggaagtgccacgaaagagtttgcggatattggaatatctggggaacccatagagaataccggcaagagcggtagaatggaaggatcagaaggctcaagaaaagtggcacccttaaggaagaaagagctagaagcccacatggtgggaactgggaggcgctacattctcaattcgtatcctaaccaaccccgacctggaaatattcacccccgaattatattattccgcttaaaacccctactaccaaggaccacatccggactgccccgtatacgccacgaacaaccaaagaggggtgaacactttaccaca

SEQ ID NO: 85109 - DNA, 428 bp, Zea mays
  Clone ID: MRT4577_177629C.1
gccacgcgttcagtacaacatccactgcaagatcgaatgcccagccctatgggacgtgctatacaacttcaaacagcgggggaggaagcaagggggccgcattgatctcctagttaacctcaaagctatggtggacctgatcataccgacgttgccagtgatgttccatggagaccaagagccatggaacgtgcagatattccgctgcatcgatggcggctcgtgttttggcttacatagcaccccagaggctggagttgaatgtggccttgatagtggcaagaataatgtcctagacaggagcttccatgatgcctacatccacgccatacactgtgccaaacacttgatctacatctagaaccagagcttatttgggagctaatttgcgtggaaagccgacgggataaaggcagaggagattgaag

SEQ ID NO: 85110 - DNA, 423 bp, Zea mays
  Clone ID: MRT4577_17762C.1
ggagctgcaggcggcgatgtcgatgccactggcttccgtgccaacgacgtcgttgttgccgccgcctactactgctccggcggcttccgtgtcaatgacgtcgtcgtcatcgttgccgcctgctactgctagcagtagcgctgctccggccgccggcgacaagggacttcttgacgacatggtgccgtcggcgatgaggcacgggcggtagttgactaattactcggctagctaattagtacaatgatgacgaagcatacgatggagctgcccatcagattatttggagctctattattaatctctgattaattggacagagacaggaagaattgattgtaacatatgcatatacatacatattaattatctatatatagctacggactaagcgagcgagcttctacagaatgggcgccgggt

SEQ ID NO: 85111 - DNA, 165 bp, Zea mays
  unsure (1)..(165): unsure at all n locations
  Clone ID: MRT4577_177630C.1
cgcccctggnntttttgttgtttttttttttgggagggcatgccatagccacatctcaaaaactgaaaacttgggtggttggaacaaaagcctggaaacatgtcatagacaggaaacactgtcacgcgtggaggcagatgcgcaacttcttggcatatgacggat

SEQ ID NO: 85112 - DNA, 370 bp, Zea mays
  Clone ID: MRT4577_177631C.1
agcgtgcttcctgctccgcttctctacgggtgggcatgccatgggcagcttcgggctgacaggcgtgtccgtgtgggaggcgctggtgctggagatcgtgatgaccttctggctggtgtacatcgtgtacgccactgcggtgtaagcgaagaggggcagcctgggcaacatcgcccccattgccatcggcttcatcgttcgggcaaacgtccaggatgggccgcaccctcgacggcgcgtccagtgaataccgccgtgtcgttcggcctcgccctcgtcagctggcagtgcggctaccaatgggtgtaatgagtcgggcgtctcatcggatgcggacactccggcgttatctacgagctgctcttcatct

SEQ ID NO: 85113 - DNA, 552 bp, Zea mays
  unsure (1)..(552): unsure at all n locations
  Clone ID: MRT4577_177632C.1
gcagggtagagcagtgcgcaataatttcaacttgattcatgggattccgtgccagaatacaggtaagaagctccgcaccccagctcaacgatcaccgcacaccccaaatccattatccaacaccttcagcagcacgaacaccagatacttcgctctcaataaacccaaagtgctccaaggcaagaacaagcacggcaacgccacaggacgccaaaaaaaagactcgagctttggaacagaacagcgcacagtgatatcgcaccttcggacgccggtagcaggatacttgaaacgaccgttcttgccttcggctttgcctcgtccgtctatccacctccagaggatttaaaggcgaagaccacgcggtgggtagagcaaagattggggggtcaaaaaaatcaagatgcttgttcacctaaatccgctcccccgactaccgcaaggagggggncggatctaaatacagagtagaccgcctccctgaaacggaaatggtcccagcgggagctggaggccgccaacaacagggatagtggattcggagctcgtgca

SEQ ID NO: 85114 - DNA, 2452 bp, Zea mays
  Clone ID: MRT4577_177633C.1
aaaaaaaaaaaaaaaaaaaaaaaaaaaaaaaaaaaaaaaaaaaacccattggtaccctcgaggccggccgggaccggccggcgcagccggccaccccaaacgcgagaaagcttggcttctgagttctcagaaagtcaagcgaaaaaaaaacagtacaggaagaaaatagtagataaaaaaatcctcttcaccgtttcctcttccttctccccgtgcgagctgtgactctgaagccgccgccgcctcccgcctgcctctccatctccgtccacgccgcgtcataaaaatcccccttcaaggcccgacctagcacctaccctcgccacccgcccattccagttcccaatccgatcggtgcacgagctccgaatccactatccctgttgttggcggcctccagctcccgctgggaccatttccgtttcagggaggcggtctactctgtatttagatccgccccctccttgcggtagtcgggggagcggatttaggtgaacaagcatcttgattttttttgaccccccaatctttgctctacccaccgcgtggtcttcgcctttaaatcctctggaggtggatagacggacgaggcaaagccgaaggcaagaacggtcgtttcaagtatcctgctaccggcgtccgaaggaaccttcaagtgttccagtggaggtattaggagtggtggggaaaaagggattgtagaggtaacgatgttgagacagagctctagtagaaatcagagatccagaggtctgaagctgaagaaagctcttcagattagtctcttgcttctggtttctgtttggttgctctaccaagttaagcattcttacgagaagaaggcggcgtacagcgaaggtgaagtgaatgatttgcataaagatgacaagggccagggagaggcagtcagattgggcaggaaggatgtgcctccaaagatggaggctgattcttcaacactggatgagcgggttgaggatgaagagaacgatgaagtggagcaagaaatgaagcatgatgagaacgatgaggatcccatcgatgagcaagacctggagaaggacgaggatcttcccgagcctggtgagcattcttctgaaaaggatgaagatgtgggtgtgtttgatgatgaagagcggaaggagcggtcacaggaggatcaagagaagagcttccatggtgacaatgtttctagtgctgttactcatgatcctccatcatcggagcaagatgagctgttccatcatggccaagacaaggtcttatttgtggatgatgcttcaactgcagtgcccaatgaaaaccacgaggctggaaacgaggaggaggaagtgcggagggctagggaaaggagtttcagaggcgatgatgtgtcaagctccgtggatcatgacgccaaggtggcaaagcctctcccagaggaacaactgaacagcatggataagatatttgaaggcaccacaaacttgtctaacggaatttcgtttcgagctcctggaataaatggatcatatgccggcatggacaatgtggctacagtaccaactaattcaccttcacagaaaaacgcaggcactcctagcaatgacatagaaagcaagacccacccatctccggcaaatttgaccggaccagagcaaagtaattcgactttgaaagatcacccagatcaacaagtgaattcaacagcagtgctgggcaaccaagtacagcctttgactaaccagacgccgtggcccgagttggattctccaaatggcaccttggctctggtaacagatgtccaaaagtccacatctggagctggagatgatggcagcagcacagtggacaagaggacggacggtagagatggtcccaaagaagacgtggatgtgtccacgaaaataatgaacagggcaatcagtgaggatgaagtcgttccagagtgacaaggagatctctcttgccggcttctggtgtaacctgtaagtttgtaggacttggtttcgtctcctagactagacttggagatgcgcaagcagactatctcgttgtgcacgccttttgtgtaagtttgatagatgtctgcttttgtactggcagttagtagtccatcacaatgatctgggtcgagtggagaacaagaagcatgtgtacccacaggaatatgtgtagcgattctgcagctcttgaagcttcgctgctcgaatcaaatgccaaagtaggcagctaaataccatctatcaatgaaatgtccatgcccaaaaaaacccaaaaaaaagcggctagggcgatatcactgtgcgctgttctgttccaaagctcgagtcttttttttggcgtcctgtggcgttgccgtgcttgttcttgccttggagcactttgggtttattgagagcgaagtatctggtgttcgtgctgctgaaggtgttggataatggatttggggtgtgcggtgatcgttgagctg

SEQ ID NO: 85115 - DNA, 1848 bp, Zea mays
  Clone ID: MRT4577_177634C.1
cggggacgccgccagccgtccgtggtcgccagagatgtgtttgcaaaggaagcaggatgttctccaaggcacaattaaatctcgtgctagagcccatgatatcattcgcaagatgctagcgagcctcggtgacccttacactcggtttctatctccctccgaattctcaaagatgtcaaaatatgacatgacgggaattggattaaatctgcgggagattcctgatgaaaatggttcttttaagttgatggtattagggctgttgttagatgggcctgcttactctgctggtgttagacagggtgatgagcttttatcagtcaacggcattgatgtaaagggtaaatctgcatttgatgcttcatccatgctgccaggtccaaaggagacgttcgttacgattaaggttaagcatggcgactgtggtcctgttgagtcaatgaaggtgcagaggcaactggttactcgaactccagttttctatcgtttggagaaaagagaaaacaatgattcatctgttgggtatattcacattacagagttcaatgcagtggccaaaaaagatttgcgctaaaacgtctacagaaatcaggcgcctcctattttgttctggatttgagggacaatcttggtggactagtgcaagctggaatcgagacagcaaagctctttctgaataaaggagacacggtcatttatactgctggccgggatcgcctagtccaaaaggcaattgttgctgaaagtggacctatgattgctactcccctcatgttgctggtgaataataggacagcaagcgccagtgaaatagttgcttcagcacttcatgacaattgcaaagctgttcttgttggcgaaaggacttttggcaaggtttgaaccacccaaaagaggatactgtgacgtttttctttccctgtgatcaacaggattatattatgccctttttgtgtctggtaactcatgtctagggtgatgcagggcttaatccaatctgtatttgaacttcatgatggttctggtattgtcgtcacagttggcaaatacgtgacaccaaaccacaaggatatcaatgggaatggaatagaaccggattacaatcgtcttcctgatttcaatgaagccaaagatttcctttcacgatgcggaattaaagaattaagctgacagacgtttgtggcagatttcaatgaagcattatattctgaaggttctctcacgggtcagacgacctaatatgatagaattgatatggaacagagctgatgctccgcctgactactacacgaccctctatgtcgcgcgccgctgataccataagcagcgtatcggcgagcgtcgacacagcctctacagtacagggcgaacatgttgctggtggcctctgctgcatggtgcaagaaatagagtacacgtggcgctcatctaaggcatcgcaaatggttgattcctaatccaacacaatatgtgaatagcttgtggtctgttcaaggcacttagtcaaaatatacttctgactaaatcctttttaattgtcggttcacgtccaaatgtcactgctggttctttcaagggtaatcagccctaatatgatagaattgatatggaccagagctgatgctccgcctgactactacccgaccctctatgtcgcgcgcccctgatcccataagcagcgtatcggcgagcgtcgacccagcctctacagtacagggcgaacatgttgctggtggcctctgctgcatggtgccagaaatagagtacccgtggcgctcatctaaggcatcgcaaatggttgattcctaatccccccccatatgtgaatagcttgtggtctgttcaagg

SEQ ID NO: 85116 - DNA, 405 bp, Zea mays
  Clone ID: MRT4577_177635C.1
ttgggtacctcgaggccggccggggtgctgtacggctacgagccgtcgcggaccgagaagcgagccaagatgacgtgcgactgctggccggcgcggcgctgctgctgctgctgcttccgcggcggcaagcgcggtaaggcgcgcaaggacaagaagggcagacggagtggaggaggcgcgccggggcctgctcggcttctacaggaagcggagcaagaaggacaagctcggtcggtggaccaggagaacggcagcaagaacgtgggtgggatggactataagaccagtcgcgcgttctagctggaggagatccaggaggggctgtgggggtactactggctggagcgctcctcgctcatgtcgcatgacagctactagaagcgatgcggccaagcgcccgagtac

SEQ ID NO: 85117 - DNA, 398 bp, Zea mays
  unsure (1)..(398): unsure at all n locations
  Clone ID: MRT4577_177636C.1
ggcaaaanngccccatgattttctttttttaaatactcgccacggggcgcctcaagcccgggcacgcactgaacggtatccaaacagcgagccaaagaggggacaaaagaatgtaaacccttcgcagctatgccgggacactctgggatagaaacaccccacagaagactttttgggggagcctgttccaccggaaacagtcaaaaacccttaggtcctgctagccgggccagtgtctcctacgaataaggcgtggttaaatcacaacggattatacctcaacgtaacatttatgccctctaggtgcgggaactggacagaagcagacttccccgcaaaatgccaacccttcttttgcgttttacaaacgcgcttgcccccaccactcgtggccgggg

SEQ ID NO: 85118 - DNA, 1279 bp, Zea mays
  Clone ID: MRT4577_177637C.1
ttttttttttttttattgtaaaattatcaaaaaggcaagttttcaaaacatccttctcggttctcaaggtgtgtaattatcatgtgatagtttatcacttattctgaatttacaacacatattacactttcagacttcatcatatacaggaaaggcactacgtcaactcaatagcatcacaacgcagtataaaccaacaaaaactattagtatccaaaaaataattgcaaataaacaagttgaaatgaaaccttatgatccattaagattttggatttcaactttcaaagtttggagcttacgctcgacagcagatagctcaccctgaacgccctgtaaccaatctatttttcgctgacatgcttcctggtaaggtttgctgataacctcaacgaagcggattaggttattagcactctgtgagatatccttttggatagcttcatcaacttttcgagagagttcatcagcagccttgttaatcttgtctattgcatgcttccgccgaccagggaaacttgataaaacaaaaaaaccgccagctgagcaaagagcaagggcaagaagatcttcaagggtagttgacaaaacagatgtcaacagagaagctgacagtccagcaatacctagccctccaaatgttccaaaagccaattctcgaatttcctcttcaaaatctttggcggcagcactggcattgaagccttccagtgcctttatggtgagtttctccccttcattaacaagcccatttggatctaacagagccctttcttccggagcaaccagtgcatcccatctttcacagaaacactccaaatatacatttgcttcgcgggtattgctagaactcaaccatgtcgagtagtcacctagtaaattcacagcatcatcaagggttggactcagaatatcattctgaacaaatgatgtggctctcatggaactgcctgtttttcctttgatcgtgtatgcaaaaataaggtcaatatttgacagctgaagtgtagattccatgagtgtaactgctcgaccttttgctctctcaatgagagacgaaatctggttctgccaggaactgctatcagacttaagtttgatggcataattgtttgcaccataaacaagatccttgatggatgctaagtcttcaacagccttttcatattctagtttcaccagcctttgacacgaagttaacaatcgatctgcaatgcctattggtgtttcaagtttcagccggaccctttcttttccattttccgttgaactatctaag

SEQ ID NO: 85119 - DNA, 342 bp, Zea mays
  Clone ID: MRT4577_177638C.1
cggacgcgtgggcggacgcgtgggtagagctggtgttgaaataagaactcttttgaacatacgagtcacataatattgtagggtctttgcaaaaatcttgatgtggtgtggcagctcagtttccttggtacacgctctgatacatagaaagacagtcataagaatccttatgatccatctcacagattgctccaggtatgccagtgggatggataatacaatttggctgacagctatttcatcggaacagtccgatatcctccgaaagaagaacaaaagaacaaaaggcattgctcaattttatagagtagtcaatccattcagttctatcaagagaattag

SEQ ID NO: 85120 - DNA, 134 bp, Zea mays
  unsure (1)..(134): unsure at all n locations
  Clone ID: MRT4577_17763C.1
tcttttttttgatatatttttttttttgcatacaagnaatatgtaaaccctaatttcacagcccaggaagacacaaactatcagagcttacacctttgacagagcggagacaaatacttgttttaaagaaaacg

SEQ ID NO: 85121 - DNA, 379 bp, Zea mays
  unsure (1)..(379): unsure at all n locations
  Clone ID: MRT4577_177640C.1
aaaaaaaaaaaaaaaaaaaaaaaaaaaaaaaaaaaaaaaaaaaaaaaaaaaaaaaaaaaaaaaaaaaaaaaaaacctaaaaaaaaaaaaaaaaaaaaaaaagggtttgtccctgggccgcaccccccctaggggcgatttttgcaaatttccttcaccctgggggccgttcgaccttgcttttagggggcccaattccccctttggggggtcgtttaacaattaatgggccgtggttttacaccgtcttgacgggaaaacccctggggttccccaccttaatcgctttgaagaaaatccccttttccccggtgggggtaatnnnnnnnnnnnnnnnnnnnnnnnnnnnnnnnnnnnnnnnnnnnnnnnnnaaccgaaag

SEQ ID NO: 85122 - DNA, 422 bp, Zea mays
  Clone ID: MRT4577_177641C.1
gtggcctattcttccccctccggttcgggttcgggttcgagaggttctccggggttcggtttcgtggatgaggggagggagatggcggcgtcggatgctgagtacacgatgctttgtcggcggactaaactgggccacggactaccacttcttacactacgccttgatcacctacgtgcaggtactcgagtacaagatcatactgaatcgggagacgcataggttcacgagcttgtgctgtcgtaacttctacacagatgaggcaatgcggaacgccatctagggcatgaactgctaggagctggactgccgcaacattaccgtctacgaggccacatccctgtgcagacgtggatgcgcaagcagcagcagatacggtggtggccgtggacgctgcagctacagctgtggctggcgccgtg

SEQ ID NO: 85123 - DNA, 612 bp, Zea mays
  Clone ID: MRT4577_177642C.1
ctctcaccccactacctctcccaggtctcctcctccgccgccgcctgcgccgactccgctatcaacctaagacgtgtccgctttataactccacggcgcgcgaccactggagcgcacacacaacagactacatgcacgaacctcctcaaaaaatctctgacactctcactctgcacaggcgaaaaactctccgatacaagacgcgtctcgtcggactctcagtaccttcacgccgacggttacgatctttcctaacacctgcacatcccgttcgccagtctgagattaagtactatggtatactgacctcagtgactgcataccacttccatgctaacaatgcataccttgcaaactgcctgtggaaatactttactccattgatgcctcagcattatgtgatcctaggcgatactagatatcatcccgactacaccgtcctgcatcaacacactaagaagcccctgttactgcgagaagccgatcttactgcctttgatatgatgacctgggagacagcatttacctgatacgacacccgagttattcgctaacacgtcttgaattgaatttttgctccggtgttttgacacttcaaaaaaaaaaaaatac

SEQ ID NO: 85124 - DNA, 417 bp, Zea mays
  Clone ID: MRT4577_177643C.1
agcagtggtaacaacgcagagtactttttttttttttttttttttttttttttattttttttttttttttttttttttttttttttttttttttttttttttttttttaatttaaaaagaaaggaaccttctattgaagcggcaaccgcttttttgtttactagggagcccgcggggggcccagggcgagcaaattggttctaaaattacttgaagcgggccccaagactggaaacagaatgaatgggggaaccataagagggggggcaaaggctttcaaactttcccccctggggaagctggcagatatacggggggcgggcgggaagacaacccccctgcactttggcgtcccagagatggggcgaccccagggatcaaagggttccccgggtcctctggggtggtaccaccgtt

SEQ ID NO: 85125 - DNA, 333 bp, Zea mays
  Clone ID: MRT4577_177644C.1
ttgctgtcgggctaaagaacaaattagatcataacctctcgcacgatttcgcgcgattcgaattattttaccccgagtatcttagtcgtcgagttcaaaataaatttgtttgagatgaaatcggaggaccgtactgaatttcctaaattcgtatttgcgcgagcgatgaattttaaataatcaccggacgcaccgattttcggaacaacgatgttccgaacatcacgaaaatttaggaagagcccggataaataaaataaaaagaatgtcgcactcgcgacaaataaaacagatgcgatattaaaatcgcgatagacgaagccgacagcaacg

SEQ ID NO: 85126 - DNA, 474 bp, Zea mays
  unsure (1)..(474): unsure at all n locations
  Clone ID: MRT4577_177645C.1
tcgaggcggccgggcaagcggctcggccccagaccctagccggatcggatctcgcgcggcgccgtgccggagatgatgtcgtcgtcgtcggacgcggcagcggcgctggagctcaggagtccgggtgggaggagctgcggcgggaggcgcgcaagctggagggcgacctcgacgtgaagctctcctcctacgcgcgcctcgccgcgcgctcctcctcctccgcctctcccgccccctcccccgccggcgnccgctccccctgccacccccttcggcgcgatgtccgccctctactccccgctgtcgacgacgcccacgaccccctcagccactgaggtggctcgagcccaccccacctacacgttcccggaccagcagacgttcagcctcctcatggtgatggacttcgtgttcaccgccgcgcatcacaagggcaccacgctctccatcctcgcccgcaacgaggtgctcagc

SEQ ID NO: 85127 - DNA, 765 bp, Zea mays
  unsure (1)..(765): unsure at all n locations
  Clone ID: MRT4577_177646C.1
nnaaaaaaataccaaaaaaaaaaaaaaaaaaaaaaaaaaaaaaaaaaaaaaaaaaaaaaaaaaaaaaaaaaaaaaaactttcccccacctccgccagccactccaaacatttgcgccgccattgcctcacaggaaaggccgccatggtctccggttcgggggtgggcgcaaagcgcttcgggggggacgcgccccaccacatgttgggccgtctctcctcaatcatagccaaggagttgctcaatgggaaaaagggggccgccgcccgttgcaaggaaatctgcttgtcggggggcctcgtccgtcaaaaaataaagaacctccgtttcctccgcaaggggatgaacaccaagccgtcccaggggcccatccatttccgcgcccccgccaaaatcctggggcgcaccatccgcggaatgattccgcacaaaaccaaaaggggggagggggttctggcgaggttcaaaacgtacaagggcgtcccgccgccgtacaacaaaaccaagcgtatggccatccctgacgctcttaaggttctgaggttacagcctgaacacaagtactgcctcctcggggagttctctaaggaggtcggggggaactaccttgacaccttcagggaacttgaggaaaaaaggaaggaaaaggccaaggttgcctacaagaggaagaagcaattggccaagttgcgtgtcaaggccaaaaaggcacccaaggaaaagttggggtctcagttgaaaattcttgcccctatcaagtactgag

SEQ ID NO: 85128 - DNA, 145 bp, Zea mays
  Clone ID: MRT4577_177647C.1
gggagcctcacacaaatgatggcactacagtatcttgtttttgtccccaaacatgaccttgtggacctgtacgctgaacttaaaccagcgtggatcaataacagatcagagatatggccgatcatacatcacggtgcatgctaca

SEQ ID NO: 85129 - DNA, 283 bp, Zea mays
  unsure (1)..(283): unsure at all n locations
  Clone ID: MRT4577_177648C.1
cgtcgaggagcggcaccctggaggcaccacgcccgggaagccctgtacccggggatctcgcgcggatagagcgccctccgatgggtgttcatccgtgaggtcaccgctgtcctcactgcgcagctggtcctcaccacctgccgtctcgggcctcaccgantctcgagcccaccctcaactgcacgctctcgcactccccgtagctcgggatcgtgctggtcgtactgccattcatcctgatgcatcacattgaatcattgtcgagtacaatcatcccacacga

SEQ ID NO: 85130 - DNA, 271 bp, Zea mays
  Clone ID: MRT4577_177649C.1
tacacactcaaactgcgcgacactttttcaaacgatgaacatacttgattctacacataacggtagcggacaatagcaacgagataccacatggcacaacggaatggataactccgttaatgtcaaagcatcagtcgctctttgtgccgctaccattctgccccgcgaggatcctagagatctgcagccccctgctgaaggcctggttgaagagcagccgtgtctggaattcagagacgaaggggaaccacgatagcacggcctcgtgccg

SEQ ID NO: 85131 - DNA, 396 bp, Zea mays
  unsure (1)..(396): unsure at all n locations
  Clone ID: MRT4577_17764C.1
accctgccgatcaactcgggggggggggggcggaggagactaaagcgcgcgcgtgaagaggacgccggaggaggggtcgtcgccgctgtccgctctggcggatgacgtgctgctacagatcctgggacggtttttttcggtcctttttgacngggcgcggnctttttgtgggggggggcncctcgccgntctgctcctgnctgtcttcctgggggggggggtgtctcttccgctggggggggagctactccccgtgccgtctcttgtctgggcgccctctttcttttctgtgctccacatgctcagcgncngntgcccggggctcctccgcgccggggtgctcctcgagctctccgacgatttttgtctcgatctctactttgggcctgtctttcc

SEQ ID NO: 85132 - DNA, 784 bp, Zea mays
  Clone ID: MRT4577_177650C.1
cggggtttcccgtccagccgtttttcggatcccgtgggccagccggccaggcgaccgccgccaccgccgccctactcctggtcccagctctgctgcacccttcgccggcgacgagcgtccaccgcggcagcggcggtccaccgacgctcggcgagctccaccggcgggcgctggtcagatcctctcggcagtcatccacctggcacgtcggatagctcgcgcctccgttggcagatccaccgccgcccggccctcccccagcgcccccggtgatccggaccgcacccgcttgctcggcctaacgaccggctcctgccccgccgcagccgaagctcccagcgtcctcctgcaggccgagctgaaggttcagcgcgccggtggagttcgacgacgaaactccgtcacgtcatacctctccgcctcccgtctccaatcggggctcccagcgtctcggagaagaggagcagcacggcacggcggctgtggcgaggaaggctcctgtcccatcccaacccagttagcagccgcccaaggaggaggagatccaatcggcgtgcgggcgtccgcggtccatccatcgatccaattccaatctgcagcgaggaggtcggctacctttctcctccggcgagctccacgagggcgccgacgaggggatggacgcgcagcctaactggagaggtggaccggcggcgactaggatatcgtacaagaacgccaccatcggcatgtgcgccctttacctctttgttggggccttctcctcccaactactactcgtcct

SEQ ID NO: 85133 - DNA, 392 bp, Zea mays
  Clone ID: MRT4577_177651C.1
tcacgcgcactgaacaattgacgttgtatagattcacaaacatcccgtgttatgtacagaacatttttgtggcatacatgttatccttcacaaaaaaaaaaaaaactacacctttaaaccttgttcgattgcatgtggattgagtaggattagatatctttctattcaattttgaccatcaaggaatttaatcctctttaatccactcctaatcgaataagctcttacgagatattgcttcccgataagaagcatactgtcacaagttcttgctcaacccagctggctgcctaatcctatcaagtttttattggacagattgatgatcgaatcagctattactcgagcacttgacttcatgtagcctcctgatgtcagcatgagcaaaggaa

SEQ ID NO: 85134 - DNA, 1082 bp, Zea mays
  Clone ID: MRT4577_177652C.1
tgggacctcgagccggccgggaaacctacggcgctctcttctctatcctctgtcccctccaccaaaaccgacggcgacgtcgctctcctccaccggtgcttggagctctccctccaccagcggcggtccacggacgctcggcgagctccaccggcgggcgctggtcagatccgcttggcagtcatccacctggcacatcggccgaagctcccagcgtcctcctgcaggccgagctgaaggttcagcgcgccggtggagttcgacgacgaaactccgtcacgtcatacctctccgcctcccgtcttccagacgtctccaatcggggctcccagcgtctcggagaagaggagcagcacggcacggcggctgtggcgaggaaggctcctgtcccatcccaacccagttagcagccgcccaaggaggaggagatccaatcggcgtgcgggcgtccgcggtccatccatcgatccaattccaatctgcagaagaagggatcaaggaacagcgaccagagaaaggctgcgtctgctgctgctcctacggctgctgatgctacgaacaagaggcccaggtcttagcttagtagcccccctcttagatcaatcctggatccgccactgggcggcaggagggaggccatagagcgggagctgaagaagcttcgggcagagcgggaggagctcgacggccggatacggctgctggaatcgcagctcgaggcagggcctgcgggattcaacggtgcggcagcggggaaaggagtaggggatgatgcgtgcggcgggagtggagcgtgccagagccgcgtgggtaacgggtttgctccggacggtagcctcccggcggatatgatctaccggtacagccgccacctccttctcccggacttcggggtcgaaggccagcggaagctgtcacagtcgtcgattttagttgttggagctggaggtttgggctctcccctggcattgtatctagcaacttgtggtgtcggttgcttgggcattgtggatgggggatatgttgaattgaaatatcttcatcgacagattattcataaagaagcctatgttggacaatct

SEQ ID NO: 85135 - DNA, 1151 bp, Zea mays
  Clone ID: MRT4577_177653C.1
gtttcccgtccagccgtttttcgcatccacgtgggccagccggccaggcgaccgccgccaccgccgccctactcctggtcccagccctgctgcacccttcgccggcgacgagcgtccaccgcggcaggtacacccacccccctcacttttgcccctccaaccaaaagcgccggcatctcaaaccggacggcgctctcttctctatcctctgtgtcccctccaccaaaaccgacggtgacgtcgctctcctccaccggtgcacggcgctctccctccaccagcggcggtccaccgacgctcggcgagctccaccggcgggcgctggtcagatccgctcggcagtcatccacctggcacatcgggtagctcgcgcctccgttggcagtcccaccgccgcccggccctcccccagcgcccccggtgatccggaccgcacccgcttgctcggcctaacgaccggctcctgccccgccgcagccgaagctcccagcgtcctcctgcaggccgagctgaaggttcagcgcgccggtggagttcgacgacgaaactccgtcacgtcatacctctccgcctcccgtcttccagacgtctctaatcggggtcccagcgtctcggagaagaggagcagcacggcacggcagctgtggcgaggaaggctcctgtcccatcccaacccagttagcagccgcccaaggaggaggagatccaatcggcgtgcgggcgtccgcggtccatccatcgatccaattccaatctgcaggcatctcgagtgcaccgtcggccgcaccagcaggcagcatcccgacaccgccgttccccagcagacagcagcaggtcgccgtcgttccccagcaggcagcaacaggtcgccagctcgcccccgcgtttgcttccggtcagctgatgtcgcatgcttttcggcagcgctagtcctcgacggacgacgaccagcatcagccgccgccccagtcgaccagcatccacggcggcacgagcccacgaccagcagatcaacgagcccacgactagtcagaaaatttttacagcagcatatccaccggatacccgataccccgacggtacccggtgggcacggtaaattttgctaggagtacactgggtcaaaatctgggtgtctctagagcgagcga

SEQ ID NO: 85136 - DNA, 451 bp, Zea mays
  Clone ID: MRT4577_177654C.1
agtcgcgcgcgatttcgaggtacgtgctctgcaaaggcgcatccgatcttttaagggagggcagcctcgccgagtcggcggccgtggacgcgtggctcgaagccgagtcccacaacttcgacaaggccatgtcggcgatcaccttccagtgcttcgtcgttcccatgttcatgggcgggacgactgaccacaaaatcgtcgaggagaacctggagaagcttaaggtggccctcagagtctacgaggagcgtctgtccaggtcacggtacctggccggagatttcatcagcctggcggacctcagccattgccccatggctcactacctgctggccagcccttgcgcgtcggttctcgatgcgtatccgcgtgtgaaggcttggattgatgggatgatggatcggccaagcgtgaagaaggtcatggagcttatggatgcgtcgtgaaaaga

SEQ ID NO: 85137 - DNA, 2111 bp, Zea mays
  Clone ID: MRT4577_177655C.1
gccgggcaggcgaccgcctgcaccgccgccctactcctggtcccagctctgctgcaccctgcgcgggcgacgagcgtccaccgcggcagacgaagcttccagcgtccccgtgcaacccaggtagcagccgccccgcgcggatggagttcaatcggcgtgcgggcgtccgcggtccatccatcgatccaattccaatctgcaggtacacccttccctcccggctgtgcgaagcaactccaccctaatttattttgcagaaagggtatcggtccgcccttggttactgaaactggtacaggtgtatgtaattttgaagtaacaaaggatttggaacccagccctctgttctccaccaccgcttcgaagatgccgcaggtaatggtggtggcacggaacttcatggatatggtggctgctcttcctgcgggcaagcttgatatgctctatgactcagcctttatctgtgaggcagtactcaggtcacttcccccactggcaaagaagtatgcactgcagatgttgtatgtgctggcaccagtgaccgctgcagcaatggaagagtgggtgcttgatgaatatgctgccaagcataaggttgccattgataagcttctacagctcagggtctttgttgaagtgcgcgacagacgacgggacgtgagctacaagatgaatcagaagttccagggaaacatgcagaagtatttggttgatggtggaagtttaccaagggaacctttaccattaagtgtcactggtcgattgcccacaccagcagatctggaagcctatgctcttgatcaatgggagtgcttcttgttgcaattgatcaattcatctcaagtcgaaaaagggtcaagttttagctcctccatgatgaagacgtttcagcgtggtcttctgagttcaagggatggtgaagcttcaaagttgactgaaaatggcttccaatttcttctgatggaaacaaatgcacaactttggtacataatgagagaatacatttcatctgctgaggaacgtggagtggaccctacggagctgatatcatttctcttggaacttagctttcataaattgggagcggcttatagcttgaacactctgactgatgtccagaggattgccatcagggatcttgcagaattaggactagtcaaacagcagcagggtcgaaaggatagctggttcattcctacccaattggctactaatctttcagcaagcttgtcagattcgtcatctaacaaagagggatttgtggttgtggagacaaactttcgaatgtatgcatactctacttccaagttgcactgtgaaattctacgcctttttgcaagggtggagtatcaacttccaaacctcatcgtaggagctgttacaaaagaaagtatctatggtgcttttgaaaatgggataactgctgagcagataatttcatttcttaggcaaaatgctcaccctcgtgttgctgacaagatacccgctgtcccggagaatgtcacagatcagattaggttgtgggaaactgacctcaacagggttgagatgattccatcgcatttgtacgaagattttcctagcaaggaatggtttgaacaatgctgtgattatgcaagggataatgggtacttgctgtgggaggaccccaagagaatgagactaattgtacgaggggagttccaccccgaaatgagggagttccttcgcaggcaaagatgaggaacgaccttgtacttgacggaccatgctatgcttctttgtagtgcatagaaacactgtatcgggtaatagttctcctttaaatatcaggaaagggtctagaaaagggctcagtttttgaattattttggtgacctgtgagctgtggaagcatatgaataatgtggtgttcaatggagcaaggcccaacatccttgatctgcttctaaatgttactagtgactgtaccctatgctggtgtatggctggtggccaggtcctgttggaactcttaggtaggtagtatggtgggatggagttggtatgctcttaatttgttgttatttggattgattctatataggacggagtgattttaaaaatgaaaaaaactcaaaaaaaaaaaaaaa

SEQ ID NO: 85138 - DNA, 775 bp, Zea mays
  Clone ID: MRT4577_177656C.1
ccggccgggctcttctctatcctctgtcccctccaccaaaaccgacggcgacgtcgctctcctccaccggtgcttggagctctccctcaccagcggcggtccacggacgctcggcgagctccaccggcgggcgctggtcagatccgcttggcagtcatccacctggcacatcgggtagctcacgcctccgttggcagtcccaccgccgcctggccctcccccagtgcccccggtgatccggaccgcacccgcttgctcggcctaacgaccggctcctgccccgccgcagccgaagctcccagcgtcctcctgcaggccgagctgaaggttcagcgcgccggtggagttcgacgacgaaactccgtcacgtcatacctctccgcctcccgtcttccagacgtctccaatcggggctcccagcgtctcggagaagaggagcagcacggcacggcggctgtggcgaggaaggctcctgtcccatcccaacccagttagcagccgcccaaggaggaggagatccaatcggcgtgcgggcgtccgcggtccatccatcgatccaattccaatctgcagaagaagggatcaaggaacagcgaccagagaaaggctgcgtctgctgctgctcctacggctgctgatgctacgaacaagaggcccagggccagcggaagctgtcacagtcgtcgattttagttgttggagctgggaggtttgggctctcccctggcattgtatctagcagcttgtggtggtcggttgcttgggcattgtggat

SEQ ID NO: 85139 - DNA, 1120 bp, Zea mays
  Clone ID: MRT4577_177657C.1
gccggccggttcgaaagttttcgcatccacgtgggccagccggccaggcgaccgccgccgccgccctactcctggtcccagctctgctgcacccttcgccggcgacgagcgtccaccgcggcagcgaggaggtcggcttcctttctcctccggcgagctccacgagggcgccgacgaggggatggatgcgcagcctaactggagaggtggaccggcggcgactaggatatcgtacaagaacgccaccatcgtcatgtgcgcctttaacctcttcgttgcggccctcctcctccacaactactactcgtcctggacgcgtatcgccggaggcaacaagctcgattctgctcagcttcggtatatatgggaatctgaggagctgcgtcgtgctatggagcctgtggatttgattagaagagtgaaggaaattgagcaagaagcttatggtgagcatggcatggcgacagatgaagatcctaagcagactgccgctgttgatttatcaaaacggcttaaggatttgagggcagggaatgatggcagtagccaaaaagctctcgaagaatggcgtaaacggaagatggagcgtgcaaggcagcgagccatcgaaaagaatgggacttctagtgtgaaaactaaatgaggtgaggagtgtaatgcagcacaagggattttgttttcatgtgtctcggagctgctccatgatgcattcaagtcaatccgtccatcgtaagcgagtgtagctgtgatgacccatgtttttaaagccacaggcagcggtgttcttgtagaaacgtgaagttttaatatttgtgattgtccatgttgccgtgttttttaaccgtcatgtatcagtatcaactttgtttgttcacttgttcaagtttgcatgtccctagaacgagtgctctgatactatgatttgagtactaattttgccataccgtgtacttgcaaaaacaaatatacaactggtatggacacggtattgtgatgaataatgccatggacaaaataaaatttgagtgatatttttttgcaggtttaaatttttagctttgtgtactacatttacgattttgtaatgattgttaaaacattgcgacatgttgagttaact

SEQ ID NO: 85140 - DNA, 837 bp, Zea mays
  Clone ID: MRT4577_177658C.1
atgtctgctcttgattatgtcctcaggactcaggtgacgtatctggtaataccctagctagcatgggccgagatcaagctgcatcgcatctgatcgggcaggggccggagttcctgatgaacaagatacatatataggtagtagaaactaaacagattaaagacacatatgcagtggcttcagctaatcttcaagactgcaaacgtaaggatacagagctagctgcttgaggtgggatcatgcaagactgcttaattacctacctatagcttaacttgaagcgcctgctgcagtttgtgcaaaactgcagcttcattttctctttcagctcataccttgagctgtttatttatttttgggatgtcgattatatgcgacgaatcagtcgaatttcaccttcattaattcagttggtcccacagttagcactctctgctgacagtgcaagcttcagggacgaagatgcaatgaaggtgctctctgcctcctaaaacgggtacgtccaagcatcaggatcatgtgcatgactcgcagccgacaagaggaatcggatcatggaggccactgcagttaaaatatacagaagcgcaagttttcactgtcatgtcggatggtgcggcggcatgcaggcgtgggttgccactgatgcccacatgacgctcctcggggcctgcaattgattatatgctcacttgcaactaactcactcactaataatacttactcctgtcctgcagctctgtctgcttaagcctgtagctagctctagctatataaagagacatgggcatggtcagctgcctgaaccacatatcgcagcagctaagctaactattc

SEQ ID NO: 85141 - DNA, 1017 bp, Zea mays
  Clone ID: MRT4577_177659C.1
cgtctagccggccagggcctaggccaccgtgagggccgtccgcctccatctccggcccgagcggatgcgccaccgccgccgcccggccgcagttcaccaggcgtcgagccccgccccggctcgcgcgcgtcgagcctctgtccggccccggctgcaacccactcactcagccagacctggcttctctgcagactgcaggttctcagtttctcttataacagccgagtaaccggacacttttgcccttcgaactaaaagcgcctgcatctcaaacccgacggcgctctcttctctatcctctgtgtcccctccaccaaaaccgacgacgacgtcgctctcctccaccggtgctcggcgctctccctccaccagcggtggtccacagacgctcggcgagctccaccggcgggcgctggcggctggtcagatccgctcggcagtcatccatctggcacatcgggtagctcgcgcctccgttggcagtcccaccgccgcccggccctcccccagcgcccccggtgatccggaccgcacccgcttactcggcctaacgaccggctcctgccccgacgcagccgaagctcccagcgtcctcctgcaggccgagctgaaggttcagcgcgccggtggagttcgacgacgaaactccgtcacgtcatacctctccgcctcccgtcttccagacgtctctaatcggggtcccagcgtctcggagaagaggagcagcacggcacggcagctgtggcgaggaaggctcctgtcccatcccaacccagttagcagccgcccaaggagaaggagatccaatcggcgtgcgggcgtccgcggtccatccatcgatccaattccaatctgcaggtgagcagctcggttagattcccaatcaacagctcgaatcgcctgctatcccatcctattgaatgaaactatgatatagaattggtttgcctagttattatctcgaattaatttataaagatctccactttggttcaaaaaaaaaaaaaaaaagcggcc

SEQ ID NO: 85142 - DNA, 110 bp, Zea mays
  Clone ID: MRT4577_17765C.1
cgacgggtctggactaggccggacacgcggtacgaggagagggaggtcgtgccggcggaggccgtggctcgggcagtggagaggttcttggagcacggtgggcccgggga

SEQ ID NO: 85143 - DNA, 531 bp, Zea mays
  Clone ID: MRT4577_177660C.1
gttaatgaattgataatattatgtgattattcatcttgcctcttatatctcatatgcttcttttgttaacacatattacattaatgaaggtgtgtcctctataaccttcgtctgaagaccattatatcctaagggaaataatgcttcgaatgacgaagagacattaacatttaacattctgtgttgtcttgttcttaattcatagcacttgagaacaagtccccaacacccgtgggattcctttttgtcgagctggtgacgcgtggctagcataagagtgtcttcacggcttggggcttggcgtagatgaagatgatgattgacgacttgttcgagctgttgtcgagcacttggtgaatatcacgctgctagcttcgtcttcactcgattcttgggatttcttgatgacgcacggaacgacgatgagattgtgtctagagcgagctggcgaggatacaaatctagtgagggctctggcgacgacgaaatcacgagcaaggaaggacgggttcaacagctcgacggcaaacg

SEQ ID NO: 85144 - DNA, 1060 bp, Zea mays
  Clone ID: MRT4577_177661C.1
ccggccgggaattacttcgcctcgaggagcaggatctcgcccagccgcccagggcctaggccactgtcagcgccgcccgcctccatctccgccccgagcggctgcgccccggccgccgcccgcctgcagtccaggcgtcgagccccgccccggctcgcgcgcgtcgagcctctgtccggccccggctgcaacccactcactcagccagacctggctagttacatactgcaatttctctgcagactacaggttctcagtttctcttataacagccagtaaccggacacatttggacacttatgcccctcgaactaaaagcgccggcatctcaaacccgacggcgctctcttctctatcctctgtgtcctctccaccaaaaccgacgacgacgtcgctctccaccggtgctcggcgctctccctccaccagcagcggtccacagacgctcggcgagctccaccggcgggcgctggcggctggtcagatccgctcggcagtcatccacctggcacatcgggtagctcgcgcctccgttggcagtcccaccgccgcccggccctcccccagcgcccccggtgatccggaccgcacccgcttgctcggcctaacgaccggctcctgccccgccgcagccgaagctcccagcgtcctcctgcaggccgagctgaaggttcagcgagccggtggagttcgacgacgaaactccgtcacgtcatacctctccgcctcccgtcttccagacgtctccaatcggggctcccagcatctcgtagaagaggagcagcacggcacggcggctgtggcgatgaaggctcatgtcctatccaacccagttagcagccgcccaaggaggaggagatccaatcggcgtgcgggcgtccgcggtccatccatcgatccaattccaatctgcaggtgagcagctcggttagattcccaatcaacagctagaatcgcctgctctcccatcctattgaatgaaactatgatatagaattggtttgcctagttattatctcgaattaatttgtaaagatctccactttggttcgatttgctt

SEQ ID NO: 85145 - DNA, 407 bp, Zea mays
  Clone ID: MRT4577_177662C.1
caccagactttaacctctgccagctgttctgatcctacacattgacccccttagggagaagtgtccttggtctctgcttcgcattcctaactcaccattgctccccttcagcgacaccctacggctcgtcaaagtgccagacccttcagctgcactgctgccaccaaatcacgcactttgaacccctgaccagcttccacgcgtcatacagcgtggccctgaagtacatcctgcagcaccagccagaacacgagctcacggtcctgatgacgacccaggtatcacaacatctgacggcgatgtgcagactgcacctgatataaccacctccctgtgcttgcaacgcacctgacgccagtgcctactactgacgaaactatacactgttatcataatgtaatggatcc

SEQ ID NO: 85146 - DNA, 753 bp, Zea mays
  unsure (1)..(753): unsure at all n locations
  Clone ID: MRT4577_177663C.1
cattgggtacctcgaggccggccggggcagccgccgtttgttgtcgcgagcgcgttcctgccccgccacagccgtagctcccagcgtcctcctgcaggccgagctgaaggttcagcgcgccggtggagttcgacgatgaaactccgtcacgtcatacctctccacctcccgtcttccagacgtctccaatcgaggctcccagcgtctcggagaagaggagcagcacggcacggcggctgtggcgaggaaggctcctgtcccatcccaacccagttagcagccgtccaaggaggaggagatccaatcggcgtgcgggcgtccgcggtccatccatcgatccaattccaatctgcaggtgagcagctcgttgagattcccaatcaacagctcgaatcgcctgctctcccatcctattgaatgaaactatggtatagtggtttgcctagttattatctcgaattaatttgtaaagatctccactttggtttgatttgattgtttcttcaactagtggcatattgttctgcttcttacgtgattccattaggtctctgcgtcacggcttgttcgtggaggagaggtcgagaatttactaagtcaacatcttgttttaggtcattactgcatttggaagactagggacaatgtttggatgtgatatgtataatattaaaccagatcttggttccatagccaaggttagttcaatataaaatacntatttaattacnagagaacttctttataaaatta

SEQ ID NO: 85147 - DNA, 452 bp, Zea mays
  Clone ID: MRT4577_177664C.1
gacgccacgcgtccggagcgacagacagagatagagagaccgtctctccggcatatcccaacttcaccgcagaggggggtgagggcgaccgatggcgcggattgttttcatcatggacttcgcggataatctgatcctccgtctgatggaggacccggacaagcgcaaccaggttcgggaggagcttgtctacatgatgaaggagctgggcgagcgcactaaggcggcgtctagcctccctatgcgcccctacggcttgtggaccttctaccgcttcaactcgcaactctcctgagatccccagatcagccaggccacacgtccgtccggacccatacatcgaccttatagcccgccactctggctcgacggcgtctgcctgaacacccgtgccgatctttgccctgaacgtctacttgagcatcattaccacactgatttcacacaaactg

SEQ ID NO: 85148 - DNA, 227 bp, Zea mays
  Clone ID: MRT4577_177665C.1
tttactacttttatatttttcttaccaatattaattttttttttttctattacgggggggcagctgggattaatcccacctcaattgcatgcttcaaccatctccgaaacaaccaccgcatgaatctgtctttcccacaacacttcctgtccacacagatctccaagagcagcttggagaccgacaatttcgctagcaatcccatactatacaagcccgtccgaaca

SEQ ID NO: 85149 - DNA, 195 bp, Zea mays
  Clone ID: MRT4577_177666C.1
tgctgtagccatcctctctacctcatgtgtttgtccagacatgtggaaatgtgactgttgttacagacctttggtgcagtatcatctcatatttcgagttgaaatggtaatcactgaatgctcttcgcagggcatttccagcttgtatcttctccatgagatcgcatctatactcggactcgtggacgatgacat

SEQ ID NO: 85150 - DNA, 355 bp, Zea mays
  Clone ID: MRT4577_177667C.1
ataacaacacatatgtagggattcccattgttgtcacccaaaaggttgacatgggttgtggctattctagatagaacaccatttctttcacacaaccttaccaacaataaaaatttgcagagaagagagtggccctcggcctttccgggcggtcgaaaggctaagcgccccccccgaggattcgggggtcaaggtttatttccttgggcatgaaggacacacccttggagtggatgggccaaatgtgggtgtcctcgaacaggccgacaaagtaaagccttggtggtctttctcactccggggacgggggagaactggaacaggaggttggttttgaagatctgggccatcttgc

SEQ ID NO: 85151 - DNA, 268 bp, Zea mays
  Clone ID: MRT4577_177668C.1
tcgctccgggccggcggcggcgtttccggttagcgcatgaaggccgactcgagcgggctggtcaagctccctcgggtgcttgggcttcgtcttcatgtctgtatttaggcaggagtaccacgtgcatcactcttgcaacaatagcgttgctgcctttagcaagggagctggtgaaaagtcgctctttatgtctgagcatgagaagcaaccctatgtggaccaatctgggcagtataagcatgactatgatgaagactaccgcaaattt

SEQ ID NO: 85152 - DNA, 520 bp, Zea mays
  Clone ID: MRT4577_177669C.1
ccgtcctagcccggtccgaatactttgtcggtcaccgtcgcctggccggaaagaacgtcgcagatcccccaggcctgctatggcgtccgaggtgaacccaaaggcgtacccgctggcctgatgctgcaggtgacgatgggttttctacattttataaacaagccgccaggtacagagatcaagaaggagctactaagggcaatacctgattgggggatatgggagttcgctgtgatggcggccttacacggagtcctatcgagattctgctccaccttcccttgctgggggaggataagaacgtcccatatgggtttgacccatcgaaacaagctctcggccgtggtgggggtgtgacaagacccgtaattgcttgctcagggaccaggactgagggtagccatctgaaacaacatatacaggggcttaaggactctattgagaagcttctcatgtgatgcaactaagatctttcagtgtgatggggctcggggacacattggtcacatgcttgtagtgg

SEQ ID NO: 85153 - DNA, 235 bp, Zea mays
  Clone ID: MRT4577_17766C.1
cggaattcccgggtcgaccccgcgtccgagacatcttgttggatggatgggtaatatttgcctacttctaaggctattgattatgtattcacaaagaaaaggctatgatcaaggtgtaagcgactcatattgcattgttctatgcaagatgagcctatggccgtgactttctgttttgaaaggctgagaaatatgaaagccatccctgaatgatgataaaaaaaatccctccccg

SEQ ID NO: 85154 - DNA, 330 bp, Zea mays
  Clone ID: MRT4577_177670C.1
cagacctatgctaatcgttttccaccggctgatcgcggtaggaccttgagcaccggtcaactgcgctcaactgaccgctcaaggccctggacccatacccactgcggagcccttttccggctgtgcacatggctcggcccattcccaggctggagggcggaccgaagaccggcggtctctgcccacacccctgcttgccggccatcggggattccttacgcggcgacgctgcacgtcacccgcagctgccaaagagacgttctgtcagccgagactcaactgagcagctcacacgggtcaaagaattttgaaggcgcatttatccactct

SEQ ID NO: 85155 - DNA, 634 bp, Zea mays
  unsure (1)..(634): unsure at all n locations
  Clone ID: MRT4577_177671C.1
aatactttgctcccggacaattgcagaacaccctctccgttttgtcgcggcggcgacggcgacaacgcagatctcctctcgtcccaaggctccggcgatctctctggctgtgtgagcgggagagatggagctgtggagcaagctgaggagcctcgacgcttaccccaaggtgaacgaggacttctacagccgcaccctctccggcggactcatcaccatcgtctcctccctcgctatcctcctcctcttcttctcagagatccggttgtatctatatgctgctacagagagtaagctcacagttgatacctcaagaggggaaaggttacatatcaattttgatgttacattccccgctctcccctgttctcttgttgctattgatactatggatgtcagtggagagcaacattatgatataagacatgacataatgaagaaaagaattgatcatcttggtaatgtaattgaatcgagaaaagatggagttggttcccctaagattgaaagaccattgcagaatcatggtggaaggcttgaccacaatgaggtttactgtgggtcttgttatggttccgaagagtcaatgaccagtgttgtaactcctgtgaagaagntcgtgattcctatcgga

SEQ ID NO: 85156 - DNA, 387 bp, Zea mays
  unsure (1)..(387): unsure at all n locations
  Clone ID: MRT4577_177672C.1
ccgcacccgcgcagccacagagcattcacacaccccacagcacaacaggacccacagcagcgcggccacgcagcagacgagggagagcacaacccacgacggccacagcacacgcacacgacagccgcagacacccncacaacaccgagggaagggaagaccaggaaaaaaagaaacgaacccggccgacgacccacgcacaaccgcaacgaacccgaagaggggccacagcaaggagcagaaaacgccgaacggaaggcagaaagaggtgtttgtacgaccaacagccacggggcgagggacttggaaagaaagcacgccaaactcttcattctcagccaccgcttgatgacttagaagctcaagagaacacgtatctccaccacg

SEQ ID NO: 85157 - DNA, 279 bp, Zea mays
  Clone ID: MRT4577_177673C.1
gtcaggtgtacgtcagtaacaccagttattatctcttgctcttgtgcaataatggcgggtggatcattctgctctcaggcggagctcttggtcgctggtacacgcgtgcgatcggcgcatgtaatgatcccagctggggccagcacacgcgacatgatgcagcgagatgctgagaggtgacgtgactagctgtggcgcgcgcctcgggtaccgcgatgggcagaagcggagtcggcgtcaccggcaatgctcggatactagtgcgcatagctcaacagc

SEQ ID NO: 85158 - DNA, 154 bp, Zea mays
  Clone ID: MRT4577_177674C.1
taccgggccggaacttccggggcgaccgaaacgcccgcagcaatagaagggagccgcgctaggaacgtgggcaccagagaggaagaagcgggatcacattacaaataaaccaggagttttaaaggcgaggaggacacccgaagaaccgcgaccc

SEQ ID NO: 85159 - DNA, 210 bp, Zea mays
  Clone ID: MRT4577_177675C.1
ggaaaaatacaccccatcgcccagcacccctgctgataccaccagacagagagagagagcacttgattcttcacgagatagccacctggaaacactaggtgcctgcccagggaggaacggaggaggactcgagagaaaactagacatcccagggacccagggaggcgatggccaccccagagtccacgctttgctccacggaggtgggag

SEQ ID NO: 85160 - DNA, 161 bp, Zea mays
  Clone ID: MRT4577_177676C.1
caagagagaagaggagcagtcgcgtctgccagacgaaatggtggccgccagagcgcatcctgcgccggggagcccctcagccggccgcaccaatccgacatacaaggagaagaccatgcacgccctcacggaactgcgcgaccagagcgggtggaaccgga

SEQ ID NO: 85161 - DNA, 454 bp, Zea mays
  Clone ID: MRT4577_177677C.1
gggccattaccacaaccaagggtaaaaccctatgttatttaaaggacgaggggcagtacaccaggggggggggggggccatacaaaaacgtattggaaagctggcagggggcactgatagttgggcacgccatgttttaaaaagcccacggggggggcttttatatatgggaggagcttaaaaaaacaccgggaagggaatgggccccatgacttcaaaattcaaaccaacctgacaaaagggaaaaaggggggggggttaaattggagtaaagcttgaggcccatgccgggggggaccccgtagcccttgagggggaaggggcccttggaaatgttgaaccacttttggagggggattttttgggggggggtccccgtctgcgccgccaccagctttttgagggcgccgatggggtcgtcctcgttggacttgacccgcacctttttccccag

SEQ ID NO: 85162 - DNA, 673 bp, Zea mays
  Clone ID: MRT4577_177678C.1
aactagcacgcacgtcaccaaacgcgcaacccgatcgagatcgagatcgagagatctgcatatgtcggagtccggcccggccgccgatggaggcgccgggggcgggccggctgacgctggcggagtgactgtgaggtccatggtgcagcggtggaagatggacggcgcgccggcgcgggcgcggctgctgctgcgggccctggcgtggctcttctccctcctcgccctcgtcgtcatggcgtccaaccagcacggcggcagccaggacttcggcgagtaccccgaatacaactactgcctgggcatctcgatcgtggcgtggctgtacgccacggcgcaggtcctgcgcgacgtccaccgcctcggctccgggcgggacctcatcgcggcgagggaggcgtcggccgtcgtcgacttcgccggagaccaggtcgtcgcttacttcttgatatcgggcatgtccgcggcggcgccggtgacggactacatgcgccaggcggcggataacctgttcacggactcggcggcggcggcgatcagcatggccttcttcgcgttcgtggccattggcctctctgctctcgtctccgggtacaacctctccatggaggctcttgtatagcctgtgaatcacaactctaccatctcatgtgtgatgtatcacgttacccaa

SEQ ID NO: 85163 - DNA, 796 bp, Zea mays
  unsure (1)..(796): unsure at all n locations
  Clone ID: MRT4577_177679C.1
gccggccgggtcgggacaggctatacaagagcctccatggagaggttgtacccggagacgagagcagagaggccaatggccacgaacgcgaagaaggccatgctgatcgccgccgccgccgagtccgtgaacaggttgtccgccgcctggcgcatgtagtccgtcaccggcgccgccgcggacatgcccgatatcaagaagtaagcgacgacctgcaccaacgtttccagattttccatcagagaaaaaaaaaagcgagacagacaatagtaatcggcggttggcgctcggtgggtggatcggatcggatcggatcgttccacggcggcgcgcacacacgcgcaccggatgaacccaccacctggtcntccggcgaagtcgacgacggccgacgccttcctcgccgcgatgaggtcccgcccggagccgaggcggtggacgtcgcgcagaacctgcgccgtggcgtacagccacgccacgatcgagatgcccaggcagtagctgcacgcttggaaactcagcactgcatcgattccaatggtcggtcgatcgagaatgggtggtgctggttaatttggttagcctactgtacagtactgacttgtattcngggtactcgcggaagtctgggctgccgccgtgctggttggacgccatgacgacgagggcgagggagggagaagagccacgccagggcccgcagcagcagccgcgcccgcgnccggcgcgccgtccatcttccaccgctgcaccatggacctcacagtcactccgccagcgtcagccggcccgcccc

SEQ ID NO: 85164 - DNA, 199 bp, Zea mays
  Clone ID: MRT4577_17767C.1
attgagcgagcgggcacatgtggcgggtcatcaagtcaggggggctcaacctgacctggcctagctagagctacatgctcccgagctgcgggtgttctacactactaccatcaacaaattcttatacgcgcggtcaattccgtttaagacactagcagagtgggcttaatcaacactcactccttgccaataatgaatt

SEQ ID NO: 85165 - DNA, 763 bp, Zea mays
  Clone ID: MRT4577_177680C.1
gccggccggtttccggaatccggcaatcccgctcccccatctcgctgctcgcccgctctcctccgccctccgccatggcggccttcccctccgcctccccgtcgccggcgatctccgcctcgacctggagcatggcttccctccagaactcaagctttgagcatcggttgtttggtattgatgcccgtggaaggatagttgcgatgcgacatggtagacgcgttcctaaacttaacaggcctccggatcaaaggaaagcactgctgcgtgggcttaccacacagctgctgaagcacgggaggataaagactacaaagccaagggcaaaggcaatgaggaagtatgtcgagaagatgatcacgttggcaaaggatggatctcttcacaagaggagacaggctctggcatttatttatgagaagcatatcgtccatgccttgtttgctgaggttgcagacaggtatggagaccgagaaggtggctacacaaggatcatcccgacgttcccgaggcggggagataatgcacctatggcgtacattgagcttgtttaggattttccatcggttgctgtggtttcattggtgccatgcaggctgagtggtcatgtttgcgcattgtcatctggagatctgtttctttcttcccttatcaagttgttctgtaccaaagtgtagatcacgcgtgatatttggaactcgtcaaacttcgtgctgtaattgcaaggcgccattatataatctgaaaaataagtacgtggcct

SEQ ID NO: 85166 - DNA, 228 bp, Zea mays
  Clone ID: MRT4577_177681C.1
ttaacattagccgagtcttttattgtcttagtagattttgaaaatcattgaaattctttgttagtattaattagtcatgatgtaatgcagtcaacagtgatctgtgttaggggcttagggctggttgcacttttatatttttgaaccgagcttattgtacttaccttttttccaaaaattattattttctctctgctagcttccaactttgcacttttcttgagaaat

SEQ ID NO: 85167 - DNA, 1262 bp, Zea mays
  Clone ID: MRT4577_177682C.1
tccgttcaggccgagcggcgtctcctctctccatcggctccagccaatccggcaatcccggtcccgcagctctctgatcgcccgctcgcctccgccctccgccctccgccatggcggctttcccctccgcctccccgtcgccggcctcggcccgtgcgggcctcgaggcagaaaccctccacaggacgagcgtgtcaaacgttatccggttcaaagccgagcggcgtctcctctctccagcggctccagccaatccggcaatcccgctcccccagctcgctgctcgcccgctctcctccgccctccgccatggcggccttcccctccgcctccccgtcgccggcgatctccgcctcgacctggagcatggcttccctccgtacgtccctccccgcactccgcccctcccccgcgggcaggctccgttcgtcgttctcgcccgcggcggcggccacggctgcatcggtcggctgcctcgggtccttctccggcctcgcgcccgtctcgaatctcctctccctcggcgctgagaactcaagctttgagcatcggttgtttggtattgatgcccgtggaaggatagttgcgatgcgacatgggagacgcgttcctaaacttaacaggcctccggatcaaaggaaagcgctgctgcgtgggcttaccacacagctgctgaagcatgggaggataaagactacaaagccaagggcaaaggcaatgaggaagtatgtcgagaagatgatcacgttggcaaaggatggatctcttcacaagaggagacaggctctggcatttatttatgagaagcatatcgtccatgccttgtttgctgaggttgcagacaggtatggagaccgagaaggtggctacacaaggatcatcccgacgttcccgaggcggggagataatgcacctatggcgtacattgagcttgtttaggtaattgaatatcttgctatgtgattcctgaaatctgaacttccaaggtcactaaaccgcacttattattccatgtgttgacctagactgtcaacaagacaaactagtattcttatcgttagcagaagtatgcccgtgctaacgctgcgagggaaatcgttttttttttgaagagggaaataataatgtaaaaaaaataacacgagaaaaataccctctatttccaaacgcactcaagattttccaatgtggctggtaaggtgttgtcaaggattatggtgtgtgttgacttctataaataatgtatctgctactagtttggt

SEQ ID NO: 85168 - DNA, 495 bp, Zea mays
  Clone ID: MRT4577_177683C.1
cgggtataatttaaatcatttttggtttttttttgggaaaccatgtcggtttgggggcccctttgtcgggtccatttaatttgtaatctaaagttggcccctccaacgttgggttgttgcagggcagggttcttaaaaaagaactggttgtttggcaccatttgttgttgttgttgcaggaaggtaccacccaatgggttagccactgccaatggtttaagtaactgttgtcgttgttgtaggtccccaccaaattttgccccacccagttggttgattggaaccaactgttgtaagtaggcaccagggtttgccacagttagctgattaaaacctggtccaatttgttgcaccacctgttgttgtaggtccttaggtcctttgcccaccggaggcgggttaaataaaattagttttaggtaaacggcagggttaaccatggttagttgactgacccctggcttaaactgttgcacctgttgttgttgctggttt

SEQ ID NO: 85169 - DNA, 424 bp, Zea mays
  Clone ID: MRT4577_177684C.1
cggggcgtgggtctctcctctctcgccacaccacaccctcgcttttgcaccccgctcgtcagtcaatctcctcccgccctttcgtgtaatagcctcgagatcccccacccggtccactgcctccgcgttggaccaccagccgctcgccaaccctctgcgccgcaggcctcccgaggctcgccctctggcgtcgtaccacgtcgaagcccgccccccatcacgcatcgagatctccctcacctcggtaggggaggcaggagcatgtccattgtgagcctcccccccacccctacggagagaggtcccggagccctaggattccgctcccgccccctcccgctgacctcatggagacgaagaagccccctccccccgctcgtagagctcaagcttgacggacgggtcgatacccccctgctctgca

SEQ ID NO: 85170 - DNA, 128 bp, Zea mays
  unsure (1)..(128): unsure at all n locations
  Clone ID: MRT4577_177685C.1
ttttnnnnnnnnataagggaaaactgtggggggttaaatagttcataagagactgggaacgtacatttgatctggaatattccctttaatttgggctactacattaaaattgggtcaattacaagaac

SEQ ID NO: 85171 - DNA, 303 bp, Zea mays
  Clone ID: MRT4577_177686C.1
cggacgcgtgggtgaaattgcattctgagtgttactccattttttgtgttactctacgggattgtactctgtggatccttgggcctaatgctgttcgaattgcgctgcattctggaatgtaaatacaacgaaacgtattcgtgtaaaatgaaattccaatagaataagaccggagtcttcatgtcccgttatggacggcctgctttaataaaaatactccgtctggcagctttaccatgactcactataaaaacgcctacgatcctgaagtaatcagaaaaacgaatttcctttttgggaaaa

SEQ ID NO: 85172 - DNA, 830 bp, Zea mays
  unsure (1)..(830): unsure at all n locations
  Clone ID: MRT4577_177687C.1
cattgggaccctcgaggccggccgggaaatcctcactcgcaaccaacatgctcacacggagtgcactgtgcccagcaagggcctttgccaatcgcttccctcccgcgatactcgccccctcatcactgggcgcaaccgcttccttttcgacatgcacacgaccaagcccgcttccgcaacagcgcaatcgccccgcgacgacagcgacggcgacagcaaaaacgacgccgtgcacccaattcccccgcagcaaatggccggcacgctatgcgtcgacgacaccagcacaatctatggccaacaattccccaggtagcacacaaccccaactcacatgggacgccttcttcgcgctgcgccggacgcgccgcagaattggccaggcctgctccggcattggtgctgtgggtgtcacgtactttgggctcacgacaatgatcaacaatggctatgatgcaacgctctcggcgcagctcggcggcttcgaccccttcatgctcatgggcctcagcaccttgggcatgatgggcgtggggtggctcattggtcccatctttggcaaccaagttttcaatctggcgtacaggggagtgattaccgagttcacacggaaagactcggcctttttcaaccgcatcanacgccaccgtgtcgatcctaccgcatcgtcgctggccaatcctcccccggattactatggcgagaagattggcagtgtggnctgggtatagggcggtggctgaaggaccagcgcgccttcaatctcanaacgggcaggtacagggncgccaaagacgttgtagtggncatatgcgttttgcattgcacga

SEQ ID NO: 85173 - DNA, 339 bp, Zea mays
  unsure (1)..(339): unsure at all n locations
  Clone ID: MRT4577_177688C.1
gaggaaaaaaaagggggggaagggcaaaccggccccgaaggcaagggggnccccccagaaaaaggcccaagccaagcaggnnnagacggaaaccccaaaagaaggccaaggcaaccacacccaaaaaaaccaaacgggcaccaaaaccaccccaaaanncgggaaccccnnaaaaggggggagggaaccccaaaggagccccaaggcgggcaaaaaggacacccggagaaaaaaacnngagggccaacgggcgggccaaagaccccaaacccaagggggcacgggggggaccaaaaaaaaaggccaaaagcccgcgggaaaaaaaaaaggaaggggggg

SEQ ID NO: 85174 - DNA, 187 bp, Zea mays
  Clone ID: MRT4577_177689C.1
cccacgcgtacggccacacaacaacaccctcatgggtcggtatctaaggggggctgacggcgcgttcagacggctattgtcttctactcagtggtcctggaacgttcgctacacttatgagtcacgcaatgctgacttttgccagcttcagcggtcattcaagagtgttggcccctcaacttatttc

SEQ ID NO: 85175 - DNA, 202 bp, Zea mays
  Clone ID: MRT4577_17768C.1
acgccctgaccggcgacggctgccaccgcgacggtgatgatgtggctcgcgacgttcgcgatggcgtcgtacaagctgaaggcggcggcgtggacgccggtctggcaccaccggtaggtggccgcgtccctcgcgcaggccgccgacgcctggctcaggctcctgcgcgccaaccacccggaccaattctacttcggggccc

SEQ ID NO: 85176 - DNA, 221 bp, Zea mays
  Clone ID: MRT4577_177690C.1
ggcaaaggggcaccgcgacccaaagaagacggaacagggaagaaaggcccggaccaaaagggccatacgtgcaaggagaccggcggcggaaaggaagaaacacaaggccaaaagcagacgcggaaaggaaggggaagcgaagccgaaagaaaacgccggaccagaggacgcacggttcaggaaggccaagggagagggagaccgaaaagggaaccgccaaa

SEQ ID NO: 85177 - DNA, 259 bp, Zea mays
  Clone ID: MRT4577_177691C.1
gagaaaaaattttttttattagggatatgccgtacaatggttcaaacgggcaatcctaccagtttcccttcccaaaaaaggtcggtgggccttttaggggggggggaaccgggtgattcccttaaaagtttaggggccccccggggttttactaaaaaatttttggggccggcaggggttttactaaaaaaatagtatcgatgggattggcctgaattcatgcttatcgagccttggctttttttaacaataaatgaat

SEQ ID NO: 85178 - DNA, 540 bp, Zea mays
  Clone ID: MRT4577_177692C.1
ggaacggaaaacaacaggaccttcaaggggcgttaataacgggggtaaaaggggcccggacattttagtatataacccgagaaagggaacaaaggagggcggaaaggggcccaaaaaaacaaacaattttttggaacccagggatcaccccccaaacatttaaaaccctgggaccgagctttgcctaaatggagggccgaaaaaaaaaagggaagggaacaaaccaaaattttgggggtttacgtcccacggaccattggactcgccccagggcataagttcggggaaaaattttgggggcaaaaaatttgggggtaacccgggaacctggggcgggaccaccctagggggaaattacaggaaaggggggggcgtaactaggggaaggaagttgggaaccaacttgggggaaaaaagggaaataagggattccggggggaaaaggttatgggttaaaaatggccaaaaaaaaagagcggaaaaaaaaaggggaaagggggggggggtaaaggggggggaaaaaaaaaaaaaggggggggg

SEQ ID NO: 85179 - DNA, 530 bp, Zea mays
  Clone ID: MRT4577_177693C.1
acctagctacttgcgtactctcacgcatgaatatatgcaccatatatgagtagtaaacgccaaaaactccatcgagcgccaccaggctaggctgctgtttgtcggctcggatcgtctcaccaacgggaccacccaattatagcaaaaggttagggagagaaaaacataaaaataaaaaaaaaatgcccgtgcagttgttcttgttctcccttccgcatatataagtatcgagctcatgcgttctccatgggggacaccatcaaccctccactctcccccagcctccattattgatcgagcggctctggtaccatcgtatacaaataatgatgatgttgttcgaggaggacgcagccgccatgggcatcccagatgccttgtgcattgtaagtagtctccctcccgccctagcttgataatgtgtccaaccctgccatactgatgtactaccagccagctaagacgtccccgttcatcggggtccgaggagtgaccgaattctttcaagacttcttaccaggccggaataa

SEQ ID NO: 85180 - DNA, 876 bp, Zea mays
  Clone ID: MRT4577_177694C.1
gtcggctcggttcgtctcaccaacggcaccacccaattatagcaaaaggttagggagagaaaaacataaaaataaaaaaaagatgcccgtgcagttgttcttgttctcccttccgcatatataagtatcgagctcatgcgttctccatgggggacaccatcaaccctccactctcccccagcctccattattgatcgagcggctctggtaccatcgtatacaaataatgatgatgttgttcgaggaggacgcagccgccatggccatcccagatgccttgtgcattgtaagtcgtctccctcccgccctagcttgataatgtgtccaaccctgccatactgatgtactacctgaattattgtcagatcataatgtagagagataacatatacatacatagaatgatgtgcttacactatattttttccagcttatcagcaaattaagagatcttctacagtagcaagggctaagacagacacgatacgatatattccatatatatattcagtaaaaacacaataatttaatgccctctactgtcaaatgactaaaaagagatcgtcattgcaaaatatattgttccataccagccagctaagacgtccccgttcatcggggtccgaggagtgaccgaattctttcaggacttcttcccaggccggaataagcagtctctgcgccaaaatagcatcccttgcattagaccatgcaccgtaccacagcagcagcatttataggacgtccaattttatgttcgctgcctttattgttggttcaatcctgtcttcgcttctatcccgtacctctcccgaccgcaattgtagcagagaaacttctgggagctgactagcttccttgctcctcggtgttgcc

SEQ ID NO: 85181 - DNA, 123 bp, Zea mays
  Clone ID: MRT4577_177695C.1
gtggaaagggccaagccaaatttccattttaacaaaatggtaaaagggacctggccagtcaaaaaaggggtaattgcccttgcaagaaccaaggccacacagacctgcaaaaaccagaagccg

SEQ ID NO: 85182 - DNA, 383 bp, Zea mays
  Clone ID: MRT4577_177696C.1
cggccgggccgggtatcttcacaagcagctcacagctctagctctagctagctagaaagggggggaaaatgtctccgcttatcactgctgccatgaaccacgttgtagcccatcctgacattaggagccatctagcacgacccaacgatgccagtttctcacggcaccacctgccgtcttcttctccacagaccagcaagcgaaggcgtaaccattacctttactacacgaaccgcaagagtatccagccaaaatggagtccacatgttgagcccctcggaaatcccacaaagcgactggtccccctctgatttcaccttcgggggcgacacttcaacgtaccttttttttttgtcctcccacgacgatggacacggcgaaag

SEQ ID NO: 85183 - DNA, 410 bp, Zea mays
  Clone ID: MRT4577_177697C.1
gtaacccattggggggcaacgccctaaacaaatgcttgggtgggtccacactaagggcaaagcgggaggaaggggggggggggcggcctcccggaaagggggttgggaacatgccggggggccgggggttttggaccaagaaaacctgggcctctcttggcccccggtgctcaagcgtgccggaaagcaaatcaagggaaaggcgggggtttgcacccgggtttttaacccaaacccggggggggcgcgagcaagcccgtggttccccctcctctcggcccaggggccggtttgaaatttgtttgccctggttttcttggccagggccgatttggtggcccccctttgcgatctctgtgttttgcggccgcctgggtcccccccgtaattgccggccgcgccctgggggg

SEQ ID NO: 85184 - DNA, 351 bp, Zea mays
  unsure (1)..(351): unsure at all n locations
  Clone ID: MRT4577_177698C.1
gtgttgannttcctcgaggtcttcaacctggtgggcttccgtttgggcagcttcaatttttaaaactaagatgtcacaatagccaaggaagtganggtacaaactgcacggtctattacaaacctcctgctgataagaaatggcacttcaaaggtcgccttcctccaaagaagacgcagncccttcaaaggtcaacctccnaacctaagagtgcttcacnnggtccccaacgtccaaggggagtccaaagagacccgcagcacttcaaagggtctcctcctaaggggacgtggtagatcaaaggtcaaggggattaggagtcggtcccaggagccccagatgatagaaatc

SEQ ID NO: 85185 - DNA, 286 bp, Zea mays
  Clone ID: MRT4577_177699C.1
tgaaaacattggttgtgtgatgaccggaatgacagctgacagcagatcccaggtacagagggcacgctatgaggcagctaactggaaatacaagtatggctatgagattcctgtggacatgctgtgtaaaagaattgccgatatttccaggtctacacacagaatgctgaaatgaggcctcttggttgttgtatgattttaattggtatagatgaagagcaaggccctcaggtatataagtgtgatcctgcaggttactactgtgggtttaaagccactgcagcgg

SEQ ID NO: 85186 - DNA, 613 bp, Zea mays
  Clone ID: MRT4577_17769C.1
ttttttttttttttttgttctataaaactgacacagctaatatcatttggttgtaagcaattagttctgcaaagtcgcttattccccacacaggtgaaatagggaagaataaagaaaaacatggtgatgataaaaaaacagtgatgtgtaaaaaaatggtagcaaaaaaaaaattacaaaaagtatcacgtctgatgatcatgggagggttgcttatcaagaattgtggaatgttgttggaaggaagttgattgtccatcgtctgacctgttgtcgaatccaccggtggatgcccggcgaagttgagcacgtgatttaccatccgccccattcccaaattcggtgggagaattctcagaatctgctgctccccagattgatcgagaaccgacattccacaaggcgccaacaatcaccttggcagtttctacaatgtcagcggctcggctgattactccgctattgtctgattcatccctgtggaggtcttcatcttcgggcgaagggcctccgtagtaattaccaaaaccgaattcatctcccgatgaacaccggatctcgtccaccgagccaccggctcgacttgctcctaaaaacttgcgatcgctttgcg

SEQ ID NO: 85187 - DNA, 251 bp, Zea mays
  Clone ID: MRT4577_1776C.1
tctccattcaactcatgagtcttacgaagactgttgtttttcattctattgtaggaacttgaaaggtcagaatggtttatacttagacattgtgctgctaaatcatttgactactgtaccctctgtgttctgtacaatttgggcaccttttagcttggtcttttttttgtttgtttaactattctaatttcgttgttgatgagtaatgaagtttggatcgtccgtggtggaaaatggcttaactatttttg

SEQ ID NO: 85188 - DNA, 347 bp, Zea mays
  Clone ID: MRT4577_177700C.1
tcgtctaaccatacaaaccatcgcaacacaacaggaacattcagtaggcaaccaacctgctgagccaacggagacgaggagaaccctgacgccaactggcaacaacaggagcgcgcctccaaccaacgggcgctggcacacctttttgcgtaccagcaacaacaacagggcaacaggtagcagacagcgctcggtcaacgagcgcaggacaaccgtgccgccgacctacaacagcaacaactgactgcatctatccctctacgtacagcggaaagcacctacaaaccagcagcaacaatggaagcaacaagatgcaccagccatgactcagctacctagggcaaacc

SEQ ID NO: 85189 - DNA, 619 bp, Zea mays
  Clone ID: MRT4577_177701C.1
cattgggtacctcgaggccggccggatccccttccactgtcacaagtctccctccgtccggcggtgacttcgctccctccctgatgccccgttcgccattaccacgatgcgcacctttgctagctgcttcgacgtcatcctggcgctggggatcatccgacgcatgctctgcctcatgctccaactcgccagtatgtcattcacaacgctccgcacctcagactcaagcatctagtcaaccatatgaggtacctacccatggaccgacgacacaaaaaactctagggacaatcctccgttcacttcggtatgacatcaacctcaaatttttctgtatgttaacaacacctccgtcaaaagcacagaagttgtgctctactaggtcctgtacgagtgcaaccaagacttggatgctccccattaaaacatcgacaactccgaaaataagctgtatgacgacatactgcttaatggaacaaacacatatactatcgacacttgtgtatgcaaaattatttacgccattcgcaacagatacatgaaccccgatcgagaacacgtttccggcacgtatgagcactgtgtataatatatgataatgctctgtacatgttgcata

SEQ ID NO: 85190 - DNA, 505 bp, Zea mays
  Clone ID: MRT4577_177702C.1
tttttttttttttttttttttttttttttttttttttttttttttttttttttttttttttttggaaagggaaatttgggggccaaatacgtagacctcaacagcatacatagcagaaaactgccagtcgctactttaattagcagcaaataatcgctcccgggccatttaacatggggaactaaaatatactacctcattcctcatacaaaatatctcgatttaaccagctactaatgacaagggtgaactacatttgcatatcacaatactataaagtacagcactgatttttgggggacgacttggcccagttaaaaaggattctctctttttcttggtcttcgaatgcttggccaggaaaacaaaaagcccagtcaatgcaaactttttcctcttccccgatatttttttgggagcagccacatcctttttgcacaaaacaccactcctgtttataatttgaccgagcgaaaactccggaatctaccccgtttgggcatcc

SEQ ID NO: 85191 - DNA, 631 bp, Zea mays
  unsure (1)..(631): unsure at all n locations
  Clone ID: MRT4577_177703C.1
ttcgtgtgccgttgcgtcgtgaagtgttctgtggtttcaggggcgtganagtctgaaaacctganagngnatgggaggggtgatgatnnggctcnntgcaggcgcccaggggnaacgcgnnggtgccgcttgnngtcctgnnncgctcttcctttcctcctnnggccggtttttgcggcagcgtagggcgtcaagccgnnnctggtgccccggacgcctgtgttgacggggggggggtgaggctcgtncnnggtggnacccgtcgggnaaaccaacgnnnactacnnctccagcagccatcgatgcagaggnnccanactttnnncccgcgcattacgnnngcagggnaccttcnnngccaacncacgnnntcgccacnncgggaaggggttctttgcaatggnnncaagctttggcgacncccgacatcannccgccgnacacccgcttggnnggttcagcttaccttaccctngnnccgcgtaccttcaaagcccacaggcgnntcggggcagaaacccnnncctcatcgggcgcccaacttnnncgcgtccggcggggtcctggggtacctaccgacccacacgggcactttatgtaatcaccgcgaatccccgctgtccccagcagc

SEQ ID NO: 85192 - DNA, 461 bp, Zea mays
  Clone ID: MRT4577_177704C.1
tgggacctctaaaacagcccccctttgtttttttttttaagcacttactagggggggtggagcagaaaaaaatgcatttcccaacagtaaatcacagcttgtgacattgttatcaaccccaagatttgcacacattatttttttttttgacttagccaaatctcactgaggggggggggcccacataaactagagattccaatctctttcctcaagctttgcaacttatactgcgcttacagatccattgactcttgcatggactatcactccaccggctccggcttccatgccttccaagcaacctcattattctcattttttttattatcgcaaacgcaaccacttgaactctatggagctaaaaggagacagttaaatgatgtcatacgattgacgacaatgaggatcattagcgctatctgataccctcatgtcatccttttcaccctgatgaatcc

SEQ ID NO: 85193 - DNA, 424 bp, Zea mays
  Clone ID: MRT4577_177705C.1
ggtaccggcgcccctctcgagtttttttttttttttttttttttttttttttttttttttttttttttttttttttttttttttttttttttgggcggtttacaaaggaacctttttgcgttggaaaacaaacgtggcaatttgaccacagatttggcgcattcttctgaaaaacaatgcatcccataactggccacgcctaataaccctccggccctgggttcaaaaggggggcccggggagggggtgaaaccgagggggcccccagaaagggcaaggaagaagggttcttttatgacccgccctaaagtttaaaggaaaccggcagcgcgctcccgaccggtccaggggggcttctgaattcgcccccgggcaaaccccgtataaaaaggcgcccccccccgagggggccggcttgtccaaa

SEQ ID NO: 85194 - DNA, 742 bp, Zea mays
  Clone ID: MRT4577_177706C.1
tcgaggccggccgggaccccaacacacacgaactagaactaggcgtggctcaccgttcgagatggccgcggcagtgactcgccgggtcggtctccacgtcgaggcgaccaacggcgccgacgacgagagcaggcgcaatagctcggcagcagctgatgactcgccactggccaagcggatcaacgacgccgccgccaagggcaatgacgtctgggtggccgcccaggagggagacatgcctgcagctgctgcaaggcaactccagccagccgcccctgctgttccggaccatgaaggtcaagggcagcatactgcacccttacaggtttgttattcttctgcggctggtcgccatcgtcgcattcttcgtatggcgcatccggaaccggaaccgcgacggcgtgtggctctgggccatgtccatggtcggcgacgtctggttcggcttctcgtgggtcctcaaccagctcccgaagctgaaccccatcaagcgtgtcccggacctcgccgccatcagagaccagtacgagcagccttccgcctccggcggcgagtccaacaacaagctgcccggcatcgacgtcttcctcaccaccgtcgaccccgtagacgagcccatactgtacacggtgaactccgtgctctccatcctcgccaccgactacccggtcgacaagtacgcctgctacctctcggacgacggcggcgcgctggtccactacgaagcgatgctcgaggttgc

SEQ ID NO: 85195 - DNA, 323 bp, Zea mays
  Clone ID: MRT4577_177707C.1
ttttcatagaagatgatgcatgttttttcatgcatagtcttcaactcttcattggacaccatgaactagaacatatatgcctagctctacgtacaggtacagcatgaatgacagtaaatgatcggtagtgccgtagtgctcgccagtgatcacgaactagcataccttggaccttgcgatatcgatgtcgaacggcggcgacgggtaggccgggtacgcaccggccggcaggggtaggggtcactgaacccaccaccgtaccaatagctagcttgtgacgatgatcgcgcgacgggccatgctgtggcagcgaatcgagccag

SEQ ID NO: 85196 - DNA, 322 bp, Zea mays
  Clone ID: MRT4577_177708C.1
tccttttgctgtatgctctctgtcggagcggtcgtttgtgcttatcttggtggttgttacaagggttcaaatgaggccttatgtagcgcccttttaagagaaaggggcagagtatccgtccccaggggtgcaaaagcctttccgacaggacggcggaaaccccccggaagctggatcaccacggacccgccaagaagcgggcatgatccaaccgaaaagggactggggggtagagggcgacggctaggaagtccacacacccctgtaaaggcccccagacgagggccctgaaccgataaacggcccgccccccatactatgg

SEQ ID NO: 85197 - DNA, 1313 bp, Zea mays
  Clone ID: MRT4577_177709C.1
catgtcaacggctacgaggcgcacgcgaaggcggtggatgttgataccaattcaccgcatgggtggaggcggtggatgtggataccaattcgccgcgtgtggaggaggaggaggcaaaggaggacgatgacgggaaagaggatgaagatgctggagtggcagccttgggggtcaaggagaggctaggtctcctcagatctcaaatctcgggcaagctcgactccatccagcagagggctgctgctgtggctgccaagaggaggcttctggctggccggcggaggaaggtggcggaggaggcgacctccgtggcatccaggcacaaggatttggagagggagctggaggaggcctgcgaggccgaggactttgagagggcagagagtatcagcgactccctcgccgcgctcgagaaggagaaggatcggctgtcgacggcgctgcgtggtgctgagcttgactatgattcagtggattcggagttgcaggaggtgcttgagtctcgcattgctgcagaggaggaagctgctgccctcatggagcaatttgcgaaggatgccactgaacacgctaattcagcgagcgagcacgcacaagaattatcctcgaaagaaatagaagagtggcaaacttcattggagttactagaaacaaagaagttagaaatggaagttgaaacacggttggttttagaagcacgttctgggttggaagggtcaatagagcatttggttgaagaagacaaactggagaaggatatgcttagtaaaaaaggagaaatcctcactaaggagttagctgagcttctagagttggtgaggttgaaagaagcagagatagctgaaaacaatgcccggatccatgaagttcaagaaagaataagtgcagtggtctccagattccatggttctcagtcagatattgacttgaagctcagttccttgaaggaagcccaatgtaaactggatctagagactgaagcacttgtgttgaaaaaaaatgaaattgataatttcatttctttaacagagcaaaaagattcagagttgagggaaattattggtgcttgtttctctgaagcaaaaacttgccaacaatcagttgaaataagaagaaagcttgcatcatcgattttgaagtcaagagaggatagaattgggttgctaaaaatggaggaggaaattttgcaagacattcaaatgcttaggcaaaaaattacagatgcaagaactactcttcaggaggtatcttcaaggagaacaagtatacaacaagaaatggattcatttaagcagaaattgagcttcattgac

SEQ ID NO: 85198 - DNA, 313 bp, Zea mays
  Clone ID: MRT4577_17770C.1
cctacccctctggtgcggggggggcgctcgacaaaacgatgcttcggcccacagccaggacgcggacggatgcgaacctcgacgagctcaacagggtctggcctccgccgttcaaggacaggggcgcaccaccgtccaccgatgcccactacacgaaaaacacagcggggcggggggctcctttatggtgtaagagatccatcaggacgacgagagggaggggcggagtgcacacaaccagaggggaggggaacaaaggcgaccggggcacgcccacacagaacacggctcgccgccgaggacagatctgcgg

SEQ ID NO: 85199 - DNA, 287 bp, Zea mays
  Clone ID: MRT4577_177710C.1
cccacgcgtccgcccacgcgtccgcccacgcgtccgcggacgcgtgggttttggccaatgatgaatggaaggaggatattcttccagagatactggatggtcacaatgtttgccgtttttctggatccagatattcctgtaaggtgtgattagtttgattggttgtaagggctttttcttgtttaacatgctgcatatatttctttctattatttatggttattatcttttttattaccttaaggagattttttctcaaatttttatgttttaggcattattttttt

SEQ ID NO: 85200 - DNA, 367 bp, Zea mays
  Clone ID: MRT4577_177711C.1
agcagtggtaacaacgcagagtacttttttttttttttttttttttttttttttttttttttttttttttttttttttttaaaaaaaaaagccgggggcatgacaacgatttataaagttccaagtttcgcacacaacacaacacacacggggttttagcttcaatacaatagggggggggcctgcagggggaatccctggtgggcatcaactttattttgggtcatcagagcatttcatatccatccagatcgaccatgctcattcgggcccaccaggccctcgttgttcagctgatccatgggggcttggtgatgcgcccccaacggcagggaaggatcgttgcccaggtgcccaaagagcccct

SEQ ID NO: 85201 - DNA, 654 bp, Zea mays
  Clone ID: MRT4577_177712C.1
ctcgaggccggccgggatttccaaactccaccgaacgagattcgtgttcggcccagcaccttcctcttccttcttccccagccgagcgcgcttctccacttccacggagacaaaaactcgatctcccgggccccacctccccgcccgcgcgccagcgacacggagaagcttccggtttccagccggcccgcctccaccgactcttcctttcccaccggccgtcgaggcgtccaggcggattagcggagagcgtcggggcggcgagatgtgggtgttctacctgatatcactgccgcttacgctgggcatggtcgtcgtcacgctccgctacttcgccggccccgccgtgccgcgttacgttgtcgtcaccgtcggatatgcttggttctgctccctctccatcatcatcctcgtccccgccgacatctggcagggctgtagttcctactatccagggctatgaggacgcaggagacttcactgttaaagaaaggctgaaaactagcattcatatgaacctacttttttattcaattgtgggagccattggccttattggtctcatactactcttaatcatgcataaagcttggtatgttcaatctttactttagaaaaaatttacactacaaaaaaaaaaaaaaaaaagcggcc

SEQ ID NO: 85202 - DNA, 1587 bp, Zea mays
  Clone ID: MRT4577_177713C.1
attgggtctctcgagcctcgccgggcttcttcggttcttcgccagccgtgcgcgcttctccactgccctggagacaaaggagcaccccgcgatctcccggcgggacccggccccacctccccgcccgcgtgcctctgaaacggagaagctgccggttcccagccggccaggctactccgactcttcctttccctccagccggcgaggcgtccaagcggattagcggagagcgtcggggcggcgacatgtgggtgttctacctgatatcgctgcctctgacgctgggcatggtcgtcgtcacgctccgctacttcgccggccctgccgtgccgcgctacgttgtcgccaccgtaggatacgcatggttctgctccctctccatcatcatcctcgtccccgccgacatctggcagacattaactgccagtgcgaaggggggcattggattcttttggagctggtcctattggagcacatttatcctaacatgggctgtagttcctactatccagggctatgaagacgcaggagatttcactgttaaagaaaggctgaaaactagcattcatatgaacctgcttttttattcaattgtgggagccattggccttattggtgtcatattactcttaatcatgcatagagcttgggatggtggtattgtgggatttgcaatggcatgctcaaatacctttggattggtgactggtgcttttcttcttggttttgggttaagcgaaattccaagaaacatttggaaaaatgcatactggtctcaccgccaaaaagtactttctcatagagttgccaagatggctgtaaagcttgataatgcccatcaagaatattcaaatgcaattgttgttgctcaagctacatcaaatcaaatgtcaaaacgtgacattttgaggccttacatggatattattgataacatgctgtctcaaatgctgcgggaggatccatccttcaaaccttctggtggtagattcggtgaaaatgatatggactatgatacagatgataaatcgatggccacacttcgacgccaactcaggagggcccatgaggagtactataggggcaaaagtgagtatatgacttgtgtcatggaagccctcaaactagaagacaccataaaaaattatgaacgccgtgatgctagcggatggaaatatgtatcaagttttagagacagacgttcgggcacacttggaccaattttggatactattggtattcttcttaccttccctgcattggttttcataattccttaaaaccagcatctcagttagattagattcttacttttcttggttttgttaattcttagatgtggttaaaatttgatggagctgactcagggatactttgttgcatttccagagttcatttggcaatgtatactgagaaagcagcttcaaaaagcatttgctgttatccttggttgcatgtcagctgctatcttgttggctgaagctactttacttccaagtgttgatctatctctcttttctattcttataaaagttgtaggaaaacaagaggttttagttcaggtaaggaactgaacacttcatgtcg

SEQ ID NO: 85203 - DNA, 703 bp, Zea mays
  Clone ID: MRT4577_177714C.1
ctgaattcaaacgaattataaattggaatagatgatagaacggacagtgtttgtatctagaaccatgtacgagttctaaccatgaaatggctctttttttttttttttttcaatagttattttgtccattcatgcatatctggtcacagaaatcaatcaaaaatgtctctcccgatgaattattcaccgtcaaaatattgttcgatcgaaacatcaaatcgccgtggaaaagaacgtgagtatggcagagcaacagctaaggctggcctcgatgagttaatcaagagcaggcaatggatgacgacacgggtttgaaggcgaactgggacggcgaggcgtaggagaacttgacggcgtactccgggcccatgccgatggggcgcccgccgttgagggtgcagagcttgccgtccacgctgagcacgcccgggtcgacggccacggaggagctgaacccgtcacacgccagcttgacgttcgcctgtgtgcagatgcaccggttctccaccgtcaccgcgtagacgttcgccttcgagggcaccgcggtctgcgttacggcgaggtctgagaggctgcaggcacctgcggctgcgcatcctgaacgctcgaacagcagcagcaagagcgcgacttcgccatcttcgaggtctccattgtgttcatgactcatcacttcatcaggggtgcggtggtatagggagag

SEQ ID NO: 85204 - DNA, 191 bp, Zea mays
  Clone ID: MRT4577_177715C.1
ccgaccgatagaatgtcagtgtcctcgattccgacgatgaatggattctccatgaggtgcgacttctatacacctttctgaaggctgatcagcacgattatggtactgcacgtaaaacagctctgaactactaccacagaaaacctgaactctggacacactggtgcaaacatacatgaagatttattcca

SEQ ID NO: 85205 - DNA, 273 bp, Zea mays
  Clone ID: MRT4577_177716C.1
attcggctcgaggtacggccgcttgttatcctatgggccccatgttctattgcctcgggcccttcaatgaattgatcctgttgaacgacacaatcggttattcagaaaatgcatgttgtgaggggcgtcttctcacatcatcatgcgggtaaccttaataaacgcactcataaacgtgaagtagaaaagacctcctaggctaggctcctccaaatgattccctccggctcttattcattaccatacctttagccacctaaagaccatctttct

SEQ ID NO: 85206 - DNA, 316 bp, Zea mays
  Clone ID: MRT4577_177717C.1
gacatggatgagctcagagaagctgacatgtgaacctagattatcactgacgaacttgattctcggcctgtagccgatggactactataacaaaacataacatacggcaaaggatgtttcacaattgattcgccacaccctggccatttgaacccaattgtaaaacttctcaccaactgtcagatcacggatgacatcggacggttgcataattcgcatgtgcatctgcacagggcttaagtgggaaagaggatacattctcataaataaacacatcccaacgtacatgttcaagttaatattattgacccattca

SEQ ID NO: 85207 - DNA, 348 bp, Zea mays
  Clone ID: MRT4577_177718C.1
tgtcattccctcttgtgtgcttcttccccaggaataatgatgagttgattgctggtgtaggtctctgttgcatagttgggttgcagctggtgctcttgtcctattgtacttgtccggtaacaaagagcctcctttctcttttttagtacctttgagtcaatgactgcaatgtctatgatgcatgtgattcttgtacatattctgagctcattgcccatggttgggtcttgtgttgttaaaactttgaatctgagcagtagcctatgccaatgatgtgaactttagttggttttaagtaatttttgcccttaagacaataatatgtacccttatgccaatgatgggaac

SEQ ID NO: 85208 - DNA, 683 bp, Zea mays
  unsure (1)..(683): unsure at all n locations
  Clone ID: MRT4577_177719C.1
gtaccctcnagctcgtccgggccaggacaccaggtgaggttgccaggactcgttttttttcttgctagaaccttgcgagttccgactccctcactcatctccgtccgtccgccgcaccgtcgccgagcgccgctccgcgccggagacgtcctgtttttttgccgcctacgagcgctgtccctcctttctttccgcggctctgccccaacttctgcatccgaatctcccacgaagttgtcacggcgatggcagcgaccggcggcgtttcaactgacgatatcccgatcctgcaggcagagaacctcaccagcaacgtcaagtccgtccactacagtgcagacatacttcgatagttggaccaggatttcaattgaaggagtttttggtggccttatgtcattcgtgctgttctggacatttgcttatgacattgttcatatcttctgatggacgtagaaagagctaccctccaaggaaaatatggaatttcatctgatgtcgaacattcccaatgggctctttgtacactcagtttttattttggtaattgttgatataatattttgtgatactatatcgttggacctaagcagagctcataaactgatgtagcgactccttcgcttggatgatctgtagcagttgtgatttgtcatttccagtaatgaatgtaaactttgagt

SEQ ID NO: 85209 - DNA, 476 bp, Zea mays
  Clone ID: MRT4577_17771C.1
cacccgtgcgcgcctttctcatccccacgccatactacccagggttcgaccgtgacctcaagtggcgcaccggcgcggagatcgtccccgtgcactgcacgagcggcaacggcttccggctgacgcgcgccgcgctggacgacgcgtaccggcgcgcgcagaagctgcggctgcgcgtcaagggcgtgctcatcaccaacccttccaacccgctgggcaccacgtcgccgcgcgccgacctggagatgctggtggacttcgtggccgccaagggcatccacctggtgagcgacgagatatactcgggcacggtcttcgcggacccgggcttcgtgagcgttctcgaggtggtggccgcgcgcgccgccacggacgacggcgtctgcgtcgggccgctgtcggaccgcgtgcacgtggcgtacagcctgtccaaggacctgggccttccggcgtttcgcgtgggcgccatctactcg

SEQ ID NO: 85210 - DNA, 399 bp, Zea mays
  Clone ID: MRT4577_177720C.1
ggagacgtcgccgtcggccagcaccaccacctgctggccgccgccgcggcccacgcccacgacgccgcctacagcttcgccgcggacccctacggcttcggcatccgccaccaatactgcaccttcccgttcccgccaggcgccgcttcggctgaggacccgccgccgccaacgcaaatacatcccttctgcttgttccctgggcccagcagcgcggcggcgcacgccgacagcaggcgccttccctggccgccgtcgtcggacgcgcccggcgtcgcccggtacggggagccgcatcagctcctgcagctgcccgttcaaagcggctggatcgacggcgtcggcgtggccgcggcaagccaccacgaggcgcccttcgtcttgggcaacaacgggggc

SEQ ID NO: 85211 - DNA, 1155 bp, Zea mays
  Clone ID: MRT4577_177721C.1
ccggggggtacccccggtccctggccggccggagcagtccaggactcgttttttttcttgctagaaccttgcgagttccgactccctcactcatctccgtccgtccgccgcaccgtcgccgagcgccgctccgcgccggagacgtcctgtttttttgccgcctacgagcgctgtccctcttttctttccgcggctctgccccaacttctgcatccgaatctcccacgaagttgtcacggcgatggcagcgaccggcggcgtttcaactgacgatatcccgatcctgcaggcagagaacctcaccagcaacgtcaagtccgtccactacagtcgaacattcttgtcgatcattggtggagttgttgctggaatctggggattcacaggcttgacgggatttgtcttctactttctgataatgatggttgcatctatcgggctcttagcaaagtcaaagttttcagtgcagacatacttcgatagttggaccaggatttcaattgaaggagtttttggtggccttatgtcattcgtgctgttctggacgtatcctttttcttcgataatttataaacagtcttgttcatactctatttctgttcttcatgtgcttgtgtagataggctgaatattgcaaatagttgggatggtaaaccaacatgttcatactctactggttgcatattgggtaacatactgttgccatctattttggtggaatataaatgaacaatattttagtcaatcggacaaaacaatccctgaaccagcgaagcagtttatttttcctaatctataaacatgtttatgcttatttcctatctatgttcaactggtttagtgttggtccttctctgctcttgttctccttgatgagagagatagatttgcttatgacattgttcatatcttctgatggacgtagaaagagctaccctccaaggaaaatatggaatttcatctgatgtcgaacattcccaatgggctctttgtacactcagtttttattttgggaattgatgatataatattttgtgatactatatcgttggacctaagcagagctcataaactgatgtagcaactccttcgcttggatgatctgtaccaggtgtgatttgtcatttccagtaatgaatgtaaactttgattgat

SEQ ID NO: 85212 - DNA, 975 bp, Zea mays
  unsure (1)..(975): unsure at all n locations
  Clone ID: MRT4577_177722C.1
ggcttgctagaaccttgcgagttccgactccctcgtgccatcgttttgtgtcggattgcaaccagaatcgttccactaatcaaagtttatataaattagagaagcaaatcgttccgaccaaccaatcggacggaaacgaacaaggcctcactcatctccgtccgtccgccgcaccgtcgccgagcgccgctccgcgccggagacgtcctgtttttttgccgcctacgagcgctgtccctcttttctttccgcggttctgccccaacttctgcatccgaatctcccacgaagttgtcacggcgatggcagcgaccggcggcgtttcaactgacgatatcccgatcctgcaggcagagaacctcaccagcaacgtcaagtccgtccactacagtcgaacattcttgtcgatcattggtggagttgttgctggaatctggggattcacaggcttgacgggatttgtcttctactttctgataatgatggttgcatctatcgggctcttagcaaagtcaaagttttcagtgcagacatacttcgatagttggaccaggatttcaattgaaggagtttttggtggccttatgtcattcgtgctgttctggacatttgcttatgacattgttcatatcttctgatggacgtagaaagagctaccctccaaagaaaatatggaatttcatctgatgtcgaacattcccaatgggctctttgtacactcagtttttattttggtaattgttgatataatattttgtgatactatatcgttggacctaagcagagctcataaactgatgtagcaactccttcgcttggatgatctgtagcagttgtgatttgtcatttccagtaatgaatgtaaactttgattgatggacactcggatttttctggcattatcacttgaaatgtgaatggccggtctggtgctgtctcaaaaaaaanaagaaaaaaaaaaaaaaaaaagcggcc

SEQ ID NO: 85213 - DNA, 325 bp, Zea mays
  unsure (1)..(325): unsure at all n locations
  Clone ID: MRT4577_177723C.1
tccgggggagnaagtagnnatctgcatctgcgngnagggaggcagnncgggggtgnngtgatgatggnagnagccagnnccgctgcaggggccccgacnnggccacggctcnncgccccccggtttcttgcggnagnnccagccggnagctttccgccggcncccgtcacccnnccggcaaggggagttcnnacgcgcacnnctgcaaggggnnnctcgtcgtgcgtgcgtcattcggnagggatttacgtgcttgctnnnccagctcnnnctcccttttcgtcactttcaactttacctttcgccattcatttcccatttccaa

SEQ ID NO: 85214 - DNA, 592 bp, Zea mays
  Clone ID: MRT4577_177724C.1
ctatagccggcgttagcatcaagctccctggtcctcgaccaaaggctacctgtatgcgtcgccggctccggagcacgcatgccggccaaattggacgcctctcacgtggtggaagtcttcttccccgtgactacaggagaggtcggcgcggcgtcatcaactggaccccaagatcggaccgatctgtctctccccgaaaaacatcggctaggagatcgtccaaggcagaccgcgctagggactggcaagtgcactcctgcgtgaccgtccaacgttcaccagtggacgaaccgaggaggccaaggacaccgtcatatcctccgccttggcgctcgtcatcaaggaggctcatcggaaccctactagggacaaggtaagaaggtcaagaacatcaagaacgagcggcaagcgtcatctctcagacgacgacgatcgagatcgttcacaccatgcagaacaggtgcatggacaaggagatggtccgggaccgtcaaggacatcctggggacctgcatcagctatcgggtgcaccgtcgatgggaaggacctgccaggacttgcagcaggagatcgatgatgtggaggtcgagat

SEQ ID NO: 85215 - DNA, 249 bp, Zea mays
  Clone ID: MRT4577_177725C.1
tcgagcggccgcccgggcaggtacatttctagattcaaaatgccatcgcttgcgactccttgttttgcttgttcccgcccgggcggtggcttggctgggcgtcttccgccgcttgtcttctccccgccggtcgctctgcctcccctgccggggccccggcggggggggggggggcgcctggggcgcgcctctctcgggtccttgcgctgggccgcgcttgtggttgtcctggccctcggcctgtcctgt

SEQ ID NO: 85216 - DNA, 117 bp, Zea mays
  Clone ID: MRT4577_177726C.1
ctgcacagcgtacgtaagacacaggaattacggactacaaggacaacactagaagacacgatggagactctagcacggttacaggaccgtaacagctgtcccgtacgcaggttaccg

SEQ ID NO: 85217 - DNA, 631 bp, Zea mays
  Clone ID: MRT4577_177727C.1
atgttgcccttatcttcttactcggctacggtcgccttgagtcgatcggtctaggagtaataagacactaaaatggctatggaggcggacagcgagagagctcctggaccaccatccgcgtgcctgcgtgccaacctgcagggctgcgagcgaccatccccgcggaacgcgggctcctgaagaccaccaccgacagaagggactcctacctcgacaggcatgaggtcaatgaccgcgtggtgtgcgacgacaatagactgacatgaatgtcaaaccctgaaatgcgacaacaatagctcatttgcgaaatgaccttggacttgatagctggcacactgtgtgagattccagatcgtgagcaacgtaggaatcaagtatgcctcttgagattcctgacaacgaacctgagaacattgactccctccagactacagtggatttcattgcttgcgcatcctcgaggaggataagaagatctccttatattccaatttcatagcgtgtgtttgcatccagaacttatgcaactaggaactacgtatctctatcttgacactgtatatacgaaggcatatctatacctatctgaatccgcaagtgccgaccgatgggtgggatctggagacctcat

SEQ ID NO: 85218 - DNA, 401 bp, Zea mays
  Clone ID: MRT4577_177728C.1
attattcttgcctactaacaaaaggaccattccacctacatagagaggttatccactaaaaagccacgcacagattggattgaaaaaaaaccgattccctaatgtgaaatcccaacagcacaccctgaacaaacagggaatgtgcaataaccacaagaacaccctcaaaaaatggttggaggcgtttcgaaccgggcaatcacaaaaggcactgaataacaacagcaggcacagccaaaaagatggtgactactttttttgttaaaagcctactcaaactgtatgaaggggacaagctaagaaaaccactagtgatccaccggaagacgcccagacctaggacccgcctctgccccagaagcaccagaggcctcgttctgtaattgccaccggaacctacg

SEQ ID NO: 85219 - DNA, 443 bp, Zea mays
  Clone ID: MRT4577_177729C.1
gcagaacatggcgcacagcatggccgttgcatccactatgccaatggatggccctatttatcctatggatccctctggcaacccaatgcttccagcggctctcttggcccagtatcctgcattagctcagctgaactggtctgcacctgatgtgaacgctggcatggacgacgaggttagtggtcgttcatcctttgatgccagcgactatgacgaaaacgaagacggtgggtatgtgagtggcccacgcacggggtttggtgagggtgggttgggccaaagctttggcgaaatgggatacgcgagcgacttttggggccggtaaaaatgggatcactggccataaaaacatgcattcatttgtgacgcgatcaatgcccccccttttgtttctttttcttttttagttatcggcgatctgtaccttgcgccttgcttctttt

SEQ ID NO: 85220 - DNA, 428 bp, Zea mays
  unsure (1)..(428): unsure at all n locations
  Clone ID: MRT4577_17772C.1
ggggagacaaagggagaggcgaaagcggacacggacangcaccagcgcaaggcggaaacggagaaacacgccgacgcaagcaccgccccgccaggaggagacggcacaaccgaagaacagccggagaccacagcgcgggcgcagccggggacccacagcaaaccggaggggacgcgcaacgcggacgacaaccacaacagccggcacccgcagcccgacaaggcagccgaggacggccccaacgacaccaaggcacggaacagcgnaccccacgcggacaccgccgccgacccgacgaccacgcgcaccacgacggcgcgccggccagccgacgacgacgacgcnaccacaacccccagaggagacggagacggagacggacacgaacacaagggggccaccagcgccgcaggcgccaaaaggaaaag

SEQ ID NO: 85221 - DNA, 258 bp, Zea mays
  unsure (1)..(258): unsure at all n locations
  Clone ID: MRT4577_177730C.1
cggnnncggattcccaaatcgtccgccctttttttttttttttttttttttttttatttctcttttttttttttcttttttttttttttcccttaggagggtttttttttataggaggaagcttcctccaaaacaataaaaacaaaagagctacccacaaccacaattcctcatccactatacacttcccaactacttagaaaaactaaatccccctcccaaactctaaaaccaaatttgtgccttaaaaataaaccc

SEQ ID NO: 85222 - DNA, 1493 bp, Zea mays
  Clone ID: MRT4577_177731C.1
ggtcatgtacaaagatctgaataataatgggttcgctccgtgatggcaagaccaacagcagcagtggccggcggtggtgcgcggtgaccggcggccggggcttcatggcgaggcacctggtggccgcgctgctgcgctccggcgagtggcttgtgcgggtcaccgacctcgccccggatgtcgtgctcggcctcggcgacaccgaggacgtcctcgatgacgccctccgtgatggccgcgccgtctatgcctcagcggatgtctgcaacctagaccagcttattcaagcttttgaaggggttgaggttgttttccacacagctgctgcggatccaagcaagaacgaccagcaacttcactataaggtcaacgttgaggggacaaagaacgtggttgatgcgtgcatgatttgcaaggtgaaaaggcttatccacaccagctctattgctgttgtgttcgacggagttaatgggcttctcgatgcaaatgaatcattgccatacccagacaagtttcctgatgcgtatggacaaacaaaggcagaagcagaaaagatagtcatgaaggctaatggcattagtggccttctaacttgttgcatacgtcctggtagcatttttggccctggtgacatagttatactaccaactctggaccaatgtggaaaaacacactttgtttttggtgatgggaagaattgtgatgattttgtatatgttgaaaatgtggtacatggccacatttgtgctgaaaaaactctttctacaatggaaggcgcaaaaaccagtggtggaaaagcctactttataaccaatacggaaccaatgaacatgtgggactttctatatctgcttcaagaagaacttggatacaaaaggttgttcaagataagaatacctttgattgtcatccaggcagtaagctatttggtagagtggggatacaaggttctacaccattatggaatgtgccagcctcaagtgctaacaccagcaaggatcaagtatctgacagttcatagaacattcagttgtaacaaagctgctgaagaacttggctacaaaccaattgtgacacttatggtttcatagattcaactctctttgtgttgcattcgttgttgtttttttctgttagtgcagctcgtttttgtattattgaaatgctcatgtgctttcctaatttgctgtctaggatggtatgaagctagcagtcaaatcatatattcggttgagaaatcatgcagatttatcttacaaacatatataaaagattatcattatggcataggatgcctcatgctgacgatatacaacagcttttgagaattgtcataagcgaaggtctgccgtgattatgtttccaataaataaaaaattcggtgtttacaactcgcatcaatgtcctgatcaaaaacccagcatgttgtattctgatttagtagcaaagatagattgtaactccttaacaatgatcaggcatgtatttcagat

SEQ ID NO: 85223 - DNA, 413 bp, Zea mays
  Clone ID: MRT4577_177732C.1
attccaaataacaaaaccggaagggcgtattaaggttcgtcaaccaaaccacattgaaaagggccatcgttttcgtcgggtgcctggttttgtaagttgccaccgcctttgcaatgccaatgccctgcccctgcccggggctgcagggcttgtacggcgctggcgccggcctgacgacgatgaatgggcgccgggggggctgtactccctacgcgggagtactctgagggcagccgcaagtgcaactccggctggcggcgggccgccctacttacgcccgggtggtgggcacgacgaagcgcccatgtaaccagccgcgtccggcaacaagtggctgccagcagcaggatgaacgatgatggacgtgcaatccgtcgcgcagcagctgcagatgatgatgcagcttgagcgtg

SEQ ID NO: 85224 - DNA, 277 bp, Zea mays
  Clone ID: MRT4577_177733C.1
cattgggtacctcgaggccggccggggaatgtcctacaactttcaccacaattctccactagcagaccgtacccacaatcctcctacgatagcgcatgacgaaccgacgctgttgccatgctgtgactcctgagatcctctgctggtctggcggtcctttcgcttgaacatgtacgtgacgctcatcacatgacctctgcacctacgacatcggcgactacatctacctcaaggttagcgaagacttgcatgacgagatgcccttcaacctctacca

SEQ ID NO: 85225 - DNA, 459 bp, Zea mays
  unsure (1)..(459): unsure at all n locations
  Clone ID: MRT4577_177734C.1
gccggccttgccgtctacccgantggaaaaaaaaaaaataccaaaaaaaagagaaaaaaaaaaaaaaaaaaaataaaaaacgcgcgggccgctaggggacccgccggaactaaaggaaatgcgaaaccccggttatggatttaataaaaaataaagggggggccggggggccgagtgtcgcgggagggccacgtagaaccccccgggcctgggggggaatgtgtttttaggtttttttagagtgggaaaattttagggggggcgggggggaaaaaaattttggcggaaatgaaatatttctccccttgccccacttgccccattgggccagacggcggagatagaaaaaaccgtggcgccacctgccttgcccaagtggggcgcaaccgccaagaggcaggaaaaattcaaacaaaattattgcaaaacaagttccttttttttttttttaggacattt

SEQ ID NO: 85226 - DNA, 542 bp, Zea mays
  Clone ID: MRT4577_177735C.1
cggacgcgtgggcggacgcgtgggcggacgcgtgggcggccgcgcgggcggttgggttggagtcttcgtcgccgtgtcctctcatctctcctccctccccatgcacgcgaacagccctctgctgctgcaaccaaagcggtggccgtggcgatgtgccgctactcggacaccagagtacggcaacagtggcaaatggtggtggtggccgcagagatgggcatggaccggctctacgtcatggacggaagcttctgcggtacgatatcaggtaagacagctctcgggcgttcttctttccccgctactggtgaccatgttctgggtggagaatcgagcactggtgggcggtcgggttgatcctatggcaacaccgtcgcggcatgtggctccatcgtcggggtctcggcgttggagaagaactgggcggagccgcgccgctgcgtttagccgtcggtaggtagaagacgcgggcgcgtccgtcgatctggaagtggacggtactggttagggcgggaaggtcgctgggcgctgcgctgttgatc

SEQ ID NO: 85227 - DNA, 408 bp, Zea mays
  Clone ID: MRT4577_177736C.1
tggggagtgcttgaagctcgtggtacaggacaatgagctgggcagcggcagaggctactgggagacatcggaggagaacctggacaggctcagggagctctactcggaggttgaagacaagattgaggggattgaccggtaaaccgatttgccagattcaaaggaatgagaagcttggaactcttgtgtctcattgaggctcttgtacaatgtgtgtgtagcttatatatatataaaaacttgtgacatgtaataccggaggatacaatctttaacaaggagcatggtggtgattggaaagcaagttagaagaagagaaagtaaacagacgcactgaagcaaaagatgataaagaaaacgaacaatggggtgactacgcttgcggtggtcatgggggttgaccacgac

SEQ ID NO: 85228 - DNA, 231 bp, Zea mays
  Clone ID: MRT4577_177737C.1
gcagagtgacgtcggcgggtgtgggtgtggggggcggcgagagtgacccccgcggtgcctatgacgaccctgcacatggacgggccggggccctctgcgcgcgaacgctctaacaccagttgcgacctgcacccagccgaggcgcccaccgctttctgggattcttacttacacgagctcattcataatctggaacactgtagcttgagcacagtcgctgtacaaccaatg

SEQ ID NO: 85229 - DNA, 346 bp, Zea mays
  Clone ID: MRT4577_177738C.1
aaaccaggtttttttttgttcccaattctacttcattactcaacatttttaatggcccactgaaacccaaaaccttttatttgtctaaaaaaactttaaactttggtaaaaaagggaccgtttttactgccaacaaaataaaagtttccagggtaaagggccccaggatacaagctcccttcaacggttggccttggaaacactctcaatttgcggcttttttttgagggcgtaactggtggaaaaacccttggtcgcggtgaacagttcatttgaaaggcactcggaaattggtttgatgtttcggaaaacacttttcctggcaccattggtgaggggggaaatg

SEQ ID NO: 85230 - DNA, 490 bp, Zea mays
  unsure (1)..(490): unsure at all n locations
  Clone ID: MRT4577_177739C.1
gaatgctggggagaccctgcgtgctctgcttcagtacttgcacttttacgtcacacaggcgctgagctctgacactccaagcgtcggcaccaagaggcttactaccaggaggtggactactgctcggaggaggagtggtcggtggccccggccggcttaagccgccacggcggcggcgtncagcagcacgtcgccttagagaagttcgaggaggtcgtctcgggctctcgcgccggcgccaaccaccaccaccaccatggtcaccacggcggccacggcttcgtggagcgcgagatcagggtcgaagaggacatcaacacctgcaccggcgaggtcctcgagcgcatggtgagcttcctcgccagggctaactgagccggccggaggtctgcatccacgcccgctcgagctagcctgcgagccttatgtatgtctgcggctgactggttgagcacggtcatcgtacttggctatcgnacgtgcacgcact

SEQ ID NO: 85231 - DNA, 280 bp, Zea mays
  Clone ID: MRT4577_17773C.1
ggccccccccaacccaaaaaataaaaagggttttggcggtacataacccggattacaggatagttggtagaaaaaaaaaaggggggggttgattttccattgggggggcccacttcccccaaatttaacagcaaaggggcctttttacccccaaatttaaaggaaccccccctcccccataggaagaatgtttttgggggggcccaaaaaaaggtttaaaggggaaaccaaacttcggaacctattttgggggggggggttctaaaacgggcccccaaag

SEQ ID NO: 85232 - DNA, 211 bp, Zea mays
  Clone ID: MRT4577_177740C.1
atgatctattatacctttggcggcgacatcatttttcctgcttaaacaaggcattgtacggatccctgtgcagagtgtgaacttacgacatgagcctttcaatcagggggagaaggtggaagatgatgtctagccatgtaaagagaatgagaattggccaatgtccataactcttccaagatttgagccagagggcagggggtgggggtgg

SEQ ID NO: 85233 - DNA, 402 bp, Zea mays
  Clone ID: MRT4577_177741C.1
ttttagttgttggagctggaggtttgggctctgccctggcattgtatctagcagcttgtggtgtcggtaattttcttctccgctgttgatttttttgggggtgaattatgagtattaaataaaaagtaaagagttgaaacgaagaaaattaaccgaattaaatgaagttttcagccatgtaccaattagagggaagtggatctgcttcaccctcacggtgaacagagaaaatactcattttcttggaagcgaaaacagatggttggattccttggaaaattagatcatgataattttcttccaaatgctccagtacataatgatgataattttcataaagaaaggcctgttgagttggttgcttgaactgatgaagaccattaaaagggttcatgtctgagc

SEQ ID NO: 85234 - DNA, 690 bp, Zea mays
  unsure (1)..(690): unsure at all n locations
  Clone ID: MRT4577_177742C.1
gaacagttcaaatccatatttcaatagcacctggagacggaattttgtgggtggtttcattctggacatgggtgttcacttcattgcaggactacgaatggtaacttcatgatgttatatttcgaagtctcctttttttctcaaaaaacacaggaaatctgggcatcattaagaagaatagagggtgtaagaacccaacagcacttacaccacacacccaaacacaacgcactcacacaacacactctacagcagccttaaacacagacacaccaagacagctgaaggtcaacccgcacagacccaaaaaactaatcacctgggaggtgagcggacaagaggaatagtcctcaggaccctgccatggtccacaactggcgttcctcaccatccatgactaaagccccaacaacacctggacccgattcataaaaaacacaacgattatgatggttccaaagaatccaagctccaagaataattaaggaattgacacctttccttcaagactatttccagcagccttactcatctcatctcctattttaaactctactctgtaaacagtatagtctacagtgcaaacagtgttttgtatttttgtatggacatatgcatgatctgctgggcacatnctaatttctccaaagtagcattatctcattcccacccataagaaaggaattttca

SEQ ID NO: 85235 - DNA, 395 bp, Zea mays
  Clone ID: MRT4577_177743C.1
aatgttaagaaaaagaaggaagatgatggagattcagggaaggctgagaaagatcagaaggataataaggctaaagagaaggatggatcatagatgaagggttcacgtggtgcgaaacaagagaacatcaatgataagaaagagacaggtgatggcacagatatgggggaggaagagaaacgcaggatgatacgacacacacaccaatataagaaggataaaaaggccaaagaaaaggatggatcgcaaccaaagggtgacaaggatgaagatggtaagaagtaagaggcccatggcgatcaagactgagaatgcaagatgatggacaaggaaaagaatgagtagaagaggaaacacaaggttgccaaggacaagacgaccgacccggtgcagct

SEQ ID NO: 85236 - DNA, 244 bp, Zea mays
  Clone ID: MRT4577_177744C.1
ctcgagccgctcgagccgagctgctggcgagatgccgctgaatgctgcttcgagtgcatcaccggatgttgcgactgagggtcctgccaatagcgctaccacttgtgatgctgcacacagcgagatcgacgaccgccattggccgtctaagtgaaaaaccgagaccagccaagaactgggaagcaatctacgagagatttggggtttctggacatactggggtttgcatacattctgaatacat

SEQ ID NO: 85237 - DNA, 259 bp, Zea mays
  Clone ID: MRT4577_177745C.1
ggaatggggaacgcagccgacccggccggaaaccggggccgacccagcgaccgaaagacaaagatttagtttgccccaacgggcgacgaacagaccgggggcgagtcgcccgcagacgggaacagcgccgaaaccaccggacgcctgcaacccgcggacggccgaaccggaccaaacgccggcgggccgccacagacggaggcccgcccccccaccaagaggacgcgcaccaaggagacaacaggcaccaccgcgggaa

SEQ ID NO: 85238 - DNA, 211 bp, Zea mays
  Clone ID: MRT4577_177746C.1
caattgaaccacaccgaaactacattattgaggaactgactggatctttattacaacggtcctaacgttgcgacttacaaacggagtacttggctattcgcacaataccgtacaggtaaaaaccacacttcactgaacggaactgagaaacgcaaacaactagagcgacgaccgcacgtctctcatgttacacagaacttaaaaggatcga

SEQ ID NO: 85239 - DNA, 502 bp, Zea mays
  Clone ID: MRT4577_177747C.1
aaagtgtagaatcctgccacctgcccgcgcaacttcttcttctttcgccgttctactcccatcgaagctactactgaggacggacgcaggcggacaacgagtggatccgctagcaggtcaacagccgctgcgcaggaatcgtttgcaggatgacagaagctgccgttattaccaggtactgctgccatgtatgcgagaaggtcatcgaggaggccatgggcctagtagatcaagtgcccgttttgcgtcgtggaatatacatcaaagagatgggctgtagagcatctccgagggatgcagttatagcgctagtgcagaacgtcgtcacggcacagctaggactgctatgactgctattgaccctgtgtagttcgaggaatttatcagaaggcacggacgagtatcatgtctgcgtcggctgctcgatggtctcctgaacgaccttacagtcgacaggcattaggacaactccttactcttcaacggcttcatcctaggcctc

SEQ ID NO: 85240 - DNA, 2308 bp, Zea mays
  Clone ID: MRT4577_177748C.1
caaaacccctcgcctgcggcttcgcgttggccggcaaccgccgctgttgccgacacttcaacgcgtacctcgcgcccccgcgctgctgatgcgatcagcgacgcacgccagatccgagcttctgtaggaccttcagccgtccccgtcccatgggggactgcgtcgtcgcggacggccacgtgcaccatccctcggatgaggtggagggcgcggttccattgacggtagccgtggagctcgatgagcgggcgggagagtcacgggaggaggaggaggtggtgggcagcggaagaaaatgggcgggatcccaagggagccgtcgttctcgcggtggtgcagggacccctctgtcgccgccgcctccaatactgccgttgctgcggcgatcagcgacagcgacagcgacgactcagaggagttcgacctaccgctcctgccatcctcctcgggcggcgggagctcacctatggacattgaggcgggggcgacggtgagatctgatgatctgccgatctcaccgaggttgcttgcgaaggtcattgggttgatagcgtgttggtacacgctgagcacatgcttgactctgtacaacaaggagatgctggggaagcacatgtggaagttcccggcgccattcctgatgaacacggtgcaattctcgatgcaggcggtggcgtccaggaatactgggtcgtatccccaatcttccaatggggcttcaaaatacatcatccttgatgaagatactgaagctcaagatgatacaggctgatctgaatgtgatagaatgcatactatatatggcgcttccagagaagcaagatcttctgtgcctgcatagtcttactttcacaggctaactgatttcatactattttttgagttgatcaattactctggtcagccatgcacgaacgtgacgcttgcagccgtgtggcaagttgggaagattacacactcgtacatggaacatacaagatacaacctggtatcagtacatatgttttgtcctttcattcaaaacaaagaacggtgcatatatctgaacgaggcattctgcattatgtccactaagaaaatgttccatcaaatacaattagaactacagctgacacacttaactttctggaagaggataggactcaattttatagtccattcagattcttgaagagagaataggcattggaacaaagattccttttcttgacatgttaccccggtgatggcaatagtaacagcaattatttccattgtgatggatccatggcacgacttcagagcaagtcacttttttgatagttctgctcacataataagaagcagccttgttgctgcttttaggtggcgctttggcctttttcatggttttgacagaatatgtccttgtttctgtgactagtgctgtaacagtgactgtagcaggaattgtgaaggaagctgtcactattctggttgctgtgctattcttcaacgatccatttacatggttgaaggcgcttgggctagcaataataatatttggtgtcagtctattcaatatttacaagtataaaaggttcaaaaaagggcattacaatgaaaatgctgggacaaatacccaatcttccaattggacttcaaaatacgtcatccttgatgaagatactgaagctcaagatgatacaggctgatctgaatgtgatagaatgcagactatatatggcgcttccagagaagcaagatcatctgtgcctgcatagtcttactttcacaggctaactgacttcatattctttgagttcatcaattactctggtcagccatgcacgaacatgacgcttgcagccgtgtggcaagttgggaagattacacatacatggaacatacaagatacaacctggtatcagtacatatgttttgtcctttcattcaaaacaaagaacagtgcatatatctgaacgaggcattctgcattatgtccactaagaaaatgctccatcaaatacaattagaactacagctgacacacttaactttctggaagaggataggactcaattttatagtccattctgattgttgaagagagattcggcatcggaacgtagctttcttttctttatttatttttagatgaaaataaacactcgtatatgtaatgttgtatgtatgggactgtatactgttttacacacgagcaccacaagttgaagttcttcccaccgtattggtattactcgtcttgagagcccagtgccaagtcggcccggtccatctcaactttgtttcccgtattttgagcagcttcaaaattgaactattagac

SEQ ID NO: 85241 - DNA, 297 bp, Zea mays
  Clone ID: MRT4577_17774C.1
atgcaggcggcatgcaaccgcgccaagtgggcgcacctctccgacttccaacgcgcccagcatggaagcccacgcccacgcgtcatgcaaccggcgcgtcggtcgctacgtgcaagcaactgcaccgccactcacaccactgccacgcctcctcgactgcggaaccagcaccgcgactcgaggcaacccagcgtacgacccagcagtgccagccaggcgcgatgggaccgggaaagggggataccccgaaaaggacccttcttcgtgaaggaaacaggcttcgagcctccctactga

SEQ ID NO: 85242 - DNA, 1002 bp, Zea mays
  Clone ID: MRT4577_177751C.1
aaaacacgccgtggagcgctgccgttcttccccagcgcgcagaagcccctggcagcgctcccttcttccatttcctggcaatcaggcttctcacacacgcaagcacctgctcctggcgcacccgcatagcagccaatggcctgcagccgctcctttcaaccagtgtcgagcgaccgcgccttcggccaatggaattccagcgatgcctcgttaaatcattcctgcgctctcccactccctgtcttcttctctagccggctacctcccttctctgtttcttagcacagaaggattctcctggcatcttccttctcctctctggttctgcgcagaagctcccaggaagcagccgctcagctccctcaactggccatggcgctcggccccgcgctctctgcgtcgtagctccagtcgcccccttcctcctcctccaggctggggcgccctactctggcccatggccgccaggatccgcggggctgagcagcacccctgctcctccttcctccctccaatgtcaaccgacgccatggagccgaacccgagctctccatctctaatccagcgctcaaggctctgctccctctctcctccaagcgggtggcgccttccctgctcctccatggcgccactcctcgccgggatcttgctcgcctacgtgctcggagctccaggtgcagcgcccctctccatcttctcccctggtggatgccgattctctctctggctccctccctgcaggtcgccagactcactcgacgccagccatggtcgcctccctctgcccccctgtgctcggcacccctccctgcacctctcctcagctccccatggcgctcgtgccccctgccctaggcgctcgcctgctccattcggagggccggtcttgatggccgctgttgccatgagcgccatgtctagctccctgtgctgggcgctctactcgaccgggccggagttctccatgggccgagctcctggtctccaaggcgtggggttgct

SEQ ID NO: 85243 - DNA, 619 bp, Zea mays
  Clone ID: MRT4577_177752C.1
cgctagcattgggccctccacagcaacatcaaagttttgcattcccaggcactcggccagtccatgcggccaacaggcacctcgagctgtgaagaatggccgcagcaacaggaaaactgtggcggtgttgatgactacctgatggaggagatcaggatgaggagccatgagattctcgaaaacgaagaaatgcagcagatgttgcggcttctgagcacgggtggtgcaggaaccaacctaactgaagatggcttcagtttcccttcgtacatgcctgcaccttcaccaaaattgagctacgaggatgaccgcacccgtgcacctgggaaagccgttgttgggtggctcaagatcaaggctgctatgcggtggggcatctttgtcaggaagaaggcagctgagagaagagctcagcttgttgagctagacgactagaaagtattgcagctggaagcatgtgcactccagatgttcatgtaccaaagtttcgttgatgtttgtggatccggatggactcagccttgttcgatgcatataagttgatttgtccaggctgttcttttaattactatggaaaaaaaaaaaaaaaaaaaagaaaaaaaaaaaaaaaaaagcggcc

SEQ ID NO: 85244 - DNA, 783 bp, Zea mays
  unsure (1)..(783): unsure at all n locations
  Clone ID: MRT4577_177753C.1
acgtcccaatcgcgccgccgctcgagcccctctcgcccttcgcgccgccgctgctgcaggcaaccgacgccgccgtcgccggagctaaacccctcgcctgacgccatggggcgcatgcacagccgcgggaagggtatctcgtcgtcggcgctgccgtacaagaggactcccccgagctgggtcaagaccgccgtcgctgatgtcgacgagttgatcacgaaggctgcgaagaagggtcagatgccctcgcagatcggcgttctcctccgtgaccagcacggtatccccctcgtgaagagcgttacgggaagcaagatcctccgcatcctcaaggctcatggcctggcgccggaaatcccagaggatctgtactttttgattaagaaggctgtcgccattaggaagcatcttgagaggaacaggaaggacaaggactccaaattcaggctcattcttgttgagagcaggatccaccgtcttgcccgttactacaagcgcaccaagaagctcccgcccacctggaagtacgagtctaccactgccagcactctggtggcttaggagggctcttcatctggtgtgctcttaccggcttcaggatggtcttgttctacatattatcaatttcatgtaacgcttttgagtttggagcgatttagatgaacaagagaccaaattttctatgtttacttggagaatcccataaaccatttttggttttgcaattctgtctggttctgtttagcgtctatctancattcatcagttaaaattagacattgt

SEQ ID NO: 85245 - DNA, 862 bp, Zea mays
  Clone ID: MRT4577_177754C.1
ggcctccctctctctcctccatttctctcctcctcctcctgccaccgatcccgaaccagggaggaacccggcgcgaggagggcaaaggaagagaagaggagatcaccgagcccagcgcgcgcacaggacagcaggcgccgcgatctcgcgcaggagcggagatggggctcacgttcacgaagctgttcagccggctcttcgccaagaaggagatgaggatcctcatggtcggtctcgatgcggctggtaagaccaccatcctctacaagctcaagctcggagagatcgtcaccaccatccccacaatcgggtttaatgtcgaaactgtagagtacaagaacattagtttcaccgtttgggatgtcgggggtcaggacaagatcaggcccctgtggaggcactacttccagaacacccagggtctcatttttgtcgtggacagcaatgacagagagcgtgttgttgaggcaagagatgagcttcaccggatgctgaatgaggatgagctgcgtgatgctgtgctgctggtgtttgccaacaagcaagatcttcctaatgccatgaacgctgctgaaatcactgacaagcttggcctgcattctctgcgccagcgacactggtacatccagagcacatgtgctacctctggagaggggttgtacgagggccttgactggctgtccaacaacattgccaacaaggcttgaagcatctcggcaggggcttctatggatctggataagctggatattcggactaatactgcctttacgtattataaactatatagtcttgacagataagtgtgggtgtttttggaagataaagctctctaagagctagctaccctatcaagagctag

SEQ ID NO: 85246 - DNA, 938 bp, Zea mays
  Clone ID: MRT4577_177755C.1
cctcccccatttctcttcccctgcgatccgagcccgcacccgcagggaagagaagggatcacctgatcaccagggcgcggcctcgcgatctcgcggaggagcggagatggggctcacgttcacgaagctgttcagccggctcttcgccaagaaggagatgaggatcctcatggtcggtctggatgcagctggtaagaccaccatcctctacaagctcaagctcggcgagatcgtcaccaccatccccaccattggatttaacgttgaaactgtcgagtacaagaacattagtttcactgtttgggatgtcggtggtcaggacaagatccggcccctgtggaggcactacttccagaacacccagggcctcatttttgttgtagacagcaacgacagagagcgtgttgttgaggccagagatgagctccaccggatgctgaacgaagacgagctccgtgatgctgtgcttttggtgtttgcaaacaaacaagatctgcctaatgccatgaatgctgctgaaatcaccgataagcttggcctgcactcgctgcgccagcggcactggtacatccagagcacatgtgctacctctggtgagggtttgtacgaggggcttgactggctttcgaacaacattgccaacaaggcttgaagcatctaggcagggcttcaatcaatggaaacactctggatacttggggtacgaactgcctctaccattacagcgatgaactatagtcgtgtctgtcggatgtggggatgtttttgggaggataaaaggctctttggtcaaggagctaggtatcagatgttttcgtggtattgttaatttctgttttggtttgtgcaaggtataccatgtccgactgtgtgctgtgtactcgccactgttctataatgtgctgtatactctcgacccctgactgaggcgttgtact

SEQ ID NO: 85247 - DNA, 177 bp, Zea mays
  Clone ID: MRT4577_177756C.1
accgggccgacccacgccgttgatctccactattaactttccgccaatttataattactgctaagaccccaaacacaaggcgcgactttaagaacggtgtgcgctccctctactacacctcccttgttagaaaaggacagcttctgtttctaaagctactaatgccgtcagaaagcc

SEQ ID NO: 85248 - DNA, 1565 bp, Zea mays
  Clone ID: MRT4577_177757C.1
tttcgagccccgtctccgcttccgtccacctcacgtcggcgtcttccatcgaagtggccttttcggcggcgagtgagagggcgaggaataaaactcgcgtcgcgcacgcaccgcaacaataatatccttccacgcgaatattcgccgcttcccacctcccccgccccgcatatccttctgtccgtccgttcgtctcccccctttcccttcccctctatttcaccaccccatcagccgcccgccaccgcgacgatcaccggcgcaatccgttcacgccaccactcatccactccccctccgcgaatctcatttctttactgcggctaggaggcggcggcggcggcggcgatgaagttcggcaagagcctgagcggacagatcgtggagacgctcccggagtggcgcgacaagttcctgtcctacaaggatctcaagaagcgcctcaagctcatcggcgccgggaacggggctgagcggcagccgaagcgggcccgccgcgacgactccggggaggctgacgcggccgcggccgcggcggcaatgacgccagaggaggcggagttcatgcagctcctggaggctgagctcgacaaattcaactcttttttcgtcgagaaggaggaggagtacatcatccgtcagaaggagctgcaggaccgggtggccagggcggccgggcgggaatccaaggaggagctcatgcgggtgcgcaaggagatcgtcgacttccacggcgagatggtgctgctcgagaactacagcgccctcaactacacaggattggttaagattctcaagaaatatgacaagagaactggagccctgatccggctgcctttcattcagaaagttcttcagcagcctttcttcaccactgatctcctgtataagcttgtgaagcagtgtgaagccatgctggagcagctccttccggttagtgaggcatctgtctcaagtgaagatggaaaaggagactctaatgatgaagagaagctggcgaagccaagttcttccttggtaaatggtggtggcatgccagagttagatgagatcgagtacatggagagtatgtacatgaagagcaccgtcgcggcccttaggtcactgaaggagatccggggcaagagctctactgtcagtatgttctcgttgccacctcttcagggcaacaatgcacaggacagctaccagatccgggcagagcaactagatgaggagccggagaggtggagcaaagtaacggtgatagagcaggcggccaaatgacagacttaatgggcaaaacatctgatggctgaacttaaaaattttagacttggacatttgctggagatgggactgggatcccaatctcccattcagaaatttgtatgaattcaggattcctaacagctgcaaaatggtggacatgttaaatcatagaattcccagcacaaccatcggacagaattgggctgattttattcactattgtgaattgatcatgtgtttttactgatatacaaccttatgattcgatgttgcttctgattgtgataatgaaaggaaaaaacaggttttggctt

SEQ ID NO: 85249 - DNA, 402 bp, Zea mays
  Clone ID: MRT4577_177758C.1
aaaacatctgtgatatttctaaacaatatttctaagcagccagttttcaagaaatgttgtccttttacaagcatagctccccagtttttggaagggtgatttttccccggccgggaacctttttttggttttcccccggttttattgtttcttcctcattttagggtccttggttcttttgaggggcttccctttttccttttccatttccttaaagcaccagggttgccctttttttgaaaccagccttttccttgccccctttttaagttttttgggggttggttttttccctttaccccttttaccctttttccaggtgagggccgtttcccggggagcccaaagaggtcaaatttttgggttttctttttttcagagaaaattttttacccctttttt

SEQ ID NO: 85250 - DNA, 803 bp, Zea mays
  unsure (1)..(803): unsure at all n locations
  Clone ID: MRT4577_177759C.1
gccggccgggccgggaaaaaacgcactgaaaaacctcgtctacattcgcatctaggcgcccctccacctcgttccgatccagctcgccggcgcagccgcagggtcgcggcctcgcggggcgccagggcggcggtggcggccttgggcagagcatctctggcatcgtgcggatggcggtgttctggtacttcgcggccaagttcttcgggcccaagcgcccgcccgcggaccccgggattctcatgtccaacctcttccagaagggcgagccaatggatatgtggatgtatttatcagagagtgacaagttcaacgattttgctaatgaggacgcacttatttggcatgaggcaaacataccatatgcagtatggggacctaccagtactagaacacggtcattaacatactacccttcagaggctctcaagcataatggatctttgtatgctcatgtttactttgcccgctcgggttaccctgtggacccaacagatcctgaatatgagcagaaatctgcatttgggaggacgcaccctgttgtggcattcttgccaaaatcaaaagctggtaaaaagaagagcttgcttgnggattcagaagagcctgaagagcaagcaccacctaaggggaataaagaatttgaggataaagatgagggtccgactgaatatttatcttattggaaaccaaatgtaacagtaaatcttgttgaagacttcacacggtatacccaacataatgtaccggccatcggtgctccatatctgaatgtggatccagctacaggcgataattatcct

SEQ ID NO: 85251 - DNA, 240 bp, Zea mays
  Clone ID: MRT4577_17775C.1
cccccaaaccacttatttttaaatccacttatttcggaaattcaacatccaccttagggcttattcgggtggaggtgacccctaacccatggggggagacccaagtctgaagactcccaaaacctgcacaaaggatatataatcccgtttaagccatcaaggtacatccggatgggaacttacgccacaatacgggttggaaaaaacctaacaagcctcacttatttgtgacccaaaccc

SEQ ID NO: 85252 - DNA, 196 bp, Zea mays
  Clone ID: MRT4577_177760C.1
gttctagatcgcgagggccgcccttttttttttatagcgcataagaacccgcacgacaccatgaggttgatgttagttgcccttgctcttctggttttagatgcgagcggcacctacacgcatacaagcggcgtatgaggatgtaatccaccgccgtcaatatatctaccggctacagcgcatttgtcatctccag

SEQ ID NO: 85253 - DNA, 192 bp, Zea mays
  Clone ID: MRT4577_177761C.1
cagctgcaacttacctgtataacctccctctcgcctgcagtacaattgttataccctcatccttggaacactcctaggtgcacccctcaaattcacctcacgaagccccacctacttctcgagcagacccttcgcaaaatactccttggcttaacattagcgtgggtctatatgggctgcactcactaacta

SEQ ID NO: 85254 - DNA, 1875 bp, Zea mays
  Clone ID: MRT4577_177762C.1
aaggaattggccttaaaccttgaagttggtcctattagcatgaccaagtggcagttgtttttacagattgagcagtccttccaggttcatcgtagttatggaagtatgcttgaaggcgaggctgatgaactcaagagggttttccttgaaggaaatccttatcttcttggattgaccatgattgtttctctattacactctctgtttgatttcctggccttcaaaaatgatattcagttctggaacaagaacaagtccatggaaggtctatcggcaaaatctgtggttctgaattttgtgtgtcaactaattgttttcctgtaccttcttgacaatgacacttcatggatgatccttgctagctctggaattggtgtttgcattgagttttggaagatcggaaaggcgatgcatattgaagtcgatagaagtggaaaaattcccatgttgaggttccgagatcgtgaatcatatgcacagaataagaccaaagagtacgatgctattgcaatgaagtacctcacctatgtcctcttcctccttgtgatcggtttctctatctattcactaaagtatgaaaagcacaagagctggtactcatggatactttcttctatgacaagttgtgtgtacatgtttggtttcatcatgatgtgcccccaattatttatcaactacaagctgaagtctgttgctcatatgccatggagacaaatgacctacaagttcctcaacactataattgatgacctttttgcattcgtcattaaaatgccaatgcttcatcgtctctcggttttcagagatgatgttatcttcttgatatacgtctaccagaggtggaaatatccggtcgacaagaagcgtgtcaacgagtttggcttcggaggcgaggaggaacccgcagcccaggagactttggaaggaagtgatccagcagctgcagcagcagcaacggaggctggagaacggagggcaagaaaaccaagtgatctccaatcgttcgatcatccaaatgtagcacgcccctcagcagcacctgccctcccacagcgggtgtgaaatttttcgctgaactggatgctggactcttgcggtattgccttactgagaccctgacgataagataagttgtgtgtgtaacagcctaacaggggatacaatagtgctgcctagggcagcgggcgaacaggcacactatcgctattacgtttctgtctagcagccatttctaggcgatatgcttgtttatattgttttttttgtacaattttgtgcatcatttttcaaaatacataacggcgattcttagcttcctaataatgttgcaacgaatcgatgacctttttgcatttgtcatcaaaatgccaatgcttcaccgtctctcagttttcagagatgatgttatcttcttgatatacctctatcagaggtggaagtatcccgtcgacaaaaagcgtgtcaacgagtttggcttcgggggcgaggacgaaccggcagcccaggaggctgtggaaggaagtgattcagctgcagcaccccagctaacggaggccgggtccgagacgagtacggaggacaagaaaaccaagtgatctccagtcttcggatcatccaaatacaagcatacatttttgcaacacctgccttcccagccggcgtgaaatttcttttgctgaaactggatgctggactcttgcggtcttgtcttaccgagacgtgctgaccataagataaggcgggtaacaagggacccgaaagtcttttgtttagagcagcgggcgaacaggcacacactttcccaattacgtttccagttcgtcttttagcagcccaaaaaaaaaaaaaaaaaaaaaaaaaaaggggaattaaaaa

SEQ ID NO: 85255 - DNA, 710 bp, Zea mays
  Clone ID: MRT4577_177763C.1
attgggtacctcgaggccggccgggagctagcattagccagaccattagtgttaccttcccctgctccgacctctatatggggatctgactatcacgtttcgatccccgccaaaccaggtatggacatgcaccagagttcaattgactcttctccggaagacgatatggtcagacgccctctgacacccgccaagaaggtgtgcgaactcttactgcaggtccgcaaaggataagtcatcgacgactgtctccacatcaacgcgtgtaggaacgccaagcggtggaactccgccttccacaatgtcaccgccatggtcggcgccggcgcgctcggtctcccctacgccatgttcaaggtcggctgatggcccggtatcgcggagctggtgctgacgtggatcatcacgctgaacacgatgcggcagatggtgcagatgcactacatggccccgggcaagagggtcaaccgggaccaccatatggagcaacactcgttccattagcggctgggcctgcgcagcccggtgccgcagcagctgacgtgggaggtgagcctcaacatcgactacatggacaccggcggcaagtcgctgaagaaattccacgacacgttctgtggcgacgacaaccaccggtgcaagggcagggacatcaagctcacctacttcatcatgatcttcaactcctgacacttggtgctctcccagct

SEQ ID NO: 85256 - DNA, 2111 bp, Zea mays
  Clone ID: MRT4577_177764C.1
attcttttgtgaagaaaaaatagtaagcacaaacttgttccatacttattcattatcataatattttttggctgagagaatttaaaaatatcgaggcttcgagcgtatccgaaggtcaacatggacaatgctagacctgatcaagcgatcgtagaccccagtcccagccaactgtcaggatatatattagtttgtttcggagcttaggttgtaaacatcaaaattaaattctctttgttaaccaccagtacaattgtagtcacatgggctgcccagggcgcactaaccactagtacaaattttgtgggtaaagaggaaactaggctcggatcatccctgaaggacaacaaaaccggaagcgctggcaaccacctcccagaactaattggtcgttgctttctttccataacaagatccagcggacgagcgagtcgacccggccttctgaggccctgtttggattcggtagagctaaagtttagttggactaaaactttagtccggctaatgttagcccattagctattagtcacggggcgtttagatactatggactaataagttgtttgtgtgtttagtcctgattagctcatatttgtggactaattgttagggaagctaaagtttagtcactctattagtcggcctgtttggcgacaaatgaactaaactttagtggctaatccttgtaatccaaacaggtcctgcctgaattgatctggcagctacaacgcatcctgggccgtcattgcgcctggtcaagcggctcgtttgacaactgtgggggttctgacgtggtcgacgcagggggctttggcttcagagcgaggatcggcaaggctccgacattagagggtgctcaagtttcagcagaggagaataaagaacttgaggataaagatgagggtccgactgaatatttatcttattggaaaccaaatgtaacagtaaatcttgtcgaagacttcacacggtataccaacaataatgtacctgccatcgttgcttcatgtatccttcaactgtaaatatagtaacatatatcgtttttgttttgtgatagttccacttttacacttacagagtgttgagtacatacttcaaattttcttttaggctgggtgagaagtacaaatcaatacatctctgtagctcactgaattaactgatttttccttttagtgcaaatatattatatatgtttgccagaagatcattttgctcttgttttaatccgtgtatggtaacttgcactgacattctaagtttgattattggatattattgcctttctttccattttccccaatactcatgagtccatggcagccatcatccagtaagttatctagctatcatttagttgcttcatgtagcagaatgcttcaatagctttggcaatatctataagcttttggattttaggttcctgagcttgtgattttcagctcttgtattaagctataaatgatacgttgttatcccatttgcatacaagtctcattgcgatgctatcagtcagcaaatcagaacattcatccagatgaggactaacctgaaggtggtcgataactccggggccaagcgggtgatgtgcatccagtccctgagggggaagaaaggagcaaggctcggggacatgatcatcggatccgtaaaggaggcccagcctcgtggcaaggtcaagaaaggagacgtagtctacggcgtggtcgtccgtgccgccatgaagaaaggacgcagcgatggcagcgaggtccagttcgacgacaacgcggtggtcctcgtgaacaagaagggcgagctgatcggcacccgcgtctttggccccgtcccccacgagctgaggaagaagaagcacctcaagatcctggccctggctgaacacattgtttgaggtgtgtcgcatagccaagtgtttgtgggaatgtttttttttgtgtgttctctgtttgaataatgcattgtgaaacgatagcatggaccgtttgaactattttgatgacattgctcgtccatttggatggccaatacgtgtcgtgatcgattctggagttccattttttttgttacaagctgctttcacctcgtgccagatatccttgtctggg

SEQ ID NO: 85257 - DNA, 3540 bp, Zea mays
  Clone ID: MRT4577_177765C.1
ctcgagccgaatcggctcggacggcggcttttctggcgacggcggcggcggcgacgacgagcagccacctggggaagagcaggtagcaggaaatggcggcgttcctgaggtcaaaatgttcaccagttggacgtactttgatgggaagcttggactcgcagccgcttaaaaaaaaaagccggcgtcgggaaaaacgcaactgaaaaacctcctctacattcgcatctaggcgcccctcctcgtctccgatccagctcgccggcgcccggcggccatgtcgcagcccgcggcggcggtggccgcggaggcgcagccgcagggtcgcggcctcgcggggcgccagggcggcggtggcggcctggggcagagcatcgcaggcatcgtgcggatggcggtgttctggtacttcgcggccaagttcttcgggcccaagcgcccgcccgcggaccccgggattctcatgtccaacctcttccagaagggcgagccaatggatatgtggatgtatttatcagagagcgacaagttcaacgattttgctaatgaggacgcacttatttggcatgaggcaaacataccatatgcagtatggggacctaccagtactagaacacggtcattaacatactacccttcagaggctctcaagcataatggatctttgtatgctcatgtttactttgcccgctcgggttaccctgtggacccaacagatcctgaatatgagcagaaatctgcatttgggaggacgcaccctgttgtggcattcttgccaaaatcaaaagctggtaaaaagaagagcttgcttggggattcagaagagcctgaagagcaagcaccacctaaggagaataaagaatttgaggataaagatgagggtccgactgaatatttatcttattggaaaccaaatgtaacaataaatcttgttgaagacttcacacggtatcccaacaataatgtacctcccattgttgctccatatctgaatgtggatccagttacgggcgattattatcctacagtattcttcaatgagttttggctattgaaggataaattaatagcgctcaacgagactgtggaggaattgcccttaaaccttgaagttggtcctattagcatgaccaagtggcaattatttttacagattgagcagtccttccaggttcatcgtagttatggaagtatgcttgaaggcgaggctgatgaactcaagagggtttttcttgaaggaaatccttatcttcttggattgactatggtcgtttctctattacactccctgtttgattttctggccttcaaaaatgatatccagttctggaacaagaacaagtccatggaaggtctatcggcaaaatctgtggttctgaattttgtgtgtcaactagttgttttcctgtaccttcttgacaatgacacttcatggatgatccttgctagctctggagttggtgtgtgcattgaattttggaagattggaaaggcaatgcatattgaggttgatagaagtggaaaaattcccatgttgaggttccgagaccgtgaatcatatgcacagaataagactaaagagtacgatgccattgcaatgaagtaccttacctatgtacttttcctccttgtggtcggtttctctatctattcacttaagtatgaaaagcacaagagctggtactcatggatactttcttctatgacaagctgtgtgtacatgtttggtttcattatgatgtgcccccaattgtttatcaactacaagctgaagtctgttgctcatatgccatggagacaaatgacctacaagttcctcaacactataatcgatgacctttttgcatttgtcatcaaaatgccaatgcttcatcgtctctcagttttcagagatgatgttatcttcttgatatacctctatcagaggtggaagtatccggtcgacaagaagcgtgttaacgagtttggcttcgggggcgaggacgaaccggcagcccaggaggctgtggaaggaagtgattcagctgcagcaccccagctaacggaggccgggtccgagacgagtacggaggacaagaaaaccaagtgatctccaatcttttgatcatccaaatacaagcatacatctctgcaacatctgccttcccagcgggcgtgaaatttctttgctgaaactggatgctggactcttgcggtcttgtcttaccgagacgtgctgaccataagataaggcgtgtaacaagggacacgatagtcttttgtctagagcagcgggcgaacaggcacacactgtcacaattacgtttccagttcgtcttttagcagccattactagttgatatgcttgtttgattggtttgtgtacaaattttgtgcatttttcttaaaacacacaattggcggctcgtagtttcaaaatgatgaactatttacatttagcataaaaatcacaaacctttgccttctctcccttcgtaaaatttcttttgctgaatcttgatcctggactcttgggggctttcttcaccgaaaaagactgaccataaggaaagtggtgtagcaggcaacacgatagtgttttgtctagggctgcgggcggacgggcgcccactgtcacaattacgcttccggagcgtcttttagcagcgattactagtcgaaatgcttgtttgattggtttgtggacaaatattttcaaactttcttttcaaccacacctgccttcccagccggggagtattttcttttgctgaaactggatgctggactcttgcggtcttgtcttaccgagacgtgctgaccaaagataaggcgtgtaacaagggacacgatagtcttttgtctagagcagcgggcgaacaggcacacactttcacaattacgtttcaaattcgtcttttagcagccacgtttctagcagccattactacgcgatatgcttgtttaaattgatatccttggaaatagtttgtttggggctgccaactcttctgttggggcaataacaaggccttctcattgcgatgctatcagtcagcaaatcagaacattcatccagatgaggactaacctgaaggtggtcgataactccggggccaagcgggtgatgtgcatccagtccctgagggggaagaaaggagcaaggctcggggacatgatcatcggatccgtaaaggaggcccagcctcgtggcaaggtcaagaaaggagacgtagtctacggcgtggtcgtccgtgccgccatgaagaaaggacgcagcgatggcagcgaggtccagttcgacgacaacgcggtggtcctcgtgaacaagaagggcgagctgatcggcacccgcgtctttggccccgtcccccacgagctgaggaagaagaagcacctcagagatcctggccctggctgaacacattgtttgaggtgtgtcgcatagccaagtgtttgcgggaatgtttttttttgtgcggtctctgtttgaataatgcattgtgaaacgatagcatggaccgtttgaactattttgatgacattggtcgccccatttgggat

SEQ ID NO: 85258 - DNA, 603 bp, Zea mays
  Clone ID: MRT4577_177766C.1
atgtcttcatctaaatcgaggagtgtcagggagaaagacgcctcgcctcgtcgtcttctgcggtgtacgttcttcaagctccaacccccatctggggcgtccatttctaaattggtggcagagatgggatctggaaggccgcgcgtgacgttaatagaggccgatgtgaagaacaacaaccaggacactaaaatgattcctggtattgatattgataacgttgaagatatgaatgatggatctgttgtagtttctgcagtgattacaaatgttggcgctgctccctgtattacaagtgaagcttccttggctaatatgcattcagaggacgttgtgcctgaaacaaggggctcagattatgtcaagactgaggcctatttgggcaaacatggagtatgtactaactcttctcttaggtctgatcttgaatggatcagaaaggggtatggacaactactttcgcagaatgcttccctcaaggaggtgcaattgttgttccgcaggatcgccttagccctatcaggaatggagacgctctcggcgaagcatgaggacatggtggacgtgaacctgaagccgacttctaaccaatccaactcgtag

SEQ ID NO: 85259 - DNA, 348 bp, Zea mays
  Clone ID: MRT4577_177767C.1
ctgctggatatcgatgggaacgctttcagtggacgctaccatgccttcttacgcagcaacagcttgatttacaaaatggctctattccgcgaatggcaagatgaatggattgatgcatgggttcattatgttcccttggggatgaagggtacggacactgtggagagtgttcgttattttgcagaagaagaagaaggcatgattcaggcgccgcggttggccaaacaaggcaatgaatgggcacaaaaggtgcttcggaacgaagatcttgaagtttggttctttaggctgttattagagaatgggcgactaattgacgataatcgagagaacattgggtatatgcca

SEQ ID NO: 85260 - DNA, 209 bp, Zea mays
  unsure (1)..(209): unsure at all n locations
  Clone ID: MRT4577_177768C.1
gcagtctccncngangcagtntcttgcgttcggtggtaganatggagatanaggaggcgacgtccttnctnnggtgtgnnntgtcngggcgcaagaggggtggnnaaggaatcggcgncgttnttgggtgtncgtntcgggngganngcgtnaagctggagaccaacggtgtgggctaagcaaagtnagggtgagcagtcgnggatatt

SEQ ID NO: 85261 - DNA, 405 bp, Zea mays
  Clone ID: MRT4577_177769C.1
aatctgtggttttagggagtattttttattttttttttcttttttattattgtttttttttcacactttttttttttttatgatttttttatttttacatgggcccccacaaatgacaacaaaaaatgggttttggggaaaaacaggcaaaacttccatgtattttgaaaaaaaaaaaagggggggtgtcaagatctcctctggggggaccaacataccacaatttatcccgaggaaagactgatgctatgtcacatggggaacacccccatcccccacaaaggaaggcttttttcaggatgcccaaaaaaaactttataccccggccgggggtgaccccgggaatttgcgcccggaccatgggggggagccaatttttctttatggggggcggtataaaccggg

SEQ ID NO: 85262 - DNA, 258 bp, Zea mays
  unsure (1)..(258): unsure at all n locations
  Clone ID: MRT4577_17776C.1
agggcccggngangaaggggggcgaggagaaggaggnnggnaaggaggggcccaagaagaagcngnnnaaggagggcgagggcngggagacccccgaggncggcgacgagggggaagngcannacacgggcacgcnnccggaggggacaaaanncgacncaagccgngaacgnggagaacccccacaaggcaagcccggacaaggacaagggaaaaaagggggggaacaaggaaacaagaccangaagaaaggagaaa

SEQ ID NO: 85263 - DNA, 480 bp, Zea mays
  Clone ID: MRT4577_177770C.1
cgcctgcgcgcggcacgcgcgaggccatagcgccgccgcattacacgtaacccgctcgccatgtcctccgtttaccttgcctgcagcgaatcgcgtattggagaaccgctcgcacacaagatgactgcgcccactgattgccatgattgcaagctagctggtactgttgatacggagccatattgtgcacttcacagagatatggatgtgcctgtggctgagtctcattaataataacaggctcacgtttctactacatacttgtaaggccatttccttccatgggcatctacattatctcagtaattacatgatgctgacttgacatgcaactacaccatcgagtttacaacgaatgtacatcattgatggagctagaactatgttgaatgattagtatgatgaacgacagcttgtttcattccatcaagtacatatattgagctctgcttgttattataaagatcaacaagtaccatt

SEQ ID NO: 85264 - DNA, 285 bp, Zea mays
  Clone ID: MRT4577_177771C.1
agtaaggtcctttcctgtacgcccttcattatgcacttgatgccgtaaatggaattgcatggcagactcccatggacgtgataaaacatggttcgaaaaggcctgctgacgcagatcccatgaacttgaacgcgcatcccatgaataaacctacagcagcataacgtgactcctgatcgcctgtctatagagacgatcactttgatgacctaagacgcggaatgcaggtgcttaactgcgtagtgacttaccagacctacatgttccaggtgctgaactaaacac

SEQ ID NO: 85265 - DNA, 765 bp, Zea mays
  Clone ID: MRT4577_177772C.1
tccacgcgtccgcccacgcgtccgcccacgcgtccggggaaagccgtctagcacataaccgtcgcttcgtgtggactcgtagctgtgtgtatagtgtatacagtagtgtactgggataggggtactgctacagctcagtggagagttgagtcgtgcagtggatcagtggaaatcatgtatgttagtgtcaacgacgaggatgaggccacagatcatacatacactagttgcatcatcttgggtacgtggcatcctgtgctgtacgggaaggggagaacgtagctatcttgccgtgttgttttgcgtgacataataacaactgttttgtttgttataatttgtttataaaattcttatctttttatattatcatatatttttttttataatctttatatttctattttattttattcggttttttctattttggtatttatatcctttcttaattttttattctaatttattatttttcatttcgttattctttttataatatttttcttactttattattttattctttattaactctttttttttatattaatttattttatttatattctttcttctttatttatttttattttcacttattttatattatattatattattacttttatttttttccttattattattttttatctttttttttttaatttttttttcttttacttatttttattttttttgttgtattttatatttttttctttctttctttatctatttttttttttattttctattttt

SEQ ID NO: 85266 - DNA, 364 bp, Zea mays
  Clone ID: MRT4577_177773C.1
gccactccttcaaaactgagatcatactattctcgtcaagggccatcagtcatactatgtagagggattgttctatacaaatggcacacaaacttcctaacgaagttctgatcgatctgctagcaaaactgccagttgcgtcatcactttctgacttatacactgatacacctaatgatgctcacgggacaatttgtccacatgttttctaatctcaatctatacctaaacgaatgactactcaggagcatttgtgccctggcccataactaacgagaaccttacatctttaattgtaaacttacctaggagacttaaagattatcctatctcacaaatcctattgttggagtaacaattcaac

SEQ ID NO: 85267 - DNA, 596 bp, Zea mays
  Clone ID: MRT4577_177774C.1
ctcactgttgtacgatgacagtctgaccgcactctgctgcgaacaggcagtcgtgcagagcaggcttcgcatgatgacgtatctgaagcgggccacccagggccaggagacctactgcgacagaacgtcctgtcatgcgaaggtacctgcgtgattagctagaccctatggaccggacccattgacaaggaccctgctgaagagattagggaagcgaacattcattactcgagagatgaccactaaaaacctgctatatgtgcctagaaacataaagctagcgcattgctgctgcaaaatgacactatgcatagggatctgcatcctgaaatatcaggggcgaccctcgtagacaatttataacgtgcctgctcgtaaatattggtgggttctgaccgagggatagctggctggacaaggcctgggcgtgacatctcccactgtggcaaggagcgctcggacccagtctagttgacttgccaaaccctttacaacatgaagtacacttagattctaactaacgcattgctgcttattgagactagtggcgtctcaaaaaagtcgttcctgggcgccattgttcccttggatttgtt

SEQ ID NO: 85268 - DNA, 311 bp, Zea mays
  Clone ID: MRT4577_177775C.1
cccacgcgtccgtacacattatcaattatctatataaaaaagcacgggcccacggggtttgtgggcggctgtgcgggtatattacagggctatctgaacacactagggaaaacaaacaatgtcaatcttcgacacaatagaggctataacacataggctttcaacagtacacttgcattcacatatatgagattcaagtatctttaacgggaacaattgactgccaccaaatgccaaattactgatcccgacgctaccaagccaaaagggcacgacctgaacgacgaccttctgaatcaacttagtctact

SEQ ID NO: 85269 - DNA, 304 bp, Zea mays
  Clone ID: MRT4577_177776C.1
acgcccacgcgtccgccaggtcatgtcatacctgacggctttcctgacgttcgatggggctctgaacgttgatgtgaacgagttccagaccatcctggtgccctaccggaggatccacttcatgctttcgtactacgctccactcatttctgctgagaaggcctagcacgagcagctgtccgtggctgaaatcacctacagcgccttcgagccattctacatgatggccaagtgctacccccgccatggcaaggacatggcatgcttgctcatgtaccgatgcgatgtggctcccaaggacgtg

SEQ ID NO: 85270 - DNA, 705 bp, Zea mays
  unsure (1)..(705): unsure at all n locations
  Clone ID: MRT4577_177777C.1
ccggcactaactctccgtacacactggtcccacccttcgcttacgacccttaccacgagcagatcatcgctgaactcggctggactcgcgaggccatccgtcagatcaccggtgtttcgcccaacaccatgcgtcccccgtacggagacatcgatgaccgtgtccgcgccatctccatggccatgggcatgacccctatcatctggacttccgtcaatggcaacgatttcgacaccaacgactggcacattccttccggacagagcgtctactccgtcgtccagaccttcgacacaatcttggaggaggctgcttctcttcccggcggtttcatcgttcttgctcacgacttgtaccaacaaaccgttgagcttgccaccggctacatccttcctgatgctcttgcccgccgcaaccccgccttcaacctcatgtcgatcatcgaatgccagaagaagcctctcagcgacgcctacgtcgagaccaacaacaaccagaccaaccccttctcttcgaacgccaaccccctcaccggttccgctgctgtcagcgccactgctgctggaggaggagcttcatctggtggatcaccaacaggttccagctcggctgccagtgctaccaacagncagaagtcaagcgctgttgcaaagaccgctggtgtcggtgctgtcggtgtcgttgccctcgccgcgggtatgcttt

SEQ ID NO: 85271 - DNA, 826 bp, Zea mays
  unsure (1)..(826): unsure at all n locations
  Clone ID: MRT4577_177778C.1
tatctcactcggctcgtttcccgaaccttcctcctcgacttatccccatgggcaagtccggcgcaaaaaagaagaagccggccaccgccgccgccgccgcaaagccgccgcccgcctcggttgagctgaaggcaacgccgtcctcgtcttctttacccgcggcgaacggtgcggcgccccaccaggtggtggacgcgggcgtcctcttgcgccgcgcacacgagctcaaggaggagggcaaccgcctgtttcagtcgcgcgactacgccggggcgctgcgccaatacgagctggcgctccgcctcgccccgcgcggccatcccgaccgcgccgtcttccacagcaatcgcgcggcatgcctcctccagctccgccccgtagaccacgaggccgtcgcgcaggagtgctccctcgcgctccaggccgagccacgctttccgcgcgctctcctccgccgcgcccgcgcgctcgaggcgctcggccgccacgagctcgccctcgccgacgcgttggcgctccttgcgctcgaccctgaccaccgcgaagccatcgacctctcctaccgactacgttcccgtgtcaacgcatcctctgctgcctccgcttcctcggcacccgagcccaccagccggccctcccccgctgcccttggtgccctccgccgttgtcgccggacttggccattccctccccgctcgctcattccctaagaaacaccaccaccagcctctcctgctaatttgcagccaaatctcgcagtgattccaaaatctaacccgccaccgntgcccaagctggtgcctttctcaattctccgccatcttca

SEQ ID NO: 85272 - DNA, 445 bp, Zea mays
  Clone ID: MRT4577_177779C.1
gaaacagcttatccatttttttttttaggagaacctgaaacataccttacaaagcaccctttgactggacagcatatgctacaactgaaccaacatatcttagggtacaaaccttccctaaagatcacctgaaaattagcaaagctagctatggtgcgcaactgggattggctgacagcctgtgtcagtgaaaagtgttccattacattaggccaatagacacaaagagccacacacccctttctgtatatcttgctgaagaagatcttgaaaacctatcagaactgggagccttccttttactggatgggacctttctagacaatgctcggcagataatgagcactgcatcatccttctgtgatggatactgaaactcaaaatgttgatccacctctttgagcctataccacatttttggacattgttgcttgctaccccactg

SEQ ID NO: 85273 - DNA, 806 bp, Zea mays
  Clone ID: MRT4577_17777C.1
acgtttcaccctaaccctagctacgatccccttctgcaacccggtcgtgtctcagggcgcatcgccgaaggccaagccctccctccctagcagcgcccggacccatcgatcccggcgggacgcgccgtcggcgccccaggctcaagctccatcgcgcgctcgacggcgagggatggatccgatggacatcgtgggcaagtccaaggaggacgtctccctccccaaatcaacaatgaccaagattattaaggagatgctaccgcctgatgttcgagtagcaagagatacacaagatcttcttgttgaatgctgtgtagagttcatcaatcttctttcttcggaatccaatgacgtgtgcagccgggacgacaagaagactattgctcctgaacatgttattagggctctgcaggatcttggcttcaaggagtacgttgaagaagtttatgcagcctacgaacagcacaagcttgaaactctggactctccaaaagcaaccaagttcactggtatagagatgactgaagaggaagctgttgcggaacagcagagaatgtttgctgaagcccgagcaaggatgaacaatggagctgccaaaccaaaggagcctgcattagaaccacagaatcaaccccaacagcccccacaacctcaactgcagctgcatcctacagcacagcagcctccacaaccgcaatcgcaactgcatcatcctcaatcacagcagcccctgcatcctcaactgcaaccgtatactcaggctgcaccacagcaacccctgcatcctcaactgcaaccgtatactc

SEQ ID NO: 85274 - DNA, 166 bp, Zea mays
  Clone ID: MRT4577_177780C.1
agcacccatctctcgctcgaactccggacttttttcatctcctcccgacatctactttgggaggctcgcgaaccttcacaatggcctcaaccgttgtgtcggtcgacgtgaagctctacaagcttcgtgctgaggacgccaaacttattcagatcagcgagatctt

SEQ ID NO: 85275 - DNA, 163 bp, Zea mays
  Clone ID: MRT4577_177781C.1
acgtagccttcttagacaatcgtacttaaccgtcgttcgtgatacgtaccgggtcttgcgtatggaacattcaagcggagggtataccatctgctgtcgtactggccttatctacgaggcatggacaatgatgtacgttgtagacactacaggaatggataac

SEQ ID NO: 85276 - DNA, 314 bp, Zea mays
  Clone ID: MRT4577_177782C.1
gctgagtgctcacttatgtactggcctctggatcagctggatgtggagagcacaatggtgcgttgggcagactaggacttgcatgcagagattgtagccctcaaacgtgatgatcgtaagctggcaacaggggttccacctcaacaacattatttagtgtcttgaccaggtcgccctttccacatcaattccaacgaattggtccacaggggcacgaaactggactgaaatgaagcatgtgaggagttgaagaatgggcttgtgggcccgcggaagtaagaagcacactagctagggcttgctgttgccagccc

SEQ ID NO: 85277 - DNA, 1319 bp, Zea mays
  Clone ID: MRT4577_177783C.1
ggaccctcgagcctactaaactcgagcttggtcgcttggccatgcactgtccctgcgccgcggttgactccgtttgtctcgcggtctcgcccccgtctcgctctccgacgactggtgtgccgccgccgtcctgtgccaggtgctaaggccttcgtcagtatcttcgccggcgacgagcacccaccagctccttgatttctagaaagaaaggaggggttgttttcctacatcttgatcatttggagatttttctgtcattctaatggaggtaaaggaagtatgtgtccaagatatgttggttgacctggagaaaggcaagtgcttgctacccatagaggacaatagtgggatgaaggttaattcaatagttgggcatgcaagtacaatgcggcccagctcatgggatgatcttgtagcactgaaggatgataagagtcaccacatatgttgtttctcttcacaccgtcaagattcatctgttaaaagtggagagcctatgaaagctgaaggggagatcaaggttgggattttggataagtcaactgctgataaggaaaataaaaaatggtataagaagccgccacgacctccaagatcacagactacttcaccattagaccctgctgaccagaagctcatcagtgcactatcggagcttgcggtgttaaagaaggctaggattgagcgtatgaaggcattgaagaagatgaagaattccaaaccagcatcttccattgggaacttggtggctttgatcattaccggcatcttatgtttcttcatactttggcaaggcttgctgatgaaataaaacactggtttttctcaaggcacggggtgagcataagcttccataggccatctatatcatcagtcagaatgcatggtggtcttatctccatccagttctacattaagaatgtcacaactgttagcccccacagttcctctgcagctcaataatactggagtggctacgatgatggaaatccatggtgagatcaggagtgtcactgaataattagattgctgggcttcgttcgtcatagtcacgtcgtggcgagtcccctctgattttgcatatgctccacggaatcaccgttgtccggtttgctccccaggccctgtacagtgtaaacttctgaaagttgaaattgccctttgcagaatactggtgttgtaaattatcactggttgattggtgatattttgtaactgttttttttaacaagggctgttattttgttgaagccatttaggaagagaaaactattgcttttttagtgacatcgtggagttaatttgcttggatgaatttt

SEQ ID NO: 85278 - DNA, 348 bp, Zea mays
  Clone ID: MRT4577_177784C.1
gcgagacctcggtgcaaaacctacagatcgggggacagatctagccgacaagatggtgaagatcaggtgaatcggagctggctatatcggagacccaaccatggctgacattggcctaaggtgcccaaacatagtgggcgtattggaagacatgttcaagcacagcatcgcagcatagaacagcggcacccttccgctctacgagcccggcctcgatgatgttgtgaagcagtgcaggggcaggaacctcttctggagcactgatgttgagaagcacgtttatgaagctgacattatcttcgtataggtgaacacccccaccaagacccgcaagctaggagctggcaa

SEQ ID NO: 85279 - DNA, 232 bp, Zea mays
  Clone ID: MRT4577_177785C.1
gcggtgagctgtgagcaatttgaacggcgatgagcttgaggttcatgatccgtgtgggcgcgcttgtggcgctggagagcacggccaggtaggtcaaggacaatgcgcatgcgctggcgcagtcagcgtccatgacgaggagcggccgcagctggtcaccagacgccgtgacggttgagtcacggtgagcgtgcgccgccgctgcagctgtggcagtcaagatgaaggcgga

SEQ ID NO: 85280 - DNA, 501 bp, Zea mays
  Clone ID: MRT4577_177786C.1
aaaagaacaaaaatcatggccaaaaggggggtcccaacaatttttcacaaaatacaaaaggggaacccacagcagcagcccccaatggggggggcccctacaggggtttcccaaaaaaacccaacccttaagcccccgcgaactaatttttaaccgggttctcaaaaataatcgcccccggcacccttgtaatttggaccctttgggccgactttctaaaaagccttttaaaaaacagccaaatcctcacgggcctttgaaaactaaccctttttcatacccttaccgacgtaccaatgaaaaaacccccccttggggtacaaaaaggggaacttgggaacgatgcgcgaaaacacctcaaaaacgggaggggtgttggtgataaaacacacgggacgctggacctttgccagggcgcctccagggacaaaaaaaggggggtgggaattgatgcccacttgaatccggggggggaccagtccacaaaatggacagtttttt

SEQ ID NO: 85281 - DNA, 270 bp, Zea mays
  Clone ID: MRT4577_177787C.1
gagataattgctgtctcccaatgacacagagtcaagtgatggaagtacactaagagatcagatcgcactacagatgtgggctgcctacaatagttgattagcttatgtttaaatacaataaggcactgcagatgtggagtttttgctatgtctagttttctaccatgcttgttaattcgggaacaatattgtaatgtcgttgctgccattgtaatgttgtaatgcaactatttgtcttatctacttatgcaattgtgttgggatttattc

SEQ ID NO: 85282 - DNA, 1356 bp, Zea mays
  Clone ID: MRT4577_177788C.1
gccggccgggccaggcctgctcctgctccatgtgtaccacgagaagaactcctaattcaactcgatcacacgacgagttgagatttttcgagatctcgatcgaacggatctcagaataaaaatggagagacctcgttagttaatttgacttcctgtgccgcttcatcgcggtttctaactatttattaggacgagcagaggatccatcaactcagctttgcagagaagcagccaagcaagagcctttccgagtgtgtggaggaggagcagcagcaggaagaaagggtagtgccactccatactccagatcgagttcacaagctagtgttttccatggcaaagctcttcggaaaggtggcgatcgtcacgggcgccgccagcaaactgggcgaagccatcgccaggaagttcgtcgacaacggcgccaaggtcatcctcgccgacatcaaccgccactcctgcgagaacatagtagcggctctcaacaagaccaaccatggccccgcggtggctcacgcgatgcgcatcgacgtcagcgaacccgacagtatcctcgccaccgtcgaggaggcgaagaaggtctacaagcaagacgtcgacatcttctacaacaacgcgggggtcagcaacgtctcctcgcccggcctcctccatcgacatgatgagcttcaggaacaccatggccgtcaacgtcgagtccgtcatagccagcatcaaccacgccggcgccgtgatgcgcagcaacaagatcggcggcgggtgcatcctgtgcacgggcagtcccgtgggctcgctcggcgacgtggtgccctcggcgtacagcatctccaaggccgcggtcgtgggcgtcgtgcgcgccgccgcggccgagctggggggacacggcgtcagggtcaatgccatctcgccgtacggcgtcgccgccaggtttgataagggcgtgctcaggcacatcttccctcacgcgactgaccagcagctggatactatgatcagcagctacgggaactacacggtgaccgaggacgacgtggccaacgcggcggtgtacctggcgtccgacgctggcaagaacgtcaatggccaaaacatcgtcctcaatggcaagttcggtctttagaagtgtggccgccaacttcagacacccccatgcacactggtgggcgacttccattcatgccccgttgtttcctgaataaattgtgtggctgtcggtgagccacatacgtgtgttttcatttctctttttatttgcgaaatttcgatgtttcaaagtttggcaacaagatgtacttcaaatccatctgtcctcccatttaattctcataatgaataaaatcgtcgtctttacaaaaa

SEQ ID NO: 85283 - DNA, 1797 bp, Zea mays
  Clone ID: MRT4577_17778C.1
atggagcatattgctggtgcttccaaaatctcgatggcggaagtgatgccgccaaattccaccaacttcacttcaaggttgctgaatcctatgacgtctgacgatcaacctactatccagcgagataacagtgaagatgcaattgtacctgaagttggaatggcattcaaatcagaggcagatgcatatgagatgtacaactcttatgctaggaagatcggttttagtattagaaaaagcaatgcaagacgaagagttgatggaactatctatcagaaacatatagtttgcagcaaggaaggagaaaaagttagaggatccagctttttttacgccatacaattagatgaagaagatggtcggatagctaatttcatctgggcagatggtcaagctatcatggattacgcatgctttggtgacgccgtgtcatttgacaccacattatttcaaacaaataagtttgaaatgccctttgctccgctccttgggactaaccaccataagcggacaattatttttggggctgtactcttatataatgaaacaattgaatcatttatctggctatttaatacatttctagcagctatgtcaggcaagcatcctagcacaatcttcactgatcaatgtgcggccatgtcagcagcaattagaattgttttaccaaatacaaggcatcgcctttgtttgtggcacatttatcaaaatgctgcaaaacatcttagtcaagtaatgaaggaccatcctaagtttcttgctgattttaagaaatgtgtttatgaagagagttctatggcatcctttgataagatgtggactgatttgttggaaacatatgaactgaaggacaactcgtggttaagcaacctatatgagttgagggcgcactgggctgcagtctttcgtgattcttttactgctgatatgaccacaacccaaaggagcgagggtatgaacaatgtttttaagaaacggttccgtagaaaactttgtctttcggaactccttgaagaatgtgagaattgtgtcaaacatctccgcgagaatgagttggatgatgaccataagtcacgatattctagtcctattacttatatcccaggtttaccaatgctgaaaactgcagctgagtcatatacaaggaatatatattctgattttgaggaggaatttaaaaagcaattttttgtgtcttgcaaattgttacagtcagagggaacaatcatgacttaccaggtgatcccaatgaaatttcaagatgaagcattagttgtcttcaactctgaggacatgacaataatgtgctcttgcagaaaatacgaatgcataggtttattgtgcaagcatgctctaagagttcttaatatcaatgaagttttcattttgccaactcattgtatactaaacagatggacaaaatatgcaaaaagagatttttattatgagaagaaaccaattaacgaggatgaaactttgaaaacacgggctgctcgtatctctcgtaaagcaacctctgttgcattgaagtgctcaggttcaaaaaaacttcttgatgatttggagaaagctatatccaagttggacttggaagcagacaatgcattaagccaacgacctgctaaatctagaggggtttctcaaagttcgaatgctaatggtagcgacatattaaaaggtaaagtgtcaattagagtccctgaggtgataaaaggaggagttcaacaagatgcaatagacaatataaaagatgcagagattcaagagttcacaatgagacagggactgctgctttga

SEQ ID NO: 85284 - DNA, 1308 bp, Zea mays
  unsure (1)..(1308): unsure at all n locations
  Clone ID: MRT4577_177790C.1
ttcatgtagtacacgaagaagaactcctaattcaaactcgatcacgacgagttgagatttctcgagatctcgatcgaacggatctcagaataaaanatgagacctcgttagttaatttgacttcctgtngcgcttcattcgncgnggtttttttttttttttttctcccccccctttttttttttttaaaaaaagagaagcagccaagcaagagcctttccgagtgtgtggagcagcagcagcagcagccgtaaggctcttcggaaaggtggcgatcgtcacgggcgccgccagcaaactgggcgaggccatcgcgaggaagttcgtcgacaacggcgccaaggtcatcctcgccgacatcaaccgccactcctgcgagaacatagtagcggctctcaacaagaccaaccatggccccgcggtggctcacgcgatgcgcatcgacgtcagcgaacccgacagtatcttggccaccgaggagccggcaaagaggggagagcaaagtaagcttcacatattttccatggcaaagctcttcggaaaggtggcgatcgtcacgggcgccgccagcaaactgggcgaggccatcgccaggaagttcgtcgacaacggcgccaaggtcatcctcgccgacatcaaccgccactcctgcgagaacatagtagcggctctcaacaagatgtgcacgggcagccccgtgggctcgctcggcgacgtggtgccctcggcgtacagcatctccaaggccgcggtcgtgggcgtcgtgcgcgccgccgcggccgagctggggggacacggcgtgagggtcaatgccatctcgccgtacggcgtcgccgccaggtttgacaagggcgtgctgaggcacatcttccctcacgcgactgaccagcagctggatactatgatcagcagctacggcacctacacggtgaccgaggacgacgtggccaacgcggcggtgtacctggcgtccgacgctggcaagaacatcaatggccaaaacatcgtcctcaatggcaagttcggtctttagaagtgtggccgccaacggttctgttggggctcattagcggcaacttcacacaccctgggcgacttccattcatgccccgttgtttcctgaataaatagtgtggctgtcagtgagccacgtaacgtgtgtttccatttctctttttatttgcgaaatttcgatgtttcaaagtttggcaacaagatgtacttcaaatccatttgtcctcccatttaattctcataatgaataaaatcgtcgtctttacagtcgtacgtgtgttttcatttctcttt

SEQ ID NO: 85285 - DNA, 390 bp, Zea mays
  Clone ID: MRT4577_177791C.1
gtcgaggggccgcgtcacgacgtcaaagttcgaggccgcctgcggcgggcccgtgcgcgatggctcttgcagctgcagcttcctccaacgcaaatatcatggagcatcatccatagcaccatctccttggccgtgacgcccgtgatcgtcctgatctgtgccgtgtcttcccgaccgcagacacctcggcgccgtacatgacatgcctgccgggcttgcagaactattcgtcaacgttgcggggctgccctgagcacacaagagctctctctccgacggtaacgcactcgattatgtcacgcagccggagcaggcagctgggacatgcacgtctcctgcaggagccgcattttcgcctggcccgccgtatcacccaccttgacctccgcc

SEQ ID NO: 85286 - DNA, 450 bp, Zea mays
  Clone ID: MRT4577_177792C.1
tctccgattaatttcactcgttccttattccaacaaaacttcgcaatggccgatcgcctcgtgggtctcagcatgctcgtcgcagcgactgccgtcttcgtctactacaccgtctggacactgttcatgccctttgttgatgatgaccacatccttcactctctcttcctccctcgcgtctgggctatccgcatccccgtcatcctccttattctcggtaccaccgtcgttggcagtttcgtctcggtagtaatgatcaagagcaatcgcaagaaggcactcaaggcccagcaaaagaaggcatcataaacaaaagctagtcctagatatggacttggctctggagtaatggggtgaaacccatcacccgtaaaaggggtctcagtgtaacactacagggtcgttactggaattgacagatgatagtataatattgacttttagtcgttg

SEQ ID NO: 85287 - DNA, 830 bp, Zea mays
  unsure (1)..(830): unsure at all n locations
  Clone ID: MRT4577_177793C.1
agtccattctaccactgcattttttgtgttgttaaaagtgaaaaataagaggtagacaacatgcgagttcaattcagctggcaaaagttctatagtacatatcaaaagagggaaatgaaaatatctacggtgtatctgtgtcaagtacttatgctcggtgccttgattagaccctatgtcaagatcctacttgacacaggtcagctccaatgttaaagcccacgcgaacagtttttttaagctaagctgtttttaaaaaatattatttgatgaaacagttttactaacagcttcatgcatatggttatgagagaaaactaagcaaaagatatgtgaaaaactatttttcagtttcatctccctttgtttatttgtgagagcatgaaaaagaaacttcacctgtaaagctattctagaaaaaagatgtttgacaaaataaaacagtacacagtagtttactaagatactatgcttgacaaaagaaaacagtacacagtagtttactaagatactagttacctagattttgcttaaatgagatgtttattcaaatttcaaacacgattatatttttttattttcaaattattagtacatgtatatatttataatatctctcctttatatgacacaaacatacatgagnttgttgtgatggaagccaaacacttcatactaaacgagtaggattcgaatcctgcacaacctattttgtagagatttattcaaacacgattatatcctattttgtagagatttattcaaacacgattatatttttattttcaaattctcagtttatttacaataccntctcctttatataacat

SEQ ID NO: 85288 - DNA, 265 bp, Zea mays
  Clone ID: MRT4577_177794C.1
aaaaaaaaaaaacaaaaacaaaaaaaattaaaaaaaaaaaataaaaaaaaaaaaaaaaagagaaaagggcaaaaacgtgaggaaatcaaatcaaaataaacacatacctccgaaattggttcaccgttatcatgcacccaaattttaatccccttgctttccacttgatagacctcttcttgggaaacctaaattcattctccagttccaatagtttacaaaaatattcctctttaaaaccctggcctaatccactttaatcccc

SEQ ID NO: 85289 - DNA, 1922 bp, Zea mays
  Clone ID: MRT4577_177795C.1
cattgggtacctcgagaccggccgggaacaccgaagcagccgagaaccggaccccgcaaggccgcaacagcaagggcagcactgccgaaaccgcaggccgcagcactcgagagcgcagccaggcggcggcgctccgcctccgactccacaccaggccgctgcgtccatggacccctccccgcagtcgacgccgcccaccggagacgacccggcagcggcggcggatcccgacctaccgaggctcacggtgacgcaggtggagcagatgaaggtggaggccagggttggcgacatctaccgctccctcttcggggccgcgcccaacacgaaatccatcatgctagagctgtggcgtgatcagcatatcgagtatctgacgcctgggctgaggcatatgggaccagcctttcatgttctagatgccaatcgcccttggctatgctactggatggttcatccacttgctttgctggatgaagcacttgatgatgatcttgagaatgatatcatagacttcttagctcgatgtcaggataaagatggtggatatagtggtggacctggacagttgcctcacctagctacgacttatgctgctgtaaatacacttgtgacaatagggagcgaaagagcattgtcatcaatcaataggggcaacctgtacaattttatgctgcagatgaaagatgtatcaggtgctttcagaatgcatgatggtggcgaaattgatgtccgtgcttcctacaccgctatatcggttgccagccttgtgaatattcttgattttaaactggcaaaaggtgtaggcgactacatagcaagatgtcaaacttatgaaggtggtattgctggggagccttatgctgaagcacatggtgggtatacattctgtggattggctgctttgatcctgcttaatgaggcagagaaagttgacttgcctagtttgattggctgggtggcttttcgtcaaggagtggaatgcggatttcaaggacgaactaataaattggttgatggttgctactccttttggcagggagctgccattgctttcacacaaaagttaattacgattgttgataagcaattgaagtcctcgtattcctgcaaaaggccatcaggagaggatgcctgcagcaccagttcatatgggtgcaccgcgaaaaagtcttcctctgctgtggactatgcgaagtttggatttgattttatacaacagagcaaccaaattggcccactcttccataacattgccctgcaacaatacatcctactttgttctcaggtgaggtaactttgaatacaatattattttcatatgcagagttttatcactagaatgtgaaattctgcaatgccgtcttattatagttgttaccaccctctatcccgaaattataagttgttttagcttttctaggttacataacttttgatatgcacctagatatacaatgtctacatacatagcaaaagttatgtgccgaaaaatgccgaaacaacctataaattggaacggaaggagtatttattgagaaaatgagatctcagataagttaagattacaatcgcttctgtaactcaggtactagagggaggcaatacgcataagcctggaaagaacagttatcatcattcgtgctgataatgcaatcggggcctcgcagagccaattgtcattaggttcactgataaggtcactcttctgataagatctcataggctgtatggtacttatctgggacaacattgtagagtggatggattgcctggataaatctctctgttgtaatggtcgtgtcccgaattatgtttgtaatggtcgtgtcccgaattatgttactggtgttcattattagttaaaatgcaacagaagtgtaggtctagatctggcttagtgatctgtggatgctaaaacc

SEQ ID NO: 85290 - DNA, 606 bp, Zea mays
  Clone ID: MRT4577_177796C.1
gccggccggtccggggaccatcatacatacatatacacagttattaaccgagaacaatctctctctgctgtttgttttccccctccctccacacacaccaggttggcaagagggcgaggagcaaggaagcggactacgcggtggagagcatcggcgcgctccggcgggccatcccggagatctggggcgaggccgctgaacgctcctccgacaagctgccggtgccggccgtgagcgtggtgaggtcgacgacgtccgacctggactccatcatcatccagcccacgtccatccacgcctaatatataacctcatcgtccctagctccccacccccaatcagaatcagcgggtgcgtgcgtgcgtgtgtgaatatgtatcgatctctctctgcctgcctgcctgactgtcaggcgtgtacatttctgatcagcaccaccggccggcggccgtcggtgcgcgcgtgcatgtaaagcaggcaccaccaccagcagcccaagccaggtgcgtgcatgacgagtcatgcaatgtgttgtacgtattttacatgatgataagaataacaaatcgtgtttaggtgaaaaaaaaaaaaaaaaaaggggcctac

SEQ ID NO: 85291 - DNA, 744 bp, Zea mays
  unsure (1)..(744): unsure at all n locations
  Clone ID: MRT4577_177797C.1
gaacgctcattcaagatgcttgattgtcccaaggattcgaacgccactcctcttcctcacccacataacgggtcatgcaagatagctgcatagctgacgcctcctcttcatacgccatnccccgtccgcgtgagtgatctgcactgactcttacgtgaaatcatcgcgtgcatgtcccatctgaaatactgaaacacatgatactatgcctgactagtatgcaagtagaaatcgtgcatggatactcacgcgtaggctcatgtgcccgcgggcccagaaccatgagctgtgcattcgacctacatgtgcccagacattgagggtgtgttgggtgacatgtacctgctgctgattgaggtgtgcatgaacgacaccctcacaatctacaaaaccggcctcgatgatgtagagaaataatgaaatggcattaacctcctcctaataagtgatgctgacaacacacgtattgtgatcgctgacatcatctctcatctaaacgaacaccctcgcctagaccctaagctcatgtaattgtgaaaagtaccgacctcaccgacagttagagctgtattcgtatgatcagctgatgatcctatcagacaagatatttactcagaaatccaacgtccctgatctgaccgctgaggctattgagaagatcttgacccacaacagcaagggggtcaactaccagatcctttccaacccgtagttccttgcagagaggactgctattgaggacct

SEQ ID NO: 85292 - DNA, 681 bp, Zea mays
  Clone ID: MRT4577_177798C.1
actttatcgtcgccgggctgcgcgccgccggctgcaacccacgccggacgctgttccttgacgacagcgagaggaacatcgccgcggggaaagcgctcggcctccgcaccgccctggttgagtcagttcccccgatttcgtcggacaagtacatgcctgacgagtgtatgccggacggactcaaccctacaaccaaacaggttggcaagagggcgaggagcaaggaagcggactacgcgctggagagcatcggcgcgctacggcgggccatcccggagatctggggcgaggccgctgaacgctcctcggaccgcagcagcatcgacaagctgccggtgccggccgtgagcgtggtgaggtcgacgacgtccgacctggactccatcatcatccagcccacgtccatccacgcctaatatataacctcatcgtccctagctccccacccccaatcagaatcagcgggtgcgtgcgtgcgtgtgtgaatatgtatctctctctctctgcctgcctcacaggcgtgtacatttctgatcagcaccagctgcaccaccgtaccggccggcggccgtcggtgcgcgcgtgcatgtaaagcaggcaccaccagcatgcgtgcatgacgagtcatgcaatgtgttgtacgtattttacatgataagaataacaaatcgtgtttagctg

SEQ ID NO: 85293 - DNA, 1743 bp, Zea mays
  unsure (1)..(1743): unsure at all n locations
  Clone ID: MRT4577_177799C.1
ttccccacgtgccgaagcacctcctggcgtcctccactcggctccttgaaatgtagccgcacgccagcacgggagcatggcccccataggcgcgccccccttccccctggcttcccttgcgcagtggccgaagcatccagggactgcgcctcccattgggtacctcgaggccggccgggctccgactcacatccacgcggttcggttccagtttcacttccagcggcgtctgggcaacctgccctgcgccaccccgcttccacgtgctcccacccaggctctcccgctgcttcaggcacgcacgttgctggataggtttgccgcgcgcgcttgcttgccccgtggtccacccggccggcggcacccgcgcctcgcccgacgctctatttaaacgccgcgcctcccccgccggcccgcgccgatctctctctctctcgttctgctcacatcgacgcggttcggttccagtttcactcccactgccgtctcggcaacctcccctgttccacgcttcgtcctcgcctgccaggctgccatggccgcgacgtcccccttcgactgcgtcctcctagacctcgacgacaccctgtacccgggcgacaccggcatcggcgcggccctgaggcgcaacatcgacgagttcctccaggccaagctcggcgtgtcggccgacgaggccgccgccacgcgcgccgagctcttccgcgcgcacggcagctccctcgccgggctcatcgcgctcggctacgacgtgcacccggacgagtaccacagctacgtgcacggcaggctaccgtacgacaggatcgcgcgcgacccgcagctggcgcggctgctgcagagcatcccgcagcgcaaagtgctgttcaccaactcggaccgcgcgcacatggagcgggcgctggagcggctgggcgtggacgaggccgccttcgacgccgtcgtgtgcttcgagaccatgaacccgcacctgttcggcgacgacggtggcgaccggcgcccggccgtggtgctcaaaccggcggtggacgcaatcgtcgccgggctgcgcgccgctggctccaacccacgccggacgctgttcctggacgacagcgagaggaacatcgccgcggggaaagcgctcggcctccgcaccgccctggttggcaagagggcgaggagcaaggaagcggactacgcggtggagagcatcggcgcgctccggcgggccatcccggagatctggggcgaggccgctgaacgctcctccgacaagctgccggtgccggccgtgagcgtggtgaggtcgacgacgtccgacctggactccatcatcatccagcccacgtccatccacgcctaatatataacctcatcgtccctagctccccacccccaatcagaatcagcgggtgcgtgcgtgcgtgtgtgaatatctctctctctctctctctctctctctctctctctctgcctgcctgcctcacaggctgaaaggcgtgtacatttctgatcagcaccaccggtcgcccgtcggtgcgcgcgtgcatgtaaagcaggcaccaccagctgcagcccaagtgcgtgcatgagcatgacgagtcatgcaatgtgttgtacgtattttacatgatgataagaataacaaaccgtgtttagctgcagagacccgagcagcggttttaaacaaaaaaaaaaaaaaaaaaaaaaatnnnnnnnntttttttnaaaaaaaattaaactannnnnnnagggcggaaa

SEQ ID NO: 85294 - DNA, 102 bp, Zea mays
  Clone ID: MRT4577_17779C.1
tgatgtctgaaaattcaggcaattacagattctcacactagattatcaggttgtaatccaattgggacattttcctgtggtgttggggaatttctaaagact

SEQ ID NO: 85295 - DNA, 565 bp, Zea mays
  Clone ID: MRT4577_1777C.1
atccgcggccgccggcgatggagaagggctagggcctcgcccgccgctgggcagtggagctccacgacgcatcttcctcctcatcctcgcctgccttccccgatcctcccggcttcaccagatctgccccggaagcggatgacgccgccagcgcgcggcagcgcaaggagaccgaagccgcctggaaggggcagaaggcctgggaggtggcgcaggcgcccttcaagaacctgatgatgatgggttttatgatgtggatggccgggagcacagtccacctgttcagcattggcatcgtcttctctgctctctggcagcccttcaacgcactccgatctgtcgggaaagtttttgaaccatttaaggacccaagggtggatacacttgcacctaagttgctcttcactgctctcaacttggccgctatgggtttgggtgtttggaagctcaatacattgggtcttcttccaacaaatgcatcagactgggtatcttcactgtctcctgctcgggaggttgaatatgctggtggagggatccccttgatgtaatttcccttatgatc

SEQ ID NO: 85296 - DNA, 1331 bp, Zea mays
  Clone ID: MRT4577_177800C.1
ctcccactgccgtctcggcaacctcccctgttccacgcttcgtcctcgcgttcccaaccaagctctcccgcctgccatggccgcgacctcccccttcgactgcgtcctcctaggtgagcgtcgaccgccagctcgcatgcagtttagtcgccgctgtcgatggttttacaatatgtaactcgtgcggtttttttttattttattttgcccgtggcccgccggcgcagacctcgacgacaccctgtacccgggcgacacgggcatcggcgcggccctgaggcgcaacatcgacgagttcctccaggccaagctcggcgtgtcggccgacgaggccgccgccacgcgcgccgagctcttccgcgcgcacggcagctccctcgccgggctcatcgcgctcggctacgacgtgcacccggacgagtaccacagctacgtgcacggcaggctaccgtacgacaggatcgcgcgcgacccgcagctggcgcgcctgctgcagagcatcccgcagcgcaaagtgctgttcaccaactcggaccgcgcgcacatggagcgggcgctggagcggctgggcgtggacgaggccgccttacgaacgaccgtgtgtgcttcgagaccatgaacccgcacctgttcggcgtcggcggtggcgaccggcgcccggccgtggtgctcaaaccggcggtggacgcaatcgtcgccgggctgcgcgccgccggctccaacccacgccggacgctgttcctggacgacagcgagaggaacatcgccgcggggaaagcgctcggcctccgcaccgccctggttggcaagagggcgaggagcaaggaagcggactacgcgctggagagcatcggccgccgctccggcgggccatcccggagatctggggcgaggccgctgaacgctcctccgacaagctgccggttgccggccgtgagcgttggtgaggtcgacgacgtccgacctggactccatcatcatccagcccacgtccatccacgcctaatatataacctcatcgtccctagctccccaacccccaatcagaatcagcgggtgcgtgcgtgcgtgtgtgaatatgtatcgtatctctctcgctgctgctgatctcaggctgtacattctgatcgacaccaccgtgtacatttctgatcacaggccagccggccggccgtcggtgcgcgcgtgcatgtaaagcaggcaccaccaccagcagcccaagccaggtgcgtgcatgacgagtcatgcaatgtgttgtacgtattttacatgatgataagaataacaaatcgtgtttaggtgagacccaaaaaaaaaaaaaaaaaaaaaaa

SEQ ID NO: 85297 - DNA, 450 bp, Zea mays
  Clone ID: MRT4577_177801C.1
caaagcttttttttttttttttttttttttttttgttattttttttttttttttttttaaatgtttattttcatcacactggcgggcgttactatgggatcccggccggccaccaagcggggggaaaacaggaacacaaaggggggcggagggaaagagaaagccgctcacaaggccacacagatacccagccgaaagcacaaacaggaaacccgggggagccaaaagagggaacaaacgcacaaaaaaaggggggcccaaacagaaaaaaatccaggcgggaaacccgacgggccaacccaaaaaaaaaaaaggccaacccccggagagaggcagctaaaaaaaaggacccacagccccctacaggaaaaatgactctctcccctcggggggaaaggcccggcaagccctatcagcccacccaaaggcgggaatacgggtacccacaaa

SEQ ID NO: 85298 - DNA, 242 bp, Zea mays
  Clone ID: MRT4577_177802C.1
gccaggcaaatatacaatgcaaagcctattagattggctgaacaatcatacggtcccgtgttaagcagtcaacccactagcactcgtggttgacgctgggagctggagtactttgccaaatccaacttggtcgtagatagcaccgagttcagttgatttatggcaaatctattcaaacagatgccatggcatcttgttgctgttgtactgcaataatactgctacaatataccggttacatc

SEQ ID NO: 85299 - DNA, 547 bp, Zea mays
  Clone ID: MRT4577_177803C.1
tggacgcctgcggtaccggtccggaattcccgggtcgacccacgcgtccggcggacggaacgcagacctggggttgggtctgttgcagtgtccgccggagcggtttgggaagtgcacagggcaaagatggcggcggaggagcaggaggcgttgagggagttcatggcggtgacgggcactgaggaggaaagggctcgtttcgtcctggagacggctggctgggacctgcaggtagcgccgcgaggtgggccgcttcgggcaggctggggaatgcggagtgcagcgtccgctccccgattcctacacggccgaagcgcacagttatccgtgcggggctgggccctgcctggcccaggcctcatggtgtctggggtcgcttgccacgcgtctccggcctggcttggaagttcatggacgcgggcgggcccggcctgcttttcagggcctccgttttccggcgggctcgcagtgttagcgagactttgggcgctgcggcagtctgcgtggagtgcgtcgctggggacgtggctgccgcggcgagtgcttg

SEQ ID NO: 85300 - DNA, 534 bp, Zea mays
  unsure (1)..(534): unsure at all n locations
  Clone ID: MRT4577_177804C.1
aaaaaaaaaatntttattttttcgctcaangcagcccagtttggtntttaacctgttcattttacagcttgttgtttccccaattccaggcccccattgtcgtttcaacatgtaactaacttttgctgttccaactttttcccctccnnctttgngggccccanangagcaaaaggaaagaaaaaatgccttgggtgacactttttttgttcctttgttctccaacagactgttctgcnnttcacccttgtaaccgggtgctgttctttgccgaatgtcgngacccacagttgcttgtcgaacgttcccttcttttaactgttccactagggagtaaagcttccttgttccctgtgacaattccccctttgttgaattccccgtttgtttcctttgcnnttttttgaactttgtcngctttgagttttttaactttgtttccatttcgagcttttttgccantgattgctttcctgntgcatgattttttcccnntnccnttnggaatgccncttttttcggcaaggagttttt

SEQ ID NO: 85301 - DNA, 2568 bp, Zea mays
  Clone ID: MRT4577_177805C.1
ctagtgaaagaaatggtgatggatcaacgtgctcggccttctgatagaactaaaactccagaggaaatagcacaagaagagaaagaacgtcttgagaagctggaggaggagcgccaaaaaagaatgcttggaactgctgatacgtctgatgaggacgatggcaacgaaaatgataaccacatgaagctaggaaactcaaaacctatatctggtgatgatcttggtgattccttctctttggatgagtcaacagtaaagaaaaagggctgggttgatgaaatttacgaaagggaaggtagaaagattggtgatgatgcagcagcatccgatgatggagaaagcaatgatgacgaaatgctggtgatgatggggctgatgatgaggattctgaagaggactccagtgacaatgactttggtaatatgtctgctagagattgggagcaaagtgatgatgatgaggtcgatgtaggagacgatgaaatggaggatttcaaagagaaggggcaagagatcaatgacaaagtggtgaataaagatgcacacaatttgaaaggagaatctaatgtgaaaccacaagtcaaggatggcagtattccttttgttattgatgcaccaaatgacctgaaagatctatcttctttgttagatggtcgttcagaagccgaaataattgagattattagtcgaatacgtgcttgcaattcaataaggcttgcagctgaaaaccgaaggaaaatgcaagttttctatggtgttcttctgcagtactttgcagttttagctacccaaagtccagtgaagttcagaataattgacatacttgttaagcctttaattgagatgagtggagaaactccatattttgctgccatctgtgcaagagagcgacttattcatacacgtacccgtctatgcgaagacattaaggttccagggaagagcagctggccaaatttgaagacattacttctgctgagattatggtctcttatttttccctgctccgacttccgccatgttgttacaactccattgcttctacttatgtgcgaatatctgatgcggtgccctatacaatctggtcgagatgttgctgttggttctttcttgagttcaatggtgcttgtggttactaaagaatctaaaaagttctgccctgaagcaattggtttcctgcaatctcttttggtaacatcacttaaaggaaaagtggaaactcatctgcacaatcagattaacgatcaatttatggagctcaagactttaaaactgtggctcagtatccatgaccatgtgcatgaggtgaatccagtgaatatcctagaaatagttggcatggatcctgacgccccttatttctcatctgataacgttaaggctggtgtacttttatctgtggcagaatgtttaagaggttttgttattatacatgaagggctatcttctttcccggaaatcttccttccaatatcctctttgctgcaagaaattttggatagatctgagttgcctggatcgttacaagacattttccatgaagtcattgacttgatcaaaaagagaagtgatgaacactatgcttcaagggagcccctccgaatgcggaagaagaagcccgaaccaattaagcaattgaatccaaaatttgaagagaactacatcaagggtcttgattatgatcctgatcgagaaagggcacaaatgaagaagctgcggaagcgtgtcaagagtgagatgaagggggcgaagcgtgagctgcaaaaggataattatttcctgtctgctgtgaaggagaaagagaggaggaagcgagatgaagagagagctgagatgtatggaaaagccatggcgttccttcaagaacaggaaagtgctttcaaatctggacagctggggaaaggaaagggtaggaaaaggatgcggtgatactctattgcaggggggcagctcggccagtgtaaatatacgggattgtgtttgctcaccctcttcccgcggtactggagggtggatccagctgattactgtatcgtgagctgctcagagtttgtcgtgcctacaagagcagggtgggcctagtcttatggaacatctccacctgcttactcctaaagctttgcctataaaattgtaacgccacaaacactttacaaggcttctccttggtgaactaccacacctgggaaatgctttatttcttttgtaccgtggagtggcttgcatctatgttatatactggtgccatagtaattttcagaagcacagtgaagagtttttattattttcatttttgttgtactctgacatgtgagccctataagtatggcaattttggcacggttttgcagtagaaaaataaatactattactgttctatgctaaaaaaaaaaaaaaaaaaaaaaaaaaaaaaaaaaaaaaaaaaaaaaaaaaaaaaataaaaatataaaaaagaattaaaaaaaaaaaaaaaaaaaaactgtgggggggccccccatttttggacctccctaacccggaatttatttcggacccggtccctgaagggttcccacttttccttttaggg

SEQ ID NO: 85302 - DNA, 389 bp, Zea mays
  Clone ID: MRT4577_177806C.1
ctcacgcatagaatggtaaagagacggaaaaatttgctcaaaccctagctggcgaactcgatggcgaaccctcacgtgaccttcgacatgaccgtcggcggcgccatcgcggaccagatcgtcacggacctggacgccaacaacgtgcccaagaccggggcgaacttcaccgcgctgagcaccggcgacaagggcgtgagcgagttccagtagacggtctactacaaggactgcaccttccaccacgtcatgcgcgagtgcatgtactacggccgcgactacaccaccggcaacggaaccatctgcgagtacatgtaccgcgagaagatgctcgaccagaagtacatgcgcaagcacacggtctccatggtgctctccatggccaacac

SEQ ID NO: 85303 - DNA, 539 bp, Zea mays
  Clone ID: MRT4577_177807C.1
gatgaaataaagtggatatgcatgtgacggaatagatccagcagatacactaaaattaaatggaaattggataggggtgagaatcacagttaagttgtaccttcacaaccatcactgatggtatatggatttccttggaaaccatctaagcatttgcatctgtatccaatataaccatcctttgaattgactcctaaacatttgctgtttgaactgacacatgcatattgtgatttatttttcagggcctcgtcgcatgtaagattggcagctgcccagtgcattgagaccactgattccccaagacccataaagagatcgggttcacctggtacatatatcccaagctgatcatcttcgaaatgtgaggtaaacctgatgcccacgagactctctgcaacatttataaacgccacaacacggtcgtcatcgaattggagcatagacgctgtcgcatttctgcagttgagtttaaatagcttccttgcagagcaaccttcctctaaaccaaagggatatggaacactgatattaccaca

SEQ ID NO: 85304 - DNA, 339 bp, Zea mays
  Clone ID: MRT4577_177808C.1
ccattttcccactcctcctcttcgctttcatccactatctcaactcactcatgcatgtttcatctaacatggtcgcctagcacttaactcccacttcattccactctactatatccatctattgactacttcactcacacttcaatttttcacttcaaccatacattatcactcttccataatactctatattacacaacccgctgatcttcatacattcattcacaactactatacctttcacaacttccatttcaactaatcccatcactataacactattgactaataccttaaatacccctttaatcatacataccttcctctatattactataa

SEQ ID NO: 85305 - DNA, 322 bp, Zea mays
  Clone ID: MRT4577_177809C.1
acacacattaaatgatcaaaacactaacgttactgatgccagagaggacaggcccgagcctttgagagagtgtcccagctgatattacaacttttcctatgccgtgcaaacttgctaactattgccagaatgagctgagccctacagtgccaacagttacttacctgaatctcctagctaggtttttcttgccgagatcatgtctggattacgctgactcggaacaacagcggcctggcggcaacttaccaggatttttcatgtgcccaatctggccctgagaggctcggccaacagcggaagttaacctgatcatgcccta

SEQ ID NO: 85306 - DNA, 392 bp, Zea mays
  Clone ID: MRT4577_17780C.1
aaacccccatccaaaaaatttattatttcaaaaccctagagtcccaaaaaggcctgcttccaaattaggacttaaaaaggctgccaattcgggaggttaaaaaacccccaccccttggcgaagtttacaggatttgaggcaaaaatgttccaaaaccccaaccctaggagccctggcgggatgggttattaaggaaaaagggcccaagggaaaaccatgtttgggggattcaaaatcttttgggccccccaagagggtaaaccatggatgtagctaaaccagggatcgatctcatcagttcttgggggcataaacccaattgcttggaaatgggggttgaataaattggcaaaacacccattggtcaaggctgctgctaaaaatgggttttt

SEQ ID NO: 85307 - DNA, 936 bp, Zea mays
  Clone ID: MRT4577_177810C.1
ccccgcgtccggcaacggtgagtgaggagtatacctgaagatacagagtttgcttcctttactgatgaagaagaagcaactccatacctgtaccgctcgggtgtaactgctctcacaggtagcaatagatctcatgaatccctcaagggcaaggatatcaggttaactaataattccggtaccagctcatcgttggattctcaacatgaagcaacagtatcctgtatgaaagtgaggaatgaagaagttgaaaagtttccaattcaagtgcaaaagcaaaatggccatccagaaaatctgtctctctcatcagatttgcccagagaacaaagtccgtctcttccaccacacaatgcattcagaagtggtcgtaaaatgtcatttgcatatggtatgactgaatctaaccaaagacagtttggggagagaacttatagcactttaactactgatagagcaaggaatgcgaggttcagtatgagagttccagatgttaatggaagtatcataaataagaaagttgattcccaggatattgcaattactcatgagaataaggccagtgttgatgatggattgcaagtccaggaaccaatacgcatttcaaataatcgaaatgacaacaaagttcgagaactagaacttaaaattgagttgcttgaagcagagctaagggaagctgccgctgctgagataggcctttattcaataattgcagaacatggtagttcagtaaacaaggttcatacaccggcacggaggctctccaggcattttgtgcatgcactaaaaaactgttcaagagacaagatgggaagtgcagcaaggaacacaacctctgggctggttttggttgcaaaagcttgtggatatgacattgcaagggtgagtttctggttgcaaactgtgttgtactgcgagcaatgtactgaaact

SEQ ID NO: 85308 - DNA, 300 bp, Zea mays
  Clone ID: MRT4577_177811C.1
ccgtccgggaccgtaacctagttccatatgcgatcccctacctctgagtatcctgccgtctccgtcgtttcgtctgcgctcctcacctagccagccatgggcaagatcaagatcggtataacggtttccgaaggatcggaaggcgtcgtggccagggtctacctgcaaagcgaggatgtcaagctcgatgccgtcaacgaccccttcatcaccacggattacatgacgtacatgttcaagtacggcaccgtgcacggtcaatggaagcacagcgacatcgtcctgaagactccaagacgc

SEQ ID NO: 85309 - DNA, 316 bp, Zea mays
  Clone ID: MRT4577_177812C.1
ctctttgatagcttgcaataaaaaaaatgagccaccacgagcaattgcaatactcactcttttttttagaaacacaggacccaagtacagtgttgacaggtttgttcttgcaccttctttctcctactaattctagctagaaaaaagtatacctgatacagtgctgagcctaatcatcaagtcacggtttcaaagcatccattctccttatttacagcacaatattagtctctctttatctcttataccctactcatatgccaacccacatcttctcttttatttacatactaaatcttgctagacccttactatt

SEQ ID NO: 85310 - DNA, 111 bp, Zea mays
  Clone ID: MRT4577_177813C.1
atggcgaacacgggcataggcatggcgacaacgcaaaggccccagaagatagctgcctacggcgtgatggcttggcggcggcgtaaccttgttccgataaaacccttttga

SEQ ID NO: 85311 - DNA, 225 bp, Zea mays
  Clone ID: MRT4577_177814C.1
aagacgcaagaacgcatatcaacactgtataggtggaacttcatttacacaggcataaaccgttatttaagtaggagcgtcctataggccctgaggttacaaaccgtcgcgggaagaaatttacgacacctacaagcttataaaatcacgacacatgtaggcattggactcaaacgcctctgaagcacaactccgttggtaacaaaaggttatgcagaaagcaaa

SEQ ID NO: 85312 - DNA, 480 bp, Zea mays
  Clone ID: MRT4577_177815C.1
ctcgaggccttccggggacttgtggggccctttgcaggcctatcttctttcctcccacgcccacgttgaaaggccgcgcctgaatcccacacgaagctcgcgatgcggttccaaccgccaggtcgggaatcccctgtattcgtgtataaatatggacgtcgaaccaaccttgtgtctgtatcatcgccaaactcatgatcccatcgtgcacccggtgattccattgcggcaagagagagaaagaaccgagctcgttggtggcttgcgggttcgttgttggtccggtcatatttggtggacgggggggcatcactggcgcaccacgctgatgtgcgtggcctgccggggggaagaggacctcgtgtctaggaaattcctcgtcggaggaggaactctactgcgagtccgcggtggcgcgtgggaaacaccatcggcgcctcatctccgcagtgaggtcacgtgtcatgtgaagagcaagtt

SEQ ID NO: 85313 - DNA, 656 bp, Zea mays
  Clone ID: MRT4577_177816C.1
cacggggcccggggtcacgggccgtgtgcagcccatgggcaccatcgctgtggtccgaggcgttcttggggcacatcatgttgacgccgcacttacaggagtgggccttgctatcatacccgttggactccctaagaaaccacgactgacaagagatgatttattcaacaaaaatgctgggattggtcgtacactctctgaatgcgtatgaagaagctgccctaatgcaatagagaatctgatcagcaacccagtgaactcaactgtccccattgctggtgaggttttcaagaaagctggaacttatgatcccaagcggctttttggagtaacaacactagatgttgcgagggctaacacatttgatggccaagcgcttggagttgatccaagaaatgttagtgttcctgttgctggagggcgtgctgcgataactatgttgggccttctctgccaggctacaccttcgagatgatttacttaggatggaaccagatattttacacaccggatacagaatggtggcacagaagatgtggaagcgaaagctggatcaagctcctggactctttcaaaggcttttgctgtgtggaaattctctgacacatgcttgcgagctatgcggtgcgaatctggaatcgtgggatgctcatatg

SEQ ID NO: 85314 - DNA, 648 bp, Zea mays
  unsure (1)..(648): unsure at all n locations
  Clone ID: MRT4577_177817C.1
cggccgcgtgggctcgaaaagaagtggnngactaacactagacatcgtaacaaaatcaccaaagttatactgtgataacgaaccgagagtattttacttctataccaacaagtttagtgccgctgccaaacacattgacatgagatagtatgtcgtaaagaagaaactccagcattaaacaatcgaacttgaacatatgtagacagagcaaatgctggaggaatggaggatccgttattccgttcactaaaggttcggtgctggtgagcaagggggtttgaagtgatacaagtcgctgatcgctgtccgggtagtagtcatatcataatcgtcctcatcgtagtcctctccatcgctttcggtgtcctacaaggctgaagagaacagcatgaattcagttcagcatcgcgggttcaatctcagtttctggaaactgttcgtcggttcgtgatcactgtagtagacgttcatctcggaatcacagcgtgttcagagcattctccagcctggttactaaatgaaaaccatgcaggattcatttgagatttattgtgctgtcagttctgcttcaatagtccaatgtgtaggttaaccgntaacctngatagtcctttgattggtagtagttagggcctgtttggttcacta

SEQ ID NO: 85315 - DNA, 276 bp, Zea mays
  Clone ID: MRT4577_177818C.1
gaaaaggatccaggcagcaggcattacacgagggtgatttcatacttatatgtattccattcatatatgaatgcggaaacacaaccgggatgatgtgaggactgccaaaaaaagctattgcaaaacttttcataattgtaccacaaccgagatttacgactggtgcaggaccatgtagaccgattactcctataactgttgaatcaaatttccatggcttatactttgaattaaagtgggagaaaagggagggaggcatcctatttttcacaatac

SEQ ID NO: 85316 - DNA, 720 bp, Zea mays
  unsure (1)..(720): unsure at all n locations
  Clone ID: MRT4577_177819C.1
aattcggcacgaggatcctgtagcaagtgttgtgctcgaggatagggtgctggctccaatccccctaagcctagggttgagatggagtatcctgggcgggtccttgccgtcgatgacgcgcaggtcctaaagctcgaccatgaactaagacacgttgatagtgccgccccctagcgcatctgcgggagttgagacatactccatgtgtgtggtgccaacgacgatgacggaggggctcgcggcgaggccgcaggggaggaagacgacctggccccatgtgcgtcgggagaccgcgaaggggcacttggcggcataggtggcacaagaggcgtcgacggcggcgatgagtagcgcctaggggtcccccgcgaaggtggtgtcctcctcccaagcggtgaggctgagcactcaggcgtcttcgccatgcggtcgagcgcgaagtggttgcgagacaagaggtcggggagggacacacgttcgtagctgtgccagaagaggtggactaggaatagggaggccttggaagtagcgatgatgtcggaggaggagaaggcgaacccgtgtggaggcaggtggtcggaggaggacgacgagtagaaggcggcgacagggtcgcccgcgaccaggtacaacatgcgaaagaacttgtggagaggangaggtaagctgtcgccagcgccaacaccaggtgcgatggctgcacccgctacaccattgcct

SEQ ID NO: 85317 - DNA, 312 bp, Zea mays
  Clone ID: MRT4577_17781C.1
atggagctattgaggacgccgaagaagacaagacacacaagtcgcggcgcaggtgcagcacgtgggaaggcccgcaatacgccaggaggtgtcgaggtgacgatggcgcagaaggagggagccatagacgaagacgacgacacagtcgtagatgaagaagccgatgtcgaggacgatgttgtcaaaccgccgcagacgaggcgtgctccaggcttgccaagcttggaaacacatgataaacgaatgcacatgtcagcgttgctagtaccacacatactaggtagaaggccccaaccaagtgtcagcatctga

SEQ ID NO: 85318 - DNA, 1290 bp, Zea mays
  Clone ID: MRT4577_177820C.1
cctcccccccccttcttggcaattatctctttgctaatgattgtcacttcgtatgcacagaagcaattagtcgcttaggggattctgagagcgtaagtactccactgtcaaactacttatttacatgaatcaaggactacctacgttgatagatgtgcttttcaccgcaatatatgggttgcaattggacacctaatttcagaaagaacaggtcaacaaaaaggagcaaatggatgacctggcaggagagcgcatcactagcatagcggcattcgcttacccaaagagtgtctaatattaaaagttcgatgtaaactaatagaaaaactaccgccgtcctcggagttttctccttttggcaccttttggaggctcagcaacaggtgattcttcctggtcaggctcttccttggtaacaccattgtcattcttgtcatcaggctcagcctctttcacatcatcatcaatagcttttattatataaatcttaaatttgtcatgctcagccaattcaaagaccaatgaatccccttcctccaggttgtggtgcattgcaaagcccctccatccaccacttagaccagttcggtttccaatatagacagcgtcaaattcaagaccctcttcgtcctccaacaccatcctaaattctttggaaggcagattatttttgcagaagcttataggaagaccaagccaaaagcaacttgacacatgtgatcgaaccatggtcttaacaaaagatgggttattagggtccagactgtcttgaagtttctcagcttttctgaaagcacgttgttgctgttcataagatggaattcttccagtgtattctcttccatgttctgtattcctaccaccactgcgccttgtgccacgcagaaaagcatctagttcaccgaaatcgtccttgtaggaaaccgtggtcttcgccctcgaagaacgccgcacctcggtggcgtcgaacttcttcctctccttggggcccgcgcgcacgccggccttgttcagtttctgcaggcgcgccgcctggagcaggctcttagacatctccgctatacccaaatcctccagatgcttgaggttctcgaggacccgcttcttgcgctgctcctcgtaggccgcgccggaggcggctgctctgctcgctttcgccgccatgtcctcgccgctctccccacttccctgcctcctctctctccctccttccctcactcggcgagagagagagtggagcgagagagcgaatgggtgttggaattagacccggccggcctcgaggtaccc

SEQ ID NO: 85319 - DNA, 284 bp, Zea mays
  Clone ID: MRT4577_177821C.1
gggaggggtttttttggggcgctgaaaagctttattacatgttcatggagtcgaaactcgaaacaccggttttaaccagcaaggggagcccccatacaaggtaaataacctttgggccccaaatggggtttttaaaacctaaaaccaagacctttttttggcctaaaaaactccaaggggcccttccccaaattgtattaaccagattgggttttttttacattgaaaaaacaaaccctttggaacctaaaaaatgccccaaaagggttccaaaaatccacctt

SEQ ID NO: 85320 - DNA, 634 bp, Zea mays
  Clone ID: MRT4577_177822C.1
gttgctgtttccattattatagaattgaaagaccacaccggatttatgttaagatcatttatttacaacggaatggtatgcaaagttatcagatcgtaatgaatacaaaataagatttatggctacacaaactgttgaagatagttctagatctggtccaagaagcactactgtagggaagttatttgcaatcatttcttttcttattttttttaatttctttattttatttttttttttttctattttatactttttattatttctttttatttgtcatttttcttttttttttctatatttctttatactctttttttcatctattttttttttttttttctttatcatttttgggtgggggggtgtgcttattttatatttctttctttatctttcttttttttattatattatttttttaattttatttttctttttttttattttcattattatttttatttttttatttatttctttattctctatttccttattcttctatttatttatactaatttattcttattatattttatctttctcttttctttctttacttttatctttttttattttcttatatttcatttatttactattttattttccttttttatttttttatttt

SEQ ID NO: 85321 - DNA, 356 bp, Zea mays
  Clone ID: MRT4577_177823C.1
accggaatggaaggccggatcgaccatgcgtacacaagccacccacatctgtgggacactgtgcatcagcggcgcactggattatggtgctcatggagagcaaacccatgatcgacactcatgtcgcatagataaagacattcctatggaacctctgaacataagcgcgggtgacaaatggtgattaacgatcgtcttgtttggaccataaagccttgtcccgataagaactggaggttgctgatatggtcattcacttgtcaaggatcagaagcacgactttgagtatggtccttgtaccgcatgacagagatacgactttgattcgatcccaggtacgccatttcagaaatccg

SEQ ID NO: 85322 - DNA, 389 bp, Zea mays
  Clone ID: MRT4577_177824C.1
agaaacaggcgacgctgcaacaacgccgaccacattctcgtcgctggcgaccggtagcgccgcggccatgctgctgatgatgttggccacgactgcgactgaggccgctaacacagtgcaatccggcgcagctgacgccgtgctcggcgccggcgctgctctgagagcccgtgcctccgtcttgctgcgcgcagctgccgacgcatcaggggtgactatgctggtacgcgcgcagcccaaactacggtagctacattcgtaggcgcaacgcggcgaggcttttatgcatctgaaacctggacatgtcacgatgtcgtaatacgcggtcaacagtatatatactagctagctcttccaatacaatcatgctcagtcgctggaatatcgta

SEQ ID NO: 85323 - DNA, 708 bp, Zea mays
  unsure (1)..(708): unsure at all n locations
  Clone ID: MRT4577_177825C.1
taattcggcacgagggaggcctcggcgccgcctcccccgccgtggatgcagaacaagtcggccgcggccatcgaggcctcgtcgggcccgctttccgccgcggcctcccgcctctccgcccgctcccgtgcgctcccctcgtcccgcgacttccacttctacaacaacttcccggcattcaaatccccagtcggcgctgcggccgccaaggccgacgcgtccctcggcgtgctcggcggggcttcgattctcccgacgcggcagcagccgttccccgtgggcggcgacctcgacgacgcgcacgactggctcgtcgccctcaacgacgacctgctcgagcggttcggcgcctccaccgacgagttcaagaccctgcggcagaaggaggagacttccgggcggagggcggcgccgcaggctggggacgggttccaagtggtgtgcgggaagaagaaaaagaaggtgggcgatggtggcgaggaacgcgtcggcagagttgaggctttcggaggttttggctctgtgaggatggtcaccaaggacaaggcggccgcgccgggggtgaaggcgaaggtgcccttccacatccgcaccatcccaaggccccaggatgtgtattgtattgtggtggacaactnncagcagccgttcgagcatatcttgcttgatcgcagcgaggatggcactcggggtcgtgcacccattgga

SEQ ID NO: 85324 - DNA, 1128 bp, Zea mays
  Clone ID: MRT4577_177826C.1
cctcgagccggccgggaaaccgtgtgtccgtgtgcgactgcgacgagaagcttccagaacccaccagctaactacgtccgtcctccaccaatcccatcttgggacgccacgacaactccctccctcttccccgtccgtatttatttatacaccccagtctctaccccggcgttccttcttgcttctccatcgagttggattgggttcaaagttgggcttttggacagctgtggtgtgcacggcagctctgtgacttgtgaggaggaagggaggaagaaagcggatccatggcgtcgaagcggatcctcaaggagctcaaggacctgcagaaggatcctcccacctcttgcagcgcaggccctgttgccgaagatatgttctactggcaggcgacgattatggggccatcagatagcccatacgctggtggcgtatttttggtcactattcactttccaccggactacccattcaaaccaccgaaggttgcattcaagacgaaggtttaccacccgaatatcaacagcaacgggagcatctgtcttgatatcttgaaggagcaatggagccctgcactgacagtttctaaggtcctcctctcaatttgttcccttctgacggacccaaaccctgacgatccgttggtcccagagattgctcacttgtacaagactgatcgcgtgaagtacgaatctactgctaggagctggactcagaaatatgcaatgggctgacaagctattggtctctcatagacctaaagcacgtactgccttctgtaactgaaaccagatgtctaaattaatttgtccattcgtgcatcgaacttttgatatataatggaaggagaaacattgatagtacctcggtgttgtctgtggtccaatttaatttaatttaattttggtcttgtgggctgcttgcatggtcgatagttaggttcttcggctgttcctttgcggtcggtgttatctctgacatggagtcaatggtggtgcatgtcttggatgtgtcatcatagtgttaaacttgtcatcttgacaaggtagatatgttttgtcacactgatagttatcgttgattacgttgtcatgtataatatagttgttaaacagtgtagttgtttat

SEQ ID NO: 85325 - DNA, 693 bp, Zea mays
  unsure (1)..(693): unsure at all n locations
  Clone ID: MRT4577_177827C.1
acctctcttgatcaaagatcagagctcaggagctcaggagctcgcagcaatggagccgcatgccgagtccaagcccatcccgctgatgacgccgtacaagatgggctcctcgctcgacctcgcccaccgggtggtgctggcgccgctgacgcggcagcgctcctacggcaacgtgccgcagccgcacgccgccgtctactacggccagcgcgccacgcccggcgggatgctcatcaccgaggccacgggggtctccgacacggcgcaggggtacaccgacaccccgggcgtctggacggcggagcaggcggaggcgtggcgccccgtcgtcgacgccgtgcacgccaagggcgccctcttcttctgccagctctggcacgtcggccgcgtctcgtcctacggcttccagcccggcggcgccgcgcccgtgtccagcacccagaggatggtcggcccgcaggtcaggcacgacggcaccaccgaggagttctcgccgcccaggaggctggcccgtggaggagatccccatgatcgtcgacgacttcaggaaagctgcacggaacgccatcaacgccggcttcgancggcgtggagatccacggcggcaacgggtacctcatcgagcagttcctcaaggacagtgccaacgaccgggacgacggctatggcggcagcctggagaaccggtgccgc

SEQ ID NO: 85326 - DNA, 446 bp, Zea mays
  Clone ID: MRT4577_177828C.1
gggcccggttacaaagaaaatttttagggggggccctggccaaaggggttaggcgatctaaacgggggggctgagagggggggggggggggggggttcccggcgtttttgaagggcacccgacgaacatttggtctgaaaggggggggtggtcaacccccgataataggtggggaataaacaaaggggctcaaggcgaattcttcaaaacagggggttattttgtttggccaccatgttgttgttgggtccccccccccaaagggaaaatttttacagggggcaggtcataaggcgccctttttccttttccccccttaaaacttagccttaaggggaggggccctagccacccccgctttgggaaggggcgggccaattccaggggggggggcaattttggggccaaaaaccacgctggggaagccaatggcaaacccaccctta

SEQ ID NO: 85327 - DNA, 679 bp, Zea mays
  Clone ID: MRT4577_177829C.1
cctcgagccggccgggaaatcctgtcgacgcgagtgaatgagaaacgggcgtattgacccaactcctcatgcgactgatactcccgtgctgtggccatgcctctcctctctcgctcgctctccactctgcgaccatccacactcgcgttcttatggaaacacacgctgtcgatgcggccatgggtgttccctgttggactagatgatgttgcgagagcgcgaccggagtgccattgatcgacaattggaaagcagcatctccgacgaccgtcacatggaactgtcgcaattagaagatgatgaagctcctcctcctcggccgctgctcgatgtatatcggagctatgcacgtgacctacagagccttcttcaacactgccggatcctgagaacgccataagactgcacctaccacaaggacgaaccggatgaccacatctcttcgaacgttggcatacaacatcatcgtcccagcgatcgcacgatcccacaagaagtctcgggtgacaccacgcacctaccgtgggaccatgacaagacactgtcctccgacgaaaccgacgacctgcgaactcgcctcgattgccattcgccaaggaatagcgcccaagagcgaaataatctgcccatgtcatcgatagcggttacaacaacagcgcaaggtgtcacgtggatcgta

SEQ ID NO: 85328 - DNA, 462 bp, Zea mays
  Clone ID: MRT4577_17782C.1
atttcggcacgaggactgcactgtacgctgcctgctgcaacatcgtgagcctactgatgcccgcacgcacgcgtatcttgtatgacgcgctctaccatgacgacgcccttggatgaagcctgcattctgattgccgcctccacctgcataccttgacgacgttgggtgtggacgatctgagaacggacagctcgtcatctagctgattgccaatagctagctaggtgccagaggtgtgcccaatgttacatcgatcaaaccatgctcacacacgacttcaagcgctggacgaggcgaacgctcttagacagtccttcgcatttgggactcccttcgctgacgttcttggactcggccccgcagctatgtaccgacttcagccatcacctggagctctagacatgagcagctgctgcgtccaatacgcagagcgtgaggttcaagctgacctgatacacactc

SEQ ID NO: 85329 - DNA, 302 bp, Zea mays
  Clone ID: MRT4577_177830C.1
acccttccggccgtttgctccgggctgctgttctgcgcctccacaggctttggccttgtgtttaagtttaagcttacctcagccatggtaagagagtcccataacattgggtattggcatgtgcttggaagtaaccccatggcactgtctcaagctggagcatgcagcgtgtgatgagagtcagaggagccgtgaagaacaacgtcttagtccctgggctgacagctaagctgacggagagagatcaccatgatttgtctgggagttggaccaccagtctactgactgcatgagccctgaca

SEQ ID NO: 85330 - DNA, 316 bp, Zea mays
  Clone ID: MRT4577_177831C.1
aaaatctaaaaatgttctttcttatttgggggaagccccaaactttggacaaaaaacttttttttggaacaataccttataaaaaatctaaaagggggccccccccatgagggggtggccggcaaaaccctgctgggtttgaaaaaccaagtgggtttaatggcaccaattgttgcaattgaaaaagggggccccctttaggcccagcgccctggtaaaaccccaaccactgggggtgtatcaaaaaggggggggggctccagacgcgtgggcggacccctgggcggacccctgggcggacccctgggccgacccc

SEQ ID NO: 85331 - DNA, 272 bp, Zea mays
  unsure (1)..(272): unsure at all n locations
  Clone ID: MRT4577_177832C.1
cggcgggtcccgcccgcgcgcccgccttgaagacttcactccaacccagcccgcccggctaaaaccctcccctgttctgacttctgatgttcgtcctnacagccaccaccagcaccaccacgggcaccttactttttcttcgatgccggccactccccttgcctaaaactgtaacacttgccacgcctcctgctttcctccccttctggattcggttccggtttttcggcttcggcttcggcttcggctttggattctccgtcttttcccaa

SEQ ID NO: 85332 - DNA, 370 bp, Zea mays
  Clone ID: MRT4577_177833C.1
aaaaggaccaccattttcaaagccccaacaaaaaaaaaactttttttgaaaggggggaaattcagggaaaagggatggggggcttaaaacaaaccaagattcctttttccccccaaaaaaaaaaaaaccaattggtttcccccaaaaccccaacgagcaattttatgtctgaaaaaaaaaggggacccaaaacatttggggatttaagggaaccattccggaaaacccttccgcccaaaaaaaaaaaaaaaccggatgtaaacatcggggccaaagccaaactataacaacagctttcaaacaagttttgccccaaaaaccccttacccgatttgtaaaaacaaaacccccccaaatggttcaaggggaa

SEQ ID NO: 85333 - DNA, 547 bp, Zea mays
  Clone ID: MRT4577_177834C.1
ataaaaaaaaaaaaaaaaaaaaaaaaaaaaaaaaaaaaaaaaaaaaaaaaaaaaaaaaaaaaaaaaaaaaaaaaaaaaaaaaaaaaaaaaaaaaaaaaaaaaaaaattttttttcctttgcccgtgaaccacttttaaggggaaattttgaaaaatttccttaaaattggcgggccttttaacattgcttttaaagggccaaattccccttttaggaagtctttttaaaattaattggccgtgtttttaaaactttggaattggaaaaaccttgggttttccaaatttaatccctttgaaaaaaatcccctttttgcaagttgggttaatatcaaaaaggccccccccattcccctttccaaaaatttgccaacctttattgggaaatggaccccccttttttcggcttttttaaacccggggggtggggtgtttaccccaaaggggacctttaattttgccaggcccttaacccccgttcttttcttttttttcctttctttttttgccagtttcgccgtttttccccgcaaagttttaaatcggg

SEQ ID NO: 85334 - DNA, 277 bp, Zea mays
  Clone ID: MRT4577_177835C.1
acgacgacagaacccgccgtacgacccattcacccctgtggtaccgtgccggtgcctcggcacgccgacgccgtaacgccatggggaagcgatgcggcggccggaagcttgcgttcttaccagagcctcctaattctcctgcaagcggaatcgctgcgcgcgctgactgcgtgccccctcgaggccggacagtgcgaggaggtctcttgtgctctgctccaccggcgtctcgccgtgcgcgaccacaccgtctgcctcgtcgggaccctcaccgccc

SEQ ID NO: 85335 - DNA, 1058 bp, Zea mays
  Clone ID: MRT4577_177836C.1
gctagtaactcggaatcggctcgagggaatccactggtggtattaattaggtgacgcgagcaattaagcaaagcgtggtagtactcgtactacactgcaaattaaactccggtggatcccagcgtagtaggtgaacgatggacagggcccggccggtcacttacgcgtacactgctcgatccacctcatcggccggctcttgtgctgcacacgaaagcaaagcggccgtcagctgaagaggggcctgaagagggggggcggttcaggtgaaccactcttttgtgtgtatcatccctgacgctgacactggctagagcgcgtcctgtgcaagctactagctagctagtagttggtagacgcggctagtacacaccacatgccaccaatatttgcatgctagtgcaagtcagctagctagctagctagctcacggcggtggccaatactctagacctcaagtactgcgacacgaagcggtagcgctagatagagtacgtgcgaccacttcggaacgtatctgtccgagcggtagaaatctgtagcgtacgtcagcgtcgtctcgctcggagacggagaagtagcgtgtggctattattatactacgtactagatgccatccgtgttcgcgttggccaatcggggcaaggccgttttgctgccatactacatcacgtcgtcatcgccgtcaccaccattcgtgacttgtgtagtataggtagtagtatacccggagcagatgcatttgctcggtcacggaggtacagacaacgggtgtaaaagacagcgataagagcacagtttattttttaactaaaacacgataaataaataaaacccgaggaatactagtttctatcaagtaagcagcttaatcaaatctacgaaacagacgaaggaaaacgcagaggcaacgtacgtattttcttcatctactcgcagcaatatttgttgtctcttaaaacttggtgagggagagggtgacctctgcggtaggtcaaaaaaaaaaaccttacctagatcgatcatcatttaccacacaagaagtaaccatgcatgca

SEQ ID NO: 85336 - DNA, 282 bp, Zea mays
  unsure (1)..(282): unsure at all n locations
  Clone ID: MRT4577_177837C.1
ggaactttgggctgatttatgtgcttggtctgttgnggaacgtattgatgattggntggattggtggttctggacggttgaggcggcggtgaggactgaggctactgcttggagtgtggagtcgaaagtgaaggttgatatggaggacgatgatccttacagtactctctttcaattcgttagtgtggctgcctctcgcggccacccctagactccgggcgtataccgcgtggtgacgcatacgcctgcaataccagctgcctcctaccaccctctcgaaaa

SEQ ID NO: 85337 - DNA, 288 bp, Zea mays
  Clone ID: MRT4577_177838C.1
gcccaaaaggaaaaaaaacggggatgaaaaccccttggggatttattccccccgggaacagggattaggaaaaaatttttttcctaaagggtttgcaggaacccctcagggaaatttttttctcccggggaccgaaaccgtgagcttttttcgggggggaactccccctttccattattttgggggccaaaccccccgggtggtgcaacctccttggaaaggagcttgcctaccccttcgggggggtgtttacttgcctttttcaaatccgggcgggttcttaccacc

SEQ ID NO: 85338 - DNA, 351 bp, Zea mays
  Clone ID: MRT4577_177839C.1
gtacgtaagctcggaattcggctcgaggcatttgcacctctttggatgattccttctcccgttcacctcgcgccgccgccgatctacaccagctgcacaggtcttcgtcgggcgctttccggcgaagagcattctcgcgagggaggggatggggaagacgcaccataaggatcatggggcaaaactgcagaaactgctcaatacagtcactgtgggttctgttgatgagacacatgcactagttgagggcatcagaccaactcgactccatgggagacataggaaatattattactacaaaggccagagctgcgcacatcctatcaagcaaaccactatgagatgtcctct

SEQ ID NO: 85339 - DNA, 1399 bp, Zea mays
  unsure (1)..(1399): unsure at all n locations
  Clone ID: MRT4577_17783C.1
cgaccagagcgcagagagtcagtgatctatgaacgagaagagcgaaaaaatncccaatacgcactatcgcctctccgttgcgcgtttcattaatccatattgcaccggccgctttcacgtttttaaagtgggcagtgggcactgagcccattaacgtgagttatgtgattctctagtcactagccgccttctacgctttatgctttatgcttccgaggttgtgtgtaatggggagcggttagcggtttccctcttggacacagggtacgacctttattcctgctagcgccgcaagtcgcccttatccctcggtaacagagagctggaacttggaggtccgtggggcccaggggcctttttttttttattttttatttttttttttttttttttttttttttttttttttttttttaattatcactagacataaagacgtagataatttggctataatataaataagccttagtttttcttgtgcagttcagtccgacataagcagtaactccacatgaaacattatcattgtggcagcaccagattgtgaggtgcgactttcttttgagattaacctgagcttttttagtagctttacattacatgtcttacagccgcaccacaccgcaccaccgcgtattttacatacaaaagttgtcagcatatacctgcctgacctgtaagctaagaatttcatcgcttcgggtaagttaccttgctatctccctacaaacaaaatcaagtgtgccctagatgctgctgcatctaatatcagaacagtgccacgaagttaaaaaaaagcccagctaactgaatgcagctgagaaacaaaattcaagcctttccatgtcagtcatcaatgtcccacccattgcaaacctgttagtactgactctactgctgaattcggaatcagcagcccaacgattcgctgactgtcatttgttgtgactaaacggacaacccgtattctcttgtgaatgaggcgttcctgcttggccagggccttttctattgtaccccaaactggaagtatgaggccacccaatatattaagctcttgcaaccttcttcctacagtacagtagctcccaattttacatttagatccatgcatacactgcttcgatgaagcatcgtactcttcctgccatcctttactaactttgtctattgatgacaccttcctgtacttgcttttcagttcacttgaaggcatctccctcaatgcttcaccaatagcaggccggattattttgtacattccttcagttgagccttccaaagatagaatgaagtgccttctccccatccattcccttctggactcgtaaaagccatcaatggaggtaccagcaccaaatttctccctttcctcaagcatcgtttttgcagacgn

SEQ ID NO: 85340 - DNA, 380 bp, Zea mays
  Clone ID: MRT4577_177840C.1
gacgtcaatgcgcgcgacgtaagctcggaattcggctcgagcggatctagtttcttccagcatgggtcctttgaaactactgtcgggggtgttaagttcaggtgcggcttctttttctacgacatgaaatgtgcaatggcacttcactgagccggccctgcacatgctatcgggatacttctacatggcctcctagtcgggcctgaccttgatcagggtgggaactgcattctgtaacttgggccatgaaatggctgggatgccaatgacaagacatcggatactcctaccacgactgttttgttgatcaaataaccaggctgctatagcacatgatatgacctgtttatgataactggaagctgttggcgagcgttggt

SEQ ID NO: 85341 - DNA, 758 bp, Zea mays
  Clone ID: MRT4577_177841C.1
ctctgtctggaaagagcgccttgaagctattggcatactcaagcaagaggtggttagtcttacggaacttgataagtctgctgaacttctgattcgtttgttgtgtgctgtgcctggatggagcgaaaagaatgttcaggtacaacaacaagttatagaggtcatcacctatgtcgcctttactgtaatcttatttccaaagcgatgtgtggttctatgccttcttggtgtaagtgaaagggttgctgatattaaaacacggacctatgcaatgaaatgtctcactgccttttgtgaggcagtaggtcctggatttgtgtttgacaggctttacaaaataatgaaggagcacaagaatcccaaggttcttagtgagggtattctttggatggtctctgctgtggaagactttgggatctccaatttaaagctaaatgacatgattgatttttgcaaagacatcggtcttcagtctagtgctgctgtaacaagaaatgctactataaaactaattgggatgctacataagtttgtgggcccagatattaaaggctttttaagtgatgttaaaccagcacttctaagtgccctggatactgaatatgagaaaaatccttttgagggtgctgctgctgctccaaagagaacagttcgagttctggatactgcatcttctgtatctgccggcttgtctgatgggctgccacgggaagacattagttctaagataacacctactttactaaaaaatcttggca

SEQ ID NO: 85342 - DNA, 741 bp, Zea mays
  unsure (1)..(741): unsure at all n locations
  Clone ID: MRT4577_177842C.1
acagcggcggcaggccaggccagcagagcgcagaggaccgccgctcggaaagtgcggagccgtttcccctctagctgctcatgctctctgcttgcctccgtccactcacagcccacgtccacgcctcgcgctcttctccaggctcccaggtgctccccgatcaatcgcttccgctgctagcgcgcgcgcgatccccgaggtcgcgcgcttgatcgcgctcaacgccatgtcgtccgccgcgggcgggtatggcggcggcggcggcgcgggaagcggcgccgagccccacggccacgccgacttcctgctgcaccaccatgcacagcacgtcgccgcgcagcagctctaccacgtgccccagcacagccgccgcgagaagctgcggttcccccaagacgacgcgcccccacacgcctccgcttccgtcccgcnagcagcacggcggggcggtggcctggccgccgcctccggcgttctactcctacgcgtcctcttccacgtcgtcctactccccgcacagccccacggctggcgcaggcaccagctcgtcngtggcgcacggcctcgccccgccgcttctcgtcgcagattcccgacgcagaacttcgcgctctcgctctcctcctcgtcctcgaacccgccgcccccgccccgnnagnccgaggagggctcacgccgcgcccttcgggcccttcaccggctacgcggctgtgctcgggcgctcccgtttctcctccccgc

SEQ ID NO: 85343 - DNA, 237 bp, Zea mays
  Clone ID: MRT4577_177843C.1
gacccactctttctttgaaaaggctcccgacagacttgacctatggggggccaacacctatgggggctcttagggaacggggggaggcctaccttacggactggtctcaatttcttcaattgcacaagcggcatgaagataatggaaaagacgatgtatatatggcaaatgctggggacacagcgatctgctatatacaactttgtgggggggtgaaaggcactcacgaataggtca

SEQ ID NO: 85344 - DNA, 734 bp, Zea mays
  Clone ID: MRT4577_177844C.1
gagagttagatagaaccggcataaaaaatctcctatcctacccacatcgccatcggggcctgcatcaacctccatgccggcgccccgtccactagccctagcctccatgccagccctcgcaccgaccggcgactcacccgtctgcaggctggcctttgcatttgtcacgggcccctgctcccaccggagcctcggtcgctcaacacgaccccgccccggcgccatgcccgtacattggccccaaccatcgctcttgctagccccccgccgcgacgcctgtccgcttggtagccgcaacctccgaaccggccacagggcccccactcccaccgatggccatagatgcagaagcaacaagcactgtagaagagtaccaggttggtcgacaacaagccgaggacaggttcaatagatcatcggtgtgtgtccaagctttgcttcattctaattgggcacaataggagtaacagaggatgaaggttgctcatgaggactgaggaggccaatgtaaggatttcacccttctgttctgctgatattgactgacatctggtaatgcaatctctaggaagaaatttggttcacaggaaaatttgcttttgactattggcaacagctttgtaactgagcttgtattttcgtgcaatgttctgaatggactgaatctactgtatgttttagtttgcaaaaccaaaaccttgcatatgggatttcaaccgacagcaaccgaattc

SEQ ID NO: 85345 - DNA, 1139 bp, Zea mays
  Clone ID: MRT4577_177845C.1
atagaaataatttttttcaaaaaacttcaaattgtattagtaaactgctatgtttgcagcaggccatcttgatatgaataccaaaatcttacatccataatagaaaacttctccttcattttgaggcaaggttgcacccactcagatgtatgcggcggtggcacctcactttcccataccaagggaacttctgcttctacttgaaggtttatcctgtgtgtgacaaaagactgccatattgatggcatatattcccgattagagagagttctttcttcctcccgtcttgaatatcccaaaccgctaggatcctccagcatgtatatagaagaatcccgattgaagtcatttgctgttgtcggcgccttccccataaacggatgcctttgtgaccaaaaccaatgcaggttcaagttgcaaaatcttgcgtaactcgtggccaacactttcaaaaatgctttgcagtgttttccctttattctctcgtgaagcttgagaaccacgatctatccagtagaacgcaccaatgctgtctatcataacaaaatatataccagcgccggacacttccctccttgattgagactgtactgtcttcaaagcatctatgaattcaggacttttgcaacatcgagcatacaagaagcgctgcatacgatcagaaaacagtgtattttgaagagaacactgaaactcatctttagtgacatcattttcagggtctccatttctaaggtgtgctaaacggcagccctctgcaatacgattcctcagaatttgagccagccgtagcacatcaaatcggcagtccaagtccaagtacatgaccgccctccccagccccccaaagtagattccctcccactcctttggtaatatgcactgcactgcagccatgaggaggaggtgggacttgccagagttggacgggccggcgatctcgacgacgttgcccgggcggagaggcgcgcggtgcagtggtggcgggagggtgatggggggccgcgaggagagtgaacgggagaggaaggccgacgccgtctcgttggcggctagccacgcttgggggtcttttcccgcctctccggccatggctaggggcctgggttggagctgtcggctccttttcaccggatttt

SEQ ID NO: 85346 - DNA, 329 bp, Zea mays
  Clone ID: MRT4577_177846C.1
ggaaaccgccaaaaggcctagctgattgacaggcatggcaaacaatcaaaagagggaccattaaaatggaaacagggggaaaaaaaaatatttggcaaaaaaatggccaaaaaagggggggctacatttaaaaatgggaagggacagccaccctacctcaaatttaaggggaaaaaaaagaagttaggggggaaataacaaagggttaaattaatgcccaaaccccaagttaaaaaagggcacaaaaaaaaaagggccataaaaaggggggcccttctccaacctttggggggaacaaacaataaagggcgtcaacaaaggccttggga

SEQ ID NO: 85347 - DNA, 303 bp, Zea mays
  Clone ID: MRT4577_177847C.1
cctacacgtaccttgatggtgttagcgcatcagcccgcttcacacaaccaggggggggttcttattaacacctcacagaggcataaccaaaaacaccgttaacatttctaaataagacagcgtatagcaaacttgttcgaacatacaatgctgggggctaccattatcctataaaaggttacgatatcttttataaccaatatcttgatgctcacagtaatgtactggattatgattatacaactgcacttcacaaatatacaatttccattctagataattatggtcctaaaatactaaaca

SEQ ID NO: 85348 - DNA, 321 bp, Zea mays
  Clone ID: MRT4577_177848C.1
aaaaaaaaaaaaaaaaaaaaaaaacaataaaaaaaaaactacaaccgtcgctcctgggggggtttccaaacttaccgacggacgcataccacgacacagcttttgcatgatgtaatctaaattcaattcaatggacggggtttttcatccttttgaatgaaaaaactatgcttaaccccacctctttgcacctctttgaaaatgaacttttcaccagctatttacataaaatagatgttggacacaatcccttttccctacaatatcccaaaactaatgtcaaatggcactttccttctctcgatgcattcaacgcatgga

SEQ ID NO: 85349 - DNA, 438 bp, Zea mays
  Clone ID: MRT4577_177849C.1
gcggccgccctttttttttttttttgatccaaacagtctcataataaattgagaataggctaagctggagagtgacgcaaaccattcaatcaatcatatctcaattctcaaaacttggagctgggggctaccccgctacactcgaactcgatagaggtacgctgacatgggagtgtccgaagttgttaattttgctgtgagaaacgacaattgagacggcctagtgactgaacgttgctgcgaggaacatgtcctcctcgctcccaatccacccgcactggccgcagcgctcgccggcacggcagcactcggggggcacgccgccgggcgtccttcccgtcgtcaattgagacggcctagtgactgaacgttgctgcgaggaacatgtcctcctcgctcccaatccacccgcactggccgcagcgctcccccggcacc

SEQ ID NO: 85350 - DNA, 596 bp, Zea mays
  Clone ID: MRT4577_17784C.1
gtgaagttcatcttgcagcatttactatgcacaacagagtaactatcgaaatgacggtgttaattttgctaactgggttaaatattttgctaactggttaaacattaatatttaccaaagtaggattttgagggtgggggtgctctctctgagggggtgggggtgccgctgtctctgaggggtgggggtgccgctgtctctgaggggtgggggtgccgctctctctgagggggtgggggtgccgctttctctgagggggtgggggtgccgctctctctgagggggtgggggtgctgctctctccgaggggtggaatgccgctgtctctgaggggtgggggtgccgctctaaattggctccatatcatttgagtttagggttctggtgtttggtttcttcattctttactgcactcagatttaagccttacaaagggaaagcctctggccgtcacacgtaggacgcatgaaggtcactcgtggtgaggctgacatgctcacacattacaacagtagagagggaaaatcctaagacagaggaactccagagatgagtgtctggagcgcttcagttcagctttaaaggccaggacgggc

SEQ ID NO: 85351 - DNA, 663 bp, Zea mays
  Clone ID: MRT4577_177850C.1
gcgaattttgctgtgtaggcaaacaaacccttgatctagtgttgcacagacacttacaacattcctgttaccatcaaatgtccaccattagttttgaaattgtgcagaggtgaaaaaggtacatctagaacctatccaatcccttctcagtttcttattcctggcttagtttaatctgtaagaaaacatatgagggggttaattgatttaatgcttacgtgtttgcaagcatggtcagggattgttctgagctattttttggtacttttataagcacaaactggtggttaattatgtcctatgtttattaagattatgttcacgtgcacaacatttgatagtgatgttattactgttggcctctaaggacaaactaccggttgcttgatttatctctatgttcaatacttcaacatgtcaggtccgccgagtccagtcccttgtggagaccttggataagctgaaggcaagaaatgcgaaccctttcagcgatcataacaacgctgtttcagtgacgacgcagtgggagacgtttgagaacggtatgggcagcttgagcgctcccccgccccacgttccttcggagcaagttaacactgactgggagcagttcgactaggctcagctgaagctgttgatgtatcgtgagatcggtatgggcat

SEQ ID NO: 85352 - DNA, 270 bp, Zea mays
  Clone ID: MRT4577_177851C.1
gtaaaggtgaaagagtctatcgtccatcgctaatagggtatacagcagcacccaaatcacacgtgtgaagcactgattgatctattccatcaggaaggacctatagcgacttgggcgacacacatactcaaagcttcacattgcccgcttgctagcttctcttgacaccagctggtccgtctacaaaccctatgccttctcgggggacccgctgagcttcttggacgagtaggccagcttggtccagccggaggacggcctctccgacgt

SEQ ID NO: 85353 - DNA, 663 bp, Zea mays
  Clone ID: MRT4577_177852C.1
acctctattgattctaggcatctcctgcccttgcttagtctcgcacttgcgatttctttaacatagaaaggccggaactcgatttcgtactccccgtccttatcgccagccgaacgcgacattgatttctccccccttctcgccttctccttctcccctgtagtctagaggcgttcgctccccattcactgcgggcctgccgatcgattcgatcccaccgccaggcatgaatacgtacaagaagcgcacctaatatcggcagtagctccagattctgcagcaactactcctgctactgcatatggaacagcaactctgccctcaccgtaaaaaacagaggttgcttcctccgttgaggattataatactaatcgaaaagcttgatcttgtctacagagatcgtagtccctgaacgcgatatgcatgcacggagagacgaagccgagggtgtctatctagacactcttgatgtctctcaccttacttgcgctagattttctccgcgctcctgcgatccagacatctgtcattggccgactctctacagatgagtcatgaattggaaggcctgagaccttgagggatcacacgtgttctttgctgaaagttctacctcccagagggtaacatttggacctcaagttcaacaacatgcctgagtat

SEQ ID NO: 85354 - DNA, 612 bp, Zea mays
  Clone ID: MRT4577_177853C.1
aaaattggccttaaaaaacgcccttattttaaaaaccgggcggccccacagggggccatattggggggggaaccacgggcccccagggggccactttttttttttttttgggaagccgaaaaacaacttcttccaaacataggcgtttagggggaaacaaaaaaagggggggctggccccgggggggaacaaagctgacaaaaaagggggggatttccttgggccccagttaaacgaagagtttgaaaggatccaaggggcccccccgaaccaccttttggtaagccgaaaaacctgggcccttccatttaaaacgctttttttccaggggggggcgttttgggtttgccaaaaagcttgtttagaagaccttgccaatttttttttcgggaaacacttttttgggggcgaacctcgctaaaaacaaaaaatccttgccccccccggccttatttagagggccaacccgagggaaaacccttcctttttaaagctccggagggggaagctttgcaacattatcaggcaagctgtaaggggaatccctcgcaaaaaattttgcaacatgggaattcccccagttgcctccatcctgctttggaaaaccaaaaa

SEQ ID NO: 85355 - DNA, 278 bp, Zea mays
  Clone ID: MRT4577_177854C.1
tctgtccgatccctcgtcagtcaccaaacaacagtgagtgccccaatactgggcgagcctcttaatgttgaacgattcgcgcgtcgtgttcccagacgggataggggccttaatcgtcgagagcgatgaaagggttctaagatcggctggcttgatgctctctcttctaaactaccgagtggccacgtgcgagaggccaacgtcggtagtcaagctcatcaccggaagactcaaagacgccgacgtcgtcttcatcgacgctctgagaggcgcaacct

SEQ ID NO: 85356 - DNA, 798 bp, Zea mays
  Clone ID: MRT4577_177855C.1
gttattactgtgcaactacacagattctgaacagaaggcgctggagatgatcctagcctcctaggtttatgtgtttattacatccaagctattgcaaagccttatgcctgcgatccatcaaatctacccaaatatcccccaaacaaggaatacgatgctaagcttcgatatgaagaaactaggagctgctaaaggacaagaagctgaagctagatagaggaagcaactacatgcacccgatggcaatagtggattgcaggcttggctctcccgtccgccgtcgcctcatcgcgttgtccctagagaggaagcaaaggcacatgaccgtcgtctccgggtgggacgacgagttcgtcctcctcgatacgatggtcgctgaggcctcccccgtctgtgagtcccgtcgcaagaggcgggcctccacctgctccaacgatgatggcgccggatccaacaccaaatacggcgatacggttgacaggctgcagcagggctcctctcttctacgctgcgaagtatttgtcaataggtgtacttagcaatggtgcaaacagatgggggacactacatcatgcccatccgtgagatcttggcctcaacgccgattaagaagatgacgttgcaaatatttcagacttgtagagccctcgagaacctccatctcttgttcagttgcttatattagtcatctgttccctatgtttaaatttgatagtagattgaggtaacatataaacttcaggccaaaaaaaaaaaaaaaaaaaaaaaaaaaaagtactctgcgttgttaccactgct

SEQ ID NO: 85357 - DNA, 168 bp, Zea mays
  Clone ID: MRT4577_177856C.1
tcccactcctcctctaactcttcatccttccccatatcacaatcattatagctactttgacaaatttcgctaatccaaaactcaatcctcactctttaaaatactacaagattcctttatcatatttacaccttattatttcaatccctacatctcattccacatcac

SEQ ID NO: 85358 - DNA, 352 bp, Zea mays
  Clone ID: MRT4577_177857C.1
cgccgcccagcccccgcccacacaggttggaggtgcgagcgatagccccggcacccccactgccatcatgcccgccgcgatgctcgcgttcgtgaggcgtctcgcgcacatcgtcgcaaccaacccccttcctccatcgcggcagaacgacatcctccaactccggcagtgtccatgtccccatcctcttcaacgcgcggcacaacgagctcctcctccctcaacggcggtctccatcagacgaccatcccaacggtcgtcgacctcaaccgtctgttgacccacaacgtccagcagaccagctcacctcctccaactcccgcgcccgcgcctgatatggaatgtccgccgg

SEQ ID NO: 85359 - DNA, 651 bp, Zea mays
  Clone ID: MRT4577_177858C.1
cattgggaccctcgaggccggccgagggaaacagatacggaagacgttggcgtaacagacgccgttgatgagggagcagctgatgaaacccgctcactacctgatgagcgagatggaatcctgacatccagattcgacggtaggcttccggcaccaagggaactccgcctccccgtgatactacgacggacgctactgaaccatgagggagctacccatgtgcggttgtaaccacgccacccaagtacaccaggagctgcaggaagacatcaaatcctacccggaggcctttcactcgcgacatcatcttccacaacatcacagatagacagcaacgtcgctcacgcttcatcgcctacaagaccccgggaagagactagaacgtgctcgccggacgcccattgccaagtagctaggtacttaatgcctgagagaactaatacctagggccatgtgccgtctcgtgtcattcctgtttcgcatcgtatcaccagcaccacttgcatgcttgtgctctactcaacagttgcgttactaatgcactcttcgcccgaaactgattactttgcctaccagctgtctatgctgaatgccacgtactccttggtgcaggcacgtacatacattgcatatctcaatacctgctacgta

SEQ ID NO: 85360 - DNA, 208 bp, Zea mays
  Clone ID: MRT4577_177859C.1
gcaacatataaagtggaagccggtagcaacaacagcacaacaatggcgaccaagatattttccgtccgttaggctaacttgcatgtggctggatgtgtggctagggcgacatgcttccataaggggtgagaggataatggggcttgcattcttgcggaggaccttatattagtgatagtatgacaggagcacagcccaggtatctggc

SEQ ID NO: 85361 - DNA, 245 bp, Zea mays
  unsure (1)..(245): unsure at all n locations
  Clone ID: MRT4577_17785C.1
antanaanaacaaagcgaacattgcgccagttctcttttcccctttttttttgtttagattctttttacaaattctatacaatgatatgttcgatgcctctcagcaacaaaatttttgagggttcacaaaatgaagtggtggttcatataagactttttttaggcttgtaaaggcctgaacaaatagaaaaaaatggagcggtacattttacaaccttgtacgcgtacgacggatgaatgtaatg

SEQ ID NO: 85362 - DNA, 609 bp, Zea mays
  Clone ID: MRT4577_177860C.1
gacaggttgcctgttttatggatcaaccagctcagcaagctcacaaagttgaatttggaggtaaccagattaatgcaagatgacataagttttcttggcaagctaccaacgctaagcattctgcgcctctgtgtcaatctgcctgaagatgccctgctccgtttttgtgtttttatcaatggatttgagcagcgctcttatcagaagctcaaggtacttgagcttgcttgcaggttcagcttccatgtgacatttggatcagaaacaatgaaaaaccttgatctgctgaaaattgactgctgcagtgggtggttagatcagctttctggcctgcttcatctatctgaactcaaggaagtctggctgaagggctcctacgaggatacactgaagcatggtctggaggaccagcttgcagcccacccaaacaatcctgtgctgaagctggaggaagaagcgccacgtcagtaaaacctgatggatgctaacctctggaatgccattttcttcatgtccacacattaccgtttattatgtgcaacccgatccgattttccccatcaaaatgcttgtgtgtacctgttctaggccgaaaacatctatgccaac

SEQ ID NO: 85363 - DNA, 755 bp, Zea mays
  Clone ID: MRT4577_177861C.1
gaggataaattcattttcccgctatttaaaacaccgatattaatctctctctccaattcatcactatatttgtcttcttatagtctgtactatactcaacagtactatacagtctactatactaaaaaggctaccaaagccatctcagctgggggcacgcaggggtccctgccctgctgccgctgccgctgccgcctctcccacctcctccacctcgccgagccttctccgcaggccagcggcttcctctctgagcctggcgttctcacgagccacggcaccgtgcctggcgaccacgcggttgagctcgacaaggagcctctggttggcgccaaggagctcggcggcccgcaacgacagctcgtgcaggcgccgctgcctccgggcgcgcgacctccgcgcggacgctcggttcgacgccagccttctcctcttcctctcggcagacaccgagctgacgggggtggcaatagcaacgccgccatcgcagctgtgtgggcagtagtagtagtacgcggggtcgaggccgacggccacgtctaagtcgaacgagctggaataatcgtgggcgggaacaggaccgttccgcgccaggaagaggctggccaggtcctccagcccagggacgactgggagtgggagccttgctagattggccgccgcgcagctctgttgcatgcctgatgaaactctctggaaggactgactagtagctagtctttgcaatgtcccggccggcctcgaggtacccaatg

SEQ ID NO: 85364 - DNA, 603 bp, Zea mays
  Clone ID: MRT4577_177862C.1
gaaaagatatataaaatagtttttatgtaaatgactgactaaataataatttagaggatgctcttagatgatttcgtctatctgttgtgttcgctgcaatcaagatcatgtatcgaccaacaacatgctaatccttacttacagataaggaggatagattttgcagaaaccaaacagcttaaatctcctaacctagctaaacccacagacccactgacgaacattcaatcccgagagcaccaaaaccggcggggacatggccggtgaccaacgagacgaaccaccacgagtgcagaagaacacaaagacttcgacgagaaacaactgacaagtaacccagaggacttggcgtcgccaccaaggaccaggccacgcatacggggcagcgcatggcacggctacggcgccgtcttcttgttgatgaacccgttgcggtagacctggacgacgcggccgttcctcggctgcgtcggcctgttgttgcgcctgtaagcttgctccaggggcgccatcagggcggcggcctggtccaccgtgatctccctcacctgggccaggacgctccagatgacgttcttggtgcacggcggcgtggtgaacgac

SEQ ID NO: 85365 - DNA, 519 bp, Zea mays
  Clone ID: MRT4577_177863C.1
ccggccggggcagccgcgtattgggggtgcggtgagctgagtacgcgaagaaagggagggccgccgtgatccgtatcgctgagcacacaaagagaaacatgagagagaagagagaacggtgaagtccgtccgcaccgctgcctcgtcctcgggcgtgagctcgcgggactcgccgtcgcgtgtggttgtcttcgtcaacttgggctcggcgcatgaaccgtataggaattgggaaattgttcgccggactgggtgaattggtgcgatttctccgcggtccggtggtactcgtccccagactcgtcgatccaaggtcaagaacaggtaccacaggatgaggcgcgtggaggatgctgcgatgtgttcgtgagaggtctaggtcgtcgtctcccagtcaactttgggttgctggaccgttgtctccatataatgtaattatttatttattttgtacaaaactctgattatatagtaaagatgtgacattcgaccaaaaaaaaaaaaaaaaaatttgcggcc

SEQ ID NO: 85366 - DNA, 583 bp, Zea mays
  Clone ID: MRT4577_177864C.1
tcgaggccggccgggcccgggatccccacgacatcatcaccgagagatcatccacacgaccgcacccactactactagcgtgacatggctcctgaggcacaagcccacagatctgctacacacgcaccgatcttgtctgttgacctccgatctgccatcaaagtgataatctatctgatctaagacgatgcctcggttgttcctcttctgcctgatcgtccagccagttgtctaccaaaaggagaggcgcagggggcatgcctcgccggctgcctggacggagtcgaaaggtgcagcgatgatggactacctcatcatggcgatcccgctgcaggacgacgctggcgcttcctgctggacgcgtactagtgtcgccaaaccgctatttgtctcatgacgctttgggccacttcctcattaaaagtatatcattcgatccattgatcatctgggaaccatgcacctggttatgcaactgggtaccagtgtgatccatctatctatctatctgtgaagacttgagtcctctaaattatgatatctgtctgtgcaacctgaatcattcacactgcactatctccct

SEQ ID NO: 85367 - DNA, 162 bp, Zea mays
  unsure (1)..(162): unsure at all n locations
  Clone ID: MRT4577_177865C.1
cacaagctcgagtttatattttttaagnctataatataaaacancgggggggagcgtttacatgctctggggaggataaccaccataccttaaaataatattatttgacctttacccaaatacttaacccatataccaccaaatcatatctctttagagaat

SEQ ID NO: 85368 - DNA, 630 bp, Zea mays
  unsure (1)..(630): unsure at all n locations
  Clone ID: MRT4577_177866C.1
ccggccgggtcccggccgcctttgacggaggtgatgacgatgaagaagacgacgacgatgctatcaactcggaccttgatgatcccgaggatgagcacgatgacgatgatgtcgatgacgacgggcttggcaacatcatgctctgcatgtacgacaaggtccagcgtgtgaagaacaagtggaagtgtacactcaaggatggcgtcttgacagttaacggcaaggagtatgttttccacaaggctacaggcgagtacgaatggtagtggataagacatgcttggaataccacggttttggacttcgagtctaagaccgtggcgtgatgtatcgaagcaacacctaaacaacggcgatnncgtgagggggttcagtggagtgaattaaaacaactcatgggccgcggagatgggccacaggtcatgtgtgcacacgtcgaggcattagcaaagtccgtaaacggcgcaatttgcggccaacagactgggaccatcatatcaggatgtttagcaccagctcacgttnatggttggaggccttgcccccgcttccatgtttataggtgaaggtagtatgcctataataacatggttatttttaaagcaaaaaaaaaaaaaaaaacccgcggcc

SEQ ID NO: 85369 - DNA, 388 bp, Zea mays
  Clone ID: MRT4577_177867C.1
cccacgcgtccgcggacgctggcaacagttaatagttgtaatccattatgagactatatcaatgtgttatcttggcacaatctatttttgctacgtgagattctctattggtgccagttctgtaatggtgtgatggttagtgacttatggtgccgcagcgaaactgagagcctcctgtgaatgcgcacacaggactgtgccactcgtcggatgctggtatcaaggtctctggtcatgatccattgtggaactaccctgatggttatcttacgtggaccttcccttgaataatttctatgttgtttgtcaagttatcaagcaacatctatcatctccgttgaataaaatgggcataccactttccatgcgtagtatctttttccttgac

SEQ ID NO: 85370 - DNA, 728 bp, Zea mays
  unsure (1)..(728): unsure at all n locations
  Clone ID: MRT4577_177868C.1
gacccccgggttcggccgggacctctcacgcgcccgccaccaacgacccaacgccgctcgccttctttcctctgcacctccacactcgagccgacaatcacacattacgcacacgccaaagatgcccgccacgacagcagagacgctgtctctcgtgactcgcacggtgtcggttgcgccgcttgtgcttctgtcggcagcagatcattacggccgtcaggcaaaggggacgcggaaacgagttgtcggtgtgctcctgggacagaacgatggcaacaacgtcagggtgtccaacagcttcgcagtaccgtttgaggaagatgagaaggacccctcggtgtggttcctggaccacaactacgtcgagtcgatgaacgacatgttcaagaagatcaacgcacgcgagaagctcatcggctggtatcacacagggcccaagctgcgcgcatcggatctagaggtcaacgagctgttcaagcgctatacaccaaaccctctgctagtcatcatcgatgtgcagccgaaggaggtcggcgtcccaacagacgcctattttgccgttgaggagatcaaggacgatggcacaacgacctccaagacattcgtccacacaccctcgataatcgaagccgaagaagcagaggagattggtgtcgagcaccttctccgtgacatccgcgacgttgctgttggtacactctncactcgnatcacatcacaattgcagt

SEQ ID NO: 85371 - DNA, 322 bp, Zea mays
  Clone ID: MRT4577_177869C.1
actcattcgatgctgaaatacattataataccgagttcagactctatcattgcgtgcacctttcccgctagattatcacggcttgcgagaggaccctatacatttatagagagctatacgtacacctgactgtttccttgattcagtacctgtaaggccttcatttgcaaaccacaaaattgctggtctatattagaattttccaataaagcaacattcaactgtcattcaccctgacttcctgtcacatagaacaaaatgtgatcataacagccctatacgtatgcctaattacaatagtttcatcccatttgctcaacgt

SEQ ID NO: 85372 - DNA, 350 bp, Zea mays
  Clone ID: MRT4577_17786C.1
ctgctctctcctctgacatcgcgtgcgaagtcccaccgacatgcgagcggaagctgaagcgcggcctccgctacctgtcaccgaggcggagacagagcacccctgacgccggagctgtggaaaccgaaagtcagggacccgtgtaggaggggactccgacgctcttcatcgactgatgacaagaccaccccgctccagactgccaccagaatcctgcacaccggcggcataacggccattgctcatgcgcgccctccgcggccgcgcccgccgcgcaaaagagctcaaagagcggccgagcggagagaacaacccaagaagctcaccgaggaggacctgtagaggcggag

SEQ ID NO: 85373 - DNA, 265 bp, Zea mays
  Clone ID: MRT4577_177870C.1
aaatggacgacatatctaaccacttttatacacactatggctgatgatctcactccacctggtcgctgatgaacctgatgtcaatgaaatcatagactacgacgtagctggacaccaatatgactgaataaatggagatagcgtttagcaaccgttaacacgcagagcatataacaatggccgttcggatgcaattaaaatgacagaggggtaatggctaaagttgtataaccactcttgctttgggaccatgatgttggctgta

SEQ ID NO: 85374 - DNA, 692 bp, Zea mays
  Clone ID: MRT4577_177871C.1
caggtcatatagtgaatagcctcgccaacagatcatatcaatgatatagtatgtttcatcaggcattcggctcgagcaatcgaggatggagtacgagcttgctgggccagaaatgtctctctttgaaccattgggcagagcggaagggaagcgatgaaggatggatccattacgaaccctgctgatcgtcatgccattggatgacacaaccaaacatcgtttgccagaaggtcgggcaaaaacatgccagtccgtggcgaggtggggcggggcatcgaccatccactcggggagcataacctggcgcgcgaaccaccgacgcgcttcggagccgcggagcctggaggcggcggcggccgccgcgacgccacaggcagtgagctcgcgctcatcctcctcctcatgctcgtactcctcctcctcgtaatcgtcgcgactggtggccgcggtaggcgcctgggtggtgaggagaggagtggcgagggcgcgcgcgcgagcctgggcatcggcccgccgagccgactgcgcctggagtgcgagctcccggcggcgctgctggtcggagatggccggtcgcttgtacgggcggcgaggctccggcggcggcgccatggtctcagacgtcgtgcgcccgtcgccgccaccggcgctagagagagagggtttctgtccgagggatggggaacgtttgt

SEQ ID NO: 85375 - DNA, 244 bp, Zea mays
  Clone ID: MRT4577_177872C.1
acccgcccttcaaatttacctttccaccctttccttaatttgtttccattctccgcaccccccaacatcgtaaaatgtttgcatccataaacctacctaaatcttaacacttattccactaattccaaccaaactcttctcttcaacacccctactatcaatctcctataccagtacaccaataatatacccatctaccccaattatcccttcacctataataatatccatctcattccccatc

SEQ ID NO: 85376 - DNA, 369 bp, Zea mays
  Clone ID: MRT4577_177873C.1
ccggccggggacgcttttcccacgtgcggagccgccggcccgtcttcctccctctccgcctcccgtccccaaggccaatagttttcaagtggcaatggtggaccaggctaaccaacccactgtccttcataagctcggtggccagttccacctgagctagatcatctctgaaggagtacgggtctgtaacatatgcccatctgcgtcctcttacgaaaggagatccgccacactgtactacatgacccaaagcctccaaggaccccacaagtacgcgactcccagagcccccacccacgatcgcccatcccccagtttaagagcaagacacccccacccacttttttttgttttccccccccccccccc

SEQ ID NO: 85377 - DNA, 398 bp, Zea mays
  Clone ID: MRT4577_177874C.1
atgcaggtcaatgttcacctatttataggggatcgtacaactttgtatggaataacaaatatgcccacaagacttgtacatataatttacaaaacgatgcgagggcaatattgacttctgcctctaacagcttggacacggaaccgtggacgccttctcccggcaatgttctccttcgtctctatgtgttgttgtgacaaagcttaacaacttcgtctttatcttcatcctattccgaaggtattcaataccgaagttcctacaacacttgtgaacatgctgacaaccaataattaagtgtgtttttgagcaccttcgaaagacgaaggccccaacatactcctcctcgttactttaccaacagtgcaagctaaagttctaggcaacaacacttttga

SEQ ID NO: 85378 - DNA, 846 bp, Zea mays
  Clone ID: MRT4577_177875C.1
cattgggtacctcgaggccggccggggtagcgtcgagacgagccgtttaaaaaggtgtcaagtggaagtgcagtgatgtatgcagctgaggcatcctaacgaacgaacgatttgaacacgccagctttccctctctgccatcaacacacatagcgaccatttacttgggcatcgctatcaaagatggctgctcctcgcgttagcttcggcgaaaaggatatggagaacggtggtgatggcgcggccgaaaggtctcgcaagtggtcgcaggctcctggcaacattgaggacctcgacgagtacactgctctgcagaagtacatctctacctacagagatcccaaggctcacgccgctgaggatgctgaggccaacgctgccgatgctggcaagggcaaggcctggtaccagttctggcgctctggcaactctggcaaagccactggtgccgaccctggcttcgtccccgatgagatgctcgaggccgatatcaagcagggtatctcctctcacgaggttgagcagcgccgcaagcgctacggttggaacgaaatcaccaccgagaaggagaacttgttcatcaagttcctcggtttcttcactggtcctgtcctctatgttatggaactcgctgtcctcctcgccgccggtcttcgtgactggatcgatttcggtgtgattattggtattcttcttctcaacgccgtcgtcggttggtaccaggaaaagaggctgccgatgtcgtcgcttctctcagggtgacatcgccatgaaggcgactgtcgttcgtgatggccaggaatcccgacatcaggctcgtgagctcgtccccggtgacatatcatc

SEQ ID NO: 85379 - DNA, 133 bp, Zea mays
  Clone ID: MRT4577_177876C.1
ggagatgagagggaagctctctcttcaggaacagagcgccggcaaatgccacggctgaatgatatccggactagacagaaggagtgagctaaggtttcgtcgtcttgaagcataaacaagatacattttatca

SEQ ID NO: 85380 - DNA, 256 bp, Zea mays
  Clone ID: MRT4577_177877C.1
gtggctcatgggaaacaaccggggcagtgcgtatactgcgtgacagttgatactccactgcacaggtctaacggagtcacaacatatcggagagacatggcatgaaactaagcttgcatgttataagccatcctttcccttcttgcgacccttggaaacggcgcatgtttgacatacacctataaagagggggaaccgaggcctggtgccacactaatgaggagccgtttaaaaacagctaactcgacaagaatgc

SEQ ID NO: 85381 - DNA, 804 bp, Zea mays
  unsure (1)..(804): unsure at all n locations
  Clone ID: MRT4577_177878C.1
ccggccgggnaaaaaaaaaaaaaaaaaaaaaagcatgcccaagtacttatatccagcatcacactcactacaagtcctagacgagtctcagctggcactcaaaattgcccgacactctcgctgtgcaacgtgctcatcttgcactggcttagtacctccacttggatacactgtcttgtcagatgccgctccagatagtgacgacgttgaacaattccttctcgagtccacaaccaacgacaatgacgatgaaccagctaaaggatatctgaacatctgttgctgcgctcatgggcttgaaatgcatggcgcggataaatccaagattggtcaggaggaattcatgcggagagctcgcgcagctgttcggctcgatgaactgctccaggtgcgaggataaaaaatctctaatggattttcaatatgaagacgatgatattacttcgctgcggaaacaaatgacgctccccgaatctcctgacaagagcttagcagtgggtccagagaaaattcctccatctccggcatccacgctttccgacctccccgtcgggcctcctgccagcgacgtcgtgtagcatcctactcttcttcagtcaccgccgacgaaggcaactcagatgaagacgatcagcctttggcttcccgtcttgttcgtcccacagccggtcataaatcgggcaggcgaacagtggctctcataagacttcgaaaggtctacataagcaacctcagcccgtggtacctggcgtggcagggaagcccattacttccaagggcacaaaatcagctattgccgatgct

SEQ ID NO: 85382 - DNA, 245 bp, Zea mays
  unsure (1)..(245): unsure at all n locations
  Clone ID: MRT4577_177879C.1
cttgcgagggttaattaaggggnnngttatccaaaccaaacagggccctttttaaaatccttaaagacatatttgaaacatccgaatgtttgagttttccttaacgctaacacgagtacttgcccacatacaaataaaaatcatgtggcgggctcacccttaaacccaattggttgaatccaaacaattttttaacccatttttcttttcgggggggtaaagttggaaaaacgggcccttttttc

SEQ ID NO: 85383 - DNA, 3913 bp, Zea mays
  Clone ID: MRT4577_17787C.1
tgcccgaggtcatgcgcctcaacaagctcggctccttcagcatgtcgcagctggggcagtccaagagccccttcttccagctcttcaagcgcaacaaggccaactccagcaacttcgccgacagcatgctcaagctcgtccgcacgctgcccaaggtgctcaagtacctgccctctgacaaggcgcaggacgcccggctctacatcctcagcctccagttctggctcggtggctcgccggacaacctccagaacttcctcaagatgatcgccggctcctacgtgcctgccctcaagggcgccggcatcaagtacgacgaccccgttctctacctcgactccggcatctggcacccgctggcgcccaccatgtacgaggacgtcaaggagtacctcaactggtacggcacgcgccgggacgccaacgacaggctcaaggaccccaaggcgcccatcatcggcctcgtcctgcagaggagccacattgtcaccggcgacgacgggcactacgtcgccgtcatcatggagctcgaggccaagggcgccaaggtcatacccatcttcgccggcggcctcgacttctccgggcccacacagcgctacctggtcgacccgattaccggcaagacgttcgtgaacgccgtggtgtctctcaccgggttcgcgctcgtcggcgggccggcgaggcaggaccatcccaaggccattgccgcgctgcagaagctcgacgtgccgtacattgtcgcgctcccgctcgtgttccagaccacggaggagtggctcaacagcaccttggggcttcacccaattcaggtggcgctgcaggtcgcgctgccggagctcgacggtgggatggagcccatcgtgttcgccggccgggaccccaggacagggaagtcacatgcattgcacaagagagtggagcagctctgcactagagccatcagatgggcagaactgaagaggaaaactaaggaggagaagagactggcgatctcgaacttcgggccgaaaccggagaagggcatcgtcgggactgcagcggatctgaacgtgttcagctccatttactctgtgctctcagacctcaagaaggacggctacaacgtggagggtcttccggacacacctgaagccctcatcgaggaggtgatccatgacaaggaagctcagttcaacagccccaacctgaatgttgcttaccgcatgaatgtgagggagtaccagtcgctgacctcctacgcctccttgctggaggagaactgggggaagccacctgggcacctcaactctgatggcgagaacctcctcgtctacgggaagcagtacggcaatgtcttcatcggggtgcagcccacctttgggtacgaaggtgatcccatgcggcttctcttctcaaagtctgccagccctcaccatggatttgcagcatactacacctttgtcgagaagatcttccaggccgatgctgttctgcactttggaacacacgggtccctcgagttcatgcctggcaagcaggttgggatgagtgacgcctgcttccctgacagcctcattggcaacatccccaacatctactactatgctgcaaacaacccatcagaggccacggtggccaagcgccggagctacgcgaacaccatcagctacctgaccccaccggccgagaacgccggcctctacaaggggctcaagcagctgtcagagctcatctcttcctaccagtctctcaaggacaccgggcgtggtcctcagattgtgagctccatcgtcagcactgcaaagcagtgcaacctcgacaaggatgtcccgctgcccgaggaaggggaggagctcccaccaaaggagcgtgaccttgtcgttgggaaggtgtacgccaagatcatggagatagagtcacggctccttccctgcggtctgcatgtcatcggcgagccgccgagtgccatcgaggcggtggccacgctggtgaacatagctgccctcgaccgccccgaggacggcataacctcgctgcccggcatacttgccgccacagtgggcagggacattgaagatgtgtacaggggaagtgacaagggcatactggctgacgtcgagcttctgaggcagatcactgaggcttcgcgcggcgccatcaccgccttcgttgagaagaccacaaacagcaaagggcaagtcgtcaatgttaccaacaacctcagcaagatacttggtttcggtctgtcggaaccatgggtgcagtacctgtccacgaccaagttcgtcagagcggacagagagaagatgagggttctgtttgggttcttgggggagtgcctgaggctcgtcgtgcaagacaacgagctgggaagcttgaagcttgccctcgagggaagctacgtcgagcctggccctggcggcgacccgatccgtaacccgaaggtgctcccgacagggaagaacatccacgctctcgatccgcaggccatcccaaccacggctgccttgaagagcgccaagatcgtcgtggaccgtctcctggagaggcagaaggctgacaatggcggcaagtaccctgagacggtcgcacttgtcctgtggggcaccgacaacatcaagacctatggtgagtcactagcccaggtgctgtggatgattggagttcggccagttgccgacaccttcggccgtgtcaaccgtgtggagcctgtcagccttgaggagcttggacgcccgaggatcgatgtcgtcgtcaattgctcgggtgttttcagagatcttttcatcaaccagatgaacctgctggacagggcagtgaagatggtggccgaactggacgagccagcagagatgaactacgtgcgcaagcacgcccaggagcaggcggaggagctcggcgtgtcgctaagggaggcggcgacaagggtgttctcgaacgcatcaggctcctactcgtccaacgtgaacctggcggtggagaacgcgtcatggaccgacgagaagcagctccaggacatgtacctgagccgcaagtccttcgcgttcgacagcgacgccccaggggcaggcatgaaggagaagcgcaaggcgttcgagctcgccctggcgacggcggacgccacgttccagaacctcgactcgtcggagatctcgctgacggacgtgagccactacttcgactcggacccgaccaagctcgtgcaggggctgcgcaaggacgggcgggcgccgtcctcgtacatagccgacaccaccacggcgaacgcccaggtgaggacgctgtcggagacggtgcgcctcgacgcgaggaccaagctgctgaaccccaagtggtacgaggggatgatgaagagcgggtacgagggggtcagggagatcgagaagcggctcaccaacaccgtcgggtggagcgccacgtctgggcaggtcgacaactgggtctacgaggaggccaactccacgttcatcgaggacgaggcgatgaggaagaggctcatggacaccaaccccaattcgttcaggaagttggtgcagaccttcctggaagccagtggcagaggctactgggagacaacggaggagaacctggacaggctcagggagctctattcggaggttgaagacaagattgaggggattgacaggtaaattgatttgccagatcggtcggccgatcggttccagcattcaacccataacgagcttggaactcttctgcctcattgggactcttgtacaatgtctgggtgtgtgatttatatatatataaaaagttgtaacatgtaatactggaggatacaatctttaacaaagagggtggcggttgttccattcacagagactgagttacaaaaaagaagtaaatataagcctcattttctgcctctgtataggatcggcccttgcgttagagtgccctgccttacgta

SEQ ID NO: 85384 - DNA, 252 bp, Zea mays
  Clone ID: MRT4577_177880C.1
gactgacaagcacagcaaggctcgtgagttcgcacacaccaagcaagcaggccagtagggcgcattcgggtcacagggtctccgtcgtttcccaacgcgctttccccggcgccatggccaggctggcgctagcgctcctactgctgctggccgtggcggcatccgcgtgggccggcgccggcgcgagccacctcgatctgggcctgggctttctatgctccggggaccgccggcgggaatgccgaggcacgg

SEQ ID NO: 85385 - DNA, 418 bp, Zea mays
  Clone ID: MRT4577_177881C.1
aaaaagcccgaactaaaaaaaatatttaggtaaaaaaaattttcaaatatatatcaaattcatttatatatcaaatataaaaattcgatcgttagaatatgaaatagtattcaatcaaatttaattgaatgaacggaaaaaatcataacatacacaaagttttctttggtctttaataatttagaacattttttattgacgagccacagaaattgcacctatcaaagcaactaaaagaattattgaaatgagttcaaatggcagaaaaaaatcctgtgataaatgaattcctatttgttgactattacttatttaattttgttttagaatttggtttaatttctttttcctgatgggggggggggggagataacctttcttttcgtttttaatttacttaaaaaaatttttttgtaag

SEQ ID NO: 85386 - DNA, 429 bp, Zea mays
  Clone ID: MRT4577_177882C.1
gtggggaaaaagggttcccttgcccaccaaattcggccattggggaggggaaaaaacccccaacccgacaaggggggccggaccgcgtccccgaacccaagacccccggggaaccctctttttttttgaccaaagaaggggcccttccccccccgggggtggttggaccccccccaccgggggcaaaaaaaattccctttggggccccccccctctttttttcccctatcaccaaaaacagggggtttcttgtgagggtacccccccctaaaaggggacccccgtttaccctcgaaggataggcctttgggaaccgaaaccccagggccggccggggaccccgatctaagaaccccccaggaccccccccggggccttaaaaacggggaaggggtcccacctgcggaccaggaaacccccccctccccc

SEQ ID NO: 85387 - DNA, 2089 bp, Zea mays
  Clone ID: MRT4577_177883C.1
ggtaccctcggtccgggttgtttactgatactgtctgtttcctctcgccttccactccctggatctccagttccaggctaggcccgagctggggaattccgatccccccaccaagggctcgccccgatcccaaggactcgtgcctctcgtcctccgatgtggcaactcatcccatccggcttctaaagccgcggccaaggttgtcaattccggtggcaggcggcatggattccggcgccaacagcgtcggcgagtcggtgggcgagtcgccggtgcccgcgccggcgcctcagacacggccagccgaaccggtcacaaagggccgcgggctccgccggtggcgtcgtatcccgcgcgagcagcaccacgaggggtctccggtgagccccgggctcggtaacagtgctggagctagcgcgggtgaggacttggcagcgcagctccacaagcgtcgttacggtcctgccgacgacaagcccaagggaaagcaggacgcggctgcagaggaggtggagagctcggtcgcgtccgtgaagtcaagcttcgtgccgctggaggcgtccccacctccgccgccgacgctgactaggttggacccgaatctgggccacctgattgccaccaccggtttctcggtgggagccggcggcgccgattcggacaacagcgatgaccgcaccagcaagtcttccacggccgccagcgcgccgcgccacgacttctcgtctgtcggcttcggccgggagcgcgacagggcgcggtcccgcgcccccggcgctgctcacggcaagggcatccgtgctgcacgtgtgcgcggcgccactatgcgtgttgcctcttcccctgctgaagcggggaattctcgctccagcgtcgagtccaacctccggagctctaacgctgctcatgcgcggcgatctagtgctggcgtcacaagcaacggtgttcacaagattctgttccctgatggtcatcaaagtgacgatgaacctccaagtggggacatgcggtatggtacaggacgtttctacaaggagaatgggagtatagaagggagattggggaactgtgactccgactccaaccatcatacctttgatgaagcgagcgtgggcaagtttgagaatggagggactcattcaggtttggatctgtatggtgagtcgatggcgttacttcagtcggcacaagaagcgcttgagaatgagatccaaaagtttgtggaaatcaggaaagaaactgacgaagattccacagctcaccaaagtgaaatcgaatggagcagctcacctgtagaagaactaaatgagaagataaagatgctcgaattgaaactggaagaggccaccatgctcatcaatgagcgggattcaaaaatacttgaactagatgcactcagccatgtacaaccacagaatacagtagcatgtaacaactatccgctgtccctacagtctgatgtagaccggctgttcctggagaagatggaagcagagattcagtgctttatccttacaagagcttctcaggactggaaactcctgacaatggatcaatttgctcttaacgaggcacagaaatcccttctgtcggatcacaaatccctagaaactaaactgaggcacgccgagaacagggcgatgatgctggaggagatggtggataaactagagtcgcaatgcaaggcgctgtctgagacttcagaagttctgaagctgcaggccggagctagcagggcctctttgttctgctcgatccagtttgtactgctgtgcatagccattgggaccctcctcgttcgcttcctgtcctcttctccggagattgtacctacttgaggttagagaattaggccagtcagcctttgtgtaggcattgttgcaatattgtttactgtaacttattagggcatcaatcgccttacaaattttcgttttttgtaccatcaactcgattttgctagtaatttctttatgaatatgaatttactgtacttctggctttaaaaaaaaactctggattctggaaatgccacatgtgtagttttttttttctatggtcggtataatgttcgaaagggaatctcgtc

SEQ ID NO: 85388 - DNA, 663 bp, Zea mays
  unsure (1)..(663): unsure at all n locations
  Clone ID: MRT4577_177884C.1
gggtaccctncgggtctgnccgggnatccccaccttactttactccttcgtttctttctagcaatccttctagcgccatggcttccgctattgagaagtcagaggccgccgatcatacctccaaggtttccatggacggtatcgttgcttacgaggaaggcaaggcccaactatctggggaaactgttgtctgcaccgatgaagataacaagcgcatcctgtggaagacagatatctggatgctgtctctcctttgtatggtgtacttcctccagtccgccgacaagggaatcattggcttgacggctgtttatggactcaagaccgacgcgcatctcaaaggaaacgattactccaacattggaaacattggttactacgcacaactcggggtgcagcctttggcagcatgggtcctggtcaagcttcgatatcgccatgtcttgccagtcatcattgtatgctggggcatctcagtcgctggtggccttgcagcatcaaagaactacggtggactcatggcatctcgattcttcctcggcgcattcgaagcggcagtcgttcctctcttctcgatgatcacaatcgccttttacaggcgttctgagcagcctttcagggttgcatgctggtatagttgttatgggccttacactctgatca

SEQ ID NO: 85389 - DNA, 818 bp, Zea mays
  Clone ID: MRT4577_177885C.1
actacactacacgcgtctcacaacgccggctctcccccgctccgtctccctccctcgtgacttcgcgaagcctcgaagcttgcacagtcgtcgagccagccagccagctagctagcagctagccagtacagtcaagtggccaccacccccttctctccctctctccctctctctctctcattgccgccgctgctgcgcatagctaggcagcagacgcgctcgtcgtgctcgccctcccctctcgatcgtcgcgctcgtacgtgcgtgctcgaagctacacctcggcggcaagaggcgcactgcgccgccggaccgatatatccatcgatatcggagagaagcagagggagaggaggagatcgctcgatatacatccgatgcagcctgccgggtccgcctcacgcctcgccgtgctggtggccgtggtggtgctggcgtcgtcggcggcgtgctgccgcgcgcagctggcgagcaactactacgccggcaagtgcggcaacgcgagcgcggtggaggccgtcatccagagcgccgtccaggcccgcctcgcgtgggacaagcgcatggtcgccggcctcctccacatgctcttccacgactgcttcgtccaagggtgtgatgcgtcgctgctgctggacggccccaacacggagaagacggcgccgcagaacagcggcatcttcggctacgacttcatcgacgacatcaagtccgacctggaggccgcctgccccggcgtcgtctcctgcgccgacatcatcatagccgcgaccagggacgccatcgccctgtgcggagggccgagctatgcggtgacc

SEQ ID NO: 85390 - DNA, 259 bp, Zea mays
  Clone ID: MRT4577_177886C.1
gtcagtaatgggggagctatatggacgtacggaaccataaggggtgcaaggttcatttacgcaggcatgcacatagcaaagcaaacaccttctagggcgtaactaacacaccaatcggatatgcggaagcgtttgatctaaacaaaccacgaccaaagggtctagcctttggtctggcatagggcacaggtgttggagatctccatcacgacatcacaggcttggatttggtcgactgggccctatgcccctttggttg

SEQ ID NO: 85391 - DNA, 314 bp, Zea mays
  Clone ID: MRT4577_177887C.1
ccgggcgggaatcgaccctctcgcgcttggcttgctttcactctacagggctccacttccacctcgtagccgcagccatggtgatcacagcgccaactcccgacatcctcggagagcgccagctcggccaggacgtccgcacgaagaacgcgcacggcgagcggggcggtggacctaacctcgtcaaatcctctagccggacccgcccgcctcgatcaagatgctacctggacgatcttggtgatgttcccatcacaaatgatggaccacccctacttacgatgctgcaagttgagcatccacccgccaaggat

SEQ ID NO: 85392 - DNA, 509 bp, Zea mays
  Clone ID: MRT4577_177888C.1
tctgtcttacctacctgtcctcagctaattcctgcgagccccagcagagctgcagacgcagcctatggtgaccccctcaccataacgatcattgggaggacgcggcagacattgatccgtactctgagtactggactctctataacctgtccttcggcaagccaatgattcatcggcgaccgggacctgctgaaggaaatgtggggtaaagacatggctacatcaccacctgcaggccatgatgatgctagatcttgatgagctgcttgtgacccagaacttcagaagttgcacgcatatagaatagctgcccttagaaaagaatttgataatcgtgactctctatataagccaggtcatggtgaatacagggagatatctgtaggggacttgcattgggaggttactggcagtcattaagtcatatgccattaataccaccgctagtattaccggtgcacgatcatgcattatcatatgaaggccctcgctccagtctatgtgggaac

SEQ ID NO: 85393 - DNA, 318 bp, Zea mays
  Clone ID: MRT4577_177889C.1
gccgaaccgcaaactctagcttacttaggtgcggcagtgagaggccgatagctaagtctctctgcttccaaacgcaagaagcgactttggacgttgctacgagggataggatgccgctgctaaagcagaaatgacggcaataagttcagcgatctagtctggcgcgctatttgtaccacgatcccgggccgagagtgcaccccatgccaggatcccagcggctatcgatcaccttggtcgacctgcgctgttgttgacgtaatcaatgatgaccggccctacaggtctaatatcttattgtcgccaactggctgcatt

SEQ ID NO: 85394 - DNA, 223 bp, Zea mays
  Clone ID: MRT4577_17788C.1
aattcggcacgaggtaagatcgtgcagctttctggcggtgtggagtgcttttctcacatgtatcatatttgtattgcagagtgcactttgattgggctagatgtaaaggcaactcccgctgttgttttctgaatgtacggtatctggccgtgcatgtacagacaatgcagctcacagtgttctagcaggttgccatttgatggctgtcctttttactcacaat

SEQ ID NO: 85395 - DNA, 346 bp, Zea mays
  unsure (1)..(346): unsure at all n locations
  Clone ID: MRT4577_177890C.1
gaattttatcaattattacctgtctcccattttctaatatatcttntatagggatttttgtgttattttttcaaatttatatttanagttttttgttgctntgtttctnggtgaataaacagangttttcattttttcttttatttctgtacaataattattgttttttttctcttactacagatattatgttagttttcatttctatcttgtgtgatcatataatacattttcttttattcttttttaatcacatttaattatataagaactntattattacatcttcacacaaaatgattaatttaaatttttttatttattattaattaacactctatttttt

SEQ ID NO: 85396 - DNA, 313 bp, Zea mays
  Clone ID: MRT4577_177891C.1
ttttggggggttttttggagaactagggagggggacacctagataccgaccatcaaaaataacggttccacagattttcgacacgcattaaccatatctgtactacatcatacacgttgggccaccacgattagacataccatgggatccacatcccatatagctgggtcaatgataatgaacaccaccgttggggcgatagaggctcctcctggctcattgctaatgttcacacatttgggcttacaggatcccaacaccatggctaaatacacatgttaccaatacgcctgacctcactttgccacaattt

SEQ ID NO: 85397 - DNA, 320 bp, Zea mays
  Clone ID: MRT4577_177892C.1
tactcgagtccgacccatgaccagcatagtttgtctgctaagcgaagccaaaccaaacatcaagcaagggtggggggacttagaagagcaaaggcaaggactacgtgctcgcgagcgacactagcgacaacacagactactacaagagctacacggagcctaagccggcgcccctgacgacccaagagagccgacgccctggttgctgtaccgaaccacgatcgccagggcgatgaccacgctaaggttacggagcatcaccaaggccaccaggatctgagtcaagcaccagaacgacgcatttatgatcagcgccgaca

SEQ ID NO: 85398 - DNA, 252 bp, Zea mays
  Clone ID: MRT4577_177893C.1
tgaattactcaagtccctcagctctgttggcacaaatacgtgctggatgatagaagaaccgtttttcccatggatgaactttttttggcttgaattcttacaaggcctgacttctggatctggagaaagaagacttcttgtgtcccatcttcaaaatgcctcctccacttgttgcagaagcctaaaattcctttagttggggcagaaagcctattattatttaaaaaaaaaaaaaatagtgggagggtgtgt

SEQ ID NO: 85399 - DNA, 352 bp, Zea mays
  Clone ID: MRT4577_177894C.1
gtgtacagcccgctgaagcactttgggctgacgaccccgggcctccgtggcggcatcctggagcgcaacgacgtccgctaccgcttcgtcgtcgacgtcgccggtagcaacgtcgaggcggaggcggcggcggcggatgcggccagcaactgatggcaccgcgtcgtcgagtcgaaccacgtctgtgcgccgcgtgcaacgttcgttcgggtcgagtctgcgtgcaacgttctgcttcctttactagttgttgtctttccgccttcttgccgttctgttctgggctttgagatgagacgatggatggtcagtttttaatgtcagactgaataactacgtatagtactgtagt

SEQ ID NO: 85400 - DNA, 1878 bp, Zea mays
  unsure (1)..(1878): unsure at all n locations
  Clone ID: MRT4577_177895C.1
gtgtacagcccgctgaagcactttgggctgaccaccccgggcctccgtggcggcatcctcgagcgccacgccgtcacccagaaagatcgcactacccggcgctcgcgcggctttctttcccaactccgacgaaggctagctacaccacctggtgcgggctcgtctccatcgcccgccacccgctccgtcgtcgtcgtccccgccgcgccgatcccgaatcgaatggggagcctggcgtccgagaggaaggtggtcgggtgggccgccagggacgccaccggacacctctccccctactcctacaccctcaggaacacaggccctgaagatgtggtggtgaaggtgctctactgcgggatctgccacacggacatccaccaggccaagaaccacctcggggcttcaaagtatcctatggtccctgggcacgaggtggtcggcgaggtggtggaggtcgggcccgaggtggccaagtacggcgtcggcgacgtggtaggcgtcggggtgatcgttgggtgctgccgcgagtgcagcccctgcaaggccaacgttgagcagtactgcaacaagaagatctggtcatacaacgacgtctacactgatggacggcccacgcagggtggattcgcctccaccatggtcgtcgaccagaagtttgtggtgaagatcccggcgggtctggctccggagcaagcggcgccgctgctgtgcgctggcgtgacggtgtacagcccgctgaagcactttgggctgacgaccccgggcctccgtggcggcatcctgggcctcggcggcgtgggccacatgggcgtgaaggtagccaaggccatgggccaccacgtgacggtgatcagctcgtcgtccaagaagcgcgcggaggcaatggaccacctcggcgcggacgcgtacctagtgagctcggacgccgcggccatggcggcggccgccgactcgctggactacatcatcgacacggtgcccgtgcaccacccgctggagccgtacctggcgctgctgaagctggacggcaagctcgtgctgctgggcgtcatcggcgagcccctgagcttcgtgtcgcccatggtgatgctggggcggaaggccatcacggggagcttcatcggcagcatcgacgagaccgctgaggtgcttcagttctgcgtcgacaaggggctcacctcccagatcgaggtggtcaagatggggtacgtgaacgaggcgctggagcggctggagcgcaacgacgtccgctaccgcttcgtcgtcgacgtcgccggtagcaacgtcgaggcggaggcggcggcggcggatgcggccagcaactgatggcaccgcgtcgtcgagtcgaaccacgtctgtgcgccgcgtgcaacgttcgttcgggtcgagtctgcgtgcaacgttctgcttcctttactagttgttgtctttccgccttcttgccgttctgttctgggctttgagatgagacgatggatggtcagtttttaatgtcagactgaataactacgtatagtactgtagtattactcggagtacgccagaatgtggtgtggtgtcagtctcaccagcaatctggatttgccaagtgtttctattttttcttcggtttgcccgagtgtttgtgattgttaagaactacgttattacggatcgtcaaatccgttcccttctgtctcgtctatagtttagacgcgagaaaatattaaagacacgtctcccattccagaagcacgatagaagaaaaaaaaaaaaaaaaaaaaaaaaaaaaaaaaaaaaaaaaaaaaaaaaaaaaaaaaaaaaaaaaaaaaaaaaaaaaaaaaaaaaaaaaaaaaaaaaaaaaaaaaaaaaaaaaaaangggggggggcccttttaaa

SEQ ID NO: 85401 - DNA, 278 bp, Zea mays
  Clone ID: MRT4577_177896C.1
aaggaagaaggagcctcgctgtgtaacttaacctcactcctgcgacgacagtgctctccctcatgtatctctctctacctaaagaggatggttagcctccctgcgcgccgaggatatggctgcctccacacggcggggagagcgctgttgtcgctgatcctgtcgctcgcctttgaacgacatggcatcgagggtacctcgagcccagggatgaggagaccctgagcgtacacgccaagtggatggctacgcacggtgggcacctccgactccgagag

SEQ ID NO: 85402 - DNA, 559 bp, Zea mays
  Clone ID: MRT4577_177897C.1
ccggccgggccgggtcgtacatccatttttcatatactgctcgcctgcgacggcgctcgacctcgacccatctgatggccgggattcgaggtgcacgagctgcgggggaagagcaaagtggatctgcaagcgcaactgtaaggagtgtaagtcggagctctccctgccttcgcgtgaagcaaggccaccgggggggctcccaacaagctctccaagatcaagggagtgcgcacctccatcgcgcgcgtgctgaccgtcatctcgaagaagcagaatgcggcgctgcgtgaggagtacaagaagaagaagctgctcccgctcgacactccgtacccgagaatacccgtgccatcctgaggcgcctcaccaaggaccaggtctccgtgaacatcgacagggaaaagaagcgtcgagaagtatttccccatgaggaaggacgctatctaggcctagatcagtgaaagaacacttatcctggcaagatttggtcagaagctacttgaatttgagagaagactatctccatgcaaggactatgcaactgatcaactgcatgatg

SEQ ID NO: 85403 - DNA, 343 bp, Zea mays
  unsure (1)..(343): unsure at all n locations
  Clone ID: MRT4577_177898C.1
cctccccccccggggggggcgcaggccttcgcntgattgggcggggcccctcggtcagcgtacagacgcatatcctttctctctgcggcgggtctttcgctttgccctcggccctgggtcctcacatgcggttcgagggccctcggtcccctcaggaaacgttggggggggggacaccgactcccggcttggtcaaggcctatgtgaagctgggatgatgcccgccaggtgcaaggaattgcgtccagtctcgagggaatctggcgcttgggctgacctagctccgggcctatgctaaattgctngtgcgccctacacccttgcctcttttcattccagcttt

SEQ ID NO: 85404 - DNA, 1246 bp, Zea mays
  Clone ID: MRT4577_177899C.1
ggccgcttttttttttttctttatattctttgttgtatcatactgctggaggcaaaaataaaaaaagtacagattcaaccaaacattgtacgttttcatcgtccaataaacccaaaaagaatataaagaacgagcatatgatacaaccacttgaccagttgacctctacagcacaggatggtaaaccttccattccattccattcaccatcgattcaccgagctagttttcacttataacggtacagcgatttcttcgccaccgatctcacgtcacgtgcctgcaacctgaatcctcctcttctcgtgcctctcgcagtctcgcccgcttctccgtttctgaatctggaggaagatcggccgcaaacagcaccggcaagcgcagcgcggcgcggcgcgacgcgatcacgcgaccctccttagtgcgccatggcgtggccggcgtggtggaagcccagcctctgcgcgtgggcgagcgccgccgtcttgcagtgcgccggcggcggcagggactgcctctgcgtggtggggagcgagtgcgcggacacgacgaggcggcggacgccggagcgcaccctgtaaaggacgtggccccagccccaggtgcccctgccgccgtggcggccctcgtcctcgttcatctcgaggtcgcccgcgaaccccggcttccgggacagaagccagccgacgacgccccgccgccaccactgcctcagggagccgcctcccgcggagagggagggcgccggccgggagcgccggaacgcccactcggccgacgcggaggagatgggctggatcttgccggagaaggcggacagccgcttccgcaggcccgtgaggtggctctcctctctgccgccgccgccgcgccgccgaaggttggcagctcgtccttgagcggcctgggcggcaggagcctcgccttctggatggtctccaggatggtggccatggctgggccggacgagtagaggcaagcaggcaaggcaaacagagagggcgggagaagctcgctctggagcccgccttcaaggggcaatggtcttctcctcctgctctctcgccgcccacccccacccagatggccagatctctctttgcttctccttttaatttggtctggtcgtctggacagaggatggtggagagatggtatgtgtacccagtgtttgtgtcgcagccacaacagcttgcctccgcctggacagactactggctttattcacgcagacacgaaccaggtg

SEQ ID NO: 85405 - DNA, 643 bp, Zea mays
  Clone ID: MRT4577_17789C.1
catcagctcacactccggcagccgagcgatcgagctccccggtcgctagcacagccggccactgcacacgacggtgctggtaggttgcaagcacttgcaggatggcgcaggtcgctaagacgcttctccttgtggccctggtggtcgtgtcggcggtggagctgtgccgcgccatcgagttcgacgagcgggacctggcatcggacgaggcgctgtgggacctgtacgagcggtggcagacgcaccaccgggtgcaccggcaccacggcgagaagggccgccggttcgggaccttcaaggagaacgcgcgcttcatccacgcgcgctcatcaccagggacgcctcttcccagtgacaggctgatccatctcggcgtcgaactcgtactactggcacgtaagtaggagtacgttgacaggatgacatcctgctgctgctgtttgcttgtactattttcgattgtgtttgtaggtttgattgtgccagtctcgatcagagacgatatacacatgctagaataaaatatagcagcgcgtgtgcgcaacaaagactaggagtgtgatatcaaagttgtgcttgtaatgtaacgtaatacggtgtcgcatatgcaccgggatatggtatattgaatggagctatgcgt

SEQ ID NO: 85406 - DNA, 825 bp, Zea mays
  Clone ID: MRT4577_1778C.1
cccagcgtccgatgagttcttggacccgggttatgcatactgtaagctgatcgcaaaatggaaaagtcaggttacgagcgcctttgctgcctaaggtgcatacaaacgtgaccaaaggaatcaccttgtgtgctctcagtgggcttgagagtagcatcatccttcaaacatgatgatgggtttccagctgatggtgtctctatagctcactggtatccttcaaaaagaaaaataggttattccaaagcaaaaaaagatccaccatgttttatggtcattgtcacaaagaagtgcttgcaaggaaccctgttgagactgagagcaccaaggttgtgagcgtttttggagcttaatggcttaatgggtaaatctaccaaggacacacatagttaagccttgctcagctgacgactgctaaggaatttctgttaagtgcagtttgggtggtcttctcaaccattgcttgacttaaggcaacacattagaggatattcatcagcatcagagatcggcaagctcttttacttttacaaaaaagaaccggaatggtttcacttgagattcaagtagtgttgtgaggcatgtaactaacccaaaaaggcacttcaagcgggcaagaaagtccaatgcccttctcaagcacttcgaagcggctctatacgtcctacacgttcttcgatcagaattctttttttttcatttgtttttttgtcttgctaatgtgcacgtcacttacaatgatactattgaaaatataggaatcaagtatgtataaacacatgtgtggtagacattttctgactgcctttcggttctttgggcatt

SEQ ID NO: 85407 - DNA, 224 bp, Zea mays
  Clone ID: MRT4577_177900C.1
gagcctaaagtcggcggccgccctttgttttttggtttttttttttttttttatgtttgtctgaccgattcattgcgagtttgtacgtgtaaagggctgatgggaataaaaaacaaattttaatgccgatgcccccaagggccgcggcaaaccaacacataagtacgcttacggtacaaaggatgcgcccatgctcgcaacaagacaattattgggacaaaagc

SEQ ID NO: 85408 - DNA, 1061 bp, Zea mays
  unsure (1)..(1061): unsure at all n locations
  Clone ID: MRT4577_177901C.1
gtacccttcgnggncctggccgggnaaaccgggtatacgctcatcggttcctcggcgctcgcctcgacctccgactcgaagcggccctcctccctcgccggacgacggcgacggccgtggccgtctaacacatccgtggggagccgctcccttagttgggcctcctccggccatggtgcacagcgcgtacgatgctgtcgagctggtggctgacgtgccgggccacatcgaggccgtcgcctcccacgctgggaagctcctcgtcgcggtttccgacaccgaaggcttcctctggggctccgactgctccttgcgcatctactccgctccttccccctccgacggcggcggcgagatccggtgggacgggccctacgcgctcgagcggcaggagccgcggttctggcggcgcccgcccttagccatggaggtcagcgccagccgcgacctcctgatctcgctctccgagtggatcgcgctccaccgcctccccgggctcgagaccgtcgctgtcgtctctagcaagacaaagggggccaacgtctttgcttgggacgagcggcggggcttccttgccgtcggtcgacagaagcgactcaccgtcttccgcctcgacagtgggcgagaatttgttgaagtgaaggaatttggagtgccagatattctgaaatcaatggcctggtgtggtgataacatatgtcttggaatcaggcgggaatatatgataataaatagcatgaccggggcactaacagaagtgttttcttctgggaggatcgctcctcctttagttgtgcctctccttactggggaactgatccttggcaaggtataatacttcaataattcaatgttcgtgatgctgtgtccaattcctgttccatttcataaatctgttagatgggtgatcctttttggttcaagggttcaagtgacatcattctatgctttatgagaagattggcagatgttctaacaatgtacttattaccattttctaatttaaggacagtggaacattatcttgtgaaattttgaaatgtttatgtcaaagttgatgt

SEQ ID NO: 85409 - DNA, 622 bp, Zea mays
  Clone ID: MRT4577_177902C.1
ccgggagtatagggaactagaacagtacacttttgtgctttcttttattttctctaatgcttatcagttaggtgccattgcttgttagttttctataagcttatcttctgattgtgttttcattccattttacaactgttcaagtcatgcattgtcctgctcatgctcccttaatgagctgaactgtgatgaaccattttattcaagtggtatttgatctgttcttgcatttgctctttagatattttaccattttttgctgtatgacttctataatttaattcagtttgatgaattaatacagttttagccatattgcatatagttaagtggttgtgttggggctgtactggatatgacttttctaggactggatgcaaattcgcatgcaggtattcaacaaattattatcattagtaatatcagtagtagttgaatgcttttaactgaatccgccaaggttttgttggtacatgggatttcatgggaaacgtggtgactctgctttttttcttctatctggtatctaagctcctgagggaggtagatttgcaagaaaaagatgtggggggacgcgggcccagaagggtttccttccctgattcccgcacctcgctgggct

SEQ ID NO: 85410 - DNA, 403 bp, Zea mays
  Clone ID: MRT4577_177903C.1
attcggctcgaggggagattgctagcgcacgtgttttaaacatggcgcatagcatgatcaatacatagcacgattggactcatacgaagagattcgttgacgcctacatgctgaacacctggttcatcaagcagacgccgttggatgagctcaagtacaaccacgtgcgatactgtcgatacctaagaagatacccagcttgtgttcatctcacagaacacatctgacagcgaaggaccatactaggaggggaccaacaagaacgtcgaaatactggtagataaaggcccccgagacgacaataacatcactatacgtgacttaaggtagccaatctgggacggaagagccgaccaaacgccggccgtgggccatggtctacctcaccgacactggactgaaa

SEQ ID NO: 85411 - DNA, 370 bp, Zea mays
  Clone ID: MRT4577_177904C.1
atccgtttattctttgcactcattttcgaagaatattcttttgttctcgtttgagcgaattattgttcagcatttgatcgtttgcaggatttgatctcagcataccttcctagataaggatcacgctcagccaagttcttactctcactcaccatacacaactcgagtaagaaccaagcacaacgaaatttgcaactgaggggatcgaatcagtattggacatcgaccatggacacaaatcctgagatagtccagcctgcggactggcagaccggtgaagctgtcccagtctttctcatccacgatggcggcggcaccacattctcataccactgcctagaacctctctgccgtccagtctacggcatct

SEQ ID NO: 85412 - DNA, 829 bp, Zea mays
  Clone ID: MRT4577_177905C.1
caaaaggtgctaaaaaagaagccacggaagggttcaaagaacactaaacctatcacaaaaactgaagattgtgagagcttcttcccgttcgagcgtccacctcaagtccctgatgatgatgaggaaattgatgaggatatagctgaacagttgcagaacgaaatggaacaagattatgatattggatctaccatcagagacaagattatcccacatgctgtctcgtggttcactggagaggctgctcaagatgaggagtttgaagttatggatggtgaggatgacgatgatgaagacaatgatgatgaagacgaagatgacgaggatgatgatgatgatgatgattacgattcaaagaagaccaagggaactgccggaggggaagggcagcagggcgaacgacctgcagagtgcaagcagcagtgaggtgctgcacaatgaatgttggcaggcattgtttgtggagcaattagtttggttctgcttgatgctcaaggtcattgagttggtttgtggaaccttcgagggggcgcttgttggttttatggaattggttggggaatttttctgggacatggcgttatatcattatatgtgggtagtttcttcactttctgtattgggtttcagatattatatgtgttcttatgcttggagtgaagatggttgccactctggtatgtcttattgtgcataccactggcatagtgtgctgtctgtactttcatcaagcgtgccgtgccgctgagaaattttgctctaggggaaaggctagccttttgcctgaaaatgttttgcgaattgcatcttgcataaaaaaaaacccccc

SEQ ID NO: 85413 - DNA, 417 bp, Zea mays
  Clone ID: MRT4577_177906C.1
gtaatagcattttccattttacctgttcaattttttgacgcccaacggatacaaaaaaaatgtgggccgggcaaggcccgagcggacaaacaggaaaaaggaggggtttggacatgccaaggaaaactcaactctactgggaaggacccagcacgcccgaagctaaaagaagaagggggggggttcttacaagggttcaaaaaaaccaaaaaaaaggggacggtggcctcggggccccaaaaaaacgcaaacctggaaaagaaatccggtgcggcttgggcaacgggggcggggggggagccatcacccccgggggacaacgaccacaaaaaaccaacggcacccccggtctagaaccaaaagggggattgccagaaaacaactttgcacacccccccggggggaaccacaccccaa

SEQ ID NO: 85414 - DNA, 459 bp, Zea mays
  Clone ID: MRT4577_177907C.1
actacagagaagccggagactaggctgagcagactagcttgcaccgcaccgtgtgctgaactgtctcagatcctgtttagccggaggctcgtgccctcctcccgcctctgtggcccaacagaagcgaggtgagacggctctttctgctagctagagaaatagactagtatgtatgtagagataagcagccagcttgcacaaggcatggtagatatgcaacgaccatgtggtgatcggacaccatgcggacagccatctggggcatctggaatgggaccaccttggtgctattactatcaccggggcctacgttaatacgcatatgtaagaaggggtgggtggagcagtactctccgatcccgtacgtggcgacgctgatgaactcatgatgtgggagaagtacaggctgccgctgatgcacccgcacagcatgctggtgatcaccatcaccggcaccga

SEQ ID NO: 85415 - DNA, 221 bp, Zea mays
  Clone ID: MRT4577_177908C.1
catccaacctttcataactactttcctattttatccttctatttcatctcttcctatcattgtaaatcaaaattacaccaaatgttgttatcttcacccaccaatatgtaacgttatctgtttttaaaccttcctaagacatcttatttttaccctactgattaccacccctttacagtaattcaacctatttcaataagaacccatattttacacaattt

SEQ ID NO: 85416 - DNA, 388 bp, Zea mays
  Clone ID: MRT4577_177909C.1
cccagcgtccgtccagcgttcgggcaacgtggtggctcgtgagacatatgctcttacgaagattttaaggacaggcgaggtgtcttgcagatttgtctaagagggtccttctgccaacttggattccggtggtggtggaggggttatgacctttagtattagttatcgttttttgggggctgtgtggattgtgtgtaggagcgttgtggatgagacctatgcatgtgtttctggatctcgttcatgccttcgtgctatgagttggttgtgtgagactatctgcgtctcgtcgtttggcccattcttcggatgttttaccgggcagggggtttcgtagacttgcgggatgttgttatgtgttcagaccggttgtgcagtgccttggcgt

SEQ ID NO: 85417 - DNA, 415 bp, Zea mays
  unsure (1)..(415): unsure at all n locations
  Clone ID: MRT4577_17790C.1
aaaactaggcaaacacgcggagnagaagcaccataagcnctagagcagccgtttggccatcaaaaaccctatctatgatctctatttctatcgattaggtaagatatacagagagacgttactatgagggcgaattcatgctaaccctacaatcgaaggcaatatagtattttatacccaacactctaacactggcatgagcggggggggcagaagcagtaattcaagggagaaacaccaacatagtctacaccctgtcttccttcgtgaatgatcccgttatacgaaaaaagtaaggtagaggacaccagatatgcggcaacggaggcagcaccagtatacattacacgagtagaacactaggaatactcaataggctatgcataacaggatgataacaggcagccaccacagg

SEQ ID NO: 85418 - DNA, 571 bp, Zea mays
  Clone ID: MRT4577_177910C.1
aaccaaaacacgcatagacatttgttgcaatggatttattccaaatgtgcgctgcaaaattcaacagttgctcacaacacatttctagaccataggaaaatccagcaataaacatcactgaaatgacatcttcacaacagattgaccacaggccaacagcaggcattcctcggttcagcagatgtgcccattggtgtagaaactcgtgataacaggacttaccatcatgacaagtgctataacactggccacacatctctagcatgtagccagcaaaggtcagcagaagctaccaaggttctgaacctgtggaaggtgggttttgccacactaccctgccagaccaatacacagctattcactggcttgtcagcttccatttctgtgtcttcatcaccaccaacagcagcaggccagtctatacggtttagcatgagcttattatatcttttgattgacttcttccccccttcaacaaccacaacactgatactatcagtgatgaccacagcacctgttagtttattctcttgagcattcacatcgactttgaagcgtgtttggggatggg

SEQ ID NO: 85419 - DNA, 464 bp, Zea mays
  Clone ID: MRT4577_177911C.1
ctctatgcgaacagcagagctataccttgcaaattgactgaaatactaacatatttcgcccatgctcatgaacctccctttctttaaggatagacatacctaagcgataaaaccaattctttgagacttgaataatggatccactgtatgaatgatgaattagattcatagacgttcctaactaaaagagggataacgaaagaattcgttgaaattcttctaatgatcgaacacatacaatccgattgacaacaaaattgttgacaatcgtaaaggaagtgatcgaacattcagagatattcaacgaatactttccttatccatcttttatttcggaactgctaaggaactaaaacagaatccataaaggtgaacctttcgacatgacacgaagaattcgatctctagcataggaataactagacataaaggaaggggaatgacagagcatcggcgaagaaacg

SEQ ID NO: 85420 - DNA, 483 bp, Zea mays
  Clone ID: MRT4577_177912C.1
aaattgggtcctttgttgaggacgcatggaagccaataaaccaagcagccctcgttggggaccgtgttttgcttccggttgtgcaacaagtccccggcctcccaataagcataatggttttttccccggcaaggttgaccgttatacggcagcgagcatttcaaggaaacgttggaaaacctgtttgtcaaccatgttcccctttgctagttagtacgccctagctaacagtggccggagtatatatatggattacttcccgtacggaccatctatgttgtgtgtgtgtaaagaatgtgttggtaataatacacagaccttggtaaatgggacatgaggatatgtatccattgtacgtacgtgtttgcatgcgaaacctatacttacttgtcgctggatagtacaacactatccagcgacaaataaaaaaaaacggagggagtatatattatcttgtcttaatttgttcttatgtctctcccc

SEQ ID NO: 85421 - DNA, 655 bp, Zea mays
  Clone ID: MRT4577_177913C.1
accgggagcatcggtagccgcgcgggcgaggggcgaccggcgcctgcacgcgtacatctccgcccagctcccgtcggccagcccatgctcctacgattaccggtacaaggaaggatcggctggggcgctcggcgtcgtgggcaccgactcggcgaccatcgcgctgcccggcggcaaggtggcgcagctgcaagacgtggtcctgggttgctcctccacgcatgatggccagagcttcaagtcagtagacggcgtgctgagcctgggcaacgccaagatctcgttcgcgtcccgcgccgccgcgcgcttcggtggtagcttctcctactgcctcgtcgaccacctcgccccgcgcaacgccaccgggtaccttgccttcggcccagggcaggtgccccggaccccggcgacgcagacgaagctgttcctggaccccgcgatgcccttctacggcgtgaaagtcgacgccgtccacgtggccggccaggccctcgacatccccgccgaggtgtgggaccccaaagcggcggcgtgatcctcgacttcggcacgacccttacggtcctcgtcaccccggcgtacaaggccctggtcgccgtgctgaccaagctcctggcccgggtccccaaagtggactttcccccgttcgagcact

SEQ ID NO: 85422 - DNA, 1871 bp, Zea mays
  Clone ID: MRT4577_177914C.1
gatcgacattcgaatattgcaagcaacaatttcagcggcatgataccccaagaattcagctcgatcccaaacctaatagttgcaggaaactcatttgtcaatatgcctgcctccccgccacaagctctgacgccacctccgaatccacgtggccggccagacgatcgtcgaggaccaaccagcgctccaactgtcccggagactcccattgacccggacgacaagaagatgcaaacgggacctcttgtagggatagctgttggctcaatagctgctgcctcgtgcgttcttttcgcgctggtgttgtgccttcacaacgcacggaaaaaacccgatgatgggagcagtgaagcgaaagcgtctagcagggaagtcatggacagtagccatgacaacgctgctgtggcaacttcagacctccaactgatccagcctgctggaaagatgactccggacgacagagcgcatggtccaaacggttgtaccgccaaaaggccaaagcagcaggttactgtgacgacagtgagttcctacacagttgctgctctccaagtcgctacgaacagcttctgccaagactctctcctaggcgagggctcgcttgggcgtgtttacaaggctgtttttcctaacgggaaggtacttgctgtgaagaagatagacagcgcttcgctgtctctgtacgaagaagacaactttctcgcggttgtgtcgaacgtgtcccggctcaggcatccaaacatcgtgccccttgcaggctactgcgtggagcacgggcagaggctccttgcgtacgagtacgtcgggaacggaacgctgcatgacatgctgcacttctctgacgacgacgggatgacgatgccgggcaagactactaggctcgcatggaacacccgcgcgaggatagcgctaggcaccgcgcgcgctctagagtacctgcatgaggtgtgcctgcccccggtggtgcacagggccttcaagtcatcaaacatcctgctcgacgacgagtacagcccgcgtctgtccgactgtgggctcgctgctctgtcgccgaaccctgagactgagagggaggctttcgctggagtggttggctccttcggatacagcgcccctgagttcgccatgtcagggacgtacactgccaagagtgacgtgtacagtttcggggtagtgatgctggagctgttgaccggccgcaagccgctagacagctccagggagaggtcggaacagtctcttgtgagatgggcgaccccgcagctccacgacatcgatctgctcgccaagatggtcgatcctgcactggatgggctgtaccctgccaagtccctctcccgtttcgccgacataatcgccatctgcgtccagtcggagccggagttccggccgccgatgtccgaagtcgtgcagcagctggtgcgcctgatgcagcgggcgagcatcgtgaggcgacaatcggacgaccagctgggctactcgtacagggttcccgagcgcgacggcggcggcacggcaggcggcgacgtcgtcgtcgcctgagctagctagctagctagaggccgcgacgagaccaaagctggcgtacactcctactcctacacaaagcgctgcacagtttatatatattcataaacaaaagagcgagcaaaagaaaagaaaagcagttggatatggatggatccttcacgttttgttaaaaagtcacccgtaaacgacatatatgtatagggtttgcagcgtactgggacgtttcttcgtgagctgcgagtgtcatgtatagtgtgcgctcttgccagtggtagatatataggataggagaaaaaaaaacgtgtcttcttttgttggtgtgttcagttcttcggccataa

SEQ ID NO: 85423 - DNA, 788 bp, Zea mays
  Clone ID: MRT4577_177915C.1
cggatacagcgcccctgagttcgccatgtcagggacgtacactgccaaaagtgacgtgtacagtttcggggtagtgatgctggagctgttgaccggccgcaagccgctagacagctccagggagaggtcggaacagtctcttgtgagatgggcgaccccgcagctccacgacatcgatctgctcgccaagatggtcgatcctgcactggatgggctgtaccctgccaagtccctctcccgtttcgccgacataatcgccatctgcgtccagtcggagccggagttccggccgccgatgtccgaagtcgtgcagcagctggtgcgcctgatgcagcgggcgagcatcgtgaggcgacaatcggacgaccagctgggctactcgtacagggttcccgagcgcgacggcggcggcacggcaggcggcgacgtcgtcgtcgcctgagctagctagctagatagccgcgacgagaccaaagctggcgtacactcctactcctacacaaagcgctgcacagtttatatatatatatatatatatatatatatttcataaacaaagagcgagcaaaagaaaagaaaagcagttggatggattcttcacgttttgttaaaaagtcacatgtaaacgacatatatgtatagggtttgcagcgtaccgggacgtttcttcgtgagctgcgggtgtcatgtatagtgtgcgctctcttgccagtggtagatatataggataggagaagaaaaaaaagcgtgtcttcttttgttggtgtgttaaaaaaaaaaaataaaaa

SEQ ID NO: 85424 - DNA, 681 bp, Zea mays
  Clone ID: MRT4577_177916C.1
agataggaactcacttgattctacttcatcaacctcaaagagaaggaagcgggacaaaggaaatgaactcagcaagtcaagtgacccatttttggatatgttaggtggattccgtggtgatcttaagaatgcttcaaatcacttcgggaaaatgactgaaatcatggagcgtgaagctaagctccaagaggaagctgcacatgaggatccaatgcaagcactacaacaaaaatctatatctgagttgactaggttgggatttactggtacagagcttgtcaaagcagcgggtgtgtttgtgaatgtcccaaatcagatgaccatgctttttgcacttccagagactctaaggagggagttcatactacatatgatccaatgatgcacatagaaagaagtgaggccctgttgctgaatttgagaagaactcgaagctagctattttggaccaggccaaggtgactgacttcagtgataggatcattcgaaagcttaaaaactttgagttggcttgtactctgttatcagacttctatgaagtttaaaaaccatgtaacaggatagttcgctttgctacatacaatggattttactctgttattagatcttcatacaatggattttactttgttatcagcctttaaaaatgagctggcttgtactctattatcaaatcttcag

SEQ ID NO: 85425 - DNA, 388 bp, Zea mays
  unsure (1)..(388): unsure at all n locations
  Clone ID: MRT4577_177917C.1
cagcgaccatcagtcagcagacctcgagtcctccggggtcagagtcctaaccctagcgtgcggccgccaagctccancagatcccggtccgccactccgccgcccctcatctccgacctgatcacctgagcgcgccgcccctcctctccctcgggcgctgacgcattgtccgcgcctccgcggtccgccggtccgcccagggcccatgcagttgctgcctgcctgccttgctgccgtccgcccatccggcgtccgccaggccgcccacactacttctacggccagcgcccagccgcccaggcacactagttgcatttctttggcacttaaagttcaagatagcctgctgtaggccatcggccgtacagatgattgatgatgacgccaa

SEQ ID NO: 85426 - DNA, 1935 bp, Zea mays
  Clone ID: MRT4577_177918C.1
ggtacaatctcaagtcttattgtatttttggactttggtgctcatctgctacagctaatggctatccagactcggaggagaaaaatggttctcagaaatatgatgtcttctttcatttttatgttttattacatttgggtactactactcatctcatataagaggaagtgttggaaaatagagagaaggataagagttagagaacttagaagcaaaatggttctcagaaagatatcatctaggaggcttcactgtgcaaaatccaccacgaagcacagaagaatattttaacttgtgccatgctagagctagaaatattattgagagagcctttggaaggctaaagggccgctgggctattttaaggtctccgtcattttttccggtcatcgcgtggaagaggaaaaagtaaaagggtgtggacttattttgaggatgaagcattggtgaaggcactctatgagctatcccttgatccaaagtggaaaagtgagggtagtttcaagaatggttatctatctgtcctcaaagctatctttttgttgaaaaaattccaggttgtggcctcactgcagttccacatattgagtctagggtcagacactttagaacaaagtatggtgcaattgaggttatgctagcaaatagtgggttttcttgggatgagaacaggaagatggtacaatgtgagaagcaacaatatgaggaccattgtaagagacatcctgatgcaaagggcttatatggcatttcattcccacaccttgataccttagccgctatatatgggaaggacattacgacgggagaaggtgctgaaggtcttggtgatgctatttcaaacttggagaaagaaataactttggaagagagtcatgatcaagaagtggaagaagatagtatgtctagagaaacaccacgatgggcttcagataggaacttacttgattctacttcatcaacctctaagagaaggaagcgagacaaaggaaatgaagttcgcaagtcaagtgacccatttttggatatgttaggtgaatttcttgatgatcttaagaacgcttcaaatcactttggaaaaatgactgaaatcatggagcgtgaagctaagctccaagaggaggctgcacataaggatccaatgcaagccctacaacaaaaatctataactgagctgactaggttgggatttaccagtactgagcttgtcaaggcagcgagtgtgtttgtgaatgtgccaaaccagatgaccatgctttttgcacttccagagactctaaggagagggttcatactgaacatgctcgccaatgaggctcaaaagaattgagtgctgaagagatgatcagttctgataagctaatgttcatctgtgaagcatttgaagttggaacaattttacagcatggataatggtctgaaatttctggaatacaaaattttggaagtattttcttagcatattcaagtttgtgcagatttctggatgtgcaagttccataaatttttggaagtattttcttaacttcatgttcttcattagacatggtgatgcagcatggataatggtctgaaatatggaagtatttctgttatttttgttgcatgtattgtttactgctagacgtcagcatggtgcaattttcacatatcaggctgcagcatttccagatcgctagtaggtattctggccgacagccaacagtgttaccaaacgctgtaaagggagctaatcacgttttccacattaaccaaacaaaataaggcaacggttacaatgtactatcagatagcggtggtaacccactccattcctattaccatttcaggtactgaaccaaacagcaccttaattaaagcagctaattttgcaatgtatattgtagtagatggtgatgttttatgctggtgaatcaccggattgtaattgttgct

SEQ ID NO: 85427 - DNA, 383 bp, Zea mays
  Clone ID: MRT4577_177919C.1
ggcatgctttcacttttactcaaaaacatgcctggcgtaggatcctgggaggagcccattcgtgtgatgagcgggcggcccgaaaaggcatacaagcccgccctgcagccgcacgtggacacctcctcaaacctagagctctacccggacagcgtgcaggcctccacagagtgcctctagcccaagctgccaacgaagcccggcccgggcggcggcttggacgcccgctactcaaccttcaagggcggcctgacgaccctgctgaaccacgtctaccctctcgccggccgcattgtagccaacccaagctccggcgcccccgagctccagtgccacaaccagcccacggcgctcggagcgggaggaagccagcgacgccctgg

SEQ ID NO: 85428 - DNA, 526 bp, Zea mays
  Clone ID: MRT4577_17791C.1
cccaacttgggaggaaaggagttgagaaaaaacaaagacgaatccgcgcctgacacaaacaagagggacctctagaaaggagagagttaagccatccctccatgaccaaaaatcacccacccactcactaaaacctggagcttagcagctccaaccaaacaccacaatctaacttcttctctgctgaagttttgggctaccgaaagggaaggagaggcaccctcaaaaacataaatatttctcttattccaaagggtccaagcaccaaaaataacgaaagaatgaaaaccttcccttctatctttctccactcgccggcttgatttcctccaccattccgcgaaacagacctcgttctgtctaggagaaataccacccaaccccagtggggcaacaaatggtgccaaaattgccttgtaaaaacgcaggtcgtgagaatgtttttttctctcgaacgcgcaggagagctgcgcatcattatattaagataggaaaaaaatgtccaaaatggaccagagtacaaaac

SEQ ID NO: 85429 - DNA, 797 bp, Zea mays
  Clone ID: MRT4577_177920C.1
gggaaaaaaattagctaatacgagcctatatggcatgctcttttgcattcgtacagttgtggcttgctgtatcttctgtgatgaacccatggagctaggcaattttaccttgatgtgcttatcctcaaatttgactgatgctaacagttgttgaacagaacttgccaacttgttgtctttggatgccaccaccattgctacaattaaaagttgaatgacgggggacttctgtccaaattgagagatccaagtgcttgatgaaagaaagaaattcaaagactagtgagcatcaaacactaggggaatagcttgcacaattgcatggctggattttaaaatacagttgtatttgttgtaccactccgatacctatggttacaaatacagttcacgccattttttgttatgttttcaagaaaaaaaaacagtagctaaaattacagttgcatttgacatacaacatacagcaaaaactggaccaaaaaatataagcagtgcagaaactctgtttccgctcctgattattgagagtttgttggaattcgttttatttattcggaattttctgattgttatagggttcttttggtgtcttcaaatccatcgtttgttctttcatatacagatatgtgaagaagttcaaaggaatacaggtacaaataactcagcatcaacattaagcttgaaaaaagtgacatagcaggttaacaatattaatgatatcaacagacctgtaagcaatttgttcattaactctacagcaaatgatggtcctgacagaacaacaaacggttggc

SEQ ID NO: 85430 - DNA, 423 bp, Zea mays
  Clone ID: MRT4577_177921C.1
aaagccccaaacaagaaaccatcctgggcatgggatggaaaacatacccatgggggcattacaagcttaaaaacagggctgaccttgcccaaagcagtatataaacgatccgtcctttattttaacataggacgggactaaacacattggtaaaaccggggccatacagccatactaaacacagttttttggattttaaaaccccttaacaaaaggcccaaggggggggtcgggccctggggagggccaaacccaggaccatgtacctggaaagtctggctcggcacaacctggaaaacaccgggtggctccttgaaaaccttgacctgctggggggggagcttccgggaaaagccggtggcggcgttcttggaggggaagagcactgcgtccctggccttctgttcccttccaaggacgggg

SEQ ID NO: 85431 - DNA, 476 bp, Zea mays
  Clone ID: MRT4577_177922C.1
acgcgggggagccgggggcaggcaacctggtgctgcgcccctcgcctgtaccgagacgctataccatccggctccgccagcccgcctctgcctgcctacgtgggtgtgagaccgcgaggagacacgacgccaagtagggtacccctcacaccgatgcacgaggccaacccggctttgagattgtggaggcttaagcgtgatggcatgtgctcaccaggcgagggcacgcgagccgactacgactacctaatgagactgctactcatctgagtcaggggggtcggaaaaggatgacagctgttacggatcctagatggatcattcaccactagcatcattacgcactctcgctattgactacaagataaggactgtcgagcgggacggcagacggcttaacttgcacatctgtgacactgcacgtcaagatcgctgccgcacgattactactgcttactactggggagcactgggca

SEQ ID NO: 85432 - DNA, 380 bp, Zea mays
  Clone ID: MRT4577_177923C.1
ggcaaagctgaacgagaagaagttcttggcgccaagcagccccgctagctccctgctgtcgcaacacaggctgcgcataatcattgaaaacgcacgtgagttgctgaaggtcatcgacgagttcggatcgttcgacagctactgctggagcttcctgagcaacaagccaacggtcggcagataccggcacacgcgggaggtgccgctgcggacggccaaggccgacgccatcagccaggacctgatgcggcgggggttcctcggcgtcgggccgacggtggtctacgccttcatgcaggccgtcggcatggccaatgaccacctcgttacctgctaccgcttcgaggagtgctgcgacctcgaatcttgcgcggcgcctg

SEQ ID NO: 85433 - DNA, 1950 bp, Zea mays
  Clone ID: MRT4577_177924C.1
ggccgccccttttttttttttttttttggaaaacttcttccaggtgcacatttaacgaaggacatcattgaagccatgattaaggccacaaaaatttacaagcaaccaatcacagggttggttggacgtgacccatgaatacattatatcaaagtttactcaacttcgatagatatatgcgcattaggaaggaggttaaaatacccctgtggccgtgattttcttcccgtagtcaaggttttttttccttgatttcttcgtgtactagtagaacaaaaattaacaagcgatttacagcatatggccgaagatccagcatgctctctcaaccaataggactgacatatccgtgtgtcaaaacaccaatgtatcacccagtagataggatcaacatgtttatctgtccccggccatggtgaagttggtcccaacaaaacgaagtttcaactgagttgcttacttcttggctcctgtttttccatttggagttttctttccttcagttccgctcttcttagttaccgtcggtgagggagcactcagctttttctgtaatggcgatgacctttttccaggattcactcctctaacgtctgaactttttgaacccttgagttgggtctttcttgcagctgagccccctccgtttgataaaccagaagcttttggggcactagatggcctcacgcaatccagatctgacgagcaattagttgcaacctcgaagtcatcggaatcctctgttgcaacagacccggaccagctccattgctgttcagggctgcttctttggtagaaggctagatcttgtgtgccatctggtcccaactctggcagcgaattgctgctcccgaatggcgagtgctcagcgaaatctcccaatgccgagtcgttctctatacttccatctactattgggtgcctcaacgcaggtaatccattgcccgttctcattctatatatgtctgggcttgattgagtgcttcgaatgctctcttgacctccatctttcctagctaatgctgccctgaggcaagcaatctgttctttgagctctctaacttcttctcctccttcacctccttcctcgtttgacttggctgtaaggtcttgtatttggttgtaaagcttgcggttttcctgaacaaacttacgatatccagaagccgcatgagaaacaatacgcaactgattaccaagctttttaaggtcttcagagtacagcagttttaactgctccatgcaacacttaactgtggacatgttacttttcaaatcctggatctgtttctcctctcgatcaaaatttctcactggctttggcatatttttatttacattatcattgcttagtggtgcatgtactaatgtgcttacatcttctgtcagactcaacgcattctcatcaacttcgtccatcttaatattttcagtggccttctccagatcactgcaggaagtcaactccacttgtggagggtccactctggataatgatttactgtcattggtgttacagggagactccattctcaaaactgagttacagccattggtatccatagtttctttcaccttctccagatcactgcaggaagtcaactccacttgtggagggtccactctggataatgatttactgtcattggtgttacagggagactccattctcaaaactgagttacagccgttggtatccatagtttctttcaccaattcactctggcttgcaatacggtgctcaagttcattaattactttgctcaagagtgattctacaactgattgaatttcttctggtttcttatctgagagaactgtttgaacaagcatccggatggaatctggagcagttgtttcagtgagttctggagaaaaatcaagacctatttgctccagtgatacgccatcccgaagtaattcagctgagtgactccttatcatcgccct

SEQ ID NO: 85434 - DNA, 622 bp, Zea mays
  Clone ID: MRT4577_177925C.1
gattctatcgcgcacatctgctgatcttctgttctctccacccccgttgatccgctcctcattccccatctcctgagtcatcatttccccaggacccatgatatacactacttcaaggctcccttgctaacagcgaagagtgctacagttccaggtcaaccatgacatctcttagtgctgtgcctgagacctcaaggaaacctactcctgactcaccctgtagtacctatgggtctaggattattcatgattgtgggcctcgaatcgtccatgtcccttacaatcatgacaacggaccaacaacggcctgtcctcaatccactgacataaaaccagatctttactcgtgatcattacatctgatgcagaatatgagccgcctactactgtcgctgctgcatatgtgaggggaatgacactactgttctgtgtggaagatcacaacagtgtacactgatgctatgaccatgcagaggctatgaattgctcaagagtatcgtgcaaaccttaatctaaagaagagaggcctctgcattctatgagaagcatggcttcacgtccacaggcgccgctagattgagctctagtgaccataagagtgggctgactgataacatgacga

SEQ ID NO: 85435 - DNA, 200 bp, Zea mays
  Clone ID: MRT4577_177926C.1
tttttactttcagaacaaggaggcgctaataagttaggtgggacgaattcataaattatgtgcaaatcacctgattttagctcgggctccagtggtgggacatttgtacttcatgggacctgggacacttcgtgcaaaagaggctctggatggttaaaaggagacatttggtcctacgtttcgcaaggacgcgaccacta

SEQ ID NO: 85436 - DNA, 758 bp, Zea mays
  Clone ID: MRT4577_177927C.1
ccgccacccaaccccatggccgccgccaccggaagaaccatgaagacgatggcgctcgtcgtcgtcctcgccgccctcctctgctccatctcggtcgccgctgcagccagcggcggcctttcttcgtacgtggtgtacctcggccagcacgcgcacggcgcggcgctgggcacgcacggcgccgaggagctgcaggcgctggagcgcgacgccgccgaggcgcactgcgacctcctcgccggcgtcttgggcggagacaagcagaaggcgcgggaggcgatcttctactcgtacacgaagcacatcaacggcttcgcagccaacctggacgccgccaccgccgccgagattgcggggaaacccggcgtgatctctgtgttccccaaccagggccgcaagctgcacacgacccggtcatggcagttcgtcggcctggccgggcctggcggcgtcctccacggcggggcgtggcggaaggccaagttcggcgccgacaccatcatcggcaacttcgacactggtgtgtggccggaatccgagagctttagagatgacggtctggggccagttccgtcccattggaaaggagcctgcgacaaaggccaggatgataaattcctttgcaacagggagctgatcggcgcgcgctacttcaacaagggctacgcggcggcggcaggcgcgctgaacgcgtcgatgaacccccacgcgacatggacggccacggcacgcacacgctgtccacggcgggcggctcg

SEQ ID NO: 85437 - DNA, 174 bp, Zea mays
  Clone ID: MRT4577_177928C.1
aacccctctctctactctcaaaccccttctctcacaaataatccttatttccccttcctctcacgggacccaaggctttggcgataaagacacattcatatcttcttctatttcattatattcattccttcactccatccatgtaccttccctctccttatattaaatacaatc

SEQ ID NO: 85438 - DNA, 454 bp, Zea mays
  Clone ID: MRT4577_177929C.1
gcagctcgactctagagcgagtagtgactgccttgctaatgtgacccacaatttggtcgaccgtatgattactttcaatcgatgctcgcacttgagttggacgtgtcagttgtgctttttcctccataacatgatcatcttgatctcccacgtgatcaccctccttttattgaataacctgttcatcatctcgagttgggggatgcaccattgacgaggcagaacgttgatcttgctacttttgatgctggggacgcacatcgtcaagcggcgtggtacgtattgcgaccgtaggaatgtcttcttcatatacatcatgaacatcaacaactggctctgttgctgagccattagtctcatcaaatacaacgctacttgagactttaaccaaacccgatgattcgctgaacaccctatatgcctttgtatgtgagtcatcacctaacaaaaaccc

SEQ ID NO: 85439 - DNA, 185 bp, Zea mays
  unsure (1)..(185): unsure at all n locations
  Clone ID: MRT4577_17792C.1
cgaatggtacctcgagccgccggaacacacacctctagtagcgagaggcaacggacgtaagaagtcntctacttcttgcatctaattagacgacttcttccgccctctgttctttgccaccctcgcttcgcatccgcgggcgctcctcaccgtctacgttcttgctctctagggtcttgtactcc

SEQ ID NO: 85440 - DNA, 488 bp, Zea mays
  Clone ID: MRT4577_177930C.1
ccggccgggattgtcatccactaaataaatattgccagtccggcagccgagatggccctacgccgccagctctgcctcggcgtccgcggcctgatggcaaccacaagcgcggacaagtccggcttcatggactccaacccgatccgtacctgacaccgaccgggcggcctcagagcgcgaggcagcatgttctgcattgtaggtcgtacccgcgacgctcttaccttcgcactgcttcgccagacggtatggaaagagctactacagcgcgtcggagccacagaccgcttcagactgctccagaggtccgctcgtccaggtactactcaatcggaaaaggctctacgtaccgccgtccacatgtaccgtttcctgtactgagctgaagaggaatgccgtgcaaaccgggtcagctggctgcagaactgctccgccacgactcgacggcaaccaccagatgcgcgccgccgccgacgtcgaggtgtcgg

SEQ ID NO: 85441 - DNA, 344 bp, Zea mays
  Clone ID: MRT4577_177931C.1
acgtacaccaatgactgatcttatggagaccatgacgcttgtagaacgacgaaggcaataacagcatcatacttgattggatgagcaagatatttcctatacttatgctcatttgctctttctgattctgatgctaacactacaataatgcctgggtgctagaaagcaagctataggtgcctttgttcattgatacctataacatgactgattagcttcacatgctgaaagagcaggtatcataccgtatgagcttatactggccgtcattgctggtatgatgcctttattgcacttgactttctatgaagcttgaggcctatactattatgcagtgattgccg

SEQ ID NO: 85442 - DNA, 700 bp, Zea mays
  Clone ID: MRT4577_177932C.1
tctggatgggtgtggagcaacttcatgccatgaaacttcgagtggtggaaatttattgaggttcggaattacaatgcaggggaggggttcaaaagtatgggatgttgttcttgacacttccaccatggagatcagttgtggttgtagaaagtttgaaaggatgggtcttctttgttcgcatgccctcaaagtcttcaccctgcagaatgttgacacaattccagaaaagtatgttttgaaacgctggacaaaagatgccaggagaagcatgtatacacttgctcaggatgattcaacccaacacgaatgcacagaggctgaacttgcatatcgcaatcgggcaatgcattatgcatataacctaattataaagagccaggaactggaagaatcacgaaaaatattctgggactcccttgaaactggagagaaggcactggaagtgttctttgaaatgagaaacatgcgcactcaagcagccaaggatgctgataagaatgtaaagaagaagaaaaaaacatcaaaaggaacaaacccaaaaaaagctaaacaagccccaggagtttcctcaactggtccagagctgatagtccatactaatgagcatcaatttcaatcttcacaagatgctcagggtaatgcaaccattggaagaccatattactatcagcaggcttttccaaatgcccctatacaacca

SEQ ID NO: 85443 - DNA, 215 bp, Zea mays
  unsure (1)..(215): unsure at all n locations
  Clone ID: MRT4577_177933C.1
tcagtgtggcaagagagtgacgtctcaaggcgtgaaagagaggagcttgagaaacaaaaagctcatggaacttatatgaagcttcaggagcaaggaaaaacagaacaaggcacgaaaagatgtggaacgtcttnctttaataagacaacaagaggctgatgctgcgaagaaacgcgaagaggagaaagctggcaaggagcagaggaagtccgaag

SEQ ID NO: 85444 - DNA, 365 bp, Zea mays
  Clone ID: MRT4577_177934C.1
aaaaggtaacacccgagaggcccggggttattattaaaaaaaaggggactgggacacgtaactggaaaaggggggggcgacccatatggggaccacttatttatgggttaaaaaaaaaaaagggtaattaaaacgaaaacaggtgtcccccacaccatgtcacattaggggataggacgggcggatgggaaagcccaaaaacccctccgggttgccggggacgttttttttaatcctgagggatccgggggggccccacccctgcccccacaagtttttgacaaaccaaaacctggcgccgccggccgccttctggccgtaaccaacaacggggaccccggggttgagggtggtcccgcagggcc

SEQ ID NO: 85445 - DNA, 610 bp, Zea mays
  unsure (1)..(610): unsure at all n locations
  Clone ID: MRT4577_177935C.1
gccggnaaaaaaaaaaaaaatactcctttctcacagcaatagngctggcaganaactntccttatccctggaacacagtggacatttataccatctaagnnccatgagagttgaagcttctgacatgntctgcacctgcaaggccattgggttagttggtgacganagaaaagagtgaaagttgggaaaaggaagcnctggaaattttggcttgcacagagatganttggtggtggtgaaagcattgggagcgtgttttatgagacgtcttagatgcaatgggatgctgggaactgcaaaaaaacgagactgcgtgaaatttttatttggtctggggttttgacaaacaaatgcaagccaagaaaactaaagatttctctggaagttggcgtatgaagattgctttatcaagagcactgtttattaatcccaacaatcttttgcttggtgaagccccaaaccctctaaatcttgaggcttgtgtcttggtggaagagacactgaagaaatttgaccgcctacttgttggcatattacactcccaagaatttttaaatggagggggggctaacattattcatatgcaaaacaagaagctcaagttatacac

SEQ ID NO: 85446 - DNA, 804 bp, Zea mays
  unsure (1)..(804): unsure at all n locations
  Clone ID: MRT4577_177936C.1
ccggccgggatctaatacaccatcgtctttcgttcaaagatccgctctgtcaacttacatacactgacaaagtacattcgttaacacaaacatacatatcaaacaccaaacactatcatgaagacttccactatcatcctcgccgctgcggccgttgttgccaacgcccactacgacgacactcacgttggattcaccactgtctacaagaacggcaccgtcactgagcctactcagtacactaccagcactgtctacagcaccaagacatacaccgtcactcagtgccctcccaccgttgtcaactgccctgtcggccatgtcacaaccgagaccattgctgtttccacaaccatctgccctgttactgaggtccacaaccctaccgagcctgctcaccccaaccctaccgagcctagcaagcctcatgagcctactcaccccggccaggacgttatcaccaagactcagacctacgcctaccctcaccccaccaaccacggcgagagtgtgaccaagaccatcacttacaccgttcctgtcgatcacaccaacaacggtaccgctgtctaccctccccacacctaccaccctgttnccttctggtggtgctcanccctaccggtgtcgctcctcctcctcctcactccgggttccgagggtggaaagactcctcagggcgagcaacctagcaacgatgacggtaccgacagcggcagcaacggtggcagcaagggtagcgacagcggaagcacggcggcagctcctcgggctcgggttctggctccggctccgactctagcg

SEQ ID NO: 85447 - DNA, 427 bp, Zea mays
  Clone ID: MRT4577_177937C.1
aatagtatatactaaaaaaaagagttgggagatatttattaaaaacgggggaaaggtaaaaaaaccgcaaaaacaagtataaggctctggaaaaagagacgatgcgcaaaaaacatcatttggaaggttaaaaggaaccctaaagaaccacataaaaaaagaaggtgccattatatcaaaggaggccatacaagcgggaggggccaaaggggggaaaacgaaacaaaaaaaaggggacacaacggggcgggggccctggggaaagccaaaaaaacaaaaggacccaaaggccaaaagaggagccactggcaaaaaaactcagacagacgggcccaaaggcacaagagggaggagaacgtgaaaaagacaccgactgacctgatgccctccaaaagtaagcaaacagctgacacaaggaacaccgggc

SEQ ID NO: 85448 - DNA, 284 bp, Zea mays
  Clone ID: MRT4577_177938C.1
ctagttctagatcgctacggacgcctttttttttcttctatttttcaccttttaacgccgttttttttaattgtttcatcttcatttattttttctttattttcagaaacccccattaaacccccaactccaaatctcctttcaaaaaaccttttgaaaattctaatccaacttccagtactaggcttttaaacattaccaatacattcccaaaaaaaaaaccaaacaaaaccccagccggatatatacacgctctactgattaacatatccttttccaggcca

SEQ ID NO: 85449 - DNA, 328 bp, Zea mays
  Clone ID: MRT4577_177939C.1
gccacgccttcgaacacgcgtgctctctatcgtctgcggacccgatgcattgcaataactgaagactagggagaggccgtgacgaattggatgtcagccatggtgacagacgttaaaccgacaacgggattcttagccttctagggatcatctgcggtctagatgatctcctaattattacggatgcctagaccatatcttcgagatcattaaaacgtacgctcgacatctgctcttgtgtaacagataacactcgtgtgagaacactctgcatttgccgaagctacctgattgctacatgcattaagtgcgaaacgaactgtgctag

SEQ ID NO: 85450 - DNA, 1009 bp, Zea mays
  Clone ID: MRT4577_17793C.1
tgacaagggcaggcacgagcggcagtccaataagatccgccaaaacaacgacatctttcagaggcctgcactccccaaaacacaagtaaatcttgaactgcggccagtatggctggcactcacacagacagtaaaggcagtaaagcccagccaatctttggtgcagtgacctttgagaagccaaatgaccaacacaatgcagaaagagggactgcatgaataaaccggagtatgtcttaggtctgccttcatagatataagtaaatttcttgcccatccatactcgtttgaattcaaagagtgacgtacagttctccttggaataatcagctatcagctcatcaatatccagcttgaacagatcaatatctatatttaaaggcatggccaagcctcaaactgatcttattgatgaggaacttgtggagcttcttgcacgatccgcacaaggccctccaccgttgacatgaggatggcagcctggagcagcaacatcgcgaggagctctaggacgacgacgcgagttccatggtcacgatcttcagcaacagagggcagaaccagcaacgaccggtgatgagggcctgtccatgcttcagatcaagccggcggattggcgcttctctgtgcctctgtcgccggccacagaacgggtggaatcagtgacggagccacacaaaaattataggtggagcgagttctaacgccgctcgcaagtcgcaactccaggctccagctagccaccgactgaccgccagccacgggttgctcctgctcactccgcgccgaccgcgcactcgcgtggccgcttgctgactacacggccccaggggcggggccgctgagggatgaggcgccgggccgctggttcggctgctcctcgcgtaactcgggcctcaggcctccgggctttggcagtccggcgggtggcgggtggcgggcgaaggacggcggagcgagcaggacggggtcgggactcaggagggtcccggccggcctcgaggtaccc

SEQ ID NO: 85451 - DNA, 677 bp, Zea mays
  Clone ID: MRT4577_177940C.1
atcatctggaaaacctgaggtctgcagctacccattcacaacaagagggattctaatgggtcacattgtatctaatcaggaacgttttcaggttacggacactccaggactcctgacaaggcatgatgatgacagaaataacatagagcgattgacactagctgtcctttcttatctacctatcgctgtcctgtatgtgcatgatctatccgaagactgtgggacctcagtggccgatcagtacatcacgtacaagcatattaaggacagattcggtgaccgcctatggcttgatgttatttccaaatgcgatcttttgggaaagaaagagcccataagttttcacgatgctgatgaagatgtagcacggtacagaagattggggccagaaggcgccctccaagtatctgtgcagaccgaaatcggcgtcaaacagcttaaggaaagagtgcatgagctgctgacctctcagatggctcggatccaatctagcaaggcggagcatgaaacacatgaagtagcgactagtgttgtttactgaagtttgacaataataaggattcgaatatcatgctgggtgtccgcgtaaacattcaatgtcgatgatggtaacacattccatcagttgtccttttgtccaaaaaaaaagggtaaaaaagcgggcccattatgcgttc

SEQ ID NO: 85452 - DNA, 364 bp, Zea mays
  Clone ID: MRT4577_177941C.1
cttcttcctcgcctccgttccattccgtcccgccctccaccgccgccgccgcattcagggatggagatgaagaagatcgcctgcgccgtcctcgtcgccgcctcggcggccaccgtggcgctcgccgcggaggatccagctccggtccccaccagcggctcctccgccgttgcgacagccgtcgtgtgccgcctcggcggcgccgtggcctccttcttccccactacattcaacgaccgcctcggtcgccctcttgccgaagtaaagaaacactgccccgcaggagaaatgcccgccgagcaccccgatgcccgccaatgcctctgaaccgcctccccctacgtcccgttgcgtcctggcccct

SEQ ID NO: 85453 - DNA, 854 bp, Zea mays
  Clone ID: MRT4577_177942C.1
agactcactcggcaacggatatctcggctctcgtatcgatgaagaacgtagcgaaatgcgatacctggtgtgaattgcagaatcccgcgaaccatcgagtctttgaacgcaagttgcgcccgaggccactcggccgagggcacgcctgcctgggcgtcacgcaaaaaaacgccgtcctcccgaagcgccccccttaccccggaaccaaatcgaacaacccagagaagccatggagcggctgcagcggatcttcggcgccggcgggatgggccagccgccgtcggactcgccgctgctcgactcctccgagcaggtctacatctcctccctcgccctcctcaagatgctcaagcacgggagggccggcgtgccgatggaggtcatgggcctcatgctcggcgagttcgtcgacgactacacggtccgggtggtcgacgtcttcgccatgccgcagagcgggacgggggtcagcgtcgaggccgtcgaccacgtcttccagaccaacatgctcgacatgctcaagcagaccggcaggccagaaatggtggtagggtggtatcactctcatcctggttttggttgctggctatcgggtgttgacatcaatactcaacagagtttcgaagctttgaaccccagggcagttgccgtcgtgatcgaccccatccagagtgtcaaggggaaggtggtcatcgatgcatttcgtctcattaaccctcagaccatgatgcttgggcaggagccacgtcagacaacatccaatgttgggcacctgaataagccatctattcaggctcttattcatgggctcaatagacactactactctattgcaataaattaccgcaaaaatg

SEQ ID NO: 85454 - DNA, 592 bp, Zea mays
  unsure (1)..(592): unsure at all n locations
  Clone ID: MRT4577_177943C.1
gttctgggactggcgccagagtctggnagccgatgtcattttgtcgataaacaatagacccttgtgtggggtctattttccgcatatttatataacnntgtgcaaatctaagttatattggatcggggtgacggaggttcctnntgagtggtaacattacccatcaagnntttcagcaggatgtagataaaaattagctgagaattaaacctggtcagaagtaacatatatttntgtggggcatatatccatccagnatatattggaaagtgtgggtgaaatttctgaaaagggctttgacccctctcacnatcatatctattgcagtggtggtcgatccctgtgcaatattttctatgttnngctccaagttgtatttcacttttgatttgggtctttaacctcttttggaatggttcggcccctcagcacatgtaagcatgccctgaagtttctagacacagctacngattgcaagaagaatnatgattcagcggagggtttgccctagatccctttctcacatattggnatatatgcttattgagnnctgcaacttgnngtggaaatnnattcttggggaagcagtatc

SEQ ID NO: 85455 - DNA, 429 bp, Zea mays
  Clone ID: MRT4577_177944C.1
ataattctaagcgaaacatttattgaagacaacgtagatctttctacagacgttcaataacgacggcagaggcaccaccgccaccgttgcaaatgctagcaacaccaatacggccattcttagccttaaggacggtaattaaagtaccaataatgcgtgcaccgctgcaaccgatcggatggccaatggatacagcacctccgaaaacgttaatcttattagcggggatgttcaacaacttcatgttagcttcgcaaacaacactgaaggcctcgttgacttcgtagaaatcaacttgttgggcagtaatgttggcgttcttcaaagccttagggatcgcgagggaaggagcggtagtgaattcctcaggggcctgagcagcatcagccataccgcgaataacggcgagaggtttcaagccgagctcgc

SEQ ID NO: 85456 - DNA, 447 bp, Zea mays
  Clone ID: MRT4577_177945C.1
attcggctcgagggcgcttttgccgcacactctaggttgctcacgagttctatcggcgcaggcggcacaaagagaatgccaaaaccctagctcggcctccccaagtacccatttcagccacaccctaactgcctgcacggctccaccccagcttcagggaacctgtgccagctacgccgggagacgccatgcgacagctactcgtcgcgagacgcaggcggcgataggccgatcagtgccagagcgatcgagcagtaccgccacatgctcgcctaacgcctttctgcttccccaccggacatctatcaagccaagcgctagctggaccacatggagacggacgaagtgtcgatcgtggcgtcgcgccaattgctacagacgatcgcgcaggacctagggaagcttggagcagacgcacataaggaggatgcccagtacgcgctcacg

SEQ ID NO: 85457 - DNA, 506 bp, Zea mays
  Clone ID: MRT4577_177946C.1
accttggcaacagatcactcattatataaatatgttcattttgatgtacacataatgatttttacatcttatattgggtataagttacaatattttacattaataacaaagtaagtatatcataattataatcttagcgggggcggagatcccgacatatatttatccccgcgagggagcggggacggagaaaaaagtccctctaaagctattagtttgggaacttcatttttttaagggatttctattttccaaaggtaaattagttcatttttttttttgaaaaaatagagttctcaaactagtcctaaatgtctgtgaagatgcccgtgaggaaattttttcgtcacggaaacagcgacagagatgtggagctaattctcagtcgacatccctatttccacctaacacagctagctagtgctcctatgccacccccttttgccgcactgccacagccatcacaatgtagatcttgcaggcgatgcgtacgtagcaggtcccat

SEQ ID NO: 85458 - DNA, 1757 bp, Zea mays
  Clone ID: MRT4577_177947C.1
attgtatgtatgtgcctatgtatgataaaaaaaataatgtcgtttttttaccaatgtattgtgccctgtgctctatatctttaatgactttttatgggatttccgtagatagctccctccgttatttatttgtttatagttcaaaaataaaataacggacaacaaatattcgagaacgggattagtatataatagctgattatgactatcttttttaaaactatttgttccaaacttgatggacatctcgaggaccaaagtgacacattaaagagttatagcttcatacaaaacaggttaagttgcactatttcctctacatttttagatctaccacttatattagtgttttttcttcattttaagaaattgcatcgcaccttccatttgtttatgtaaaaaactatcactattgtgttctacataggatcttatttacatacatattttagtggaccataaaaaaaacagcgcgcgcagggcgcgcgttagacaccagtacatacatattaaagcccgacgcaaaacgtgcatctccttaagccatgtcaccactaaaatcttgatcgtcggatctgctttggacggtctcatcaagaagaacgcgtagcttccagactttcctcgagcatactttgttaccagcctggcaaattgaaaagccaacatgaatcaaacgtcggcgcgcggtggatctgaagcctgtgtgggggcgcggtcggcgaggagctggggcgcgcgtccccgcccagctcccccgtcgtggcactggaccgccacgcctgcgtccaccaagagacgtccgcaccaccctcgtccacgagcagctccaacgacctcatcgccgcattgcgcctgctcctgcgctgcaggctccggttaccgtcggtgcccacaccgaggaaggcgtaatccacgccaagcaacccagttactgagctactgagctgcaacctccgatatcgcgcacgtgtccaggagcattgaggaggcttggtacgattgcttggcgatgagcgagtcggatgtcgaagacgatttccaatgtgcaagatggtgagagtgcataatttcaataatttgttgaacctgctgagatttttgtccccattttaacatgtctttccattttagggcttgttcggttagctctcaatccatgtggattgagtgggattggatgggtttgaaacccaaacaagtcaaacctcttctcatttttttccaatctcattcaatccatgtgttttgggaataaccgaacaagcccttactggatgagcttctccgctaccattcagatcctttttcacatggcttcgaaaaacgaagctgcattgagcatgagagatgatggcagcgatgggagcttcaatggagctgtacaatcaggcgaacagcacaaggccaaagtctagcgaactgttaaaagggagcacaaggccaaagtctagcgaacgactgttaaaggggagctcggagaatggtgtgactgtgtgagatcgtccagactccagaccatgagccatgatgatgcggtgagtgtttctggtgcgaacatcactcacggtggaggcaggatactcgaccactgcatgcttctgccaaatatttgtctgccatgaattgcatgtacgtttcttctctttcctatgtgaagaatgattcactaaacacgtatttcctctgattgttgttgggtttataggaactaattagtcccttaattttattcaaaaaaaaaaaaaaaaaactcg

SEQ ID NO: 85459 - DNA, 203 bp, Zea mays
  Clone ID: MRT4577_177948C.1
attatattatctttaattattttattaactacccctatcaaatgggggcaagcggaaagatacaattattttccacaaccgggactataaaattaagagggcctatacaaatcgccgcgccggattcaaagagaaggccctctagcatctaggcggggagggggggggacttgggaaaggacccaataaataactccttttaa

SEQ ID NO: 85460 - DNA, 415 bp, Zea mays
  Clone ID: MRT4577_177949C.1
tacgaggcacacttgcacgccttgctctattgccaggggcccatattactatctacatctctcattaagccgaacctagactgccgtggcccttgataatgacgaagattgaacaatttgcatagcgtggcagtgctgataccgttcacagctgttgcccaacaaatacatatatgtattgcaggaatgctcaacccagactccagatcatcggtatgaaccagaggaacacagctaatgtagtcgaagatctcttgggagattgtgaataccaactgcaagctccttatattatgtaccgaaaagctgctcaagaaggtatatgaagttgaaactacaactctgacgagagacacgaagtaggaccactattcagctggaatatgactgcttactgaaaggtgccaccaaagcc

SEQ ID NO: 85461 - DNA, 1638 bp, Zea mays
  Clone ID: MRT4577_17794C.1
cctcccaacagtgagggttatacacgcgtcggctctcacacactgcaacagccaagtgcaagtgatcgagctcccccctcctcatcagtcgctaggcacagcgcacttgcaggatggcgcaggtctctaagacgcttctccttgtggccctggtgttcgtgtcgtcggcggcggtggagctgtgccgcgcgatcgacttcgacgagcgggacctggcgtcggacgaggcgctgtgggacctgtacgagcggtggcagacgcaccaccgggtgcaccggcaccacggcgagaagggccggcggttcgggacgttcaaggagaacgtgcgcttcatccacgcgcacaacaagcgcggcgaccggccctaccgcctccgcctgaaccggttcggcgacatggggcgggaggagttccggtccacgttcgccgactcccgcatcaacgacctccggcggcaggattcccccgcggcgcgggccggggccgtgccggggttcatgtacgactccgccgccgacccgccgcggtccgtggactggcggcaggagggcgcggtgacgggcgtgaaggaccagggccactgcggaagctgctgggccttctcgacggtggtggccgtggagggagtcaacgctgttcggagtcgaggacgaggtcgctgtcgaggccgtccgagaggtggacagcggcgacggcgagtccgtggccggcgcggcaggctttgtggcgatggcggtgcggaatgggaagcacagggcggcgcccgctggtttccttgcactgccgcggctcggcgacggcgcggcgaccggaggcgccggcttgggactgatcaccggcgcgtcaggctcctgcggcggcggcggcgggagccgcgtggagaggtcgaaatcgacgagcatgatgtggccgctgtcctggatgaggacgttctccggcttgaggtcccggtacacgatgccgaggctgtgcaggtactcgagcgccagcaccagctccgcggcgaagaaccgtatgacggagtcggagaacatcttctcggtctgccgccgccgcagtgagttgaggtccccgccgccgcagcggtcgatggcgaagccgacgacggcctcggtggcgaggatgccgcgcagggaggggagcagcgggtggcgcagcgacaggagcacgtcgcgctcgaaccagatccggcggtgtccgtccccgtccccgctgcccgccttcttgtgccgcgcggcctcccgcgagaccgccttgagcgccatggccctatatttaaaggcatggccaagcctcaaacctgtccatgcttcagatcaagccggcggattggcgcttctctgtgcctctgtcgccggccacagaacgggtggaatcagtgacggagccacacaaaaattataggtggagcgagttctaacgccgctcgcaagtcgcaactccaggctccagctagccaccgactgaccgccagccacgggttgctcctgctcactccgcgccgaccgcgcactcgcgtggccgcttgctgactacacggccccaggggcggggccgctgagggatgaggcgccgggccgctggttcggctgctcctcgcgtaactcgggcctcaggcctccgggctttggcagtccg

SEQ ID NO: 85462 - DNA, 211 bp, Zea mays
  Clone ID: MRT4577_177950C.1
aagcaggtgcaacgggcaaaatgaattatatttctctttttttaggcatatatgtacgctgtgctcaaacaggttcggcaagacatcaaagcagctggctgtcgtctgatgaggccaggaggaattcaacaatggaaacgagggctggtgcactaacaaacaatgcaatctaagactacgatccggtgatagaaaacaccctacaccccta

SEQ ID NO: 85463 - DNA, 195 bp, Zea mays
  Clone ID: MRT4577_177951C.1
gccggccggtccgggcttttccttctgtttgtgacatttgctacactgcgctgctcatatatacggtgactcggaatgcctgctaatgctacctcataacgcacatttgccgtgcaatgtctgatgcattgctgtctgaatgacatcgctggcacatttattttacacacaaacacaaataaaaggcccctacgc

SEQ ID NO: 85464 - DNA, 1138 bp, Zea mays
  unsure (1)..(1138): unsure at all n locations
  Clone ID: MRT4577_177952C.1
caggatcctgcttccacanacctcagggtgaacattttcatgcattgcttgggacaaacaatagtgctcttgaattgtttcttatcaaaaggaaggtcaagggaccttcatggctgtcggtttccaagtttgtgacacggccatccactcagcgggtcagctggtgtaaatttgaagttacagttgattgcccaaaggatatatctgttttgacaacaagtacaaatctagaagttcctactgttgtagttggagcagttaatctcaaaactatcataaatgagaaacacaatgtgcatgagattgtgtcggcatctctcatatgttgtcatcgggtgaagattgatagtccaatgcgtccagaagattggcagaaacggggaatgctcagccattttactgttgtgcgcaaacttgaaggtagcatatttcctataggtcttgctaaggaagcttctgataggaaccagaaggctggtagcaacgtgctagcactagaaagcagtgaacgtgcattattaaatcgcttgatgattgagctgagcaaacttgattgtgatgtacttgtgggacacaatatttcagggttcgacttggatgtgcttctacaccgtgctcagacatgcaaagtgccaagcagcatgtggtccaagattggtcgtctcaggcgatcattaatgcccaggcttaccaaaggaagcacactctatggttctggagcaagtccaggaattatgtcctgtgttgctggccgtcttctctgtgacacctatttatgctctcgtgaccttctgaaggaggtgagttattccttgacacaacttgcagaaacacagttaaaaaaggtcaggaaggaggtttctccacacgatatacctatgatgttccagtcttcaggcgaactgctcaaactggttgaatatggtgagacagatgcatggctttctttggagctcatgtttcatttgagtgttctcccactgacacgacaattaaccaacattagtggtaacctgtgggggaaaacactccagggtgctagggctcagagggtagaatatctactactgcattcattccatgcaagaaaatttattgcaccagataaatttgcacgcaacaaagagctgaactccac

SEQ ID NO: 85465 - DNA, 452 bp, Zea mays
  unsure (1)..(452): unsure at all n locations
  Clone ID: MRT4577_177953C.1
tggcttctttccctggcaggtagtactcctagggaggctggctctcctaggtggtgtcggccngctggaagagctctttcccctaggcagtagagttcccctatgcggtatgtctccccatggtggtaggttcattctaatcggtgagtgcttcccgagcggcgagtgtctcagggtaagttcagccctccaggcgataacactctctcctaggcgtgtggcgtcctccaatgtttggcggtatcttcagacgacttttgggttcatacaggcttcgggcactagagactaggaagttcatgttcccattgtacactaggcgcatgcctctatgtaatattctcttcttatgcctctgggagcgatccttagccgctcttagcgtttgcagatttaaagtccaagagtctgcctagactcgagctgtgatcgcaagaacaatttcatgcacc

SEQ ID NO: 85466 - DNA, 254 bp, Zea mays
  Clone ID: MRT4577_177954C.1
gccttaccagctggatgacctgctagggaggaaagcattgtgccaggtggtggagatctccttgtttatgcaaccaacgtacttgacaagatcagcaaagcagactaggaccacacagagggtttaaacatcataatgaatagaatgaaggatccctagctgaccataagtgaatacgctgacattgatgtggtaatactcatatcgtcacggataaggcaaaaagacctgagttggggctatgatgccataaa

SEQ ID NO: 85467 - DNA, 203 bp, Zea mays
  Clone ID: MRT4577_177955C.1
tattgagatcatactcctcctctgaccgttttaattatactacccaaccgtatccgcaccatcacctttaaaataattcagttatacaaccattcccctcctatttacataaaacacatagtaaatattttatctcactcctactaaatctccataccaatacaaatttcactcacttctctcataaacactatccttcccta

SEQ ID NO: 85468 - DNA, 155 bp, Zea mays
  Clone ID: MRT4577_177956C.1
ctaaattgtattgtacatattaattggatgctacaaatttcaataaattcaccgctacatttaaaaaatacacaacacgccatgacacatatattacagcaggctactgccttactctgcgcatacaaaagcaaaaataaacggcccatgcccgg

SEQ ID NO: 85469 - DNA, 995 bp, Zea mays
  Clone ID: MRT4577_177957C.1
cctcgaggccggccgggacacatccgccgccgtttcttctcccatcatcttcctcgcagcgccggcgctccctctcccgctcccttccttactcgcgctcggcacacaggcggcggcgctcgggctcgggctctcagcgacggcgtcagcggcttaccctcgcgccctcgcctccggtcctccgcacaccggccggtgaccctgcgacaacattgcatctgaactgcattggatcctaagagatgatggatgagtcttttcttgataggatggtttcccaacttcggtcaacatgcaagtactacactggatatcccaaggacttagggcgatcaagaattataccattcacatctgagcgtcagtttgtgcagctattacatgaaggcaggcctgtagtcgttgcctttactattaagtgcacatatacacagcatcttgataaagttctggaagaggccgcagctaaattttatccacatatcaagtttgtccgagttgagtgcccgaagtaccctgggttttgcctcacaaggcaaaggaacgaatatccatttgttgaagtattttacaacccagaacaggctgcaagcccaggaaagagcgtggatcctaacatcaccaagtattctgtaaaagtgctaccgttcaactatgaccaaagcgtgtatggatttcgagaatatttcaagaagcatggtttcaagtattctgaaacaaactagatccgttgttaaagatctgcctcgagagtagtcctagggacttgagtagcatgtggaggcagttgttgtatggagttgaaatggcgtgaggctctaatgtggggtcttgactagttcattcgagaatgcctgtcatgtattcatttgtatacgggctactgctcatgcctagagatttgcttttccatacctatgaaccattggatttggtaatgttttacctctcaaagccaggagtgagcaatttgcatcattttttcaagcactatc

SEQ ID NO: 85470 - DNA, 868 bp, Zea mays
  Clone ID: MRT4577_177958C.1
ccgggcccatcatcttcctcgcagcgccggcgctccctctcccgctcccttccttactcgcgctcggcacacaggcggcggcgctcgggctctcagcgacggcgtcagcggcttaccctcgcgccctcgcctccggtcctccgcacaccggccggtgaccctgcgtactacactggatatcccaaggacttagggcgatcaagaattataccattcacatctgagcgtcagtttgtgcagctattacatgaaggcaggcctgtagtcgttgcctttactattaagtgcacatatacacagcatcttgataaagttctggaagaggccgcagctaaattttatccacatatcaagtttgtccgagttgagtgcccgaagtaccctgggttttgcctcacaaggcaaaggaacgaatatccatttgttgaagtattctacaacccagaacaggctgcaagcccaggaaagagcgtggatcctaacatcaccaagtattctgtaaaagtgctaccgttcaactatgaccaaagcgtgtatggatttcgagaatatttcaagaagcgtggtttcaagtattctgaaacaaactagatttgttgttaaagatctgcctcgagagagtagtcctagggacttgagtagcaagcatgtggaggcagttgttgtatggagttgaaatggcgtgaggctctaatgggggggtcttgactagttcattggagaatggctgtcatgtattcatttgtatacgggctactgctcatgcctagagatttgaattttccgtacctatgaaccattggatttggtaatgttttacctctcaaagccagtagtgagcaatttgcatcatttttctccagcactg

SEQ ID NO: 85471 - DNA, 1274 bp, Zea mays
  Clone ID: MRT4577_177959C.1
attgggtacctcgaggccggccgggaccagccgccgccgtttcttctccctcatcttcctcgcagcgccggcgctccatctcccgctcccttccttactcgcgctcggcacacaggcggcggcgctcgggctcgggctctcagggacggcgtcagcggcttaccctcgcgccctcgcctccggtcctccgcacaccggccggtgaccctgcgtgcgtgcctatctctctcatcccgcctccagtggatcgtcaacgccaccggccccgccagctgcgccgcgcgcggcctgatggctgcgggagccagcagccgctgctccaccaaggcgttcgcgccgctttggtagcgcttatgccccaaagcgaagcgttacccgtcctcctagcgcttcagcgcgctgaagcgtgcgcttactgccgccttttggaaccctggcgtcttcgcatttgcagggagaagactcagtttatcccttgccctcccttcccagaccccactcatgtagagcctccggcactgggacaacattgcatctgaactgcattggatcctaagagatgatggatgagtcttttcttgataggatggtttcccaacttcggtcaacatgcaagtactacactggatatcccaaggacttagggcgatcaagaattataccattcacatctgagcgtcagtttgtgcagctattacatgaaggcaggcctgtagtcgttgcctttactattaagtgcacatatacacagcatcttgataaagttctggaagaggccgcagctaaattttatccacatatcaagtttgtccgagttgagtgcccgaagtaccctgggttttgcctcacaaggcaaaggaacgaatatccatttgttgaagtattttacaacccagaacaggctgcaagcccaggaaagagcgtggatcctaacatcaccaagtattctgtaaaagtgctaccgttcaactatgaccaaagcgtgtatggatttcgagaatatttcaagaagcatggtttcaagtattctgaaacgaactagatccgttgttaaagatctgcctcaagagtagtcctagggacttgagtagcatgtggaggcagttgttgtatggagttgaaatggcgtgaggctctaatgtggggtcttgactagttcattcgagaatgcctgtcatgtattcatttgtatacgggctactgctcatgcctagagatttgcttttccatacctatgaaccattggatttggtaatgttttacctctcaaagcc

SEQ ID NO: 85472 - DNA, 3028 bp, Zea mays
  Clone ID: MRT4577_17795C.1
ctttgttttttctttttgcggagccgtcagctcacactccggcagccgagcgatcgagctccccggtcgctagcacagccggccactgcacacgacggtgctggtaggttgcaagcacttgcaggatggcgcaggtcgctaagacgcttctccttgtggccctggtggtcgtgtcggcggtggagctgtgccgcgccatcgagtatcgacgagcgggacctggcatcggacgaggcgctgtgggacctgtacgagcggtggcagacgcaccaccgggtgcaccggcaccacggcgagaagggccgccggttcgggaccttcaaggagaacgcgcgcttcatccacgcgcacaacaagcgcggcgaccgaccctaccgcctccgcctgaaccgctctcggcgacatggggccgtgaggaattcctgttccgggttcgccgactcccgcatcaacgacctccgccgggagcacaccgcgtgggccggcgccagccggtggttcatgtacgacgacgacaccgacctcccgtggtccgaggactggcggtagaaggccgcgtcgatgaccacttagtacctgggctgctgccgcagctgctggtccttctccaggaggggtttccctggaggaaatccgacacattcggtcgcgtagcctggtgcccgttgtcggagcaggggctaatcgactgggaccgggacaagaccggggtgcgagggcggtgttatagagcacgccctcgatgctcatcaagttccacggcggcatcaccaccgagtccgcgccacccgtaccacgcctccaacggcacctgcgacggcgatcgggcccggcgcgggggaggcgtcgtcgtggtgatcgacggccaccaggctgtgccggccggcagcgaggacgcgctaggccaaggcggtggcgcaccaaccggtgtccgtggccatcgacgcggggggccaggcgctgcagttctactcggagggcgtgttcacgggcgactgcggcacggacctggaccacggcgtggcggcggtcggctacggcgtcagcgacgacggcacgccctactggatcgtcaagaactcgtggggacctgcggcgcgccagtggggatacgtccgtctgaagcgcggcgcggagatgggcgggtgccctgacatgatcatattgacgtggtacttcaggaggttcttgcccgacccgccccaggccctccaccgtggactcgtgaccggcggcgcctattcccagcgtcgggaggagctctaggacgaccacgcgagttccatggtcacgatctccagcaacagagggcagaaccaacaacgaccggtgatgagggctgcagtgagaggaggaagcgagagggaggtagtattgtaaagggccccaccttgcaaacaaaactaggtgataaaatggccccaccttgacatactttatttatctgttatttactttgtagataaggatgtttaattgtcattcattcagacaaatctctaaatctttctcgatcagaatacgaactttccagcttggtaagtacgataaacatagtattgtataacctttctgtttacaaattgtaatctgacgattttttacgcgaaccggttggagggatcttatttcgaagtggagcggcggtctactcatcactttggagagcagaaacagccttactctgcaacttgataaggtttataccccatcttgctgaacccaaataactgagtatgtttcctcttggcacaattcacacagatacatagcttcagattgatctatattccacttgcaaaattaatcgctgctaaaacaaccagggttaccgtttggactttcagagatactgaacttgagaaaccagggaaataaaaacattgctgactttgttagactatttataataaaacaggtacattgagctaacagtacatcacccctcccccctccacctgattattgatttacctccatattagcaactttctgtacgttgccttttcacagaaactttgtgctatactcactaaagcaacattcaacaaaccttttcatactgcaatggtagacagacataaacatggatataactatagctaccaaagattacccaaattactctattgtgttccaatcaagatttaaaatactaatataataacgaccaatgcatttcgttgcacattttcataaactatgtatgcaccttaaaaaagaaacaaacctgatttatttatgatgtcccttcacacatatttaactacatacacaatgttacttttctatattcccatcactcaatgagatagacacaatgaaacttgatttacttattcctaatattgcaagttcctttggcgctttgaaccattgcccatcccttttcatgggctgcatcttctaccagagcaggtattcgtttttgcaagcataagaactagtttgcattacgcaacggctaaacaggttattcattcaggcatatcagaattttatgagcgaacagttggtgcaaaacagtcttggaggacacagcttgcaacaaaagcgcaattcaatttagaatgctcgtacatccctttgaaccattgcccatccctttcttaccctgtccatgcttcagatcaagccggcggattggcgcttctctgtgcctctgtcgccggccacagaacgggtggaatcagtgacggagccacacaaaaattataggtggagcgagttctaacgccgctcgcaagtcgcaactccaggctccagctagccaccgactgaccgccagccacgggttgctcctgctcactccgcgccgaccgcgcactcgcgtggccgcttgctgactacacggccccaggggcggggccgctgagggatgaggcgccgggccgctggttcggctgctcctcgcgtaactcgggcctcaggcctccgggctttggcagtccggcgggtggcgggtggcgggcgaaggacggcggagcgagcaggacggggtcgggactcgggagcctcgtgccgaatt

SEQ ID NO: 85473 - DNA, 684 bp, Zea mays
  unsure (1)..(684): unsure at all n locations
  Clone ID: MRT4577_177960C.1
accgctggnagcacacggtttccacgccagccagcaaatgggtgcccacagcaaagatcaaatcaaatcaaaagggaatttctgaaaaggagagaggaacacccttcctcgccatttccgtccaaagtgtttccccgaggagtcgcgcgtgcctgccgggttgcgtaggcgctggggcggcgggacgggagcatcgcaggccgcggtggaccctggcgctcgagtttcttctctgcggtgaccagagggacagccttgtggcaatcatatataggacagtttcgtatctataatgtgctcatataaagaaatcaagtacaaatgaagaagtacatctctgcccattatttgatgactgaagacaggttgcactatggtagctgctacaactgcgggaatgtttcttgtatgttttgagtccctctgtccctgttttgggtcaaaaagtaaggatgggagcgaagaccatgttcttgcagaacattccaattccttgaattcttctgaaatgaggtcgatttctgatagaattgctgcaagtccgcttcgagtacctgcaagtccatctagattttcactgtcttcgccaccaagtagaaacgagcctttaaacatcagtctcgaacatgttgntaaactgacacataactttgcgccgaccttgatgattggcgaaggttactt

SEQ ID NO: 85474 - DNA, 263 bp, Zea mays
  Clone ID: MRT4577_177961C.1
ggttggacactgatgatgcgatgtgtacttctgtggcttctgagcaacagattcttgctgttgggtgcagtagaggtgttgttgaattgtatgatcttgcagaaaacacacggcatatacgaaccatttcgttgtatgattggcggtattcagtggaagataccgggcctgttgcttgtatatcttggacgcctgacaattgtgctttcgcagttgggtggaaatttaggggacttactgtatggtctgtgtctggatgtcgg

SEQ ID NO: 85475 - DNA, 287 bp, Zea mays
  Clone ID: MRT4577_177962C.1
cggccgcccttttttttttttttttaatatatattctgtctattttgtgttttttttttaactagtggcggcgcgcaaaaatcacttgttaagctaccattttatatcaaaacccgggtaacagggaaaacaaattttccacagactacattaaaaatagcgctggataactaccaacggatgcccgtgatttaaaaccattaccaaaaaaagagggggcggggaaaacaaaagaaaaaggtaaaacttgaggggaccaacccccctctaaacaaaagcagcctaaa

SEQ ID NO: 85476 - DNA, 540 bp, Zea mays
  Clone ID: MRT4577_177963C.1
ccgggaacttaattaacagaattcttttagcagtcagcatgactgcagcgtccagtctggctccatagcccgcgacgcctgcttggtccgtgatctttttgggtagcacgtataggtaatcatctcgaaagatgtagacctcatagtgataggcatttcaaatgcggcctaaagcacggtctctgggctactaaattctataaagaatttagcgcagccagtgcttaggactccatcaccctatgcctttcccaaaaaagtgcaatcttatgttgcatgaggaccgttaagtttcgacttaattaatgtgctatgttttccatacaaacataaaagaatgcaaaaaacaaaagcaagtcgaaacatgtgaatcatacatataaataaaaatataattcactgataagtctgcattttcacaataaaaacagacaaatatgtataattacatataacattagcagtagtctaaatatgagaatttagatactaaatactgattgaaattgcgttacaagcaatcacagagtcttgtactgt

SEQ ID NO: 85477 - DNA, 365 bp, Zea mays
  Clone ID: MRT4577_177964C.1
aagctcgaattcgggtcgagggacagttcaacttgtttttttctcaagaactatccattatatcaggggatggataatctaaaattaggggcgggtctaacattgcatacaccagtcaatttcagctcgtaggcccagacccaaaacatgctgaacaaagccctatttgcaatcaaaaggtagaaccagctcaataccatcaaaacgaaccttgagggggccctgaaacaccagaaaagcagatgatcattcctaaacatcattaatatgctgaaaatagggagacacaccaactaagtcctacatttgctcattctcagaataacacaaaccgctctctgctatcaatgaggatgattctatgg

SEQ ID NO: 85478 - DNA, 275 bp, Zea mays
  Clone ID: MRT4577_177965C.1
acacagaaaacacccacgatcagagcattccttcagagtattcaccgccaccatcggaggacctatgcagccacctcttcatggtatccaaagccctctccaacctcccttggtcctttggcttgagcagctaaccccacctctgcaaagaagaaatagagccatataagatcatttttgggctactaggaaaaatattttctttcaccatcttgtttctgttgcaccataaggaccaaattaaacctgcagtcatgaacagaccgacagcaacg

SEQ ID NO: 85479 - DNA, 245 bp, Zea mays
  Clone ID: MRT4577_177966C.1
gccacgcgtcctgctactcgtacgtgcactcgtccgttcacgcgtgcgcaaggtgttcggggcctgtctacgtgctacctggggccgcaacattggcctgatgctgctgccatgtagcccagcgctaccccctcggcttcaccgtccgcggcggcaacgactgtgtaaactacatcgggtgctagctcctactgtggtgcgtgctttgatgactatagggcatgctttgcgctggcatctttgtt

SEQ ID NO: 85480 - DNA, 677 bp, Zea mays
  unsure (1)..(677): unsure at all n locations
  Clone ID: MRT4577_177967C.1
gggggggggggggggggggggggggggttgctccccccccagcgcccaacgcccccccggcctctcgccgcttcgcctgtggcccccccccggccgccgcccgtccccgcctctcccgcccgatcgacgctcccctggtggccacgccgcccccaccgtcgtgtccacctcatctcgcggggcctgggaacagcttgccaacgaccgacccacactccaactaactcgctcgacgggaggagggtactactaaggttgacaaggttagaactggttcgaaggaggagaacacagaggtcgtcnnagaatcactaacaatgggtannagacgtgacaatttcaaacttacccctngaatcaaaaccccttcttcgcggtccccccttgagaacagcaacgtttaggctgtttccaacgaggacaacgcaactacgacaacggaggtctcccgggtttagaaggggacctagggggtaacccgataagcgaccgaggttgccgtctagactacccaggtcactaccgtgtgtcttgtgttactgaactccagttttacgctaacggtaaccgagttaactttgttggacgtcgtcgtcaagtttcttgccctagctactaagaaggttactttgacgaaggttctggttcttaacacgcaaacataggaccgaaggcac

SEQ ID NO: 85481 - DNA, 302 bp, Zea mays
  Clone ID: MRT4577_177968C.1
ggcaaagctggccgtggaattggctctcatactgattatggtctgcttgtcatcgctgctcaggatgaggttggcggtctgtttattcggccaccatcggaagaggagcagactgccaattggcagacaagtgccgcagtttccgggaagatggtgaaggctgggtctatgttccaccggttccagatgtgttcactgtatttccaggtgatatgatgcatatatcacgaactccttccttccgtcaaccccgcacaaagtcggtctcaacacacgcgaacggtttgcattcgcttactttc

SEQ ID NO: 85482 - DNA, 442 bp, Zea mays
  unsure (1)..(442): unsure at all n locations
  Clone ID: MRT4577_177969C.1
ggggtnggttaaaaaataaaaaaatcctgtctcctccttttgcttaggcctcaaaaaaagatgtggtggggagtgcgtcctttcttgggcgggggctggatccacctgtccccggggacttacggggtgcccaccaaggggttggcctgcccctcggggggggccaacgcccaccccaccttttttttttttttgggggctgcgccggggccaaaacacttgcaccccccgtaataaaggccctttctctcccgcttggagatttgccggccgtcccaccccacggggaccccctcctcccccatattcgggtaccagaggacgatcccggaggagtccccccaggcgcggcccaagttgaacgggccacctcttgcccccccgatgctggattttttgaacaagaaacccgtgtccaagggcccctcaatggacttggaac

SEQ ID NO: 85483 - DNA, 1767 bp, Zea mays
  Clone ID: MRT4577_17796C.1
gctgagctccttgtcactgttcatgtacatttttacttaagctcacctctttcttttctcccctgcataggctggcgcactggattatttcaatgtacagttactgcagccagtgtagatgaacagaaggtctggcacctaaaaaggagaggctagtaaagacgagcgaggattacaggcctgtttggttcactacctcagttgccacactttgcctaacttttctgcctaaggttagttattcaattcgaacgactaaccttaggcaaagtgtggcacatttagccacaaaccaaacaagccagtacatctctcggtgttctgattacacggttatacgccggtagtaagagtttacagacttgtatatgttcttcactctagcagcagttctaactcggcaaagccgtcgtcgtcgtcgaggtcctcgtgatcctgtactcccaattcatcattgtcgaccgccatgagctgatcgcaacgggatccatcctcgtgacattgagctcctgattcatcgttgtcgatggccatgagctggtcgccaggggatgaggataatcctgtcctctcgtagaacccctccttctggacatcccattctttgacgacttcatctatcttgtcgcccaacagcctctcactctgaaggaggtgcttagcatcgtcaacttcgacagtttggcttgcctctgcaagggccagttcctttgcttctgcatactcctttgacaatttcttgatgctatcaagctcgaactcagcacccaagtccatgtgcaaatatctttctgcttgggtatttgcaaataacttgtcacatgcaaattttactcgcttgttctgcaatgcggtcatttcctcgacctgcttgtccccgttgtcgtcgatcaaattcatgtagccaaacaaaaacatgtctttatccagcatccttttgacaagtgcaggcacgagctgcagtccattttgcttcgccataacaacgacatctttcagttgcctgcactcctcaagagacaagtaaatcttgaactgcggcttgtatggctggcactcatacagacagtaaaggcagtatagcccagccaatctttggtgcagtgaactttgagaagtcaaatgaccaatacaatgcagaaagagggactgcatgaataaacccgagtttgtcttaggtctgccttcatagatataagaaaatttcttgcccatccatactcgtttgaattcaaagagtgacgtacagttctccttggaataatcagctatcagctcatcaatatccagcttgaacagatcaatatctatatttaaaggcatggccaagcctcaaacctgtccatgcttcagatcaagccggcggattggcgcttctctgtgcctctgtcgccggccacagaacgggtggaatcagtgacggagccacacaaaaattataggtggagcgagttctaacgccgctcgcaagtcgcaactccaggctccagctagccaccgactgaccgccagccacgggttgctcctgctcactccgcgccgaccgcgcactcgcgtggccgcttgctgactacacggccccaggggcggggccgctgagggatgaggcgccgggccgctggttcggctgctcctcgcgtaactcgggcctcaggcctccgggctttggcagtccggcgggtggcgggtggcgggcgaaggacggcggagcgagcaggacggggtcgggactcgggagggtcccggccggcctcgaggtacccaatg

SEQ ID NO: 85484 - DNA, 262 bp, Zea mays
  unsure (1)..(262): unsure at all n locations
  Clone ID: MRT4577_177970C.1
ccggccgggggccggtcctgtagcgcgcgcccggcacggatttgggatcacccgcacggcagcccgggttgtcgggagcgcgaggggcgacatgggggcggaggccgtcgagcccggctccatcctgagcttagcttccgtctttttcctatggagccgcatctatggccctggttttcgtgatctggggggggggggggcnntattgttcctcgctgagcgtgctctcttttctgcgtgtccctgctggggttctggtgcg

SEQ ID NO: 85485 - DNA, 487 bp, Zea mays
  Clone ID: MRT4577_177971C.1
aaaaaaagcagccgcaatggccaccagcaccatggccctctcctcctggccttcgacggcaagaccgtgaacgtgacgccgtcgaccgccttctgagaaggcccgcgtcgaccatgagcaagacgcccatcaaagaccaagccagcgccgcagacccagagcccgtggtatttccccgaccgcgtgatgtacctgggcccactgttcggcgagccgtccagctacctgacgatcagtagttccccggccgaatacacgctgatacaccgcgacgatgtcgcaggacccggagatgttcgcccagaaccggcagctgcaggtgatccactcccgctgggccatgatgcaagcgctcgactgcgtcttcccgaagcttctcgcctcgcaacggatgtcaaagatacaggcgaggcccgtgtgatatcaaggaacgacctcccacaatcttccccgaggcacggatcaactacctcgagaacccgagcct

SEQ ID NO: 85486 - DNA, 518 bp, Zea mays
  Clone ID: MRT4577_177972C.1
gagtgatctgagccggtgatgccgaaggcagtagcctcatccttggcggcggcatgactctacacattttacaaggtacaaggaattctggtgaaaaatctctcgtgcaagacgatcaacatcgaaccgcgcaacttcgcttattgaagaagccaacgcaaaggcagtgcctgttttgcttcccactgatatggcattcgcagacaatgaaccaggcgatgctgagagcaagaatgtgcctggcactgctatccctgccgactggcaggtaccgtgatgatgaccctgatgccaagaaaaccttcaacgaatcattggacaccaccaagactggtatttggaacggccccatgacgaccgtgctgagttccccaagagtggtatctggcactgaggcgaatgccaagaagctaactgagcttacaaccacgaacggtgtgactaccatcatcggcggcggcgactctgtacgatgatgtcaagaaggctgggctggcggccaagatgagccacatttc

SEQ ID NO: 85487 - DNA, 545 bp, Zea mays
  Clone ID: MRT4577_177973C.1
cgatctttttcctatggttttttttcagatatctccacgcttcattactggcacgggtaataaggttaagggggctccatccacaagaccagatagtacgggtatgacgacaacgggcgttagctccacttattagcataatggcactagcacacaacctgggatcctggagactacagatcaggggggacgagggcttataaaggtattactgcccacacattttctgaaagcctgagttaaattcccatcaacgcatgggggggacattactgacatttttttaacttgcctccgccaatacatagccatgcccgggcttgccatgcttgaacttcccgagcccctacttgaacttgccgagggggtacggaccattctctaactctgctcaggccacataccgcgggacgtaccaccgtgacataacctacagagggcccatgctacccgcgtccgctatggacataataaagcttgagtgctaaataagggctgcggacggtttacaggatccaaacttaacgacgcgctgctgcgactgc

SEQ ID NO: 85488 - DNA, 367 bp, Zea mays
  unsure (1)..(367): unsure at all n locations
  Clone ID: MRT4577_177974C.1
ttttctgctacggatcacgttctgcctgcctaatgggctgtctatgggacttggtaacaactgcctcgagccaaaccgaccgggctcagacaaaatgagccacactgggcatcatagcctagagcatatacgacagaagacttccttttaagcaggaagcttaggtaatcgagcaagactggtatgtgcactcagtgacttatatctcaatggagacgacgaccttaacttcgacagtgtgatcttagtgttcatatgagctgactcctgtcatggaaatcattaagtagtctttaacaggtctgctggtggcagtcagtactgtngctagagacggacacataatgcaacgtcgtatcttcgataa

SEQ ID NO: 85489 - DNA, 105 bp, Zea mays
  Clone ID: MRT4577_177975C.1
attcggctcgaggctgcggcggaccgagctgagactcccaggccaggagcagtctgccgagtggaatgtggagacgaatgcccgtttgaaacgcacaccacgagg

SEQ ID NO: 85490 - DNA, 150 bp, Zea mays
  Clone ID: MRT4577_177976C.1
ggaatgggaccctgagccggcggacggagcttagtgtgccatacggcgggcaggggaaaccccccaaacgcctcgaggctgacagatcggcgaggatgacctaccctcgctgccctgccacgcctggcccgcatggccgagccaccgacc

SEQ ID NO: 85491 - DNA, 267 bp, Zea mays
  Clone ID: MRT4577_177977C.1
ccgataagcagcggccaaaacagaaagcgcgatttgtttgatcgcttcctcctccactaccactagctagcctgccgccgtccgccgtgcagtgtgcgagctccgcccgccggtgccggaggagagcgaggaagttccctctctgaaaaaatcgcagatttctgttagtatcatcaccagttcgccatcatctccgctctgtgggggcagaagctccgcttcgttccaagaaaggcccccgcgtcttcctccgcaaaacctcccggg

SEQ ID NO: 85492 - DNA, 278 bp, Zea mays
  Clone ID: MRT4577_177978C.1
cagatcaccaacatacttccgtactgcgatatacgttgcactggtggtcgacatttatccgggcgcgactctattgtcgtctatctcgagatcatctgcaaacgagataatgtgttagctcgtccattttggaccgtagaatttgcgggtttagtgtagaggataaaaagtgtggcattgctggtaatattactagcaaattttgtagagttttctccattggtctatcaaagtttatggaagttaaggctgtcatacccgcctgtgggtccttaaag

SEQ ID NO: 85493 - DNA, 684 bp, Zea mays
  Clone ID: MRT4577_177979C.1
aaacgcaatatcgcccagcccctcttcctcctcgacgcgcaggccccagggaaaaagaaaaactccgttggagaaaagtcgcgtgccgtctcctctcgcccacagcacgttggcagcaatggcacaagagagctggaaggagtctgaggagactgtccaaacacctgaggcaccaatattgtgtgtaaacaactgtggcttcttcggtagcagcatgacaaacaacatgtgctccaagtgctacagggacttcattaaggccactacaatggctgcccctgtagtggagaaggtgttctcagtggcatcatcttccagtgtgaccttggagcaagcagaggcagacgaagtaccagccgcggctgtagctgatagccaagcagcacaggagcctccaaagccgcccagcaacagatgtctttcatgccgcaagaaggtgggcttgactggtttccagtgccggtgcgggggaacattctgcgccatgcaccgctacgctgactcccacgaatgcaccttcgactacaagaaggctggccgggagcagattgccaagcagaaccctgttgtgatagccgagaagatcaataagatctgattgatagtctcaccgggttcatttgcttgctatttgtggtggtgccggagtcgtctttacttgaatcagtaggtttcttctggtct

SEQ ID NO: 85494 - DNA, 156 bp, Zea mays
  Clone ID: MRT4577_17797C.1
ccttctttttttatgttggaggtagaggaaaaatgacgggactcaccattttacgaaatgccatgtaccgagctaaatttctgtctcacagggacactcaattgtggctggccgcacatgagtccagagtatcagattgacgacatgtaatacaaa

SEQ ID NO: 85495 - DNA, 465 bp, Zea mays
  Clone ID: MRT4577_177980C.1
cccgggctgtaaaagaatgccaaggcaagggcacaggaatcccaatcaggcaatcaaaaggaagaaccacctcgctgcggagcgctggagatgtcagccgcagtctgaacgaggagcacctatacgggcgcagcacggtgcagcgacagccacgcagctgggcgagcgcacgccgccgcgagttcatggctggagctgggcctccccgacgggctcctccctctggcgaggctggactaggtgggctacaaccggacgacggggttcgagtggctgcggcaggccgccggcctgaccgacacctgcgcctccatcggcacgcaggaagtggtacgacaggggaggtgagcgagcgttcgtggagccggcgacccatgcaccgcctcacgcggggtgaagagccaggagctcctcatctgggtctccagctccgaaaacgacagtagggccctgcggcaccaaaga

SEQ ID NO: 85496 - DNA, 1309 bp, Zea mays
  Clone ID: MRT4577_177981C.1
cgttgctgtcgcacggaacttctgaatcaaccattaattggggaggaaagactttctgctcatgattttttccttactctggctgcctgcaacacagtaattccagtgaacacagagggttctcacgatttgacaaatgaagtggatgagataggtgcaattgattaccagggtgaatcacctgatgagcaggctttagtaattgcagcgtctgcttatgggtatacccttgttgaaagaacaactggacacattgttatagatgttctaggcgagaggttaaggttggatgttcttggtctccatgaattcgatagtgtgagaaaaagaatgtctgttattgtaaggtttccggacaacaatgtgaaggttcttgtgaaaggtgctgacacatcaatgttaaacattttgaaagtagaaattgatgatgaactttatgattcgttgcatgttaaaattagagaagctacagaaaatcatttgtcagcctattcatcagagggtttacggaccttagtcattggttcaaaaaatctgacagatgcagaatttagtgaatggcaggaaatgtacgaagaagctagtacctccatgcatgagagatcagcaaagctccgtcaagcagcaggtctggtagaatgcaatctaacccttcttggtgcaactggaattgaagataaattgcaggatggtgttcctgaggccattgactctctgagacaggctggaatcaaggtgtgggttctcacaggagataagcaagaaactgctatatctattggtttgtcatgtcgattgttgactcaaaccatgcatttgatcatcataaatggttcctctgaggttgagtgcaggcgtcttctagctgaggctaaagccaaatttggaataaagtcagctgattttgggcgggatttgcaaggtacagaagacatgtaccatggtgatatttctaaattgaggccctcaaatggtcacctgtctgaaactggagcacaaagcctcgaactaaccggtgttattggtggtgacaagtcagagtacagtgagaacgtgacaaattttgatggcactgagttagcactgataattgatggaagctcccttgtgtatattctagagaaacctcttgaatcacagttatttgacttggcaacatcatgtaaagtcgtcatttgttgccgtgttgctcctctgcaaaaggctggtattgttgatttgattaaaagcagaacgagtgacatgaccctggcaattggtgatggggcaaatgatgtttcaatgatacagatggctgatggtggtggtg

SEQ ID NO: 85497 - DNA, 428 bp, Zea mays
  Clone ID: MRT4577_177982C.1
tcaattaattaactaaattctaaacttatcccttgctttataaattatactacatttttataagtgattaaaatattttattaacacacatgtctactaaaattctactcggtacactaattcaactaattgaccggaatagcgaaacaactcgctataactgaacctggctcgataattgcaagaactgcgaagtcgacgagagtttcgtgacttacgcaatttattgaacattataatgagcctcgcactagcatattaatttattcaacgatcgaactattctgaataatttatcagcttaccgttctaaatctgacgcgttatccgcgaacacgcggcaagtattctgattcaggattctgattcagctcctgtgtcgagcactttggggaatattacgctgtcgcttcgtgctcgagccgaat

SEQ ID NO: 85498 - DNA, 1040 bp, Zea mays
  Clone ID: MRT4577_177983C.1
ccggccgggatcacagtaccattcatcggtcaaagacgaaagatgactgtcgtgagcatcatgtggtcattagtgcaggtgcaggtgctggtggcggtggcactatcatttctagtaggcggtgcctggtgtggtcctcccaaggttcccccaggaaagaacatcacagccaactatggtagtgattggctagatgccaaggcaacatggtatggcaagcctacaggtgccggccccgacgacaatggtggcggatgtgggtacaaggacgtgaacaaggcccctttcaacagcatgggcgcatgtggcaacgtccccatcttcagggatggtctgggttgtggatcctgcttcgagatcaagtgcgacaagccagcggagtgctctggcaagcccgtggtggtatacattacagacatgaactatgagcccattgcggcataccacttcgacctagcaggcacggcgttcggtgccatggccaagaagggcgaggaggagaagttgcgcaaggcaggcatcatcgacatgcagtttcgaagggtcaagtgcaagtatggatctaaggtcaccttccatttggagaagggatgcaaccccaactacctggccctgttggtaaagtacgttgatggagatggtgacattgtggcagtggacattaaggagaagggctctgacacgtacgagcctctaaagcactcctggggtgccatctggaggaaggacagcgacaagccaatcaagggacccatcaccgtccgactcaccaccgagggaggcactaagactgtctacgacgacgtcatacccaccgactggaagcccaacaccgcctacaccaccaaataaactaaccaaataataatatgtatcaaatgacatacttgatagacctttatttttattttttattcaataaaaggatataaggtgcatgacaacaacacaaacattgtattatctatgtatctcctatgcaatcccaattttaccatgaatacattttaaaaaaaaaaaaaaaaaaaaggggggccgcc

SEQ ID NO: 85499 - DNA, 1091 bp, Zea mays
  Clone ID: MRT4577_177984C.1
cactcctatgggcgattgggtccctcgaggccggccgggacatcacggtaccattcaccggagatgactgttgtgagtatcatgtggtcgttagtgcaggtgcaggtgctggtggcggtggcactagcatttctggtaggcggtgcctggtgtggtcctcccaaggttcccccgggtaagaacatcacagccaaatatggtagtgattggctagatgccaaggcgacatggtatggcaagccgacaggtgctggccccgacgacaatggtggcggctgcgggtacaaggacgtgaataaggcccctttcaacagcatgggcgcgtgtggcaacgtccccatcttcaaggacggtctaggttgtggatcctgcttcgagatcaagtgcgacaagccagcagagtgctctggcaagcccgtggtggtgtacattacggacatgaactacgagcccattgcggcgtaccacttcgacctagcgggcaccgcgttcggtgccatggccaagaagggtgaggaggagaagttgcgcaaggcgggcatcatcgacatgcagtttcggagggtcaagtgcaagtatggatctaaggtcaccttccacttggagaaggggtgcaaccccaactacctggcactgttggtcaagtacgtcgacggcgatggcgacattgtggcggtggacatcaaggagaagggctccgacacgtacgagcctctaaagcactcctggggcgccatctggaggaaggacagcgacaagccgatcaagggacccatcaccgtccaactcaccaccgagggaggcactaagaccgtctatgacgatgtcatccccgctggctggaagcccaacactgcctacaccgccaaataaactaaccaaataataataagtatcaaatggcacacttgatagacctttattttttattttttatttaataaaaggatataaggagtgtgacaaacaacaacacaaatattgtattgtatatgtatctcctatatatgcaatcccaattttatcatggccacattttaaaatggaatatatgatatatatgcaaaaaaaaaaaaaaaaaaggggcggcc

SEQ ID NO: 85500 - DNA, 324 bp, Zea mays
  unsure (1)..(324): unsure at all n locations
  Clone ID: MRT4577_177985C.1
caccgacgagcagcgacccggcgaccacagaaggaaccacccagcaaccccaaccgccggcgggcaagaaggagggggcggcacccgccgcccgagcacagcaaggagcnggagccgacgcgcccggcgaacaccgacagccagacgcacgaaggcccagacgcccaccaccaaggcgcgcagccggcgcgacggcgcgcaagccgccgacaccgagcgggggcgcaccgacaggagccaccccggggacaccaaggacagaggcgcacggcgaagccgccgaacgggccgaggacgacgacgccggcagcgacagcaagaagc

SEQ ID NO: 85501 - DNA, 1123 bp, Zea mays
  Clone ID: MRT4577_177986C.1
actcctaagggcgattgggtttctcaaggccggccggggcatcacggtaccattcaccggacaaagacgaaagaaacgcctattgtgagtatcatgtggtcgttagtgcaagtgcaagtgcaagtgctggtggcggtggcactagcatttctggtaggcggtgcctggtgtggtcctcccaaggttcccccgggtaagaacatcacggccaaatatggtagtgattggctagatgccaaggcgacatggtatggcaagccgacaggtgctggccccgacgacaatggtggtggctgcgggtacaaggacgtgaataaggcccctttcaacagcatgggcgcgtgtggcaacgtccccatcttcaaggacggtctaggttgtggatcctgcttcgagatcaagtgtgacaagccagcggagtgctctggcaagcccgtggtggtgtacattacggacatgaactacgagcccattgcggcataccacttcgacctagcgggcacggcgttcggtgccatggctaagaagggtgaggaggagaagttgcgcaaggcgggcatcattgacatgcaatttcgaagggtcaagtgcaagtatggatctaaggtcaccttccacttggagaaggggtgcaaccccaactacctggccctgttggtcaagtacgtcgacggcgatggcgacattgtggcggtggacatcaaggagaagggctccgacacgtacgagcctctaaagcactcctggggcgccatctggaggaaggacagcgacaagccgatcaagggacccatcaccgtccaactcaccaccgagggaggcactaagaccgtctatgacgatgtcatccccgccggctggaagcccaacactgcctacaccgccaaataaactaaccaaataataataagtataaaatggcacacttgatagacctttattttttattttttatttaataaaaggatataaggagtgtgacaaacaacaacacgaatattgtattgtctatgtatctcctatatatgcaatcccaattttatcatggccacattttaaaatggaatatatgatatatatatgtacatatggatttaaaaaaaaaaaaaaaaaaggggcggcc

SEQ ID NO: 85502 - DNA, 862 bp, Zea mays
  unsure (1)..(862): unsure at all n locations
  Clone ID: MRT4577_177987C.1
gtccactgcatccgtgcaaaattcgatctgattccgaaggtgtagccaatactggagcaaattatggagtcaaaacagaaattataaaattggaggaggatgattttaaacctaggtatgcagagatcactatcttaaatccattagaagacagggcacggcaacctactcttgttgagggaacttctgcagcgactccagtagctagtccaagcaactatgctgaggtaaacacctcagtacagatcaacaatggagatcagattgcagacatgtccatttctcctttttcaacaaacagaaatctttcttccctgtccacactggcagctactcctgaaaggaccacagacaaagactgtcatgattcttttattaacagaagtgtaaattctcactatgagaaaaagagaaggttgagctccccaatgagttgtacttacacgacgcattctagtcctccaagcaaatcattctgccacactggttctgttatgcctggggattggaatagaaattctgaattgtgttgtaaaaatataggattgtccaggtgtgaaaatgtcaagtttgaaagaaactacagtccagaagaggtttcagcaaagaagtctatgcaaaagaaacttcttataaattgcattagatgcaaaacagctcttgggttagaagaagatgggtttcttgttacttgtacacaatattattcatcaaaattgtacttggcatatcttttgaaacatgggctatcaacttttggcatcctggaggatgattnttcagcatcgacaccaacagaggtacaagtagtgcagtgtgaagcttcgtcactcaacaaaaatgtatttggcanattcagcag

SEQ ID NO: 85503 - DNA, 1072 bp, Zea mays
  Clone ID: MRT4577_177988C.1
ggcgattgggaccctcgaggccggccggggcatcacagtaccattcatcggtcaaagacaaaagatgactgttgtgagcatcatgtggtcattagtgcaggtgcaggtgctggcggcgatggcactagcatttctggtaggcggtgcctggtgtggtcctcccaaggttcccccgggtaagaacatcacagccaactatggtagtgattggctagatgccaaggcaacatggtatggcaagccaacaggtgccggcccggacgacaatggtggcggatgtgggtacaaggacgtgaacaaggcccctttcaacagcatgggcgcatgtggcaacgtccccatcttcaaggatggtctaggttgtggatcctgcttcgagatcaagtgcgacaagccagcggagtgctctggcaagcccgtggtggtgtacattacagacatgaactacgagcccattgcggcgtaccacttcgacctagcaggcacggcgttcggtgccatggccaagaagggcgaggaggagaagttgcgcaaggcgggcatcatcgacatgcaatttcgaagggtcaagtgcaagtatggatctaaggtcaccttccatttggagaagggatgcaaccccaactacctggccctgttggtcaagtacgttgatggagatggtgacattgtggcggtggacatcaaggagaagggctctgacacctacgagcctctgaagcactcttggggcgccatctggaggaaggatagcgacaagccgatcaagggacccatcaccgtccgactcaccaccgagggaggcactaagactgtctacgacgacgtcatccccgccgaatggaagcccaacactgcctacaccacttgatagaccttttttatttttttattcaataaaaggatataaggtgtgtgacaacaacacaaatattgtattatctatgtatctcctatgcaatcccaattttatcatggacacattttaaaatgaatacatatttttaatgaataatcgaaatatatgatacatatgtatcaattctagaaaaaaaaaaaaaaaagggcggcc

SEQ ID NO: 85504 - DNA, 294 bp, Zea mays
  Clone ID: MRT4577_177989C.1
agagtacaagctttttttttttttttttttttttttttttttgtactgcggggctgttgtatttgctgctgctggtgctgctgtgatggccgctcctatattactacgaccaacaatctgctgaccaactaatgatggctactactgctgggtggggttgcagccgctggcctgccgggattgccacttctatatatctatgtttaaatacctgtttgccaaacaatacattgctacgtgctctctggtgtaatgacaacgcctcgtctggcgtagaggcaactcgcctattgc

SEQ ID NO: 85505 - DNA, 248 bp, Zea mays
  Clone ID: MRT4577_17798C.1
gcagcaagctggtgggaattgattacagacacacacacacaacacacagagagatctagtagagacagacagagagcctagcagctagccggctttctgaggtctgaaactgaagaaccaaataaccctggcgctcgctcgctcgctcgcattatctcatctcaaactctagtatctccagccaggtcataaaacaggccaatacgggtagcccgggggggccaaggggctactcgcctaaaagctag

SEQ ID NO: 85506 - DNA, 285 bp, Zea mays
  unsure (1)..(285): unsure at all n locations
  Clone ID: MRT4577_177990C.1
tagcaacatagaaagcacaatagtgtaccaacaatggcagccaaaatattttgcctccttatgctccttggtatttctgcaagtgctgctacggcgaccattttcccgcaatgctcacaagctcctatagcttcgcttcttcccccgtacctctcaccagctgtgtcttcggtatgtgacaacncaattcatcaacctacaggatctacaggcaatgcagctggcacttacattatcaccttgttctcgacatcatcagcctatacagcagtactatgtgattat

SEQ ID NO: 85507 - DNA, 195 bp, Zea mays
  Clone ID: MRT4577_177991C.1
cccccgggggaccccagctaggatacctcctagctatgatcgcagatcacaacactgcttcgacagcccacattactatagctaatggctgacacattctgtgactgaggctctcagatctcaggatctcaggactcacacgcatgccactctgatcaccattatcacagcattcgcacttgtccctctaagtct

SEQ ID NO: 85508 - DNA, 391 bp, Zea mays
  Clone ID: MRT4577_177992C.1
ccccaaatcttggcagccaaaaattcaggaaaggacccccggtctgggtagccaaaaaaaaacccccttattttggaagggggcccctggactgtaaaaacatccatagccaaaaaaccaaaggaacaccatgtcaagatggttaaaaaacacccaacacccatccataaacccagggttttgcaaacattgccagggggaagaaattgaccaaaaccccggcccatatttaatgcccccggttttaaactaatttaaccaaccctaacagggcccaacagcggcggtttggcatcaaaactgttttaaagcctgtttttaaccattttccacttccccccttttttttgaaggaggggccaaaaactaatcaaaatggccgctcttcccc

SEQ ID NO: 85509 - DNA, 704 bp, Zea mays
  unsure (1)..(704): unsure at all n locations
  Clone ID: MRT4577_177994C.1
aaaaaaaaaaacatttatagctaagtaagtaaacgcaatggcttcctcaattgtctcatcggcagccgctgctacccgtagcaatgttgctcaagctagcatggtcgcacccttcaccggactcaaatccgccgcttcttttcccgttaccaagaagaacaacaacgttgacattacctcccttgctagcaatggtggacgcgttagatgcatgcaggtgtggccaccaatcaacatgaagaaatacgagacattgtcataccttcctgacttgtccgatgagcaattgcttagcgaaattgagtatcttttgaaaaatggatgggttccttgcttggaattcgagactgagcgcggatttgtgtaccgagagaacaacagttcccctggatactacgatggtagatactggaccatgtggaagttacctatgtttgggtgcactgatgcaacacaggtgttggctgaggttcaagaggcgaagaaggcgtacccacaagcctgggttcgtattatcggattcgacaacgttcgtcaagtccagtgcatcagcttcattgcctacaagccagaaggattctaaatttccaaacatataatcaaaatgtttgtttgatttgtacctaagtctttaattttttttcttcaatttttgttttgcattttgttcctatttgtaccngtgtattttcttcgattccgac

SEQ ID NO: 85510 - DNA, 373 bp, Zea mays
  Clone ID: MRT4577_177995C.1
cccccccccccccccccccccctttttccatcgtcttctttttcttccccccttttcagattttttataagctataagctagccagacaacccctgtaggagaagaataagggaaaccataaaagaaagagagggatgccctgattgggattgtaagctagctaggttgtccgcctgaaagcaggctggcagctaggcccaataatccatggacggatggatggattggatgtgtcgccggagtcaaaaaaaggccacgtcgtcttccccgcaggcgcagccaaggactacggcccgggacggcgaccccgccttgtatttgtttcgtgatttcgtccaatgcaaaaaagacagtagtgactgctttcccagc

SEQ ID NO: 85511 - DNA, 1384 bp, Zea mays
  Clone ID: MRT4577_177996C.1
ggtcgttttcttagaccttattattttatataattgtgcggctgagctttttctgacttaaaaaaaaaaaaaaaaaaaaaaaaaaaaaaaaaaaaaaaaaaaaaatctcagttccagtggccgcttcgatgtacctgaccgccgtttccttcccccccacagccgccttctcgtcttcatcccagaagctgctgcccaggtcgatcatcgaggagcagcaggagatcgctcggtccaagggctcctccggcgatgagcccctgacgtgggcggacaccaggcggatgcacgtgacgagccgtgcgatccaggagacgatgcgggtggcgtccatcctgtccttcaccttccgggaggccgtggaggacgtggagtaccaagggtacctgatccccaagggctggaaggtgttgcccctgttccggaacatccaccacagccccgaccacttcccctgcccggacaagttcgacccctcccgattcgaggttgctcccaagcccaacacgttcatgccgttcggcaacgggacccactcgtgcccggggaacgagctcgccaagctggagatgctcgtgctcttccaccacctcgtcaccaaatacaggtggtccacctccaagtccgagagcggcgtgcagttcggccccttcgcgctgccgctcaacggcctgcccatgaccttcgctcgcaaggactgatcgaggagccactgcacggccatggatggtggtatatgctagcactacactactagtaatacccaggaacgcgaaaaaccgcttcccggcagcgttgcggcggcggccatcggacgggacagggaaggtgacggtgacgggcatcaggcgagcgggcatgggccatgggatcgatgatcagagaaagaaagattacgcagctccttgtacagattcttcctcagctagtagggccggatcccaagaagccggaagaggagaccaaacacaaaattaggcatagccgcttaggtgctactcactctaagctactagtactccagtaggcaagcatcagatcacccagctgcgctacaaacaagtggcgtttaattgtaaaaccaaaccattttttttctctatcttcttcttcttctttttccctcccctttagattttttttataagccagccagatagtggcacccataggagagaagaacacaaggaaaccataaaagaaagagagggaggccctgattgggattctaattgtaagctagctaggttgcccacctgaaagcaggctggcagctaggtcgagtaacccacggatggatggattggaatggaatggatgtatcgccggagtcaaacgggaaccacgtcgtcgtcttcccgcagctcttgcgtttgtttcggca

SEQ ID NO: 85512 - DNA, 212 bp, Zea mays
  Clone ID: MRT4577_177998C.1
gggggggatccatggacgagggtcatcgggggcaaaaagcaattccaggccttgtactcaaatttaaatagtttaccaggacaaaaagaaagccttgcaggattcaagaaacaagaaacatttgtccatgtgttagagggatgttaaatttattaggatcattccctgcatccgatgccaatgaggttgcaaccttaaacttattctaaaac

SEQ ID NO: 85513 - DNA, 692 bp, Zea mays
  unsure (1)..(692): unsure at all n locations
  Clone ID: MRT4577_177999C.1
ccccgcgtccgcaaaatttcattcaaaaacacnnaaggcttactcnncgacaagcaggnnatctctatnnggtgtcagacccatgaaaagatttctccttccagtgttttgaagattttattctgttataggcctattatagtttactaatataaaattttggctgtttcagtgttatccatagtaatgttctagaaagcaaaaatatgaagtaaatattttactgcgaccataattcctgtatgtgtaactcgatcaagaaatcaagagagtttcccttttaatgttgaattcacaattatgcctgacttatgctcaaataccttgtccagaagtgaacaatataagtgcatgagttgatttggaaaaagtacatggttaatgttgatcttttgcacggaagttatacttcatctaaaatgacatgtccctcttttgcagggaaggccgctattcttgaagttgaaacactaacctgtcttgaaggttctggtgaagttttgtgtatgaataggtcggtattttttttagaacaattaagctttacagcttgactggaatgagtgaataacccattgatgcgacacctggaacaggagtactatctatttgcgtggtgctggtggcttctccaatcttcacaaccgttctcatatgccacttatccttctaatgaggtttccaatgttaca

SEQ ID NO: 85514 - DNA, 370 bp, Zea mays
  unsure (1)..(370): unsure at all n locations
  Clone ID: MRT4577_17799C.1
ccggcccggaaggaccggggcgacccacgcgcgcgccgacgccaaggaagngaagcaaaactcgaaggcagaaggccagcacaacaccacagctaagggcgcagaagacgagccccacgagaacgacagggagccgcccgaagccgggaaagaggaggagagcaaagcagcagacgccccaaggaccagacgctacctgataaagaaagctaagagcgggtggtggccaaggctgctgaagcaagagggcaagccacctgcgtttttgaaggatgactgggacaaatggcacggccaggatgatgaagatgctgcatttaacgactatggcgggatggacttctcgaaacaggacataggaggggctgat

SEQ ID NO: 85515 - DNA, 138 bp, Zea mays
  Clone ID: MRT4577_1779C.1
ccacgcgttccgatcatttatgccaatccatggttacttctcttgcatgttgccttctttaaaaccttaaacatattcaatggaggaattccaaggagaatgccaattgttgcaggaccacattcttaccggagggag

SEQ ID NO: 85516 - DNA, 646 bp, Zea mays
  Clone ID: MRT4577_177C.1
aattcagtggggaaaggcgtcttcgtactcgcctctctccgcgcatcctagccttcgccctcctccttccccatttcgccagcggcgcagcccaccaaccacccccacccgccgccatgagggagtgcatctgcgatccacatcggccaggccggcatccaggtcgggaacgcgtgctgggagctctactgcctcgagcatggcattcagcctgatggccagatgcccggcgacaagaccgttgggggaggtgatgatgctttcaacaccttcttcagcgagactggtgctgggaagcatgtcccccgtgctgtctttgtagatctcgagcccactgagattgatgaggtgaggactggtgcttaccgccagctcttccaccctgagcagcttatcagtggcaaggaggatgcagccaacaacttcgcccgtggtcattacaccattggcaaggagattgttgatctgtgccttgaccgcatcaggaagctttcacacaactgcactggtctccagggattacctgtattcaacgctgatgaaggtggatatgcctctgcccttgactcgcttgtcctgcagaggctgtctgtttgactatgcagaggagtccaccccttgggtccgggatgtacacctctcccca

SEQ ID NO: 85517 - DNA, 373 bp, Zea mays
  Clone ID: MRT4577_178000C.1
aaaaggaggagggggcccaagtcccattcccgggggaaaggttcttttcttagggaaacagcgggtggtttcgaaatttgggggggggggaggcataaaccccaattaaaatccggtcccaaaattggccccaacccaacgggaagataaatttttcactgggtggaaaacgccaaggacatgcccaagcccacattttaaaaaaccaaagggggggcaaacttaagggcccaaggaccaaaatagctttttgaaaaacttaaaacccctgttcaataaggtaatccccgagcctttccaccaccatattggattgccctggaataattggcttataataaataccgataataaaggacatgccatttttccg

SEQ ID NO: 85518 - DNA, 936 bp, Zea mays
  Clone ID: MRT4577_178001C.1
cctcgaggccggccgggccggggtcagtggaagcgatcgacaccattcaagctaaagctgctttcttgggaaacgcttgatcgccacagctcgaccaatggcttcttcctggggttctcggttgccgctcgcagtagtgctgctgctcgtggcctgctcctcctccacggcagccgccacaagctacaccgtcggcgacgggtccggctggacaaccggcgtcgactacacatcttgggccgcctccaaaaacttcaaagtcggggacaatctcgtgttcaactacgcgaaagggctgcacacggtggtggaggtgagcgcggccgagtacatggcgtgcacggccgccaactcgctgggctccgacagcagcggcgcgaccaccgtggtcctcaggacgccaggcacccactacttcgtgtgcagcatcacggggtactgcggcgccgggatgaagctggcggtgacccccggcggctccaactcccctgttgccaccccgcgaacgtcgtccccgacccctacaacgcggaaaaaaacgcccgcccccaccacccggtaacaaaccccaccctgttttgggggggggggcaccccgccgaccccgggcatgactccgttcacgtcaaaccccagcgcggccgcccttgggtcggcggcgttggctggatttagtctggtttggtgtgtaagtgtccggctagcgctgctttaggcaaagggcggccatggaccgtggtcgaccagggtatgtaacagtgtaacgtatgtgtttgttctttgttccggatcgagctagctggggtatagtatacttgaacgaaggaagctgccaagctggtgactggtgtctcgactccactttaaatcgccgtgcaaccaaaccgtgcaagtcactttccttgaaccaatcgaattgccccgcatgtgcaaccc

SEQ ID NO: 85519 - DNA, 553 bp, Zea mays
  unsure (1)..(553): unsure at all n locations
  Clone ID: MRT4577_178002C.1
cccacgcgtgcgcggccgcgtgcgggcccatcgtgccgaggacagaaaggtcatccctttactccccatgcttttttcattgatcacatancaggcaggcgctaccccattcttacaacactcctgatgtggctacacatcaggtgccaaaccagtcaccaccaactacaggtacagaaacgcgcgatatctagctgaactttctggaccatggcatagaagcttgtggtgagtatgcaccaggacaacaccctccttgaaagggacaacaactggaacatcttgtggactattagtggctctcctaagcacttaggtccttactactgtggagatcttgcggcaaaaatcgttcgggcgggacatgactggacacccactacaaggtctgcctgtccgcacgcatcaacatcagtggcgtgaacggagacgacatgccgggtgcaggggagatccagttgggaccgagcatggggatctgttcctgcgatcaggtgtgggttgttcgctacattgttgagaggatcaccgatatcgtcggcttggcggtgac

SEQ ID NO: 85520 - DNA, 191 bp, Zea mays
  Clone ID: MRT4577_178003C.1
cggacgcgtgggcttcgttcgtctcgttagcagaagcccatctgtgcttttgactgcaaagacactctgcgtcagttgataaagctgagctcatcctcagattcaagagacccatgcatcaaccagcatggactgtggaatcaaaggatgctgctacttctggcacgatttgaactacaataatcctaacg

SEQ ID NO: 85521 - DNA, 1125 bp, Zea mays
  Clone ID: MRT4577_178004C.1
attggtacctccggccggccagaatgagatgtgttttggcggcgacgacaaagggctaaaaaaaatcttgccgctccaccaattcgtcttggttgccgacacggcacctcgtcggaatcaggtggcgcgacctcctcgccggccggcgcgacaccaccatgggcccggaagcagtgcggaaaagcctggagcccaccgcaaccgccgaggaaatcactggctccacccctgcgcggctccacttctacgaccccttcgtcctcagcggcgtccgtatcgaagccgccgagcacggccgcctcctctgctctttcgtcgtcacccctcgcctcgcgagtcccgtgggatacctccgcagcggtgtcacagcgacgctcgccgaccagctgggatcggctgtgttcttctgcagtgggatccccagcagcggggtctccatcgagatcagcgtctcctttgtcgactcggctgccgtcggggaggaaatagaggttgagggaaagttattacgtgctggaaaatcagtcggtgtcgtctccgtagatttcaggaagaaaaagacagggaaattgatggcacaggcccgtcacaccaagtatcttgtggcatcaagcaaactgtgaggcgctccccttttgttaacaagatatcaacatcaattgcgcccagactctccatactggtgccattattagtagtcagcaatcatgaaatgtttgtggcatatctttttttttcaaaaaaattcctgtatatattatatatatgaaattcaagtaagtatcattggtgcctctgatgcatatcggtctagtcatgttactttcacttgacagccatgatcagattatatatgttttcaaagactcgtgcctaaagaccctctctcttggatcacatttcatgttgtcttcgattatggtataaaaagaagtagctcgcgtggagatcggaatctatgattgaactggatcgattgtgcacttgctagcgctagagctaggcaattggggaaaatccctttttttgctgaagaaaatggcattcactgcaagtaattgctaaggcgtgtagtttggattaaaatgaggctgcgtcgaggttttagcatgttttaggcgaatg

SEQ ID NO: 85522 - DNA, 431 bp, Zea mays
  Clone ID: MRT4577_178005C.1
atttctagattcttaaaaaaaaaaaaaaaaaaaaaaaaaaaaaaaaaaaaaaaaaaaaaaaaaaaaaaaaaaaaaaacaaaaaaaaacaattgggaataacaattgccaaaaaaataaaatgttttttccctccccgcgcgcccccttgggggggggatttttccatttttccttccccctggggccctttcgcgcttcttttttggggccccctttcccccttttgggggtctttttaccattccctggccggggttttcccctctcgtctttgggaaccccccggttttccccctttttttgcttttgcgccattcccccttttccccatttctctttttagcaaaggggccccccccgttggcccttcctaccttttgcccgccctttttgcttattggcccccccctttaccggccctttccccccc

SEQ ID NO: 85523 - DNA, 1966 bp, Zea mays
  unsure (1)..(1966): unsure at all n locations
  Clone ID: MRT4577_178006C.1
tataaaattgtgcggacatttggagagaagagagtagaggataatttgaagaaccacgtggacctttgcaggatgcttgatattgtcgcattggaaaagggtgctgatgtggctggtggtaggggtttctatttaaaggacgaagttacaggtgatggcgaggacaaatatctcatagctacatcagagcagcctttatgtgcttatcacttaggtgatcgaatctaccctgctgaacttccaatcaaatatgctgggtactccacatgcttccggaaggaagctggttctcatggaagggacacagctggtatcttcagagtccaccagtttgaaaaaattgaacaattctgcattacaagcccaaatggcaatgattcctgggagatccatgaagagatgctaaaaaattcagaagatttctacaaggagattgggctaccataccaagttgtttccattgtctccggtgctcttaatgatgctgctgctaagaaatacgatttggaagcatggttccctgcatcaaagaccttccgagagttagtatcctgttcaaattgcactgaccttcagtcaaggagacttggaattgggtatggccagaaaaagaatgatgagcagtccaagcagtttgttcatatgctgaactctaccttgactgccactgagaggaccctctgttgcatcctggagaatttccagaaggaggacggcgtcgaggtgccaaaggcgctgcagccttatatgggtggaatagagttccttcctttcaagcaacctttggatgccaaacaagctgctgactccaaatcaaacaagtccaaatcaaagggaaatgctgcttgagttggacgaggaacagactggaatgcaaatgcacgtgcaggttgcaaattcttacgttaatttctggggcctatcagtacacagtactcatagcatgacaaatggcgttgcaggttttggtttttacccgttttggtttccttgttgccacattatctgatgacccacttggcacacttgtattgcaatagcatttcttgaaatctggaatgcttgaccactaccagctcaaccgggctgtgtttatcgcgttgccacagaacgcctgcttgtctgtctccgaaaccaccaggtgttctttgtagcacattagaaacggtttgctggtggattggtgttcatctgattgttaatgaagaacctgcaatgtcattaatagaacaattcaaatttntgaagtaataaatgcaaatatctgaaaaaactgagagctagataattctctagaagaacttccaaagttcagttggacaatggaagagctacagagaaggaaataggcatatcaggctatggactctaagggaagaaagaaaaacataaatgtatattttttctaaaaaaggagtaaatgtagtacccaatgaattaaggttctcatcatgagttaagacttaagagcttactcaccgccacaatgtaactacaatattctgaaactatcactaacctgagtacctgaattcattgaaacaacaatacctcacccaacctaaagcccgtgattgccccaaactggagtcaaacaaataacagaatcaattcatgtccccaaagattgaactccaactataataatccttatatctgctttcaaggaagtgactattgcagaggccagatctcactaaacctgcattcccataagaaatattggtttttgtgccatttataataaaacataatattgtatatatagtctttaaataccaataaagatacctgaagatgcagaagacatgtcggtgttcgaatttcatgcattaccatcaaagcaaaggacaacagtgttgtaccatttaacagattcagtacttctgcttctaaagcaaaaccgagtgtagaacttatgtgttctttgtccaaggaatttagatattttcaaacagatgccggc

SEQ ID NO: 85524 - DNA, 854 bp, Zea mays
  unsure (1)..(854): unsure at all n locations
  Clone ID: MRT4577_178007C.1
ctaaaatcatatgagtatcaanatactacaaagccaaaatgagaccacanccacatagtaaatctaggggaagaccaaaaatatgtgattggaaacaatgaacataagtgttgaaagtgcaggggcgatacacatagaaattatccatcggctggatggctaataaagcagagcagtacctgaaactgaagaaagctcctctgacagacatagcattctagtttttatctttcatactaatatctatcacatctgaaatttgattgtaaagagataggagttgtagaaagagaaaaactaaaggaaaaaatgaataatacgaattacaaaatgtagaacatacactttaccaaatatgcacgatccagttctatttcacatatgtgttaaaataaatcatattgcatgagctatattaaagcataaaagtacctaaaactgaagaaagatcatctgactcaggaaccataaacacacacttttgccatcggatctaatgattttgaagacgtgctcaagaggcatgtcctccttctatgccccgacggacgtggaggcgaggtcgtccccatggccccgaacagcgaacgagagctcgccgccggtgtaggtgaggctcttgcgtagcttctgcctccgttgttgctggtggtacgacgccacgtgctccagcactttctcctagatcgatcgcccctaaggcgacgccatggacaccaccatcgcgaccgtgaaggacgaggggagttggggtgcgggggtgcggatggcgccggatgttcgggggcggggagtggagggggaggccgagacggaggcaagtgggcagaagagagacgtggagaaaattcgat

SEQ ID NO: 85525 - DNA, 2198 bp, Zea mays
  unsure (1)..(2198): unsure at all n locations
  Clone ID: MRT4577_178008C.1
attgggacctcgagccggccaaaaaaaataagcgcccaagctcacccgcgacgtcaagcctgccctaacctcgtgtttcccttgctcggcttcaccccatccgcccatcgccgccgtcgcaacgtgcccgcctgtttcccttgctcgacttcaccccatcgccgccgccgccgtcgcaagcgacgatgctcgacatcaacttgttccgcaccgacaagggcggcaacccggagcttattcgtgagtcccagcgcagccggttcgcctccgtcgagctcgtcgacgaggtcatcgccctcgacaaggcatggcgcgaaaggcagttcgagctggacaagatccggcaggagctcaacgctaccagcaagaagattggcaagctcaaagccagcaagcaagaagaggaagcgaagaagctcatggagagcacagacgaaattaagaaaaggttggcagccaaagaagttgaggtgcaggaggccaagagcaccctcgacgccaagctcacgacgattgggaacatcgtgcatgagtccgtgccagtcagcgaagacgaggcaaacaataaaattgtacggacatttggagagaagagagtagaggaaaatttgaagaatcacgtggacctttgcaggatgcttgacattgtcgcattggagaagggtgctgatgtggctggtgtaaggggtttctatttaaaggatgaaggtgtcctccttaacctggcattgataaattttgggctagcctttctgagaaaacggggatttaaaccaatgcaaactccctttttcatgagaaaggaaactatggcaaaatgtgcccagttggcccagtttgatgaggagctttacaaagttacaggtgatggtgaagacaaatatctcatagctacatcagagcagcctttatgtgcttatcacttaggtgatagaatataccctgctgaacttccaatcaaatatgctgggtactccacatgcttccggaaggaagctggttcgcatggaagggacacagctggtatcttcagagtccaccagtttgaaaaaatcgaacaattctgcattacaagcccaaatgacaatgattcttgggagatgcatgaagagatgctaaaaaactcagaagattactataaggagattgggctaccataccaagttgtttccattgtctctggcgctcttaatgatgctgctgctaagaaatatgatttggaagcatggttccctgcatcaccgaccttccgagagttagtatcctgttcaaactgcactgactttcagtcaaggagacttggaattgggtatggccagaaaaagaatgatgagcagtccaagcagtttgttcatatgctgaactctaccttgactgccactgagaggaccctctgttgtattctggagaatttccaaaaggaggacggcgtcgaggtgccaaaggcactgcaaccttatatgggtggaatagagtttcttcctttcaagcaacctttggatgtcaaacaagcttctgactccaaatcaaacaagtccaaatcaaagggaaatgctgcttgagctggatgaggaacactatgttaatttttgggcctaccagtacacaatacccatagcatgactatggcgttgcaggttttcgttttacccattttggtttcttggttgccacattatctaatgacctacctggcatacttatattgcaatagcatttcttgaaatctggaatatttgaccaccatcagctctaccggctgtgtttatcgcgttgccacagaacgctgcttgtttgtctccgaaaccaccagtgttctctgtagcacattagtaacaatttgctggtggatttgatatcatcttttttaaatgatggtgtattggtgtacttgtgatcgataatgaaaaagacatcttgtgttagtggcatctagtgctgtcgtggctggaacctggaattgttcttggattctcccttcgcatctcttatattgaaacccggtgcggattgctcgcacgagagcgttttctgacggngtggggagtgcctccacctgtaagtcccagacgcgaaatcttcattcaattgcgctctgagcggggttccgacgcagcttcctcacgtgcctagccttccacacttctctgtctgccccaccgtcgccgccttattcttctaaggttagggctcgcgtc

SEQ ID NO: 85526 - DNA, 5391 bp, Zea mays
  Clone ID: MRT4577_178009C.1
ttcggcacgaggtttcccttgctcgccttcacccctcgccgccgccgccgccgtcgccgtcgcaagcgacgatgctcgacatcaacttgttccgcaccgacaagggcggcaacccggaccttattcgcgaatcccagcgcagtaggttcgcctccgtcgagctcgtcgacgaggtcatcgccctcgacaaggcatggcgcgaaaggcagttcgagctggataagatccggcaggagctcaacgctaccagcaagaagatcggcaagctcaaagccagcaaacaagaagaggaagcgaagaagctcatggagagcacagacgaaattaagaaaaggttggcagccaaagaagttgaggtgcaggaggccaagagcaccctcgacgccaaggtcacgacgattggcaacatcgtgcatgagtccgtgccagtcagcgacgacgaggcaaacaataaaattgtacggacatttggagagaagagagtagaggataatttgaagaaccacgtggacctttgcaggatgcttgatattgtcgcattggaaaagggtgctgatgtggctggtggtaggggtttctatttaaaggacgaaggtgtcctccttaacctggcattgataaattttgggctagcttttctgagaaaacggggatttaaaccaatgcaaactccttttttcatgagaaaggaaactatggcaaaatgtgcccagttggcccagtttgatgaggagctttacaaagttacaggtgatggcgaggacaaatatctcatagctacatcagagcagcctttatgtgcttatcacttaggtgatcgaatctaccctgctgaacttccaatcaaatatgctgggtactccacatgcttccggaaggaagctggttctcatggaagggacacagctggtatcttcagagtccaccagtttgaaaaaattgaacaattctgcattacaagcccaaatggcaatgattcctgggagatccatgaagagatgctaaaaaattcagaagatttctacaaggagattgggctaccataccaagttgtttccattgtctccggtgctcttaacgatgctgctgctaagaaatacgatttggaagcatggttccctgcatcaaagaccttccgagagttagtatcctgttcaaattgcactgactttcagtcaaggagacttggaattgggtatggccagaaaaagaatgacgagcagtccaagcagtttgttcatatgctgaactctaccttgactgccactgagaggaccctctgttgcatcctggagaatttccagaaggaggacggcgtcgaggtgccaaaggcgctgcagccttatatgggtggaatagagttccttcctttcaagcaacctttggatgccaaacaagctgctgactccaaatcaaacaagtccaaatcaaagggaaatgctgcttgagttggacgaggaacagactggaatgcaaatgcacgtgcaggttttggtttttacccgttttggtttcctggttgccgcattctctgacgacccacttggcacacttgtattgcaatagcatttcttgaaatccggaatgcttggccaccaccgccagctcaaccgggctgtgtttatcgcgttgccacagaacgcctgcttgtctgtctccgaaaccaccaggtgttctttgtagcaagcacattagaaacggcttgctggcggattggttttttatccttttttttttccaatgacggtggattggtgtacttctgatcggtaatgaaaaaaaaggcatcttgtgttagtggaatctagtgctgttgtggctggaacctggaaatcctcagtcctcacaagcatgttcttggattctcgcatcgcatgcattgtatggaaacaccggtacctacagcgaaataaaaaaaaaaaaaaaaaaaaaaaaagctatcttggggtagggcggttctggtggtggattgtttagacggtgatccacctagcaccgaaagatggagaggtgtgttctaaaactgaagaaagatcatctgactcaggaaccataaacacacacttttgccatcggatctaatgattttaaagacgtgctcaagaggcatgtcctcgttctgtgccccaacggacgtggaggcggggtcgtccccacgaccccggacagcgaacgagaactccctgccggtgtaggtgaggctcttgcgtagcttctgcctccgttgttgctggtggtacgacgccacgtgctccagcactttctcccagatcgatcgcccctaaggcgatgccatggacgccgccatcgtggccgcgaaggacgaggggagtcggggtgcaagggtgtggacggcgccggatgttcgggggtggggagtggagggggaggccaagatggaggcaagtgggcagaagagagatgtgggagaaaattgcggatcaaggagagcggcgaaggtagtttggcggacgcgtgggcggacgcgtgggcggacgcgtgggcggacgcgtgggatcgccctcgacaaggcatggcgcgaaaggcagttcgagctggacaagatccggcaggagctcaacgctaccagcaagaagatcggcaagctcaaagccagcaagcaagaagaggaagcgaagaagctcatggagagcacagacgaaattaagaaaaggttggcagccaaagaagttgaggtgcaggaggccaagagcaccctcgacgccaaggtcacgacgattggcaacatcgtgcatgagtccgtgccagtcagcgacgacgaggcaaacaataaaattgtacggacatttggagagaagagagtagaggataatttgaagaaccacgtggacctttgcaggatgcttgatattgtcgcattggaaaagggtgctgatgtggctggtggtaggggtttctatttaaaggacgaaggtgtcctccttaacctggcattgataaattttgggctagcttttctgagaaaacggggatttaaaccaatgcaaactccttttttcatgagaaaggaaactatggcaaaatgtgcccagttggcccagtttgatgaggagctttacaaagttacaggtgatggcgaggacaaatatctcatagctacatcagagcagcctttatgtgcttatcacttaggtgatcgaatctaccctgctgaacttccaatcaaatatgctgggtactccacatgcttccggaaggaagctggttctcatggaagggacacagctggtatcttcagagtccaccagtttgaaaaaattgaacaattctgcattacaagcccaaatggcaatgattcctgggagatccatgaagagatgctaaaaaattcagaagatttctacaaggagattgggctaccataccaagttgtttccattgtctccggtgctcttaacgatgctgctgctaagaaatacgatttggaagcatggttccctgcatcaaagaccttccgagagttagtatcctgttcaaattgcactgactttcagtcaaggagacttggaattgggtatggccagaaaaagaatgacgagcagtccaagcagtttgttcatatgctgaactctaccttgactgccactgagaggaccctctgttgcatcctggagaatttccagaaggaggacggcgtcgaggtgccaaaggcgctgcagccttatatgggtggaatagagttccttcctttcaagcaacctttggatgccaaacaagctgctgactccaaatcaaacaagtccaaatcaaagggaaatgctgcttgagttggacgaggaacagactggaatgcaaatgcacgtgcaggttgcaaattcttatttatgttaatttttggggcctatcagtacacagtactcatagcatgacaaatggcgttgcaggttttggtttttacccgttttggtttcctggttgccgcattctctgacgacccacttggcacacttgtattgcaatagcatttcttgaaatccggaatgcttggccaccaccgccagctcaaccgggctgtgtttatcgcgttgccacagaacgcctgcttgtctgtctccgaaaccaccaggtgttctttgtagcaagcacattagaaacggcttgctggcggattggttttttatccttttttttttccaatgacggtggattggtgtacttctgatcggtaatgaaaaaaaaggcatcttgtgttagtggaatctagtgctgttgtggctggaacctggaaatcctcagtcctcacaagcatgttcttggattctcgcatcgcatgcattgtatggaaacaccggtacctacagcgatggtcaggttctggtggattctgtttggctctgctttccagccttttcactgctcaacgtgactgtagccttttataacatccatcgaattggatctcatcttctattttaaaattccatttataaacgctgttacatagtgtcctaaattaagacatagtaaatcaacataaaatacgcagaaaaactaaaatgacatgagtatacaaattaacctacaagccaaactgagaccacaaccacatagtaaatctaagagaagaagaaaaaatatgtgattggaaacaatgaacataagtgtttgaaagtgcagggcgatacacatagaaattatccatcggctggatggctaataaagcagagcagtacctgaaactgaagaaagctcctctgacagacatagcattctagtttttatctttcatactaatatctatcacatctgaaatttgattgtaaagagataggagttgtagaaagagaaaaactaaaggaaaaaatgaataatacgaattacaaaatgtagaacatacactttaccaaatatgcacgatccagttctatttcacatatgtgttaaaataaatcatattgcatgagctatattaaagcataaaagtacctaaaactgaagaaagatcatctgactcaggaaccataaacacacacttttgccatcggatctgttgcttttgaagacgtgctcaagaggcatgtcctccttcgtgtgcctcgacggacgtggaggtggggtcatccccacgggcccagacagtgaacgagagctcgccgccggtgtaggtgaggctcttgcgtagcttctgcctccgttgttgctggtggtacgacgccacattctccagcactttctcctagatcgatcgcccctacggcgacgccatggacgccaccatcgcgaccgcgaaaggacgagaggagtcggggtgcggacagcgccggatgttcgggggcgaggagtggaggtggaggccgagatggaggcaagtaggcagaagagagaggtaagatcaaggagagcagccgccgatcgtacggaagcccggcc

SEQ ID NO: 85527 - DNA, 501 bp, Zea mays
  unsure (1)..(501): unsure at all n locations
  Clone ID: MRT4577_17800C.1
gcatctttattgccttgaagagtgcagttgctagagcctcagaagatttcatgcctcgggaaccaacactgcaaactctgcacattgcgtctgtggcattcaatagcctattgttgggagaaatcttcatacctgactgggatatgttccatagcaagcatgaatcagcggaattccagggaggagctagagccctgagtggaggtggtgtttatgtcagatggttcgattctaagagcaaggtatgctggtcgtcctacacgcgattgtctgttcactgacccagtcatggatggcaaaagtctgatgaagatatggaacttgaacaatttcactggtgtcattggagtgttcaattgtcagggagctggacagtgggtttggccagttaaacaaactgcttatgttcctaccaacataaacataactgggcagctctcaccgnccgacgtagaatctcttaaggagatagctggggatgactggaatggggagactgca

SEQ ID NO: 85528 - DNA, 307 bp, Zea mays
  Clone ID: MRT4577_178010C.1
caacacgatgcttttaaaccctttatttgggtatattatattatatacacaaaatcgacaccgtacagcttggatcaaatgacaagcaaatctcagggctttggaaaatgaaacacattgatgcattacaacacacttaaaacctggctactggatagctaaattgacgtttgaacggccacccagccctggatttttactttcggcatttagcccaccaagaagccctttttaagatagcctaaaccgaacaggtgtgtctagggatgttttaggagcctctcagaactttttttctgctggcttg

SEQ ID NO: 85529 - DNA, 483 bp, Zea mays
  unsure (1)..(483): unsure at all n locations
  Clone ID: MRT4577_178011C.1
aacgggtgngacccggccctcctcgggcacaaccaacgacgacattaaacccccaccacatcatccgaacgccactgcctgctccagccctccgcgaatccccgccgagatctccacgtcgtgcccaccgacgctaccgacgcgacgcccaagcccacgcagccgccgaccacggccacagacaacgagctcgacgacacatacgaagccaagaaggagcaccggaacaaggccgtcaacgaccacaacgacgtaaagaacatcacggaaccagcaagggacgcaaaggaccccactgagcacaagaagaataacaacgtcatgaaccaacagctggatggaacctccaatgagtgcaactggtgcaaacagaagcttggagcaaatgccattcttgcggggtcacttgctgtgagcaaagctggagctatggcgaagaagattcctctttaccagcacatcgcaaatcttgctgggaacaaa

SEQ ID NO: 85530 - DNA, 710 bp, Zea mays
  Clone ID: MRT4577_178012C.1
cattgggaccctcgaggccggccgggacccacttgcatcatcccagcacgggcctctctacgcctccacctccctcgattctttcctagtccatcgcctcgcgactgcttcatcacctgctcaaggtcgcaccacatggagagagatcctagcccggcaggaagcgcaggaactccatgcgagacagaccggcgagtcgtgccaacaacgtcaaccgattgaccatcacctccgtgacctacatgaacgccgcaattcctcgaacgtgtctatcaggatacatctaaaacgaacatctggcacaacatatcctactacatgtggaatgctggggttgaaacgagcatcaatacattgtcttatgactgaaatgcgccagtggatttgaggataactctcaagaacttctgccagagatccggtacaattaactatccctctgagagggcacctctgagtgcccggttcgcgggccagtgcacactctcagaagatacacatgctggaccacatcagggtcttggttgaacgctatgcgaagatatatggccagctcatgccattacaacatgaggctgaagaccatcttccacttcgtcgccgaaccacaacttatgatattgacctgacctcatgcctttactgctggtctctgtcaacacgcttgccccgtctcaagctattgttgatcctcctatgtgtgatctcga

SEQ ID NO: 85531 - DNA, 448 bp, Zea mays
  Clone ID: MRT4577_178013C.1
tttcggaaatagaaattttgcttttattttggtgccctatctatcccgatcccaggttccgttgcattgcatcgcatcgtatcgcatcgtatatcgtatctaatcgaacaaacgactcgaactccgatagtcgatccgcttactgctcggtctggaagtagttgagcaggatggagcgctcctgcgactcctcaccccagtccttgacgacgacgcaagagcagttgacaaccttgcgggcgttgccctcgcggtcaagaacgcaaagaccggcccactcgccgagctgcttgccgtcagggaccttgatcagggggatcttgtgctcggagcacagggcgatgacgagcttcttgtaggcatcctcctcgcaggcctcgttcaggacgcacatgtgcgcctggcggcggtcgagggccttggaagcctcgcgcagaccgcgggcaag

SEQ ID NO: 85532 - DNA, 493 bp, Zea mays
  Clone ID: MRT4577_178014C.1
ggaaacacatggaacctttttccttttgggccttaaagggtctaatttgaattttggggcgagggccaaaatttgcaccgacggccgttccgcccgggtttgccccccggtttttgggggggccgcccttttttttttttttttttttttttttttttttttggataaattttttttttttttttttttttttttcaaagaaaaaaattttttcctttgccgggtgttaaaaattttttggggggggggttttttatggggggcggggtttacagggccgggaaccattttttttctttttgggccaaaaaaaaaaggccggggggttgggttttcccaccctttaaaaataacccgggggttttccttttttttcccatttttttttggcccgggacaaaaattttggggaaattttttttttgccaacaaaattggttcccggggcccctttggcctttttaaagatccgggggggggggggtgcctttct

SEQ ID NO: 85533 - DNA, 387 bp, Zea mays
  Clone ID: MRT4577_178015C.1
cggacgcgtgggcggacgcgtggggaatcaattaggtgcattgttttggcaatagacatgatggcaaccggagaagatcggtgggactatgtatgttgttgtacaaatcgagactaccataatggataatggagtggacacactaataataatatagcagctcaactattcagcggaaggaactataccttgtctgatctctgtatacccggatctttctgtctatatcaaccattctttcattctcccaaccctagctgtttggcacctttagatattttttagtgtcgttactgtatatttggcctattatttctctcaactccacacatgctcatgtcaggggcgattagatcttggtcctattatattatgttggttcctatt

SEQ ID NO: 85534 - DNA, 328 bp, Zea mays
  Clone ID: MRT4577_178016C.1
tgtcactatacatctactaactatagttaatctccaccaaccaaaagagccacagaaacacttcttgttttttagataacaaaaaacaacaccccatatttatacaaataccaataccatctattaaacatcagggcattcaattaaattttttttataattcctaataaaaacataaacacatcaataccacaataattaaacactatccttaacattaactactttatccaaaatacatatattaaaaacaaaaaatcatattaactacaaaaaaaaaaccatcttaataaataattaacatattcaataatactaccctaataaa

SEQ ID NO: 85535 - DNA, 1124 bp, Zea mays
  Clone ID: MRT4577_178017C.1
aattgaacagagtaagcaaatggtgacagcatagagtcaactgtcaagcatttgctagtcttcagttatacagcagtatgatagaagcagtagctgctctacgaatcattgatctcgaatacaagaaaaacgtccgatagtactctgtgaagcaaacatcaattttatcagaagagaaactgtaacttattagttcacaagatttacagaaagactaatcatatgatcaggcgttcagcagcaaaaactaacagagtatggaactggcgtcatgcacagatgcgctattgcaagaactagaaaacattatggcgaaaagtttataccaaaatcttgcaattctcatcccaagatgcccattgatcagtatcaatttgaacactggggcgcgaggaaatggtacaaagtgccaaaccaattaacgagaatctatctgctattcgctttcatcagatcattggatctgagccaagaactaacagaacattgcttagttcatcacaagtgaacgtagatcagaacaaaagaagaaacaagctaagtttgttcagttccgacgtagcaaaaaaaaaagtaaatgactccatgagaaccgatccagaccatcagcgagatgcaataccctttgaccagttccaataacgcatgcagagaaagaaacgacgaaagaatccttaaagaacctctggaagaactgatccaaaagacgctccaacactgtcccatccaagctcgatcatgcgtctttacgacggagacccaaactgtagcgcgtcctggaatcatatcgacggtggataccgcggtcttcccaggtccaacgacagtcgccgctgtggcccctgctccgacgacgcccaccgcctcggctcctgagcctccaaatccgacgtcgacgtcgacgtcgacgactgtgctggcagtggcacgggcgcggtcggtggaaccgatgtcgtcggcgccttccacggtaacacggggtagacgggcttgcagcaggaggggcagcgcatgcggttctcgcggagccagtcgtcgatgttgctcatgcacttgggacccttgcggaggtggaacacgtgaccgcaggagagcgtgcggacctcctcccgctggtccaggct

SEQ ID NO: 85536 - DNA, 370 bp, Zea mays
  Clone ID: MRT4577_178018C.1
cgcggcacatgtaccacctccaccgtgcgcagcacgctgctaccgcgcctgccgtatgtgcaatagggcggggccatgccgccccaggcgccctgtggccgcatccgcagactcctggagcaggacaacaacacccccgaccggcggcccatgtgcggctggctaaaaaacggcggcaacggcgccaacgggagcggcacctacatgaagcgcgccgtcgcgctgcaccaacaagggcgaggagaccctgccggacaagaacaagaccaacgttaactgcctcacgaagaatcgaatgaggggtgctgcgcacccttcggacgaggaatgcatgcatggtggacagagatccagcctagctactggactt

SEQ ID NO: 85537 - DNA, 266 bp, Zea mays
  unsure (1)..(266): unsure at all n locations
  Clone ID: MRT4577_178019C.1
gtccaagtctaaaactttggtacttttccatgcagatttgtgcacatgtgagagggtgtccagtttgtctagtgattgttatttagagagttggaccactattgtgtgttgctaatcattgactgtagtcccaaaaaagccttgtgaaaatgttatgccctatgtaacagcagagtaacacttaatanaagtacattttataaaccatttactatggctttgtaacaattgcatacccatattttaagggacaggtgaatttacta

SEQ ID NO: 85538 - DNA, 3244 bp, Zea mays
  Clone ID: MRT4577_17801C.1
gccggccggtactcgactcgtccgcagtgcaatgccgggtgcctgccaggacctcagcaccatcacgcccacaccacggcggcagagtatggcgcagctccagcgcgggtccgtgctggttggtgggcgcgagctcctcgtccgcgccccgcccaacgtcaacctacggcccgccggtgccggcgtcgccgacggcggggccgcctcgggcgccgcgttcctcggagccagggctccggccgcgtccagccgccacgtgttctccgtcggaaacctggctagtgggtggaggtggttgtcgttgttcaggttcaagatctggtggatgatcccggccacgggcgtcggcgcggcggctgtgccggcggagacgcagatgctgcttctggagtacaggagcgaggcgggtcctgcggccgcgacggagcgtggctcactgtacgcgctggtgctgccagttcttgacggcggcttccgagccagcctccaggggagccccgaggacgagctacagttctgcttcgagagcggtgatcctgatgtccagacgatggaagcagttgatgcagtgttcgtcaactcaggggacaaccccttcaagcttctgaaagaatccatcaagatgttgtccaagatcaaaggaactttcagtcatatagaggacaaggagatcccttcaaatttggactggtttgggtggtgcacttgggatgcattttacaaagctgttaacccaagtgggattgaggagggccttcaaagtcggcgtgaaggtggtgtgccgccaaggtttctgattatagatgatggttggcaagaaacagttgacgaaatcaaggaagtggatgaagccctccgtgagcagactgtatttgcgcagaggctggctgatctgaaggagaatcataagttcaggggggaaacctgcaagaatcttgaggaccttgttaaaacgataaaagaaaaacatggagtcaagtgtgtctacatgtggcatgctttacttggatattggggaggtaccttagcagcatccgaagtgatgaagaagtataatccaaagcttgtttatccagtccaatcgcggggtaatgttgcaaatctgagggatattgccatggatagcttggagaaatttggagtgggtatcgttgatcctgacaagatatatgagttctacaatgatcagcacagctacctttctagtgtgggtgtggatggcgtgaaggttgatgttcagaacgtgttggaaactcttggacgcggatttggtggtcgtgttgcagtaactcgaaagtaccagcaggctcttgaggaatcaattgcccagaacttcaaaacaaacaacctaatctgttgcatgagtcacaattcagacagcatctttagtgccttgaagagtgcagttgctagagcctcagaagatttcatgcctcgggaaccaacactgcaaactctgcacattgcgtctgtggcattcaatagcctattgttgggagaaatcttcatacctgactgggatatgttccatagcaagcatgaatcagcggaattccacggagcagctagagccctgagtggaggtggtgtttatgtcagtgacaaacctggggtgcatgatttcagtgttctaaaaaagcttgttctaccagatggttcgattctaagagcaaggtatgctggtcgtcctacacgcgattgtctgttcactgacccagtcatggatggcaaaagtctgatgaagatatggaacttgaacaatttcactggtgtcattggagtgttcaattgtcagggagctggacagtgggtttggccagttaaacaaactgcttatgttcctaccaacataaacataactggtcagctctcaccgtccgacgtagaatctctcgaggagatagctggtgatgactggaatggggagactgcagtatatgctttcggttcatgttctctttcaaggcttcagaaacaccaaagtttggaggtgtcactgtctactatgacatgtgagatctacagcatttcaccaataaagattttcagcgaagtcgtccagtttgcgcctcttggactgatcgacatgttcaactccggtggtgcacttgacaatatttcaagcgttgcagattcttcagctacgacagttcatataagatgccgaggaccagggcggtttggggcgtattcagacaccaggccagagctttgcagagttgatgaacacgaagtggagttcactcttgcagaggatggcctcctgaccttttaccttcccccttcttcctcccaggacaacctgagacacgttgagattgtctacaaagcatcatgaacgacatttacccttatgattcttacgctccagcatgcaatttctggcgtgctcttcagtaaccaccacacatgcacattgacatgatgtaacaaagaacccattttgttggatttgactgtgtatgctgtgctgcaaatacctgttttatacgattgttctgcacctggactgctataatttgattgacatggtatagcttttttagataaaagatggacatggtatttgaattattgagatccatttttaaccttactaaatactgtgaggctgccccaacgtgaacttgtcaaaccttttggagtctgattaaattgatagaaaagaacatcttagtcaaaccttttgaagtctgattaaattgatagaaaagaacaccgagatttattactcaaacaagcaaatgctataagaatatgcctttcatatgtacgtctatataatactagtggtgagttaggaacaggatgaggatctcctggcaaaagccgaaaatcgaagggatgaatcacacggacaaatttaatatcgtctacggtgtcaataagttaagattagctcatctcttttgaaactctaaaaacagtacagagaacaataaagctaaccaaatcttcaaatgtaaggaccagaaataaatttattagaattggctcttttgaaactctaaaaacagtacagcgaacaataaagctacccaaacttttaaatcttcaaaggaccagaattaaatttatcagaattggcaggggccgcgcgaacgcgtacccctctaccataaattatgacgtccactctcccacttggggagatggtaagccagcgcacctgccatgtgcaatgcgggccactgacctaggccacggggcttcttgatccccagtcgaccccgtccaggtaagt

SEQ ID NO: 85539 - DNA, 624 bp, Zea mays
  Clone ID: MRT4577_178020C.1
ttttttttttttttccgtgcatcaaataaaagttttcagtgcatcactataaaagaatttaagtgccctaaatgcgtctctgcaagggagagaagagtgttcttcatctattgcctcttacccactatactctggccatccaggtgccaagaatgcatattatggctagttcatttaaactgcagggacctatcattttgttcggctgaacttcagttggtaaatgttttccaaagtccaacttaatcccactatctttctatcggtaactgttttccaaattctacttaattaactaagcttgtgttctcatctcagtagtcagttcacttggtataaggaaagcggaacagaattaaaatcactccacaaacactcacatcgatgcagcccttataaagatgcttcccccagaaccacctccacccttctcattgctatccccaccgtcggcgagcactgtgccattcatgaccagatcatcagcaaacagccacacgatgccaccaccggcaccaccgtagtccttttcaacactggtcgagccccctttgctcccgtagctccaagggtgttcgaggtcagaccatgcatatgcatcaccaccccatgaatcctcctgag

SEQ ID NO: 85540 - DNA, 442 bp, Zea mays
  Clone ID: MRT4577_178021C.1
ggggtaaaaaccaatacagtaaaggaacggggcatgtaaggggggcccaaaccaaaaaaacacaaacagacaccggcacacaaaaaacaggggacaaaaaaaccccaaaaaccaaccgaacccaaaaaaagggaccgtttgggaaacaggaacccaactaaaaaaacccgccccagaaaagcacatccctcacctaaaaaaaccaatcggcccggaaaaaaaaaacacgcccaaaaaccgggcccccctatgggaggcggcacaccccaaatccaaacacggggctaaaaacacaaaagttacgacaaaaacccggccccaagagggaggggggcaaaaaaagggaaagggaccgccaccaaaagggggggagaagaaaattaagcgggaggggagggccccgggcccaacgggggcccccaaagcccaagaaaaacagggg

SEQ ID NO: 85541 - DNA, 444 bp, Zea mays
  unsure (1)..(444): unsure at all n locations
  Clone ID: MRT4577_178022C.1
ccaccgnaacccgctgccaccttcctacccccgcgccgtcgctgccgccgccggcaaccatctgcctcccccgcttcacccccacctccccccgcagccatcccctcgacgactgccggggcccggcgggccnngccccgcgccaccgtatcggcgacttccgcgatgcgccccggctgccgcttggtcaccccgtcagcttccaggaggcggcgggggcgggtgttcgtcatttcgtgggcctcggtcacggcggtgccggtgggcccctgccaccttagccgggtgtgggtgccgcgctggaagagcggttgggcgcctgggtttgcgaggcgcgtgcgcctgtcgggctgtgcccttgacgggttgcgacgcgcggggcggtcgtgctggggggtgcttctctcgcggcacgaggttcggcgccccgcggtctcggttatt

SEQ ID NO: 85542 - DNA, 333 bp, Zea mays
  unsure (1)..(333): unsure at all n locations
  Clone ID: MRT4577_178023C.1
gcggggctctatggngccgatcgtggacccatgtgttccggatgtctggcgctcttgtgccacgctcactgttgatattggnctgaaggcgctcattgtgggagatgatcttctcgttgccagcctcttcatggttgccattgccgtcagtgggaggacctgctntgctcttctcttgctggttgtccccgtcggggctgtgtccgctggtattttggctgtgacgatgctctctcgcgccgtgtggggtgtgctggcatgccgtcggcgtggttggacagaggactccttccttgctgtcctgtgtggtggcctgttctcggtgctcctctg

SEQ ID NO: 85543 - DNA, 413 bp, Zea mays
  Clone ID: MRT4577_178024C.1
aaaaaaaaaaaaaaaaaaaaaaataaaaaattttaaaaagaaaaaaaaaaaaaaaaaaaaaatgggaaaaaaaaaacataagacgctaccatgcgcagcggggatcacaacacaagtaccgatcagacactacatttatatagatccaactcaaagtcatgggggggcccctctttatggtcccatgtttcttgctccgtcttggaggcttctccttttttttttggtggccgtaaattcacttttgggcgcgcggttttcacgccgggggggggggaaaacccgtggggagcccctttttattgcctttgcagacttctccttttcacctgggtggtttaatgtaaaatggcccaccagggatctcttttccaaaaatgcggcctgcattttggacatgtgtaccccccttt

SEQ ID NO: 85544 - DNA, 296 bp, Zea mays
  Clone ID: MRT4577_178025C.1
cagacacgagagcttgttctaaaatacaccgattttgtaccggaattaatgactggccggatgcttgcgatcagaagatgcgtgaaacctgatagaccgagtttgatgactatgtacgcactggttcaaacctatgtattccgaagatttggcttagccatggagacctacgttccacacttgcagcactcgaacaacactatgcatatacctgcattacctatgaggacacatcctgaacaaagatgccttgtgtactcactcaaaaacgtggcttttgtgtcaactagctgtga

SEQ ID NO: 85545 - DNA, 307 bp, Zea mays
  Clone ID: MRT4577_178026C.1
attaagaaagatacaactttgcaaggatatttttaaaggaaggcaaagctgtgagtgatagagtaacatgaaaccagaggcgtatctggtgacgatgagaatacaaggagatctagagcttatcactttccaaattttgatgacatcaatattagcatggtaggaaaaaatatatgcaggcacgatgtataacaaagcccgtgcagcaccaactagatgtcgtacaatcatgttgatgctctgatccttccaactgatctccacgcagcacatggtctacaaatctgtccagtccagctgtttcgcg

SEQ ID NO: 85546 - DNA, 547 bp, Zea mays
  Clone ID: MRT4577_178027C.1
catgcatgcgtccgcggtttcgtcgtcatctcgttcccgtgacccgagcaccccgtctcggtacggactggctgccgcctcctcgaggaccggcgggcaaggacggactgccccgccgcttgctccctccggctgctgagaggactaacccctcgacaccccagctgagggcgctgctatcaggagactactcatagatgaggtgtggtccgtggctgctagcaggtggatgcctctgttggtctatatatggccgtcgggacgggtagtaggcacgtatccaagacgcgtgatcgatctggattgcatccccgagctctcggcctaggaactctagacagagaacgttcgtgctggtcgccgtggtgcaccacgatctgaatgatcatggatgccccttcaattgaactgatttaaacagacagctgcaggcactatggtagagagatctggaggtgtcagtgctaacaagacatggttaacaactgccgccgtgttgatgtgtcatgtctagctctccctcatgcgaatattcctgctgcatctg

SEQ ID NO: 85547 - DNA, 114 bp, Zea mays
  unsure (1)..(114): unsure at all n locations
  Clone ID: MRT4577_178028C.1
cttgtanttccgnagttctggatatggngataattagtgngtggaagatggtatggatgttcacttttggaataaaatcctaggccatccgatatggcatatgcgttagaatgg

SEQ ID NO: 85548 - DNA, 250 bp, Zea mays
  Clone ID: MRT4577_178029C.1
gttatacatcccgagccatcaatgtggactattccagcttacctccacgagcatgctggggcttagctaagagagggggttacttaatttcaagttattaaccttcttgacgcaactcccaacttgggaaaaccaaggccttcccgacctaaatttccaaacgttaaaccctcaattctccaagtggcacattaaaaacaatgcctgaccagttcggaatcaggaccaagggcccaaattaattggcaac

SEQ ID NO: 85549 - DNA, 1096 bp, Zea mays
  Clone ID: MRT4577_17802C.1
cgacaactaaaaagaaacggagggagtgctaatttgtgaattcttctacagtctgatgaagatatggaacttgaacaatttcactggtgtcattggagtgttcaattgtcagggagctggacagtgggtttggccagttaaacaaactgcttatgttcctaccaacataaacataactggtcagctctcaccgtccgacgtagaatctctcaaggagatagctggtgatgactggaatggggagactgcagtatatgctttcggttcatgtaaatatttgttggctgactgtttctttctaacaatcccatcgtaccactatactatcagtgactgattagccatctgttttgtctcccaggttctctttcaaggcttcagaaacaccaaagtttggaggtgtcactgtctactatgacatgtgagatctacagcatttcaccaataaaggtcagaacttcagattactttccactccctcccttcttacatgtattccacattgtaaatattaagtttttacagacattctttgcttcttgcaccagattttcagcgaagtcgtccagtttgcgcctcttggactgatcgacatgttcaactccggtggtgcacttgacaatatttcaagcgttgcagattcttcagctacgacagttcatataagatgccgaggaccagggcggtttggggcgtattcagacaccaggccagagctttgcagagttgatgaacacgaagtggagttcactcttgcagaggatggcctcctgaccttttaccttcccccttcttcctcccaggacaacctgagacacgttgagattgtctacaaagcatcatgaacgacatttacccttatgattcttacgctccagcatgcaatttctggcgtgctcttcagtaaccaccacacatgcacattgacatgatgtaacaaagaacccattttgttggatttgactgtgtatgctgtgctgcaaatacctgttttatacgattgttctgcacctggactgctataatttgattgacatggtatagcttttttagataaaagatggacatggtatttgaattattgagatccattttt

SEQ ID NO: 85550 - DNA, 375 bp, Zea mays
  Clone ID: MRT4577_178030C.1
tcgtctacctccgaggacgagggcgtttgccccttgctccaattccgtccgtgggccggcgctccatccccgtgcgacgcatcgccatagagggaagtgcattgtcgaaccacatcgggccatggccgggactccatgctcggaaacgcgggctgggatctgtacagccttgagcatggcattcaggcgggcgggcagatgcccggggccaagaccatcaggggaggcgatgatgctttcaacaccttcgttcccgagactggcgctgggaagcacgagcgccgtgctgcatgtggcgaccttggacccactgtcctcggagacgtggggactggcacctactgccagctcttccaccactgagcacctcataag

SEQ ID NO: 85551 - DNA, 1566 bp, Zea mays
  Clone ID: MRT4577_178031C.1
cctcgaggccggccgggagtctacgtgggaccagcagcatcaacccgaaaaaatcggcgacagcaagccaccaccaccgccagcaagagcagagaggcgagaccgcgagagtgtacgtgccaccagtagcagcagcagcagcaatggccgccgccgccgccacctcctcatcctcccacctgctcctcctctcccgccagcaggcggcctccctacgatgccgcctctccttcctcggccagcccagaaggcccggcagggtcacggcccaggcgccggccgctaaggacgtgcggtgcatggcggccgtggacactactgcggcgtccacggcggcggaggagacgagccccaagtcgagcagctacgagatcgtgacgctcacgacgtggctgctgcagcaggagcggaccggcgcgatcgacaacgagatgaccatcgtgctggccagcatatccacggcgtgcaagcagatcgccgcgctggtgcagcgcgcgcccatctccaacctcacgggcgttcagggcgccgtcaacgtgcagggcgaggaccagaagaagctcgatgtcgtctccaacgaggcgttctccaactgcctcaagtcgagcgggcgcaccggcgtgatcgcctcggaggaggaggacgtgcccgtagcggtggagcagagctactccggcaactacatcgtcgtgttcgaccctctcgacggctcctccaacatcgacgccgccgtctccactggctccatcttcggcatctacaaccccaacgatgagtggcctcgccgacgtcgacgacaatgacacccttgattcggtggagcagaggtgcatcgtgaacgtgtgccagccggggagcaacctgctggccgccggctactgcatgtactcgagctccgtgatcttcgtgctcaccgtcggcaccggggtgtacgtgttcacgctggaccccatgtacggcgagttcgtgctgacgcaggagaaggtgcagatccccaaggcgggcaagatctacgccttcaacgagggcaactacgcgctctgggacgacaagctgaagctgtacatggacagcctcaaggagcccggcgactcggggaagccctactccgcgcggtacatcggcagcctcgtcggcgacttccaccgcactctgctctacggagggatctacgggtaccccagggacaagaagagcaagaacggcaagctgcggcttctctacgagtgcgcccccatgagcttcatcgtcgagcaggccggtggcaagggctctgacggccaccagagaattcttgacatcacacctacagagatccaccaaagagtgcctctgtacattgggagcgtggaggaagtggacaaggtggagaaattcctggcttgaatgtccctgcttcatgccagagctctctcatcagatggactccccaagacatcaagtttagggagggaatatgcatgtactctctctttcccaccccaaataagtcttcttcatctcatatttcgataaatcaaacaatctcaattttgatctaatatatacacacaacattaatattta

SEQ ID NO: 85552 - DNA, 2224 bp, Zea mays
  Clone ID: MRT4577_178032C.1
cctcgagaccggccgggcccggcgtcgataaaccccagaagtcgactcctgcccctgcctcgccgccgccgttgcttaccaacctcccgccatggcgacatcgccgttgccgacggcgaccgcctctgcctcgaagaagcggcgttccagaggcgggacgctagccctagatgaggtgaagaagctgggaaccgagctcctttcctctcgctcccacctcaaccacgcccccgccctcctcgctctcctctctcccaccgcgccgctcgacctcgctctcgaggcgctcatttcgctccagtccttcttcgtaccactcatcccctccatcccctccgcctccgcggcagccaacgcgggggatgcgggcagtgaccccgagctcgtgtttggagcctggctgcggcagcggttcgacgagctcgtcgccgcgctggtggagctcagcgtgtctccacacagcgacgacgcaatcagggatgtagcactggatgctctcatggatttcgtgaagctggggaaggatgggaagttccattcggcaatttaccacaagtttctctacgctgtcgttcatgctgctgatcccgtcgatatgttgttagagttgcttgtatcaaagtacttcaaatacactgatattcgttacttcacttacactagcttagacaagattgccaacagtctgggcagtaaaaccactggctctggaaaagatgctttgcaaaatggaagtgacgagtcaaaaaacaggagtagtatttttatacacaacatatacaatcttttggcacatgttcctttgatggattttcaaaaggaatcaacatttgatatgtggagtactgttggtctatcttctaaaggagaaaatgactcttccaaggacacttctacgtacatcaataagaaactaaaattgaagttcaccaaagcatggctgtcttttctcaagttaccactaccacttgatgtgtacaaggaggtccttgcttcaattcatcaaaatgtcattccttcaatgtcaaacccttccatcttatgtgatttcttgactagatcatatgatattggtggtgttatcagtgtgatggccttaagtggccttttcattcttatgacacaacacggtctggagtatccaaaattttatgaaaagctttatgcactactgactccggctgttttcatggcaaaacaccgatcagtgtttttgcaacttcttgacacatgcctgaaatcttcttatcttcctgcctatcttgctgctgcgtttgcaaaaagattgagtagacttgctctttcagttcctccagctggagctcttattattattgctttaattcataatctgctgaggagacacccctcagttaattttttggtccattgggaggttgatgagagtgatagcaatgccacaagagaagctagtcaatctaagaagattggttctgatccttttaaccagaatgatgcagaccctgcgaagtctggtgcaatgcgcagttctttgtgggaaatagacacgcttcgtcatcattactcttctgcagtttctagatttgttgtgtcacttgaggaggatctcactgtccgggccaaaactactgagatgaaaataacggacttcagttcaggttcctatgcaacagttttcagggacgaggtacgtcggcggttaaaacaggtcccccttgcattctacagaaccacaccaacctcgttatttctaggatcagattttcctggatggacctttggggaccaacacaatagcaccgtagaaactactgtagaaggcaacggaaaagtcgaggcagtaggggctagcgacagcacaccttccaaaaggttgcggatggagacctgagaaggaaacaccgcgaatctccaagaattaggccggcttgttggggtagcattgggtggttgtgtgcctctcattttggagtttggtttcccagtgttgtctccaggaattggtctgggtgttgtagcttcaattttgagcagaatgggttacgtgagggaacacttctttcggttacgactaatataagttgtaagcttaattgccaattacagaggaaatgtaccgatttttttttcagtgcgtttatccaaaaaaaaaaaaaaaaaaaaaaaaaaaaaaaaaaaaaaaaaatttaatctctttaatttagtaagatattgagacaaaaaaaaaaaaaaaaaagcggcc

SEQ ID NO: 85553 - DNA, 503 bp, Zea mays
  Clone ID: MRT4577_178033C.1
atctatatccccactcgcaccaaacagcttattttatacctgtacattacgctcctgcacctgaaggcgtacaacttatgcctataaatgctgctcatatatgttgacatcttaattgccgtagcttcatccttttccaaactgcattcacgtcacaattaacacacacgataccacccgcaaccttaatgcgtgattaaccaagagcgtattcatggacttaacgtacattacttgcatagctcttagtgcaagctttcctcctcatatactggttccaccaattactttctggttttcgtccaccaccagttgatatctctccaccaaatgctgcaccaatttgagcaccatttgtacgaatgataacattcactattccacaatctctaccatgtggccctaaccaattaaaaataatatctgccctctttgtagatatagaactgctcaatcctgtgagaacagagttatcgatttcaattgcttgcttcagagtctga

SEQ ID NO: 85554 - DNA, 243 bp, Zea mays
  Clone ID: MRT4577_178034C.1
atgggcatcaatttggctcgcacgttcagagaatgccctacccacgcacacggcggaatacgcgacgtcgagcccgcgttcccacaaaaccgtgcccgtaatggtcaaatggtcgccacgggggtcacgttgaggctatacgtccgcaaaggactaccgattcaccgtgcacaactaatttggggagatgaggaggaggcagtgcgaattttggctttaaccaagctcactgaagaactgtga

SEQ ID NO: 85555 - DNA, 280 bp, Zea mays
  unsure (1)..(280): unsure at all n locations
  Clone ID: MRT4577_178035C.1
cgggaacanantgttactntctggaggttggtaggtcacttgtttacatgagtatcatgtctaattgtttgcttcctctatcttctttgtttcttgttatatgggctgttaactgggtctcgtgcaatntaattcaaataaatttcncaaatatgggggaaataatncccccccggcggggnggccccctcatattatttttttttnggggggggaaaaaaaaaatatattttttttttttttttgggcaattttggggggggaggggggtttttttttt

SEQ ID NO: 85556 - DNA, 320 bp, Zea mays
  Clone ID: MRT4577_178036C.1
ccggccgggacggttcatcgttgcttagcgcgacaggatgagctctggcctctctcgggccggatccacggacgaccgcaacccatccaccctgcgttctgatcccgcgaagagctccacagaactactactaactagaagcgttgagtcacggaagggacacacagcgggtgctggagctgaccgcatatcgctgtgtgatgataagatcaggtggatgattaattggaggatacaccgcccgatcggtggtatgtacgcagctagatcgcactgatagcgatgccagggcactcattacctacatgttcatgaggccg

SEQ ID NO: 85557 - DNA, 232 bp, Zea mays
  Clone ID: MRT4577_178037C.1
gtgacactatagcagagcttggcatgcgcgcctcccttacctcagatttggattcgagctgcggtctttattgaggccgacatccattgtggagagagcggatcctccgagcattatgggcttgaagctaacgaagcggcggtcacattttttgtttgtctggttccagtggctttcgatgtgcacataaaatattgggtatgcctttttgtctaaattaacaaggataaac

SEQ ID NO: 85558 - DNA, 585 bp, Zea mays
  Clone ID: MRT4577_178038C.1
taactcttatgttattgtgcaatgtagtgttgtctcagaatttttttttcctaaacatgcaggagagctgcgtgtcacttcattaattggtaggcaactgtctgggtacatgctgtctgtggccagcgtgctggctactttgctcaggacagaagaaaaatcgaggctgacctttttggggggaaacttcatggagtcgctgctactaatgctcttgagctaggaattgatgttggacatattgatgcaacattgcatcttggatttcctggtagtattgccagcttgtggcagcaagccggtaggtctggaagaagagctaaacaatcactagccatttatgttgcctttgagggtcctttagatcagtatttcatgaagttcccacataaactatttggcaggtcgattgagcattgccaagttgattcacataatctaaaggttttagaacagcaccttccttgggctgcttatgaacatcccttgtgcgtgcaatacgatgagtgctactttggctctagtctcgatagtgtaatgacaacccttaaagacaaaggttatatcatcaataatcgagctgga

SEQ ID NO: 85559 - DNA, 1357 bp, Zea mays
  unsure (1)..(1357): unsure at all n locations
  Clone ID: MRT4577_178039C.1
ccgtcccgtgaggcccctgcccctgcccgtgaccgccccgcaccccccacagccgggggtcgccggtttccgcgactccaaatccgcgtgcgccgcccgccctctaaatctgcctcgccggcagccgggcgggggccaccacgtcacacccagcctctcctctccgcccgcggcccgcccgcttcttcttcctcgccatcccttcttctagcgcggaggcgcagatccatcgggcttcgggggctcggttccatccctctgccagctgggattggattggagcatcttcccagcaccacccacgcggaagccatgaccattcagttgctccgctgacgactcctctgacgacagcacggctgcgctgacctgcaggcctctcgcccacgctgccctgacagggtaaagtcagggggtggcgtgtgtgggtgggggggggggacaatcaggtgaataatcatggacagaagagctggggcgatcctagtgttcctgctcgtcgtcctggtctgggatgtggcggcggtcgccgagaccgagcctggcagcgtgcggctagtacaggaggcgccacataggaaggtggtggaggatggggccaaggcggggagggtgccggtgtcgaccgtcgcgtggtccacgcttgccatggccgcggcgacggggttgggagcggtgcccttctttttcatggagctcgaagcgcagtgggctggcctttgcaatgggctggcggccggggtgatgctggccgccagctttgaccttgtgcaggaagggcaggtgtatggcagtgggagctgggttgtgttccgaattctgagtggaggtatatttatttggctttgtaagaactcccagggcanaaggccacctaaggatgctgggggagattgctggcctcaatgtgctgcgtatcatcaatgagccaaccgctgctgctattgcctatggtcttgacaagaaggcaaccagcgtcggtgagaagaatgtcctcatctttgaccttggaggtgggaccttcgatgtctccctccttactattgaggaaggtatctttgaggacaaggccacagctggcgacacccattttgggggtgaggactttgacaacaggatggtcaaccactttgtccaggagttcaagaggaagaacaagaaggatatcactggcaaccctagggctctccggaggctgaggacctcttgtgagagggccaagagaactctgtctctcactgcccagaccaccattgagcactgactcgctgtactagggcattgtctttttctccaccatcacccgtgccaggcttgaggagctcaccatggacctgccaatgaagtgccttgagcc

SEQ ID NO: 85560 - DNA, 448 bp, Zea mays
  Clone ID: MRT4577_17803C.1
ggagcaaaactgggggactgagcacaaaaataatggggtccgcccgatacaaaaccaatcagaacaccaacaggttcgagcccccaatacattataccaagcaagaccagatgaccgcaatcataatcctaaaccccccaacctaacctaaacacgtggcctaactaaaaaacctatcgcgcccttaaccgcatgaccaaacggaaaggcccagggatcaaaaaaacttggagggggaggacccctcaagcggggggatcaagtaggggagccctagggcaaccagcataaggatgtacccaatccccaagtcaattgatgtgccccccctggggggcccgggccccggtgcctgcccccaaacggggggggtcataaatatggcaaaaacaaaagcggccaccgccattgaaaaaaccgccccgagcggagcccttgccacggccat

SEQ ID NO: 85561 - DNA, 395 bp, Zea mays
  Clone ID: MRT4577_178040C.1
tcggccacgttgtacgcctttccttccttttgacaacattgagaactgatgctgccagagtaaaatgccaaatgctctgtggtggacctggtcacttgaacaggaggatgcttgctggaaggggtgaagtctatagcatccagatagctcttacgagagatacaacgtgtttttgctttcttgggatacaaggaggctatgtgaaaccccttattaatgggggtaggagaaaaacactgttggtgacatagtccacctgggccaaaggggagcttgtgatgcaaccaaaactggtctgtattaagcctaagattcgctaatcctctttgacctaccagaggcttttgagacaatagcgcctgtaatcacgggaaactgtgccctgaagacatacc

SEQ ID NO: 85562 - DNA, 413 bp, Zea mays
  Clone ID: MRT4577_178041C.1
cccctcatctccttttcttgctccttcgttgcagcccaagttagctgggataagcttaagttacaaaagaggcgaccgttgctcacgaggcgacggacgacactagcggcggcccgctcctcgtttgggactgcggctgcatgctctacggactcgtacgagctcaccgacttcaagcgccaactcgacgccaatgtgctttccagcatgcgcttgctctgcatgccgcacctcactgtcagggacgacacaacttggctgcccaccaccgacgtacagtaccttctatgaaaggggtgcacgtagaggcgcctggccaccctgctaccgtagcttttgttctagggtgcttcaggtgggggtattaccaaacacctgtgtcgccgggcgcgcactactggacgggggacgac

SEQ ID NO: 85563 - DNA, 359 bp, Zea mays
  Clone ID: MRT4577_178042C.1
gagctcattagtcggcggccgccttttttttttttttcaagcacagcagagtataggtggtcgaaattacttttgcaagaagtgtcatgattccacaaggtgggccaaattcaagaccagataccttcacgtctgctctgtgaaatatcatcagtggcaagggaaacagcttttttttctgcactggacagtatagcgaactccttatgcctgtcggcgacacagaaacgaggctgttcgaaagcataacctgtaccaaatgttctccaaaaaaaatatgtgtacccaatttccatgcctgggtaaagaaaaccggttttatgctggaacaagacccccggcattgttgatatgatcaa

SEQ ID NO: 85564 - DNA, 188 bp, Zea mays
  unsure (1)..(188): unsure at all n locations
  Clone ID: MRT4577_178043C.1
cgctgccgttttgcgctttcgcgatcctgggcttttcttgtcctgggttctttcgctttcctgctgcctggccggttgttctccctccgcccccttctgcttctcttctctggtcttccgncgtgtttcttcggttcggcgtcggctcccttctctgccttnttgggggcctttgcggccttcttggg

SEQ ID NO: 85565 - DNA, 173 bp, Zea mays
  Clone ID: MRT4577_178044C.1
ctcccctcccttgccgcgcacttcttctccaccacagtgcatcagtggcgttatcctcttcgttctcgcctccctggttgttggcggctgcacgaggacgaagacaccaagaggcagagtgtttcgaccggcatggctagaggccggtatccacttacgatacgcgcgctgcg

SEQ ID NO: 85566 - DNA, 274 bp, Zea mays
  Clone ID: MRT4577_178045C.1
ttttccttttcggggggtgaaaatgaagtgaccggtcctttacaggttactaacacgtacgggcggggactttccatgatagcgatgggcgcgaaatgaataaacgggcgtgcgggcacaaggaaacagggggccttaaatgggcgggacaaaggttcacagaaccctacttgtgcggtcaaatgccacaacctgtgtaacggcaagagccgtttacagggtgggtcacgttgggtggcacacaacagcaacttgggttcacaacaggggggcc

SEQ ID NO: 85567 - DNA, 758 bp, Zea mays
  Clone ID: MRT4577_178046C.1
ctggccgggtttccttccccaccatcgcgtgtgagtcccggtgtgatgtcacggagcggtggcggctttcccgatccactgtgcgggagaaatccccgtgcagccttcttccagctcttcctactctttgctactcgtcttcgctgatttctgccttaattccatcccttccctgcctagaacttgctttgcttcaccccatcacagcttttggtgcctcgtcatcggcgacctaaccgccggcgaccagataaactaagccaggcccttcgctccgaaagtcgtctctcgtagagagcacttgctcacctgctcctcgccctcctctgctggcagtggacttgcgcggagtggagatccatccggacctggttcgatttcttcatctcgttagaaaacggacagagtggagccatggtcccggcttctaattcatctgaccggtctgacagatctgacaaacctatggaccagaaggttttacgacggcttgcccaaaatcgtgaggcagcaagaaaaagccggctgaggaaaaaggcatatgtgcaacagctagagagcagtaagctaaaacttgcaagcctggagcaagaactccagaaagctcgacagcagggaatcttcatttctagttctggagatcaaactcatactatgagtggaaatggagctatgaccttcgatttggaatattctcgatggcaagaggaacaaaataagcagataaatgagctgaggactgcagtaaatgctcatgc

SEQ ID NO: 85568 - DNA, 226 bp, Zea mays
  Clone ID: MRT4577_178047C.1
ctatttcgcagtaaactgtttggaatgaaatggcaacagtgagaacaccattgaattttgatatctagcaagcagagcttttgtcaatattctattagaccttctcggtggaggactgttagtggccataactggagattggatcacacttatgacaacattctcgcaattagtaagttgttgagagttgctgcttggaagaaaagctgtttaatggtgaagattg

SEQ ID NO: 85569 - DNA, 2648 bp, Zea mays
  Clone ID: MRT4577_178048C.1
ctcgaggccggccggggtccgtctcataccatcccatcccatcccatcccatccccgtgcgccgagttcacggccgccaccaccaccaccacaaccgattgcacaaggccacgcggcttctggaagcttccttcccttgccttgccttccctctcaacccaaatcgccacggctcctccgcccgcagcgccctcggcacgaccgccggattcgcctctgggtggggttggttttgtctcccccaccaccctacccacccctctcctctcctccaaggcttggcttgcctcgtgtcgtgtgtccctccaccgcccgccatgccgacgaggcttgccccccaccgacgatcgcacacgatcatatgattgcaatgaatcctgacatggtactactgtcttggaaacaaattggcctgccggccgtgaaacacgaaacgaggaaggcgaggagacgtgctctgctgctgcagcctgcagcggctttccttcccccaccatcgcgtgtgagtccacggtgtgatgtcacggagcggtggcggctttcccgatccactgtgcgggagaaatccccgtgcagccttcttccagctcttcctactctttgctactcgtcttcgctgatttctgccttaattccatcccttccctgcctagaacttgctttgcttcaccccatcacagcttttggtgcctcgtcatcggcgacctaaccgccggcgaccagataaactaagccaggcccttcgctccgaaagtcgtctctcgtagagagcacttgctcacctgctcctcgccctcctctgctggcagtggacttgcgcggagtggagatccatccggacctggttcgatttcttcatctcggttgcttctctgtccagtgggtggatcactggattgtgggttgtgctaactgcaggctggcttgtcagcctatcataaggaaagtgaaaaagagacaacaaagcaatttgttgtctcattcttaggagctggcgagcactcggcatggcagatgctagttcgaggactgacacctcgactgttgtagacatggatgataagaatcaaaggattattttacgaaatttcaacttctctctgtgggacatctaatggtacaggtcttggagagatgcatgtaaagtgttagaaaacggacagagtggagccatggtcccggcttctaattcatctgaccggtctgacagatctgacaaacctatggaccagaaggttttacgacggcttgcccaaaatcgtgaggcagcaagaaaaagccggctgaggaaaaaggcatatgtgcaacagctagagagcagtaagctaaaacttgcaagcctggagcaagaactccagaaagctcgacagcagggaatcttcatttctagttctggagatcaaactcatactatgagtggaaatggagctatgaccttcgatttagaatattctcgatggcaagaggaacaaaataagcagataaatgagctgaggactgcagtaaatgctcatgcaagtgatagtgacctccgtcttatagtcgatgggataatggcacattatgacgagatattcaggctgaagggcattgctgcaaaggctgatgtgttccatatactttcaggcatgtggaaaacatctgctgaaaggtgcttcttgtggcttgggggtttccgttcgtctgagcttctaaagctccttgtgaatcagcttgagcctctaactgagcagcaattgatggggctgtccaatctgcagcaatcttctcagcaggctgaggatgcattgtcacaaggaatggaagcattgcagcagtccttggcagaaacgctggctgggtcccttggtccatcaggatcttctggaaacgtggcaaactatatgggtcaaatggctatggccatgggaaaacttggcacactcgagaatttccttcgccaggctgacaatctacgacagcagaccttacatcagatgcaacgtatcctgacaatccgacaagctgctcgtgcgcttcttgcaatccatgactacttttcacgtttgcgcgcactgagttctctttggcttgctaggccacgagagtaacatcacccccgttggggtcactcgatgaactgatctgtgaatgtgggactgctggctgcaaactcgcaaagcatttgcagatgactggaggatcagtcctctctgtacaagttgtattaacatcttctggtctcatattgtgctccagtgttgtacaatttagggaaaagcttggattaacttgtaagttatcatgaatttgttattggcatattgtacaattgtattagcaataaaaatagaagtacataagtgctggaagcctggaaggatatccagaatctatattggttggaaacgagcagcagaagattgttatagattgttatgttgctttgaatattcggttgtaagtgccttttttggggtatatagaacaaagaaagattcaggagagatgtagggattcaccagaggctatcggggattgtgcttctaggagctccctggactatctctagcaagtctcatattaagctctactctgtaaacagtgatacattgaattgaacgtgctacggttatgatggtaacatttaaaaaaaaaaaaaagcggcc

SEQ ID NO: 85570 - DNA, 1061 bp, Zea mays
  Clone ID: MRT4577_178049C.1
ttgggtacctcgaggccggccgggaaacaaaaaacgaggaaggcgaggagacgtgctctgctgctgcagcctgcagcggctttccttcccccaccatcgcgtgtgagtccacggtgtgatgtcacggagcggtggcggctttcccgatccactgtgcgggagaaatccccgtgcagccttcttccagctcttcctactctttgctactcgtcttcgctgatttctgccttaattccatcccttccctgcctagaacttgctttgcttcaccccatcacagcttttggtgcctcgtcatcggcgacctaaccgccggcgaccagataaactaagccaggcccttcgctccgaaagtcgtctctcgtagagagcacttgctcacctgctcctcgccctcctctgctggcagtggacttgcgcggagtggagatccatccggacctggttcgatttcttcatctcggttgcttctctgtccagtgggtggatcactggattgtgggttgtgctaactgcaggctggcttgtcagcctatcataaggaaagtgaaaaagagacaacaaagcaatttgttgtctcattcttaggagctggcgagcactcggcatggcagatgctagttcgaggactgacacctcgactgttgtagacatggatgataagaatcaaaggttagaaaacggacagagtggagccatggtcccggcttctaattcatctgaccggtctgacagatctgacaaacctatggaccagaaggttttacgacggcttgcccaaaatcgtgaggcagcaagaaaaagccggctgaggaaaaaggcatatgtgcaacagctagagagcagtaagctaaaacttgcaagcctggagcaagaactccagaaagctcgacagcagggaatcttcatttctagttctggagatcaaactcatactatgagtggaaatggagctatgaccttcgatttggaatattctcgatggcaagaggaacaaaataagcagataaatgagctgaggactgcagtaaatgctcatgcaagtgatagtgacctccgtc

SEQ ID NO: 85571 - DNA, 1562 bp, Zea mays
  Clone ID: MRT4577_17804C.1
gttggttcaggattgccactcgaaaaacaagcagctgcctaactctggctctgagaagcaaacaatcatggagagcgagagcttagaccatgtaggtaagcgtgtcattgagatgcttgatcaggtgactccagtggtgaaagaaatgttcagttccatggaaagctccagttctgcacaggcggcggcggcagcagcagcttggccggaggatctcccagaaagaagaacactccctcctgttctctgtcgcactacatcccatcatccatcagacggtgacgaggttgcgatgcacacaggacgttgcaaagttgaggcaccggcgcctgggcacgagacagatgagggcgtttgcaccagggaggaggatggccaaaccagcagccgtgaaccgctgtcagctcctattcctaccgctgagtttttaccgctgcagccgacgctgtcgtcggtgtccccacatctgctgtcggcgccgccgccgtccccgatgcccgtggttggcttgtccatgcttctgcagtcgtgggaggcaacgcaagatggccacgccaccgccgtcgcagtggtgccacctgctggcgtcgcacagcctgctgaggcagcgccgacggcacacaaagacaccacgcccgtcggcaccagcatggaagtcgaaggctctacgtcctctgtgttacttgaagctggtcagcctgagccatgcgtggattcacccaatgggagcacgcaggcaccagcgcagggcggcaatgccgctgttccaaacgtgccgccgccgccgccgccagtaccggcgcacagaggcagatctcaagaggggccgtctatggacgagcccggtccggcagtgacagacacgccacctcgaccgccgtgtgaaatgcaaggaggaccacctgcactgccgccggccgccgccaaggtttcgccgtcgccgtcgccgccgccactaccggcgcacagaggcagatttcaagagggggcgtctatggacgagcccggtcaggcagtgacagacacaccacctcggccgccgtgtgaagtgcagggaggaccgcctgcaccgccgccggccgccgccaaggtttcgccagcgccaccgccgccccctggaagcatctcggcaacggtgcgcggcaagaaagccgcgagcaagctgaaacgatcgacgcagatgggcagcctgtacagacgcctgcgagacagagtggaaggctctggcagcacgcacggcgacaggatgcggcagaaccgcaagaggccccggacggtaggcgcgtccaagagcgacgccggcggccagggcatggccgaggcattggccgagatggctaagagatcgacgtacttccgacaaatcgaagaggacgcggagaagtatgcagcggtgatcctggagctgaaggacgccatcggctcgttccagtccaaggacatgtccgagctggtgaggttccgtcagcacgtcgagcggcagctggtgtgcctgaccgacgagacacaggtgttagccaggttcgagggcttcccttccaagaagctggaggcgttgagga

SEQ ID NO: 85572 - DNA, 2739 bp, Zea mays
  Clone ID: MRT4577_178050C.1
attccccctccccacgccatcccttgtccgtctctccgtcctctcctcccgaccctcaccctgccctcgcgcccgccgccgcgcacacaccaggttatccttccgccgttaacaagcacgctccattcccaactaattctctcttacccttccgcctcgctcttggggccgctgcaagtgcagatccgtctagactgactccgattggtttcggcttcttcgcttctccttctcggtcatatgattgcaatgaatcctgacatggtactactgtcttggaaacaacttccaccaacggtcgatcctgtgaaacactaagacacccgttgccactggaaaggagagagcaaagtgatttgctgtctcctggcgatcgttgctcgtgaggcctagtgatggcagatgctagctcaaggactgacacctcaattgttttagacgacaacgacaagaatcatagggatctcactacgcattggcacctctgaaggtcttcgttggatatgaccaaactatttcaaccaattttgaacaagcttttcttcaattagtgctacccctagcctatcagatggtcgggggaggtaccctcgaggccggccgggcggagacgtgctgcagagcctgcagaggcttttcttccccccaccccacccatcgcgtgtgagtccacggtgtgatgtcacggagcggtggcggctttcccgattcactgtgcgggagaaatccccgtgcagccttcttccagctcttcctactctttgctactcgtcttcgctgatttctgccgctccaattccatcgcttccctgctttagaaccttctctgctagcttctccccgtcacagcttttggtgcctcgtcatcggcgaccaaaccgccggcgaccggataaactaagccagctccttcgctccgaaagtcgtctctcgtagagagcacttgctcacctgctccccgcccccctctgctggcgctggacttgctcggagtggagatccatccggacctggttcgatttcttcatttcgggttcgattcggtttttctatcccagagcgaaagatcaatatcacctgacacaacataacgatttcgtggaagccgaggttgcttctctgctcagtgggtggataactggattgtggattttgctaactacatgctgggttatcagcctatcataaggaaagcaaagaagagacaacaaagcaatttgttgtctctttcttaggagctggcgagtactcggcatggcagatgctagttcaaggactgacacctcgactgttttagacatggatgataagaatcaaaggttagaaaatggacagagtggagctatggccctggcttcgaattcatctgatcggtctgacagatctgacaaacctatggaccaaaaggttttacgacggcttgcccaaaatcgtgaggcagcaaggaaaagtcggctgaggaaaaaggcatatgtgcaacaactagagagcagcaagctaaaacttgcaagcctggagcaagaactccagaaagctcgacaacagggaatcttcatatccagttctggagatcaaactcatgctatgagtggaaatggagctatgaccttcgatttagaatattctcgatggcaagaggaagaaaataagcagataaatgagctgaggactgcagtaaatgctcatgcaagtgaaagtgacctccgtcttatcgtcgatgggataatggcacattatgatgagatattcaggctgaagggtattgctgcaaaggctgatgtgttccatatactttcaggcatgtggaaaacacctgctgaaaggtgcttcttgtggcttgggggtttccgttcgtctgagcttctaaagctccttgtgaatcagcttgagcctctaactgagcagcaattgatggggctatccaatctccagcaatcctcccagcaggctgaggatgcattgtcacaaggcatggaagcattgcagcagtccttggcagaaacgctggctgggtcccttggtccatcaggatcttctggaaacgtggcaaactatatgggtcaaatggctatggccatgggaaaacttggcacactcgagaatttccttcgccaggctgacaatctacgacagcagaccttacatcagatgcaacgtatcctgacaatccgacaagctgctcgtgcgcttcttgcaatccatgactacttttcacgtttgcgcgcactgagttctctttggcttgctaggccacgagagtaacatcacccccgttggggtcactcgatgaactgatctgtgaatgtgggactgctggctgcaaactcgcaaagcatttgcagatgactggaggatcagtcctctctgtacaagttgtattaacatcttctggtctcatattgtgctccagtgttgtacaatttagggaaaagcttggattaacttgtaagttatcatgaatttgttattggcatattgtacaattgtattagcaataaaaatagaagtacataagtgctggaaggactatccagcgtctatattggttggaaacgagcagcagaagcttgtcatgtcgattttgaatagtcggttgaagtgtttttttgggggtctatagagaacaaagaaagcttcaggagaaatgtataggtattcaccagtctaccatagagtgtgtgcttcggggagctccttgtgatggtaaaatttgataacgaggatgagttctgtgacatt

SEQ ID NO: 85573 - DNA, 458 bp, Zea mays
  Clone ID: MRT4577_178051C.1
aacaaaaaaaaaaagccccatcaaaaaggggccaaaaaacaaagggcggatttatttaaggggaaaacccgggtttaaaaaccaagggggggggggaaaaagggcccacggaagggcaggcaaaacgttaaactgaggggggcccggaaccccaggggggggtaaaatttttccaaaggccccccaacccatccaaaaaaatgtttgcccccccccatgtaataaggcccaaaaaccatttgaaacggccaactgggacccctgcccaaatttttgggccttcctttgaacccccccaaggcccttttttttccacttggccctaaggggccttttttggggggcaaacctaaaggcgtttcccccggggggggcggggggggtccccaatgggggaaccggccgcccctaagggaccccaattccccctaaagggaggcgtataaccccccccaacg

SEQ ID NO: 85574 - DNA, 381 bp, Zea mays
  Clone ID: MRT4577_178052C.1
aaaacacaacaaccgtttttgcccttaaaaaacgctgcccgcccccatggggtgcacctcggccggggggggggcccatctccccaaaaaaagaggggggtagggcaaacacgcacgcacatttaggggtgggtcaatgccaccaaaaataaaaaaccaagggcgaccgagggcacgatctggacatacccgggggcaggttttatttttttaacgtattgcccctcttttttcctgggcgttttttacttgaccttgaggggcaagggtttgccaccccactctttggggcactcgagcatggggcccacaggcttgccctggctggtgccgacaaaaaccttgttgcactccttgccgggggagttgagcctttcgccg

SEQ ID NO: 85575 - DNA, 351 bp, Zea mays
  Clone ID: MRT4577_178053C.1
acggatcgacctgtttcctccccaccaccgaacccatgggggaccaagttaaccacgggcaggggggccagttcaaggggggctttaacctttttcacaaggacggggatgggtgcatcacgaccaaagagctgggcactgtgatgcgcttgctggggcaaaatcctacagagggtgagcttcaggacatgatcaacgagggcgatgcttatggcaacgggaccattgatttaccagagtttctcaaccttatgggtcggaaggagaagggcaccgactttgtaggagaagttaaggagggctttcgtgtgggttgacacaggaccaaaaacgggtttatatttggggcgc

SEQ ID NO: 85576 - DNA, 360 bp, Zea mays
  Clone ID: MRT4577_178054C.1
ctaatgtctcgggtgggtggtacaacttaaccgtgcgacatggagagctggacagagtgggtggtgtcgggtgggattggtgtgtccggaactccggatgatatgcttcgttccgttttactttccaacgctggtagatactctgacgtgatgtctgctgcctgctgcgtgctcttgtctagtatctggactgctgccattgatgggcctggaccaataggcgtgggggttgcttcagtgcagggcgattttaaatggttcaagtacggacagcttggttggaatcctgcgtgctgattttgtttctgcaagatggatggatgttggcgtgagccacagagatgctcaaaatgagtttaa

SEQ ID NO: 85577 - DNA, 300 bp, Zea mays
  Clone ID: MRT4577_178055C.1
cttaaggggatggaaaacgctaatttcaaaattctgcagaacctgatgtgctgaacctattttcggtacacctgatcgtaccttataacccacccttttcacattacgacggtttcagagatcaatcacacttttacaacccacggggaattatgtcatgcgccgcttcaaacttgagacctcaaggagcggagctcttccgatgcatttcactagggcttttccggtacaaccttttactggaccaatactgggccccttaataagacaccgatggagaccttggcgctggtcttttga

SEQ ID NO: 85578 - DNA, 389 bp, Zea mays
  Clone ID: MRT4577_178056C.1
gacagcatggccgcctccgcctctagcgtctccggcctcgacggtgcctcgctgcccaggcgcccggcgttctagacgagcttcatgcggggcaaccgggtgtcggcgaagacacctctgatgaacaagaacctggataagaatggcacgatcaactgcatgacgtttcacctggactggctgtcgacggaactgagcgtcatcggattcgggctcatccgctggatggggccgtcgatcgtctcggccatcaacggtaacagcctcacggggctcttcttctacagcatccgtcatcagctggatcagttacccactcgcccgcttgtcaactcccagttctggctgtggctagtgacgtgtgacctgagcctgttcatcgtgctcac

SEQ ID NO: 85579 - DNA, 408 bp, Zea mays
  Clone ID: MRT4577_178057C.1
atgggcgcgcccgcctcggccctggcgagctcggccgctccagcgagctcggcctcggccccggccccggccgccccggcctcgcccgcgcccggccggctccgcgcccggtcgcccccggtcgcctcgcgcccggccgcccgcttggccgcccgcccctcgccgcggctcggccgccccgtgccccggctcggccgctcctgtcgcgccccggctcggccacccgcccccgcgcccggcctcgcccggccgtgtcctcgcccggccgcgtcctcgctcgcccgtgctcgcttgccccggcgcgcttgcccgctcgccccgccgtgccttgctcgcgtcgtgacggccccggcgtggcctcaaactcggcccagcgtgcctttagcgcgcggctttgagctcggctag

SEQ ID NO: 85580 - DNA, 346 bp, Zea mays
  Clone ID: MRT4577_178058C.1
gggcccgaagggacttatttttcccatgggcattaaaaataaaaaaaacaaaacaaaccctcccctcagtcctttgaaaggggaaaaagattaacaaaaaaagggggggaaaaaaaggcagcctctacttttggacatcccctagggtttaacccccgcatcctgaatttgcagggaccccaaaaagaaaagctttggggccctccccccctttgggcggtcccaatttcagaaaaaaaacccaaagggctgggacaaaaaacacgccaaaaggggtgcaaaaacccgggggtaacgcgaaaaagcccgcgaagcccctcaaaactataaccaaaaaaaggccccc

SEQ ID NO: 85581 - DNA, 472 bp, Zea mays
  Clone ID: MRT4577_178059C.1
tcggtcagctgcagggtaacctgcggtgacggcagtacctcgaatctgaaccagtgcgtcaagttatctgagacatcagaccatgccacccgtggacgccctactgctcattttaacgccagtatttgcggtaaaagagttaactagatatcaagccagtggatctactacaccggatccaggctatattggggtagaccctccagaccatcctgcaggaatagccgtaaagtggtcaaggcccgacactgccggcggtgcatatagctcatgaactgacaagaatgtgcggactgcacagtctactgcatgcccctacgctggtaccggcggagcaccccactgaagaaactatgccctgtgatatagctccatcgctatctagctagttgagacatttagccgcgatgactgagtaataatgcgagcacgcatgaccatggcgtggcagcggcactgtgagcaaagaaac

SEQ ID NO: 85582 - DNA, 415 bp, Zea mays
  Clone ID: MRT4577_17805C.1
gtgcgatcggcggcgggaggttccctgggaaccaggtggtcgaagggctgagctgggtgggcagacaagaggtccctgccctcccccagtgagccctgctgttcccgtgggagccatgaagctgaacgagaggagtgtagcccactatgcactcagcgactccccagcggaccacatgggcttcctgcgcacctgggggggcccagggaccccaccgacccccagtggcactggccgaagatgctggtttgtcctcaagggcaacctgctattctcctttgagagtcgcgagggccgggccccactgagcctggtggtgctggaaggctgcacagtggaacttgccctaagctcccgtgccccaagagtttgcctttgccatctgctttgatgcccctggagtgcgcccacacct

SEQ ID NO: 85583 - DNA, 223 bp, Zea mays
  Clone ID: MRT4577_178060C.1
cattacttcccctgataacacataccatacaaaaaaaaaaaaaatggaaaaaaacattgaaactacagggttaacatactcacacactccggatacgatagcgaaccctaactaactcatccgatcttttttctatgacaactaccttcatacttgccaaaaaaatagagagctaacaagacagcgtactgtacactaaaataaccaccatcttattttaaac

SEQ ID NO: 85584 - DNA, 347 bp, Zea mays
  Clone ID: MRT4577_178061C.1
atagtgagtcgtattataaaatacgacacacaaggaaggagtaaaaaaaaaaagaacaaaaaaaaaaaagagaaaaaaaaaaaaaaaggggggaagacaaaaaaggttggggggggagataaacgtagaacggacgattaaaatcacatcaaagggggggccgaccctcaggtacgggccccttcgtttcggagcggagtaatgggaatctctctggcggttccaagaaatatcgccggggggggggtttttatatcccgcgcagggggggaaaactggggtggcacgccacattgacccccccaaatattcccccttttggaggggttggggaaattctcaggggg

SEQ ID NO: 85585 - DNA, 285 bp, Zea mays
  Clone ID: MRT4577_178062C.1
cccacgcgtccgcggaccgtggtcgtgctttggcggtcgagattcaccgactccagcagcagcatggtaggacgagcagcacgaggataagtcatagggggcggcggctgcagcggcgaggtcgtggtggtgggtcgtccggccggggccgagatcgacaccagggcaccgttccgatcggtcaatgaggccgtggccgtgttcggcgagatggtcctcgccgggggaggtctccgctggacgacgaggaccagtctcctccgtcaccgagcctacccggtcatc

SEQ ID NO: 85586 - DNA, 1353 bp, Zea mays
  Clone ID: MRT4577_178063C.1
atggtgcaaatcgttgagcaccgcgccgagacatcgacggacttcctggtggaggaagaagttgtttcttccacgccacaggtctccgaccgcccagtgccgggcattgttgctgtgcacgctacacgacagcatacattagcgcagacatcccggactccgtcaagaacggccctgggagcattgtcagcagcaagggagttgctgcgtcaccctctaagatccacggcctcaccaggggcaatgaagcagtggcgggacgacgtcgaccgattgctcgtcatggcgcattctacctcgaccaggtcgaggtcacggtcatcccgacgccaacatgaggcgtcgacgtctgtgcgctcaccctcagtaaggggcgcacagaccaatgacctccgggccgaactcaaccgcaggcacgcgggagaggacgcccggatctctttggaaagggcgcgcgagcgccgccaaaacatcgatggccgcaacctcgatcaagacttcactgcgatagcaccacaggccccaatgggcacccggtcccaagcgggtgtccccttggccaacgtgggctgtgccgctctcgcggagcatctccgcgcagtgtcgtggccacccaagtttcggccacacctgccagaaaaatacgacggtacgtcaaaccagtcggagttcctgctggtgtacgtcaccgctatcacagcagcaggtgggaacaccgctgtgatggcgacatattttcatgtagccttgtctggacctgcccggacttggctcatgaacctcgccctagggtcaatctactcctgggaagagctctgcgcgtggttcgtagcgaacttcgccagtgcttaccagcagcacggtgtggaggcccacctccacgcggtaaggcaagagcctggggagaccctccggacgttcatctcccgcttcaccaaggtgcgaggtggctcgggtgccgtcccccgggacggtaagaagaaaaagaagaaggaccgtgactaccagaagccgcggtccatcgctctagtcgttgcagccgcgaccaggggccagggcgaccgcaacaaacgcccacggccacagaggggtaacagcggttcatgccctgtgcaacccaacggttgccacaacgccgaggagtgtcgcgagatcattgacctcgcgaaacgcgtcagcgagcgacgcgagcagtcttccaaggacggctctccacctcatcaccgacctggcaaagaaaaggccgacgacggcgaggtggccgcagctgaacgggacctcgggtatcagtcacccgagggggacctaaaggatgtcttcgccggaggctcctactccagtggagatagctag

SEQ ID NO: 85587 - DNA, 243 bp, Zea mays
  Clone ID: MRT4577_178064C.1
gccttccaaaatggggaaaagaaattgcaactggcccatttggcacaacacatagactggggcttgtgcagcaaatcctgattctccaaaggatacaaagggtgacttccttcggggagtcaagcagcgcttaagcgacactcccccttcgtggtatgaatatttggcgcccgctcgatcatttttggactagcccctgcccatgtgacaggaaagaacagagtgcggttttttttttttggc

SEQ ID NO: 85588 - DNA, 151 bp, Zea mays
  Clone ID: MRT4577_178065C.1
tctttagagggcgccctcttttttttttttttttttgtttgtgctttaatcttgtgttttctttagcaaaatatgctatttcatggggttcggctttgctctacttcccaatgctaaatgcctatcctcagcattctcttcggggttgact

SEQ ID NO: 85589 - DNA, 432 bp, Zea mays
  Clone ID: MRT4577_178066C.1
cattccaacttgttccgttgctattcctagatccttgtcacctcctttgtgtcttcctccaactgtgttaatacattctctaggccagaaattaggatgagtacttggaatacttattcagcattgctatctattactgacttgtgtactacaaatatatatttagtgagccttcccaaagctccacctttttctcgagcagaacatgtactcctttgcaatcacaaccacgctctttgggcagtcacaccgggcaccgtttgccatctttatgaggaggagagtcaggctcttcttctaccagaatattgcagctggcagcaaaacctataggagcaccttcaggaggaccctcaggaacaccttcagttggagaagctttagattgaggaactggttcctctcccccttccacttcaacctctctggtgc

SEQ ID NO: 85590 - DNA, 524 bp, Zea mays
  Clone ID: MRT4577_178067C.1
attatctctatctcagcactactagcaataacgccaagatggttagatgtcacaaatcacggcatcgagcttgacatcataggtagtcacgacatctagcttgacgtcgagctacctgcgctatgttctggtggctcctctattctcttgttctctttactgacgggagctcaaataaaaaaaaaactaaaccactcaatagatataaatttaaagatttttctttcaaaataattttttttgttaaaaaaaatcgatttggctggagaagcagcgcctcggttacgtccgcggggagatcacgccctcctgctccggtttgactcatctgaccacgcgctctttcgcaccggggttccaatggctgacttgaccgcgcggtcagcgttccaccgggatcacgccctccttttgccggccctcccgagtctccgtcgcacgaattttgcctggaaattaatactggataatttaataggacaatataggagtagcccatttcttcgtcataaaacgggaagcca

SEQ ID NO: 85591 - DNA, 1028 bp, Zea mays
  unsure (1)..(1028): unsure at all n locations
  Clone ID: MRT4577_178068C.1
cattgggtacctcgaggccggccggggaagaaaactggatgtgaatcctcctgctgtattagaagaaattatgctgcccatgatgagcagaagcaatgtgatgttttatcaccagaagaatattctgatgaagggtggcaagcagctagtatgagaggaagatctgcaaatgtaaggaagaaaagcagtcgcaggaaaccggctcttatgaaattaatggttgatcattttgaagatggtcatacaggttctgtgtataggactggtttacaacctcaaacaaaaggaggcaaagaagattctgtaagtgctcctagccagctttcatttggaagttttttgaaaacggattccagcattgctgaagataagacgtgcaatggtagcgctaaccaagaacaacggacaaagccaacaggaattaacaggccaaccagtatcgcttccaaatttatatcatacaaagatgtggctgtttcgccccctggcacagtattgaaacccattttggagaagaaggaagcaaaggagaaagatagtggacgtgatattgacctagcactgtcatccgaggaagaagataaaaagtttacagaaaaagagaaagaaaagccaagtgaggacagtagcaaagagattctttcaagtcagcgagacttagagtgtcatgtagaaatacctcatgacagcaacagtgatgaaggcccatctgcagctagtaaagcgtctggaagcaaactgtcagcttcagctcctccattcaatccaggatcagtgttatcaatgtcccagccatacagcacggtggcagtatatgatgccagtgctattcttcaggcaataccaagtcaagcaatggagattctcccttctgccattgacactagagtgcctcgtggtcctcggtccaccttgtactatcgtactgggcattccttccaaggaaacaaggttacacgcacagccagagcactattgtaaggngtggcttactccccacaaccatgaatccacatgctgctgaattt

SEQ ID NO: 85592 - DNA, 173 bp, Zea mays
  Clone ID: MRT4577_178069C.1
tgaggaataaaaccgggtggggacagaaaatgacaggtttaccgaactggatggctcttgtcattatctttattctgtagtctgtattatgtatgcgtttgagtattgagatgattctagattagaattgtctgctgtgtagctgtcaattcttataaaaagggggtgtgggg

SEQ ID NO: 85593 - DNA, 494 bp, Zea mays
  Clone ID: MRT4577_17806C.1
tatgacgtaagacctgcacgcgtccgtaagctcggatcctgtatagcgggcgccatttactctttcttttgcgcgccacaatagacagcgtcgactttctactgtttggctcatatgtcacaaaccaccaagtagcgagccgttcaatatccgaatcaaccacatcgtacatacacataggaaccatcttgtcatactctttctgacagtcctcataaaaccgagaccttgctccgaccggttgatccatccgcaggatcatatagatggattaataaactaccatcaacatgatcctgccgatcgatcaaccgggcggaccaatggtggtcttaagatgaccctgagaaagaggataacatgatcgagcctatcggatcgctcatgtgggtgatcaagatagctaccggtccctctccgggggcggcaatctgtactgcaaacccgagaaagcaatcattgcaatgccgtcgtcctagaagacacatgggggc

SEQ ID NO: 85594 - DNA, 198 bp, Zea mays
  unsure (1)..(198): unsure at all n locations
  Clone ID: MRT4577_178071C.1
aaaaagnnaagcaaaacnntagcaatatttcatgggttcgcgnttcgctgnnaaaaaaaaaaaaaaaaaaaanaaaaaaaaaaaaanaaaaaagggacggaacgatataaaaggaaaccaaagcttaacgaacgacgagcaatgcgaacagtcataagactcatactataagtgaacaccgtaaggggaggggcactg

SEQ ID NO: 85595 - DNA, 116 bp, Zea mays
  Clone ID: MRT4577_178072C.1
ttatgcgtggggagcgaacagagcaagcagagcgggtgagcatgtcggacaaactctgacggacgcctccacaatgtcgggccatctatcgctgttacagcccatgcttatgctgg

SEQ ID NO: 85596 - DNA, 1500 bp, Zea mays
  Clone ID: MRT4577_178073C.1
atgtcgggttctagctccttgtgggagacgggcgcgccgtcgctcgacacgctggcagagtcagccgcgacgtacgcggtgatgatgtcgtcgcagcagcagcaacagcagcagacggcgggaccgagccggcaggcggtgtacggcgctcctgtcctccccgaaatcccgacgcgcttcgtctacaggccgcaggtggcgacggatgtgatgtcgggttctagctcgttgtggaagacgggcgcgccgccgcacgacacgctcgcagagtcagccgcgatgtacgcggcgacgctgtcgtcgcaccagcagcagcagcagatggcgcgaccggaccgacaggcgatgtacggcgctcctgttctccccgaaatcccgacgcgcttcgtctataggccgcagacggcgacggatgtgatgtcgagttttagctcgttgtgggagacgggcgcgccgccgcccgcggcgtacgcggcgatgctgtcgtcgcagcagcaacagatgccgacgacgcgaccgggctggcaggcggcgccccgcggcgctcccgttcctcctccgatgaacatgcgtttcgtcccaaacacgatgccagcggcggatgccatggacgtcggctcctcggcgcccatggcaccctcggactcctcgtcggagaggacaccctcgccgctccagcgcgtggaggtgcgccaggtgtgggcgcacaacttcgacagcgaggccaagctgatcgagtcgctcctgcccaagttccggtacgtggcggtggacacggagttcccggggacggtgtaccggccggcgggaccagcgtacaagttggagcccgcggagcggtacaggctgctgaggtgcaacgtggacgcgctgcaccctgtccagctcggcctcacgctgttcgacgcggggtgcgtgctcccgggcggtcacggcggggccacgcggtacgtgtggcagttcaacttcagcgatttcgatgtccggcggcaccgtcacgtggtggagtccgtcgcggcgctgcggagcagaggcgtggatctcgaccggacgcggcagtacggcgtcgctgcggcagcggtgttcggcccgcgcctgcgcaagtggacgcgcgccggcctcggccgcgccggcgtcgtcacgtcccacggcggctacgacctcgcgtatctggtgaagatgatgttcgggaccgggttcaggatgtccgggtcggcggcggagttcaatgctgtcgtcaagtcggtcctccaccgtcggagggtgtttgacatcggggagatggcgaggctctgcccgcacgaacacctccaccgcgggctggacagcatcgccggacagctcaacgcggcgcggttcgccgccgacgcggcacgccaggccggctatgacagcctgcggacttgctacacgtttatgaaactgagagaaatatacttcgacgacgatggcaagctggcgggcgtcgatgggatcctggccgaggtaacggcgttctag

SEQ ID NO: 85597 - DNA, 471 bp, Zea mays
  Clone ID: MRT4577_178074C.1
ggtgcgcacagacacaccaagggcagggaccaatgcgttactaccaaaagctgcactactgctcgcacgaggtgaggacagagggcccggacggcttccgccgccacgacgtgagccgccaccagcaccacaccaaggagaagggcgaggagcgtccagacgttctcacgatggcggagcgaaccaccaccaccaccatggacgccacgggggccgaggcttggtgctgcgcgagaccgcggacgaagaagacgtcaagacctgcagcggagagttccgctaccacatgtaacggtacctcgccatggcaaactgacccagccgacgtccgggatgcacgcccggacgtgcttgcctgcgtgcctgatgtatgtgctgtggatgactgtatgtgcagggccatcgcacttggctatcgaacgaggcctcactcagctcctgcacgaatctaaacaataaacccccgacctg

SEQ ID NO: 85598 - DNA, 656 bp, Zea mays
  unsure (1)..(656): unsure at all n locations
  Clone ID: MRT4577_178075C.1
ctcccaaggctcgccctccccggctcccctcgtatcttcgccgtcggcgatcaaaatggcggtgcccatgtccgccatcgagtccgcgtggcagctcctgatcgccaacttcaccgagttccagctcgccaccgtcatcaccttcctgctccacgagaccgtcttctttctctctggccttccctccctcctcttcgagcgcttcggactcttcgccaaatacaagatccagaagaggagcaacacctctgcttaccaaaacagatgtgtcttgcgtcttattctgtaccatgtctctgtgaacctgcctgtcatgattttgtcgtaccctgccttcaaattcatgggtcttaggagctctcttcctctaccacattggacggttgttgtatctcaagttcttttctactttgtccttgaggattttatattctactgggggcacagggcactgcatacgaaatggctatacaaacatgttcacagcgtccaccacgagtacgccacacccctttggtttaacttccatgactaccatcaccgagtgctgtacacaaagtcagggaactatgcctcgacatttgtttacatgggactggtntgntccgngacggacaatggnttatcgcaaggcaaagagaccattgaggagcaag

SEQ ID NO: 85599 - DNA, 353 bp, Zea mays
  Clone ID: MRT4577_178076C.1
ctcctagcaacattcatccatcaatctatcatcttctccttctgctgaggaagacataatgtctcgttccggtggcacaactctctacgtcactggcttcggccacggtactcgagcgcgcgatctcgcctacgaattcgaacggtacgtcccaaccgccgatggtccacgacctcgacctcttcgacccctgcccgattgacttccattacccccctcctcgtatctttcggtcagatctgtcggcttcagaaatcgtgacgcgttctcattgcgctcctaaacgtcgttctttacctccttcccttgctatagtgcgatagtgattctgacgacatcgaaacaccctactc

SEQ ID NO: 85600 - DNA, 1294 bp, Zea mays
  Clone ID: MRT4577_178077C.1
gtctgagctcgccgctttagcgagcgcaagcagagcctgccaaaaggctagagaaaaaaaaatccgccttctcctcccagtcgcaggccaggctcagcctccccccttccctccccggcgatctatctctctctctcagccatcgactcagcgtggcagctcctgatcgccaacttcaccgagttccagctcgccaccgtcgtcaccttcctgctccacgagaccgtcttcttcctctccggcctcccctccctcctcttcgagcgcttcggactcttcgccaagtacaagatccagaagaagagcaacacctctgcttaccaaaacagatgtgtcttgcgcctcattctctaccatgtatgtgtgaacctgcctgtcatgattttctcgtatcctgccttcaaattcatgggtctcaggagctctcttcctttgccacattggtcggttgttgtatctcaagttcttttctactttgtccttgaggattttatattctattgggggcacagggcattgcatacgaaatggctatacaaacacgttcacagcgtccaccacgagtacgccacaccctttggtttaacatcggaatatgcccacccagctgaaattttgttcctgggattcgccacagttgttggtcctgctcttactggccctcatctcttcaccctgtggctgtggatggtgttgagggttttggagacagttgaagctcacagcggctatcacttcccatggagcccatcaaatttcctgccgctgtatggcggctcggacttccatgactaccatcaccgtgtgctgtacacaaagtcagggaactatgcctcaacatttgtttacatggactggttgttcggcacggacaaggattatcgcaaggcaaaaaccattgaggagaaagaagggaaaaatctgtagattgtggaagctgctcagcaagattggcgatagagtttcactcatggaaggagatatggatgcaccctagaaacagtcagtttacctcctgaccatcgatactataggttgagatattgatttcctgtgtttgctatgatcaagaatgaggccctggtggccctggtctgtcatgaactgaatttgatgatttgtcatctcctcctgggggtttgctttgcgtttctttcgtgactcgacgggatgtatacatatggaatggcctggcagcagtaataaaaaaaaaaaaaaaaaaaaaaaaaaaaaaaaaaaaaaaaaaaaaaaaaaaaaaaaaaaaaaaaaaaaaaaaaaaaaaaaaacacccccc

SEQ ID NO: 85601 - DNA, 762 bp, Zea mays
  Clone ID: MRT4577_178078C.1
acaaagtctcgccctccccggctcccctcgtatcttcgccgtcggcgatcaaaatggcggtgcccatgtccgccatcgagtccgcgtggcagatctctgtctctctctgctcttcctcgccgggcgaaacgtaacggaaatgaatgcagctcctgatcgccaacttcaccgagttccagctcgccaccgacatcaccttcctgctccacgagaccgtcttctttctctctggccttccctccctcctcttcgagcgcttcggactcttcgccaaatacaagatccagaagaggagcaacacctctgcttaccaaaacagatgtgtcttgcgtcttattctgtaccatgtctctgtgaacctgcctgtcatgattttgtcgtaccctgccttcaaattcatgggtcttaggagctctcttcctctaccacattggacggttgttgtatctcaagttcttttctactttgtccttgaggattttatattctactgggggcacagggcactgcatacgaaatggctatacaaacatgttcacagcgtccaccacgagtacgccacaccctttggattaacttccgaatatgcccacccagctgaaattttgttcctgggattcgccacagatgatggccctgctcttactggccctcatctgttcaccctgtggctgtggaatggggttgagggcattgaaaactgctgaagctcacaacggctatcacttcccatggagcccatcaaatttcctgccactgtac

SEQ ID NO: 85602 - DNA, 1411 bp, Zea mays
  Clone ID: MRT4577_178079C.1
ggtacctcgaggccggccggggaaaggccacgacaggccaaaagcacgagaggagacggagcaatggaattggaaggccacgagaggagtctgagctcgccgctttagcgagcgcaagcagagcctgccaaaaggctagagaaaaaaaaatccgccttctcctcccagtcgcaggccaggctcagcctcccctctcccctcctcggcatcttcgccgccggcgatctatctctctcacaatggcggcgcccatgtcagccatcgactcagcgtggcagctcctgatcgccaacttcaccgagttccagctcgccaccgtcgtcaccttcctgctccacgagaccgtcttcttcctctccggcctcccctccctcctcttcgagcgcttcggactcttcgccaagtacaagatccagaagaagagcaacacctctgcttaccaaaacagatgtgtcttgcgcctcattctctaccatgtatgtgtgaacctgcctgtcatgattttctcgtatcctgccttcgtgtttggcaggaataagagaaatcatgggtctcaggagctctcttcctttgccacattggtcggttgttgtatctcaagttcttttctactttgtccttgaggattttatattctattgggggcacagggcattgcatacgaaatggctatacaaacacgttcacagcgtccaccatgagtacgccacaccctttggtttaacatcggaatatgcccacccagctgaaattttgttcctgggattcgccacagttgttggtcctgctcttactggccctcatctcttcaccctgtggctgtggatggtgttgagggttttggagacagttgaagctcacagcggctatcacttcccatggagcccatcaaatttcctgccgctgtatggcggctcggacttccatgactaccatcaccgtgtgctgtacacaaagtcagggaactatgcctcaacatttgtttacatggactggttgttcggcacggacaaggattatcgcaaggcaaagaccattgaggagaaagaagggaaaaatctgtagattgtggaagctgctcagcaagactggcgatagagtttcactcatggaaggagatatggatgcaccctagaaacagtcagtttatctcctgaccatcgatactataggttgagatattgatttcctgtgtttgctatgatcaagaatgaggccctggtggccctggtctgtcatgaactgaatttgatgatttgtcatctcctcctggtggtttgctttgcgtttctttcgtgactcgacgggatgtatacatatggaatggcctggcagcagtaataaccatctgaattgagtcgtcaaaaaaaaaaaaaaaaaacttgcaccctagaatcaaaaaaacaaaaaa

SEQ ID NO: 85603 - DNA, 844 bp, Zea mays
  unsure (1)..(844): unsure at all n locations
  Clone ID: MRT4577_17807C.1
ccatcccagcccagcccagccagccgtcaaagcacgacacatccaggtccaagcaaagcatccccagccgagaccgcgtgcgctccacgcagcatccgccgagagaagtcgccgccggagaaggaggaggatgtcgtggcagacgtacgtcgacgaccacctgtgctgcgagatcgacggccagcacctcacctccgccgccatcctcggccacgacggcagcgtctgggcgcagtcccccaacttcccccagttcaagcctgaggagattgctggcatcattaaagactttgacgaacctggacaccttgcaccaactggtcttttccttggaggcacaaagtacatggtcatccaaggtgaacctggggttgtcatccgaggaaagaagggcaccggtggcatcactatcaagaagacgggcatggccctgattctcggtatctacgatgagcccatgactcctggccagtgcaatttggtcgtggagaggcttggcgactacctggtcgagcagggtttctaagcccgccctgatatgctgttattttggtcgtctgggactaagtttgctctactgtgggctttgcatccatctgcttggcgtaccgcatgatatatgcagtgaataattttagcttggggtttgtcggttgatgatgtgtcgaagggaaaaaatggatttactatgtttntctttttaatgtttggcatcgcgtcgtatcanactcagccgctctttcgctgagtatgtacatttgcctggtcgtggaaacttggtgggtctgctgctgcttnattgaagatgattgcaatttgaaaaaaaaaaaaaaaaaaggcccta

SEQ ID NO: 85604 - DNA, 318 bp, Zea mays
  unsure (1)..(318): unsure at all n locations
  Clone ID: MRT4577_178080C.1
cggccgctcgagccggccggggccggatcatagccacaccgccgccatccacctgcgcccgctccgttccgtcgccgtctcctccgcgagtcacgctcgctcctccacctcctcgcccggcccctctcctcttcccaatcgtcctacgcctaccgcccttcccctacagcgcccgccgccgccgcccccaaccatgtccaccaccctccccatcaccaccagtcggngcctcccccaggaccccctccacagtggaccgcgcagggacatccgcctccgccgacccgatggatatgaaactccaacgccgcaacacca

SEQ ID NO: 85605 - DNA, 1191 bp, Zea mays
  Clone ID: MRT4577_178081C.1
ttcggccgggtccccggctccccctcgtatcttcgccgtcggcgataacatggcggtgcccatgtccgccatcgagtccgcgtggcagatctctgtctctctctgctcttcctcgccgggcgaaacgtaacggaaatgaatgcagctcttgatcgccaacttcaccgagttccagctcgccaccgtcatcaccttcctgctccacgagaccgtcttctttctctctggccttccctccctcctcttcgagcgcttcggactcttcgccaaatacaagatccagatcttacttagctttcctttagaattggaattgggttattccctgagaaaacataactaagacccagaagaggagcaacacctctgcttaccaaaacagatgtgtcttgcgtcttattctgtaccatgtctctgtgaacctgcctgtcatgattttgtcgtaccctgccttcaaattcatgggtcttaggagctctcttcctctaccacattggacggttgttgtatctcaagttcttttctactttgtccttgaggattttatattctactgggggcacagggcactgcatacgaaatggctatacaaacatgttcacagcgtccaccacgagtacgccacacccttttggtttaacttccgaatatgcccacccagctgaaattttgttcctgggattcgccacagttgttggtcctgctcttactggccctcatctgttcaccctgtggctgtggatggtgttgagggtattggagactgttgaagctcacagcggctatcacttcccatggagcccatcaaatttcctgccactgtacggtggctcggacttccatgactaccatcaccgagtgctgtacacaaagtcagggaactatgcctcgacatttgtttacatggactggttgttcggacggacaaatggttatcgcaaggcaaagagaccattgaggagccaagaagtgaagaagaagaagaatctgtaaagtgttgaagctgctcatcaacaggactggcgatagagttgcgcctcagcatggaaggagagaaaatggacgcagtcagttattgcctcattgcctgacgaccgatactataggctcctgagatgttgatttctctgtgttttctatgatcaagaacgaggtcctggcgaccttggtctgtcatgaactgaatttgat

SEQ ID NO: 85606 - DNA, 410 bp, Zea mays
  Clone ID: MRT4577_178082C.1
gttgcatgtaaaaggaagtcgtaagaattgtggtgtgcacaagcaatttggctcatggcaagggagaacagggattcacgagaagctgtggccacgatagaagcaggtgctgctgcgatcggtgtaaggacattcaaatgatgttaccagccaattgccaactgaaaccaacgtcctggatcaatagcaggaatcttgtgcccaatagtgttgcttggaaacaaaactgatgctcctcgggctcaagcctagtgtaggctgcattattcaaaggcggtatcatatcatttttattcctccccccaccaaaattcttgggagatgtcacttctgattttggaagctcatcatatgagttagtgcggtggactttgtagagacaaagtattttgaaaggatgctttgtcatc

SEQ ID NO: 85607 - DNA, 365 bp, Zea mays
  Clone ID: MRT4577_178083C.1
ttattgaactgttgctcctgagaacattaaaacgggcgctccaagctgggttgctggcctaactccgccgggcctgtcaaaacaagtgggttgagtgggagcaaaacccagcacttgaaacatggaggcaccaacaggcgcacacagctggcataacacctacaacacccgttgtattacaacagtaataaggctcaaaccatctagctacctgaatggcatttattggtgctgctctcaatgaacagcaacttcaacaacttgcgctagctaaacttgataaatactttgaggtacacaagatgcttccatctaaacaactagctgcgttgaaccctacttcatatttgctacaaccacaacta

SEQ ID NO: 85608 - DNA, 355 bp, Zea mays
  unsure (1)..(355): unsure at all n locations
  Clone ID: MRT4577_178084C.1
gtgtatcggtggattctgatgangcgttgatgaagcgctcgcgtacagtcagctcgacgttagcttcgagatttgggcgttcctgcttccctcgagccttgctgggccctcatctgaaatggggacgtcagttccaccgggcttcaaagtctttgccgctcccaacgtggtggaggatgagattgatcagtacctcagctaacaggacgggaagatttacagaagccgagacccacagctatgccgccacggccctttggggaaatgcgtgcactgcgtccctctagagccattcgatgaggactatctaaaccatctcgagcctcccgtgaagcacatgtccttccacgcctac

SEQ ID NO: 85609 - DNA, 341 bp, Zea mays
  Clone ID: MRT4577_178085C.1
catattttctttaaatccatgttggggtcatttttttttggggtgatcttcatcaaacccaaaaaataggccaccaacgtgcccttgagcactccaagtccaaaaatgagcgcaccggctggcaaaacgctgaaatgaattatacaaacccgaaatcttacactgcccccaagtctttccaaagcgtcacaaaactcctggcgatcatggacagacacacagacacgcacccaaagcacatttccaggacggaactacagaagcacacggtgcgcataagggcagacgggggccttcgcctggcagaccctctggcccaccccatgagctccaggcccccc

SEQ ID NO: 85610 - DNA, 859 bp, Zea mays
  unsure (1)..(859): unsure at all n locations
  Clone ID: MRT4577_178086C.1
attttccggaatgaagaccgacgacgctgtggattagttgcccagcttgctctttctcccccagatctgctcggccagcttgcagcagcagcagctctgctctccccgccggccgccgtcactttggccggccatccaccacccaccgtaccgtctccagccgccactacttggcgtccggagtggatcccctctccgctctggctctccatcgacaaggggatctatctctatatattcattctaggagtgagtggcttcggctgcaaacaaccgacaagagatagatagatcccatcccactgcctgccttgttgaatcctctcggctctcactgcaactgcaactgcaaggcaaggaaggaagccatggcggctgtccttgatgctttggcagcccgtgtgatgaacaacatcatggacatgggagaagccaagatgagcatgctgctgggcgtctcccacgagatcaagaagcaggaggccaacgtggaacccctccggaacatcctcaccgacgccgagaggaggcgcatcaccgacaagagtgtgcaggcatgggtgaccaagctcaagagtgccatgtacgaggccagtgacatccttgatctctgccagctcgaggccatggaccgacacgacaagcaacactccaggggcttatgcctccggctccgggagaagctgccatttctagggtgcctgggggaaaagctgcagggtgtcctccaaccctttctcttttgcgtgcagaaccctaggtttgccaatgaggtangctgccgcatcaagaatctcaacgatgagctgctcacaatctgcaaacgggtgtcgcttggcttcaactttcacattgacct

SEQ ID NO: 85611 - DNA, 993 bp, Zea mays
  Clone ID: MRT4577_178087C.1
cctcgaggccggccgggacccgcgccctgcttatccagaaacagacaccgcccttcctatgcgagcggtccacgccgccgaaccctagatccaacgaaccatacggctcaagacctcctcccctcgcgttcaccaaacaccgccgcacacttctaaaaaagttccgcaggaaacgcggcccgcagcacgccctttccccacctcgatctcgcgctaggttttcgccacaccgctttcgtcctccgcgaagatgccgaagaacaagggtaagggaggcaagaaccggaagcgtggaaagaacgaggctgacgacgacaagcgcgagctcgtcttcaaggaagacgggcaggagtatgcgcaggtgacccggatgctcggcaacgggcggtgcgaggccacctgcgtggacggcacgcgccgcctctgccatatccggggcaagatgcacaagaaggtgtggatcgcggccggggacatcgtcctcgtcggcctccgcgactaccaggacgacaaggccgacgtcatcctcaagtacatgaacgacgaggcgcgcctgctcaaggcctacggggagcttcccgagacgctcaggctcaacgagggcgtcgacgtcgatgggcccgaggagggcgaggagaacggcgactacaactacatccagttcgaggacgaggacatcgacaagatctaagaattctgtctctccttccttccggcacattttattattattatgggattccttttcgccttccggctaatttaatattatgtgacttgcgttttagtacgcggtggtggactggtggtatggtttaggcgggctgttatgaattcgctcgcaatcctgataggatctgaggtggttaaataatcgcggaacgctgataatctcgttttaaatctggcgcatgctgttgcaagatgttctatactagttgttattctggattgtgttaaaaaaaaaaaaaaaaaaaaaaaaaaccccccccc

SEQ ID NO: 85612 - DNA, 404 bp, Zea mays
  unsure (1)..(404): unsure at all n locations
  Clone ID: MRT4577_178088C.1
ggggcaaacaccaaaacacttggaagggggttggggttttgaaggggnaaacaatccaaaaaagaccagaacatgctcccaaataatcctggtaaaaaactggggacaggaggggaaaaaaaaaaagtttcacagtttggtgattttgaaaaaagggacttggggctgaaccggaaaaccttacgccttgggcttaccaaaaaacctttgttttttatgggggggggggaagcgaccatgcccaaatttggacgatggggggataaacttgagcttgatctcctccagccccagccgggaagtctgtttcaggagggactggcggaggggcaccaccctttttttgggacccaaaaagatcccttggacatagggggtcacccttcacaaaaccatgggggggg

SEQ ID NO: 85613 - DNA, 722 bp, Zea mays
  Clone ID: MRT4577_178089C.1
gatcttcacctcagtcaactccgaagtaagatgttctccaggccatcctcagcacctcgttgctctcagcgctcgccgctgctgcccctgcgccgcaggtggctggctacactgatgccgacgcttccttctcggtcgagtaccctactggcacaccttcttcctacagctttggccccgactcccaggtcgctgctcagcctacccagcctggctctgcctaccctcgcgtcagcgccgaccctactggtgctaccagccatggtcccttctctggcactcccactactaccggagctgctaaggcacccgccactctcggcactgccattgctcctctccctcccaaccctaccgccacatactacaacaccaatggctctcctcagaaccccatgccgattccttacacaccggctggtggcctcggcaccaacggcactgagcctcgctacatggtgaactctgacttcgactacgagtcgattcagcttggtctctaccaggagtggattgagctcgacctgttcaacaacggtcttgccgtcttctctgaccaggacttccttgacgctggtctgactgctgaggaccgcgcctacatcgccttcatggctatccaggagaccggccacgccaccctcctctccaacatgctcggcgagactgctgctccccagtgcacatacgactaccccttccgcacagtccgcgagttcatc

SEQ ID NO: 85614 - DNA, 259 bp, Zea mays
  unsure (1)..(259): unsure at all n locations
  Clone ID: MRT4577_17808C.1
cttagcataattttgttctggattcagtaaatcaagtcagattggatcattcaccttaacttttcctttagcagccatttccactagtttccattaactagtgttccataaactttgatccaaagcagaatcaatgtcttttccatctcgtgacttaaagttctgtgactgtgatgcatgtgagtgttccgacttcatctgttcctcttcaatacggtgcctgncttaccatggcattcataggatgaaatgaatgact

SEQ ID NO: 85615 - DNA, 279 bp, Zea mays
  Clone ID: MRT4577_178090C.1
aaacaaaccgaatccccgggcaaaccggggtggtgggtttccccggattttttttttccccccccccttaaagggggggggcttcaaaagggcccaaacagtcccctaaggggggtccccgcttagtcaaaccccccaaaaaaatcccccaaacggggtacatatttccccccctaaacccgggggctcattttttccgggccccaatattcggatttggatacccccccaaatattatttggggggggggggggaaaaattttttttatctccctaaa

SEQ ID NO: 85616 - DNA, 357 bp, Zea mays
  Clone ID: MRT4577_178091C.1
cggacgcgtgggtgcacgcgcaagctatacgcgtgccaagctaaatagctgctgcgtatatatactactactactgccgctgtgtacatgtgcgtgtatgaactgtgtgtgtgtgtatggtctcaagtcactgtgttcgtggctgctttccagatcggtcagtgtgttttctcggtttgcttggatctgcacatcaagttgttgtatcaccagctaccagagggaccatgccctttgctttgaaaaaaaaaaaaaaaaaaaaaaaaaataaaaaaaaaaaaaaaaaaaaaaaaaaataataaaataaaaaaaaataaaaaaaaaaagggggcggccgttttaaaggaccaaatttta

SEQ ID NO: 85617 - DNA, 368 bp, Zea mays
  Clone ID: MRT4577_178092C.1
aacagtgtcaccgacgtggcttacgccgtgtgcaccgacaccataactgggcgcaacttcgtgatcgccattgttgagttcggtggttcatgcctccagatcgacatcgtgaacctgttgtacatctgcgagtgcaacagcgtgcccgatgtggccaactactgtaagcaggtgatcaagatcacagattacaatcagaaccagttcgtgaaactcgtcgtggcctctatgttcagcaccgtcgacggtatgagcatcgcggtccatggcttcgccttcacgaaagacaccggtcacagtagggtgaccccggccattgacgtctgtaacggcctgctgggcgagaacgaccagatcagcatctacga

SEQ ID NO: 85618 - DNA, 262 bp, Zea mays
  unsure (1)..(262): unsure at all n locations
  Clone ID: MRT4577_178093C.1
atctattgacctcctatatgggagttattttagccaacctacagccctcatgcataaaccagtaaccnatgtaggtttaaagggtctttcgttttaaacaaaccctttttgcaatataatagtggatccattaggcagttcagctctaatacctttggccgggtataggatgtgttggcagcgtgacgtaaatcgttatatcatcactgtagccacatatgtatatgtgtgtgtgtgtgtgtgtgtttgtgtgtgtatgtgt

SEQ ID NO: 85619 - DNA, 479 bp, Zea mays
  Clone ID: MRT4577_178094C.1
ctcgctcgtcccaattgcacaggccgagcacctagtaacgacctgctcgatcatcagcgtaaagagtaattaggtgcttgtctctcatgaggcctggttgctaagcgcatggcgacgtccgctcgccgagggcccttgctgctgctgtgtctgcgagtgctggtgtcctgatccttcgcggcaggtagcttgcaccaacagcttcacatcactggccacgacggacgaggcgaggtacttgacaacgaccggctgctgacgctggcgctggaccgcacgtccgactcccagctccagttccggcacgaatacctgtttgttaaaatcgacatgcaactgcggctggtgcccggtaactccgccggcaccgtcaccgcctaatacctgacacctcatgatggggcgcacgaccagatagactgcgagctcctgggcaacgagtccggcgagccctacaccctgcacaccaatgcgctcac

SEQ ID NO: 85620 - DNA, 471 bp, Zea mays
  Clone ID: MRT4577_178095C.1
aatcctactaacagggacatgagttctgccgtactacgtatttaagaacgagacaacactcggaacaacacaacatacagggtaaatcagatggcgaaaccgaacgcgtgccaacagctaacgagaacaggattgcgcgcaggcatatgcaagacaagaggatgctaataatctcatgtgtgtgttgtgtcatctctctcccgcttgtcagcgtacgtacgtgccaccgccaagaaggcaggaactgcttggccgtatgattcggaactgtttgttacatcgccaaggaacctgccaatgccgccgccagcagcgtgagcactgaaacacacacgtaggtggtggccttagcagccgccgagttgctggtcccgccagtagacggggcgggtccactatcgtctcctgccttcggcggggaggcaccaccagagcccaccggggcgggagccggcgccgcctccacgggca

SEQ ID NO: 85621 - DNA, 469 bp, Zea mays
  Clone ID: MRT4577_178096C.1
agagcacctacggcgaggtccttgagtgcaagatcatccttgatcgggagacgcagaggtcccgcggctccagcttcgtcactcttgtacacagaggaagcgatgcgtaacgccatcaacggcatgaactggaaggagctggacggtcgcaacatcaccggcaacgatgcccactcccatggacgccgtagaagcagcggcagcggcggatactgaggtggacacagaggcgggcgataaccgacgtggcgggcacccaagattgccgctgctgctacaggggaaagcagccgctaccgtagtaggagaacgtgctaccgcggtggccgccgctgataccgtggaggtaaccgtggaggtggctacggcaactcccacgggaactggaggaactgagcggtggggcccacgcggaccagtatcctgttcgcctacgtggtggttaccctagtacacagtgtttatctta

SEQ ID NO: 85622 - DNA, 250 bp, Zea mays
  Clone ID: MRT4577_178097C.1
gatcaatattgtcatggagcataagcttgtgtatattagatccatcagaatttttggagaaatatcaaattgcctctttcttggatgcacctttcattcagtcacagtctcattagacttcctgagcaaatgaagcatacgattgcccttcggcatctgtacacagatgggtgcacgaggttggagtgcatgcctccagagcttggacaattcacctcgcttcgaacaattacatgggagaagaatgcaa

SEQ ID NO: 85623 - DNA, 177 bp, Zea mays
  Clone ID: MRT4577_178098C.1
caaaggaacaagaaacaaccggccgccaacacacccccgcgcaagaacaggccagcagcaacaacaacaaggccgccacgcaacggcgcagccacggcggaagcccgacgaacaagcgcggggcgacccagcgcgagcacgacggagagacgcggacgacaggaagcgcagcgacgc

SEQ ID NO: 85624 - DNA, 285 bp, Zea mays
  Clone ID: MRT4577_178099C.1
agctcggaattcggctcgagtgttgccactggcaccgtattgactctccaggctgacctaacaaacgagggggccattataaagaacccgtgggatcgcgaccgtatccaccccaagccctgcaaaacagacagagatcctcaaggttgccatgccccgtcattcaaacatcaagcaagacccaaacgggctcacgatcatcaactgcattctgaacgcgacgaatgtgcggctaaactacaggaaaactagcccggcatacctgtgacgccagcacactcatca

SEQ ID NO: 85625 - DNA, 230 bp, Zea mays
  Clone ID: MRT4577_17809C.1
gaccacgcgtcgactcgcttgctcgctcgggcatttctctcgcgcgggagcgccatgtgagctcgggcggatctgatggcttgtgtgatctcctgcaggtaagaaaaagaggaaggcaagatgtctcaccgtaagttcgagcacccgaggcacggctccctcggcttccttcccaagaagcgctcctcccgtcaccgcggcaaggtgaagtcattccctaaggatgaccc

SEQ ID NO: 85626 - DNA, 400 bp, Zea mays
  unsure (1)..(400): unsure at all n locations
  Clone ID: MRT4577_1780C.1
tttttctttttttttttctttttcacattcctgaactttaagccnnggttgggattaacattagtggctcatttaataaaatcaatgcttgtcgatgctttgttgcgttgcctatcctattaaccacgttgattgaaccttgctatgggcatgacagttggcatccaattttctgcactacaggcacaaccatcgaacaccacggacaacgactacgacgaaccaaagcaggtccgtttttccctctggggtggcaaaaactgcatcaaccttggtgtcactaccgccattaggcccataaacaaccccaggctgaggtccagggatggaggctacgccactcccacgaccatcacccacagtgactcttcattggggagcctgaggacaatttgtaccc

SEQ ID NO: 85627 - DNA, 344 bp, Zea mays
  Clone ID: MRT4577_178100C.1
tcttcctagcccggcccccatgggccatcccttcttcgccttcaacaagcacaagcgcaagcgggggctcaagcccaagggggttgcctccttccccgaccggttcttccccttttccttggccgggcccggttctgctgggccccccggccccaagcctggacgtcattagttccccgccggcgcggacgccacgcggtcgccgatcccgaaccgacgaggggaggccaaaccggttgcaaacagaagccatttggttgcatacgccgaaacagggcccgccagcttggattacgttgtgaggggttttgcatgcatttacccctctgtttagtggacctggg

SEQ ID NO: 85628 - DNA, 380 bp, Zea mays
  unsure (1)..(380): unsure at all n locations
  Clone ID: MRT4577_178101C.1
ccggnnccggaaacccgggacgacccacgcgnccggaagaaaaagaccagacaancnnccccggcaaacaagaccggaccaaaggaccagcagaaggccgggcccacaacaaagagagggaggcgcaaaggaagaggagcaacacggacacggcaaacaacacncagcgcagcggggagagccagaacggcgacaaaggacaacaggaggcagnggaacaacgcaagccacagaccacggcaacaaacaagaaaacaaaagacaaggcacgaacagacaggagagcagaaaacaggaccaacaaagggagccaacagacaaacaccacccggaggaaaagggaggcgcaacaaagaaacacaaaggaaagaacacggggc

SEQ ID NO: 85629 - DNA, 184 bp, Zea mays
  Clone ID: MRT4577_178102C.1
ccatattcaggactccaggtgcgaactaacagaaacgactttgcacgcatcatcatacttgatcaaatatgcatggagctcgacttcgcgtatggttacttgcctgagcacacatactgagcgccggataagatagcactcatctatggggacgaaacttgacttggcattctggtggctggca

SEQ ID NO: 85630 - DNA, 560 bp, Zea mays
  Clone ID: MRT4577_178103C.1
ggtactcattttatttatctgccagtgctatattaaagatggttcttagataattttctttgtacagtgatatctggtatcttattttcatgcaggttgaagaggtggttgacatttcaaattgggagaaaaaagaagtttatggcaagaaacggaagttacagagctttagagatgaggactactacataagttcagtacctcaaaaccatcatttggaagctgggctgtcggtgagggacaatgaaggatttgttgaaaataggttggatgctgttgttcttgatttagttgatgatgaagcttctggtatgcaagcgcagaaaactcgatatcactggatgaaggtggacaattggagctatgtcagctacagttattgatctgtgttcacttttgaaatactaaaataggaaagtaactatacaatgctgctaacttgacaatcattgcatgaaagcatcatatgctagtgctccgtgtttattgctgccctagccatccggatagtccatcgcccgtcgtgggcctcgtggcacatcctagatgttttgccccgc

SEQ ID NO: 85631 - DNA, 359 bp, Zea mays
  Clone ID: MRT4577_178104C.1
ctgaagaggagcgatttttacccaacaccgacagagactagtatccccacgagagcaggaacacggagaagcgccatcaacaaacccaacacaacaaggggaacaagcgaacacccgccttgccacagaagccaagcgaggaaaacccaaacaacgcagggctgcttgcctaagaggagcaaaaacaccagcccaaagaaaggtccagagcgaccgctggccagcaaaaacaagagcgagcccacgaccaccaccactcccctatcaagcacagctatggtatcgcacccctgcaaggagcccagcctgtgcgccacgaccacgctagtacggccaaccattaccctgtgcagcgcccc

SEQ ID NO: 85632 - DNA, 469 bp, Zea mays
  Clone ID: MRT4577_178105C.1
acacaagcggcggttgcgcaccaaacgctggcgagggcgagggtgtgagggaaggagcacagccatggtgcacggaacttgctaccgcaactatggcatgaccttcatgaaaccacgcgcccttatgagaaggagcgggttgatgctgagctgaagctggtcggtaatgatgatctgaagtacacgcgtgaggtggggaggagccagtatgcactgaccacgatccggagtgctgcaaggcacttgctcacccttgacgagaagaaccctcgtggactctttgagggggaggcgcttatctaccgcatgaaccgccttggactgcttgctgagggacaaaacaagcttgactagtgccttgccctgaccgctgacaacttcctcgtaaggcggcatcaaacactttgttttactgctggcatggccaagtccattcaccatgctagagtggtgatcaagcagcgtcaca

SEQ ID NO: 85633 - DNA, 320 bp, Zea mays
  unsure (1)..(320): unsure at all n locations
  Clone ID: MRT4577_178106C.1
gcgaaaggctcccaaccctacccacagcccttacttctatgcacgctcggcgacggcaaaagcccgttttttgatgggcaacgcatgcatcgacgccctcagatccaattacctgctcatcttcaagcacgccgagttccagcgccacgactccgagtacagcgccagcgccagcgccgacgactcgtccaggaagcccacaccgtccgccaccacggacgcccacgcgccggttccgtccgccgtcgccattatgttcggcgcggctggcgcgacgccggacctcgggtcngggctcggccacacaacccccaaccttc

SEQ ID NO: 85634 - DNA, 468 bp, Zea mays
  unsure (1)..(468): unsure at all n locations
  Clone ID: MRT4577_178108C.1
gtacgcctgcaggtaccggtccggaattcccgggtcgacccacgcgtccggnaggcttnntncttcnccttcggnccgagcgtcctgangcagataaccgntggnnacagcagggctnatntnggaaanntcatnnccacatatnttnntcagggnatactccaacatgncccntnnaaggtnctcgnccagannngagtgggngagctngnaaagcttngtacagagagagnacgcaaagctaggcctaacnnaaagntgggcattnanggagaacacgatggngagccttcgtcccnngncttnttcgcgaaggctgggctggattacgtttcttgctcccctttcagggttccgattgctaggctagctgcagctcaggtgcttgtctnaggctgcctcctcattgggaaccggattgcctgctgctggtggatntggtgatcaacaggattattacagagccat

SEQ ID NO: 85635 - DNA, 1017 bp, Zea mays
  unsure (1)..(1017): unsure at all n locations
  Clone ID: MRT4577_178109C.1
tttaaaacagnaaagaaaaacaaatcaaagnaaataaatagctcagaagaacacgccggccggggccatctttagattgatctcccctcccgtcgcaatcgccgtcgccgccgacacggcctccgtccgccacaggccaagccttcccgccctccgcgtcgttggacgcgaacacctcgcggacgaccttctcgacgtcaagcgcctcgtcgccgtcgccgtcctcgccctcgtcctgcggcggcggcgtcgggatgaacggcgggcgcgccacctgcaggatgcggtcccagtcgacgccgcggaagaaagggtgggccctgacgccgcgcgcgccgatgcgcttctcggggtccttctcgaggaggcgggcgatgaggtcgcgcagcggcgtctgctcgccgacgagctccggctgcttggtgaggacgcggtagaaggtctccttgcggctctgcccccggaacggcgtgcggccgtagagcatctcgtagagcaccacgcccaggccccaccagtccacggcgaagtcgtgtccgcgcccggcgatgatctccggcgccacgtagtcctccgtccccacgaacgagttcgacttcgcgggagtccgcgcgccggccgacgccgctgaggaggaggccgtggtcgccgtcgaggacgaggacgacgacgaggccgtccgagaggtggacagcggcgacggcgagtccgcggcaggcttcgcagcgctgccggtggtgcggaatgggaagcacagggcggcgcccgccggcttccttgctctgccgcggatcggggacggcgcggcgaccggaggcgccggcttgggactggtggccggcgcgtccggctcctgcggctgcgccgggagccgcgtggagaggtcgaagtcgacgagcatgatgtggccgctgtcctggatgaggacgttctccggcttgaggtcccggtacacgacgccgagactgtgcaggtactcgagcgccagaaccagctccgccgcgtagaacctgcgat

SEQ ID NO: 85636 - DNA, 226 bp, Zea mays
  Clone ID: MRT4577_17810C.1
agcagtggtaacaacgcagagtactttttttttttttttttttttttttttccactctggaatataaagcggactggttaaaaaaagaaaatcctatttagtataactaatcggataataagaaccctctacacctatcaaccggatagcagagtagaaccaatatcctggatataatcaccaatctgcctatatacgtggtataaaagaatacaggactctaaaa

SEQ ID NO: 85637 - DNA, 511 bp, Zea mays
  Clone ID: MRT4577_178110C.1
caaattaatcatatcaagtttatggttctgatacaaaattttcacagactttggtcaaatttcaaattcaaaatcatttttccaccctcggccgtaacacaatacataataactcaagtgatttctccaaagatttaaaagacgaaattgttctcttctgcagcaaaaaataatgctccatcttccatttcacggagggcagttgcagttgaatcatctattcccagcagatattgtagcctcaaaactttttccggtgcgggtttgggatcactctttgaataaatagcatatagatcagataattcctctgagacctcccatgacattggctcagccggcacagctttgtcacatgcaagcaaatcattcagcgacaagaccactcctttaaagtttctctgcctgagtaatgccacggcttggaccagcgaattcgataatctactctgagcgagatcatggacaactcttttggctttttccacatcaatactgagatcggatggga

SEQ ID NO: 85638 - DNA, 594 bp, Zea mays
  unsure (1)..(594): unsure at all n locations
  Clone ID: MRT4577_178111C.1
gagcacaactgcgctatcattattatttattatgatcaagcaaagtacacagcaaaaaaaaacctatatattggctataccccattgagcgggagcacctgcacctctttaatttatgtactccaccggccattgcgccgtactcactcctaacctcagttgctaaatgccatcatgttcatacagtacaaatctaaagaaaaagaaagaacaaatctaaagaaaataaatagctcagaaaaacactgagaaatcaccatctttggaatgatctctcctcccgtcgccgtcgccgcccacagggcctccgtctgccacaggcgaagccttccctccctcgccctccttggacgcgaacacctcgcggacgaccttctcgacgtcgagcgcctcgtcgccgtcctcgtcctgcggcggcgccgggatgaacggcgggcgcgccacctgcaggatgcgttcccagtcgacgccgccgaagaaggggtgggccttgacgccgcgcgcgccgatgcgcctctcggngtccttctccaggaggcgggcgatgaggtcgcgcagcggcgtctgctcgccgacgagctccggctgcttggc

SEQ ID NO: 85639 - DNA, 309 bp, Zea mays
  Clone ID: MRT4577_178112C.1
aggcttcatatgaactgctcccttatgcgtaatgtgtagcactcgtacacatccattaccaaactggcagactgtgtgctattttcaatgagtagatccggtccccgattaacccactaacataatcatcaccatacaccataaatacttatacaccgatactaatctcaccacttaatgaattcatctacatatttctcatgctaccacttatgcactaactacacacttatttttttttccggtctcacatcaatcttctcctactccctgcatttctttattgtatctcaaagatccctaacttgc

SEQ ID NO: 85640 - DNA, 260 bp, Zea mays
  Clone ID: MRT4577_178113C.1
tttccaacaagcaacatacaaaggggaatccattagcaacaatagagcaacaatggccaccaagatattttcccttcttatgctccctgctctttctgcatgggtttctaacgccacaattttgcctcaatgcttacaagcttctatagcttgccttctttccccattccgtacattaacgttagcgtaaatattgtaaaacccagctcttcaaccctatttgcttcaacaagcaatcgcatcaagcaacatacctttat

SEQ ID NO: 85641 - DNA, 633 bp, Zea mays
  Clone ID: MRT4577_178114C.1
ctatcatcagcggtgactacaggatgtgaaaacccaattcttcaaccctacaggatccaacaggcaatcgtacaggtattttacctttataacccttgttccttcaacaacagtgagtcctattacagctgttacctatggtgcatttgatggcacaaaacattaaagcacaataactacaacaacattgtgctaagaaaccttgctgtctattctaagaaacagcagtactttacatttaacgcaacatggctgaattgaactattatgattatttgcaaaaacaactaccattaagtcagctatcctctgtctacaccaacaaatgttttccattctaccaactggcagcatttgaactctgcatgcttatttacaacagcaacaactactaccatttatccaactagctgatgcgaaccctattggcttctagacacacacacaattgttggcgctctacctgcacactgtgactgacgctgatacactattacaactgttagagatgatgacattcaaccaacttgctttgacaaactcttcagcgttctaccaacaacccatcattggtggtgccctcttttagattgcttatgagttatagttcaataatgaaagattttggatgat

SEQ ID NO: 85642 - DNA, 542 bp, Zea mays
  Clone ID: MRT4577_178115C.1
tctcgatctataaccggacgcgtgggtttatttgacacaacaaaaaaactagatatggatttacctgtgacatatatgtatcaggacattatataggacatacaggggcgtatgatttgggggccgtgagcgggggcagtaccctggacaccctcagggactgccctgggttgatccatgcgcggcgaccgttccggtactaggacaagtcttactgcctgtgcgtatggatgacgatagtcagtacgtctgtgtacaaatacgcatgtgatcacattcccagaaaagatctgagcctgaagcatgaacgactgagctggctgggccaaaggagcgtgctaaatcttgtcaatgcacgtggagtaactgcccgctctgcaggagtaaaacgtcgcgtggctctaccattaaaataatggaccaatacctgcagagaggccatttgtgcctatagcgagacggatgatatcttgttgaacagatagacatagatgatttctgtgtgaaatagcgattggctcacaatagagacacaacatacg

SEQ ID NO: 85643 - DNA, 408 bp, Zea mays
  Clone ID: MRT4577_178116C.1
ataattaacattatatgatttacagtttttgttataaacacccattcttaaactagccacaacgtaacagaggcggcaagggttaacacacctgtttttatggccaacatctcgatctacatcccatccggctagcccaggaccacgatcaccatagaataaacattcgcacaggacactaacgggaacggagctggcctcctgttcagcgcacggaaacacgggggcaacaacacctacaggatctgaaaaaccccgttccataaaggggggcatgaagagcacgaggatgccaatgtgattggacacacaattgaccttcctgaggccgttcctgactccatctgacgccctgatgggctcttgggaaaagttgcatcccaaaaaaaggcttattaagacaccgac

SEQ ID NO: 85644 - DNA, 874 bp, Zea mays
  Clone ID: MRT4577_178117C.1
aaaaaaaactgggacagacgcaccgagcccctactcgccctctacctcggccgctcggctcctgatctcgccggctcgccgcttacctcgccggacgccaccgcccgtcgctgcctgcctcgccgtcgctagacgccaaggaggcgccccttcccggagctcggcgctaccgcgcccccttggcgcccctgcaaaccggcgcctgccgcccagtccgctgtccgccgattccggcactcggccggctgcaagccagcaaccctgcccagtggccagcctttagcccgatttgaggacttgaggcaagttttccattgcgccacttcccattccccaatttctgatttagggtttgctctttgctgtctattgcattggaaagtgcctcaaattccccaatttcctcgtgccttcgcccaccgagtggtcaaccagccaaagaccatgtggcgccgagccggaccgatctgcctccacctcgccggaatcgccggccgccgcatccgacgacccccacagcctcctgctcccacagccacctgctctagctccgccttcgcttcatcctctttccaccacaatcttggaacctttcgggattccatcggagttcctccctctcgaagcctatcgaaccaggcaggaggtgatggcggcattggcggcgagtggctggagttgtggcgccaagggggcattcctctcctgcgggtcctgcaggagtgtgcagcccgttgatcctgcggccgactacttccgaatatttgtgctggacagaggatatgacgtaaaggataccactttagaaggaaagtacaaagactggtatgaagaagtacatccttgaccttgttcattctaaatcagagaaaga

SEQ ID NO: 85645 - DNA, 507 bp, Zea mays
  Clone ID: MRT4577_178118C.1
ggtgatttgacaccatttgcactcagtacaccaatccagtcaacaggtcataaacgtggtggttaaacatcgacactgaaaaactatgcatctactattttaggctatgaggaagctaactgatgcataaatagttagagtcgactgcattgatgtagttcacaatgccattaatcttgcagtcgttgagaacgactgatgacgaggaggccccgaccactatccactggcttcagatcccacaagaagacggggctaacagtcaccactagatctaccatcttcagacccacatcagagatattggcttgctcgacactaacagaatagcacaactcaaaatgttgtaggtagtcttgaggcatgctcatgtgccgcaattcatctacaggatcacaacccctctagctaatgtggtctccgctcagatgcataacatcatgactcctatattccatagaagtgaagccacaacactaataaatattatgcccagcacttgatgcc

SEQ ID NO: 85646 - DNA, 554 bp, Zea mays
  Clone ID: MRT4577_178119C.1
ttttttttttttttttagcggaaacaaattaatttcagaaagcgacaaatacaaaagtagcaatgacaaggaagagaactaaggagcgaggtggaaacaatcaaacttcctgagagactttggaagttttgtcctttgatttggcaggaaggagctccgagtgaatctgaggaatgacacctccctgtgagatatctttttggcctaggagcttgttcaactcctcgtcgttccggatagcaagttggagatgacgggggatgatacgggacttcttgttatcacgagcagcgttgccagccaattcgaggatttcggcggccagatactccaagacggcagccaggtacacaggggcaccggctccaacgcgttgggcgtagttacccttccggagaagtcggtggatacgaccgacagggaattggagaccagccttggacgatcgggattggctcgcggctttgtcgcctccggctttgcctcctttaccaccagacatgctgtgtgttgggttgttttggtttgggttaggtttgtgggtggttgggctc

SEQ ID NO: 85647 - DNA, 877 bp, Zea mays
  Clone ID: MRT4577_17811C.1
cattgggtacctcgaggccggccggggtccgcctcccgccgaccaccaccttgttcttgctgtctcggcgctgcaatggcagcggcgacctcgctggcagcgtgcgcacgggcgtctgcgtccggcctccacacgggccgcctcgccgtgcgcgccgccgccctcccggcagacggccgcagtgacggcgctgcctcctataaggaacttggtctgtactccttgaaaaagaggattgaagacacagttgtgcgggttgaaacgaccgcttccgatgctctggagttggaggaagcacagagaattaagcaggaagaagtactgcagaaacgtaacttgtgggataatccagctaagtcacatgagactctgtctgctctggccgatgctatcagggtggtcgaccatcttaaagatcttcgcttcaaggctgaagaggcgaagttgattagtcaattatcagagatggatgccataaatggtgagctatttaagcaagcatacaaatcttcagtagacgctagtgagtatctagatcgctaccagatgtacaagcttcttaagggtccgtatgacaaggagggagcgtgcattattgttactgcagtatctaacggtgttacttctgagctgtgggcagagaaggtctttggcatgtatacaagttgggcacggaagcaaggttacaaggttggattgattgagaagatattttcaactagtggccatatccaatctgcaacaatggagattgaatcagagtacatgtttggcaccctttctggagaaaaggaatgcatcaaatgatatactcctccattgaaaactctgacattgatcaggcattatcagctagagtcgacaaaattcccctgtt

SEQ ID NO: 85648 - DNA, 640 bp, Zea mays
  Clone ID: MRT4577_178120C.1
cccttcctcgagttttttttttttttttttttttttttttttttttttttttttttttttttttttttttttaaaaggacccaatttttaccaataccatttccagggcccaacctgttgaaaaacattgggggccccccttccaaccccaacagtttgaaaaggggcttcaacttcgggcttgaccaacagttgcaacaaatccttgcaagcccaacaccctgccctttgtttttaattttttgggaaccctaccacccaacaaagttttcattgttgtaaaatagaaaacacaatctccccattgttttccaggtaaaaaccggcttttgagtttaggccctccttgtcttcgggggggccaatgtcttttttcaaaaactgattgagcccacggaacccacctgtgggaagggccccctcacccagaatctgcagaaactctttcttgctttgaatgggttgttaaggctcctcgaactgtttactaatggaattgccatcctttgggccagctaggaggtttttaaaaaaccatggagggttttttatctaagggatggggatcgtcaccatcccgtatggcatcactccgaatgaccacccataagcacccttagttcagaaacaaagagttagg

SEQ ID NO: 85649 - DNA, 380 bp, Zea mays
  Clone ID: MRT4577_178121C.1
cccactcgtccgctgactcgtgggaaaatttaaaaaaaaaaaaaaaaaaaaaaaaaaaagggaaaaaaaaaaaaaaaaaaaaaaaaaaaaaaaaaaaaaaaaaaaaaaaaaaaaaaaaaaaaaaaaaaaaaaaaaaaataaaaaaaataggctttaccttttaaaatatcaaaacttactaacccttcctttcaactttttaattttcatatagattcatctaaatctaatcaattgaccagtatttaaaaacgttatacctgtaaaacctctggtattaccaaattaaaaccatttgcaaaaaattcccttttctcaagttgtctatatatcataaagacccttaccaattgctttttaaaaaattttaccatcctaaa

SEQ ID NO: 85650 - DNA, 438 bp, Zea mays
  Clone ID: MRT4577_178122C.1
aagcttttttttttttttttttttttttttttttttttttttttttttttttttttttttttttgggaaaaaaaattttttttttttatttaaaaggggaaaaaaggggagtggggaaacaggcacaaacccccccgggggggggggggacaaaaataatcaaaaaccggcggggaaagagataaaaagaggggacccccggcgcgacccccccaagggggaaaatcaacaaacaggggggcgggtgtgggggggcatgagggcgcaccaaggcgggggaaagggtgggcaaagaatagggcggggggaaaaaataattctggtaacaaatcgcacaaaaaaaggcccgaacgggcaaaagggaaaaaaggggggggctctcggggggggtcaatcccaaaaagagcattgcggcaacgggccccatttcagaggggg

SEQ ID NO: 85651 - DNA, 293 bp, Zea mays
  Clone ID: MRT4577_178123C.1
cacagtggggggctctaatgtcatcatgcttgatgcacaacaatgttggtgtgggtgaacgtgtaggaaagaaacttattgagctagagccagatgatggtggacgttatgttgttctgttcaatctgtatgcagttaatggtttatgggaagatgcaaaagctcttcgtaagatgatggaagagaggggagccaagaaggagacaggtttgagctttatagagtggaatggtttagtccatgagttcagatcaggtgatacaagacacccccaaacaaggcagatctatgca

SEQ ID NO: 85652 - DNA, 388 bp, Zea mays
  Clone ID: MRT4577_178124C.1
gttctgatggtttgttttaccaaaacaagcgggaaaacgggggccattctgaaaccattggaaaagggccaaacaaggggaaagagacttttgtctgacccggggcaaaaccgagggaaaaaggcaagagccttggaacgacccggaaaaaatccctacattggctcggaagggcattgaaaagaatttaacaggggtgcaaccttgcgacaaccagacctcagcaattgttgggaggaagggattaacgttgctttaaaaagccaaaagaaggggggaaggattggtttcccccggctgggggagcaccagggaaccaaccgaaagaaaaagggaaggggaagggcttggcgcaaacaagggaagcaaagaactcggagaccccggg

SEQ ID NO: 85653 - DNA, 294 bp, Zea mays
  Clone ID: MRT4577_178125C.1
acaggggaacccggcattggattatatgggccaaaaaaacccccctaccgttgtctactaaagaaaagggcccggaagcaggttggggaacacgggggctagctagctccctcgggggaaaaaaggccccttggggcggccagggtcagcgccgtcttgggctccagggggaccgggacccttaacctccccccgggcgcgggggggggggaccccacccacgagcttcccaccttggccaccgccccgaagttcccttattttttccggggcccccctgttgttcttttcggg

SEQ ID NO: 85654 - DNA, 547 bp, Zea mays
  Clone ID: MRT4577_178126C.1
atttgttcttgtgatataattaacgattcctgttatacttggaaaaaataaaaaaaaaaaaaaaaaaaaaaaaaaaaaaaaaaaaaaaaaaaaaaaaaaaaaaaaaaaaaaaaaaaaaaaaaaaaaaaaaaaaaaaaaccatttaaaaaaaaaaaaaaaaaaaaaaaaaggtttgtccctgggccgaaaccaccttaagggaaaattttgaaaatttccataaaattgggggccgttcaaccatccttttaaggggccaaattccccttatagggagtggtttaaaaataaatgggccggggtttaaaaacgtgggaaggggaaaaaccttggggtacccaaattaaatccctttgaaaaaaatccccttttcccaagttgggtaaaaacaaaaaaggccccaaccaatcccctttccaaaaatttgcccaccctaaatggaaaagggaccccccctttaaggggcaataaaacccggggggggggggggttaccccaaggggaacctttaaatttgcaaggcccttaacccccgttttttttgttt

SEQ ID NO: 85655 - DNA, 312 bp, Zea mays
  Clone ID: MRT4577_178127C.1
catttcttggaaatagcaagcacgggtctggtatagggtttaacattctttacttgtattgactttcgagcattactggtgacgtgctgagatatctaggcaactttcacgcacaaaaatgacagcttgcaaacgtttctatgtcgtttttatgcatctgattaccttaccattggttttctatattttaatgattctttgtacttctaactaataataagactagactaagcatacatacaagctgtataccaacgattcctcgctgcgtacaaacatgaattgctgctagcgaaggccagcacccttgcc

SEQ ID NO: 85656 - DNA, 214 bp, Zea mays
  Clone ID: MRT4577_178128C.1
gtccaacctaatcacagcctgttgtttgtaaccaggttttaaggtttgttatccttaaggttgttaaggcgtttgttcttgttgtcaggaggagaaatcattaattaaactggttttataacatccaccacaagaattttccttgttaactaaaaccgaaatgctctgtagttgtatttttgggtggagtttaagggtgtgttcatttaaaatt

SEQ ID NO: 85657 - DNA, 825 bp, Zea mays
  Clone ID: MRT4577_178129C.1
ggccttcaattgcagcaacggggatctcttcaagtggaagcaactgtggccgatacttcccgaccatttcggcctggaatgggctggctcccaaggtgaggaaaacaggttcaagctcgaggaggccatggccgggaaaaaaactgtttgggcaaaaattgtcagggaaaacgcccttataaccccggagcttttcgagatcccgaattggtggtttgtcaatcccatgttttctgtggagacccagcttttgggcagcatgaacaaaaacaaggggcatggcttcctcgggttcaggaacactgtcagctctttcaacccatggattgaaaaacttaaggttttcaaaattgttccctaaaaaaaattcacccctgctattcccttttaaactgttgttttgcacccctattatcctgctcatttatcagccccagttttcctgtaattcaaacatcttgctatctgtgccaggtttgcatgttatatactagggaccaataaagatcaacacattgccaaaaaaaaaaaaaaaaaaaaaaaaaaaaaaaaaaaaaaaaaaaaaaaaaaaaaaaaaaaaaaaaaaaaaaaaaaacgagaaaaggcaaaaaaaaaaaaaaaaaaaagggggggccgttttaaaggatcaaagtttacttccccgtgcatgcaatttaatactttttttatagggcaacctaaattaaattaatgggccgtggtttaaaaacgtcggaacgggaaaaaccctggggtaaccaaaataaatggctttgaaaaaaattccctttttccaagttggggataaagcaaaaaggcccgaac

SEQ ID NO: 85658 - DNA, 344 bp, Zea mays
  Clone ID: MRT4577_17812C.1
aaaaaaaaaaaaaaaaataaaaaacaataaatacacatttacatttatgcaatagcagtaaagaaggaaaatgtgacgagaacattgaaaaattacgaaaacgggggggcccctatttagatttccgtttttgttctccttgtatcatgcgctttatgtcttataaagggctcccgtaaattgggtttattggccgaacttttataccgttgttacggggaaaaccttgtcgtttccctattataatgcgtttgcagctaattccctttttttccctgttgggttataacaaagaggtcccttttgatccccttctttcattggggtccctctttattggtcta

SEQ ID NO: 85659 - DNA, 271 bp, Zea mays
  Clone ID: MRT4577_178130C.1
cgaattaggttcgggcgggaacttaaagggctccctttttttggtaacgtgggttccgttacagggtgcccttaggacgcccatacgtggttcgtgcgctaaacaagagaccggaccggagaccacggaggaccagatcaccgaccaccagatcgccaggctgaaggaggtcttgagtctgttaaacaaggtcggtggcggtgggatcacagccaaggagctaggaactgaaatgcgatcactgggtcagaacccgaccgaggctgcgctc

SEQ ID NO: 85660 - DNA, 535 bp, Zea mays
  Clone ID: MRT4577_178131C.1
gagcggactacagccgtggatgagagtgcaccgtcgaatgtcacattcctaaaccctttcacgcacgcgcacctaacggggacgatcatctcaccatcaatactgggcgtaggtagcgggtgccactagccacgccactcccggtgtcgggggacgaagcgcgagccaggaaacctccgtcgttaagtacaacgtgttctatcctagccaggactatcacttggacagttcgtcgcacgagtgataagacccagccggagtagacctgggtgacgtcccttgagggtcccggcggttaagacatgaagagtccgaacatcttagagaacctccatttctaccagatcgactggaagtcgagtcttttgacgacccaactagaggccgattgcgtaatggcgaacaggtaccagttccccaagttttctgcggttaccagcggtaccaggggtaacctgatcgaaaactccggtgacttgaagggtgcgctaccaatgactctccgcacacctcggccatcgcccgcataatgtct

SEQ ID NO: 85661 - DNA, 447 bp, Zea mays
  Clone ID: MRT4577_178132C.1
gtcgctcacgctacatcactacatcacgagctaccagagttatacatgacgtgcgtgaacatcattgaacggatcgtttccaaagtgctaatggccaaacttcaaatgtcccttcgaagactgaccaatacatgccacaacaccctcaaaaagagagttcacaacatgtaattgctgattctcatgataacttcgaagctaagttgaaagaagttgatgttaaagtcgaaactcctgtgaatcaaaagaaatcacaggagcaaaatgctggtactccacaaacggtagtccaggaccaacttgatgaggctcaaggactgcttaaaaccaccaattctactggtcaatcaaaagaggcaagactagctcgggtttgtgctggactttcatcccgtctccaagaatacaaatccgagaatgcacagctttgagagcttctaattgctt

SEQ ID NO: 85662 - DNA, 1996 bp, Zea mays
  Clone ID: MRT4577_178133C.1
ggatccatcatggccgtgatgggttcaacatcggacaagatgtacctctaccaggtaccaaactttgggattttaaatgataaagctgagactaggtgggtgacttgcacgagaagagagtctcggtgtagtgtctccatctgagttgattaaggaccgtgtcgatgtaagcttgatgattgaggaccttttaactatgaacatgcctcgtcatgggtaagctttacctcgagcagactaataccagaatggccaacacgcaatgggagtggagagatagcgagagtagcatgtaccctctatggcaagaggctggatggtggtgtatctgtgctctcggttggcgtgaacccaatctggtcttaagaaactatcacacccggggctttaagggacaaagccgggtgcatctcatacatgcgccaaagaagacaacatatataataacagagtgtatagagataaatgtaacaatataataagagtacttattacatagcgaaagtcttacaaaataaaaggtaaatataaaacaaactaaagtccatccttggcgccataaagtcaactgggagacgccacctagatcaaaccgaactcctcgttatgtggcaccgcttgaaccacctgttcttctcctgtgggggcgtgtgagacagcaagggtgagctcacacatgttcatcgctcaacgtgttgtggggaataatgtgcatgaactcaccaaaggtgggagttcatgtgatgtgtaaggctgatcaacaataggggttaaagctgagcaatgcttttaataagttggtcaaaattttattagcagttactggaagtaaataccaaaccataataagaatataacaaaattaacaaataatcccatgcaatgcaaatgacaaattgaatttagtttcatagtttaatcatgcgagagtcttgagctgctcttgactgtgagctcgtctagtataccggttttacactctgcagaggttgtaccctgtacccacaagtcatgttacccatctgccacggggttgtacgagccccatacacgtctactaaggaagcaaggcagggtaacactatgaggcctttacaaagttccactagctttcgaaaacccgctacagtttctgggaatagcaatgcaggaatccctcgtctgaccgccatcgcaacaaaatcaacccaaggacctccctacactaaccactcccctactgcccttgcccctttcgggtaaggtagtcatccactagctttcctagttaatcagccaaggacgtcccattaaactcttgtggtagcattgttttcccgggtggttctccatgttcccattaacataatgatcttatcatgaacagtaaataataaacagataataaaaagtataacaatgagtgatgaatatctctatacccaaagccacataaagcaatagcatgtactacccaaaaatttagtagtaaaaccagtggtgaaacaaggtataaagatagtcaaaatctagggtaacctattgggtcccatcaacattaacctatgtagatcattatgattaataagaacatgactgggtaaaagaagtgatcaagggcacaacttgcctgggacttgagattccaggtaccaacttgctcttcaagtgactcgtaaccttacgcaatggtgaggatgctgatattctccgaccacggcgctagtggttccgcggcggagcagcggcatgggtgagaaattctggtggccacgaggtccttctccgtccccccgacgacaacgcaagcatcgaagctcgccgtcgaccaacgaaccgagtgcatccatcccaatacctcgcgcgtgaagaagatccgtaccgccggtcaccacggcatcttccttctctccttctctcttgccccagtcggtggtggtggccaacacagcagcggcatctggctttctctctccatctctcagtttgatctctccgctgcttgctcggaggcctc

SEQ ID NO: 85663 - DNA, 310 bp, Zea mays
  Clone ID: MRT4577_178134C.1
atgcgcgcgtacttaattttgtaaccattaaagcggacgcccttatttttatttttacttttttttttttttttaccaaggacggaaatttgcacctgataacagttgggagttgaaacaaagatacaacacatgcagttaagcacacaactactgatgttaacaggctaatatccaagagacgggagcgctctgctatacttgacaataagtgtgcacaaagggtagctggtaattttggactagtagaactacaatgggtttaatgaagaaagcgaatttattaacaagcatggaacgcgttaccttt

SEQ ID NO: 85664 - DNA, 351 bp, Zea mays
  Clone ID: MRT4577_178135C.1
gagctcactagtttgttgtcgcccttttttttttttttttttttttagtttttattatgttttaggggaagcattgctctaccaagaaattacaaggcgacaattggttatacatctaacacgatgtttgagcctgtgaaggggcaatttcctgttaaaggcgacccatttgggggattttccatgtacaggtcgatcggggaagttaagaactgtctggcaggcttaagtgactatcaaaacgtccattttattgaaacgaggaaattagcatgaggggttctataaagggggggtaaggcactggaccaaataattttggtttgcagaggcccaggccaattttaagaa

SEQ ID NO: 85665 - DNA, 354 bp, Zea mays
  Clone ID: MRT4577_178136C.1
acgtaagctcggaattcggctcgatggctgttagtagagaagccctcgatacggacagctccgtaccctaaatatgggttcgtttggagggaaccctggttgcctccaaagtccatcaatggtccggcctagagatcagcagcaatccctatgaggcatgctagattactcccctgttagtgatgaatgtaattttaatcttgatgatgaggatgcagtacttgaggatgtaccagcacagccagctgaacgagttgcacagttattgtaataccaaataatcagctggtttattttatctgagaaagacgcgggtctgttatgactgatggcataaaaaagaaaaaacaaagg

SEQ ID NO: 85666 - DNA, 604 bp, Zea mays
  unsure (1)..(604): unsure at all n locations
  Clone ID: MRT4577_178137C.1
gggccatgggcccgcgctgcacctccataggtccggcggctgctggaacccgaggctggggctgggggccctccgggctccgacccacggccctcccgcccccacccggaccgggtgaggggcgcccgccctaaactagaggcggagcggaggccgcactcggccggccgagcaccttcaggatgctcatcaaggagtaccacatcctgctgcccatgagcctggatgagtaccaggtggcccagctctacatgatccagaaaaagagccgggaggagtccagtggtgagggcagcggcgtggagatcctggccaaccggccctacacagatgggcctggcggcagcgggcagtacacacacaaggtgtaccacgtgggctcccacatcccaggctggttccgggcactgctgcccaaggctgccctgcaggtggaagaggaatcctggaatgcttatccttacacccggacacggtacacctgcccctttgtggagaaattctccatcgaaatagagacttattacctgcctgatggcgggcagcagccaaatgtcttcaanctgagtggagctgagaggagacagcgcatcctggacaccat

SEQ ID NO: 85667 - DNA, 639 bp, Zea mays
  Clone ID: MRT4577_178138C.1
aagcctcttacatcttttagatatgcttgcttactagctcactttgctgtgctgtaccgaactacaggggtaggtaggtatgtaggtggagttacattgccgagcaagcgagcgatgccgccaagacaacacgcatcgatcgccatgcccataagcggcgacgctaatggcgacggtattagtagaagaagtagactgatgaccaacctcccgtgcggactccgcttccaccccacggacaaagagctcatgatgcactacctcatgaggaactacggctccttgccgggccccgtccccttcatctgacagtacaacatctaccatagcaaccgctgcaagctccctgcctacgcattgttctgccacaaggatcggtttttcttcaccccctgctacagatggtacaccaacggcgccccccccaaccgcgccaccggatccgcgaactggaaggccaccgcatgcgactaaggcatcctgtctgcgtccacgtccacgattactgctcgcgccagcatcgctaggcggctattggactccgctcgaacttctactcaggtacgacgcccacagcgacctttatggactggatctggccgtagccaccacctctagctatatcgcggaacactactg

SEQ ID NO: 85668 - DNA, 752 bp, Zea mays
  unsure (1)..(752): unsure at all n locations
  Clone ID: MRT4577_178139C.1
attgggttgcggcatccattccatccgcgttcctattcgcaaccgccgtcgctttcgcccggtcggcccacccaatcccgtccctatcgtcggccatcgtctctctcccatcagcacgcagctgtacccgtacgcaactgcgacaggtccacatcgcggcggcccactcacccccccagcgccccagcgactgccgactgctgttccatggcggacggcgacggcgcggcggcgacggggaagctcgcggagctccccagcggcgccgagaaggggctccccaggaggggcaaggcttcttctgggaggacattaaacaccgcacaaattccgcttgttgcgagccatccagatgtgtatgagccatgtgatgattcctttgcccttgttgatgcactactctcagacaaggcacaactcttgacactacagccaaggttatgtatggaggtagggtctggtagtggttatgtcatcacctcgcttgcaatcatgctcaggcagttaggctctggagcccagtacctagcaactgacatcaaccaacatgctgccgagacaactcaagcgacccttgaagctcatggggtgcatgcagatgtgattgttactgacatcatgtctggtcttgataaacgccttgctggtatggttgatgtggcagttgttaaaccctcttatgtgccaaccctgtggaagaagtcgatgtagaggcttgctttcgtcctgggcaggcggtttnaatggcccca

SEQ ID NO: 85669 - DNA, 386 bp, Zea mays
  Clone ID: MRT4577_17813C.1
ttttttttttttttttttttttttttttttttggtttttgtttttgtttttttctacaacaatgtgtttttaactgcttacattttcaatttttcaccccaacataattgcatcacccacggggatgttaaaattggggggcacacaattccatcgggagggattgaattttttgctaccaggagggggtggcaacacacgacacacacgaacattttcccacatacaatcaatcccaacaacacagattccatgagcaggttgagggggcggtatgggaatacaagcttcttttccctttttcctttgaaaagcagaaacctttttccatgatcttggggaacactaaaagaagggggacatcacttgccatttttgtttccact

SEQ ID NO: 85670 - DNA, 404 bp, Zea mays
  Clone ID: MRT4577_178140C.1
cccacgcgtccgcggacgcgtgggtgcgtcacccgattcgggccgggctcgggacgcgtccttaacaagggcttcaacggcctaaggccttgagtttagccgaaccatggcttcaagcactggttcatttgatgggacctgttgggggcattcctcttccgaaggtcctcaaaaaatgtgactagccatatgttttcagtataattatgaatagttataggaagcttcggctttggaatggagaacttctctcatgacagaacgaatggaaataaagggtgggcgacgaagctagaatccaaaagactttagctggacatgttgacgaagctcaagtatgataacgactgaagaaggataaagaccatacagtcataataattcttgttaaaatcatagatagt

SEQ ID NO: 85671 - DNA, 135 bp, Zea mays
  Clone ID: MRT4577_178141C.1
cccaagcgtgcgctaacggatctgagtctgagtccgtcatgtgcatcgcctgcacggctggtgcggctgccatgggtttccccaccacgccgaacctgaatctggagcactcacctcgcggacggaggctcctgc

SEQ ID NO: 85672 - DNA, 163 bp, Zea mays
  Clone ID: MRT4577_178142C.1
aacgatctcaccaccgagtgctgctacaatgatacagtggtcctacacccacaactcgggcaaggggttcagctccagcgtgatcacacgaacaacgtctcgaataccatcgtccatcccggcacttgaaagaacgagcacatcacagattcatggtatctga

SEQ ID NO: 85673 - DNA, 119 bp, Zea mays
  Clone ID: MRT4577_178143C.1
tcgctcgatgttcacggtgtaaacataagcgggccagcattaccaggaggcaggacgccctgtatatcgttgattcttgtgctaaacgtcaatctctccgcacttacattggacccgcc

SEQ ID NO: 85674 - DNA, 626 bp, Zea mays
  Clone ID: MRT4577_178144C.1
caattggtttcatgttttttgagctgatgttggatttgtatgatttacaattagtttcatgtatatgagctaattcatagatcaatagtcaaattttatattcctgattagtaatgaattctgaaaaaaacaatggactaagtataaatttatacacctgcataagtgaagcaagcacttatatcattgtcagatacaacagacctagctaatcttggaaatggtcttcagcatttggggtaacccttttatcctttggtcatttaatgtttttttatcgaaatggtcatttaatgtgttgttactttgaactgtataatttacaactggtcatttaatgtttttaaagatgatgttagatttctatgatttacaacccctttcatgtctcttaagggaatgttatatttggttttctacgcgtgcagggcgcgcatcagttactagttgatgtaatgagagctggttccatgatgcatgcaaccttcatcaacgctgctttagaactctagcattgcacctgaaaaggcagtcaaattcaagaaatggaaacataaattctccgacgagccgtgctcaactacagaaacttagcacgatgactcctacatcttcatgggcacaga

SEQ ID NO: 85675 - DNA, 344 bp, Zea mays
  unsure (1)..(344): unsure at all n locations
  Clone ID: MRT4577_178145C.1
ctcggacgccgccagtgtgaggnaatctgcanaatcgccctttcgaacggccgcccgggcaggtcaagcttttttttttttttttttttttttttttttttttttttttttggtttttttttttttttttttttttttttttttttttttttttttttttttttaaaaagttccaaaaaacctttttccctaaaaataattcctttccatttaaaggggtcattcagggaattggtcacactgccacccagggggaggggggaaactccgttactcatcgccgttaaacgagggaactagctttagggaggtaggcaggggctccattacattattactacagg

SEQ ID NO: 85676 - DNA, 846 bp, Zea mays
  Clone ID: MRT4577_178146C.1
attcggctcgaggaaactgatagtgacagtgttcctccagcgctcgaggaaaaccaggctgttgcatttgcaaccaaagctgcagagtccctaggtgattctgccatgaatgcagagcattatgagggtcctgaggaggctgatgctactgaaaaaacaatgaaagtggttgaggacattgtgaagtccctggatgaatcctccttcaaggagggagaatcaaaggagacgcaaaagaagcagccgcaggattatgatatcatgagcctaataaagcttagaagcacgtacaagaaatgtcttattgcccgaaaggaggggaagaggcctcctctcgaggaggtggatgggaacgcctgcattgaccactgaacagaacaagctgtgtcagtcacaaaattttcgtgaggatggcagctgccacgacgggattgaatagaggaatgctctggttgtgaagtgataactaaggctaccttcaaggcttaatgatcaagggttaatgaaactgtggtttcagccaaccaacctgcaattcctgtggtttttgtccatgttgattaactagtacgaatgccaagttccttgaaagttatacaaatccgttaatgttcagatggcattcagcatgctccatgtgctgcatgccaacatatcattcggcaaattggcaatgcaaactagaattgctaacgcagagtgaattttctagcctgttcgtttttttttccgtggaacctgtttccctttggatgtcatcgttgaatacaagcctttggacggcccagctcagatgctactcggcccagtttacgacggcctaactgcccaaaaaaaaaaaaaaaa

SEQ ID NO: 85677 - DNA, 265 bp, Zea mays
  Clone ID: MRT4577_178147C.1
cgcccacccaaagtggcagcagccaccacaaccggtccccagcgatgtccgcggctgcaggcgcctttgaagtggcgccgtccgtcgtggcgaccagctacacggcgtcgagctcctgggctggctcacgggaccctgccgacggcgccaggaaaaacgcgcagtctacgatgatggtctgcacctggtccatccaccaggccccgtccacttctccggcgagctcgagctcccctgcagggaagcgggccgccgcatgtcgacc

SEQ ID NO: 85678 - DNA, 1642 bp, Zea mays
  Clone ID: MRT4577_178148C.1
accctggctggttagttcaactaagatattacatgtttacagacatgctcttttccccctttttcctatttaatttacaaaatactcagatcttttagtgagtgcaatgttagctcacagtttagggtttagggttttctttttgcacataagttgtggctcatgagttaacatgtttctctcttcagcgctatctgtgttaacatgtgtggtgcacgatgcctaaatgcttgcagtgataaaaatgtgatagttctcctcttgatgacatatttgtggtttccataatatgtgtaaattaaatacaaaggtagtgatgtggcgtctctgttgctgcaattgccaagtggatgaaacagatcggtgtgagagtcatgtcaaggccacaaccaacaaaattgacggggtgacgaagggtttgagggattctgctactgcaaaagtcgagccacacgatgatgctccccctatcgatgtcgatgttctatccttggatgatctgataaaaaattgttgactttggttcaagagccttgataggtgaaggtatttatgggacattgtactatgcaactcttggtaatgtaacaaaaatgacagtaaagaaactttactgaaaatgaacccattgtcgagttcttggtcgaggttggtgttgccattgattattgatcacgggggttactaccaaacaatgatgcttacttctgatgccaagtctcattggtttcaaggatgacacatgaaaactttgttgacatgttgggggaccgtatcaagcgtaatcttcgcatagtatcctacgaattcgcgaccatgggttctctccatgatgttctacatggaagaaaagtatttcaaggtgctcgacctggcccaacgtttggttggatgcagcgagtgcaaattgttgttgacgctacaaaaggactcgatattttcatgggaaagttcatcagtccattgtccatagggataatagaacaattaatatcatcttgtttgaaggcttcaaggcaaagatagtagacttcagatatggctgtccacttgcacttgaactcacatcaagccttcggatatcatgccgcacaataataatcctttttttaaaggcgatgaggcggctaaactaaatagagtggggttaagtccctaattgccttgcctgcagttgacttgcaacattttccctgggatgtccatttcaagccccacaagctctagaagcttaaagccatccatgtctggcatgtgcacatcgctgatacaagatcaaacaagttcttgttttgactcaacatggtcaagatcacaacagtctgattcatcgttgtgactgcaaatacgaaacaatgtgtcttacaggagagcagcggagttgatgcgtacccaaggtagcggaggaggatcagccatcagggtgagcctcgtgagtaggaaggtctcggcacggcccgaccgacttcgcgacgtggaccacggcgtggagtgcgcacaacacaacatgctgacttgtacttgttttgcttaaacaataaaccatttctcaataattttcccattatactgcttatgaaatgttcattgtgcacatgatttcctgtacatcggttagtgcttattttcaaacgttagtacc

SEQ ID NO: 85679 - DNA, 1606 bp, Zea mays
  Clone ID: MRT4577_178149C.1
acgcacccaggttgtcgtcctccccaccgcaccaccaccacggccactgctgcgacgatgacgagggtgaccgtcgatgcctgtctgctgccacctgaccagtacggtcgcgtgcccgtcgacccggatccgtacgcccagctttcgtgacaccgatgcggcacccaaggagggtgcctcgcgggggacccagacctccacctcttcgtcgtcttcaatggctggtagtgatgtggcgtctctgttgctgcaattgccaagtggatgaaacagatcggtgtgagagtcatgtcaaggccacaaccaacaaaattgacggggtgacgaagggtttgagggattctgctactgcaaaagtcgagccacacgatgatgctccccctatcgatgtcgatgttctatccttggatgatctgataaaaaattgttgactttggttcaagagccttgataggtgaaggtatttatgggacattgtactatgcaactcttggtaatgtaacaaaaatgacagtaaagaaactttactgaaaatgaacccattgtcgagttcttggtcgaggttggtgttgccattgattattgatcacgggggttactaccaaacaatgatgcttacttctgatgccaagtctcattggtttcaaggatgacacatgaaaactttgttgacatgttgggggaccgtatcaagcgtaatcttcgcatagtatcctacgaattcgcgaccatgggttctctccatgatgttctacatggaagaaaagtatttcaaggtgctcgacctggcccaacgtttggttggatgcagcgagtgcaaattgttgttgacgctacaaaaggactcgatattttcatgggaaagttcatcagtccattgtccatagggataatagaacaattaatatcatcttgtttgaaggcttcaaggcaaagatagtagacttcagatatggctgtccacttgcacttgaactcacatcaagccttcggatatcatgccgcacaataataatcctttttttaaaggcgatgaggcggctaaactaaatagagtggggttaagtccctaattgccttgcctgcagttgacttgcaacattttccctgggatgtccatttcaagccccacaagctctagaagcttaaagccatccatgtctggcatgtgcacatcgctgatacaagatcaaacaagttcttgttttgactcaacatggtcaagatcacaacagtctgattcatcgttgtgactgcaaatacgaaacaatgtgtcttacaggtgcaacaggagagcaagcaaagcacaagcaaaagtgcaaaattgtccgaagtccaagtagaggagagcagcggagttgatgcgtacccaaggtagcggaggaggatcagccatcagggtgagcctcgtgagtaggaaggtctcggcacggcccgaccgacttcgcgacgtggaccacggcgtggagtgcgcacaacacaacatgctgacttgtacttgttttgcttaaacaataaaccatttctcaataattttcccattatactgcttatgaaatgttcattgtgcacatgatttcctgtacatcggttagtgcttattttc

SEQ ID NO: 85680 - DNA, 493 bp, Zea mays
  Clone ID: MRT4577_17814C.1
ggcttggccttggccttggccttggggtcgggcgaccccgcatggaagacctacgtcaaggacggcctcgccaaggcagacagcaaggcgggtgctcctgccagcaaaggaaaggcagcggcggctcctaacaaggagggaacccagaagaaagatgctgctggtgccggccggcccaggaagggcgtggccaggaaggccaggaacgaatctgcctgccttgctggtggcgagacacacccctcaattacgcctatagatagacctctttcatggatgtagatccaaccgaaagattgtcaggagctatagatagatcggtagctagatcctgcgtgacggtgggagcgtaggtccctgcctaaacatgcgatagataatcgagcgcgatcggcgggcatgctcctccaggctctatgaacaagcaaatctatctcaagatttagctatccccacagaaaaaaaaaaaaaagcgggcctccagctacagcta

SEQ ID NO: 85681 - DNA, 376 bp, Zea mays
  Clone ID: MRT4577_178150C.1
catacgctgcagactcaccagagcgacaggaatagtaggctaaaatcttattgattttcagcgaggaactagccaagaaagaaggatggctcccatatgaaaaatcgtcgaataccccattcatctttttcgtccggctttcacaacatgcggcagattagccacgacggtggcgatcgagaaccataaccagagccaggccgccgtggcgttggcggtagaggcggtgccggtgccggtgtcgcgtatccccagggaggcgccggcgcctgctgtaccatcatggtgttggtgtggacggacctcgcccactggcgcgtgctggaggccgtgcctctcaaggtggccatgaccaacgaggtctaccatgcgcgct

SEQ ID NO: 85682 - DNA, 274 bp, Zea mays
  Clone ID: MRT4577_178151C.1
cacattcttggcgtgcaggtccacggcggcgctacttgtgcaaacctatccatccaggcgtctgctctgttcgtgcacgggagttccatggtgcaacaaacggctggctgcagccgagccacaggaacaggaagagttcggtggtcaacatcctgtcgttgattagcgcagtgagtccatggatctgctcccgaaatgcacgacgaacgccagatacagactaggatgagtggatgacggcaaccagggccgccgaatttgtcacttgattttt

SEQ ID NO: 85683 - DNA, 764 bp, Zea mays
  Clone ID: MRT4577_178152C.1
gccggccggtccggggaaaaaaaattctctcatttcccatggctgcagcagcaccttcttccatgccgtgctcctccagccgtgcgcccccatctccctcctcggccaccactccaaagccgcctctgtacagccccgctcgacgctctccacgacgagctttctcccacacgcccatgcctctgcttccctccacgggcgcacaagcgagcaggcgccttggacccgagcctgagttcccccaaccgatcctcttctttccagcttggccatgccaggccctaggttgcgcgccgagatccttgccggcgcttagccccgacacacgcagctcctccgaccgacacgagcttctaggcatgtccttctctgcattttggctgagcccagcccaatgttgggtccgccagcgacgatcgttgtagagcgccactcgacctcctccacgcgcgagcagcagcggccacagaccttctatgtgttgcacgttccgcctcgttgagctcggcccaagccgatgccttggcatgcacaatagctgtgggatctccacattgcgtgctccacctcgatctacacagccctggccatgacattgtcaaaccccggtgaggctcctcgctatcccacgctcctcgattagactatttgaccaaatctgtaactgtgtatgtcgttgctcgcaaccccttgatgatgttgtggctcgagccgatggataacatgcgcgaaccaagtgtggccagttgtttgatgtgaggact

SEQ ID NO: 85684 - DNA, 160 bp, Zea mays
  Clone ID: MRT4577_178153C.1
ggcagggagctctctcattcgcatcccaggccaacctcaaccccaatccaatccggtgcaggtcgcaggatggctccgcgtgagcactaccagccccatgaggagtaggagtaggacaccgcatgcgtcgtcaagctcatcagcgccgatggcttcgaat

SEQ ID NO: 85685 - DNA, 298 bp, Zea mays
  Clone ID: MRT4577_178154C.1
ggggtccgacagggggcctggtcctcggtgcacacacctattccccacaagcatacaacacaatgtgtgcctgaagagccgtctaagcacatcccacatcctgcagaagaaattcactaaccttggcgtctcatggggcctacggacccgctatggccgaagaatatgaactacgggctggggagcagcggggcgcctttcgaggcccccaagtggccgacgggcctactcgaggagtgcaaacatgtgcgcggctgccgccccatgcagttctaccatcgggcccgacccttcggtg

SEQ ID NO: 85686 - DNA, 215 bp, Zea mays
  Clone ID: MRT4577_178155C.1
acggacgcgtccaccctctctcgcttaccaaagagcttccactacacaatcctcccaccatctctcaatgtgctggctcccgaccttggcgcagcatacccacaccatatacagatccactattcaaaaaaactactacctcaccaccatcgaccttaattcattcctatttcgcaccaacagttaccaaaacatacatcactggatctcataca

SEQ ID NO: 85687 - DNA, 275 bp, Zea mays
  Clone ID: MRT4577_178156C.1
agcacgcatccatcgttgcgacccttgttgggattgcggtgacacactgtcgttgtactgatacagagaattagcagatataccattaggcacaatggtcgatatgtatatgctatgggccttcatgaccacacagatggttatgtgggggactgccaatggtagaaactggggcggtgctaacaacagcccgtgtcgtgtgaaaacgatccctcgcccaagtcctgaaaagaagaggtaccttacacattatgtcatgcaaccgatgggtggac

SEQ ID NO: 85688 - DNA, 818 bp, Zea mays
  Clone ID: MRT4577_178157C.1
tctttagaacttcgagctcttgaaggtttgtccttactggtttgtattatcagtttgaaggtaattttcttgggtggattactgaaatttttattggagttactatctgttgtttggaactctagatagcagctatgcaaaaaacaactttgatagtgaagtagtgaacaacctttttatgtttgaattgccacaaatttagtgaaacctaacattatcgttgaggcagtttttttttatgttatatgatcagtccaatggaatgcacaaggagcagctaggtaaagtagcaaatatcttatggaaataactgatcattatgcacgttgactcaaaaccttcctatgatataccttgtaaacttttattgttttcctctaagaattgattagagttgtatactcattggcctagatgctcatttgaaactgccagctataacttacaatatccaatacttgccttttcttacatgtatttttcttacatgtcttcattgaagtagccttcctaactgatgtgtcactcttcatcaacaagattttgaatgcttttgtaacttgtttcaaaccatgcttgttcctttgatagccattagtcaagatgtatccttaatgggagtgaatagacccactcatcttataacctactctttggaggcagagcgctccagtattatcgcggagctgaagcaattgagtgataatattttactgttgatggagataaaatttcaagatatttcatcggttcgtatcgatttcaggttgtaatggaagttgtttttaatctacgcaattttcactgttaaggtgttg

SEQ ID NO: 85689 - DNA, 477 bp, Zea mays
  unsure (1)..(477): unsure at all n locations
  Clone ID: MRT4577_178158C.1
agcagtggtaacaacgcagagtacttttttttttttttttttttttttttttttccacgncatcattatcatcatctttcttgcccttaaacttgttcttcttgagcttgttgcattaatgagcaagatgaccaagctctccacaattgtagcagtccattttagagatggctttcttttactggagaaaaacttctttcttgagtcaaacctaatgccttctctattgagctttttcaacattttgatggtctttctcaccatcaaattaatgttggcatcaagatcatcatcacttgaggattccttctcaatttgaactttagcttccctttcttttcttgattggcttttagagccaagtattttctcttggaagacgactcatccttgtcatttatgtgcatgcacattccatgagcatttatctttcccaatatttgngtaggagtagcaactgaaagattcatctgatgt

SEQ ID NO: 85690 - DNA, 391 bp, Zea mays
  Clone ID: MRT4577_178159C.1
acctcagctaagcttccgcccccaactcttccgtccatccaaaagacgtacggcacgtgcaagttcgaagaaggaaagcatcgaatcaatggcgggcgtgagccggagcatggtggcgccgctgctggtgctgaacctggtgatgtacatcgtcgtcatcggcctcgccagctggaacctcaaccacttcatcaacggcaccaccaactacgccggcgtggccggcaacggcgccaccttctacttcctcctcttcgccatcctcgccggcgtggtgggcgccgcctccaagctcgccggcgtgcaccacgtcaggacctggcgcggggacagcctcgccaccagcgcctcctccgcgctcgtcgcctgggccatcacggcgctcgccttc

SEQ ID NO: 85691 - DNA, 272 bp, Zea mays
  Clone ID: MRT4577_17815C.1
gcttcccgcaacgagcatcagaaagagaagagggatagagagagcagagagcagcaagcatggaaatgggcgaaagttcgagtactactgggagatgcagcattacctggagtcagaggagctcagcctctacatgggcacccaggacgatgccctgtcctgctacgactccagctcgccggaaatgctcttctccaactcgtcctgggcgccggcgggcgtggcggccacggcgtccgagaagcgtgagggccccggcggcgcggcggccg

SEQ ID NO: 85692 - DNA, 460 bp, Zea mays
  unsure (1)..(460): unsure at all n locations
  Clone ID: MRT4577_178160C.1
gcggggggagcttttttatttttttttttttttttttccccctccttattttgtttctgtttaatcccacctcccttgttctgaagggtacctctctgancccgcgtccttactttgtcctcatatcncacataggggggggggggggactctctcttcaacccacacttcttaactctttttaaatttttcatanccatcccttttcttagggctccctccagancacccatccttactgttttctaagtgtccaggcgtcttggcttcttgcgctctgaccgatatcttggggggggggatcgcactgtttctttttatttgtttnccccgagttcggttcactttctttgcgtttaacctgcggtgaatggaacaggtggctcatacgttgctggggtttaggtgcgtgtttttgtagcatatagtgnctcctgttaagagtcctctaaaagtgagg

SEQ ID NO: 85693 - DNA, 295 bp, Zea mays
  Clone ID: MRT4577_178161C.1
ccaacatggtgttcaggcgcttcgtggaggttggccgggtggcctatgtctcctttggacctcatgccggaaaattggtcgcgattgtagatgttattgatcagaacagggctttggtcgatggaccttgcactcaagtgaggagacaggccatgcctttcaagtgcatgcagctcactgatttcatcctcaagtttccgcacagtgcccaccagaagtatgtccgacaagcctggcagaaggcagacatcaatacaacatgggcagccacacgatgggccaagaagattgaagc

SEQ ID NO: 85694 - DNA, 283 bp, Zea mays
  Clone ID: MRT4577_178162C.1
gaggctggccggggcatcttgccgtgtagccttcttgtacagcttggactggactagactggaggtggagtggagcttttccttctcaaaatccaaataccacatccccccattaatttaaggggtttttatgtccaccgccgccgccagcgccaactaaacccgcgacgacggtcgaccatggcgtcctcgctgctctcctcccccgctaaacccaccatcaccaccgccaccaaaactaccccggtcccaagacttgtccgcttcgcccatgcccatgtcc

SEQ ID NO: 85695 - DNA, 239 bp, Zea mays
  Clone ID: MRT4577_178163C.1
gaaaaaaaaaaaaaaaaaaaaaataagaaataaaaaaaaaaaaaaaaaaaaaaagggaaaagggcaaccggcgtacgggatccaggatcccatcctccttcctcctacatgctacctcttatatattgtatcctgaaaccaatttacagtccactggccgacatcttacaacactggtaactccctaaacctctcccatctccaatcttattcgcctcataccacatttccccttttgc

SEQ ID NO: 85696 - DNA, 3009 bp, Zea mays
  Clone ID: MRT4577_178164C.1
atggagtctgaatcactcgattttgaagacaatggagaccaccaaccttcatcagaagcttctcttgcttcagatgtggtatatgatgactcgcttgtatgtccatgcattggaagtgagcaccaggcagaaatccccaatcttgctacagaggatgagtgccgtaagctcatggccagttcacataatgattccatattccatggctatggttaccctgttgtggttgggttagctttaccaattacgtgggcatcaccaagcgaagttgataagacggaagaggtactacaaacgcaaaaatgttcagaatttggaacaaaaggcagcactggagatgtgcacagtcaggtgacctcaacttgtgcaactagcaatgacactggcatatgtgctgcaacattccagtatccacatacagtagtgcctgtagttcaaattaaatctgacagtaatcaagcatacgatgaaaaaatggtcccttgccccactcaagaaggacagaatgttaccaataattcaataatgcagcagagagaaaccaaacaattaagtcctctaccttattcacccgttgctctttggagtgatcttgaggcagaggtatttctccttgggctctacatttttggcaagaatctcaacctgctgagcaggtttctgggtacaaagactgttggtgatgtgcttgcatactactatgggaagttctacagaagagatacatacaaaagatggtcggactgtagaaaggcaaaaactaggaaatgcattcttggggaacgcatttttcaaggatggcgacagcaggagctaatttcacgtctgaaatctaaaatccctaaagaagctcatgattctttaattgaggttttcaaatctttcagtgatagccaaacatctttgaatgaatttgtcttcagtctgaaatccactgtcggagcagaaacttttgtggaggtggttggggttggtaaagggaagcacgatttgactggattcgttacggaccaatctaaacctaatcatgctctctctgttcatagtgacttgcctacaggtaaagactgttcttcacttgcttcagaagatataatcaagttcttaaatggcgatttcagaagaagtaagactagatcaaatgatattttctgggaagctgtatggccccgtttgcttgcaaaagggtggcactcagagcagcccaaggatgttagcacaactaagagttgccttgtatttcttgtgccgggtataaagaagttctcgagaagtaaactcaccaaaggtactcattattttgattctgtcagtgatgtccttaaaagagtggcagcagatcctgttcttcttgagttaaaggtagatgcgataaacaatggtttaactgctgaggaaaatggcagtatcacagatgtgaaactgaaccaggatagtccgttagatggatatcaggagcttcctaagttcacaataatcgatactagcttagtcgaaggggaagagccattcaatatacgggaactgagaaacttacctgcagatgcaaatattacttttctcctttcacaacattcatctaatatggtgagttacagctcctctgaagaggaagctgccaatgatagattatcagatgaccaggaagattgtggacgagttaaagctgaggccaaggaaattgaaatggtttcagctggttcattgcaaaacatggttactgctaatggccactcttctaatgtcaatgataaaattgatctgacaggcatctatggcatcaaaacaaaacctgaaaggcgcaagtatttgtccccagtgtcaaagcgcagaagattaaatagctgtagtaatgaacaggccagccggcgcagtttttctttctcaaaaggtggtggttttgagaaacagaaaagcaagccaccgttgatttcatccaaaccagctgctgttgaagttggcgacacttttcagagtaaaacaatttcaagctgttctacaaaggagaagccatctgagcacacagcagatgcattgaactcccttatcgatgatgagcaaaatgcgagaatggttatggaggttgaagcagtggctgaagttcactcaaaggtcattgccgttcagccaaaatttgtcaaagaaagagctgagtttattggtccagttgatttgaataagctggaaacgctacatgatgataaggcaagtcgaagcattgacaccacatcattgggaaatcttggtagcatgaaggttgatgaagctccctccagttcagacaagaacatggcctgtgatccttcaggggcagcaggaagacctgttagcgaggcacctgatcctgctttgcaggtgaatgctcggaggcacggaaccagaaacaggcctcccaccgcaaaagctttagaagctgtcgcttttggacttcttggaagcgggaagcggaagggtgacctgaaaaacagggcgacaagccggccttctcagcgagctcgcaaatctgccaaagacttggttcccgtggcttctagtggtgacgcaaaggcgtcctgcatagatgcagaagaacagcgatgagcagatttctgtggtgacatatgctgacaatcaacggcaccatgacaatgtgcggatgatgaatatcaagcaactacatgaggcctggagctaagctgtccaaagctggtggttaccttaccattgtctaatgcctaccattcaggaggtcctgaaggtgacaatggttttacagggtgcatggtccccgttcgtgcggaggaacccatccttagtttttttagtcaacagtcttgtgtctgtcaaggcttgcaaaaccaacttgtaccggagagagggagggaaatcgccaaattggcgaattaagttatgcgataccgggattaatgtttttgtacattggtctatcgactttccatgggtgaattcatctatgagcttcttttgcagggaaaaaaaaaaaaaaaaagaaaaaaaaaaaaaaaaaaa

SEQ ID NO: 85697 - DNA, 1875 bp, Zea mays
  Clone ID: MRT4577_178165C.1
caacaatgtttgctgttatgaaagacacagactatgcggccaagccaacattcattgataactttttcactgattggagaaaagttcttggtaaaaatcatattattaagaacttcgagctttgtgatttcacaccaatatatgaatggcacctcagagagaaggagaggaagaagcagatgacaacagaggagaaaaaaaaatagcgggaagaaacatagaaacaaggggagaagtacatgctgggctgttgtagatgatgttaaagaaaacgtctgaagtttcaaaggagaagcacctcgcttgttcaggggacgtggagaacatccaaagatggggaaacttaagcgccgcattctaccaagtgatattacaataaatattggaaaaggagctccagtccctgagtgcccgatacctggagaaagttggaaagaagtcaaacatgacaatactgttacatggttggccttttggaacgatccaattaacccaaaggatttcaagtatgttttcctggcagcaagcagctcactgaaggggcaaagtgacaaagagaagtatgagaagtccagaaaattgaagggtcatatacaaagaattcgtgagaattatacaaaagatttcaaaaacaaagatgtgacgaggaggcaaatagctgtggcaacataccttatcgataaactagcccttagggctggcaatgaaaaggacgacgatgaagctgatactgttggttgctgtacgctgaaggttgataatgttacatgtatgcctccaaatcagattcagtttgactttctgggtaaagattcaataagatactttaacaccgtagaggttgaagagcttgtgtacaaggcaattgagggtttccgtgctggaaagaagccaggacaagatctatttgacaagattgatacatctaggctaaatgctcacttgaaggatctaatgcctgggctcactgcaaaagtgttccgtacatataatgcttccataacattggacggaatcttgcatgaagaaacagaagatggaactgttttagaaaaaatcgctgtctatcagcgggcaaacaaagaggttgccatcatctgtaaccatcagcgtagtgtctcgaaatcacatgagtcccagatgactagaatgaacgaaaagattgatgagttgaagtcccagatggaggagctgaaagcagacttgaacaaagcaaagaaagggaagcctctaggctatgattcagaggggaagccaaagaggaacttggctcctgaagcgattcaaaagaaggttgcaacacttgaaggcaagatagagaagatggagatggataagaggataaaagaggatctgaagacagttgcgcttggaacgtcaaagatcaactatcttgatcctagaataaccgtggcatggtgcaaacgccatgaagtccctattgagaagattttcaacaaatctctcctcgcgaaatttgtatgggcaatggacgttgacccggaattcagattctaggagaccattggctaccatgtgccagccagtttggtccagtttccagcccttctccctggacactaattgcagctaggaaaggaaagagctcggtgtttgttttttcaaagcccccaccccccctgctcgtggaacgaaggaaagcacccgtcattctctttgtaggcccttcttttttttttcttttggttcaattgcgctaagttcaatatgtattctgctgagaaatctgagctcgtttgagaacggttggacattgaattcatagtgagttttaatcttgaatatagatgacttgttgagggatgaaaaaaaaaaagggcgccgctcgcgcccacgcgtccgcggacgcgtggg

SEQ ID NO: 85698 - DNA, 1781 bp, Zea mays
  Clone ID: MRT4577_178166C.1
agggtttttcccgtcccgacggtttaaaacgccggccccttcattttattttggggcccctttaaaaaagctattacgttgcaagcccggggacgttagctttggtcctttaaggcggccccccctttttttttttttttttttttttttttttttttttatttttcccccttttttttttttttttttttattttttttttttttttttttttttttttttttttttttttttccctcaacaagtcatctatattcaagattaaaactcactatgaattcaatgtccaaccgttctcaaacgagctcagatttctcagcagaatacatattgaacttagcgcaattgaaccaaaagaaaaaaaagaagggcctacaaagagaatgacgggtgctttccttcgttccacgagcaggggggtgggggctttgaaaaaacaaacaccgagctctttcctttcctagctgcaattagtgtccagggagaagggctggaaactggaccaaactggctggcacatggtagccaatgcctctcctagaatctgaattccgggtcaacgtccattgcccatacaaatttcgcgaggagagatttgttgaaaatcttctcaatagggacttcatggcgtttgcaccatgccacggttattctaggatcaaggtagttgatctttgacgttccaagcgcaactgtcttcagatcctcttttatcctcttatccatctccatcttctctatcttgccttcaagtgttgcaaccttcttttgaatcctgcaagtaggttttgtcaggttgcctaccctactctttgttctaacacacaaaaccaaaatacaacaaaatgtattattggtggttgagatgtgttacgcttcaggagccaagttcctctttggcttcccctctgaatcatagcctagaggcttccctttctttgctttgttcaagtctgctttcagctcctccatctgggacttcaactcatcaatcttttcgttcattctagtcatctgggactcatgtgattcgagacactacgctgatggttacagatgatggcaacctctttgtttgcccgctgatagacagcgattttttctaaaacagttccatcttctgtttcttcatgcaactgtaatatcagcacaagtatatatacacttagaccattctaacaggatagtcacatgaacatgcgtaataagtcaatagcatgcttacatgctatcagaaagtaaaaaatcagaggtgcaaaaaatgaagatatgacaaactgtgtaacattgaccaattacttatttgcattaagttgagctgtagaacaagtaacatttataaacattaaaataccagaagaaaacaatacatctacatcaacagctctaagtgtccatgcaaacctaagaagttcgaaagaatggacaaatgaaacccagtaagacaagattcttttcaactcacgattccgtccaatgttatggaagcattatatgtacggaacacttttgcagtgagcccaggcattagatccttcaagtgagcatttagcctagatgtatcaatcttgtcaaatagatcttgtcctggcttctttccagcacggaaaccctcaattgccttgtacacaagctcttcaacctctacggtgttaaagtatcttattgaatctttacccagaaagtcaaactgaatctgatttggaggcatacatgtaacattatcaaccttcagcgtacagcaaccaacagtatcagcttcatcgtcgtccttaaaattg

SEQ ID NO: 85699 - DNA, 272 bp, Zea mays
  Clone ID: MRT4577_178167C.1
ggagagagcctctcgctaagcattagcattcactgttaccccagtaaaggtctgtttgtgaacaaatggaagggaggagattcaagagttataatttcttactatttaaaaatatataataagagattttagaccaatcaatctcctaaatgtcggacgaacgagcgcggcggccattggtttcacttgcaggcttgcagctgcttgcttttatcagagctcggtgtgcaagacggcgtcgtccttcccctggttcctcgtcgtcgtcgtcg

SEQ ID NO: 85700 - DNA, 374 bp, Zea mays
  Clone ID: MRT4577_178168C.1
gtggaggtaagaaaaattaccgtattacttaaagttttccagtaaccccgataacatggaaccgaccgactatcacgaggtccaaaaaaaataaccacctcaaaagtaccagcccaccacaaataaagtttaagcggacacaccgtaccgacctgacgacgataactcgcggtagcgactgggccaaccagtaactggtgaatgcttaaaaatgtcaacaaacccgtttagtccaccttccttaattttggggccagggcctgctttgtcaacgggggcattcttttacattccgtcagcgccttccatttttttaccacaccccttggaaatatttgggaaaatgggggtgtaaaagcttttcaactttttta

SEQ ID NO: 85701 - DNA, 806 bp, Zea mays
  unsure (1)..(806): unsure at all n locations
  Clone ID: MRT4577_178169C.1
ccgataatgttattagtnttctaaagttaggaagctcgaaagaaatttttaaaaagccggccctccgtttgatcgttctgtcgccgtcccctcctcttctgtcctaacccaactacaacagccagtcaacacaatttcccccacaacttgtgtggacccagacgagagtggaaggcacgagcgacatcatgagttccggaaggtatgcgtcccacggttgtatccgtagtaggagaggtaccacctgacgaacttcttcaaccccatctccaggctcgtcgtgggcttgtagccgagctgctcccgggccaggctgatgtttgcgtgcgtgtagggcacgtcgccattgccgggcatctccaccacgttcttcttggccttcacccgcaggtacctctccaggatggacaccagcgtgggcaccgtgacgggcgacgtgttccccaggttgaagatccggtacggcgccgggccgcgcttcttgccgccggtgccggtgctccggcccgccgtgtccagcgacgccaggcagccgcgcacgatgtcgtcgatgtaggtgaagtcccgggcgaggtcgacgcggtccctgcccctgtacaccgtgatgggcttcccctggaggatgttgcgggtgaaggagaagtaggccatgtcggggcgcccccacggcccgtacacggtgaagaagcggaggccggtgacggagaggccccagatgtggttgtaggtgtgggtgatctcctcgccggccttcttggtggcggcgtacagcggcgcaggccggtcggtgcggtgcgcctccgaga

SEQ ID NO: 85702 - DNA, 433 bp, Zea mays
  Clone ID: MRT4577_17816C.1
tgacattgggctcactgacttctctgcttgttttttcaagttcattattgaagctcttcaacgtgaatttgccgtgttggtcctggcttacatacatcactttctgggaatttctgggacgcactctgcatatggcctgttcctttctcagcggcagttcattcaggatgttttggcagcgcaccgtgatgagtgcgtgcaagccgtgcattacgcctgttgatctacactccaaactatttgctgttggaccacatgttgctgacgctacacagtttctgatcctagctggcgccctgctgatatttgaccttcacccgaccagacatcgattttgcagttcagacagatatgcctctacatgcatggtccactggtaccacacctcgctactattcagcgaatcatgctttacttgcagggcacactagca

SEQ ID NO: 85703 - DNA, 258 bp, Zea mays
  Clone ID: MRT4577_178170C.1
ggtgctgctcatgctcggtatgcactgatcatatactgttcaagttaagcgcacaatgaattcatgggagggtaacgattaaaagagcgatgctactctttttcgaggctgaagagtgcatttgaaattacatgaattaatattgcttcgagacttgagacatgaccggatggtgaacaacgttctggtatgtgagagctcaccagcctttatatgtggaccgttgggaattattgaaacctgacttgcatttggtga

SEQ ID NO: 85704 - DNA, 216 bp, Zea mays
  Clone ID: MRT4577_178171C.1
ggagtctctcgccggtctccctctcccgctctcgccttctcttcgtcccgccgcgagatcgcgcccagtgtgggccctagatcccgatggcctcgcgccgcgaccctgtaaggcatatcctcgggaagtggggttgggaaaacttcttgagaaccaaatgtgaacaagaagttagcaatcagacaaggcggtgggggggggggattttctcaccaa

SEQ ID NO: 85705 - DNA, 199 bp, Zea mays
  Clone ID: MRT4577_178172C.1
agcccccattcttcacggctacggtgcattccgtgtcctgtcctgtcctgatggaagcagcaatggctgccacgtcctccctactccttgcctccggctccaggaggtggccagcaaccttgcctccttccccctggccccagcagcagcgtctggttttctgcctcgctgcaagaacgaggccgctgcacagcaagag

SEQ ID NO: 85706 - DNA, 105 bp, Zea mays
  Clone ID: MRT4577_178173C.1
gccatgaaggccgagttcaacatcacgcttatccaccccaaggacctgacagtcctgtccaacatgcttcccaaaggtcccagcaccccacttccagaagacccc

SEQ ID NO: 85707 - DNA, 540 bp, Zea mays
  Clone ID: MRT4577_178174C.1
atggagctcgcggcccggacctccagccaccgcgcctcccatcgacgaccgtcaagcgccacattgggcgctcctccccaaccctgccgtccgcggactccgatgacaagggacccctgcacgaccatggatctcccccctgaccaccgttcttggatgcttgacatcactttgcctcacttgtttggaggttggcatgtggtggacaggcgacgagcgttctttggtagccgctctgaggaagctcgcgcagaggtcggaaagggtgaagtctgtggatctgcatacgacatagctatggggaaacaatggatggatagatcatcaaggttcatgtcttcagctctgaatcttggtatgaaacgtctaggaaagtggcagcaagattataatgatgtagcatatcttggtgaatccccgagtgaagcaagtgacttcatcgagctagcgcagctaccaggtggtgaaaacacatgtcgtaagatttttttagatgagcaggcaaaaatgcctaggaagcatttcaggtgcgaaggctga

SEQ ID NO: 85708 - DNA, 452 bp, Zea mays
  Clone ID: MRT4577_178175C.1
gcgtccacgcgttcgtccacgcgttcgtccacgcgttcgagtgattatttgcacctactgtgctgtgtactcggatcaggaaacaatgaatagtttgtccaccagcttcgtgagaatttctaattcgctctggtcccatatgtgccatgaccacgtttttatatacaagtaaagcttcggtgtgtcttttctaagttagcatcttaattacatcaagtacctacaaatgaagctcatagagaccatttccctaccggtcatgttttgctttgcggttaatgactgccctaatagataattagatatgcagtcagatttgggactgaaagtgaaggtcgtgtttgaccaacagaagctgttaaactccagaaataaacaagccgcaaggttgcacgtgttcgagctaccatactatggttttgagcgcgttttcacaatagtttgatctaaat

SEQ ID NO: 85709 - DNA, 1465 bp, Zea mays
  Clone ID: MRT4577_178176C.1
actccatagggcgattggtgaggtcaaggcgcacctgggaacccgccaccaccggatccacacgacaacgccgccttctcctcccccacctccccttccccctctcgcaagccgaagccggaccaaatacacgctcccgtctcatccgatggctcctctcctttccccgccgctgctcgcggacagcgtcaccaagttccatgcggcctcaacgccagtctcgtgctccggtagcccacaacgctacgtcatcacagggttggctggggccggaaggggagagcacgactggcgtcggaggacgtggggaagaacgaacctgagggtgaaagcggtggcggcagagtcccgcagctcggaggggggaatcgctgaagattattacgctgttcttggcgttatgccagatgcaacgccgaagcagatcaagaaagcatactacaactgcatgaaatcgtgccatcctgatctcagtgggaatgaccctgacgtgacaaatttctgcatgttcatcaatgaagtttacacggtgcttaccgatcccatccagcgagcagtgtatgatgagatacatgggtatgccgcgacggcaaccaatcctttcttggatggcagcgcaccccgggatcacgtgtttgttgatgagttcagctgcataggatgcaagaactgtgctaacgtgtgttctaaggtcttcgaaatcgaggaagatttcgggcgggcaagagtttatgaccaatcaggcagcacagaactgattcaagaagctattgatagttgcccagttgactgcattcactggacttcagctgcgcaactgtcgctccttgaggatgaaatgcgcagagtggagagagtaaatgttggattaatgcttgctgggatgggaggctcaattgatgtgtttcggatggcaagttcacgctgggagaaaagacaagccaaagtcctggagaaggtcagaaggcggatgagccaagatgattccagaaagggtggctcatggagtgacatctggggggcaccaacaagatacgagaagaacgaagaggaggtgaaggagagagcaaagcgagccgcggctgcagcaaggaggtggcgggagtactcacggaaaggcgccgacaagcctccaacattcaagcttccggaggcagtgcccagcaaggagtgagaacccaacacagtcagagatcgtatggaacactgcagagatacttagcccccccattcacttcgtgtatagcctgatcatttacagagagccgtaagcctgtatagtatctgctctctgactccacatggtatacctgtaaatcctctgttagtgatagctcgggtcgattacccatagagtttctcagattgcagacgcaaaacaagtgtacacagaaagccttaatccatagaacacgggcacatacttttacaggatggcattatgtcaaatgagtcggttgtcttt

SEQ ID NO: 85710 - DNA, 1153 bp, Zea mays
  Clone ID: MRT4577_178177C.1
tgatagctaaaacattagttgaaattaggggcgtgtctgaatacatatagctagttactagttgggctagaaatcaacctaaattagtaatggttggttgcctatttgcttaacagttagttaagatttgataaaaaaatcaactcaatcgatagccatcttgtttggatggatgtactagagctgatttttagatagctagcaattagctttgagattcaaattattagataaagatttagcaactaactattagcaattagccttgagattcaaattattagctaaagatttagcaactggctgttagttgtacggacatgtcgatgttggatcgttccgattaaagttggaggaagcaaacttttttttttttttttcggcagcaaggtggtggatattagcaaacggcagagaaaaatcgcgggagaggagtggccgagaaaaatcaaacaaacacggaaacacctggcgccaagaaaacgggcaggaaaacagagacagagcagggcgaaccccactggatcctcaccgccttctcctcctcttcctctcctccctctctctctcgccggagccagatcaaatacgcgctgccgtcgcatccgatggctcctctcctttccccaccgctgctcgcggacaccgtcaccatcacagggttggctggggccggaagaagagaccggggctggcgtcggagggcgtggggaagaacgagctcgagggtgaaagcggtggcggcggagtcccgcagctcagcggggggaatcgccgaagattattacgctgttcttggcgttatacgtgttccaaggccgaagcagatcaagaaagcatactacaattgcatgaaatcatgccatcctgatctcagtgggaacgaccctgacgtgacaaatttctgcatgttcatcaatgaagtgtacacggtgcttaccgatcccatccaacgagcagtgtacgatgagatacatgggtatgccgcgaccgcgaccaatcctttcttggatgacagtgcgccccgggatcacgtgtttgttgacgagtttagctgcatagggtgcaagaactgtgctaacgtgtgttctaaggtcttccaaatcgaggaagatttcggacgggcaagagtttacgaccaatcaggcagcac

SEQ ID NO: 85711 - DNA, 295 bp, Zea mays
  Clone ID: MRT4577_178178C.1
tctattcgaagccggatcccgcggagcggcgggcacctcgacaaacggagtacggcggcaaaacgctccagtgcatcttcaccacgtccaccgctgggctggatctatcggaaccggagtcgggccggcaccgcttgcctccggactcgtgggatcctgtctgtaacatccaagatagctacgccctcggccaaccttgcaaagccgtacaagcgggcgtgtcactaaccgacgaccagttccaaatttacagcattggcgttacgttcatgccaagcacaaaaaaggagatggc

SEQ ID NO: 85712 - DNA, 329 bp, Zea mays
  Clone ID: MRT4577_178179C.1
acgcgcgcgctcttgcgtttctggcgtggcgtctctgagtgggtgtcttcaaccccggcaccggcaggcggcggcgtgatggcggactgggaggggatcccgccaagaaagcggcggcagatggaggagatcctgcagctcgacataaaggagctcaacgtggaggtcgtcgacgacaaccaagaagacgaggaggaagaggcggaagactataccgaagaggaccacgaacgtcatgccttgctcagagaattcatcgaagatggaggagacagcacatcttgaccactaacactcaaccagcctgtagctgaagtacacacatacct

SEQ ID NO: 85713 - DNA, 154 bp, Zea mays
  Clone ID: MRT4577_17817C.1
attcggctcgaggggcccgagcaaggttttttccattccgccccctaggatcaagaagggcgttttttaggggctgtttgcctacaacagaaggaatacgggaaaggttgtcccggcttaccgctgcttatgacccggacctgcctgggggacc

SEQ ID NO: 85714 - DNA, 176 bp, Zea mays
  Clone ID: MRT4577_178180C.1
gagcctactagtcggcggccgccctctggccttggtgtttgttctatatttcatttttctgttcattccttaatcatgggaggaggcaaacaaagtggcgggcggccaaagttacattggacccggttaagaatgccacagcctaggggggcccgacccttaaagagcagaaccca

SEQ ID NO: 85715 - DNA, 247 bp, Zea mays
  Clone ID: MRT4577_178181C.1
cggttattgaagctggcgcaaatgccattgtcgcaggttctgcagtttttgcggtgtccagactaacactgcagctatcaaaggaatacagaccagccaaagacctctagctgtagccgcataaggcgctggacgtgtaatcatttactctgtgcaagtttaccagtgatgcgatctgtatagttgtgtgtcttgtccaaccatacgtataccgagatgaaaagagacggaggcagtgaagaactat

SEQ ID NO: 85716 - DNA, 268 bp, Zea mays
  Clone ID: MRT4577_178182C.1
aatcttcggtgtttttttattccgaatgcatatccgaaccaatttcacattccttggttcggatatgcattcggaaccaaggaatgtgaaattggtttccgctttttgaggatctatgtagcataatggataagtcggtgtttcgtaccctatttagggatgcttgaagcaagaaacatcttcatgggttgtaaaataaaagaaaaattctctttattatatttgatcaattcttttgccttaaaacgtataataagttctatactgg

SEQ ID NO: 85717 - DNA, 262 bp, Zea mays
  unsure (1)..(262): unsure at all n locations
  Clone ID: MRT4577_178183C.1
cccttttccggtttttagngcnccccgcgagcgccccctggggcgaggggggggaaacgaaaaaaggaccaccgcccccctacgcgagacgcccagggcgtcgccaacgaccagcagccgggggagagaggaaaaaacggcaaccgaaacaacggcgggagaagccggcgctcgcagacaaccaagcggcaccaagggcgaccagcggcgcccaggaacccacggccacaacctaagccgcaaggcaggtgacgccaagagg

SEQ ID NO: 85718 - DNA, 434 bp, Zea mays
  Clone ID: MRT4577_178184C.1
gggcaaaaaaccccacacataaaaaattggggggaaacccccagggggggtaatcccaaaaaaaaaacggggggggggggcctaaccaactaatttaacgtacacaagaagagaggcccccttggtttacgggtttacaaaccaaacgggaaccccgggaaaaagggtctcgaatttcctttgggaaattttaaacctttttaactaacgggccaggggggtaccacgtcccccagttaaaccgggggtttctcccacccaaacgccttgtcctcgggggggggggcgccctccagcctaagttccaccaaaataagttcgggggaaacctccgaaatttccattgaaatggccaaaaggcccggggggacccccaggggggggggcttggccccctttttccccaaaatgaaataaccgagcctcgggccggg

SEQ ID NO: 85719 - DNA, 353 bp, Zea mays
  Clone ID: MRT4577_178185C.1
agcagtggtaacaacgcagagtacggggattgggatgggataatgtgctatccctgggatcgatctccaatcgatgggaagagataacgggtcaacccgactccagctcttggctagataggctgcgaaactacgccgtccaaaacaaatggactacgccatccagaatttgcaagaaaaaaaaaaaaaaaaaaaaactgtctccactgagatttcagaccagaaaggagtagactctagttttaattgcgtatagaaagagattcgtcttgtaagagcgagcaggttgaagcgcttaggctacttcagctatatgcttaacacatgcaaatctaacgaagtgctcctggacg

SEQ ID NO: 85720 - DNA, 703 bp, Zea mays
  Clone ID: MRT4577_178186C.1
gataattctgggacttgggggcatggagggatgtttgatgctttgactagtctgtcgacatgcattccagatgcttatcaccgtgcttctgaatttgatgatctccacatgggcgatcttcacttgattcagcttgatgaaggcaactgtacccggagtttggatgcacctttatgggttgcactagctatcgttcagtcttacaatccgaggcgtaaagttccgagaagtgaaatctccatgtctgatttggagctctgtatatcaaaagcagccttctcagctgctcagcattctgcggctatccacatgccccgaattggttaccaaggtggctcccaacgatcagaatggtatacaatagaacgcctgctcaggaaacactcatctctccatggaatcgacatttttgtatactactttcaacgacgacaggcagattgccagattgtaacccaggtaggtcatgcttacgatttgaccccagcgtagggatgtttttgtaaaaaaccccttcatcaaaaaaatttgggattatgtgtagctaactgccacaatttgttttttgttttactgccccttctctttggggcccaaacgcctatgaatagatgagggagcccaatgaattaggttttaggacctttagctaaaaggggtatgtatgtacaagtgttgttggcatttgcagtctcttttgatg

SEQ ID NO: 85721 - DNA, 299 bp, Zea mays
  Clone ID: MRT4577_178187C.1
cttgtgttcttactagtgtaactcccttcccatccctgagtgcgctgtcccagagcttgctcgtcgtgttcctgtgccagtggtgaccatagccaccgattactcaccttgccgtggccaggacagatggagcagctgcacacccaggttggtcccgttctctgatctccgtgtgacactgaagcttacgcaaccccgcctttgaactctaccgatgcatgctgcgtggagcagggacatgtcgctgcaatctggcgccgcggacacgcctcaatgtctactgattgacttgcgttcgt

SEQ ID NO: 85722 - DNA, 193 bp, Zea mays
  Clone ID: MRT4577_178189C.1
tcgggggagtagtcgacgcgccgtcactgaatcctcaaatcacgggtaggcggaattacgccactctggtgacttccggggagcaggggaacattttcctttaaccatgggccaggggaaaactcacatcaacattgggggcattgggcatgtcgactctggcaagtcgaccaccactgggcacctgatctac

SEQ ID NO: 85723 - DNA, 481 bp, Zea mays
  unsure (1)..(481): unsure at all n locations
  Clone ID: MRT4577_17818C.1
gcggggaaaaaggatgtttggaaaaaaaaaaaaaaaggaaaaaaaaaaaaaaattaaataaataatataannatcaacaattatattaaattaaatcaaaatgtntaacactgaacccttgctgcttatttgcaacaacaactcattaccatctagggggggggagctcactgggtagctgtcacccgcaacgggcttactgggtgtaatcctgttgcaccgcactgaacccctggtgcttatttgcnaggggccaacactcctcctcctttagccatgcttgctgcagtaaaccggtgctgtccttcttgacacagcagcagttgctgcctttgtaccctcggtttgcggctatccgcgcaacccgtcttacttctaccacatattgttgcctctttgtccatcttgctttgagcagaccctgcggctctcctaccaacaacacatgcattggtggcgcgcctcttttagattgcttatt

SEQ ID NO: 85724 - DNA, 573 bp, Zea mays
  Clone ID: MRT4577_178191C.1
ggttaaaaaagagaaaaaactcccaaaacaaaacaatgttaaggggggcggatgggacacacccaaacaacaaaacattggaagatagacgggctgcgacccccccaacaaagagagccaaaaaagaccgacaggctaacaaccccccagcaaacagggccggaaggggacggttccaaaccccgggggggcaaaaaaaccggccagggagggtgtggcaaacacgagcctcccaaaaataccagcccccgggggtggggtcaaaaacagcctcgaaaaatagggggggcccaggcgtgacaacaaagacccccttgacaaaaggggggcaaagaggagaaaagaaaccgaccgcctggacaaaagctgcccaccgaaaaaaaaggaaacaggacggcggggtccaaaaaaaaggcggcaaaaacggtaaaaaggactccctcctgggggggagaaacatcaaaaaggccatggttcgtggccggccggggacccgacagacataatcagcacactacctgccgggccggccggttcaagggcgaataccaacaccaggggggccgggaccat

SEQ ID NO: 85725 - DNA, 512 bp, Zea mays
  unsure (1)..(512): unsure at all n locations
  Clone ID: MRT4577_178192C.1
tcccaaaccatgacgggcagccaggncggnggcggagggctgcgagggcggattcctttcgacgcgatccgcagcttcccgacgacgcccgaggcgctcatgaaggagatcgacgcggccatcggctccaccgaggacgcccgcgcactgcgccctccgcgacccctcccaagtgtcagcctcggcgccgcccgagaccgaggccgagggccaaggggaccggggagcctcccctctgcctccggtctgctacgacgcgagggacgcggaacaagcgtaccgcgcgcagagcgcgacgctgggggcgggacggcccgacgccgccgtgcggaccctgcgggcgcggctggaaagctgtccgccggacaagggcgcggctgtggccagggggaggaccatgatggccatcgcgttagggtagctgcacaagcagcagctacaggccccgcagcagcagagcaagaactgaagccgtcctacttcgacatagatgcagcactcgaacgatgtaa

SEQ ID NO: 85726 - DNA, 743 bp, Zea mays
  unsure (1)..(743): unsure at all n locations
  Clone ID: MRT4577_178193C.1
gatttgccgaagggtacaagtttgtgcggacagcactctgtttctgcttgccatgctagttataggtaaatcttccaaatgcttgaaaccaacctatttctcaatcaatatattaggccattggaccagcatccaacaatctcaaccctctagtgactgtgtgtttattcagtctccattacagcaagtctcttgattaattcatgtggttgaaagagtttttgggtggaggtcttaccagtaattactattcccattagttgttgattcaccgcagaccatttaaaaaaaaaaaagatgagtaccaaaatgggaaaacggcccttgcatttttcatgtacagttagcaatcggagaacaaaagctgagtcttatccttaatgatcaaaagcccctagcaggtgttagcattattaggttaccacatataaatgtggcgacttatcaaacaagttagctttagcaagtgcaaaatgttcacctgatgcttcgcttggtcacacattntagataatctattttgtttgcctcgtaataatatacttatgcatagcctaaaatgaggaactactgtatgtattcactaagccccttctcacttaaagcactctttcctttatgcttgaatagggagacaagctacggaggcgtggagcatgggagaattggttgcttccaaaactgaactattctgctgggagttcttctggttcgatgacccctgtgacatctaacattgatgc

SEQ ID NO: 85727 - DNA, 398 bp, Zea mays
  Clone ID: MRT4577_178194C.1
tctgttaatatgactgagaagatgcaaaaagggggcaagtatgattatgcctctgaatttttggagtttgcagctgaattctcgagttcagataatggtgaagatggtgctactttactgatgtataaacattatgctgcaactgctatttccaaaggaatccattgcttgtctctgcgccttactgatgaatactcctcaaatgcccatgcacggatgtcatctgtattctgtgtcctcgcaacactgatattctttgcaactctgagcagagagatacatggaatgttcagcttttcagatccattgatggtggcgctgtttttaatgtttccaagacttctgaggaagctgcaagagcagaaattgagcatggcctccgagaacctgatggtcat

SEQ ID NO: 85728 - DNA, 458 bp, Zea mays
  Clone ID: MRT4577_178195C.1
tttgaaccaaaaaggtcttaaaagcttcaaaatcatcacccacattgaaaaccacaactaatttactctaatttttcattcttgctccttttgaggccacaagctacgtgtccacgggccacagctttacctcaactatggcagccaaacctagctggctagttgaggctaaaagctacgtcgccagtttctaccatggcatccgaatcctagctggctagttgaggcctgagggtacaagctacaccgctggtgctggacgccagatcggtatatcaacttctagagatctaccaaacaggcctagtatgccaaatcctgttaaggatcaaaaactaccatcatcgctccgtaggcaactgaccatgcggctgtcagctgaaacagttggtcatgtttgcaacgtcttcaagcacatcatcttcgtcttcattccttaggtagttgatcatgaggct

SEQ ID NO: 85729 - DNA, 1967 bp, Zea mays
  Clone ID: MRT4577_178196C.1
gtataaacattatgctgcaactgctatttccaaaggaatccattgcttgtctctgcgccttactgatgaatactcctcaaatgcccatgcggacgcgtgggcgaggctcggcccattccttgcccacgtcatctctctgtctctccctctcatcgccgcgtcacgcacagccgccgccgtcgtgcgcgtgtgccggaacggccgcgtggatcctccgccccgtcccagcggcgacttgtccgtgcgaagatgctggggttctcgaccggacagctgctggtcgtcctcggggcctgctccgtcatgatgaagcccagtgatatggtgaagattgcgaggacggccgggcggatgactggaagagcggttgggcggctcatagtggctcgccggcagctggacgagattctgggccagtctgcagccacccaggttcataaggagcttaaagacgctatgacacaattagactcgatccgttatgaagtccagaacttatcaagattatctcctgggcagtttatgttgaagcaacataacgctggcatggctgaagcagggaaatctgactcctctgatggtcctacaaccaaccaagaagaatttcgtcaggaaattcgcagtataattcgcgatgaatttgaaaaatactgtagaacacagcccattcaaaactctgtgagcacaactgaacacagaaaacttcatgtggctgatgaaccaacggcactgaaatccaaggacatgaagatggctaattcaggattgacaaatctgcacaaccaagcaatgacgtatgcaaggctatctgaagccccaggacttaagatggattcttccttgagtgggaactacaaagatcaatctaaggagatggatgggctgctaactgtactgccaatatcagctgaaagtgctggattacttccaagccgcccagataaaccaacaggctcagatctagtccttgaggctgtgcttgaagcggaagttgcggagaacgctaaactgtttgtgtcgcagcctcatgatcagctacctaaggaatgaagacgaagatgatgtgcttgaagacgttgcaaacaggaccaaactgttcagctgacagccgcatggtcagttgcctacggagcgatgatggtagtttttgatccttaacaggatttggcatactaggcctgtttggtagagctctagaagttgatataccgatctggcgtccagcaccagcggtgtagcttgtagtcttgtaccctcaggcctcaactagccagctaggattcggatgccatggtagaaactggcgacatagcttgtagcctcaactagccaggtaggtttggctgccatagttgaggtaaagctgtggccggtgggcacgtagcttgtggcctcaaaaggagcaagaaagaaaaatagagtaaattagttgtggttatcaatgtgcatggtgattttaaagcttttaaggatgtcatctgtattctgtgtcctcgcaacactgatattctttgcaactctgagtagagagatacacggaatgttcagcttttcagatccattgatggtggtgttgtttttaatgtttccaagacttctgaggaagctgcaagagcaggaattgagcatggcctccgagaacctgatggtcatggtcttctataggttccttgccctggagtctacattatcaacggcttgggggcaagccgtattttaagcagtggggaatgttagcacactgtcatgtggggccttagataggtggcaaatgggcatgttcggctataaaaggagagcggttcaagctatgaaggatcatcaaagaatcaatttataaactgaagtcttcatttctcatctgcttcctctccttccttctcatgttactggttcttctatttctagtatcttctgttgtagtgctgtactcggatttgctagaataatatacagagtgttcctct

SEQ ID NO: 85730 - DNA, 641 bp, Zea mays
  unsure (1)..(641): unsure at all n locations
  Clone ID: MRT4577_178197C.1
aattcggcacgagggtcgctcccgtgtcccgtccgccgtcccccttcctctcgtattcgcttcgccgcccaacccactgtgcaccgctgccttcccgaccgttctcgccgccgccgtctccgcgcctgccaccccgcgcgctcggccaccggcgcccacggtgcggctcgatcaaggccagatcagaacccgccccggtccgcgtcacgccgatattttctgttttttggtacggatctagggttttcctgctgcggattcgttcgattcgctcatggccgctgggcgccatgggggttacagggactacgaggcgagggagcgggagctcgacgcggaggcctccaggaggagcaaggagcagcaccaccatctcggcggccgccaccgcgacgtggaccgccaccgcgatggcgggcgcagcaggggtggcagagactttgccaacggctacggtcgccgacgctcgccgccaccccggagccggctggcgggaaggcttggtgaccgtgagcctggcgaggtgctgnagcgtagtgcatctgatgactncggtgggaggccgcatagagggagggagaatggcgtgctcagttccggcagggagggtgattggatggcagtcactgatgactccgggg

SEQ ID NO: 85731 - DNA, 334 bp, Zea mays
  Clone ID: MRT4577_178198C.1
atcccattcttcgcagatactccatatacaaccacggcccccgagcagccatcgaagttctgtggtatccaaaaccctcaactatatccatacatacgcatggatatgacattatcaagaaccgtgctatttacacatacaaaatacatattgctgttctcttactccatacactaccttacccaaaattaatttcctaccaattcctcctaacaatccagctttccctatatggagacttatctactctatgaaatatcatagtcatagcgcgataactatggtaaacggtcatgcgctcacaacaccacacaacataccagcctcaagcata

SEQ ID NO: 85732 - DNA, 846 bp, Zea mays
  Clone ID: MRT4577_178199C.1
tccactcggtcgacctacccagtccgccactgtctaccgccgcccccacgacgatccagtctctgtcgctgccccgccggccgcctcccctcctcttcccgctgcctctctcggtctccctgccccgggcgcaaccggatccaggtgactccggcctggacacgtcaccagacttcctctccgccgtctgatcgggttagcaaaaggaaaaccggcctgcttcgtgaggataagaaaaggtagcaatagcacgggtaagtaaaaacgagctgtagctgtctgccggtcggtctgtccggtctccggtccatccccgagacccgactgcgttccttctccttgtcgatggaggaaaccctagccgtcgaatccgccgccggcgagacggcggccgcgcaggcgcccgagctgaacgaagagacgctcgaggaggtgctctcgaggcataggaaagagaaatcgaaactccaggataaggaaacgagtctcaagaaagccgctgcaaaaggaagcaaagctgagcagaaggcgaagaaaaaacaggtagaggaagagatcacacgcctctcatctgagttagaggcgaaccatgctgcagagcttgcttcctttgggtacaaaccctctggcagctcagagaagggaaacctcgacaacttagtgaaggccatagccggtgtttcagtttccagcaattcggattcagcaaagctcagcaagggagcacgccggcgagagaagaaggcgaaggaggaagctgcccgagagcagcggatccaagaggaacaaagcaatctcgtgagcgaccgcatggtagaaaacgagaagctcgaaaggaagctcgag

SEQ ID NO: 85733 - DNA, 595 bp, Zea mays
  Clone ID: MRT4577_17819C.1
aataaagttgtctagctcagtcggtagagtgcaaggcttttaaccttgaggttgtgggttcgagccccaccgtgggtgtttaatattttaaaaaaaaaaaaaaaaaaaaaaaaaaaaaaaaaaaaaaaaaaaaaaaaaaaaaaaaaaaaaaaaaaaaaaaaaaaaaaaaaaaaaaaaaaaaaaaaaccccccctttttttggaccccacttgcaacaaaaaaaggccaattggggccccaacagggggcccaaaaaatttgggttccttaagcccctggggtttttgggaagggggggtacccgaacctttttcccaaaagggcaaaaagcccctaaaggttttttttttcccccaaacccttaaacagggggggttttaatttgggaaaacccaattttttaacccttaagggaccaaaagggaattgggggggggcttttacctttaaaccccttggtcccccaaaaaccgggagcccttataaaagaagtaccttgggggcatttgggggcccaaaacattgggggcccaacccccccacaacctgggctaggaaaccttgggggccaatttaaaaaaaaggagtttttttc

SEQ ID NO: 85734 - DNA, 580 bp, Zea mays
  unsure (1)..(580): unsure at all n locations
  Clone ID: MRT4577_1781C.1
caacgagctagctctccggcgtcgtccaggaacaacatttagagatgggtcacgcgagcgcagccctccccgtgattgacctcgcgtccccggacatcggcgccgccaccaaatccatccggcaggcgctggtggattacggcttcttctacgtgatcaaccacgggatcgacgacgccctgatgaagagcgtctacgcggagagcgccagcttcttccagcagccaatggaggagaagatggcgctgcacaagaacagcagccacagaggctacattccgcccgattttgaaggcttcgaggctgacgctggtggcaagggggacctattggagtgtttccacattgggtctggggtagacggcgactccaagaatcctgtgaatcagtggcctcctgcagaacgctttccatattggaaggagacaatgaagtcgtactatcaatgtgcaatgggaactagtaaaaggatattgtccctaattgttttgagtttggaccttgacgctgaattcttcaagccagatggctccgaaacaattcttcgacccaattcattactcangtcgggcaattgaat

SEQ ID NO: 85735 - DNA, 318 bp, Zea mays
  Clone ID: MRT4577_178200C.1
ctcactcattcgcccacgcgtacggattcagttttcacttgcctcatacttcgacagggacttgctgactcgcacggaccgcgaggactactcgcagcactggatcaatgacatgaattacagctaccactgtcaactatatatgaacgctaccctgccatcctcctcgtcaactaacccattggagaagctctcaaccatttccttgtccaatgacactctgatcctatgaccctgcataatgaacactacgtttacgactctctactgggcacagatatcaataacggtcgtcttgacctgctcttcattatcaga

SEQ ID NO: 85736 - DNA, 359 bp, Zea mays
  Clone ID: MRT4577_178201C.1
aggatatatatagtatcaaatcatatcatcgggggccaattaatatatgggtacaggagatgcaatcgggtcaaccaacatgcaggttgacacacgtacgttcatgagcacaaagactgacgccaaacatgcagagggggatagcaaactgaagaactttggttgtttctctttcacacacaccccacaattcctttgtttggcagccagctcggccttgcttattattgttcaaccaccaccacaagctagatagataataatcatatccatggcggtcgaccgatgtgatcaggatttgccggggtcgcacttgcatttgccaccccagctgcagccgtgggcggactactcggact

SEQ ID NO: 85737 - DNA, 1161 bp, Zea mays
  Clone ID: MRT4577_178202C.1
cgggaagacaaacagtgacgactagaccgactaatccgactccctagctcccacactaccaccatcccaccatctttaaaaagcccccaccactacatcctgcgctgcaaacgcctctcgcctctcctcgcctctgttcagctcacggtggaagaggaggcgacaggccgacagcacacgagagggagctagcactagcagaagcgcgcgaaggagctcaagcagccacacgccgaccagcaccaccgcgcgatggcgtgcatcaacatgtacaacccagacggcgcggcggggttcggcggcggcccgcagcagccggccgcgctgggcccgcgcatctccttctccagcgacttcgccgtggagccgacgccggtgcagaaccgggcgacgagcctgcggtgccaggaggaggacctcaacttcgagttctccgtgggcagccaccccatgatggccgccgaccagctcttctccaagggcaggatccttcccctcaaggacaacggcggcggcagtgtctgcttcgctgccgcgcggccgcccaccacgctgcgcgacgagctccgtggcggcggcgacgacgacgacgagagggcggccttctccgccgccggcaccaaggggtccaactccaaccggtggaaggagatgctcggcctgcggaaggcgctctgcgtcggcgtcggcggcggcggcaacggcagtccggccaagaaggctagcagcagcgacaagcagggcgtcgttgccgccgctgcccccggccccgacgaccacatggccgcgtccaatcagcaggagcagctatcatgatgaggcgaccgtaccgacgggagactgggactgggagagagagacgacgagacagccatgggatgggagcactccacatgcgtgaacaagctttaaaattttgtcctccctccctccttccgatcatccttcctgatgctgctgatcgatcaaccacttgaatcatgcttgtcatcatcggtccatgcctccatggtctagtaggttctgtaaattgttgtgagtttgcttgtgtgctagctagctaggtggcccggcccggccgttgaaaagtgccaaaaaaaaatacatgtgtattttcccctgcatgcatactcgatctaagtgctctgatgtcttctctct

SEQ ID NO: 85738 - DNA, 282 bp, Zea mays
  Clone ID: MRT4577_178203C.1
gaaagacatacacgcattctttctacacaatcatacaaaatgggtttcttcggttgggacgattctcaaaactaccacgagcaggtctacggccagcagcagcatgaggccaagttctcccacgaattgattgccggtgctgccagcttcgaggctttcaaggcctttgaagaccaccgccgcaaagagggacagccagtctcccacgcgttcgccaaagaggcccttgtcggcctcgtcggcgccgaaatcgacaagcttgccgaaaccaagggcatggac

SEQ ID NO: 85739 - DNA, 327 bp, Zea mays
  unsure (1)..(327): unsure at all n locations
  Clone ID: MRT4577_178204C.1
ggtaccctggatgtccggccgggctcgctttagctcggtgtcttnacaaacccggtcgctaacttttgcccgagctgcgaggattttcaattgcggattgcggccaccgatcgagcttcacgccagtctgggtctcttcctagggcgtcgcgcgcggctgtctgagaggagaggaggaagatgatggagtgcatctgagttcacatcggtcatgccgtgatacaacacggtatcgcgcgctgcgaactttactgactagagcaatggatagagtctgctggctcgactgcctggagataagacctcggaacatcactatgatgcttt

SEQ ID NO: 85740 - DNA, 330 bp, Zea mays
  Clone ID: MRT4577_178205C.1
ctgcactggcatgggtcgcctttccggcggtcatcgtcgcgggggccagcgcggccgggatgcagagcgagccctgcccgtgctgcgacggcaaggcgacgacgggagcggtgatcgcttgtcccggttgccaagtcggcatgccggcggtcacggcgtcggctccgcgtgctgccgttgcggtcgcctggaccgcgttgcccggcatccgcttcacgggtaccgaccccacgccggccgagccgccacctcgctgactcttctccgcaagaagcatccccaacccatcgacggagaatcacatgttgaagacacttctctccaccctcg

SEQ ID NO: 85741 - DNA, 554 bp, Zea mays
  Clone ID: MRT4577_178206C.1
ggggggtggggtgttttttttttttttttttttttttttttttttttttttttttttttttttttttttttttttttggggaagacgatcgggccagttaataatgcaagggggtcatgatcgggtgttgggatgatggaaacagaaggggggggggggcccatgaaaatttaatttccctgggggtgggacatatttaggggggacaagacaggggaagatctcctccattcccataaaacgctgggggtaggtggttcaccacttccaaaaaacgggggggccgcacttgaacttttccttcccctggcactcaatctcgagggcgtcgctgatgaaggggacttttttttggttggggagggcctggcccccagggaagttgtgggggaaatgggagctgccgaactccaagggggaggcgcgcgcaaagtgggttccactggggggcaacctttttttggggttaaagcttttggggggcttgctcttttcggggggctttaaggaaaaaagggggcttggcccacccgggggggggccggaaagaaaaa

SEQ ID NO: 85742 - DNA, 857 bp, Zea mays
  unsure (1)..(857): unsure at all n locations
  Clone ID: MRT4577_178207C.1
atgccaggaacaggcgttagttactcctataatatattccttctgttatgttcctgagcccacatgtcggggctcagcatccttgtatgtgcctcccttgagctataaaagggaaggcacacgacgttacaaggcaggttcactcagaccctcagactcacaagttcatacaagctctcaagttcacaaactcaatacaacacacagtgaagtagggtattacgctccggcggcccgaaccactctaaatccttgtgtcctcgtgtgctcttccaccattaatgactgtaattgcagggacacgaagagttgtagcgcttttgccaacaagatccgctatatgcttgtagagtggaaccttgtggcgcgccctgtcaagtgcatgatggcctggtcgatctgcgtctgctgctgcggatccatcccaacgagtgcctccgacaccttgtcgttgatcacccgcaccgcgtaggcgacccccctggcgaggaacttccgcctctcggaggccccggccgcgtcggcggcggcgccctcgagcgcgcccacgctagccgtagatgctcggtgcacggccttgttggtgtgcaactcgacctcaacggccggtgcgctacgcccgtcaaggatctggcgcgcccgcaccctcgtgatcacggtgggcgcctcccgcctcatgtggccgacgatgaaaagcgccgggttaggggccttggcgcggaccgccgtattcagggcctcctcgctcttgcgcgagagcaggtgcttccccaggtactcctgcactgacatggctgccacagcggtggaattttncttgtcctcacgacttcgnnccacgtcgtcctcaccncctg

SEQ ID NO: 85743 - DNA, 603 bp, Zea mays
  Clone ID: MRT4577_178208C.1
atgtcagtgcaggagtacctggggaagcacctgctctcgcgcaagagcgaggaggccctgaatacggcggtccgcgccaaggcccctaacccggcgcttttcatcgtcggccacatgaggcgggaggcgcccaccgtgatcacgagggtgcgggcgcgccagatccttgacgggcgtagcgcaccggccgttgaggtcgagttgcacaccaacaaggccgtgcaccgagcatctacggctagcgtgggcgcgctcgagggcgccgccgccgacgcggccggggcctccgagaggcggaagttcctcgccaggggggtcgcctacgcggtgcgggtgatcaacgacaaggtgtcggaggcactcgttgggatggatccgcagcagcagacgcagatcgaccaggccatcatgcacttgacagggcgcgccacaaggctgagtttggagcaaatactatgcttggagtgtcaattgcagcttgcaaagctggttccactctacaagcatatagcggatcttgttggcaaaagcgctacaactcttcgtgtccctgcaattacagtcattaatggtggaagagcacacgaggacacaaggatttag

SEQ ID NO: 85744 - DNA, 204 bp, Zea mays
  Clone ID: MRT4577_178209C.1
tctccctcctcccgaaggatttccgatctccagtaccagttccgagggctccctcctctggcgccatgacgctctctgtggagataacactcggtgcacgggagtactcggaccaggatctctaccaggagggcttctgccgcctcgagagtgatctggccgtggtcgacatgcccaacctcatcgagtgccgcgccgagctcg

SEQ ID NO: 85745 - DNA, 359 bp, Zea mays
  Clone ID: MRT4577_17820C.1
gtcgcataaaattcaagttttatatcaatacatgatacaaaattcaaagaaaaaaacatataaaaaagcaaatataccgttaagttcttgttgaccgaggcaattgcatccttctagttttgagacgttgaaatcgtcgaataataagctcatcatcaacggatttgaagatctctttctcagtgtagcaaaccattaaatcattcaaccaatcatcttcaatcttgttacgcaattctctcttaattatattcatagctgaaaatgttctttcaacacttgccgttgtcacaggtaataatagggccaactcaattagcttgtagactaaaggaaacacaacatgctttccagtctga

SEQ ID NO: 85746 - DNA, 130 bp, Zea mays
  Clone ID: MRT4577_178210C.1
gctaaaacaacgcacgttctattcacatggatctcaacactactacgaccacactcgaaccaacggggggatcatgatgtatctatagcagcctatcacacaccaccatgcaacaccgccaccgcgccac

SEQ ID NO: 85747 - DNA, 511 bp, Zea mays
  Clone ID: MRT4577_178211C.1
aaccggaacacgggattttattcctaataaaaaacaggacacccaaactaaacaaatggagcaggcggaaaatccgcctttccgataaaagagagacccaaacagaaaaaaggacgggacgggactggaggccccaaaacaaaagctggcccacacaaagcaaaacaaaaaaacgactagttggagttatgggggggaccgaaactttacgggagggtacgaagaaaaagccaccgccttaaagggccaaatgcccccgccccggaaggggttaaaggggggcgcgcgcccggcccgctcaaggggggtttttttttaaaaacccctgcccctgggcaagggggggctgggctgaatccttgagggcgggggcctgggaccccagcctcgccttgggggggcccaactggtcggcccccggggggggcttgcccgtaaggtccttgtccatccagaaaaaacggacagggcaacaaccccgaggccgcggggggggacaaacccggccgcc

SEQ ID NO: 85748 - DNA, 328 bp, Zea mays
  Clone ID: MRT4577_178212C.1
ttaatttgttttcatggtttgtttttatttgtttgggaggtgctttctgtgaaattatacaaaagatataaattggagaaacaaattctacctgcatcaacagatatatgacaccgtcgattgtttatacgaaaactgggaccactcatggtattgaaaatatgtcattccccaactgtttattcaaccccgtcaaatttttaagtcaagcacattctaactcaaccgataaaacatattgccccccaccaatgataacggccccaaataatattagtggtgaattttttccaaaaaaaaggcaactttgacatttatatcataaacg

SEQ ID NO: 85749 - DNA, 646 bp, Zea mays
  Clone ID: MRT4577_178213C.1
ggccgcttttttttttttttttttctttttttttttttttttttttttttttttttttttttttttttttttttttttttttttttttagggaactttaaccaacaatcactcaagtccccaacgttttacaaagttcaacttgctactcaggggaaaaacccttaaagtcttgaaccaaagcacacaggggtattctattcatcccatcagagggtttaacatttaagcatatccaaacaaaaccaaaagggggggggcaatacaaaaccccccttggggtctggcccaaacatcataacccacaacattatatttttggacgcttttgcaaagggcacaaggaaaatttttgcatcccggaaactcggggatccctcaacaaacagagggcccagttgaaaataccagaggctggctacccaaaatttccaagaaaataacgggggggtctcggagtccttccaagggttggccaattgatcgccataccggtcacccaaaacttaataaaccggggggtacaactcgagttcaaccatttcatctggggtaagcttaacaaacagggcccccacgttttggtagaagttcgcgatttttgttggcccaggtatggggcaaacggcgtttccttgggggggaac

SEQ ID NO: 85750 - DNA, 455 bp, Zea mays
  Clone ID: MRT4577_178215C.1
ggtggtttttttttttttttttttttttttttttttttttttttttttttttttttttttttttttttttttttttttttttttttttttttttttttttttttttttttttaaagcaaaaaaatcaaaagttccatcctattaacggggggtttgcttggggaaaaaaaggggaaaaaaaaagggccaaaaaggggaaaaatttgcaaaaaaattttttacaaaaaaaaaaaaaaagggggcattttattccaggaacaggcaaaaaaaaaaacgtgtcctgttttccccacaggaaaaaatccaagggggctaatatttttaaagcggccccaaatcttaaccccccattttaaaaaacctttgaacaagaactcccaaaagaaacctttccccaagaaaactaaaaaccccgctttaccttttttggacaaaaccaacggggtaagaggggg

SEQ ID NO: 85751 - DNA, 123 bp, Zea mays
  Clone ID: MRT4577_178216C.1
ttaagctacaaccccagaccgagctctccgtggtggtcgctcgtttccggctaagagagcaacgcactcacagcccctgacgcgactgaatgactggcgccactgagatgctcgatccattgg

SEQ ID NO: 85752 - DNA, 281 bp, Zea mays
  Clone ID: MRT4577_178217C.1
ccgacgacgacgagcttccttttcctctgctggtgccggggtgcttgtgtccgtatggcacggcccgcaagcccgcaagggtactgcatacggggctggccgctggtggcaccgtcgtgtgacctgtctctcgcccgtggctgtcctggccgcgcccagtggggctcgccggcgggtggattatcgctgtcgagcttgaggctaatgagctggctacgttcgtcggtctgccgtctgctccaactgattgattgccctgttaaaaaaaaaaaaaacacccc

SEQ ID NO: 85753 - DNA, 172 bp, Zea mays
  Clone ID: MRT4577_178218C.1
gagattaggggtgactatactctctcgcagctttatacatgcccactctatttctattacatcacggggctcgaagttacactcttgtgtctgggtcgtcgctgtcgatgtgctagtttgtgatagaccagctctctatttgcggatggggatcgatcacatcgggcgcgct

SEQ ID NO: 85754 - DNA, 274 bp, Zea mays
  Clone ID: MRT4577_178219C.1
atcactactcaaacctttaaatgagcgttttgatgagaggacagggcgcttgacacagcgtgacattaaccatggcgaaacaaacgggctaccagaagtgcatactggtgtgcatacattaatggaaggactaaaccaaaggaagcgcccaactaagctgacaatggaccaaacactgcagcaagttgttcaggcgaaggttagtgagacaaaaaatagcacaaaggagaggaccttgaaggtgaacgtcacatagaatgacactgaacaagat

SEQ ID NO: 85755 - DNA, 347 bp, Zea mays
  Clone ID: MRT4577_17821C.1
tgtttttgacttttcagttgttggtcttttaagatggcattacatgatagaaaggggaatgaggatgtgagagtttttgtgaaggttgatggaaaagagttttggattggaaaactatcagttgacaaataccctcagtgtaaaactagtttggtattcgagaaggagttccggatcgatgggatcgaggaacgggaacgtggtacgttgtatgctactaaaactaggatttaacactactggaactagattgttcccacgtttccggaatggaacgaacgtttccagaacgaggaacgtgaccaagttcccagtcccagttactaaggtttgagttactacacacc

SEQ ID NO: 85756 - DNA, 291 bp, Zea mays
  Clone ID: MRT4577_178220C.1
tgtgatgggtgaacgactggttacccgcgcgggcagcccagggttaccactggcatgtggcggtgcgaggactggagctaccagagcaactgtgggacgcgaatggccagtagtgtgcccgttaactttggcattggcgtgaacacacccccttgtgtatgatacatgatacgaacaccagatcactctatgacctgcaccctgtctgacaacagagcacgagcttactctggttcttagggtgattcctaaactctgcacagtaccctatgtgccacagaattgctataa

SEQ ID NO: 85757 - DNA, 762 bp, Zea mays
  unsure (1)..(762): unsure at all n locations
  Clone ID: MRT4577_178221C.1
gccggccggtccggagacatccacagatacccaattcattcacaatggctcccaaggttctcgccgttctcaccagccagtccaagatgaacaatggacgtcctaccggttggtacctgcctgagctcgcccacccctactatgacctcgtcaacaacggcgtcgagatcaccgtcgcatctcccgccggcggcgaagtacccctcgaccaagcctccgtcgagatgttcaagggcgacgaggagtccgtaaagttcctcaacgagaagaagcagctctggcaacaaaccacacccctcaaggacttcctcggcaaggcctccgacttcgacgccatcttctaccccggcggccacggccccatgttcgacctcgtcaacgacgagacctccatcaagctcatcgaggagttctacaaggccggcaagcccgtcgccgcagtgccacggccccatcgtctttgtcaacgtcaaggtcgacggcaagcctctcctcgagggccgcgaggccaccggtttcagcaattccgaggaggaggccgttaagctgaccagcgccatgcccgttctcctcgaggatgagatcaagcgtgttggtggcaagtacgtcaaggctgacgactgggctgagaagcttgctgtcgatggacaggttatcactggacagaaccctgcttctgcccatgctgttggaaaggccatcctccnggccattggcgcttnaatagatcatgataccacgttaatgcgatgagatatgtgc

SEQ ID NO: 85758 - DNA, 311 bp, Zea mays
  unsure (1)..(311): unsure at all n locations
  Clone ID: MRT4577_178222C.1
atgaaaatacgcgcaagactaacgaaaaggaacaatntgcatggcttttttcgccgtcaaaccgctgcttgtcggggagtctcttgggagccttattcccagaggtttgcacggtcacatcacgttcgccatgcaatcaagaacccggtcatcgacacatttggacatgctgaacatgcatgtggccgcgtccgacaaactcacaaagcacgcgcgtaagcacgtcacggtggcggcccttactattacaccgccaaaggcacaggcctctagaacctgcgacacgatgttcatgaacactcatgacacca

SEQ ID NO: 85759 - DNA, 250 bp, Zea mays
  unsure (1)..(250): unsure at all n locations
  Clone ID: MRT4577_178223C.1
ttangccaaacacagagggcaaagcccaccaaacccgggatggaaaaactatagagcgccctacatgcaggggccaatgacttgtatgagggctctcaggcataacacttatataaggacccgtgcacagctcacatgcctagcttgagttgttttggacaaagggagacacacccccgggctggaatatgtaggtgatgattgaaaccgagcatgccgctcaggtatggtaaagggggctgcagacgac

SEQ ID NO: 85760 - DNA, 386 bp, Zea mays
  Clone ID: MRT4577_178224C.1
tcgtaggtcgacgcaagactctaaaatgagtcgtatcacatcgtggcaatatttggattggattggttgcttgttgcaatgtggttgtagaagaatggaacaagcatggcagagaggaggccgagcctgtggcagaaatgaagaaccgaagaagcattgcccaagggtcatggctcgagtgccaaagtgagggattgatgctaccttcagtgcttcagtagaatatgttcagcacttaattatggtaaacatgatgattttgactgttttgtgcttcaattttgtaactggcagttgatggttggcattcaaactctataatgttcactacgtgtagctgtgtttttgacaatctgtaacattctgctaacatttggttaagagac

SEQ ID NO: 85761 - DNA, 146 bp, Zea mays
  Clone ID: MRT4577_178225C.1
tgagaaagtacacagcgtgagtgcgctgtcaaggtgtttctgcgccatttgctagtgtgttctgttcttcttctaccttccgtgttttacatttcttgcgtgtgtgagccttgagagttccaacaattggtactggaaccatttta

SEQ ID NO: 85762 - DNA, 309 bp, Zea mays
  Clone ID: MRT4577_178227C.1
ggggccaaattggccccaaataattccacccaaaaaaaaattggaaccggcttgcaaaatttaaattagcccccgggtaaaaaaaaaaaaattcttcttttttaaacaaggggagttccacgggaaaacaaaaattttttcaaattccgggccccaaaaacattttttgaccactaaatggaaaaacacccacaggttcttaaaagggtttttatacacccctcattccaaaattgggggttaaaaaaaaacccttttttaaaaaaggcgccgggccctgcaataaaaaaaaatttaagggtttttttt

SEQ ID NO: 85763 - DNA, 273 bp, Zea mays
  Clone ID: MRT4577_178228C.1
aacttcatcaaaatgtatgtcttgaatttgttttttacatctatactctggtacacacccaaaacacatatcaaagacctcacgggaggaggaagtgattaccgcgacaacagacgacggcgatgccagcagttcagcaccaaccacccttaataagtaaggcgcggggggcggcgctgcgcttggcagtcggtgagatcacaggattcacagggcgcaacggctgccgtcacgcgcggtcgctggggcgtgggcaactgggcgtgccggatc

SEQ ID NO: 85764 - DNA, 277 bp, Zea mays
  Clone ID: MRT4577_178229C.1
cttgcagaaaagttgattgcaaagtgtggtagaaaaagaaataatggtagcagtagagaatttataaataagagtttatctttatgaatgagttaattgttctacaattttgatcagtggtatttaagcctgtatatgctaagtgtatttatgcccctttgagccaaaattttttttttttttcagaatccataagagtttatttgttggcttcacttgggtttagatgcaaattttactgcatcacaccctgatcagctgggtatttgcttagtgt

SEQ ID NO: 85765 - DNA, 592 bp, Zea mays
  Clone ID: MRT4577_17822C.1
attgggtacctcgaggccggccgggacagacatttcctagcggtggtagctggccagccactatggctccaccacctctgttcccgctcccgcctctcctcatcctcctcgtcatcgggcctctgttccccaccgtcgcgcggacggtcacgacgctgccgctgtaccgccacctaccgcacgtatccgagggcgtggcatcgcaccaccacccgctgtcccgcctggacgtcgcgtcggtggaccgcgcgttgcacctcaagcgccgggaccccaaccaccacagtcagaaaggatcaagcggccacccgtctgtaccagcacaccgccgcgctgtacccgcactcctacggggggtacgccttcacggcgacgatcggcacgccgacgcatccgctccccatgctggtcaacaacggcagtcacctcacgtgggagccatgcacctcgatgctacaactgccacaactggtcctccgcatccgtctccgccgtcccgaacttgcaacacataaactcctcctcctaccgtctcgagatctgccataacctcgcctgccattgcctgcactctgccgctaggctctccacc

SEQ ID NO: 85766 - DNA, 1367 bp, Zea mays
  Clone ID: MRT4577_178230C.1
cggacgcgtgggcggacgcgtgggttttagtttgggctgccttattttctattgtatcactaaaggcaagcatccgtttggtgagtactatgaaagggatgtgaacattgcaaacaatcgctttgatctctttatggtggactacataccagaagcagtccatcttatatctcatttgttacaaccaaacccagaggcaagaccgacagcagtatatgtcatgcaccatccactcttttggagccctgaattgcgtctttcgtttctaagggataccagtgacagaattgagaaaaccagtgaaactgacctcataaacacactggaaagcataggatctttggcgtttggtggaaaatggggagagaaattggatgctgctttggttacagacatgggtcgttatagaaaatataactttgagtctattcgtgatcttctgaggtatatcagaaataaatcgggtcattacagagaactttcagatgatctcaagggcatacttgggtcactaccagaggggtttgatcgctattttgctagccgatttccaaagttgctaattgaggtgtacaaggtcttgtgggtgcactgcaaggacgaggaagctttcagtaaatatttcaaaggaagttagttatagctggagaggattgtcctttcctactgtacatactaaccctgatgtagaacaagtacatgtgtaccatatgactcgtattataggataaaaaagagctcaatctgtacattatgcaccggtatggtaggaccgtgtcatttgcacagcctaatgctctgatggcttggacattgtgcatcgtggaatcttcgtaatcgttgtgtgtttgaagaaaaaaaaaaaaaaaaaaaaaaaaaaaaaaaaaaaaaaaaaaaaaaaaaaaaaaaaaaaaaaaaaaaaaaaaaaaaaaaaaaaaaaaaaaaaaaaaaaaaaaaaaaaaaaaaaaaaaaaaaaaaaaaaaaaaaaaaaaaaaaaaaaaaagggcccctgggggggggggggtttaaaaaaaaagggaccccccgggggggggaaaataaaaaaaaagtttttaaaaacccccaaccccgggggggggcccgaaaccaaattcccccaaaagggggggaaaaaaaccgggcccacggggcgggttttaaaaaagcggggaagggaaaaaaccgggggaaaacaaaaaaaaacccttggaaaaaaaccccccttttcccaggggggaaaaaaaaaaaaaggccccccccaatcccccttccaaaaaatgggcaacccgaaaggggaaaagaaaattgaaagggtaaaaattttgtaaaaatcccgggaaaatttttgaaaaaacagtctttttttt

SEQ ID NO: 85767 - DNA, 3226 bp, Zea mays
  unsure (1)..(3226): unsure at all n locations
  Clone ID: MRT4577_178231C.1
acgcgtacgcccttattttaatagggtatgtgagcgctcttgctctatcgaaaattgactcttttttaacggtaacgatcctctccccctttgccaaaaacagtatctctccggagtccaagctccaaccagatccggacacccccccccctccgaagaagccctagcatgcccagcagccgatgaggtcgctccgcggggtcctcatcccgctcgtcctcctcgcggggctcgccttccgcgtggacgacggcggcgccgcgctcctcccgctcccgccccccgcgcttcccgcttccccgtcccgcctcgcgctccccggaggagctccggaggatgatggggcggcggcttcgcgctccacggagatcgtcacggcgggggtgcgctccaccgagatcgtcgccccagtggggcccaagaagcagagcctccgggagctccttgtccggccgcagcctgcacgtcacgagccgtctagcttggttagcggcgaggcgaaagccgaaaccagatctgtgctccagttttacgacaatggcacgattcagcttgtggacaagctgtctcaatctcctctgtgggagattgccacagggcctccactctcagaccatattactaccactgagtctggtccgaattacctcatttatcctttcaatgggaacgagaacatgaatgggaatagtactgaactttgggaggtttataatgggaacagcgtgaggctcccatggaaattggaggaattcgttgccaggagcccatatattcgggattctgttgttactatcggatcaaaagtttcaactgtttttgtagttgatgctgatagtggtgagattatttacaggcatagtatcccatctgcgttaaaggaattggaaggaccagggttgaagagcaccatccaagctaatgtccgtactagtgatacagtgataatatatagtgcttgtgagaatgactattctctcagtgcatcagaccttggcaatcatttatttaactggacaagaacttctttcactgcaaactactatgtgaaatacaagcaccctgacatgcttgatcagtcatcttgcctgcaaggagacattccatgcattagaactgagggtttgccacttgctttacctgatttaaattcagctaatgtaattgtcttgaaagatggtaccccttttgtttctatgcatggttctgatgctttgtaaccaattcaaaccccaaggaagctaccaaacactgctgggaagtcaaatatcctattggatgattctcaaaatcaaactcatgatgttgctcgatctcatgccatctctgccgatcctgaagctaccctaaaccccactaggaacacttctggatggctattccctttgtttcccatatttttggtcactggttatctgttgagcttgatatctgcaagcaagtcatgcaggcagtttatgattcaacttattgagccattcacgcacaacaagaaatcggtggacattagaggcaggtcggagggaactcccaaaaaaagaaaaacacggaagaaggatggacttgtcaatagctctgagaccttgacagcatctgacaaggagtgcagtgatactggtgggtcaactgaggcaccaatgaaaaattctgcgctaacagatgcccttggtggtcgtcagattggtaaggtatatgtctccaataaagaaattggcagagggagcaatggcacaattgtttttgaaggatcttatgatggtcgtcaagttgccgtgaaacgtctgctccgttcccacaatgacatagccgaaaaggagactcgaaatcttattatatcggatcatgatcctaatattgttagactctacggttgtgaccatgacagtgattttgtttatatctcgcttgagaggtgccactgcagcttggctgacctaatccaaaaacagtcatatttgtcttctggagagtctatttctaacaatgaggtcagtatgagcatcaactcaaagatttcaaatgttaagggaatagacgtggagttgtggacgcaggatgggcttccttcagcacaactcctgaagctgatgagagatgtggttgctggccttgtgcatttgcataacttgggaattattcatcgtgatttgaagcctcagaatgtcttaataagcgcagaaggacctattagagcaaagctttctgatatgggtatcagtaagcacctgcaagatgacatgacttctgttagccatcatggtacaggaattggaagctctggctggcaagcacccgaacagcttcgtcatggtcgtcaaactcgtgcaatggatctttttagtttgggctgccttattttctattgtatcactaaaggcaagcatccgtttggtgaatactatgaacgggatacaaacattgtaaacaatcgctttgatctctttgtggtggactacataccagaagcagtacatcttatatctcaactgttacaaccaaacccagagacaagaccaacggcagtatacgtcatgcatcatcctctcttctggagccctgaattgcgcctttcgtttctaagggataccagtgacagaattgagaaaaccagtgaaacggacctcataaacgcactggaaagcataggaccagtggcgtttggtgggaaatggggagagaaactggatgctgctttagttacagacatgggtcgttatagaaaatataactttgagtctactcgtgatcttctgaggtatatcagaaataaatcgggtcattacagagaactttcaaatgatctcaagggcatacttgggtcattgccagagggatttgatcactattttgctagccgatttccaaagttgctaattgaggtgtacaaggtcttgtgggtgcactgcaaggacgaagaagctttcagtaaacatttcaatggaagctccttatagctggagaggattgccttttcctactgtaaatactaaccctgatgtagaagttgtatgtacatttgatatgtataccatattacccgttttatagaataaagagagctcagtctgtacattatgtagcatattactgtgttgcctataaatccaagctttactgttgaatggtgaacaatggtaatacaatctgctggatggaaaccagtggtatgtgtaatacccacattgtaagaaaagtctaaaaagaaaaattatattactttgtntct

SEQ ID NO: 85768 - DNA, 314 bp, Zea mays
  Clone ID: MRT4577_178232C.1
aaaacaaaggcttccatggtggcttattgatggcaagcataataaagttgcctattgactacttgaccaacacacatttaccccaaaatgggagaaaataacatttcatccatcatggggaatgccccctttaagaccccattaacaaaaaaacccaattcctcagcttggcgttactacaaatactcaaagaatcaagggtccaatccaaataaaaattcataatttcctatcaaccccttcatgggcttcagtttattatggggggctttgttcacaaagcattcaagggtagaccccgatgatgactgata

SEQ ID NO: 85769 - DNA, 199 bp, Zea mays
  Clone ID: MRT4577_178233C.1
cggacagcgtagggtcagccccgggcactacagactggtgctttcagatccatttacagagcgccttattcacaacatctatcatgggtacacacaaggataccgcccacagcccagcgtaatagcccccacagtataaattggtccatcataagaaccagtatgggaacaagggaaatgtcaaagagataattaacaa

SEQ ID NO: 85770 - DNA, 1380 bp, Zea mays
  unsure (1)..(1380): unsure at all n locations
  Clone ID: MRT4577_178234C.1
tgtttttaatgttaaaggatatataatcgagataaaattatactcgcttctctcaaaaaaaaaaaaaaaaaaaaaaaagagagaggagagggagggtttcctcaaagagaacctgaacccaaacccaagcagagaacactagcgttccctcaccagggcgggcgtccatcccagcagccatggcgatggcgtacaagatggcgacggaggggatgaacgtgaaggaggagtgccagcgctggttcatggagatgaagtggaagaaggtgcaccgcttcgtggtgtacaagatcgacgagcggtcgcgcgccgtgctggtggacaaggtgggcggccccggggaagggtacaacgagctcgtggccgcgctgcccggcgacgactgccgtnacgccgtcttcgacttcgacttcgtcactgttgacaactgccagaagagcaagatcttcttcatcgcctggtcaccggcggcgtcgaggatcagggccaagatcctgtacgcgacatcgaagcaaggcctgcggcggctgctggacggggtccatacgaggtgcaggccaccgacccctccgagatgggttttcgacgtcatcagaggccgcgcgcaatgagggaagactgagagtctgggagatagagagaggagagggagggtttcctcaaagagaacccgaacccaaacccaaaccgaagcagggcacactagcgttccctcaccagggcgtccatcccagcagccatggcgatggcgtacaagatggcgacggaggggatgaacgtgaaggaggagtgccagcgctggttcatggagatgaagtggaagaaggtgcaccgcttcgtggtgtacaagatcgacgagcggtcgcgcgccgtgctggtggacaaggtgggcggccccggggaagggtacgaggagctcgtggccgcgctgcccggcgacgactgccgctacgccgtcttcgacttcgacttcgtcaccgtcgacaactgccagaagagcaagatcttcttcatcgcctggtcaccggcggcgtcgaggatcagggccaagatcctgtacgcgacatcgaagcaaggcctgcggcggctgctggacggggtccactacgaggtgcaggccaccgacccctccgagatgggctttcgacgtcatcagaggccgcgcgcaatgaggcccccgctgcgctctgctcctatttacgtacttacctgtgcgtgggcgtgttctcctactactcactgctcagtagtcagtagtcatctgcgttcgtgtgtgtgtgtgtgtgatcggccggatgctaattggcggttggtgtgctcccgtagcgatcgatgctgccaatctgacgaggcttcgcgtgtgtttgctttgctattttc

SEQ ID NO: 85771 - DNA, 2329 bp, Zea mays
  Clone ID: MRT4577_178235C.1
agactgggagatagagagaggagagggagcgtttccggaaagagaagccgaaaccaacgcggagcgggagaggagagggagggcttcctcggagagaaccccaacccacaaccaaggagacgacacgatcgctcccggagaagggcacccaagccgagaaccacgagcgttgcgtcaccaaggcggacagcggggaggagctggaggtgggagtgcaagaggtggtcgatggggatgaaggggaagaaggagtgcacagggctggttcatgagaggtgaagtgggagcaggtgcccggcttgggggtgtacaagatcgacgagcggtcgcgcgccgtgctcgtgggcaaggtcggcgcccccgcgactggcgacacgccgtcctcggcctcgacttcgtcaccgtcgacaactgccagaagagcaagatcttcttcatcgcctggtcaccggcggcgtcgaggatcagggccaagatcctgtacgcgacatcgaagcaaggcctgcggcggctgctggacggggtccactacgaggtgcaggccaccgacccctctgagatgggcttcgacgtcatcagaggccgcgcgcaatgaggcccgcgctgtgctctgctcctatttacgtacttacctgtgcgtgggcgtgttctcctcctactcactgctcagtagtcatctgcgttcgtgtgtgtgtgtgtgtgtgatcggccggatgctaattgccgtcggtgtgctcccgtagcgatcgatgctgccaatctgacgaggcttcgcgtgtgtttgctttgctattttcggttctcgggagagatggtgcaggcgtggtgtgttgatgttgatgggtggagtagaagctcaggggagtggcagcggactaatgaaacgtccacctctgcgacgtagaattccactgaaaaaatgctccagtgtaccataagctgcttcagatttgatcgtgtgtttctctccagcttgtctaaaggatttggatttgaattcctaccccatagtagacgaaggcaattaggcaaagtagagcatgtcctgccgtatctcttaaggaaagccgacctgtcgtcttgggccttgggaggcaccacacaaattactgaattcacaattgagtagaaatcaacgggtccactgtgcaatcagtgccgcatcctcatctgagaaagccggcaggtgcgtcccgctttttcggttatttctccacaggaaagacatcgaactacagatgcttgtgtcactcatcgccccgctccccgttgtctttggtcgggcgagatcatgacgggtactgggcttttgtgatgaccagcagcggcagctctctggccaggcatcacgtttgccctgtgtttcttttcccgttcgctgttctagtcacacatgacgcatttgttgtttgtaaaggctgcagtgctaaggacgccggttgggttatcacagctgatctagcctgcatccacctgttgtcaagatccgtcaacccaccgaaagcaagcaccgcccacgatgacagccataggcaaaactgcccaatccgccattttgtgagccatataatttctttttttataacaaggcgtcagcaggagagcaactatatttatatacatcttccctgatctgtccctgtccggcaacaagaacagcaccaatcaggatctcatcactacgagtaatcggcacgaccgaattatttaactactgttttatcttgtcaacttgctccagcatccaattgttaaagcactactatggtatggctgagctggcgactgctgctgtcttgctggtcaccggcggcgtcgaggatcagggccaagatcctgtacgcgacatcgaagcaaggcctgcggcggctgctggacggggtccactacgaggtgcaggccaccgacccctccgagatgggcttcgacgtcatcagaggccgcgcgcaatgaggcccgcgctgcgctctgctcctatttacgtacttacctgtgcgggggcgtgttctcctactactcactgctcagtagtcatctgcgttcgtgtgtgtgtgtgtgtgtgtgatccgccggatgctaattggcgtcggtgtgctcccgtagcgatcgatgcggccaatctgacgaggcttcgcgtgtgtttgctttgctattttcggttctcgggagagatggtgcaggcgtggtgtgttgatgttgatgggtggagtagaagctcaggggagtggcagcggactaatgaaacgtccacctctgcgacgtagaattccactgaaaaaatgctccagtgtaccataagctgcttcagatttgatcgtgttttctctcc

SEQ ID NO: 85772 - DNA, 2393 bp, Zea mays
  Clone ID: MRT4577_178236C.1
gccggccggtatctcgccgattattcttttttcctgctcgggttgtttcgaactcacgcaacgcaagctgagcaaccgctgccggccgcgcacggccgcccacccaccagtccaccactacagcctcacaccgccacagcagctgccgcggccgagccgacgacgaggatgagcggggccgcgctgtgcgcggcgctgacggagctggggttcgacggggaggacccgctggacgcggatgcgctggagtggccgttccagtatgaggaggcgcgaccgctgcttgcctggatctgctcctgcctccgcccctctaacgtcctctccccgtcccacctggcccagtatgaacaactcgtggaagagggaagactgttagagggtgaagatttggactctgcttttgatagtatttcagctttttcaagcaagaaagacaatcaagaggctgtgtttggatcggaagaaaccattcttgatatccgtgaagcaaaactagcatatagagccgaagtttttgagttacaaaagcagcttgtgcggcagcaagcacaatttgatttgcttgcaggccaggcttcaactcttattcaaggtagaagatcacgtgtatctgctatgtctgcagttagtggagagcttatatcgctagatgagatactttcttccagaaacttggagatgaattcagttcttggaagaatcactgctactacccaggaactagcccattatcattcaggggatgaggaaagtatatatttggcatattcagacttccactcctatgttgttggtgacttggcttgtacgaaagagctaaataggtggttctcaaagcaatttgagaaggggccatttcgacttgttgctgaggaggggaaatccaaatgttcctgggttagtcttgatgacatcactaattgcttgataagaggagattctgaaaaatcgcatcatcaccaacgtgtcgctgagttgcaacgacttcggtccatatttgcaacaagtgaaagacaatggattgaagcgcaggttgagaatgctaaacagcaggctatactctctatattgaaagcacaagtgtcatccgacgaggctcatatacatagggatatccattctcttaggagaaaaggttctgagcttgctggagagctctcgacactttctcaaaaggtgcaagctttggtatctgagacaataccgtgcctgtgttcagaacttgctcaacttcaaggcacatatatcttgcaaggggattatgatttaaaggtcatgcgccaggagtactacattaacaggcaaaaaacgttcatcaatcacttggttaatcagcttgccagacaccagtttctgaagattgcttgccaacttgaaaggaagaatatagctagtgcgtactcattgcttagagtaatagaatctgagttacaaagctacctttcagcagtcaatacccgcttgggtcattataattcattgattcaagctgcatctgaagtacgagaacaaggagctattgatgatcgtgacactttcctccatgcagtgcgagatctcctatgtattcactcaaatgtccaagcaacagtgccaacatacatgtcagcacatgcattggttcagcagatatcagcacttcaatctgacttgctttctcttcagtctgagctggagaacacccttccagctgaccggaaaagatgtatcaatgaattatgtactctgattcaaacagtggaacagcttctatttgcgtcgtcaactactgcagaaccaatattgacgccttggccattgatgcgggcacttgatgatatggaaaatgccaacgctcaagtcgaagtttctgtggaagaagtaaccaaggctcgcacccagaagataaagatctttgaaaatcgtgcccatgaggtggggagggagaggcaaatattcgttgatttcttctgcaaccctgaacgcctcaagaatcaagtcagagagctgacctcccgtgtgaaagctctccaggactaacctgtttctgtaggctggtctcacaggtcgtgatgctttttttttctatgtaaagtttgacttcactccagcgtcaggttggggctgctgtgcagggacggtatggaacaatatacccatcatgtagctcgggggggttcaggctgtaggtccttgtgccacccggaataggatggcattgttgtgatattatttgtagcgatatgtatgttgtaaagtatctcagaaatcacgagccctttctttcgtgtatggttttgcttttgagtaggttgtggtggtacagttgttagcgtccaaaggcacaatcggtactgtagtttggataaatgggatcgatttcctcttcaaaaaaaaaaaaaaaaaaaaaa

SEQ ID NO: 85773 - DNA, 1500 bp, Zea mays
  Clone ID: MRT4577_178237C.1
cattggctccctcgcggccgggccggggtcaaaagaacccgcagcaggggagactgggagatagagagaggagagggagggtttcctcaaagagaacccgaaaccaaacccaagcagagaacactagcgttccctcaccagggcgtccatcccagcagccatggcgatggcgtacaagatggcgacggaggggatgaacgtgaaggaggagtgccagcgctggttcatggagatgaagtggaagaaggtgcaccgcttcgtggtgtacaagatcgacgagcggtcgcgcgccgtgctggtggacaaggtgggcggccccggggaagggtacgaggagctcgtggccgcgctgcccggcgacgactgccgctacgccgtcttcgacttcgacttcgtcaccgtcgacaactgccagaagagcaagatcttcttcatcgcctggtcaccggcggcgtcgaggatcagggccaagatcctgtacgcgacatcgaagcaaggcctgcggcggctgctggacggggtccactacgaggtgcaggccaccgacccctctgagatgggcttcgacgtcatcagaggccgcgcgcaatgaggcccgcgctgtgctctgctcctatttacgtacttacctgtgcgtgggcgtgttctcctcctactcactgctcagtagtcatctgcgttcgtgtgtgtgtgtgtgtgtgatcggccggatgctaattgccgtcggtgtgctcccgtagcgatcgatgctgccaatctgacgaggcttcgcgtgtgtttgctttgctattttcggttctcgggagagatggtgcaggcgtggtgtgttgatgttgatggtggagtgagacgtcaaagcagggccagcggactctgctggcgggggtgccctacaaggtgcaggccaccgacccctccgagatgggcttcgacgtcatcagaggccgcgcgcaatgagagcgtgattggcgttggtgtaatgagctggggctcccgatgatgccggtctgacgaggcttcgcgtgtgtttgctttccccccggttcttccaagagatggtgcagtccaggggcgtggtgtgctgatgctgatgggtggagttactggagtagaagctgagggagtggcagcggattaatgaaacgtccatctccgcgacgtagaattcccttctacaaaaaaaaaaaaaaaaaaaaaaaaacatctgcgttcgtgtgtgtgtgtgtgtgatcggccggatgctaattggggttggtgtgctcccgtagcgattgatgctgccaattttacgaggcttcgggggggtttgctttgctaatttcggttttcgggaaaaatggtgcaggggtggtgccttcatgtttatgggtggagtaaaagctcaggggagtggcagcggactaattaaacgtcccccttttgggggtagaattcccctggaaaaaaaaaaaaaaaaaaaaaaaaaaaaaaaaaaaaaaaaaaaaaaaaaaaaaaaaaaaa

SEQ ID NO: 85774 - DNA, 315 bp, Zea mays
  unsure (1)..(315): unsure at all n locations
  Clone ID: MRT4577_178238C.1
gggtcacgccgccgctcccctcccaacccactattttaaaaccctagagctctgtccgtctgggggggggcgccagaaacgagctccccatcttcatccgtcaaccatggcgacccagatcagcaagaagaagaagttcgtcagcgacggtgttttctacgccgagctcaatgagatgctgacgcgggagctggcggaggacggctactggttcgtnngggtgcgcgtnacgccgatgcgcacggagatcattatccgggcgacgcgcacgcataacgtgtttggagagaagggccgaaggaacggggagattac

SEQ ID NO: 85775 - DNA, 629 bp, Zea mays
  Clone ID: MRT4577_178239C.1
ggtacacgcggccctctctcgagtttttttttttttttttttacagttacaaaaattttacattattttatcggagtggttacaaaagtataagtttgaaatatatgctagctcatgggaccatcctcaataagaagtatagaagaagtacttagacttataagaaggccgagcccaccggcacttaacaccatcacaacagcataaggttagaacctgggtaacactaggttagtgttgttagacgacgtccacttgatgattatccttgttgtgatacttgtttcatctatccgtcttcagattagttcatccgctttatcctgcggattagcccgcgcttggggtcgacttgggtcgtcttccgcatcacgcgagtaattatcgtacctaattgaaatgcacgatgcacatgaatgcatagcactgacttcactgtacaactaaaattcttcacaagaaataccgatagtgcctaccggcaaggcactaaaattactaagcgaataaatttagcttaccagcatcaaacgtgactcactactcgcgagaatgctgataagtccctggttcgggcttatcgtggaacatcatacgggggtaagtccgatgcacgctgcgtggggggg

SEQ ID NO: 85776 - DNA, 529 bp, Zea mays
  unsure (1)..(529): unsure at all n locations
  Clone ID: MRT4577_17823C.1
ccggtnccggaatcccccggngtcgacccacgccgtccgtaaaaaaaaaaaaaaaaaaaaaaaaaaaaaaaaaaaaaaaaaaaaaaaaaaaaaaaaaaaaaaaaaaaaaaaaaaaaaaaaaaaaaaaaaaaaaaaaaaaaaaaaaaaaaaaaagggggggcccgttttaggggacccaacctttcattccccgcccttccaaaaaaaaaaacttcttttttcgtgaaaccttaatttctttttcctgggccgccccttttcccccgcccggttttgggaaaaccccggcctttccccattttacccgcttggcaaaccacccccttttcgccacctggctttttcccaaaaaggccccccccttccccccttccctccttttgccctgcctgattgtttaaggggcccccccttttggggcgcctttccccccggcggttttggtggttccccccagagcgccctctcctttggcccccccccttgcgccgggccttttggttgcctgcctttcctttttccccccttt

SEQ ID NO: 85777 - DNA, 914 bp, Zea mays
  unsure (1)..(914): unsure at all n locations
  Clone ID: MRT4577_178240C.1
agaaaacactagcgtttcctcaccagggcgtccatcccagcagccatggcgatggcgtacaagatggcgacggaggggatgaacgtgaaggaggagtgccagcgctggttcatggagatgaagtggaagaaggtgcaccgcttcgtggtgtacaagatcgacgagcggtcgcgcgccgtgctggtggacaaggtgggcggccccggggaagggtacgaggagctcgtggccgcgctgcccggcgacgactgccgctacgccgtcttcgacttcgacttcgtcaccgtcgacaactgccagaagagcaagatcttcttcatcgcctggtcaccggcggcgtcgaggatcagggccaagatcctgtacgcgacatcgaagcaaggcctgcggcggctgctggacggggtccactacgaggtgcaggccaccgacccctccgagatgggcttcgacgtcatcagaggccgcgcgcaatgaggcccgcgctgcgctctgctcctatttacgtacttacctgtgcgtgggcgtgttctcctactactcactgctcagtagtcatctgcgttcgtgtgtgtgtgtgtgtgtgtgatccgccggatgctaattggcgtcggtgtgctcccgtagcgatcgatgcggccaatctgacgaggcttcgcgtgtgtttgctttgctattttcggttctcgggagagatggtgcaggcgtggtgtgttgatgttgatgggtggagtagaagctcaggggagtggcagcggactaatgaaacgtccacctctgcgacgtagaattccactgaaaaaatgctccagtgtaccataagctgcttcagatttgatcgtgttttctctcccatggtggtgattagtacctgctaccgtttctacccgaanaaaaaaaaaaaaaaagcggcc

SEQ ID NO: 85778 - DNA, 790 bp, Zea mays
  Clone ID: MRT4577_178241C.1
cggaaaagacccgagcggggagacgggatgagagggagagggagggttctaaagagaacccgaacccaagcccaagcagaaaacactagcgtttcctaccagggcgtccatcccagcagccatggcgatggcgtacaagatggcgacggaggggatgaacgtgaaggaggagtgccagcgctggttcatggagatgaagtggaagaaggtgcaccgcttcgtggtgtacaagatcgacgactgccgctacgccgtcttcgacttcgacttcgtcaccgtcgacaactgccagaagagcaagatcttcttcatcgcctggtcaccggcggcgtcgaggatcagggccaagatcctgtacgcgacatcgaagcaaggcctgcggcggctgctggacggggtccactacgaggtgcaggccaccgacccctccgagatgggcttcgacgtcatcagaggccgcgcgcaatgaggcccgcgctgcgctctgctcctatttacgtacttacctgtgcgtgggcgtgttctcctactactcactgctcagtagtcatctgcgttcgtgtgtgtgtgtgtgtgtgatccgccggatgctaattggcgtcggtgtgctcccgtagcgatcgatgcggccaatctgacgaggcttcgcgtgtgtttgctttgctattttcggttctcgggagagatggtgcaggcgtggtgtgttgatgttgatgggtggagtagaagctcaggggagtggcagcggactaatgaaacgtccacctctgcgacgtagaattcactgaaa

SEQ ID NO: 85779 - DNA, 1056 bp, Zea mays
  Clone ID: MRT4577_178242C.1
gaccctcgggctggccggaaaaaagaacccgcagacgcgtggactgggagatagagagaggagagggagggtttcctcaaagagaacctgaacccaaacccaagcagagaacactagcgttccctcaccagggcgggcgtccatcccagcagccatggcgatggcgtacaagatggcgacggaggggatgaacgtgaaggaggagtgccagcgctggttcatggagatgaagtggaagaaggtgcaccgcttcgtggtgtacaagatcgacgagcggtcgcgcgccgtgctggtggacaaggtgggcggccccggggaagggtacaacgagctcgtggccgcgctgcccggcgacgactgccgctacgccgtcttcgacttcgacttcgtcactgttgacaactgccagaagagcaagatcttcttcatcgcctggtcaccggcggcgtcgaggatcagggccaagatcctgtacgcgacatcgaagcaaggcctgcggcggctgctggacggggtccactacgaggtgcaggccaccgacccctccgagatgggcttcgacgtcatcagaggccgcgcgcaatgaggcccccgctgcgctctgctcctatttacgtacttacctgtgcgtgggcgtgttctcctactactcactgctcagtagtcagtagtcatctgcgttcgtgtgtgtgtgtgtgtgatcggccggatgctaattggcgttggtgtgctcccgtagcgatcgatgctgccaatctgacgaggcttcgcgtgtgtttgctttgctattttcggttctcgggagagatggtgcaggcgtggtgtgttgatgttgatgggtggagtagaagctcaggggagtggcagcggactaatgaaacgtccacctctgcgacgtagaattccactgaaaaaaaaatgctccagtgtaccataagctgcttcagatttgatcgtgttttctctcccatggtggcgtttctacctacatttttcttagaaaacacatttctagttactcgttcagttctgaattataaaatgtttttttttctt

SEQ ID NO: 85780 - DNA, 2014 bp, Zea mays
  Clone ID: MRT4577_178243C.1
cattgggtacctcgaggccggccgggaatggcaaaagaacccgcagcaggggagactgggagatagagagaggagagggagggtttcctcaaagagaacccgaacccaaacccaagcagaaaacactagcgtttcctcaccagggcgtccatcccagcagccatggcgatggcgtacaagatggcgacggaggggatgaacgtgaaggaggagtgccagcgctggttcatggagatgaagtggaagaaggtgcaccgcttcgtggtgtacaagatcgacgagcggtcgcgcgccgtgctggtggacaaggtgggcggccccggggaagggtacgaggagctcgtggccgcgctgcccggcgacgactgccgctacgccgtcttcgacttcgacttcgtcaccgtcgacaactgccagaagagcaagatcttcttcatcgcctggtcaccggcggcgtcgaggatcagggccaagatcctgtacgcgacatcgaagcaaggcctgcggcggctgctggacggggtccactacgaggtgcaggccaccgacccctccgagatgggcttcgacgtcatcagaggccgcgcgcaatgaggcccgcgctgcgctctgctcctatttacgtacttacctgtgcgtgggcgtgttctcctactactcactgctcagtagtcatctgcgttcgtgtgtgtgtgtgtgtgtgtgatccgccggatgctaattggcgtcggtgtgctcccgtagcgatcgatgcggccaatctgacgacggcttacccgcgacgatgctttgctattttctggcttacaagatggcgacggaggggtggtgtgtgaaggaggagtgccagcgctggttcatggagatgaagtggaagaaggtgcaccgcttcgtggtgtacaggatcgacgactgccgctacgccgtcttcgacttcgacttcgtcagcgtcgacaactgccagaagagcaagatcttcttcatcgcctggtacgtacgtacgtacgtacgaattcctgagccgctcgccttcagtttcccgtccaatggcttggctgttcaatcagtgcagcatcctaacgtcacaaaagcagggaaattgttgcttgcggcaatcatcccagctgcctttattaaggtcgccggttattttatcagatctgatctagcctgaatccacctgttgcctagatctgtcagcccaccgaaagcacgcagcgcccacgatgacagttgacagccataggcaaaactgtccaataatccgccagccatacattattattttttggacaataagttagtagcaacccgtcagcagaaacgagagcaactataatttatatacatctacctttcttgatctgtccgtgtccggcaacaagagcagcagcaaacaaatcaggattccatcgctacgagcaagcaactaccgaccgagttattctactactgctagcttgtcaactcgctccggtgtccacttgttaaagcgctatgattctgctggtgcgcacgcagttaggtgttctgacgggtgggattcgtttgctcggcggttggtgccgcgcgccgcgcctttttcttcttctttcgcgcaggtcaccggcggcgtcgaggatacgggccaagatcctgtacgcgacgtcgaagcagggcctgcggcggctgctggacggggtgcactacgaggtgcaggccaccgacccctccgagatgggcttcgacgtcatcagaggccgcgcgcaatgagagcgtgattggcgttggtgtgatgagctgagcctcccgatgatgccggtctgacgaggcttcgcgtgtgtttgctttccccccggttcttccgagagatggtgcagtgcaggggcgtggtgtgctgatgctgatgggtggagttactggagtagaagctgagggagtggcagcggattaatgaaacgtccatctccgcgacgtagaattccactgaacaatgctccagtgcaccataagctgctgcttcagatttgtttag

SEQ ID NO: 85781 - DNA, 573 bp, Zea mays
  Clone ID: MRT4577_178244C.1
cggagatctttttaactatctaatcttttctatctatttccgcttgactctgatcattcttaccttttccttctaagacaatggggatttcacacttcgaaatcctgtgcctaaagtgacctttaggaataggagacctactcttaggaaaaaaaataaaactatttttatagatatctatgaacttgaatgtttgttcttatgatacatgtctgatttggatctttaattgagtgtgatgagttgtggagtaatgtccacgattacatctgcatatacataatgcttataaaactaactagacaaactagattatccctcattaaagtatctaacctaacaatatccatctcatcttaaaagattctatcctacgctcatagatccatcttatcttaaaaatattctcttatcctaatagattcatcttatcttgaaggattcatcttatcctaaccactttacttatcccatcttaatagatctaactgacctcaaaggattctaccttatccttatggatttatctttgcctaattttatattgatcccactctagaaaaacaccatgat

SEQ ID NO: 85782 - DNA, 1233 bp, Zea mays
  Clone ID: MRT4577_178245C.1
agccggccggggtcaaaagaacccgcagcaggggagactgcaccacccagagaggagagggagggtttcctcaaagagacccaaacccaagcagagaacactagcgttccctcaccagggcgtccatcccagcagccatggcgatggcgtacaagatggcgacggaggggatgaacgtgaaggaggagtgccagcgctggttcatggagatgaagtggaagaaggtgcaccgcttcgtggtgtacaagatcgacgagcggtcgcgcgccgtgctggtggacaaggtgggcggccccggggaagggtacgaggagctcgtggccgcgctgcccggcgacgactgccgctacgccgtcttcgacttcgacttcgtcaccgtcgacaactgccagaagagcaagatcttcttcatcgcctggtcaccggcggcgtcgaggatcagggccaagatcctgtacgcgacatcgaagcaaggcctgcggcggctgctggacggggtccactacgaggtgcaggccaccgacccctccgagatgggcttcgacgtcatcagaggccgcgcgcaatgaggcccccgctgcgctctgctcctatttacgtacttacctgtgcgtgggcgtgttctcctactactcactgctcagtagtcagtagtcatctgcgttcgtgtgtgtgtgtgtgtgatcggccggatgctaattggcgttggtgtgctcccgtagcgatcgatgctgccaatctgacgaggcttcgcgtgtgtttgctttgctattttcggttctcgggagagatggtgcaggcgtggtgtgttgatgttgatgggtggagtagaagctcaggggagtggcagcggactaatgaaacgtccacctctgcgacgtagaattccactgaaaaaaaatgctccagtgtaccataagctgcttcagatttgatcgtgttttctctcccatggtggcgtttctacctacatttttcttagaaaacacatttctagttactcgttcagttctgaattataaaatgttttgatttttctagatgtattgcttttgctacgtttagatatacccaatgtctagatagatagttaaagcaataaatctaagaaaaatcttataatttagaacgagccaatatgattcagagcaaagttgggttacgagagcaacatagaagaaaaaaaagtccaaagtggggaatagccatggcaattaaaatgaagttgtgttt

SEQ ID NO: 85783 - DNA, 594 bp, Zea mays
  Clone ID: MRT4577_178246C.1
tttctgttttttcagggaaaaaaaggagagagagagagagagaggaaggaacaacctccctggttttttcgttcttgttattctatctaatgaaaagcacgagagagagaagatagagagaacgagaaggcaaaacagcacgtacgcatggtctgcgtctgttaagcccaagctgggcgtggccgctgtcgaagaggagaggagaggtctcctgcatcggggcgaacgactgggaaggaagccagacaggctagggcgacgcgagagctagctcgacaaggttcaagatttcctcagattcaatgatacggtcctcctccatgcacacttgcacagggccacaggcacagctaacacagcggttggtggtagctggtagtagttcatccgtgctccttgctgtctgctgtggtggcctcgctgagtcgcaggacgacctccatggctccatggccctgccccgcctgcactgcaacggccaacggcaacctcatgtgatgactgatgagtgactatactactgagtactgacagtggccccacgaatgctccctcggtccctccctccctccatccacctgctttccatgcaaa

SEQ ID NO: 85784 - DNA, 1017 bp, Zea mays
  Clone ID: MRT4577_178247C.1
cattgggtacctcgaggccggccggggtcaaaagaacccgcagcaggggagactgggagatagagagaggagagggagggtttcctcaaagagaacccgaacccaaacccaagcagagaacactagcgttccctcaccagggcgtccatcccagcagccatggcgatggcgtacaagatggcgacggaggggatgaacgtgaaggaggagtgccagcgctggttcatggagatgaagtggaagaaggtgcaccgcttcgtggtgtacaagatcgacgagcggtcgcgcgccgtgctggtggacaaggtgggcggccccggggaagggtacgaggagctcgtggccgcgctgcccggcgacgactgccgctacgccgtcttcgacttcgacttcgtcaccgtcgacaactgccagaagagcaagatcttcttcatcgcctggtcaccggcggcgtcgaggatcagggccaagatcctgtacgcgacatcgaagcaaggcctgcggcggctgctggacggggtccactacgaggtgcaggccaccgacccctccgagatgggcttcgacgtcatcagaggccgcgcgcaatgaggcccgcgctgcgctctgctcctatttacgtacttacctgtgcgtgtgcgtgtgcgtgttctactactcactgctgtgctcagtagtcatctgcgttcgtgtgtgtgtgattggccggatgctaattggcgttggtgtgctcccgtagcgatcgatgctgccaatctgacgaggcttcgcgtgtgtttgctttgctattttcgcttctcgggagagatggtgcaggcgtggtgtgttgatgttgatgggtggagtagaagctcaggggagtggcagcggactaatgaaacgtccacctctgcgacgtagaattccactgaaaaaatgctccagtgtaccataagctgcttcaaatttgatcgtgttttctctccaaaaaaaaaaaaaaaaaaaaaaaaaaagaaaaaaaaaaaaaaaaaagcggcc

SEQ ID NO: 85785 - DNA, 125 bp, Zea mays
  Clone ID: MRT4577_178248C.1
tgacaaaacattgctgtgaatgtagtgaccatgtggtcagtcgatgcgggcaacacagtgcgatggctttggcgttcgagttctacagtgacagtcgcatagtgcggtcctcccaaagtcccccc

SEQ ID NO: 85786 - DNA, 194 bp, Zea mays
  Clone ID: MRT4577_178249C.1
gtaccctccgagttggccgggacccgcgcggctaacaaaacaggccctcaattcgaatgactaaccttagacaaagtgtgacacatttagccacaaaccaaacagactgcgcgcgtagcggtagtgcggtacatatagacacacaaggacaggtatcttgaggacctgaactgtaacactgtggttaattaatt

SEQ ID NO: 85787 - DNA, 273 bp, Zea mays
  Clone ID: MRT4577_17824C.1
ttttttttttttttttttttagagcacaattgttctacactttgtactacctgacgatgtaaacgcctaaaaacaccttttccctcttggttcagctaacttagtgtaacgaaataataacacggcccaaaacatgcattattcaagcgtcatgtggcaaaaactgaatcaaatggcaaaaaaaaggaaacaaactggaagtgcagttggaccagataaattgaatcctcttttgcagagttccaagttttttttttggggtgggggggatag

SEQ ID NO: 85788 - DNA, 597 bp, Zea mays
  unsure (1)..(597): unsure at all n locations
  Clone ID: MRT4577_178250C.1
atcagctataatggcattgtcaaattatctcaacgacattaagttacatgcatgatctcaccatggcaataggagggagttaatgaacagattagatagtacgcctcattgtttatatgaggattgcgcagctgaacctaaacggtaaactgtcaggcacagacaacaacccacgtcacagaacaacttgagatcatctggtatacacacgagcacatctaagccgacgatctcgacttcggtgaggtctctgtgcaagcttcagcatgctaccatgggccagtcagggtgcggtgaagacaaagtttctttgccttcggtccatgtgtggttgtttattcgctccaggacctgcaaaaaccatttacagagaaatttctgtgagcaaaaaaaaatatatattgtcccaagggaacaaatcatgcagaacaaaaccacatggaagataaaaaaatcaagtcatccctatttccctgcaacgaatttatttatcttttttgggtatcaaatcaatctctnttttttcttataaacaacgaacatgatggctcatggatgaatgaactngttgacaccatgttttacgaacaagtctat

SEQ ID NO: 85789 - DNA, 256 bp, Zea mays
  Clone ID: MRT4577_178251C.1
cttaaaagctgtcttatagagaggtttggtgagttttggcaatttatttaattttacacttacatgatttaatttttaataattataaataatcttaccaaagtcattactttccaatggtagagttgtttttaaccacaacattgttgaacctctagtattacataatcttatctcaccttttcagtgttatttatgggcagtgtattccaagtattaactggagatatgaggagttttttttattactgctatt

SEQ ID NO: 85790 - DNA, 153 bp, Zea mays
  Clone ID: MRT4577_178252C.1
cgacccactcttactattctctctatctagtcaatcatatatacatatatacacttacgatccattcggctttattagatccatgtgagctatctgcaactacatgcctattctttattatccaataattccttaaattgacctgatcatact

SEQ ID NO: 85791 - DNA, 2025 bp, Zea mays
  Clone ID: MRT4577_178253C.1
ggtaccaatagtctgaatcccgtcgaaggcagcgacatgttgcaaaattctcatctttcttcccgccggattgacgaaatcgatcgctccgctcccaccggccaccaccagtccaccacacctcgatccccgcaccgcccagccggccgcccgcatccaccgcacaaaaccctaggcatggccccaccctaaaccccttgctccccacctcgtatggtcgtcgtccccttctccctccgcattgcgcgaaaccccatccgcctccgccttcttccggtctccgctgctcgcttcacccgtctcgccatgtcgaccacgccgccggcggcggctaccatatccgtcgagtatgccaagtccgggcgctcaatctgcaaggggtgcagcggggtcatcgcctccggggcgctccgcctcggcgcctctgcgcgcgacccccgtggcttcggcgccaccaagtggtaccacgtctcctgcttaccctcctcgtcgtacccgctcggccccatcgggagtatcaaggggttcgactccattaaggaccatgatcgtgcggaattgcgagaactagagaagaatcataaaagagacaatactgcagtcagccctccggaggaacaacgtccaaagaaagcaaggattcagatgttttcccctgcggagggggtgccagataatgtaacagtctctgttgagtatgcgaagtctggtcgctctacctgcaagggctgcagtgagaatattgccaaaggtgccctccgccttggtgcctcttttcctgatccccgtggctacgaaaatactaagtggtaccatgttgtgtgcttccctacatcatcatacccattatttccaatgtcaaatctgaaggggtttgattcaattgaggatcatgaccgtgacaagttgcacaaattggtggagaatcacaagagcgatggaaaagcggctgatgtattgaatgagtcaaatctgaagagagaaatggctcacagcatggatgactcgaatgaaggtgctgaaaaggatctggaaggaataaagattcactgcatgggggagtttgaagaaggtgctgaaaagaacctggaagaagcaaagttacctgcagggaacaaaatgattggtccatcgatatccttttcactttctgatataaaaaaagaatacaagaatgctacccttcctgctcattggaaggtttttgatacagttatcttccgtgagaaggaagatggccttcatgcttcatctaagattgctgcatttgattttgatgggtgccttgccaataccagtatgaagagggttggtgcagaccagtggtctttacagcataaatcaattccagaaaaattgcaaagactgtacgatgatggttacaagctggtcatattcaccaatgagtcaaacattgagcgctggaagaacaagcgacaacaagctgttgactccaaagttggccgccttgataactttattgaatgtgttaaagcccctattcaggttttcattgcttgtggtttagggaaaggaaaaggtattccagatgatccataccgcaaaccaaatcctggaatgtggtggttgatggctcagcatttcaattctggaatcaaaattgacatggatcaatctttctatgtcggtgatgctgctgggagagagaacgatcatagtgacgcagatatagaatttgctaaggccatcggtctcaagttccatgttcccgaggagtacttcggtttctaattacctgtgaccagctagtaagatggttacactacgtcgtttagtgtttggatattatcaatactgtggctattctggtatggtgatctacatgtctgtttaaaccgtcaaataatatcccagttattcacttaggtcctgtttgtttccttccagaattatgtaatccatatggattatataagtacttaataacctgcttatggattatcataatctaggtatctagattatataatccacctaataatctgtgttgtttgtttgtctctt

SEQ ID NO: 85792 - DNA, 506 bp, Zea mays
  Clone ID: MRT4577_178254C.1
aacaccttagagtcgctattattgatagcaatccagcactgaagtcaaggagttacctggataaaaacagtatacccgattctagggtcagcaccgttacccctgcaaccatttccttcttcaaggatattggcgcctgggagcatgttcaacagcaaaggcatgctttctttggtaaaatgcaggtgtgggattacactggacttggatacacgaggtataatgctagagatgtgggcaaagaacaccttggatgtgtggtggagaacaaggtgctttgcaactcattgctcttacgtttacagattggtgtctcttactttcccgttgaagaccagacaagcaggaatggaaccattatctgttggtcatactacagaagagttccatcacagtgatttagttaaacttgatctcagtgatggacggagtttatattccaaattggtgataggagctgatggttcgaagtccaatgttagacagattgcaggcataaaaacaac

SEQ ID NO: 85793 - DNA, 372 bp, Zea mays
  unsure (1)..(372): unsure at all n locations
  Clone ID: MRT4577_178255C.1
cgcccgcgaggggccggggtcggggtcgcctgggccatgcgcgcgggctgggcagggggcgtgcggtgcgcagagcggagcggcctcggagcctgagccgcccggggccggggccggggagccgcgcggggccggccggccggggggaggggagcgatgcggcgccggcgggcggcagtggccgcgggtttctgcgcctacttcctgctgggctccgtactcaacgtgctcttcgctccgggctcggagcctncgaggccaggccagtcccctgagccttcgccggccccgggtccgggccgtcgcggaggccgaggggagctggcccggcagatccgggcgcgctacgatgaagtgcagcgctattcccgc

SEQ ID NO: 85794 - DNA, 402 bp, Zea mays
  Clone ID: MRT4577_178256C.1
cccggggcgcgcccccccgcccccaccaccgccccggcgcgggcggaggcggcgcgaccggcggcacgggagccgcccccgccgcacgaacgagccgccagcggggcgcggcacctcgcgcgccgagagcggcggaccgccccgaaggacgaccgacggcgcggcccccgcacgacgagccaaacagcggcacgccggcgctgcgcccacacgacgtccagggccgaccagggggagggcagcggctgccccaagggcacgggcgacacagccgggggcggcaccgggaccacacgcggcgagaacgcacaagagcacccgccagggccacggcgggccgcaggccgcgggcgcggcggacggcccggcggaggacgggccaggggccccgccctaccacgg

SEQ ID NO: 85795 - DNA, 394 bp, Zea mays
  Clone ID: MRT4577_178257C.1
ggacccaacagggcaattttataatattaccctgcaccaaaaggcaaaaaaaccccaaaagggcaccctgggaaattttaaaaacaacccaggatccacggcccccagggccttggggcttccgaattaaccataacaaggaatatcccaaaaaaggaagggggaaaaacaaggcaaaagggtccaaagaagggaaacccaaacatccacgaggcggggtggccccccgggccgaaagggaaaaaacacacgaaatctttgacttcaacgaattgggggccccgaacaaaccacctgtttccctaaaaagggaaaaaggactccccaaccctggggcctgggagaaaagggattaaacccttgaaatctttttgcggccaagagtgggcaaaaa

SEQ ID NO: 85796 - DNA, 598 bp, Zea mays
  unsure (1)..(598): unsure at all n locations
  Clone ID: MRT4577_178258C.1
caagaaaacttcgaaatctgcccatcaacgctctgttcatgttggaattattcttgtcggctgcttggtaaatcatgttaaagtccccagtcaacacccacggtccactgcatagcgctctgatatctttgagttcctgcaggaattggattttattctcatcttcctgtggtccatagacatcagtgaaccaccaattcacaccatcgaactgaactgagaccgagaaaatatcaatgcgagagagatggcctgacacacagctcccttccacgcaatcaagatgccaccacaggtaccatttgcagggagggtcaagcacttgtcaaattctgtcccgcaagctgagagcaacagataggcagagaacgcctccactttagtttcttgaagacaaacaatgtcggctttggaagaaagaactgtatctcttacataatcacacctgggcttattattaaggccaccggcattccaaatcaggatgcttgacaaattcattgtaaacaaaataaacaccaccaggtntctagggattagagaccaaccaggatctccgggcctctgaactcctcgctggaatccacctgccaaccca

SEQ ID NO: 85797 - DNA, 392 bp, Zea mays
  unsure (1)..(392): unsure at all n locations
  Clone ID: MRT4577_178259C.1
cacttatacacaccaacaacaccgatatctccacctctccctatctcccaaaacatccacgctagaacatagggcgccgcagcgcgacgcaacacctgggctgcgcataactccacactttactttgctgccgactacctctccgatccatccgcagaacatttaaatattgttgcgcgacaggcaactcgcagtacgatctgctgaagccccaaaatcgaatcgctccggctgaaggccataaccgcgctcaagagccaagtgacacggccccctgactccatcccctccccgccctgcatctcctcgaggacatacttcagactcaatctgagccacatgtcttccctttccggnaaaggctcccgccccactgacttccatcacgaaat

SEQ ID NO: 85798 - DNA, 316 bp, Zea mays
  Clone ID: MRT4577_17825C.1
gaaacaagagattttttgtgttaaagaaacaaataatatataaaggaaaagcaatgaaaacccaatggaggtgacagagggtgtgcagagagaggcccacccacacgcgaagtgtcagtgagtcagcaaagcaaggggccggaccccacatatccggccaattctctcacactcacttcctctgccctcgaacacacaaaaagaaaaatggcgacacaaaatactccaatctagatattctcgctctttttcgtcttctctccacaccacccactatagctttggacttggatatcaaattctcccagtttcccac

SEQ ID NO: 85799 - DNA, 359 bp, Zea mays
  Clone ID: MRT4577_178260C.1
acacagaacacgcttcattatttctgatccatgatacaaagtgccacaggagctgctcgcctacaagctctgtactaggatccctgcgttccaggtgctgcagcaccttgcttgggttcaagggacttatcataatcctccatggacttgaacagctgcgagaagattcccttgccgaacccgccgaagccacccttctgggattcttgccccttgtcatgcttttccatgcacgcgatccttaggatgatctccacgaacagggtttggctgtccccgactggctcggggaagatttcgagcaggacgccctggtcattcctggccaccagcacccctagctgctggcactccctaat

SEQ ID NO: 85800 - DNA, 748 bp, Zea mays
  Clone ID: MRT4577_178261C.1
cccacgcgtccgtctagatccaagctaacggaccactgctgtcattgctgcctgggaccgggagcaagagaacgacgacgaagagatcggctgaacaagagggtcgcgtagagccatgcttgcgagcgcgacgagggcagggacgtcgtccaccaagcccggcctcgcggagggcgccgtccgcagagccagagccagagccagagccggagacggcggcagcggcacccccatcgtcgtcaccgatgtcgggcaggaggtcaccgtctcgcagttcgtcgcgcagctagatgaggcggcccggcggaggctggacagcatgcaccagaggctgaggctgctggagcagcagatggagaattgacacctagttattagtaggtagaattgacacctacgcctagttattagtagttactttgctaggctcctggcaacatcgatccagcagcagaccgcagtccacagatatttttttctcgattaaacctttctcatgtacatgtataagcgattatggattatgatccaaatacttcctcacaaagtaggactctaaataaattttagttcaaaaatgaatagaaaagagacacgattttaatccgatccttaaattttatattgtaaaatttaaaaggtattgtcacccatatgtacatgagcgatgattaataatatatatgattgccaatatataaaaaacagccgcagggttgcccctaaaaaaaaaaaaaaaaagagaaaa

SEQ ID NO: 85801 - DNA, 276 bp, Zea mays
  Clone ID: MRT4577_178262C.1
gcgtccagtctcattctagacggtgcatgagcaatcgacgtaggccgtcgggtccagcatgtcgatatactccgttctgatggacacatggacatcgcagcctctgcggttcagccggacatgctgtatgctcgggagaacactggcatgacgtattcgactggacactttccacacggcatcaacgatatctacagtctggtacagtccacgatgactgccaagcctaacggaagcagtgttaagcacagcaacatatcatccatcagtatgcgc

SEQ ID NO: 85802 - DNA, 404 bp, Zea mays
  Clone ID: MRT4577_178263C.1
ggagtggttgacccgaagaagtttagtgttctgggaaactggcagcgtgagtacacaatggaatacatcctaacccatctcaagaaagagatggcatccccacagaaccgcaagctagtacagcctccggaggggacattcttctaaagacgccagctactcatgtccttccatggtgactcaggaaacagcttccgcacctggtttctatatatcttatatatgtctagtttaatctcccagatatctgtgaaccaccgagatcgagtacaagcagacttggttcattacaatttgcacggtggttgctaaagatatgggatgaaacggttgctggtttggctgctattaaggtcgtgtaatctgctgggcaatttcagcttcttaatgccattgttatgatg

SEQ ID NO: 85803 - DNA, 571 bp, Zea mays
  Clone ID: MRT4577_178264C.1
gggggataatctagattggcaacggggcagctccaaagtttaggacaaaggttttccgtctggaaaacttgacacaatgttttttggcggggacaaaaaagggccaaaaaaaaccttgggtgggctttggcccctaccgaaattttccggcccaaaattaaaccccccgctttttaagtttttggggggctatgacctaaaagccccacttttttaaggggcatgcccatggggggggaccttgttactcccaaaattttttggaacaccatttggggggtccatacctacaggggacttttcttccggagagccgccccccccattaaagcccccattggtttggggttttccccggggggggaaaaaggtttttttgggggagttcttaggaaaaagatggccattaaaggtctccttgccattgcccttactttggggggaaggggataaaccttgggaaaagttgggtcccccctggccataaaaacccggcttcttttgaggaggaaaaggggggcccgaccccggaggaaggaaaacccccgtcccaggaccagggaatcggggg

SEQ ID NO: 85804 - DNA, 242 bp, Zea mays
  Clone ID: MRT4577_178265C.1
gaccttacacaatgcgggaatttctaaaatttcacattgtcatgcacaattcctagcccaatctcattggaaacagttcattttggaaaggggagcaatgaactaagggtttcaaaatgcaacacagtctcaaaagaaacacggggctcatacctaatcaaaattgccctttggagggggggcaaaataattcgacaaaaaataaaaaacccaggaaaaaaaaaatgcctactctgtaatct

SEQ ID NO: 85805 - DNA, 237 bp, Zea mays
  Clone ID: MRT4577_178266C.1
acaacgcgagaagccttgaaagactaagtacacaaacacatgcaatacacagcacgacgtaacacagcacccaccaaccagccaactcatgacggctcatgatgcaacacgagacaagatgagggtacgacacaagaggctccggggggcacggatagctaacaggtaatggcggcggacaagtctacaattccgggagagacacaatccaggcatacgagatgccggcacacacac

SEQ ID NO: 85806 - DNA, 332 bp, Zea mays
  Clone ID: MRT4577_178267C.1
tgaggcctcatgggtcacacctcccgtaccaccctggccaggtggaagctttgtcggtcttcctcgcactacctttcactttctacatcttcttcgcacccttactctggagcaaagtgttccagtacatagtcatgttactatacactccgctcttattatgtatcctttttctatacatctgatgtgccgcagcaaacccagcaaatccagggctcttcaaatcaaagaattatctgagcttgtacagaagcggcaaacacaagcatctgaaagaatccaaaaagacttcttcaaatgctcggttacaaatggaaggaactagcgaaaaa

SEQ ID NO: 85807 - DNA, 1635 bp, Zea mays
  unsure (1)..(1635): unsure at all n locations
  Clone ID: MRT4577_178268C.1
ggggtcaatccaacaacaaaccaaagcaaggcacagcgcaggcggcaggcggtttgcttacctggcaggctcccttctcctttccgcacccagctccatcccgtgatcgtgatcctgatccatcgatccatggcggcggccaataagtccatcgaccggctggcggcgcgccgggtggtcccggccgagcccacgccaaccggcccgctccgcctgtcctggctagaccgctacccgacgcagatggcgctcatcgagtcgctccacgtgttcaaggcggcccccgaccggcccgccaccaagaccggcggcactgacgccgccgccagcccggccaggaccatcgagcgggcgctcgcgcgcgcgctggtccgctactaccctctggcgggccgcctggtgctgtcggagtccggcgcgcagcaggcggtggactgcagcaacgccggcgtgtggttcacggaggccgaggccgcctgcaccctggaggacgtggactacctggaggcgccgctgatggtgcccaaggacgagctgctcccgcccgctccggccggcgacccacgaggacgagcgcgagctgatcctactcgtccaggtgacggtgttcgagtgcgncggcttcgtggtgggcttccggttcagccacgcggtggcggacgggctcggcgcggccaagttcatgggcgcggtgggggagctggcgcgcggagcggaccggatctccgtggcgcccacctgggcccgcgacgccatcccggacccggccggcgtgctggtcggcagcctccccgagcccacgggcgccaagcgcctcgagtacctggccgtcgacatctccgctgactacatcgaccacttcaagtcccagttcgcggcggccacgggcgggggccgctgctccgcgttcgaggtgctcatcgccaaggcgtggcggagccgcacccgcgcggccgggttcgacgacccggactccgccgtgcacctctgcttcgccgtgaacgcgcggcccatgctgcacgcgtcgctcccgcggggcggcgccgggttctacggcaactgctactacatcatgcgcgtgtcggcgcccgcggggaaggtggcgggcgcctcggtcgcggaggtggtgaggatgatcaaggacgggaagcgccggatgcccgcggagttcgcgcgctgggcggcgggggagctgggcgccggcggcgtcgacccctaccagatcacgtccgactaccgcacgctgctggtgtccgactggacgcgcctcggcttcgcggaggtggactacggatggggcccgcccgcgcacgtcgtgccgctgacaaacctggactacatcgccacgtgcatcctcgtgaagccctgggcccacaagccaggggcgcggctcatcacgcagtgcgtcaccccggaccgcgtcgccgccttccacgaggccatgctcgacaccagctgctgatcggagagaagagatgagtctgggggctctatttgcatgcatcgtctgtgtctgtgtggtgggaagccgccgcctacttacagaaatatgtgacattattcatgatatctggaaaaaaatgtgagctgtattgcataaaataaaaaaaaaaaaaaagagggcggcctctatag

SEQ ID NO: 85808 - DNA, 1678 bp, Zea mays
  Clone ID: MRT4577_178269C.1
acgccataacacttctccttcccgtcgtcaatccaacaaccaaaccaagcgcaggcggcaggcggtttgcttacctggcaggctcccttctcctttccgcacccagctccaccatcccgtgatccatcgatccatggcggcggccaataagtccatcgaccggttggcagcgcgccgggtggtcccggccgagcccactccaaccggcccgctccgcctgtcctggctagaccgctacccgacgcagatggcgctcatcgagtcgctccacgtgttcaaggcggcccccgaccggcccgccgccgccagcccggccaggaccatcgagcgggcgctcgcgcgcgcgctggtccgctactaccctctggcgggccgcctggtgctgtcggagtccggcgcgcagcaggcggtggactgcagcaacgccggcgtgtggttcacggaggcccaggccgcctgcacgctcgaggacgtggactacctggaggccccgctgatggtgcccaaggacgacctcctcccgcccaccccggccgccgaggacgagcgcgcgctggtcctgctcgtccaggtcaccgccttcgcgtgcggcggcttcgtcgtgggcttccgcttcagccacgccgtcgccgacggcccgggcgccgcgcagttcatgaccgcggtcggggagctggcccgctccggcgcggtgtcggtggagccgcagtggggccgcgacgcgatcccggacccggcggcggcgctggtggggcggctcccgacccccgacgccggcaccaggcggctggcgtacctcgccatggacatctccgccgactacatcgggcactacaaggcggagtacagcgcggcgcacgcgggcgccgggtggtgctccgccttcgaggtgctcatcgccaaggcgtggcggagccgcacccgcgcggcggggttcgagccggacaccctcgtccacgtctgcttcgccgtgaacgcgcggcccgcgctgcacggctcgctcccgcgcggaggcgccggcttctacggcaactgctactacatcatgcgcgtgtcggcgcccgcggggaaggtggcgggctcctcggtggcggaggtggtgaggatcgtcaaggacggcaagcggcggatgcccgcggagttcgcgcggtgggcgacgggcgaggccggcgccgccggcgtcgacccgtaccagatcacggccgactaccgcacgctgctggtgtccgactggacgcgcctcggcttcgcggaggtggactacggctggggcccgcccgcgcacgtcgtgccgctcaccaacctggactacatcgccacgtgcatcctggtgaagccgtgggcgcacaagcccggggcgaggctcatcacgcagtgcgtcaccccggaccgcgtcgccgccttccacgacggcatgctcgacaccagctgctgagctgagcagctctgcctgcctgtgctggattcgaggaaggcaggattggtattggattggatggggggtgggggagcgtggatgcattggttggtggtgattgtttgtcagtgtgtgtgtgttacctgctgaataactcccagaccccctcgattcagggagtttgggggagctgagctgtgttacctactcgcaccaatattgaattattcatctccgaaaaaaaggagatcaattaaccgt

SEQ ID NO: 85809 - DNA, 251 bp, Zea mays
  unsure (1)..(251): unsure at all n locations
  Clone ID: MRT4577_17826C.1
tttctctaaangatcaacttataaaacaacatatcacatcncanggccacccggcaaaaataataaatctttcatctcatcttaccaaaccagtccatacacacaataacctttcacccttatacacacctgtattaacacacattgagagcaaacatatgaaaaatacacaagaaacttattccacaatccacttacacataacaacatgttgtgaaactcaaacctctaacatgaccccatgggctcca

SEQ ID NO: 85810 - DNA, 347 bp, Zea mays
  Clone ID: MRT4577_178270C.1
caaaaaaaaaatccctgcattaggaacgggtgccccctgcccgccttttcttacaaaaaagctccaacaggaatgccctccaaactgagacatatacatataatttgaggaccaaccccccctaaatcagtccttggggccaatctcagggccctgaacaaaaagcccttttttccaggtgcctccaaacctggcctccttaacactggaacgaaccactagggggacgccccccccatgggtggcccaggttcctagctccccctccatccaaccatcaggccttttatgggggagcccagggggagctccttccggggataccccgttttttttgtgcccacggg

SEQ ID NO: 85811 - DNA, 2431 bp, Zea mays
  Clone ID: MRT4577_178271C.1
agcaaccaaaatcaaaccaagcaaagcgcaccgcaggcggcgccagccagcggcagtagcttgcttacctggtccccgcccccacacctcttcccttcccttctccctcccatcacacaactccatctccaccccgtgaccgacccacccatccatggcggcggcgcccaagtccatcgagcggctgccggcgcgccgggtggtcccggccgagcccacgccagccggcccgctccgccgctcccggctggaccgggaccccacgcagatggcgcctgacgaacttcgactacatcgccacgcgcatcctggtcagccgctcggcgcacgagccagcgccgccgggcccctcgcgcccgccgacgcccgcccgcttctaccgctccggcgacgccatggtggacttgacctagcggaccgacgagcacagcccgtggcccgctaccgccgtcgtgtggttatcggcatcgtggcctatgccgctgtcatcgccgttaccgtggtagaccgcgaggggtgattggtgctgccgatggaacccctccgcgagcccaccccggccgccgaggacgagcgcgcgctggtcctgctcgtccaggtcaccgccttcgggtgcggcggcttcgtcgtgggcttccgcttcagccacgccgtcgccgacggcccgggcgccgcgcagttcatgaccgcggtcggggagctggcccgcgccagcgccggaggcgccggcgccggcgcggtgtcggtggagccgcagtggggccgcgacgcgatcccggacccggcggcggcgctggtggggcggctcccgacccccgacgccggcaccaggcggctggcgtacctcgccatggacatctccgccgactacatcgggcactacaaggcggagtacagcgcggcgcacgcggcgggcgccgggtggtgctccgccttcgaggtgctcatcgccaaggcgtggcggagccgcacccgcgcggcggggttcgagccggacaccctcgtccacgtctgcttcgccgtgaacgcgcggcccgcgctgcacggctcgctcccgcgcggaggcgccgggttctacggcaactgctactacatcatgcgcgtgtcggcgcccgcggggaaggtggcgggctcctcggtggcggaggtggtgcggatcgtcaaggacggcaagcggcggatgcccgcggagttcgcgcggtgggcgacgggcgaggccggcgccgccggcgtcgacccgtaccagatcacggccgactaccgcacgctgctggtgtccgactggacgcgcctcggcttcgcggaggtggactacggctggggcccgcccgcgcacgtcgtgccgctcaccaacctggactacatcgccacgtgcatcctggtgaagccgtgggcgcacaagcccggggcgaggctcatcacgcagtgcgtcaccccggaccgcgtcgccgccttccacgacggcatgctcgacaccagctgctgagctgagcagctctgcctgcctgtgctggattcgaggaaggcaggattggtattggattggatggggggtgggggagcgtggatgcattggttggtggtgattgtttgtcagtgtgtgtgtgttacctgctgaataactcccagaccccctcgattcagggagtttgggggagctgagctgtgttacctactcgcaccaatattgaattattcatctccgaaaaaaaggagatcaattaaccgtatgtttggttgtggaaaaaaaaaaaaaaaaaaaaaccgattagcgccccgcctcgtcctgcgttcaccagccgccgtcgtctccgccggcctcccgtttgttcatgggtttcttgtttttttttctcctctcagttactgtggtaattattagttggtattacaattactaatcacattgctgccttaggacgagtggtcatctagaaaaaaaaaccgaagcaataaactactaatataaagagagaaaaagataagaaaggaaaaacatgataataaagtggtcgcccgggcaggtacatactgcacaggcaggcaggcagccagctagagccaggtgaggtgaagaacagaaggagaggtatgggcgggggacagatagacacagctagatagtagttggcaatagtgggattggtattggattccttatttccgttggatgccttgttctcttttgttggtgtcggggtgagtacacggcatttttcttttcttcttgcctgttgttctttgggggctttgatcggagaaaggatcaaaactggactcggtgggaagccaccaactagtctgcccctaaataccataataagattgtatttgtaatatagtgttcagcattttttttctgtctagtatatacatgaactacaagccataaaaaaaaaaaaaaaaaaaaaaaaaaaacctcgaggagggg

SEQ ID NO: 85812 - DNA, 822 bp, Zea mays
  Clone ID: MRT4577_178272C.1
ggcattgcaaatctgtcaccgaagctgtcaatagctagagagagatagagagagagagagagagcagggtgcggcgccggagcggaggaagatgagcgggagcagcaacagcagcctggagacgcgcacgttcctggacgaggtgcgcggcctggagaagaactggatggtcgacctcggccacccgctcctcaaccgcgtcgccgagagcttcgtcaaggccgccggcatcggcgcagtccaggcggtcgcgcgggagtcttacttcatggccatggaaggggagggtgggggcacgggagccgtgtccgactccaccggcgccaggaagcgatcgttcccggatctcaacggagggaacagcagcaagtcagctgaggctatggtgaaaagcgtgagcaaagagtctctccagtgggggctcgcggccgggttgcactcggggctgacctacggcctgacggaggcgcgcgggacgcacgactggaagaacagcgtggtggcgggcgccctcaccggcgcggccgtcgcgctcacctcggaccgcgcgtcgcacgagcgggtggtgcagtgcgccatcgccggcgccgcgctgtccacggccgccaacgtgctctccggcatattgtgagccgctcagccggcaaattagctgtccggagttttaactacctgcatcttaacttctcaagtctgccattgttatgctagctgttggagcttggaagtcttcagtgtagcactcgttgtaattggcatcttgtatgcttgatttcctgtgctatcacggggtacaaataaatcgaaaaatcatgtcgaacc

SEQ ID NO: 85813 - DNA, 407 bp, Zea mays
  Clone ID: MRT4577_178273C.1
tcgcgatctagaacctggacgcgcctcggcttcgcggaggtggactacggatggggcccgcccgcgcacgtcgtgccgctgacaaacctggactacatcgccacgtgcatcctcgtgaagccctgggcccacaagccaggggcgcggctcatcacgcagtgcgtcaccccggaccgcgtcgccgccttccacgaggccatgctcgacaccagctgctgatccaggggaaacgaagcccgaggcgaagaggattatgctaaagctaactgatggatggggttgatgagtccgggcctccgggggctctatttgcatgcatctgtgcctgtgtggtgggaagccgccgcctacttacagaaatatgtgacattattcatgatatctggaaaaaaagtgagctgtattgc

SEQ ID NO: 85814 - DNA, 606 bp, Zea mays
  unsure (1)..(606): unsure at all n locations
  Clone ID: MRT4577_178274C.1
aattcggcacgaggctcatctgtcagcgccacaggtgaccggaaaaccacggccggcgttcctgcttctctacccggtccgaattgctgaccggatcaacccgagaccttgcaggattatcgatctgattgcggcatgatccgcttcatcctgctgcagaaccggcaggggaagactcgactggccaagtattacgtcccgctcgaggactcggaaaagcacaaggttgaatacgaggtacaccggctcgtggtcaatcgggaccctaagttcaccaacttcgtcgaggtaatcgtgttccttattccctctaaattcttcatatcatactttgcaacttctgaatctgaatgtgagaggggctatgaggatttatctatgtgaatttgtgatagaagtggttatgaagatcgtggcatcagtgtagttgaagttatgggaggtggattcagtgggaacgtagggacggacacttgttttgtttgcaattgctattgnggacttgttgtaaaggaattaaggaaatattggtgtgagcagagtgtgagagtcgagcagatatctgagatgctgatcgagaactaaggaattgtgttctaaatattg

SEQ ID NO: 85815 - DNA, 2873 bp, Zea mays
  Clone ID: MRT4577_178275C.1
agtaatagtaaaccacaaccaagcaatctttttgtttctccttacctgcctaaatgcctcgctactgcattttctttacacataaaaccctgtctaccaacgcgaaaatgcacaagagaatacgaagacaaagccaacgaggcaacgacccgtggtatagagtactgacaaattcgctaaatgaaacagacaacaccaaactctcgattgccacaacctggaagtagcctaagtgcaaacaaattctggtagcaagacatgggtgccctgggagaaaatatgggagcaggcacagtagcctagtgcctacatgtgccattagatgagcaaaactctgaagcttaccacccctgctccttatttaccaagggatctgtgcgtccaaactaaccaccggccaactgtgggcaggcgccaaatgtctcatttacctcttcctcttcccagccgaacctcctcccgccgcggccttcccacctgacccggttgctcttgacctggcagcaggcgccttcttcccgcgcgggccatccccattgctcttcaggtcaagctgcacttggattcctttcttcttgtcgctttgcaggtccagcttcggcgtagagtcagcaggcacaagctcatcattattgtcagcatcagaagaaccatcttcatcatcttcagctgatgctagtccattttcttcaggtaggctctcttctaccggctccaagatcgccgccactcgtttctttaaaggctttttcatgcctggaatgtttattagatctgctgctcgaacaacacgggaactacttccttgtttgtatgcctttgtcaaggcacttttaacagcaggttgaatcccatccataggacttggatgacccttaaatttggatacttcaacaattgtatcgaagtcttcctggcttaaagagtatgtatccataaactctaccaccttttgaacagcttcatcctttgacatttttttcagtgggtcagtcagctctctcaagataagagtaagataatccaacctcaatgcatccctgtccaagtttgcttgctgggaggcaagaatatgactgtggacatcttccagtagccttctgtttttgttagtagtcgagtacttacccaaccatccaccaaacctattaaagtttcgctcacctgcttcaaggatttctctgttcccatgcatcaaagcggcaggtactatagatgaagcaaaacaagcagcttgtgacagctgccactgtcgatatcttcttatctgtacattaacaagatcaccgtccgctatagattcagcagcccgggctaaagcattcattcttttaactccactttcatccttgccgatggtgttaggccgataattgatataattttcctggatgatcaagggaactaaatcaggatcgctcatgccaaaatccattctctcatccatccttaacctcccgccattgaaaccaaaaagtttgtcaacagcagtaaaaggagaaatatcttcatcctttgaactgctattaagtcgctcctttatatcatcatatttgaccacagactgggagaggctcatatactgcaaatggttgagtgccatgcgaatatctccgtgcactctttcagcaagctcttccattgcattctcttgagcttgaataccttcctttttggcaatttccatcaatcttttacccatctgttgttttgttggctttctgaagttgagcataaggcagtaattcacaagactcttcaatttctgactataacggtcattacaaatgcagataatagggatcttggatatcttgatgctagcaataagatcagcaacaccacctctatctccagcagacataccatcaacttcatccataactagtacagctttgggatgttttaaccgattgtcactataattcagagtcgcgttgttgataagctctttgatagaatttgatgtactccccccaacacccttctcgatcttggagtctgccttaccacggctatcactcgcatttacctcaatggcctgcaaaccaagcatctgactaacaactttagcagttgtagtcttaccgataccaggaggtccactcagcaacacagcctttttggctgcactgtcagtttgtttctttcccttacccttttggccagaatgaaggaatagtgcatcccaactttttaaccaatcatgaagttgtttgaccattgattgattgccaactatgtcatttggaacttttggccgatatttttctgtccattgcatagaaccacggtcaacaatcttgggcttttgtttgtcagcggaggcacttgcagcattactgtttgaagcaatacttttgcctacagcacttgcttcggctcgtttttcaactttagctggagagctctttgtctgtgatttctgaagcttttcagaactgttgttgttttgacgtttgtctacaggagcctttgcaggctttgattttcggatcaaatcaaataaaccatcttcagtcaagaatggaacacccagatcttttgctttgttagatttgactccaccaatgtcttcgtcggccaataagtagctcgtctttttactaatagagccagtcacacggccaccataacgcttaattagatcagttgcttcctcacgttcaagactgtcgagggtaccacttatgacaaatgtcagaccagataaacagtcaggggcaccctctgggacctccttttctcctttgtgaggaggatctttcctctcaccaaaattcataaaacctctcccacctcctctacctctgcccccaggggcagctcctgcatttacccggacgctgggcggacgctgggcggacgctggg

SEQ ID NO: 85816 - DNA, 365 bp, Zea mays
  Clone ID: MRT4577_178276C.1
gttatggcaccagtgttggtacaggcaacgcagcacggcatcgagtcaagccagttagcaagcgatggaacaggctacactgataggagagaacggctagaggagggatcggaagcgcgactgccatgggcatgggcatggagaccgcggatactgcccgtgcattctatacggacgtaaaacgaatcattatcaaggtaggcacggatgctgtcactggaatgaatggacgatcggccatgggcaggctagtctctctatgtgaacaggtgagacaactgaatgtttacgggtatgaggagattctgctgacgtaaagatctgttggtgtatgcaggcagatgatctagtactgtagacttatc

SEQ ID NO: 85817 - DNA, 631 bp, Zea mays
  unsure (1)..(631): unsure at all n locations
  Clone ID: MRT4577_178277C.1
gcctgcgtgtaccgggctcctattacacggtcgaccttagcgttcgtatcttgcatcatataagcacaatagtgtctccatcatggcagctaaaatttttgactccttagctgcttggactttgtggggtgctggtacggataccattgggccacaatgactcacaagctcctatagcttcccttttttccccgtacctgtgaccaacggtgtctggggcatgtgaaaacccaatacgttaaaccctgcaggatccaacaggaagtcgcaggtgtcatacctacctttatgactcttggtcctacaacaatgcatgatgcctattacaggagtaacctttggtgcatgtattgggacagaacataaatggctgaggatctgcaacaacttgtgctatcaaagcttgctgcctactctgaaaatcagaagcttattccattcaaccaactagctgcattgaactatgctttttatttgcaacaacaacaactaccattcagccagatatctgctgcctacccccagccatttgtttcattcaaccaactgacagcattgnaactcttctgcttatttacagcgatcgcaactactaccattcagccagctagctggtgtgagccctgatacc

SEQ ID NO: 85818 - DNA, 358 bp, Zea mays
  Clone ID: MRT4577_178278C.1
ttagtccataagcgcgacttatgtttttcacataaaagtttttttcgaatcctgttcaaccaaggaaggagaagaaaaaaaactacaaaccaacagtttctacgctcagcacagctattggcagtgcagcaccaacattagcaaaataagtattgtccggcggtaaacaccgtgacaaaatttggcatcggttcccggcactggaggtcaccaccactcatctacaaccatctacagctagacgaggacgacgtcaacaccggcgttagcggcagcgtgaccggcaggggcgcctaccgaccgctggaacacggccgacacgatggggttgcacacgggctccaccttcttgagcttt

SEQ ID NO: 85819 - DNA, 211 bp, Zea mays
  Clone ID: MRT4577_178279C.1
cccactcgtccgcttgtgcgcgttgttatatgttgtttatgtgaggctgcatgcgcttggtatttgttgtttatgtgaggctgcatgctaatgattaactctggtctttatgtccatgtgagaaggctaataaattatctctttattttggttcgtgaaaaaggatgtttgaccctcgagacgagtaactacatatggtctgatacttact

SEQ ID NO: 85820 - DNA, 255 bp, Zea mays
  Clone ID: MRT4577_17827C.1
gtaatgcggagatgcaggaagttggtgttggcctatatcccagtatctctttgctcaatcacagctgtgaccccaactgttcgattgtgttcaatgggccccacctcttactacgagcagtccgagacatcgaggtgggagaggagctcaccatctgctacctggatatgctgatgaccagtgaggagcgccggaagcagctgagggaccagtactgctttgaatgtgactgtttccgttgccaaacccaggaca

SEQ ID NO: 85821 - DNA, 160 bp, Zea mays
  Clone ID: MRT4577_178280C.1
cccgcacatgggtatcatccagcatggcgggcggctgcggcggcggcgtgccgggcctgggattctaccagggacatgccaacggcggcggatgcggcggcatgcattctggcgcggagatacttcaggccgccgcggcgtccgggaactccatggcgca

SEQ ID NO: 85822 - DNA, 382 bp, Zea mays
  Clone ID: MRT4577_178281C.1
acgccacgtaagctcggaattcggctcgagcggaaccaaaccattcaatttatgtgactggaatgcctgtaaagatggggcagagggatgacattgacgtgcttgagccccctgatgcccttaaggccatggatgctgaggcgatggatgctatccacattgtggcccatgaggaaaatgcacacaccccgaacagccagctcggtgcattatcactaaccgaacgcatcatatgctaacttgactgccatgacaaactatcctcactatgcaaatgagtgatgtgaccaaaggttacctaggacatgacagacatgacccttttgctccttctacttctggaccggagggccgtgagtgcatttgcactctgcgcagtact

SEQ ID NO: 85823 - DNA, 227 bp, Zea mays
  Clone ID: MRT4577_178282C.1
attcggctcgagaccacgtccgcctcttttaccatctagcaaatctaggggttggaaggatgactaaatggcaccggatgcggtgctcgggacagataaacgatacaacggaaccaacggctatggacaatcacccccgacgactgttgcaacgacctattggaccaccagacctgcatgaagtcctaccgatacgcgagccttaacgactgcgatcaccgcaaata

SEQ ID NO: 85824 - DNA, 458 bp, Zea mays
  unsure (1)..(458): unsure at all n locations
  Clone ID: MRT4577_178283C.1
cggaccggttggtcaagtggagactggtgtcatcaagcctggtatggttgtcacctttggtccaactggcctgactaccgaggtgaagtctgttgagatgcaccacgaggcgcttcaggaggctcttccgggtgacaatgttggcttcaggggtganagcgctgctgnnttganctcaagcgngggnnngnggcccccaacaccaaggacgaccctgccaaggaggcccccagcnncaccncccaggncancaacangaaccaccctgggcagannggcaacgaaaaagccccagngcnggacngccacaccncccacanngcngncaagnnngcngagcncannaccaagaacgacaggcggncnggcaaggagcnngagaaggagccaaagnnccngaagaacggngangcnggnanggngaagaagaaaccgaccaagcccanggnggnggagac

SEQ ID NO: 85825 - DNA, 278 bp, Zea mays
  Clone ID: MRT4577_178284C.1
aggctacttgtcttggtgatgccatctcagctttagggtgctaatttcgtggtgtcagttcagctcagggaagtagtggtagtgatcagctatggtttgtgtgatgcatcgtattctttgatattatatttggttgtcgttggacattttgtcagcttgaatgcaaggggttatccttcaattgagttatgactgctagtataaagttgtattccatcctttctaaattataggtcacttataggctttttttccaatgccaattttctcttatcttg

SEQ ID NO: 85826 - DNA, 350 bp, Zea mays
  Clone ID: MRT4577_178285C.1
tgttggcgcacaaggtcctgttcatctctgacaacacactgctggacaatccctggacggccggaatggtccacttcaacgccgcagtagaaacggcatggcaggccaagttcgccaaggccatggttaagatgggcaaggtccaggtgctccccggcgacgagggagagatcagggagaagtgcttcgctgtcaacccacactactagtcatgtttagccaataagccttgccagggtactaagtttgtttatacgttccatatatacgtcgatattatggagattgttttactctaaggttgtgaaatcaaacacaagtttatcaagtaaaatggtgttatttgcccc

SEQ ID NO: 85827 - DNA, 285 bp, Zea mays
  Clone ID: MRT4577_178286C.1
ccggaaaagcatgcgtggcctctctctttactttcttttattgttttataatccatgcgctctcaatcacacacacaaaagtcgtcaagcgatagacaattgatgatcacaatctcaaataaagaaaaaggcttctttgcatagtagcaaagcctgacaaatgtgcaatgtaatgaaatcggggaccacccagacgaaaattctcagattatttagatccagcggaggatcagccaagcgtacccccactcggaacaaccttagacaccactagcttcaggatcc

SEQ ID NO: 85828 - DNA, 325 bp, Zea mays
  unsure (1)..(325): unsure at all n locations
  Clone ID: MRT4577_178287C.1
ttgtcaagatgagaaccttttgttcttttttataatcaatttgtcgataacgaaagtggcattcactggaagcatttacaggcatgctttacacatctgtgaaacagntngntcatgaaaccaaacacaggctaaactgtttccttaattatcaggatcctgcctatatctgcggcttttatttcacactttatttatgggctgaatcgtcataaagacctcttgattcattacaatatgtattacattgagaactctgttgctatgccccgggaacaattaaccttctctctgccattgtgtggtaaacggtgtgttgaccttg

SEQ ID NO: 85829 - DNA, 381 bp, Zea mays
  Clone ID: MRT4577_178288C.1
ggggaaaaaccccccccccggttcttttttttaggaaaaatgggggccacccgccgggggggccaacaggggagggcgctggccatttaccaggagggatttagggcaacatcggaacaaaatatgggcggccaaaataaaaaacgcggggaaaaaaagccaaaattcggttagctaaaaccggggggggggggggggggcccttgcaaaagggtacgtaaatgggcaccccccgcattcacgggaaaaaaaacaccccccgacaagaaaccttataaagggggggggggccccaaaaacacttttttacttaggggaaaagggggtttcccttattcgcaggttaaacattatttattgggggaaggggaaccacaaccc

SEQ ID NO: 85830 - DNA, 436 bp, Zea mays
  Clone ID: MRT4577_178289C.1
acgtccacgcgcgtcgtgacgcgtgctcgaacgctaccctcgctccttcactctcatgccggcggcttgctttactgatcgacattgtcaagcgccgaccgaagcccgacatggctaccaagctttctaacgccactgccagcgatccgacggtcgcacttcaagaacgaatcggacacagcactctggctctatcaaccgtctgcgaccaaagctcacggacgccttcacgattctatctccgatcatgcggcaattcccttccggacatactgggggggtgttggtcgcaccgcgcaagctaaagctcgccactgcaatgggcatggcccgcggccggttaaatgagccgggtgcatcgtggatttgctgaagaatgctgagagtaacactgatgtgaaaggcttggatgtggacaacctctataattcacaca

SEQ ID NO: 85831 - DNA, 263 bp, Zea mays
  Clone ID: MRT4577_17828C.1
cctgtatcttttatggtgtgtttttttttttagcaggagcgcctacaacctttaagcttctaccccttaaaaacaaaatgtcttattacaggggtatcggaagccaatctgttttattagttaggacttcaccgatacaagatctcacctttgccacaccactcactattaaataaaaacctctacacctcaaattaatttcacaacacaactgtgcaagaatgcgaaaaaaacatgctctccctctctgtttgaatgaccgc

SEQ ID NO: 85832 - DNA, 377 bp, Zea mays
  Clone ID: MRT4577_178290C.1
ctcacacactgcactaagaattgacatcatagctaccgtgacatgattgtcctcacgtgaatggacctgttagtctaggccttaatctcaactcgagcactaggtgttcttcctctgaaaacggacaacggtgtaccttgcactgcactctctaggctatgccagactgcacagtgtccactgccagaatttgaacttatgccacaaccgtaaaggccacgatccgacccttggatcacgccgtgtatgagaagaatcatctgatcttatggactcctattgttatggatggggtgacaactactgacttgaatagcttagtttctactatcacctatgcacatcccttgagcgaccgtcattacccttccaggtga

SEQ ID NO: 85833 - DNA, 338 bp, Zea mays
  Clone ID: MRT4577_178291C.1
ccggccgcgctgtcttctagcaggaagcagcatcagggggggcgacgacgccggctgcggcagcagcagcagcgacgaccactaccagcacgacgtgatcatgctgaggcggacgaggagcgggcgggcgttcccgccgccgatctccgtgatcggcaagggcggccggccgcggctctgcctgcgggcgcaccggggggggggacgcctcgtgctgcgacagatgcacctgccgtcgcaggagctgctgcagacctgcaaggaggacggcaggttcaagctgctgatgcaccccgaggtgcgcgcgcggacgtgccacgacggcacacctgacgaat

SEQ ID NO: 85834 - DNA, 239 bp, Zea mays
  Clone ID: MRT4577_178292C.1
tatgttttggaaaaagtcttgatgttattgtcttcctttattttccacaattaagtgcatctaactgtgaattgtatatggaattacattattcagcatatacatatatttacctgctttgttcattctctgtattcaaaattaacagatcatgctgaaaaccactcaaacgattatattttttacattataagaagtaaaatatattattctgaataatgaaaaaggaaaaaagtaaa

SEQ ID NO: 85835 - DNA, 588 bp, Zea mays
  Clone ID: MRT4577_178293C.1
aaaaaaaaacccaattttacccggaaaatcccaatcggggtttaagggaaaaaaaaagcaaatttcccggtggccctttcaaaacccagcttgggggggtgggaccaaactttttttttaaaataaaaaaaacagttttttaaccccccccctttttttccgttggggggaacggccctatttgttaatcctttaaaaaaaaaaagggggccccttttttttgggcaggtaaaaaaatactggaaccttttttttttaaaaaattgccccccccccttttttgaggacataacctacttaggccccccagggggtaaagggccccttttggttaaaaaaccccatcagtttgtttttcccccttccatttgaaatatttgggccaccaccttttacattgttggggaaaaaatcaccaaatgctggggtaaattcttcgggggggttaaaaaaccaacctggagttttttcaattttaccactaaaagttttaagggcctttatggaaatgttttcctggaatccaaaggaaataaaagtttaaacccttgttttgtaaaaaaatggttaataagcccggaaattttt

SEQ ID NO: 85836 - DNA, 411 bp, Zea mays
  Clone ID: MRT4577_178294C.1
ggggggttaaaataacaaaaaagttttattcagggcacgagcttattggggaaattcgaacagggggggggggggggcacgtacgtaccctagccaaggacaaagaccctggaaaaaaaaaaaaaaaaaaaagggacccaggcaggcccaaacggggggggatgcccgccccccgggctgttaaattaaccctggggaggaaactttccctgggctcggggacccccccggggcagggggggaagtcctcctcaaccctgggttcgcccacaaaaaaaccggggcccccggggggaccaagggggggggggggggtggccccggcccctgcaaaccggtaaacccccttaaacttttccttgacaaagggctggtggacccccccgccgggggggccaaaaccggccgggg

SEQ ID NO: 85837 - DNA, 552 bp, Zea mays
  Clone ID: MRT4577_178295C.1
tcctcttccgttcctctcccgcctccagccctccacggtccccgacccgcacaaccgaaccggagaaggagcgccgcctcctcgtcgccctcctcgccgagtcgctccagttcccagcccgcccgcccggactcctcctcgtccccgcccgacaccaccgcgcacgacgagccccgcccccggggcctcccgcgcggcccgcccccggccaacgagcgggcccacacgctcgactccggctccggggacttcggcgtcgaccgccgccccagccgccggatcaagctgcccgaggggagccacctcggcgccctcagcgaccgacccacgggccggccggacgaccgccgcacctcgggccccgacggcagccgcgtcaaggccctccgtccgctggtggtgcaccacgggggatgcgcggcgatggggaccagctcggcttcgagggcggggccggctccgccaagtcccccgcgcaagactccaacggcagcctctaccgccccgcccaggcgggggcctaaggcaaggagggatccgatcacaagggcc

SEQ ID NO: 85838 - DNA, 524 bp, Zea mays
  Clone ID: MRT4577_178296C.1
cccacccgcccgggaggacgatagatgattgatggtctggctgagttgtagtttttttttgcacccagcaggactgtggccacgtttctatagtttaacataggttagtgtccgggaagaaaaaagatatattaacgttgatctaggagtttgatcattttttgtattgtaaggcagaaatatagggttttggttactctggtccatgttgctgtgttgtaaagcagtgatgtagtttagattcccccaagccatgccttagagagatttgtttagtagtatcgtcttgggaaaacttctgccgggtattgacaacatcctgctgagttctgactgctgagtactatgactggaaaccacctaagccttcagaattaatccaaatatacttggacttgcactttcctacatacatgtgtaatattgtttgctttgaaacctatgttttaatttgttgtataacattatttttgcaatgctcgtagtacaaatgttgtctcaaaaaaaaaacaaaaataaaaaaa

SEQ ID NO: 85839 - DNA, 375 bp, Zea mays
  Clone ID: MRT4577_178297C.1
attccttgcttttttgcgtttgtgtttttttttttttttgagaaaaattgggcggggtagatttgtgctgcccgtccacactagtgggggaaaaggaaatgttcctattatttttaacaccggcttccccggggcttgcgcttcaggcctcggtgctacgtgccctgcgcctgaaggccttaagaggacaggacccccctgtttgggggctccccggggtcggcacagataaggctccccttactgtaacaaaacttggtcggtttgaaaaatgccaaaaccaacaggttccgcttgttgatgaaatggtggtccaaaaacaccccctccttgggcaaatggggagtggacctgtcttcgccggaatttgcttcc

SEQ ID NO: 85840 - DNA, 1348 bp, Zea mays
  Clone ID: MRT4577_178298C.1
attcggctcgaggcgtttcaaacggtaaggaagccaccccgctgtgaggttacttaaggcacggtgacccgccgcgagcaaagctccaagacccgcacgcgaacgccctccctgccgctccgccgtttcgcgtgggagtcgtttcgaaaaagttcgtttcgcgagcggtgaggactgaggagtgtggaggcctaaaaccatggcggcgagcatcgggatcatggacggcgcctacttcgtcggcaggggcgagatcctgcactggatcaatgcgaccctccagctctccctcgccaaggtcgaggaggcagcgtctggcgcagtgcagtgccagctcatggatatggttcaccctggagtggtgcccatgcataaggtcaatttcgatgcgaagacagaatatgacatgatccagaactacaaggttcttcaggacgtgttcaacaagctgcggataggcaagaatattgaggtcaacaagcttgttaaaggacggccattggacaacttggagttccttcagtggttgaaaagatattgtgattctgtgaatggtggaattatgaacgaaaattacaaccctgtagaaaggaggtcaaagggatgcaaagaacgtgtctcaaagggttccaataagccatctaaatcattgcaagccaataggctttctggtgctgatccaacagatggaggccatggagttgggaaagtatgtaacactttttctgaagagcattacatagaacagattcagaagttgtctgaaaagattgcagacctgaaagtttctgtcgatagtactgaaaaagaaagagacttctacttctcgaagttgcgtgatattgagatactgtgtcaacggcctgagttagagcatctaccgatgactaaggcggtccggaagatactttatgcagctgatgcaaaggattcaccgctacctgaggcgaatgatataatcacaaagtcaccaagcttgttctcaaatgaaaccgagtgagatgtgcggctacatgagctaattttggtgcttattttccatgattgatcgtcttagttctgagtctgtaaatgcgtaaaataacatttgacacaagtctttttgctgtcaaaaacagttttcctgtaagaacttgagtggggttaagtagttattacgcattcatgcttgatgtgactgtccctgtatggttcctctggagaatatagggtctgttcacttgactaatctgtaccggcttctactacttttacaggaaaactgtttttgacagcaaaaagacttgtgtcaaatgttattttacgcatttacagactcaaaactaagccaaggatgttttcattaatc

SEQ ID NO: 85841 - DNA, 793 bp, Zea mays
  unsure (1)..(793): unsure at all n locations
  Clone ID: MRT4577_178299C.1
cattgggtacctcgaggccggccgggaaaatcacggttgggaacagctccgaatactacaactgcacacaaatccccgctggtagcgctgtccaggaagttgaatactatccattcgccagaacaccccccggcttctgcaataccggcccaccagtcctccccaggcttaccacacttcatccacacatacacaccatgggcggcttcgacttctccaaccacaaccgtaatgtggctctccatgctcagggcatccccctacccaaggccaccagcacgggaaccaccattgtcggctgtctattcgatggcggtgtggtaattgcagcagatactcgtgcaaccagcgggcccatcgtcgcagacaagaactgcgagaagcttcacttcatcgccccccagatctggtgcgctggtgccggtaccgctgcagacaccgagttcaccacagccatcatctcatccaatcttgaactgcacgcactctccacgggccgcaagccccgcgtcgtcacctgcatgacgatgctgaagcagcacctgttccgccaccagggccacattggtgcctacctcgtcgttgctggtgtcgaccctactggcgcccacctcttcaccgtccacgcccacggctccaccgacaagctgccatatngtcaccatgggttcccggttcgctggcccgccatggtcggtttttgagacacaatggaaggcgcacctgacgcgcgacgaggccgtcactctgtgctcaatgccattganngcggtatctgggacgatctgggctc

SEQ ID NO: 85842 - DNA, 2205 bp, Zea mays
  Clone ID: MRT4577_17829C.1
aggccctttcctcaacgccgcctctctcagacggtgcgagcccccggcgttgccgttggtgggcaggtcttatcgacccatgtggtcctgcctccacactgagttctgccatagaggcggacactggtggtggtgtcctcctccttctagctgtggttgcctccgctcgtcgccatcgggggcggtagcttcagatccccagcacaggtacaacgcggcaccccttttcttctccattagactatgaagcccctttgttcgtcctctgttccggcggccccatctccctatgatccggcgtcctctccccatatatttttatcattcgctggtcattgacggtgggttgagaacttgagattaatttaaattcaagtatagagcacatgatgctaaagttgactccatgccatgcccacacatcacgtgtaatgtggctagggatggtttggatttgcctctgtatgcaattgcacatgtgtgtgtattgcgtgttcttacaagactaccaacaagactttaagttttcataatattcgtatatcactgcatatctcattcccaaaaaaactttaagaatagaacatatattagctaatacatgtttgatttaaactggagttctgaaatggaaaggttaccccttttatcttggtgctaaatgttaccatgcaacagggaaaaatgtaaatagcaaggggttaaatgcccgaaagatcgaagcttttggagcgaataagagagcggccaaaatttgcagcaaaaagcatggatgccacacaaaatgggcaaacacatgatgaagaggaggattttggtacaggcactatcaaggtcaataggacaaaagatacagctccatctttgagtcaaggaacagttaggaaatctgcagtcagagatttttctgatagatcagagggcacaggaactgtccgagttgtttcaaggcctcctcaaatcgcctccacgaaggatggtagatctgatatgcctcaaagtccaaaagcaccaatacgcacagctgatcgagaaaatcagtggaggtcatcagggactggatctgaagaatctctctctctcagagatactcagagcggacgagggagagtagaaagttctactgatgacaatgatcactctgtaagtgggtcaggaactgttgtgttacgctctccaagagcatctcagttgtactcaacagctagcaaccacagtgccaagcctcccagcagattctcctcttatgaagatatgtctaatagtgggacagttgttcggacccaaaatgaagacccagaaactccacgatcttcaaggtcaaggctggggatccaagaaaaaacatcaaatgctcctcttgaggatagtgccattaaccttgcagaggcgggggctgctttgcaggctgggttaagaaagggaaatgctcgagaaagaccttttatcaacaggcatgaaaagggatcacatgagcatagatcttctggagtaaatagtcaagaggttcaaagtgaggatgtggacacgcagaaaggtcacaaattacggcaattacctgatgggcagtcagcctctcgtgctagttctgtagcttcacctgcagtctcatcattgctactcccttccctgaaagaggctactggtgacaagtttgatcggcctgttgttcatgccttccttgattccttgatggatttagaacgtgatatacctggatcatgcgaagtactggttggcagattgctacaccggctagggagctcaaaggattcctcattgcaaggtcttcaggagacggcgatgtcaattttcactaaggaacctgaacctccctctgaaaaagcaggcgacaataagttagctaatatgccaccattggctgctcctaccgtgagcccactggcaaggttccttctcacaaggtggcaaaatcaagtttctcaagatcttaactctgtttgatccctgcgatgcagaaaagtgatttcatgttcgattcggtgtataattaatatttttcaatgtacataatgcaaactttagaactttatttcatccagtcggtctcaaccacctgttatttcatttgttttgttcataaaaaaaaaaaaaaaaaaaaaaaattagaattttgcgttgttaccactgctgtgttgtatatatatgtttagtttcataatcattcatatgaatatggatgta

SEQ ID NO: 85843 - DNA, 357 bp, Zea mays
  Clone ID: MRT4577_1782C.1
ggcatcttatggaagttttcataatggtaacctggcatctgtatgcagagaattggtattatcttccagagttagaaatcagatttggggcttggaaaaaggatttcactgacgcattctgtatgcagctccactgaatcaaataagaagcaaggcttgttgctggcttgtctattttcgctctcctatcattttcaatgagctctcagcttttgctcttagttttcatccttttttcctttgaggaaaattttgcccttccttattgtacttgcctcgaaatttgacaaccagacacttgaattgcttttttaccgtgagaagtcatgtaacatgaatcagaagacattttctttc

SEQ ID NO: 85844 - DNA, 259 bp, Zea mays
  Clone ID: MRT4577_178300C.1
acgcgtacgcgtggtagctgtcaagacattggttaagccacgccgacccaagcagcggctcctcgatcggacgtcaacagaaggctgagaaggtgtctccactatcgaggacgcacccttatgctccgatgattcagtggcagacactctagttcaccgtgaattaaacgtcttacagaggctataccctacatgagcagcatgcggcagaccttcgaaataggccaacttcacccattggcatctatgcggaccaccg

SEQ ID NO: 85845 - DNA, 265 bp, Zea mays
  Clone ID: MRT4577_178301C.1
atctacttacgtttttttttttgggatcacccgtgatctttactcgatatacttcgaaacaactaacgaaggtcgctccaatggaagagggctaggtttggcaggccacattgaaaattctctgccatcagtctaccgctgagccgacaggaacatccttaaaagcatgagaaagacaagaaatgggagctcagttcatgactatgcataacaagataaaatggcggcgggacatatggttcattgctcaacacgtcttgattct

SEQ ID NO: 85846 - DNA, 814 bp, Zea mays
  unsure (1)..(814): unsure at all n locations
  Clone ID: MRT4577_178302C.1
ctgggaaaaacagccgaaggcaaaccagcacgcaaaacaaaccagcacaaaaggaaacacttgcccatggccgccacacagtcagccctacgccgaataatcgggcatgagatcggaagcacctcggtttctgtcttgcctcgagttgtcggcgctccccgatcgttctccatctcagccgtttctcgcctcggtaatcctccccccatgggaccatcgcccttcaaggaacctgccggccgtaatccagccgaggcttttgccgacgtatctaaatctcttcacgattatggagcttacctcacgtcctgtatcccgaaatacatccaacaattcagcgtatacaaggacgagctgacgttgtacacggcgccgagtgcgatagtgcctacattgacgttcctgcgagaccatcgacaatgtcaatacaagcagttgatcgnacattagcggggtggattacccgactcgggccaaacgattcgaggtggtatatcacctcctgagcatcgagtatgcctcccgccttcgtgtcaagacctatgcggacgagatcagtcccgtgcccagncgtctcgggggtcttcaggagcgctgactggttcgagcgggaagtgtacgatatgtttggtgtcttcttccaaaacatcctgacttgaggaggatcttgaccgactacggcttcgaaggacacccactccgcaaggacttcccactcaccggnatacacggaggtacgatacgacgaggaggaagaaacggggtgtctatgagccattacaactctcgcaagccttcagaaacttttgagggg

SEQ ID NO: 85847 - DNA, 278 bp, Zea mays
  Clone ID: MRT4577_178303C.1
ccctcctcgatccgatccgccgagtgcacaccacctttccccactacgatctaatcgatggccgccgagggccagaagaagatgattaccctcaaaatctccgatggcgaggagtttcaggtgttaacaggcggcgcggatgcagtcgcagaccatccaccacatgattcaggatgactgcgactagaatggcctccctcttcctaagaaggactccacgatactatatctcttcccgagtgtaatggaattggcgcgtctttcttcccggccatgct

SEQ ID NO: 85848 - DNA, 347 bp, Zea mays
  Clone ID: MRT4577_178304C.1
cagcataccgttaatgattaatatttcagatgacctctagtgcttgcgttcaccttacatcacctaaaactaactagcctcgaagacaacaaacgtcacttgaaaagagtttcgagtattcattggccaacatggcaaggcaccaggctgttgtacacaaggaacccattggcaacaataaggctcggaaagcataatattggttgttcatatttcgtccccggtttaaagggcactttctctgaatataggaaaccccatgctctttatactctgttttggagaaccacatttgcttggtacgacccaagagatgctagaatgctccctccaattcaaacactgat

SEQ ID NO: 85849 - DNA, 412 bp, Zea mays
  unsure (1)..(412): unsure at all n locations
  Clone ID: MRT4577_178305C.1
accccccccccccccagcccaagncaacttccaccgcgccgncggggggggcgggcggggcgcccncgacaggaacccgcccgcggcnccggaacggcgcggcccgncgnnncgccaaggcaaaaccgccaagggcggcncngcncnnngcgggggnncnggnggnggngnnggcggcggcgggagcggaagcgggaggagggggggggggcnncnnaccggagnncagcnncggggacccgcncacggaaaccggcaacnnccngcncnccgngcccgacgacnncccggaccccgcgcggaaccnncccaacggccagaccnacnncggccgcccccccggccgnnacnccgacggccgcaaccngcacgacnncngcgcggaggcacnagggcngacgaaagggccacc

SEQ ID NO: 85850 - DNA, 539 bp, Zea mays
  Clone ID: MRT4577_178306C.1
actaccaatcggacaacgccataatatggcaggcctctgtggcaggctcacacgcagatccggcgctgatcgcagcctctgctacttctttcctgggcatgacttaactacaacgccgctacggccgggccgcgcaagcaagaaggcccccatagcgaagactaactacggctgcgttatatagctgcacgcgctctatgcggggtgcatcaggccacatgactattatcgaagcaggcccagcgcgaagcagcaaacgccatccagctgagcgtaatacatgtagatcatcaccttccattttgcggggcacggtccggtacaaaggtgtgaccggagagggttaggcgactagattgcacgattatctacttgctatttggtcgctgaactggattgccgacaggtaatcatcattcgactttatctggttagcaacccaggaaccgctgctgattcagaggctggtagattctatcacttgctgagttgtaaggatatgacatgttcgttgtgctcataatccatgaggattgagt

SEQ ID NO: 85851 - DNA, 547 bp, Zea mays
  unsure (1)..(547): unsure at all n locations
  Clone ID: MRT4577_178307C.1
agagaacttccacaacttgctagtagaagccacgatgaccatgaccacctgccgcagcctcctcctgctcgccgtcgccgccgccgccgccgtctgcgccttcgtccccacgccggctaccgccgaccccttcctctgcccatggaggacggtggctcaccccgaggaccccttcatccagaacctcggcagctgggcggtggaccagcagcatagcgtcctccacttcgacaaggtggagagcgccaaggcgcagggcgtcggcgactgcaccagcatgacccgcaactacgagctcgtcatcgacgcgtccatccgcgccggctcaggcgactacaagtatagggcggtggtgtacgtgactaacttcacccagccgcagaaggtcatctccttcgcagccatcccaccgagccgccgcccgccggcggccaactgatcgattttaatctacctatatgatgaagctcccaatttttgaaattacatataaaaggaggataatgaacatgtccatacaaaaaaaaaatttaaaaaaaanaaaaan

SEQ ID NO: 85852 - DNA, 430 bp, Zea mays
  Clone ID: MRT4577_178308C.1
aacaagaacaaatgagtgataaaaatttatcattccaccaatttgtagcatttagatgtgaggacctcataaatgttttctgcctagttattcagtgatacaataccttccagcaacaaccaaatttaggatataacacctaaaaagctaaaggaacagaaaaggtcaggcatcaagcagctggtacaactgaatgatcgtggaatacaatacctccataggaaaatatacatgtcgtgaatcaccgtaagtctgaaggcaaggccaagagacatacttcaatttttcttatcccagtccaagctgaaacaaaacaccatagactttacgctgaaactaaacaacgtagaatttagtattagcttagcacagaagagtaaatgagatttaatccatagaaaagctaagactttctttgacaaattgttag

SEQ ID NO: 85853 - DNA, 264 bp, Zea mays
  Clone ID: MRT4577_178309C.1
atggggaaatggttaataaatctagaccaggcgctgagcagacagagtcgtccgtctgtgtcgattaaggaccgtactgttgactggcctgttgtggttgagactttgcaactagccacataccctggagaaattttattcccttatcttttgccatctgaggccgttaaggcaaggattggtgcacgtgggcccgataacttgggagggctgtcacagtcgtccacggtcgaggatttcaattcgcgaagggttagaaagtga

SEQ ID NO: 85854 - DNA, 169 bp, Zea mays
  Clone ID: MRT4577_17830C.1
gtttgttgtatcccacgactgatcgtcgagtgccaacagaccacactctcgatgctcaccaccagctccatccaacaactgatttgaactagagatgcaactgattaaatcaatactcagattggcttagagaggagctcttccaccatactaatactgagaaaggatt

SEQ ID NO: 85855 - DNA, 506 bp, Zea mays
  Clone ID: MRT4577_178310C.1
gcgacctgtccggaccacctggtgctgccgatgccgctccactgatcccgctgaaaggccctggctgggaggtcgtggtcccaaccaagagcggtggcggtatgctctcgtcgctcaccagctgagcgatgccggcaccatgtttggggtgcccattttgctagtcactcatcatcatgtggacgatgatgcgcttgttggccggtcgctgatcaggcggatattttgcatgtatgcccccctacaaactgttgatctgggtgttgagcctgcagcattagggttagggtcagtgacacgcaacgcaagtcgggtgaagttatgctgtgaacttctgatgagtagctgcaagctgcctttcagacttgagctttttgctgcttctgttgctgcgttatatggtgtagtaacaatagctgatgtttacaccaaagcggagatggatgccctctatgatgtagtccttgctatataacatgaacattcatgtgattttctgtagtgtc

SEQ ID NO: 85856 - DNA, 1484 bp, Zea mays
  Clone ID: MRT4577_178311C.1
agaacaaatgcttccacggaagaaagagaagagcatttatgctaacatgactgaggttcagaagcgaatccaggatcacttagttgagaaaacctttgatgtctacttgaatgatgaatcagatattgtgttgcgtagacctggcatcaagacaaagctaaatagtctctttattcaattgaggaagaactgcgcccatcctgatcttttggaagctgcatttggaacaacaagcctttatccacctgttaataagcttttagagcaatgtggcaaatttcagcttctggacaggctactaacttccctacttgcacgcaagcataaggttctaatattctcacaatggacaaaagttttggacattcttgagtattacctagattcaaaaggccttggggtttgcagaattgatggtagtgttaatttggaagagaggcggcggcagatagcagagtttaatgatttgaatagcagtctgaatgtctttattctgagcacacgggctggcggacttggtatcaaccttacttctgctgatacatgtatcctttatgacagtgactggaatcctcagatggatcagcaggccatggatcgatgccaccggattggtcaaacacgcccagtgcatgtatataggctggctacctcatattctgttgaggagcggatcatcaagaaagcttttgggaagttaaagctagagcatgtggtgataggcaagggacagtttgaacaagaaagagcaaagcctaacgctttagaggagggggagctgctggcgctgcttagggacgagcaggacgaggaagatcggatgatccagaccgacatcagcgacgaagacctcttgaagctgatggaccggagcgacctgtccggaccacctggtgctgccgatgccgctccactgatcccgctgaaaggccctggctgggaggtcgtggtcccaaccaagagcggtggcggtatgctctcgtcgctcaccagctgagcgatgccggcaccatgtttggggtgcccattttgctagtcactcatcatgtggacgatggggcgcttgttggccggtcgccgatcaggcggatattttgcatgtatgcccccctacaaactgttgatctgggtgttgagcctgcaacagtagggttaggttatttcctcccgtgtccgtgccagtgacacgcaagtcggattgagttatgctgtgaacttctgatgagtcgctgcaagctgcctttctgacttgagctttttgctgcttctgttgctgcgttctatgatgtagtaacagtagctgatggtttacaccaaagcggagatggatgccctctatgatgtagtccttgctatataacttgaacactgatgtgattttctgtagtgtcaactgccatgctttataagttttaaaaaaaaaaaaaaaaaaaacgttgccccatttttgtgatttgtgtccgggtgtatggtgcccccttgtg

SEQ ID NO: 85857 - DNA, 389 bp, Zea mays
  Clone ID: MRT4577_178312C.1
gcgacctctcgctcaagtttgccatgccccccgttgctcagccctcatcatggcttcgcgctgccaccgatgaccgatcaaaccccaactgccccattaagatcgcccacggaaccaccacgctcgctttccgtttccagggcggcatcatcgttgcgaccgattcccgagccaccgctggcaactggatcgcctcgcaaaccgtaaagaaggtcattgagatcaacagcgtcctgctaggaaccatggccggtggtgctgcagactgtcagtactggcttgcctggctcggcatgcagtgtcgcctccatgagctacgacacaagcgtcgcatcagcgttgccgcagccagcaagattcttgccaacctcgtctacagctacaaggga

SEQ ID NO: 85858 - DNA, 184 bp, Zea mays
  Clone ID: MRT4577_178313C.1
ccgggacgacgccacgccgtccgcttactcctctgagcgcgtatgacactaccgcaccgcaccgaccggacgaatagacgccgactgcggggcgtgataacccccacccaccaaccaacgcgactaacgtctctctctctctcaatctccaagcgagcgcgggcggcgcgcggttgcagcatgg

SEQ ID NO: 85859 - DNA, 401 bp, Zea mays
  Clone ID: MRT4577_178314C.1
gcctatctatctatcaatagagacagaggaaagctagctaactagcatggattgcggtcacaaaaaagcctcagtgggagtgatctcgcctatgctccttctgctggtgttacctaccacaacagagactgcccatctttttcaggcgggtgcgtacaacctggatcgcctggacatcatcacaaggcactccggccttcgactcgagaggcatccctctgtggtgaacctctgctcttcctaccatgctatactgcaaccctgggtcgacaatgccttggcctaatctgcttgatgacatatctagactagcgctatttgccatctgtgtcgggagaaacacatggactgctctgaggcgttcaaccaaacagttgtggatgctgatcttataagctaag

SEQ ID NO: 85860 - DNA, 264 bp, Zea mays
  Clone ID: MRT4577_178315C.1
gttctagatcgcgagcgccgccctttatttttttttttttttatttttacattttttttggggttttttttttttttgtttaaccactggcaaaataaaccaatgtttttagagccaattttaacgctgcttaagggtgaaaactgatcttgcgcaagaaaagagctccatcgcctgccttgcttttcttgctgagacgatcgaagggactgccaaattaattacttccattgcgggggacgcttacttagatttccttaccgg

SEQ ID NO: 85861 - DNA, 420 bp, Zea mays
  Clone ID: MRT4577_178316C.1
cgcggccgcccttccgatctacaccttgagggtgttgccttgtatcctaattgtccattcaggccatggctgacactgacactgccacccatggggatgctgtgacacattatcactcaatcatggccgataaatgactcaactagctagttacccatcgggtataacttacaaacatagtttattcagtgggggacacccgccggacgacggtagggcaatggactccgctgctgcaggccgcacatccccgtcatttgctgcgctatctgggccaccaacatactcgcgacctggccgctttgccgatgctgctgcaggatggactggaggaccaaacccaaaatcgactggtaccggtgtctggggtacacctgcctgagctggtgccacactgctgcccaacgaactggacactga

SEQ ID NO: 85862 - DNA, 2410 bp, Zea mays
  Clone ID: MRT4577_178317C.1
actcctatgggcgattgggatcctcgaggccggccgggacaacctaattaaagaatttgaggagagaaagaaagaaagagtgatcgtcatggagagcaggaggaagaatcaacagaagacgagctacattgtaatttccatccagctcctagcggccctcctactcttggagcttgtgtcgctagtgccgggggcgtcatgcgaggagttgcccttggatttttgggtgagtgcactacggggggtcggggcaaaggacgtttcaacagccgatggatgcaccaagaagaataaggacaccgtgctctgctctgcccaggctaacacggtaaccaatttcatcaaccctaccaactctgaggaacaaggctataggaccatcggggagtccatcgctaacatccctgatgatagcaccaaacggtacatcctcatcctcagcggtggcaccgtgtaccgagagaaggtattggtgagcaaaagcaagccattcgtcaccataagatcatatgaccccatcaaccctgccatcattgtgtggaacgacactgccgccaccctggggaaggatagcaagccccttggagtagatggtagtagcaccatgaccgtagagtccgactacttcattgcctatggtgtcgtctttaggaatgatgctgcagcagcagcgaagaagaagaaggcagaaggcgaggcgccagcgttgcgggtgctaggaacaaaggcaaccttctacaactgcacaattgaaggtggacaaggcgccctgtatgaccagatggggctgcactacttcaagtcctgcaccatcaggggaaccatcgacttcatctttggctctgccaagtccttttacgaggactgcaccattgtttccgtgaacaacatggaggagatcatgaccttgcctgtggcaccacctcaacttgacattcacgacaatccaatcaaggttgccccaggggagggcggcttctccttcaagacatgtaccatcaccggggaagggcaacaaatcttcctcggaaggatgggcacgccttccatctactcctacacccagattgctaaggaggttgtgcccataatctacgacaaagggaacatcttcatgcccagtaatatgactggtagacgctgtgccactttcaagtgctatggacctgggttagagaaaatatggcacgtcaaacttagatacgctgaagccatatactttcttgggacagattttatcaacggagattcatggatcctgtccataccacctactgatgctgaaacattgctatcagtttgaatatatagaatcctcagagatcatcaaagatcatcatctaccactaattaataatgagccaaattaaataagttttgcgtatatattttatccctatctataaattatgcatgtgttgtaaacaagtcgtggatgggcttcatttgttctcgcgattgaaaaataacaaataaacaaagtagaaaagaggatgaaccagaagtcttgttcagcaagaaggaaggaggaatgacgatatttcccatgtgatacttgtaaatcatatgtgtaaacttcgtgggcgtgcttgtaatttcatacgaagttgtacctctcgtctataaatagagtaacagtgtcatgcataaattcacctttcgagagctcaaagctttatttagctcagccttcgaagtacctttgagctatcacttgtatgaagccgaaggtatgtttgtaattgtttgttatattgcaaggagtgaaataataagtgtggaagcatgaagatgagtaacatgtcaaacatgtaacatataaaacttagatactgtgggccgcgaatccttcgtgccacagattttatcaacggagattcatggatcctgtccataccacctactgatgctgaaacattgctatcagtttgaatatatagaatcctcagagatcatcaaagatcatcatctaccactaattaataatgagccaaattaaataagttttgcgtatatattttatccctatctataaattatgcatgtgttgtaaaaaagtcgtggatgggcttcatttgttctcgcgattgaaaaataacaaataaacaaagtagaaaagaggatgaaccagaagtcttgttcagcaagaaggaaggaggaatgacgatatttcccatgtgatacatgtaaatcatatgtgtaaactttgtgggcgtacttgtaatttcatacgaagttgtacctctcgcctataaatagagtaacagtgtcatgcataaattcacctttcgagagttcaaagcttcatttagctcagccttcgaagtacctttgagctatcacttgtgtgaagccaaaggtatgtttgtaattgtttgttatattgcaaggagtgaaataataagtgtgg

SEQ ID NO: 85863 - DNA, 242 bp, Zea mays
  unsure (1)..(242): unsure at all n locations
  Clone ID: MRT4577_178318C.1
aaccataaatttggggacgcttggttcaaagtttctttttgaggaatcgagccggcggctgggggggggttctgctatggcggccaaacgatagatccctgtttcaccctcaggaaccttaagnctatgcagcgctgctcggctgctcacaatgcctaggagaatgccgttgtggaggtacaggaggaggcttttgttatgtgtcactattgaagtgcttctcctcgtttttttctttttct

SEQ ID NO: 85864 - DNA, 548 bp, Zea mays
  Clone ID: MRT4577_178319C.1
atcacgtgggggccaccccgacgagaacctcgaacgcaacctacatcctaaggacgttcccgctaccccactctcgcaaggccctttgggacttgcacctcccggtcaccagctcgactcacagtgtctttcataaatcacgagctcctattctaggttgccctccaacaagtggaggtaattgaggtccaagagaagatcttatataaggttattaaggtacttaggatcaaggaggtgaaatttgttctctatatgatttaaataaatcgtatcatgaaggtcctgatcatgatctttgtgctatttgtttacgtcttgtatgtcctggtcatctaggtcgtcctacaggtcatatttcaggaggttaatgaggaggttattctgaaggtattcgacaaggaggttttgcaggttatcttaaatatcatcttactgtaaatgctttcatcgacatttgtaaagaagatccccatatacatcgacattaaggaattaattatccaattaaagttcttcttcgccattaaggtaatttaggtcttcca

SEQ ID NO: 85865 - DNA, 744 bp, Zea mays
  Clone ID: MRT4577_17831C.1
tttttttttttttttttcgggtggaagggtttgagttttctatacagcggtatccgattccaatgtatgtgattccaattagagcctataacaaacacatgtaacgttatcaaataccctaagaagtcccataccgttacattacatcgaaccaaacacgtcattagtttcttttgatagagctgagtatgggaaaagtgacccaaatacaaggagggatgtcaagagcaaagcactggataacaaagagcttgctgaccagctggatcttgggcagaagttacatgtctcgtgggtcttgatgggaggatactcaatttggagacgcctccggtatatacctcacaggcaaacacacagatacaaccaaatacatgttaatgaaatatgcaactcagatttcagagtaaagctgtatatgctgtactaatcgtcccaaccatcaactattggtggctttctttcacatttaaaatgtccaggcaggccttcaagaaattaattgtgccagagcagaggaccctctgccccctggattgcaaacaatacaccttcccctctgctgcaagagccatgcgccaccctgaaatattcgtgatttatttgtcttctggaagttgggaatttgtcccataaatactaccggtctgtttcatcaaattgaaagttctgtatcaagaagcttcccttccatgaatcaagtatcataagtcccacaatgtgaaaatatgttcatgctggtag

SEQ ID NO: 85866 - DNA, 448 bp, Zea mays
  unsure (1)..(448): unsure at all n locations
  Clone ID: MRT4577_178320C.1
ggcacgagctccccataccgcccgatctcggagatgtgcgcgtaccacatgaggctcaccggcggcgcggcctttgtgctccttatggttctcctcttgctgctgtatgcggtgcacaggtggaggaaccctcgatgcagcggccgcctgccgccgggctccatgggcctgccgctcgtcggagagacgctgcagttcttctcccctgaagcttccttggacgtcccgcgtttcgtccgacacagactgcaaaggtacggcccgatcttcaagacgagcctggtgggccaaccggtcgtcgtctccgcggacgaggagctgaactacatggtgttccagcaggaagggcanctgttccagagctggtaaccggactccttcgtggagatcctaagcaaggacaacgtcggggaacaacaaggcgccatgttcaagtanctcaagaaat

SEQ ID NO: 85867 - DNA, 323 bp, Zea mays
  Clone ID: MRT4577_178321C.1
gaaaggtgactcctacatgccttgtggagaccttcttcgtttagggacagcagccaggtcagggcgattgacgtctaccagaacctgaggctgtttggctggagcgcgccagcgtacaataagccgggcgacgcggaggacgtggaaaccgaccttgtcgttcccagggaggacctctgccgccccatcccgatgcgggggacctgagacaaaaagccgatggacagcccgcaagggacggccgcaaacagagcaaggcatgcgctgcacgaccccgtagatttagcccgccacgggagctgagacccgaggtgttctttctg

SEQ ID NO: 85868 - DNA, 314 bp, Zea mays
  Clone ID: MRT4577_178322C.1
aacagaacacgcagacatcagcccaagcgcatccaaggttagcgtcccacttcggccgccatggactacgcaccgacagccgtcctggtcgccgcgatggcgccgttgatgcagtgggaggacgtggtggtgtccaccgatggcggcagccgcctcgtgcacgtctacctcggcggcaagagctaggagatgcagctgtccgtcattgggtcggagccgatctcgtctcacaagtcgttcgtcgtgcatgggctgttcctctgcacgctcgccgtctgccacctgagcggtcaccgtctccccgtcgacatcag

SEQ ID NO: 85869 - DNA, 308 bp, Zea mays
  Clone ID: MRT4577_178323C.1
ggctcaattccgttttgaacacgcagggaagcaccgctgagcccacaggagggggggggggggtaaggactggccaacggggaacagggggacgaggggggcagggggcaggaggggagaggggggggggggggggagcaaacccagggggacaccggggaacaggacaagggccaggggagcgcattgggggaacgggggcacaggggggggaaaccaaggcaaatccgaaagggcggggacggagaggggaaacacttcggatttcggggcggcccacaagaagcgggaagtggggtaggagcaac

SEQ ID NO: 85870 - DNA, 146 bp, Zea mays
  Clone ID: MRT4577_178324C.1
ataattcttcccataagagccaacacaaatgagcatctttgcagaaaagtaactggggtttgtgcacgcggaggcgcaagcagactgggcacaactggaaaacttaaacaaacttcgtttcatatcctgtccacctccaaaggtga

SEQ ID NO: 85871 - DNA, 805 bp, Zea mays
  unsure (1)..(805): unsure at all n locations
  Clone ID: MRT4577_178325C.1
cattgggtacctcgaggccggccgggatttttttccccctgttacataccaattcgtctcgccatgttcgccagacaggtactccgcccggtcaggacgctgcaccagcaagtccgccgatatgcatccgaggcgcccaagagcggcggcaacaatggtgttctttacacaggaattggtgctgcgggtcttgcaggtgcctacctattcttgaggggcggtgattcaccatcagggcagaagggcaacgcaccgccgtcagaggaagccaacaagattccctcctcaactggtggccctgctaagaaggccttcactggaggcgaccaaggcttcctctcgcttgtgttggacaaatctgagattgtcaaccacaacaccaagaagcttaccttcaagttgcctgaggaggacatggagagcggtctgcctgtagcttctgccgtcatcaccaagtacaagggtcccgaaatgcagaagcctgtcattcgaccgtacactcccatcagcgacgtagaccagaagggcaccgtagatttcatcatcaaggcttacccgaacggacctatgtcggagcatatgcacagcatggagcctggtcagcgactagatatcaagggacccattccagaattccaatggtcacccaacaagtttgagcacattgcgnctgattgcngggtggaactggtatcacacccatgtggcaaacagcacgcgccattttccgcaaccccgaggacnagaacaaggtgacgctcgtatacggcaatgttgactgaggaggacattctggctcagcgcg

SEQ ID NO: 85872 - DNA, 741 bp, Zea mays
  Clone ID: MRT4577_178326C.1
gggtacacctccgaggttcggccggggctctcgctctccccttctccccacctagcctctcgatcggctcatttcgtggcctccagatcctccttctccccccggggcccatcatcaacccctcaacaccggcctcacaaactcgggcaggtctcccccgctgcttaattacctcgtgcgccgcgaaaacacgctctaggctctcgtttcctcgtactggtacaagcgggacgggagcagcagcagtagcgtgatccatccccatggcgggggcaacctcttcctcgtccgtgtctttgatcctcatcctcgtcgcgtcctcctcgccgcggcgcagccggggcagagtgggcattgctctgcgctcgtacggctacagcggcgccgagctgcggttgcattgggcgcgtcggggctcgtctcgggatggaccggcggtagtgcgcgccgcagcggttccggccgggggtgagggcgaggacgccgcggcggtagggaagagctcctcgtccaaggcggtcgccgtgcagggcagcgagtccaaggggacgtgatttataggacgttgttggagaggaaggagatatagaggatagaatcttttagagaagactgtaaaggacggatatagaggatgaatatagagaacgttgctggagacagtctgaatgcgctcctttctgcaagacaggtggccttgggagatgtttgtgggtgctttgcccaaggctttggcgagga

SEQ ID NO: 85873 - DNA, 249 bp, Zea mays
  unsure (1)..(249): unsure at all n locations
  Clone ID: MRT4577_178327C.1
gactgctgtgttattcttgaaggttatgattgggatgggccacaactttacatgaggcaaggcctcaaagtatcttataaatactatnaatctgcattatggaaagggaaacaagctgcaaaaactgagatataaaagatgaaactttcatagcttacgtgcccagaaggcatttggtaagactcaaaaataatttattgagtgcatgaccaaactaaagataaagcctttcagttggaattgaactgg

SEQ ID NO: 85874 - DNA, 344 bp, Zea mays
  Clone ID: MRT4577_178328C.1
cgggggcctctaccagggaggctaccctttggtccgtcgtctccgctcctgccgacaccggcacaccgccgcctccatgaggcacaaccctgccgccgcagcctgctgattgcccgcaggccatcgccctgcccgatcctgtctccctgatccctccaccggtgcgatgccctctgccctcggcaggcggaagctcatctcgagtgctcccttctcgcccaccacggccgtgctcgcgtagcccggccggcgtcaccaccggaaaggtgtaggcgggagcacccgctccgtgctgcaccgcccgtccgctccgggccccagttgtctggcggccgtagctctgg

SEQ ID NO: 85875 - DNA, 707 bp, Zea mays
  Clone ID: MRT4577_178329C.1
acaagtggcaaacacatctggccaagctcagggggctggaaatacgaactggggatccgcacttcagagtaatgcaaacatggcctggggagtgatgggacaggctaatatgaacatgccctgggcagcaccagcacaaggtgccgccagctacaacatgggtatgactatgccaacacagcaaaatgcagtccaaaacatgggctgggtcacaccaaatccaggaaacaccaacatgaatatggtgtgggctacaaatcaaggccaagggactccaaatgcagctgctatgatgggagctcagatgcaaggagttgcgatggccccttggggcggtgccattgcgcaaggaaatgcaaattcttatcctggttgggtgccccaagttggaaacgcaagtcaaaatgccggcggctggagtgctcctccgcagggaaattcaggtcctaaccctgtaaatggcacaggccaggggaataataacgtgaactggaattcaccaagtgggaacccgacatggaacaaccagcgggattttaatggtggtggctcgcgtgggaggtcatggaggccgcagtctgggggtcgggggacacggccgccctgccatgtcttccagaggactggttgctgcaacaaagagcattgctcctattcccatacgccaggagacgagggatattcacagagaaacgatcgccactttg

SEQ ID NO: 85876 - DNA, 510 bp, Zea mays
  Clone ID: MRT4577_17832C.1
agtactggttggcagattgctacaccggctagggagctcaaaggattcctcattgcaaggtcttcaggagacggcgatgtcaattttcactaaggaacctgaacctccctctgaaaaagcaggcgacaagaagttagctaatatgccaccattggctgctcctaccgtgagcccactggcaaggttccttctcacaaggtggcaaaaccaagtttctcaagatcttaactctgtttgatccctgcgatgcagaaaagtgatttcatgttcgattcggtgtataattaatatttttcagtgtacataatgcaaactttagaactttatttcatccagtcggtctcaaccacctgttatttcatttgttttgttcatggcgaatactccctctgtccccaattaaaatttgttttacaattaatgtatgtgttgtatatatatgtttagtttcataatcatccatatgaatatggatgtaaaaatctagagctagtacgagtactatttttg

SEQ ID NO: 85877 - DNA, 456 bp, Zea mays
  Clone ID: MRT4577_178330C.1
cattaatgacccactctactacttgaagttactaccagctgctgcgtcttaacactataacagagcgagatgatggcgctaccgaagccctcgccggtggccctgctcctcctggcggaggtggccgtgctggagctggcgcgcgccgacctgacccacgacaactgcgtgaagaacaagaaggtgaccgtgcagaacctgtgcatgcaccacgtgactctgacgctgaacccgttggccaacagcccgccggtgatggcgggcacctacacgctgcacccgcgcagacacgccaagttccccgtgtgctggtggacggggctcctgcgcgcgcccgacgccgccctattggagatccacgtcagagtcgccagcggctacttctaccttgcccccaacgctcaaccgggccaacacgttctgttctgcggcaccctgcacggctagtcgctgcat

SEQ ID NO: 85878 - DNA, 144 bp, Zea mays
  Clone ID: MRT4577_178331C.1
agctgctgacagaataactgttgccagcctttgcctccaccgctatatacggacaacgcggggggctcttattagccaacagagttctcagactgacaatctattgacacagcctaaggaatgctgcgtacgttgaacgacgag

SEQ ID NO: 85879 - DNA, 193 bp, Zea mays
  Clone ID: MRT4577_178332C.1
gaattgaaaattagatctgtgaatgtgtattactgagaggaggcacatatgaaggtggagaactttttagtacagtttaaatgatgaagaagatagaagaggcaccaccaatggtgggcggatgcaataaggtggtagggatacggcaaaggatgttgggtaaatggtaacaatggatgtagtaggaggaagg

SEQ ID NO: 85880 - DNA, 346 bp, Zea mays
  Clone ID: MRT4577_178333C.1
cggcaatcaaccaacttagatctcacattgactcagtgcccaaagggtactcagctctgcgacaaactttcaaaaggagaagcggggaacaaggccaccacgcccaaaatagtagcgtgtatgtatcttggggtccatcatatagaacaatcttgtgtggggtcaaacagggcagccagaggactattattcccccatccgtgcggcagagggacccagtctttgtacctaagttacaattacataggcttacaacatagggacggtggatgactctggacattgccacccgttggcaaagaagaatgacgcggacatgtctggatcttagcgttctgaaatcctg

SEQ ID NO: 85881 - DNA, 135 bp, Zea mays
  Clone ID: MRT4577_178334C.1
tcgccctctaggcagaggccacgccccaaaccagcgggtagcgccaggacagggaggacacacccggggacgaacggcagcggagggagcccaaagggcgcaagagaaaaccggacaagcccagaaagagaagcc

SEQ ID NO: 85882 - DNA, 484 bp, Zea mays
  Clone ID: MRT4577_178335C.1
gttattgccaaatacccaattatattaataaaaaagaagatccatactgaccaatcaatggtcccacataaaacaacaataaaaacactacgtctaagatatagtagttttacgtgagggcgtccttatgttgatcaccttggagctgaatgacctgacctagctctgggtactgaactacattaccattgcagcagaatttcttcttcatattcaaaccctggactgtattcagagactttctatcgttgcgctcttagatgcgcacatgcacttaatccttcgttccaagagcaacaccagagcctcagcatttgcctcgacaaacaaatcaaagcagatggaagctgaacgtctaaattagacatgaaactgggttgttgaggttggatgggcaccgaaataatcaccctttgaatttgttctccacttttggcatcgttgccttaggctgctgctcctttcgaagtgaacgggactggcc

SEQ ID NO: 85883 - DNA, 702 bp, Zea mays
  unsure (1)..(702): unsure at all n locations
  Clone ID: MRT4577_178336C.1
ccggccggccgggaaaaccattaatttagaaccccatctctcgtctggatctttggtttccatcaacgtttaccatctattccctcctttcttttctccatttcgcgctctctaagaaccctgctgtgattctcttgtcaaatacccttcctcggctttaattcttcaacaatgtcttctcctcgtccttcttcccccgtcaacggcggcgctgctgccagcggtgccaacatcggccgaccctcatcacctgctatccctggtggtccccgtactgccatccgacgacgcgctgccgccgaccagaaggagaagattgccaatgcccgaccaagcagcactcgcgccgctggcgccggtggttccagcagcaccatgctgcgactttacaccgatgagtcgcccggtctcaaggtcgaccctgttgttgtccttgttctctctcttgtctttatcttcagcgttgttgctcttcacattaccgccaagattacccgaaagttctccagctaaacggttgcgaaaaagtctcaaatttcacgacgaagctcgaagagaaagggagatgatgatatcttttgtggacgctgctatttcttgntatcacctgaacgtggctggcgtagggcctcttttcccacatgaagntatgtgatgtgaacgacgcgccacacccgcactgngagaagggttaggttaata

SEQ ID NO: 85884 - DNA, 218 bp, Zea mays
  unsure (1)..(218): unsure at all n locations
  Clone ID: MRT4577_178337C.1
tgcgcccgctcgaggccggccgtggcagcacctgaaggncgaggggcctgtttgccgctgcgctcacgcggccccgaccccagttcagcgtcgtcaaggccgccattttgtccgagaagggaacgtaccagggggggcatcgcatcaacgggggcccgttcgtcggaaggctggagacgaccgccacctgcagcccggtcctcgcgtgttacctgttc

SEQ ID NO: 85885 - DNA, 467 bp, Zea mays
  Clone ID: MRT4577_178338C.1
atagccgaaaccctaacccgccgccacgccgccctcccgccacccgcgccggcgccgcttctccccgccgatacaggccaaacccctcgcgcgggggcatcggaggcggaggagggatggcgtccgacggggacaacaagcggctgttccgcgcgcggcgcacggcgctgcagatgctggcagaccgcgggtacacggtgaaggacgacgaaatcaagctgtccctgtacgagttcgtcgaccgctacggagaccccgtccgccgcgacgagatcgtcatccattgcgagaagcagggcgaccccaacgacaaggtcaacgtcttcttcctcgacgagtccaagaccggcctggccgtggtcaggagctgcgtcgagaagatgaagctggggaacgccaccaatggcatactcgtcctgcagaaggcgctgagcggcccggtccggaccgaggtcgcgcagagcaag

SEQ ID NO: 85886 - DNA, 521 bp, Zea mays
  unsure (1)..(521): unsure at all n locations
  Clone ID: MRT4577_178339C.1
tggttgcgnnnctgggcttgcaacgncnnagcggtgagccgtcccgnnggtgtcccaacgagnnctgggcngnnccaaccgnngcccaaggnncggccatagtttcgtcggtggaccccgtggcnnggtgcttgacggtcggggcgtgccgtgcggcgccccgtctttcctttcgccgnntgttcctttggcctggnaggnnacggggnnctgccgcgccccttcttcagnncgaggaccggcnngacgtgcttttgcgggaggcnnnctccaggctttgggcttacctcnnnctcgccggcttccattcttcnnnctcaacagcgnntccagcccggtgctttctcgnnggcgtggccatttcggggcgggctttggcaggcgctttcgtggcccgtcgtcaacattcggcagctactttacttcgtcggcattcccgctttcgcggcgctctttcggcttttcaagcttaggcatttggacgcgatgnngggatctggcttttgggcatgacgcttcgg

SEQ ID NO: 85887 - DNA, 622 bp, Zea mays
  unsure (1)..(622): unsure at all n locations
  Clone ID: MRT4577_17833C.1
agatcatcatctccatccaccgcccgccgtagctagctagatctgctgccatggcttcctttggcgaggctcccggcggtgacgccggcagcggcgagaagatcttccgcaccaagtgcgcgcagtgccataccgtggagcgaggtggcgcgcacaggcagggacccaacctgcacggcctcttcggtcgtcagtcaggcaccaccctcggctatgcctactccacggccaacaagaacatggccgtcgtctgggaggagggcaccctgtacgactacctcttcaaccccaagaagtacattccaggcacaaagatggtcttcccggggctcaagaagcctaaggagcgaaccgatctcatcgcctacctcaaggaatccacggcttaacttcttctagctatcttaattaattcaccatgcacgcacgcacatcaataaatcaaggtaggaatctacttttccatttcttttaccttttaagtacatccatctatatattacatcggtctctgtgagttgattccacttttgttgttctttgctacggtttttatatattatataaattgatattgagatatttattcaaatataattattgtttatttttaaaaanaaaa

SEQ ID NO: 85888 - DNA, 2141 bp, Zea mays
  unsure (1)..(2141): unsure at all n locations
  Clone ID: MRT4577_178340C.1
tgggtaccctcggggtcggccgggaatccggaggatctggtaagcaactaagcaagtgtactgaggacggaggcatcgatccagcgttccagctagcacgcacgcagccagcacccagcacccagcagtagaatctatatatcgtacgcaagtagtggatcgaggcatctatctgcagtccctttcttcttcttcctcttgattgataggtgcgccgaagcttgttttgttgggtggcctttgtctctgtcgtctcgtctcgtctcgtcttcctcccgcccggccgccaccacctgcaggctatactagctagctattaagtccggccaaccaagcagctcgatcaggtcggtcgacggcggggacagttcggagggaggaggcggccggagaccgaaggacgcctaccatcaactcgcggtcctggccgcgctgccgaaaaattaaaggaagaggacgaaggctgaccgatggacgatcgttatcctcatcatcagtcgtcgatggcgacaccggcagcagcgagcaagatgagcaagaagctgcagggcggtggtgagcgtagtagtggcagtagtagtaggggcagcggcaacagtgataagcagcagcagcagcaggtgccggcggcggcgatgaggaagggcccgtggacagaggaggaagacgctcagctggtatggttcgtccgcttgtttggtgaacgccggtggggatttcttagcaaaggtctcaggtttgcgcggtggcgggtgcatccgatccccaagcatgcatgcatgcatgcatatgtagatgcatgcgtgcgtggggatggattgatgtaagaatgggctatggcgatgggtgttgattaacatttcttttctctctctctcttggcgtgccctgcttcttctctgtgcatgcgcatgtgtcggcggcgtactcgtgcaggtctgaggcgcaccggcaagagctgccgcctccgctgggtcaactacctccacccggggctccggcgcggccgcatcaccgccgacgaggagcgactcatcctccagctccacgcgcagtggggcagccgctggtcgcgcatcgccaggagcctccccggccgcaccgacaacgagatcaagaacttctggaggacgcgcgccaggaagcagaaggcggcggcgcagcagcagcagcagcagcaggacagccggagcagcaagacggcgacggcgtcggcgttctcagggtcagcgtcgtccgtgactaccaccacgtccagctgctctggctctcctagtccgaccagccgcggctgtggcacggccacgtcatcgtccgctctgaccgagtccgcgctgcggcaaagcggcggcgaagacgaggacgccgagctcgacgaggcgtccaccaccaccaccaccacggcaagccagcgtcaacaccaagacgacgaccaccagcagcagcaccaggagtgctacgcctcggaccacttctggaacgacatcgcggcggcggaggcggccatctacatgttgatcgacggcggctggacagggtccggccccggccatcccgccgccgatccgccttcgtcgccggcgtgggagtactgctctgattactcgctctggaggatcgacgacgacgagtactacgagaagatgctcgactcctcctcctgattcgattatccagccatcacacgcatatgcatatctatcattagcttatttctttcttttttttgtgctgattagtctagcatacagcagctatgagaatccaaagcttcggttcggctttcgttgcatctctttgtataatactgtaacatatctatatatatatatgtatgatatgatactgctctcgatcatatatattgtaccaatatgtgctaggatatatagacatgtagtataatcatcgtcgtcgatcgtgtgtttagtgaagaatcagatgatgaggcgagacacaacacaatcgattgtagtgtgtcctgctgcatctatgtatttattcatgtactaagtactatatatatatataagtgatgatgagattgtatatgattcagttcgacaaatacattcttcagtagtttctgagnnggtatatttacttaaggtanaaaagaaaggccgcccgctataaagcat

SEQ ID NO: 85889 - DNA, 1778 bp, Zea mays
  Clone ID: MRT4577_178341C.1
cattgggtacctcgaggccggccggggaggcagcgagcgggcggaaaaggctagtgcgcgcctcgtgctcgtgctccccgagcagactagaccagcgcgctagcgccagcaaggccaaggcgagggaggggcgatgctcgcccgatctgctacagccgccgccgccgccgggatctggctgtgattaatccggtcggcgtcgcggagcgggaggatcaggcgggccgggagcgtggcgctcggggactttctgcggcgggaggcgtcggcggagcgggccgcgctcccaagggcgctcgtcgccgggttcgtcaagaccgacaaggattttcaaactaaagctcattcctcggggacaaccgtgacacttgccataattgatggctcagttgtaactgttgcgtccgttggtgattcacgttgtgtccttgatgctgcgggatccatctactatttgtcggctgaccaccgctttgacgctaatgaagaggaggttggacgtgtaaccgaatgcggaggtgaagttggaaggctaaatgttgtcggtggtgctgagattggtccccttagatgttggccaggtggtttatgcctctcaagatcgattggtgatcaggatgtaggtgaatttattattccggttccttatgtgaagcaaattaagctgtctaatgctggaggccgtcttattatttcaagccacggggtttgggatgctttgactgcagaaatggcttttaaatgtgcacgagggcttcctcctgaggccgcagctgagcaaattgttaaagaagcagttgaagcaaaaggattgagagatgatacaacttgcattgtcattgacataatatcaccagagaaaccaaaacgcactatacaatctcaaagaacgccaggaaaaggccttgtgcttctaaaaaatttctttttaaggaaaacaacatctgactcgttgtctctccctgataaggataattatcctgagccagatttagaggaggtctttgaggacggatgcccatccctttcaaggaggcttaattctgagtatcctgtccgagacatgttcaaactttttgcatgtgcaatttgtcaaattgacttggaatctggccaaggcatatccatacacgagggtttgtcaaggccagggaagctgcgtccctgggatggccctttcctttgtcacagctgccaggaaaagaaagaggcgatggaggggaagcgccattcacgagattcctcgtcgagaaatagcgggtcaagtgaatcgtgactgaagccgagaatcatcttgaggcaaacgcctagcggtgtgacgagctaattattgttgctgctgtcgtcttgcagcactttctcatggattaccattgaattgagacatgttggaagtcgccatgcctatatatatgttggagctgtacggtactggaccgtagagcaaatccaatcgcctctagataccacaccagcgtcttcggcagggcttgtgacagcagcttatgcagggaatgatgacaagaggttattattagtgaagaatgtcgacagtggccaacagtcatgtaaattattcgtcgtgtagaggtgcaagtgacaaatagccacggttttgtaattctcaactaggattaggtattgagacctgtaattcgtctgggcagacctcaaactgaaggtcaacaacgtagcctggccctattgtagaatgtatgttgccctacaatctaaatgattcaacgctgcaattaaatctaagatctttgcggacgcgt

SEQ ID NO: 85890 - DNA, 545 bp, Zea mays
  Clone ID: MRT4577_178342C.1
cgatcgaatcccaagcaacgaacagaccacgatggcgtagtctgcctggactgctccagcttccaggccttagcttcacgcttctccctgccgtggccgaccccagtccacgatgacacctgcgtttgcgcggtcctcccaaccgatgccgaggcgcctcactcagtgcttactacgacgcgtcccgcagaagttgcagaaggagtactggccctagtgctggccctagcggcaggaatctctgtctgctgaagaggacagcgtgaaggagctcaaggggggagccaagacgaggaaagttcctgcatgcggaaattctctcgggagctgcccaagatcaagaaggcaaaactggacacgtgggggttttttgagacactcgttggtacctagtctgcaaccaggacgtggatgcttatcttgactagcaagggtcatctggagaaagggcacaatggaccaccgacagcagtccaacgcttcatatgctaccacgaaacgcattcagaatggtatatatatgggcccgatcttgctcttgacct

SEQ ID NO: 85891 - DNA, 1547 bp, Zea mays
  unsure (1)..(1547): unsure at all n locations
  Clone ID: MRT4577_178343C.1
gcagaatccctatcacactccctatctcactccatattttaaactccactctgtgaacaatataatctacaatgtattctacagtgcaaaacagtactttgcacggtccattgcacggcctgctgaaatcacacttgtgcaactagccaccaactctcaattatgcttatttttttattattttaatctatgactgacgtatcaaactgtattgagtaccggcttgaacattttaatacctgttgtatgttggacatcttccataggttttccttttagagtcctatcttttggtttgtaggtgtgattcacaccctcttttgatcctttattcctttttttatccatccagattggtccccttagatgttggccaggtggtctatgcctctcaagatcgattggtgatcaggacgtangtgaatttatcattccggttccttatgtgaagcaaattaagctgtctaacgctggaggtcgtcttattatttcaagtgacggtgtttgggatgctttgactgcggaaatggcttttagatgtgcacaggggcttcctcctgaggctgcagccgagcaaattgttaaagtacaacactagtacccttcccagcccatcttaacacaaggtctaaaatcctcagttgtactgttcctaactggtgtactgtttgcaggaagcagttgaatcaaaaggattgagagatgatacaacttgcattgtcattgacataataccaccagagaaacaaaaacgcactatacaatctcaaagatcgccaagaaaaggccttgtgcttctaaaaaatttctttttaaggaaaacagcatctgactcgttgtctctccctgataaggataattatcctgagccagatttagaggaggtctttgaggacggatgcccatccctttcaaggaggcttaattctgagtatcctgtccgagacatgttcaaactttttgcatgtgcaatttgtcaaattgacttggaatctggccaaggcatatccatacacgagggtttgtcaaggccaggaaagctgcgtccctgggatggccctttcctttgtcacagctgccaggaaaagaaagaggcgatggaggggaagcgccattcacgagcactttctcatggattaccattgaattgagacatgttggaagtcgccatgcctatatatatgttggagctgtacggtactggaccgtagagcaaatccaatcgcctctagataccacaccagcgtcttcggcagggcttgtggcagcagctcacgcagggaatgatgacaagaggttgttattattagtgaagaatgtcgacagtggccaatagtcatgtaaattattcgtcgtgtagaggtgcaagtgacaaatagccacggttttgtaattctcaactaggattaggtattgagacctgtaattcgtctgggcagacctcaaactgaaggtcaacaacgtagcgtggccctattgtagaatgtatgttgccccacaatctaaatgattcaacgctgcaattaaatctaagatctttgcagacc

SEQ ID NO: 85892 - DNA, 560 bp, Zea mays
  Clone ID: MRT4577_178344C.1
ctcgaggccggccgggccgggatctccctcctctccctcacaagcagcacacgaccagagccgccccgcctacaccggcctcgccctgctggagacgccgctgttgccgagctcgacgtgcacaggcgagccttcttcctccccgcctcggaccccttcttcctcacgcagctcccttcgtgttctctcctctcggcattctcccgcgcggtaggcttgcagcagtcctatggcgaacgcagccaggaagctgttttgccctgcgcacgtcgctcgcctagcgtccctcgtgcctcgctagccgccatggccgccgctatcacgcagcatctgccccactccgtcgcggcccagcgtgtgtagatgagcgccgctccgtagagtactactcccgcctgcgtgccgcatctgtgtgcgccctgctgcggcgacgctacacgccccggcatccgtgcggtgagccgccccacgtccggttgcctgcatccgtgcggttgcagcaacgaggaagaagagagagagaggtagaaggaaaattgcttgtgcgtgatttcagggga

SEQ ID NO: 85893 - DNA, 499 bp, Zea mays
  unsure (1)..(499): unsure at all n locations
  Clone ID: MRT4577_178345C.1
tcttcctctagcagaatccctatcacactccctatgtcactccaatttcgaacttcattctgtgaacagtgtaatatatagtgcaaaacaatactttgcacggtccattacacggcctgctgaaatcacgcttgtgcaactagccaccaactctcaattatgcttattttttatattttaatctatggctgacgtatcaaactgtattgagtaccggcttgaacattttaatacctgttgtatgttggacatcttccataggttttccttttagagtcctatcttttggtttgtaggtgtgattcacaccctcttttgatcctttattcctttttttatccatccagattggtccccttagatgttggccaggtggtctatgcctctcaagatcgattggtgatcaggacgtaggtgaatttatcattccgattccttatgtgaagcaaattaaggtacactgntggaaagtcactttacaccatttctggataaaact

SEQ ID NO: 85894 - DNA, 2352 bp, Zea mays
  Clone ID: MRT4577_178346C.1
cattgggtacctcgaggccggccggggccgcttttcgggattccattccatttcgttttagcttcatcactcaagggcgaggggccagcgcgcgtgggagcgggctggatttgcgcgtcctgtaccgagcgccccatgtgacaggtcgctcgcttgcccccgctccgccgctccctccctcgtcccgcaaagcaaccgcaacgcgccgagcgggcagcggggtccccggccagccgagcaatcccccctccccaccaccccaaaaggcgaggcagcgagcgggcggaaaaggctagtgcgcgcctcgtgctcgtgctcccccgagcagactagaccagcgcgctagcgccagcaaggccaaggcgagggaggggcgatgctcgcccgatctgctacagccgccgccgccgccgggatctggctgtgattaaggatgtcggcgtcgcggagcgggaggatcaggcgggccgggagcgtggcgctcggggactttctgcggcgggaggcgtcggcggagcgggccgcgttgggaggcggcgagcggccctcggtcgcggcggggcaggcctgccgggcgaagaagggcgaggacttcgcgctgctcaagcccgcctgcgagcgacgccccggcgcgccgtccacctccttctccgccttcgccctgttcgacgggcataacgggagcgccgcagcggtgtacgccgaggagcacctcctcgccaacgtgctcggctgcgtcccggccgatctgagcagggacgactggctcgccgcgctcccaagggcgctcgtcgccgggttcgtcaagaccgacaaggattttcaaactaaagctcattcctcggggacaaccgtgacacttgccataattgatggctccgttgtaactgttgcgtccgttggtgactcacgttgtgtccttgatgctgcgggatccatctactatttgtcggctgaccaccgctttgacgctaatgaagaggaggttggacgtgtaaccgaatgcggaggtgaagttggaaggctaaatgttgtcggtggtgctgagattggtccccttagatgttggccaggtggtctatgcctctcaagatcgattggtgatcaggacgtaggtgaatttatcattccggttccttatgtgaagcaaattaagctgtctaacgctggaggtcgtcttattatttcaagtgacggtgtttgggatgctttgactgcggaaatggcttttaaatgtgcacgagggcttcctcctgaggctgcagccgagcaaattgttaaagaagcagttgaatcaaaaggattgagagatgatacaacttgcattgtcattgacataatatcaccagagaaacaaaaacgcactatagaatctccaaaaacgccaggaaaaggccttgtccttctaaaaaatttcttcttaaggaaaacggcatctggttcattgtctctcgctgacaaggataattatcccgagccagatttcgtggaggaggtctttgaggatggatgcccatccctttcgaggaggcttaattctgaatatcctgtccgagatatgttcaagctttttgcatgtgcaatttgtcaaattgacttggagtctggccaaggcatatccatacacgagggttcgtcaaagacagggaagctgcgtccctgggatggccctttcctttgtcacagttgccaggaaaagaaagaggcgatggaggggaagcgtcactcgcgagactcctcgtcaagaaatagcgggtcaagtgaatagtgactaaagccaggagtcatcttgaggcgaccacctagcggtgtgacgagctaactcttgttgcagttgtcattgtagcagcacttcctctatacatggattaccattggacatagacagatgttggaacttggatggtgccatgcgtacatatgttggacctaatgcggtaatggaccgtcggccaaattcaatcgcctctaggtaccacaccggcgacggcgtcttcggcaaggcttgtagcagtagctcatgcaggtagtgatgacaagggactgttagcgaagaatgtcgacagcggccaatggtcatgtaaattgttcatcgtatagaggtgcaagtgacaattagccacggttttgtaattctgagctaggattagctattgggaccctgtaattcgtctgggcagacctcaaactagaggtcaacaacgtagcctggcctattgtagaatgtatcttgccctacagtcttcatgattcaacgctgtaattaggctggtgccggtgtaccatcttctcgttcttctatgttagatctcgactccactctcctcaaaaaaaaaaaaaaaaaaagcggcc

SEQ ID NO: 85895 - DNA, 1505 bp, Zea mays
  Clone ID: MRT4577_178347C.1
tcagggcgttacactacccgaggggacgccgtcgaggctgaaggcctggcaaagagccgagatggcctcggacatggccacacggttggcctccttctgctcagccgcctgggcaagcgccttgcagttcttgacggactcgttaagagccgtctcgaacccttcggctcgagcacgctgctgcgaggcctcagcttgggcggactgggcagacccgacggcctcggccaggctctccgcaagggtcccggctcgagcggacgcctcggctagccgctccgtagcctcagccaactgacccctaagggcctcagcccagatcacgacctcggtagcttggctccgagattggtcccgctcgccgacagcctggccaagctccagctgccgctgccacatctcctcggcctgggaagccaccagctcccgggtcgacaaagcctccgctcgtgccgatgtcgcctctgtccgtgccgctgctgcctccgactttagcccgtcgcagagcaaccaaaggtccgccacctcggcgctccgttgggcaaggcgctcattggcctcggcaagcgcggcccactgggatcgcagcaactcccaaacgtcgctttcgctgcggatgaacagcgacttggcggtgcttgcatccgcgagctcctggaaaaccctgggaacgtccctggaaagggtttccatggtcgaccgaagcgacctcatcgccgcctcggtatactcacggaaactatcccgagccttctcctccaactcatcgttgaggaagaggaggggctccgaggtgccgtggccccagaaccggagcggctgcccacacccctcattgggattgagctgcgcaggggtaaggccgctgctccccaggacatgccacggttctgcacgcccgtccaccgaggcgtcgggtccccctgcagccgatgcatcgggtaccaccgccgtcgacgtactgggcctctcctcggctaaggtggcgggcctccgatcaccaacctcggcaacgatggccgccctctcctcgtggccgagaacggagaggtcggggatgaccacgggcggcggcgcctcaaccgtcccgtcgcattaactccttggcagggcaagcgacatctccggcagaagaagcgggcgccgtttcgtctccgtcataatgaccgtgtcaaaaaaggtgtgccgccttatttaaattcatgtcctttttctttccctctctctctcttgccacagggatcgggaaagggggtatttcgaaaaaggacccttcccagcgaaggaaacgagccccgagccctcctactgatcaggggttcgaaggttgcgccctccggggttcggcgaccgccctagagcactcgggctccgtgccctttactgatcaggggttcgaaggctggcccctcggaagggttcgacagctgccccagagcacgcagagttagggatgaccctgggtatgtccgttacatggccgaggctcgggctacgctcccgag

SEQ ID NO: 85896 - DNA, 525 bp, Zea mays
  Clone ID: MRT4577_178348C.1
atggatgccgcgacttctgtgcaactcccaaccagatttcgattcttagagcatataagccacctttccccttacctcacatccacatcctctccgcgcagccaccgtcggtcacctgggcgtttcttccatgggctcgctggaatcacgggtgccatcacggaccagggaaccatggtgaggtcgaaggtgggcatcggcgatgaaccacgtctgcgacctcggcatgcgacgaagaagcttcaccatcgggctgggacgccgcgggaaccatactcaagcaacgactcggtcggcaccggtcgggcttcctcatcaaggaatcttcaagctattggcgtcgtgacccggctcgtacagggtgctagcaccggtgagatcctccccaatagactcatttcaaccttcgctagatgtatcaccgataggatcaaggattgttgtgcggatcgcgcgctcagggcaccgtggcgatggcgctgccgtgtgctccatccgctggcgtgttcgacctggggaagatga

SEQ ID NO: 85897 - DNA, 471 bp, Zea mays
  Clone ID: MRT4577_178349C.1
agctgccggcgaggagaagaggcaagacaggccgccgccgccggagggcaagcggtacgaggcggccggcggcgggggcgcagcggtggtgcaaggcgacgagccacgggaggctgggtcgaactccgaagagtagaccgcgcccggcggactggtgtacatggaaatcgcgggcaacgacatcgccggaatcagggatgcctccgacgcgctcgaactgaaagctgctaactgttcggaatcggaactgaattcggcgccgaaaccaaaaggcagcacagaacagaatccgatgccaaagatttgacctcggtgaggtggagtcgacgagttaataaaaatcggacaagaggaagtgttgcaaacagctgaaatcggcgtgatcaagcagggaatttcgtggggagggcgaggagagcagggaaatggggaaaatctgttcggcttgcgtactacttgggttgcgtcccg

SEQ ID NO: 85898 - DNA, 308 bp, Zea mays
  Clone ID: MRT4577_17834C.1
ttatatttttccgaggaggcaacaccaaagcaggaactggtggacggaaccccgaagaaggccacaaaggggccaggcaacaataccccgagatctaaccggcaggtgtgcaatatgcaccaacaagagcaaactcaacaacatttggtctaagcccaaccaaaaagaggcgacaaaaaaaccaggataagagcacacaaaatgtcattacaaaaagagattcatgggaaaacaaggaccacgaacattggtagcacccaaatgagcaaatgaaagggggcttcaaatcatccgccaggttttttaag

SEQ ID NO: 85899 - DNA, 446 bp, Zea mays
  Clone ID: MRT4577_178350C.1
taggggcctttttttttttttttttcttttttttttttttttttttttttttttttttttttttttttttttttttttttttttttttttttttttttaaaaaaaagcacatacgttagcaatggggaagggtgggttttaaaaaaagatcgcacaagttggaaggacaactaacactgaaaagggtttggtcagggattgaaaaagggggggggaaaaaaaaaatcatcgggggccggttataggaaaacatcaagatacgggagagaaaaccctgggaatgggatgattgggggccaccgttcaaggggagaagccaccagcggggggggacgagccagcaccacctccagagggggggggaacagcatagccaattttgatcccgggggactctttggatacataaaatatgccatctgggattttctggaaaatgggaccag

SEQ ID NO: 85900 - DNA, 249 bp, Zea mays
  Clone ID: MRT4577_178351C.1
atggacaggagttttcgtcaactcgttgggaagacaattgcatgtaccgcttggaagcacttccccttgcttaagatgcagactttggaactgcatagcgagcagttaaagatgactttttgggagcgatatgggcaagagatggctcaacaccatggtgatgacttcgattggaggcatggacccactaatccatcgacggtgcatgcaagtggtgtggaaaggcgcataaacagtaaggatgattag

SEQ ID NO: 85901 - DNA, 533 bp, Zea mays
  Clone ID: MRT4577_178352C.1
cgagtacaagcttttttttttttttttttttttttttgtttttttttttttttttttttttttttttttttttttttttttttttttttttttttttttttttaacccccccggggggccctttaaaagggcaaattccaaaaaactggggggcgttattaaggaatccaaacttggaacaaaatttggggaaaaaaaggaaaaaattttttcctgggaaaaaatgttatcccctaaaaattccaaaaaaaaaaaaaaccggaaaaaaaaagggaaaaacctggggggcctaaaaagggaactaactcaaattaattgggttggcctaaatgccccttttcaaaaggaaaaaactttcgggccaattttattaaaaaaacggccaacccccgggaaaaaggggtttgggaattggggcctttttccctttcttgataaataaatcggtggccttgggcgttcgggtgggggaaacggttttaatttaataaaagggggtaatacggttttccaaaaaattaggggtataaccc

SEQ ID NO: 85902 - DNA, 220 bp, Zea mays
  Clone ID: MRT4577_178353C.1
tcttcttaccatacagtcgagccagctctgctgggggctctatgatgggcccggctatcctacatgagcgcgattctatccagaatcctagggctcgcacgcctactctaaagatgggcaagggccgcgccctcctgcccccggcccctgacgcctccgacgtgaagaagggcaaacgcttcaggatcaagacgtggaacgccatctctctatgggcctg

SEQ ID NO: 85903 - DNA, 398 bp, Zea mays
  Clone ID: MRT4577_178354C.1
gacgcacaaacattagtttaatttatttccaagtcaaaattgcttgaaagaataacatgactatctgatgtgccacaaccttgccccgaattccaattcataaaatgatacgggaaccctcccggccaccccgctggaagaagaaccatcatgcacacagttcggtacaggagttcaccaacttctgggttcagataacaaagcggggcgtgcttgcgcagccttgaagggaagagagatggaagactcagcttacaaactaggcgggggccgacaatacgtgccccacatgtctcatcacacccgcggccgcttaagacctgctcttcaacgggatggccctgatgatcaccgggtgggacatggcaggcagggcgcctccctcgaaggggccggcc

SEQ ID NO: 85904 - DNA, 698 bp, Zea mays
  unsure (1)..(698): unsure at all n locations
  Clone ID: MRT4577_178355C.1
ccctcgaggctggcctgttgcccgcaaaaaacctttgtaaagcagaccatttccttaaccaaccataaccattgtaaagtttaaccgtgaggaataacaagttgctgggcgtacctggcagaccattccctggcagagcgctcgtccctggcagagcgcaggtagattatggcagagcgacggggaaagatattttggttgttgtggcgtgcctgcatgttatatgaaagcttgagggaaaatcgcaatcagagagcgggagcagggaatcagtcgaacctggaggctgcaattccctgcgcaatcagaaaaaaacgccgctgtcacctccttccatgtagagcgcgagcgcggatcgaggccgccgtccgcgagcagtgattccgtcgatttggggatcccatagagcgacttccatagagcgcgagagatttggggatcgagagagacggcggngtaaacggccgcggggccttccatgtatgcggcggcggctcaccttccatacagcgcgagcgcggatcgaggccgccgtccgcgagcagggacgagcgcgagggagttggggatgcacggnttcaccttccatagagcgacttccatagagcagggacgagcgtgagagagacggcggggctgcgggggcgcggggctgcggggctgcgggaacgctgggacgagcgcggcaggggccgttg

SEQ ID NO: 85905 - DNA, 361 bp, Zea mays
  unsure (1)..(361): unsure at all n locations
  Clone ID: MRT4577_178356C.1
tttntttttttttttttttttttttttttttttttttttttttttggaaaaacctctaattaataatgattaaagaagccttgggttcttgcagatttatgtccagaacaatagagatcatgctgcagggaatccagagccttcgactttttttttacaatcttgaagaacaactgaaaaattgcctaataaggagataggaattttttctcaagttcacggaaaccacggtagacattctttgtttggttctggggaagggttaatcgcctcacctcagtcatgtacctgttagccaaactaattattttattttgagcaccttgattcgcagtccctgtttggttcagtgaaaatgttc

SEQ ID NO: 85906 - DNA, 745 bp, Zea mays
  unsure (1)..(745): unsure at all n locations
  Clone ID: MRT4577_178357C.1
nnctcaaggatgtggcgcatcaggtgcgcagccgcaagcggatctacagccatggcaacgcggcccatgtgagccaggactcgcagattcagcaagtggtgggtgaagtcgcggcgctggtgtatgccgccgaagccagtgcgctgaaggccgcagttccggcgcagcgggcttatgtggcaaggttcggtggggatgatgcggtggagcgcgaagccaacgtcgccgctgaaatcgaatcagccacggcgcaggtggtggtctcggaactgatccagcgtaccaccactgaactgttcaacgcgctgggggcgtcggatgtgcgccagggcaaagccctcgatcggcactggcgcaatgcacgcacggtgtcgtcccacaatccggtgatctacaaggcgcggattgtcggcgactgggtgatcaatggcaccgagccgccgtttgtatggcagatcggcaatgggtcggcgcgttaaagtgccagcttgaagccaatcatcaccagcatgaacgccaggcaaggccgcaatatcccgtccgggaccttgccagccatgtggctgccgacataaatccccggcagcgagcccagcaacaggaaacccagcagggtccagtccatgttgcccatgctcgcgtggccgaggcctgccaccagggtcaatggcacggcatgggcgatttccgtgcccaccaggcgcttggtggccaggaacgggtacctgcccgggcggccgctcga

SEQ ID NO: 85907 - DNA, 2210 bp, Zea mays
  Clone ID: MRT4577_178358C.1
ggtaccggccgggccggaggggtccaccatgccgtgttcctcctcttcgtcgtccaaccccttccactccctcgcctccgccttccccttcctctcctccacatcccaacccccatccccacccgcctcgcccgcgcccgccgctccccacctcgccgtcccgctcctcctccccgtctcctcggcttccgagtcccgccgcggggcgcagccgctgccgggcacgcggatggtcggcgcgggcgcgaccggcgggggtaacatggccagcggtggtggggggcccgcgttcgtgggccaggtgttcaccatgctcgacccatccgggaacgggctcatggccgttaccacacgcttcgagctcccgcgcttcctcaccaacaggactcctatgtggttcaaaaggatgctatcaccgtcgaagaagactgaaaatagtccagtatttaggttttttatggatctgaatgatgcagtatcctatgtaaagcgactaaatgtgccaagtggcatggtgggggcttgtcgccttgatgtagcatatgaacatttcaaggaaaagcctcacatgttccagtttgttccaaatgaaaagcaggtccatgctgccaataagctattgaagtcacttccacaaaggggcagaaggaaaaaacttgatggggttcctgtttttagtgcgcaaaacttgaatattgcagtggcaacaaatgatggaattagatggtacacaccatacttttttgataaaaacttgttggacaatatccttgaagcttctatggatcaacatttccattcgataatgcaaaatcgccatacacgtcgtagaagggatattgtcgatgatagtttaacatcagaaataattgaagaaagtgctgaaagcttgcttgagcccccagaggttcaagaattaatgaatgagattggcccagctggtataccattaaatgttgtaacgaaagctgcagagattcagtttcttgatgttgttgataaagtccttctaggaaataagtggttaaggaaagcttctggcatacaaccaaagttcccttatgttgttgattcatttgaagaaaggactgctgtttcaattgccaatattgctactaccagcagtttaactgcttcaaatgacgacagcagttgccagaataatcaagaaactcaagcttccgagccaagtggtgacaacagcagctacagaaatcacaataatgaagatcataatcactttccgtttagcaatctgcttccaaatatatggccagggcatgacagaaagttcaaatcacaagagagtgacaataagtttagcagatatgatgcagacatgaagagtaagttacaagcaaaccctcttcttccgaaaatcaccatggttggcatctcaatgggtgatggtgcacagatgagcaaagccaacttaaagaagacaatggaagacttgacaaaagagttggagcaaacgagtgaagaaaatatgttcggtgatgaaaaagacccactttttgttgccaacgttggtgactactcaaggataacaaagattagctctgcatgaggctcgttgaccaacaggcgacagcaagggtgttgtactgaactgctaacgaagtctacagtccatgatactgatcttaagagggctctactgatataatgatgcaaatcggaggtcatcagatcatatggacattcgactgtagaccgttctgactttagaggctatccaacgtcaacagttacaagccaatctaaattttcggatatgatttgccaaaaggatgattgtaaatagaaaagtttgcagaatgtccaccatgcagttaggcgtgaagatctgaagcaacatgttgttggatttctaagatcttagctcgtaacagctgtagagtatggtggtatagcttcaggattgagatgggggggtcataggagtctgtcaggtgagcagagtcgaataaattgatgtgggtagcatttttcttcactagctgcgtatcggatctgagtttgtatggcgagaggtacggtaaatgttggttcgcatataggtccttggattatttattgtatgcgatatggtgaaaggaggttgtaactaacatgttgtgtgtctccgatcatcatactgacattattgtctctcttgatcttatacttgcttataaatagaacttaaaactttattttgagttgac

SEQ ID NO: 85908 - DNA, 216 bp, Zea mays
  unsure (1)..(216): unsure at all n locations
  Clone ID: MRT4577_178359C.1
cgggaggacccagtgcgccgccgtcgnctgcatgacctagcgtcttctgcctagagagtcgtccgacatagttgcgctcacagcctcgctaggtagctacgatagctccatatcacaaggcgggggtcgctagtctcatgagtgacacccaagattacgatcgattagcctcagccaccgtcgcgtcaagtcctccctctccttctccaatgaagt

SEQ ID NO: 85909 - DNA, 122 bp, Zea mays
  Clone ID: MRT4577_17835C.1
gacgagcactacctagggcgtgctgttgaggagcggcttcgggtttttgcccagcagatcagtgggaagcattgcaagagtctacaggacatcgtctcaggggagcagatccgccatgagcc

SEQ ID NO: 85910 - DNA, 262 bp, Zea mays
  Clone ID: MRT4577_178360C.1
cgggcttccttctctgtcgtaagcctccacgactttggcttcggccaagccggttccggaagacacaagatacggtgtattccggatgtgaataaacgtgtgtgagtaataacgcagacgtgtttaataaaaagctgcctgcacgcacccaatgtgtgtgcacaaataaaaatttcgccctggtttttctgtcgtcgaaatgtgttgattgattgatggtacaagagtgttgttcatttcatatattactatctgatgaaaa

SEQ ID NO: 85911 - DNA, 828 bp, Zea mays
  unsure (1)..(828): unsure at all n locations
  Clone ID: MRT4577_178361C.1
cattgggtacctcgnagccggccgggctgactgacctcagcctcaggctcagctgcaccgatcatccatccccatacaaagacactgtatacatacattttaacaacaacaaggtttagctccgcatggcctattactgcaatgcttgctgcgcagggaagagctgccgcctccgctggttcaaccagctagacccccggatcagcaagcgccccttcagcgacgaggaggaggagcgcctgatggctgcgcaccgcttctacggcaacaagtgggccatgatcgcgcgcctcttccccggccgcacggacaacgccgtgaagaaccactggcacgtcatcatggcgcgcaagtaccgcgagcagtccacggcctaccgccgccgcaagctcaaccaggcagtccagcggaagctcgaggcagcctccgccgcggtcgcaatgccgccgggcgcgggcgcgggagacgtcgccgtcggccagcaccaccacctgctggccgccgccgcggcggcccacgcccacgacgccgcctacagcttcgccgcggacccctacggcttcggcatccgccaccaatactgcaccttcccgttcccgccaggcgccgcttcggctgaggacccgccgccgccagcgttcatagatttcctcggggtcggagccacatgaacgcgcgcgcatgtgcatgcatgctcgacttcaccacgcgccttgcagttgcatgtagtgggatctagctaggacaggtagctcgagcagcctctatctagtatctagctagctacctttgccatatatgangagtaagtacatcgatccaaggctt

SEQ ID NO: 85912 - DNA, 653 bp, Zea mays
  Clone ID: MRT4577_178362C.1
ttttttttttttttactatcaattgatgattactcaacagttgtgaaacaaataaaatcggtatgtcaaacgcagtgtactcaaatttcgtcgttgtcggcaatcgaattgctgataaacaaagcggaatctttattagtactattaccagcggtggctttgttcgcgtctcgcaatttcgacgccttcattttggttaatttaatttccgcactacgacctattaacgcgccttcagcaccatcaaacattttgatggcttcagcgggcgtaatgtttaactggtcagcacgtttagcaactaattcgtcgaatataggattatcagtcataacttctatgacggttttcgccatagacctagcaaaacgtcgataattgttgttacaatgtcttttgataactacgcctatgtgacgacgttctaattcaaaatcgttgaaactgatgcatccagtaaattctcgtttgtcggagctcgagttgacatagatgtcggccactatggcattcaaaaagttcgtcaagtcgtcttctttatcggaactcaaattcgcttctaccattatatctgtcagaatgttgtcgatgttctgaaccatgttcgttgcgacttgatctaaagttataggtgctacgtcgcgtttgacact

SEQ ID NO: 85913 - DNA, 500 bp, Zea mays
  Clone ID: MRT4577_178363C.1
ggaaaaaaaagggaaaatttggaaaaaaaaagggcccttggttttaaaggatcccccataaggggaaaaactccccccctcctgggaaaacaagaaacatagggggcacccctccgggggggccccaaacccccccgaagcccgaggggtttgaacggggcccacccaaatttccccaaattttttccccccaaagttcccttgggaatggtccccgggggcaaaaaaaaaaccttggggtttggcaaagtttactggggggggggccaaacccctttgggggggccccccccccccaaggtttcccaattttgctaaatttttccgggcaagggggggtttgggttaaaaaaaacccccccaaaggggggaacccctttggccgggggggggagggacatttttgaccctctaaaaaaatttgtttttgccctgggggctccgggaaaaaaaccctcccaaaacttggccagttggccctttccataaaaggggggggg

SEQ ID NO: 85914 - DNA, 799 bp, Zea mays
  unsure (1)..(799): unsure at all n locations
  Clone ID: MRT4577_178364C.1
gggccggccgggggttcagacttcanaggtgctctaggcttaaggggcggctgggtgagggcagtgctcataactaaatgcccaaagttaggatatatccagcaaaggacagaatgaaagtggtctctgtacaccttgctgctgctgttgctgttctacttctgttggcggngaagcgcacccccgctattgcggttcctagccctcagtgccaacggcaatgtggcggcgttgacattgcgtttncgttcggcatcggtgacaactgctcgctatcacgaggcattaacctcagctgccaggaggtccaaaatggcgtctacaggccattcctaggtaatattgaggtgctcaacatctncttgataaatggnacggnccgggggctgaaccccgtntcgacatactgctacgactcctcctctggttccatggagcccagtacctggtcattcgacgtgagcagaacccccgtaccggttttcggacgtccagaacaagttcaccgtcatagggtgcccagacccctcgtatacatcaaggacaacaccgacaagagctacccagagagaggtgcgtnttgacagtgccagagcctggtcgaacatggtggaacggagagttcctgcttacggcagggggcttgttgccagacagaacatacccaaggggaattgactactaacaacgaggagcattnaacccaagccttcaacacnaagccagaatttggaagctaaaaaccgtttaaacttacncccaagctgatggaggggggnaggaaatttcatttttaaaa

SEQ ID NO: 85915 - DNA, 587 bp, Zea mays
  Clone ID: MRT4577_178365C.1
catgcacgcgagacgtgagctatgtgatcctctagatagtcgacccacgctgtgctgccagaccagtcgccgcggcccgtgcgcttcggtatcctgggctgcgccgccatcgcgcgaaagctggcacgcgccatgctgctcgcgcccggcgcagccgtcgccgccgtcgggagccgctccgaagagaaggcccgcctcttcgccgccgacaacggcctcgacgtcgccaccacccgcctccacggctcgtacgatgcgctcctcgacgacccggacatcgacgccgtctacatgccgctccccaccagcctccacgtgcgctgggctaccgcagccgccgcacgtggcaagcacgtgctcctagagaagcccacggcgctgtgcgccgccgacctcgacaccatcctcgcggcttgcgacaccgcgggggtccagttcatggactccaccatgtggatgcaccacccgcgcaccgccaagatgcgggaaatcgtcgacgacaaggacgccatcggggacatcagaacgattaacagtgtgttcagctttcgagcaaacgaagatttcctccagaatgatatcagagt

SEQ ID NO: 85916 - DNA, 783 bp, Zea mays
  unsure (1)..(783): unsure at all n locations
  Clone ID: MRT4577_178366C.1
ccggccgggatcatcattcaacatcacatccagccttagcatcagcatccaaccattcaaaccatcttctcatcaatcaatcgaccaacttcaaaccaaacctcccaaccaaaacatcagcaatcatgcacttcaccgccctcatgctcgctggcattgccgcctccgcctctgcagcctccgtcttcgtcgacaacaagtgcaacttccctctctacctccagtccaagcacgacggctcttccaccggcgtgatcaagctcgacgccaacaagagcaacgccttcagcaccaccatccccggtgccgacgtcaagcagtcctccatcaccgtttctcgccagcccgacctcagcagccccgtgcaggccgtctacaacgtcggcaccaaccccgacaggacctactacgacctgtccaccgtcttcggtgaccctcttaaggctgagggcttccagctcctcgctggcagcgccagcaacggcttcagcgtcgtctgcccgccgcgtcagaacggcgactgccccaacacttactctcctggcaaccctggtggcaagaacgccgtcttcaaccagggcattaacgccaacttaattctccagctttgcagctccagcggcaaggcttagattgggaggcttttaagagcgcgaggggagagtggacgagataagataatacggctccttcagcatgacgatatgaactacctacactagataagcttaatccataattcaattcacaagcttaaacaaaaaaaaaaaaaaaaaagcggnc

SEQ ID NO: 85917 - DNA, 203 bp, Zea mays
  Clone ID: MRT4577_178367C.1
tttttgaaggataacccacaccccgtgtaaaaatatatctgccccagagggtgctgcctttttgtacacaagatgccctcttttttcggaaaatcggtggctttttttttgaaaacccccttaatcgggttttgggggcaaaaacctgttttccccccgaggggtgttatatttttttataaagaaaccgtgccccccccttt

SEQ ID NO: 85918 - DNA, 581 bp, Zea mays
  unsure (1)..(581): unsure at all n locations
  Clone ID: MRT4577_178368C.1
cattgggtacctcgaggccggccggggtctgttctgctctcctctccatgcatggacagngtaggtcctcctctcctcgcctaccgcagtcgcaatgccatcacagttcagcattacatcagtctattacacgcgccgactcccgcctgtttgttctgtggacgcgtacatcgacagaatgcgcgacgagcaaacagagacacgtcgcagacggacacatgaagcctgctgacaagcacctcatacctgcgcaacaacatatgagccagaacagcactcgtggaccgagcaggtatacgggaatgattatgaaccccatgatgacacccctcgtgctacttcatcttcatagtgatgtacaccgcctgcgtgatctacctgatcgccttctgcaatgattgcatctaggtgcctgtgcgatgaccgctgctggatctgccaagatggagtccacatgctgactcgtcggcctgcgtcttatcatgcgtgagctgtgcgactttgtaccttcttatatagagactggatgtctctcgccagtgacgataatagcatgattgcgtggcggatgctgccacaaa

SEQ ID NO: 85919 - DNA, 674 bp, Zea mays
  Clone ID: MRT4577_178369C.1
gagggccaactaaacccgtaaccaaggtgcgaccatggtcccgctcgctgctctcctcccccgctaaacccaccatcaccaccaccaccaaaacgaccacggccccaagacccgacggctccgcccatggaaatgatcctacactggacgacgcatccctccgacatccgcctcgcactacacgactgaatatgctgcggctgcgcccaccgcgcatatcgcgataaagcaaaggacccacagaaccaaaaacaacgacacctactaactgggaaacgttccacactcacgcgtgcgcgacggcctagcaagtcgatgggcgaacaacatgacgagcacccataagaacgaacttctgcaacagatgacccatacacaaccgcgacatcatacaaggccagggttcccaaaactcctcgcctcgactagatactgacttcggggcactccataatgcatccaggaaaacctaccgacaatcgcgccccccgaggacgcccccaaccaactgtgcgatatatctgcgaactctattaacgccaccgaaagaacctatacgcagggatgatgatgccaagtgccatatccaccattgacgtcatgaattccattgctccagcacaaaagattacactgatatcagctgctgaacaccctcacaaagaaattgctgc

SEQ ID NO: 85920 - DNA, 2264 bp, Zea mays
  unsure (1)..(2264): unsure at all n locations
  Clone ID: MRT4577_17836C.1
tgttaacatcattttttgtgcctgtcttaagctggatattatgctgtgtggtgggtatggtcccatatttctgacacattttcattctgattagtctttttgtagcacatttgtgaagctgttaatttaacaacaatgtatatctagagttattagattgcagtctcttcgagtcccttttgtttgatgcttacagaagccccccctcccttgacatagcctcaaaattttcaacaacatgncttgtgatgcaacagaaggcctaatttcattttttttatattttcaccacgcgtgcgctctctctgtctgcgacgactgggctacgccgccgccgccgtcctccgtctggtgccgaggtcttcgttggacccttcgcccgcgactagcgtccgccaggctgaaggcgatggcgacggagaggaggcgcgcgtcagtcgtggtactgggcgacatcggccgcagcccgcggatgcaataccactccctctcgctcgctaaccaggccagtatggaagtggacattgttgcaaatggaggaagtgatcctcacttgtcactgagagagaatccatcaattcacatccacgagatgaaaacagtgcagttaactggaatttcaaagatatctggtgctctgtcacttctacttaaagctgctgtccagttcattttgctggtttggtttctttgttttaagattcctcgccctgatgtcttttttgttcagaatccaccctctgttccaacactggctgctgtaaaactggcaagctggctgagaggtgctaaatttattgttgattggcataactttggatatacattgctggggttgtcgcatggcagaagtcacattattgtcaaaatctatttctggtttgagaagtactttgggcagatggctgatggtgccttttgtgttacaaaagcaatgcagcatgagcttgctcaaaattggggaatcagggcgacagttctttatgatcaatctcctgatttttttcaccctgcttcattgatggagaaacatgggttgtttagcaggctagggaattccatgtgtagtgctatgggcaatgctgattgcatatcagtggaggaagtaggggaagacatgaacactactgcctttaccagtaagattgatggccaagttttcttgaagcctaacaggccagcacttgttgtgagcagcacaagctggacgccagatgaagatttcagcatacttttggaagcagcactaatgtacgacagacgcgtcgctgcagctttaggtgaagatgattcaatggatgaggggcaactttggattgatatcaagaacgggaagcagtttgtctacccaagattactgttcattattacaggtaaaggacctgataggaagaaatatgaggatcaaataaaaaggttgaagttgagacgtgttgccttgcggacaatgtggcttgcatcagaggactaccctttattgctcgggtcagctgatctaggagtgtcgttgcatacatcttcgtcagggctggacctaccaatgaaggtggttgatatgtttggatgcggattgcctgtttgtgctgcttcattctcctgcattgaggagcttgtaaaagtaaacaaaaatggtcttcttttctcaacatcttcggagcttgctgatgaacttatgatgctctttaaggggtttccagaagaatgcaatgccttgaaatccctcaaagaaggtgccatgaagtcagcatcatcttcgaaatggtcaacagaatgggaaaccaatgcactacctttggtggaccaggtcattggatgagatgtgtgcttacatacatcagatagaattgttgtattgcagagaaccagagatcggtgtactagagagaccagatgtacattaaagggtacggtttgctttcaccaaaaatcaattgctagttgctgccagtgccatgtgcaccacttcagcaaaacttgggcaagtttgtagctacgaagctctttcctttttaggctgggaaacatactctgctgaacacatgtctaagttgtttcaggatgtatactactgtaggccagcactttgtttgataatatggcctgtattggaatacctctaatctgttacgtcagaaggaaaacatagaaaaccatattgttttccctggcttcgaaggccatctgataagatcctatgcagagaggcgtgtaccaaacagaagtgtacaaggaatcaggatctctagcacgatgtctggagaatg

SEQ ID NO: 85921 - DNA, 217 bp, Zea mays
  Clone ID: MRT4577_178370C.1
ggccgctttttttttttttttttttctgtgcaaggacaaacgcaactcttattttgctgacatgatacaatgataagttgaaatgcaagatacttcacaatcacaaggggcatttttacgacatcaggatacattaacagatttggataattgtagtgccgttttttgacaccgggcaagaccaagttataggtaagcatatatagcagcggacgcg

SEQ ID NO: 85922 - DNA, 227 bp, Zea mays
  Clone ID: MRT4577_178371C.1
tcgcgccgcgccggtgattcggcgcacgggcctgccctgcccggccaggggaggcggtacaacagacatacgcggacagccggacccggacgccatgcgaagtgcaaaccccctaaatattccacttgtcttcccccctcgtatgactccacggaaccattgacttcttggccctcgtcactggaggagtgaatggctacctttaattcaacacgtaaagaaagtaa

SEQ ID NO: 85923 - DNA, 185 bp, Zea mays
  unsure (1)..(185): unsure at all n locations
  Clone ID: MRT4577_178372C.1
atccattcacacaacatncgagnatctngcancaggcngtcgatgtagttggncaaancttnctcctntcacaggactcctgactcngactntctcnaatgccngtnanggctangcngtnnctatgccatgtatgcacatgttgcgcactatctgaagagattctgngaggtgcctcnngagtg

SEQ ID NO: 85924 - DNA, 600 bp, Zea mays
  Clone ID: MRT4577_178373C.1
ggccgggccgggttttctacccgaagtgcagacaccgtggctgatgcagaagctgccacttctttacgcctcgtttcttctccatcccggcgacatcaatggaaaaggtgagaggaatgaggaatcctccaccgccaacgctccatgtggaggatttcccactggggggaaaaaataccgatgagaagccctttgtgcgcatacgtcgcactggataatggtgaagttctgactgatggtcatgtctgtatccgacatgccgactctctcttggttcacaaactgatgaagacacgggaaaatcttcaggtcgctacaaggctctgaggattgacagagattactactatgtcaatcgaacaaaggtgccgaacatagggtcaaggcgatgatcttcacatgaatattgatgctgttggcgtatgcatcaatggcaggcatacccatggaaccctctcaattctgttgagacctcttaccatcagtctcgcctgatccttcttactgaaccaaagatcgatcatcagccgatcgaggagactgctcagaagaacatcccgacgattgccttcggcgacactggctctcccatgaggtatg

SEQ ID NO: 85925 - DNA, 701 bp, Zea mays
  Clone ID: MRT4577_178374C.1
ggtacccctccgccctcggggccgggccgggaccccaacaaccattattcagatttcataataccatatatcgtagtacccaacccccatggatcctaattatggagagtggaatttctctgagatcaagatagcgaaagctctcattgctagccacaatgccaagagtagctattctagtgacatgaacaataagcaaactgacattatagacatgctccaagcaaggtttcccacaaaagagaagcataaggtaaccaaactgtatgttgatctcatgttggagaagatgcagatgatattgagtggcaaccaacatgcaacaatgggtaagaagcttgtgaatgacaagtttgggatgtcgatagaggatccagccatagatttcatgggtggtgatttagtggagaaaaggacggccaaaaggaaggcaagggaggatatgaatacccacctagattctcagaaggagaggcggtaccgaaggttttggaccatagacgaacacaggaatttcctctatggtttgcgtgcatatggtcgaagcgactggaagaacatctcaaagcactttgttaccactaggacgccaatgcaaatctctagccatgcccaaaagtatttgcataggatggttttttttgctaggaggcagcggagcagcataaatgacattggtccttcacgatgatgaacccagg

SEQ ID NO: 85926 - DNA, 684 bp, Zea mays
  Clone ID: MRT4577_178375C.1
atgaagcatttgagaacaagtccccaacattggcgcccacctccggtgaactcattcgaccaccttcggcaagctgtgaccttcgtcatgctgccaaagaaagcttcagcgctgggggctgcattgcagccactggacgtcaaccaagaaacactgcgtgaagctagaagccaaaaaaggaaggctacaagtccaacgcctcaggaggaggagctggaccaagaaataagggacctcgaagccattcatcagcagaagaagatcgatgagactaccgaggaaatgcgtcatcttactcaagatgaccaggaccgaagacctcaacgcagagagcttcgtcaggacaaatcctacgataatgatgagtggtatgatgatttccatcatggaaattttgcttttgatgatgcttctcctctgtcagcagaactgcaggctacccaatggcccctaaagccaccccagctccccatgtatgatgggcactcagatccgaagcagcttctgatgagctacgaagcaaccatatcttcatatgggggcaatactgtagtcatggcgaaatccttcgtcatattagtcaagaatgttgtgcaaacctggtactcctctcttcggtcgggaacaatcacatcatggcagaagttgaaggacatgctgatcactagtttccaagggttttag

SEQ ID NO: 85927 - DNA, 792 bp, Zea mays
  unsure (1)..(792): unsure at all n locations
  Clone ID: MRT4577_178376C.1
gggaaaccaaccattcattcagatttcataataccatatattgtagtacccaacccccatggatcctaattatggagagtggaatttctctgagatcaagatagcgaaagctctcattgctagccacaatgccaagagtagctattctagtgacatgaacaataagcaagctgacattatggacatgctccaagcaaggtttcccacaaaagagaagcataaggtaaccaaactgtatgttgatctcatgttggacaagatgcagatgatattgagtggcaaccaacatgcaacaatgggtaagaagcttgtgaatgacaagtttgggatgtcgatagaggatccagccatagatttcatgggtggtgatttagtggagaaaaggacggccaaaagaaaggcaagggaggatatgaatacccacctagattctcagaaggagaggcggtaccgaaggttttggaccatagacgaacacaggttaatgatttctttatttcacacatgcatttgttttgctctatttatatcttttgtcttattttggaaacgcttttcacattttcatgcacattattgttacattcattagaatgacgtatgggngtattggttattatgagggtgtttggagaaatttttcactaataatggttagtgtggatacttatgcatttttcaatctaatccttatcctggtgtaggaatttncctctatggtttgcgtgcatatggtcgaagcgacttggaagaccatctcaaagcactttgttaccactaggacaccaatgc

SEQ ID NO: 85928 - DNA, 706 bp, Zea mays
  unsure (1)..(706): unsure at all n locations
  Clone ID: MRT4577_178377C.1
acttagttctagnatcggcgagggtgttcgtgcccatcgatgacctcctggccggcgccgacaagggaggtgatccgaggcccgtgagctaccaggtgcgcaggccgcactctggccgcgcccacggcgtcctctacttctgctataagttcaccgacgtccccgccgtggcgtgtgtcccggaaccggaaggcaaacaaggccagtacgccaagtacgtgctggactccgtgaacacgacggacaagacgatggtgccgcccaccgcgtacccaccgtcggccatgccgtctacgtacccaccgccggccatgtcgcctgcgtaccctccgccgcaatatggctcgccgtacccggcctacccgccgcagccttacgcgtacgctgctccgccaccgtacgggtacaatgcggctaccccacaaccggcgatgtacggctacgccgcgcagccggtggctgcacccgcgagccatggcggaggcatggggatggggcttggcctagggctcctaggcggtgctgtcggagggatgatgcttggagaggcgatcggtgactatgaggccgacgccgcctatgatgcagggttcaaccgatgcgttggcattttagatcttgccgtgcagtgatggagattattgtccttgtaaatctctaattcatacgaaacgatgaaatagaatttgcaagttttgcttctctt

SEQ ID NO: 85929 - DNA, 246 bp, Zea mays
  unsure (1)..(246): unsure at all n locations
  Clone ID: MRT4577_178378C.1
aatcgttcccgancgagatgggccgnaagttcttcgntggngacaactggaaacgaatggaaccgcaaatcaggatgagaagatgtcaaaaccctgaatgaaagaaatgttccctcttcaaatgatgtatgaagaacgatataagacctccttatgtgttcctcccggtgatcaagagccagatgtgccaagagtaccaagttgctgctcacaactgctgggcgaagaagggatgtgcattctgtg

SEQ ID NO: 85930 - DNA, 453 bp, Zea mays
  Clone ID: MRT4577_178379C.1
cggaattttcgggtcgacccacccgtccggtgtcaatccatacgacgagggtggcgagggccaatgtgttttttacacacctgtcaaggtggttcatattggggacacattccctctacaggtgcgacctccttctgacaagaaaaccattgtggcctacatcaaaaaatgcatcaggaatcggagtgttgagcaggggccatataacgcggttgaatacaaaaagggtgccacgggtgcaaccaactttgtccttatcaagctgagggacccccaactttttgttggtgactccatcaaggatgatgcgtctgccgtatgaggctattactaggatggtgccactaatgtcgacattcctacatttctctcacggtgctatagagatcacgtgctcagcgtgcggacaaattagttacccatgttgggtgctatctatgtactaccattata

SEQ ID NO: 85931 - DNA, 1260 bp, Zea mays
  unsure (1)..(1260): unsure at all n locations
  Clone ID: MRT4577_17837C.1
cataccattgcagnagnnaagtaggggaagaaatgaacactactgcctttaccagtaagattgatggccaagttttcttgaagcctaacaggccagcacttgttgtgagcagcacaagctggtctgctcttttgaaccttgcagtcattgatatagccttctttatgttcattgcatgtgattatcgagtggatagttcaaatatgagaaagtaaataaacctttgccacctatttctaggacgccagatgaagatttcagcatacttttggaagcagcactaatgtacgacagacgcgtcgctgcagctttaggtgaagatgattcaatggatgaggggcaactttggattgatatcaagaacgggaagcagtttgtctacccaagattactgttcattattacaggtataaaccattctgctatattaacatgaataaccaagtttgttttttcatgtattccattttccaggtaaaggacctgataggaagaaatatgaggatcaaataaaaaggttgaagttgagacgtgttgccttgcggacgatgtggcttgcataagaggactaccctctattgctcggatcagctgatctaggagtgtcgttgcatacatcttcgtcagggctggacctaccaatgaaggtggttgatatgtttggatgtcgattgcctgtttgtgctgcttcattctcgtgtattgaggagattgtaaaagtaaacaaaaatggtcttcttttttcaacatcttcagagctagctgatgaacttatgatgctccttaaggggtttccagaagaatgcaatgccttgaaatccctcaaagaaggtgccatgaagtcagcatcatcttcgaaatggtcaacagaatgggaaaccaacgccctaccgttggtgaaccaaacatcctgtatggccgtttacatataggagcagtctcaggtaagagatcaattacaaactcaacttccctatctggtggcatccctggtgactcctctgggaagacatctgggaaatcactaaccacacggatgttgtttccaacaaaccccccatttatgaaaaatcccgcccgtctggtaaaggtagttcctgtaatttcaacgtcaaatctttcccctttagggggggtgggttttactgggccccccccccagggtaaaagggcctttgccttttttacccatgacaaacaaaggattagatttatgctgtttgcttctaaaattaaagggggagccccgaatttttttcc

SEQ ID NO: 85932 - DNA, 271 bp, Zea mays
  Clone ID: MRT4577_178380C.1
cggacgcgtgggaaaaaaaaaaaaaaaattaaaaaaaaaaaaaaaaaaaaaaaaaaagagaggtgtaaagctccatactagaataccgcgttacattctacgtgcttgctacttttatagcgcttccatacttcaatctaattgcactttagtgtcacctattttaaatggaataaccttggaattacacaacttaaccgcggttaaacccatttgcaacacatccaaattgcgtcatatcgcataggcctttagagatctggcttaataa

SEQ ID NO: 85933 - DNA, 660 bp, Zea mays
  Clone ID: MRT4577_178381C.1
cagccacagacacatgacatagctagagtgaggaagagtaccggtagtttacaacaagcaggttgaatccaagcgaagcaaggaacgccgaggattttgagtagcttgatacggacaccgagtgtgggccgccgtgaaggaccacaacagttggactgcgcgagctacccttgcagctgcaggacacgaatatggcctcgagtggaagcttgccaccgtcagagaggtcagcagatgggctagggacagggattttaagtatgctgacgctgtgatgcagcaacaaggacttaactttgctgttggatgccatgaatggactagtaacttcatcccaggtctatatacgtgcttcaccctcagatggtgtcacggcaagacgtcgtcagtagatgatgaaaggagggtagatgggactacttgacacagcaagaacattggtgccatctaacgcaagagcacgccacgaatagcacgagccttccggagttattcttgccactttgccacttaacacatcaaccgatagtatcacttcggcacttctccaagcagatgtcaatatcactgtacgtccgtctccgagagaaccatccggtagcacggatgaccagtagaggactccaaaacagcagcagacgaagccttaggagacgtggc

SEQ ID NO: 85934 - DNA, 545 bp, Zea mays
  Clone ID: MRT4577_178382C.1
agcgatcagcactacactgaagaggcttctctttgataactgaccattaaagattggttcttttaatcctagcctcctaggtgcccaataccgattacataggttgaacgtgcacccacacgcaatttattattacaccccatatatataagcgcacggcacagctaggagcatgcatattaattaatcctggcgagcgttaatcaggatggcactgaagactggccgaagaggtccttgagcctcatgacctcctcctttgttacgaaggtggtcttattcaccgtttccactgtgagggtgttgccgaagagtgcatagacagcgatctgtaggccggggttctggttgctgtacgcggcgatggcggtggcggtcgtgttgccggtgttgaactggaagtgcagcaagccctgcgggaacacgtagaggtcgcccttctttaggatcttgacataggccttattggtttcggcgctgatgaagccagcgaaaagggttccttcgaggaggaagatgagctccgaggcttccgggtggggtgt

SEQ ID NO: 85935 - DNA, 281 bp, Zea mays
  Clone ID: MRT4577_178383C.1
ccctgcacgcacgaaggcatctatgaatcggtggagcctccccgccgctctgcgaccgcctgaagcatatccattatgttttcgaatgtgcaagctcgctgtctgatgcctggatcgacctagtaggttaccaaattcatcttatagtcagtagtattacatcctaccattacaaaccataactcgaaaatgacatcttactggttccccttaaaagaaatcctaccccacaatttaatcataaaccaaatcctctccctttaactactaactttgcaaaa

SEQ ID NO: 85936 - DNA, 425 bp, Zea mays
  Clone ID: MRT4577_178384C.1
gcggcacgaagcaaccccactctgaaccctttctcggagcacgccggcgggactgggcgggaacagcggagcaccctggcccccaaccggaaccaggcgttcggtgcccagggcacggtcatcagcacatctactgcgaagaaacaagaggaaccctaccaagtcgacgcagccacctcgtgcaagagcaaggacaccctgccccaccagggggctgacagcaccgggacaatgaggagccacaagtagcaggcaaactcaccttgtccccgcacatggggcagctgaaggcccaccggctaagaagacaaagaggaggctgtccaccaagcctttgaagagtccggccggtcacctgaaaagagggatgaagaccctgggggggagctcgagtcgcagcatgagggacacccaggagatgagca

SEQ ID NO: 85937 - DNA, 415 bp, Zea mays
  Clone ID: MRT4577_178385C.1
acgaaggaattgcgtttttcaaacaaaactatcgattataccgtcggaatgaatatgagagatgataaatataaaagcaaccgtgggcggagagcgacttgacgccagctactcatttcccacacgttagatcttgctatttgcttgccgccgaatcagggtaccacggaagaatgcgcctgaccccaaacattgaacacgacgcctgacaaaagcgcgcccggagccacacctccagaccatgacacgaacactgaacggacggagaccgaaacctccctcaagggcgctacaaaactagtgtccgttccgccgtactgggggaacagacagtagcaccagcagcagtctaagatggtagccagagccattagaataaataccggtagaaccatgggagacccgaaccccaaat

SEQ ID NO: 85938 - DNA, 277 bp, Zea mays
  unsure (1)..(277): unsure at all n locations
  Clone ID: MRT4577_178386C.1
nnnnnnnnnnnnnnngcancncaagcacacagggggnaggaggacaangcagggagaaggcaananaancgcgcacaggnncaagacgacnaganacnagggnancannnnncgggncnacaaaagcgggggccnancanncnganccancagggaagcgnncaagggcanncngnnncccgnnaacanaaaanncaancacggcnnncaggcganccgacnnancngganggnagnncaaangcacaaccaccggcnncaaannccgcaganaagc

SEQ ID NO: 85939 - DNA, 177 bp, Zea mays
  Clone ID: MRT4577_178387C.1
gcgggcttcgcgcatggcaggacggaggtggggggcgaacgcgagatcgccgccttgcgtcgcgcacgtcacgcacgaggacggacatttctgctaggtcagcgagatcaacaagagcaacgcctactgcgacgcaggcaacaggcagtggccgtgcgcggtggagcagaagtacga

SEQ ID NO: 85940 - DNA, 248 bp, Zea mays
  Clone ID: MRT4577_178388C.1
tcgcatggccgtgctttctccccgcatttcctttcgacgccggtcatctccgaccagggtggcgaatcattctcggcgcgtgggcatggggctacggagttggacgttgagcatacacgatggggtgtccatgaacaatgagcgttgaagacaccgtaatagctcgccgaatcttgccccagcgaggattaccgccgtgcgccactcgaccgtactccagcgagcttaatactcgtgaggtcacgtgt

SEQ ID NO: 85941 - DNA, 226 bp, Zea mays
  Clone ID: MRT4577_178389C.1
tgccccccgtccgtaacctggattccttaaaaccggccgcctttttttttttttttttttttttgaactacggacatggagcacctttaaaggttgaaaattaacattaacggttaattattctttccttacagtttaaatttacatttaccagatgcacaaaagggttgaagggttttttttcttgaaaacaaaatgtggaaaatgggcgaaattatcctgccct

SEQ ID NO: 85942 - DNA, 249 bp, Zea mays
  unsure (1)..(249): unsure at all n locations
  Clone ID: MRT4577_17838C.1
gataaaaattttgggggggttgtatatgaagctgatgaatataatgacatgcccgaataatcgcgcgggaatttcctcatcaatccgattgtngctttagttatttgtctcctaccantggaaaatctagggggttttgttcggggcatcctantcatcctcactctccctantggctctcactatagcatgctcatctggctggtcgccttcctgtttttgcttcgggcggtccctttctttttcctc

SEQ ID NO: 85943 - DNA, 224 bp, Zea mays
  Clone ID: MRT4577_178390C.1
acatagtagcatttcatactatacgcattgtgcccttgacgcgtggactcgtcaccgtcgccgatttgcatcaccatcatcactccccggacttagtcttgtagttctgccacagctggtgcacgggcttggccatgatctgggcgaaaaactcttctgtgtggccgcccttcatctattttttgatgcatggcgactatacccccgcttgagcaatttgcagt

SEQ ID NO: 85944 - DNA, 416 bp, Zea mays
  Clone ID: MRT4577_178391C.1
tttaatttccccagcaatccctagaaaaagcgggcgatcctcattcgctcgagggcccggacgaagcaaacgcggaggagttcctccggcggcatggtgccgaggaagcatttgccaactaaggcggcccgcatgtctgcccctgcgaccggcggagttaaaaagccccaccgttttagcctcgataccgtcgcgctccgggagatcctgaggtaccaaaagagcccggagctgctgatccgcatgctgccgatccagcgcctgttgcgggagatcgcgcatgacttcaagaccgacctacgctttcagagctccgctgtctccgcgctgcacgaggcggctgaagcctacactggcggtctatacgaggacaccaacctgtgcgtcattcacgccaagcgcgttaccatcatgcc

SEQ ID NO: 85945 - DNA, 495 bp, Zea mays
  Clone ID: MRT4577_178392C.1
ttttttttttttttttttttttttttttttttttttttttttttttttttttttttttttttttttttttttttttttttttttttttttttttttgggcgaacgagatccattttttttttttttacaaaaaaccccttaaaaaaagggtttcgttgaacaatggggtttgggccaaaaagaataagcaattgcccaagataacaacccccccccgggggggggaggggcacaattaaaacagcccatggggggttctttttcttctaactaaggggaaaacaatcgaacaggggttcgcctgacccccaaccaaaagtttgccaccacgttgacgggggggccttctgtacgagggccccggggacgagggtgaaaaaaaagggagagaaaggcacgggcaggaacgaagccgggggcccccttgtcgcgccctttttgggggccggggggggggggacccccaggttcattttttgggccgaccccgggggg

SEQ ID NO: 85946 - DNA, 267 bp, Zea mays
  Clone ID: MRT4577_178393C.1
aaaacaaaaaaaactgggcctggtttgccctactgagcaacacacaggttttaacaacataattggagggtgcccctggcccccctccaagggtccttgatattaatacaaacccttcctttggggacaggcctaccctacataaatccccctttccgggggccccaacgtttttttttaaaggcttaaggcgaaaaggcccattctgggggccactgggggccctttaacttttaaattcttgcccacccccactggggacggttt

SEQ ID NO: 85947 - DNA, 1093 bp, Zea mays
  Clone ID: MRT4577_178394C.1
tattgtaacgaaattactctctattgttgaggattaatagagggtaggcaaggattatgaggcaacgttgccactacaccgcaccacccttaccagtgagccaccactatggaccttggtccttggctggttgtctcttaccccatatatgctatgtgttccaacctagcctataacagctgtttttcacatgctcctcagctttctgttccaaatccattttctctgtgaacttgtgctttccatgtaccctgctaaagaaggatccatgatttcaggatgtagcatcaagagccatgtcattttctgggaatggatgggctgtttgtatcctgacagccaatggcactgtatctaatgtgaccctgcgtcaaggagagtcttctggtggaacagtaacttatgagggccgttttgagattctctctttggctgggtcatatcttctgtctgaaagtactggcatgagcagtcgaacgggtggacttagtgtttctcttgctagtcctgatgggcatgttttaggtggtgctgtcgcaggacctctaactgcagcttcgccagttcaggtggtcattgggagctttctggctgatacaaaaatggagcttgaccctggatcagcacctgagaaacatgttttcagcaggtttcaaactaccagcagtccatctaggggtaccgaatcctcgggtgggcatgcaagcccaccaaacaccacaggctccttcagcaccagcacacagccaggcttcccaagctttcccacctggaaatgagcttaccttctatggtggagtgggaccgtggcctctggggatgaggagggaggaatttggaactgacggtcctcgagcgtcgtcgctgtagtttcatgagatgttatgagagtcgatcctatttaggtacttctaactggttacaatgaagttccggtttgctgcttgtcttgacattttgcaaatcattgaggcacttcaaactccaaaaaaaaaaaaaaaaaaaaaaaaaaagtactctgcgttgttaccactactacccaaaaaaaaaaaaaaaaaaaaaaaaaaggaccctcgggttgttaccacctgct

SEQ ID NO: 85948 - DNA, 214 bp, Zea mays
  Clone ID: MRT4577_178396C.1
gttacacaatgcataaataggaggaggactatctccggtcagaaaaacaaatcctcctagagcacatacggggtacatacagactacatagagtaagcggacacatacatactccataacgcaacataacacgcacgatttttaggagcttgcttaggagacagaataggcgcgaaaaaacttaatgcccatgcattatcactgacaccaaaca

SEQ ID NO: 85949 - DNA, 193 bp, Zea mays
  Clone ID: MRT4577_178397C.1
ttttcctcttttggaaacaatatatcaatatcattgtgcgaatttttttgggaacaaaaaccttgcccatccttttctggaatagtttcatagcgggagcaaccaaatcctccctctggggtaccaacacctaatccaaaggttgaacggacactaccacggtttcagaagcaaacggttacacgatcctata

SEQ ID NO: 85950 - DNA, 313 bp, Zea mays
  Clone ID: MRT4577_178398C.1
aaaaactagagctcatacaatcataaaacatacacgggtagaatacaaatgttttcccctaaaatattagaattatctgtttcgctaacgacgaaaaggcacacatatgtttgacttttgccatcaaactaactgggtgactcaaaaaaaaaaattgcttcttgaacatcaataatcgactgcacaacacaagagttggtcatcctttccaatcggctccgacctcttgtatctcttcagtttcatcccgaggatcatttttggccaaaggttgccgtgaaacaaggatgtctgcggctgcgcctgcagattc

SEQ ID NO: 85951 - DNA, 453 bp, Zea mays
  Clone ID: MRT4577_178399C.1
ggacctttgggctggtttatgtgcttgttctgagtatggtactgagttccacggtatcacgtttagcgacattatggccggtgctgtagacgaggttcctaatatgcctcctagtgagattggcctcggtaagtacgcgttgagggttactcctgctgattccgagtttatcgctaccgacgaggcctgtatcggtctgcattgttaatctccttatttagagtagtctactctgggtaaggaagatgtagtcaataatcccgtttgcggttatcatatcgccgggaaggagaccgctgactcacgttcggattgcgcgtgtaagtccgtagataatcgtatcgggtcgtagggacctccggcgcctaacgtcgccggcggcgggatcggtctcggatccgggctatccccaccggagtgttccctagccgaccacggtaagaaacttaagtc

SEQ ID NO: 85952 - DNA, 425 bp, Zea mays
  Clone ID: MRT4577_17839C.1
gacagattgttgatgattttatgtctctagctagcgctacaaaaacaattcccgaaattaaatccagggctgctggagctacactagacctaccactctatagatagttagctccaacagaccaaaggacgttcctagttaaaatgtcggaaccatgagatgatggagctggggatagctgaattcttatgacttccagtcgatcagagacaacttcaactgaaaaccaaacataagagggggtacaagcaaaatccataggagcaaacattttatataccatcgctaagcattaagcttttaggtgtggatgacagggccatttgcgtatttcccatttaacaagctggatagtggattattcaaaggagcagttgaaagcggggttagtttcagggctctagctcatagagacatgcttttag

SEQ ID NO: 85953 - DNA, 540 bp, Zea mays
  Clone ID: MRT4577_1783C.1
ggtttgctgagctggtcttcccacgtagacaatctacgtgctttcacatgtgccgcgccgcgccagagcatgaagaagaagcgccccagttcggttccccggtagaggcgtcgagcccaccccgcccgcccctagtacgagacagcgagcgggacgaagaagaaacaaaacataacagggccgtgcgttcctgccggaactggtggccgcctgccccgcgcaagaagctaccacggcagcagcagaaaggaggaggaagaggcgtcgtcgtctcgaggatcgcgcgcgcaatgcctctgtcgcggcatacggcccggagcgagtacgcgctgggcggccgcgacctctaccgcggcgccgaccagcacgacccggaggccgtcctcgatggcgccgccatggccgggctcgtcggcgtcctccgccagctcggcgacctcgccgaattcgctgcacaggtgttccacggcctgtacgacgaggtgatgagcacgtctgcgcgagggcacggcctcatgctccgggtgcagcagctggagg

SEQ ID NO: 85954 - DNA, 415 bp, Zea mays
  Clone ID: MRT4577_178400C.1
gccggccgggcctggatcggagcagaacccacccaccaaaccctacgtcgccgcggcggtcggagcgggcagggaccctgcctggactggaggatggtggcgatctcgatgtaccgcggaaacctccacattggcggtcccgacagcggcgcctctgccccgcgccgatgggaggcgccccggccgaccctcgacgtgaagcggttccgccgcctcctgcgcaaccgcttccgtgctgtcgcgcgcctcgccgggacgccgctggggcaggcctccccgtcctcttcgggcatggatgtcggccgtggcgccgcggaccccgagcgggaggcaccggacgaggaggtacgagcgttcgacggtagagaagaggagcaggggccattgcagcatgaccagcacctggaccaggtac

SEQ ID NO: 85955 - DNA, 365 bp, Zea mays
  Clone ID: MRT4577_178401C.1
tttctcttttttttttttttttggggggggaaccttttaggaaaacaattggagaataaaccggtttttagagggcccggggtcaacggaaacttttttaaaccccaaaccaagggggcctggggaaatttacttttacaaagtttcttcgttttgaaaaaccccaaactggggggaatttttttctgcccctccaaccttttttttttgcctgcaccacaaaaaaaaaattggtggggtgcccctgtaaaaaaaaactttttttaaaaacgggtaataccacttcccctattttctctttttccttttcccccaaaccaatttcctgggggagggggggtattaggcacccggggctttttttt

SEQ ID NO: 85956 - DNA, 325 bp, Zea mays
  Clone ID: MRT4577_178402C.1
actgcctcctcttcctcgcacgcgccgcccctcttcctcccctgcgccgccatcttcctcgccttcctctcctcggacaacctcgcgccgccgcgcctctacctctcgccgtcgaccacctcctggtgctgccgtcgtcaaccacctcgccgtagaccacgaagccgtagtactggagggaaggaggagaagaggagggagcgcagcgcgagcagctgcccgccgtcgagttgagggtcggacgccgccgtctccacctgtccgtcgtcaaccacctcctcgccgtcttgctgctgtcgatcagagatgaccacgaagctggagg

SEQ ID NO: 85957 - DNA, 219 bp, Zea mays
  Clone ID: MRT4577_178403C.1
atgtgaccgcgccatcgcttagtatctctgccttaaaaaaaaacatgggatacattccgcggggcatgtttcacaatacacgcgcgcacacgcacacacatgcagacatgctaactgatgcatgactcagggcattgatgtttgggtatgtacggagaagatcctagaggctgtgggtgcagaggataggtcgcttctgacggacgcagcgcaacgcaa

SEQ ID NO: 85958 - DNA, 659 bp, Zea mays
  Clone ID: MRT4577_178404C.1
gcttcaatcctcttctcccccttcccttcctcctcgcccccgagaagctcacgcatcccaactctaaccatacgcaaacgcaaggcttcaatggagccgtgcaccaagcagttcctccccatgcctcctcaggaccccaactccccgtcgtcgtccacctcctcttcctcctcctcctccacctcgccgtctcacccctaccaccgcgcccagccgccacacccacacaaccttccgccctcacccaggcccgtcccccgcaccatcgagaccaccccgttccccaccaccttcgtccaggcggacaccacctccttcaagcaggtcgtccagatgctcaccggctccgagcagtcctccaagaacgccgccgcggcgacgacctccgcaggcaacggcagcgccgggaaccaggcggcgagcgggagcggcccgtgccgcccgaagaagccgtccttcaagctgtacgagcggcggagcagcctcaagaacctcaagatgatcgcgccgctggccatgggggcgccgccgtcgccgaggaacgcctccgccgcgccggagatcctgtccccgagcgtcctggacttcccgtccctcaagctcagcagcccggtgacgccgctcaccggcgaccccttcttcccctcgccggcgtcgtc

SEQ ID NO: 85959 - DNA, 275 bp, Zea mays
  Clone ID: MRT4577_178405C.1
agaaatgatttaataaaaaaacgtgacatatgactccttaatggccctaatatgcatgctcattcaggctccattggatctactgtacatacacttcaggatcgtcagtgctaaatgctcgactcattaaatcaccatacaactcgcaagccaaaggctatgaacatgtcaatgtctatacgctgatatgcctctgaaccacacattacctactacagccacccttacctagtgaattcaagcccgcccgggcctccatgctccactagctagcc

SEQ ID NO: 85960 - DNA, 1261 bp, Zea mays
  Clone ID: MRT4577_178406C.1
aaatgcacagaagagtagtctccagcaggcagctgcccatcgtcccacaccaagaacaaccagagaggcaagcaggggagaatcgcggaggtctgggaaacaccatcctgcagagatgacagtgctgctctccccgagctcctccctgttcctcgccaaaccttctgccgtcgccaagggcagggcggcggctgtgacgtgcttcagcgggccctccctgtcagtggggcgtgaagatcaggagggtgtagcagtggtggtggggaggcgtgcgttggcttccgcagcagctgtcgcctcagtgcttgggtttgcaggccgtggtctggcggccaaccagggcctgctcgccgggagggtccccggcttgtctgaacctgacgaaaatgacaggttggagaacgtaccgcaggccagacgacaagtccggtggccacggagttggctggagccccatcatcccgtacagcttcaaagttccagacggctgggatgaggtcccggtgtccattgctgatctgggcggcacggagatcgacctgcgcttcgcaaaccccaaggaaggccggctgttcgtcatcgtggccccagttcgccggttcgcaggtgagctgagacctgaacaaaatgctcaagaaatgttgtgatgtggttcccgtcctacagatgacctggacgacgcgaccatcgagaagatcggcagcccggagaaggtgatcaccgccttcggtccggaggtcatcggagagaacgtggaagggaaggtcctgtcctcggcgacggcggcgcattcgggaagaacttactaccagttcgagctggagccgccccatgtgttcatcaccgccacggcagctgggaacaggctctacctcttcagtgtaactgcaaacggtaaagccattgttcgcagaaataaaagccaactcttttttttattatcctgaataatacaataaatagctgggaatcttttgcaggtctgcagtggaagaggcattacaaagacctcaaacagatagcacaatcatttcgagtcgtgtagggttccaattcctactacttttttttacagcgcctggctcttgttgatatgattagaggacatgggagacggtaatacggagagaggacaagtgagcatcacttctgatgaccactctaattctctaaggttacaaagatgcagcagcagttcaacagcatgtgtaaacctgctcgctaaggctaaatgcatgttactaattttttttcggacgcg

SEQ ID NO: 85961 - DNA, 274 bp, Zea mays
  Clone ID: MRT4577_178407C.1
agtgcgcgcacgtcaccacatactgtgtgccttgtcgtggaggccccgggcacttacgccgcacagggcacaccttgctccttcgaactgctttgatcactggtttgactgcgtttcggcgcttctgcggctgctgttttttatcctggccttcaagctgcagggacccaccacctgtcccaagtgccaatcttccatggcggcgctgggcacggtgatctcccccgcagtaggtaccacggcgccgtgctgatataattggcattcggggagt

SEQ ID NO: 85962 - DNA, 2033 bp, Zea mays
  unsure (1)..(2033): unsure at all n locations
  Clone ID: MRT4577_178408C.1
cattgggtacctgagccgattcgggccgggcaagaacaaccagacagaagagaagtctccagcaggcggccgcgagtcggcccgcaccaagaacaaccagagaggcaagcaggggagaatcgcggaggtctgggaaacaccatcctgcagagatgacagtgctgctctccccgagctcctccctgttcctcgccaaaccttctgccgtcgccaagggcagggcggcggctgcggctgtgacgtgcttcagcgggccctccctgtcagtggggcgtgaagatcaggagggtgtagcagtggtggtggggaggcgtgcgttggcttccgcagcagctgtcgcctcagtgcttgggtttgcaggccgtggtctggcggccaaccagggcctgctcgccgggagggtccccggcttgtctgaacctgacgaaaatggttggagaacgtaccgcaggccagacgacaagtccggtggccacggagttggctggagccccatcatcccgtacagcttcaaagttccagacggctgggatgaggtcccggtgtccattgctgatctgggcggcacggagatcgacctgcgcttcgcaaaccccaaggaaggccggctgttcgtcatcgtggccccagttcgccggttcgcagatgacctggacgacgcgaccatcgagaagatcggcagcccggagaaggtgatcaccgccttcggtccggaggtcatcggagagaacgtggaagggaaggtcctgtcctcggagacggcggcgcattcgggaagaacttactaccagttcgagctggagccgccccatgtgttcatcaccgccacggcagctgggaacaggctctacctcttcagtgtaactgcaaacggtctgcagtggaagaggcattacaaagacctcaaacagatagcacaatcatttcgagtcgtgtagggttccaattcctactactactttttttttacagcgcctggctcttgttgatatgattagaggacatgggagacggtaatacggagagaggacaagtgagcatcacttctgatgaccactctaactctcttaaggttacaaagctgcagcagcagttcaacagcatgtgtaaacctgctcgctaaggctaaatgcttgttactatatatttttttttacaaaaatgttgactcgaagggtacagatgcttgccaacgcatatatacctcgaaactttcggttactaaaggcaaacatgccaaatctatcgagtttgtggggacaaaacagttcatgtacggtttcttggttgcagtggcgccagcctccatctggtccaacaaggtcattgcattgcatgttgatcacgagaaaaagacgtccttcacctacttgtgtccttgagtaccagatcagcttttttcatcacaaagtgccggtagagctccaatggccagactgaagcactagcacacttccaatgatgggtgcaccgtgtcatcatcatgcaaagctatacatcaggacctcccagtcaaacagatgcactcaggaaacgggttttcgtaaaaagattcctcagtcctaagccgtgctctgcccttgcttcctggcaaggagccatacctcttccttggagccccttgtctgtacttgtgcatgtcagtaacaagtgccgacagcttaggaccttccgtgagatcccctttttccagtaaatcaaagagttccaccaatcctttcctgtcaggagtgatagttttacgatgccctagaaatcgacgatggccttctacagcttttgccatattgccagagtgtgatggaataaacacatcactttcaactgcgattatgtaatcaagggcagcaacttgagaagcatgattactgaatttcgcaagctcttcttctgttgctagcatgtccttgctaaccaaatttgggaagtatgatctcaattttgatatatacttttcaccaccataaatttcacctgctgcaaggnatatccacgtggnttcaggatagcccatagcacgcagaaaaatgccc

SEQ ID NO: 85963 - DNA, 737 bp, Zea mays
  Clone ID: MRT4577_178409C.1
atcgcgagcggccgccctttttgttttttttttgagatgaaactgcctctttagcataaacaaccaaggtttacataaatgcaagctgcttgcacaagctgatttaaaagcgagaaaacgaagtagaaattgaaatgaaaccagacatacaatgtgacgatggaccagaatcgtcagatcagctcgacggtctctggccaccacattaaaaaccccaggctggaagtggaaagccgcaggccgcagcacaacagctgcgtcgctggtgcaccgtcagcagtcagcacaagccgacagcgtctcacaagtcacaactcccccagtcccccaccacaatttttcttcttcaaaaagctaagaaagaaaaaaaaggagtactcgcgtcctttattttgctcgttgcttcgttccagtccgtgcactagtatctgaatctccacctccacccaactgccgcgcgccggccggccatgaatgcatgcacggcgttcggccgtcaggccagcaggagcacaacggaggcgcgcgagcagcgccgacccgaggtagagaggaacaccgtgctgtgcagggctagcttcctcccggcgccggccgccgttggcgccgcgctcgtgctcttcccggtggccgctacaccccgcacccgaaagttggtcgttggctttactcggaccggtgttgtgttttgcatgggacgaaccgaacccaggactacggctgcctcgtgccgaatt

SEQ ID NO: 85964 - DNA, 378 bp, Zea mays
  Clone ID: MRT4577_17840C.1
aaatataaataaataaatatgcaaacaaaaataaaaataacaaaataacaaaaaaaaaaaaagcgaggaaaaaataaaaaatatagagtataccttaattcaattaaacagaacgaaattaataacaacataaaaactataaaaaaccctggggggcccccttttgagtaccctttctttctccccctcttttccccagttaatgtttttgttaattgcgccctatactatctccttcccctctttttcccaccctgtatggtgaaaaacccttgcccttccccagttcattatccgcggaccttgtcccccttttcgcgctgtgtgtcctttacacttgcctccgccctagcgccctttcctaacggtttctcccct

SEQ ID NO: 85965 - DNA, 185 bp, Zea mays
  Clone ID: MRT4577_178410C.1
ctcacccgtcgcagccaatcactccccagcagccgtcgtcgctaccgctgcagcgcggaggcgaccccccatcggacgtaagatgcagatcttcgtgaagaccctgacggggaaaacgatcacgttggaagtggagtcctctgacaccatcgacaacgtgaatgccaagatacatgacaaggagg

SEQ ID NO: 85966 - DNA, 609 bp, Zea mays
  Clone ID: MRT4577_178411C.1
tgcaagttcttcactttaatcttgttagcattagaatttcactacggggagagcagcctatttatccaaccagaacagtaatgtatcctgcaggctacttagtgaaagataagaaataggcttatgaacgatagagttaggccctgtttgtagtcgcttttcaggaactcgattctctgggtagcagcttgtttgataattttgctgtccagagaatctgctgcctcaataagctgagtttttggctatcctgattatagctgtaaaacgacctgaatgcccgagttgataatagctcatagccaataattgtaatgtcttttgagtttgttaaatagaaattgctgtacaataaagatagataggtctaaaatatggctacagtattatacaattaaatataaatctaccgtgtgtatcgatcatggacaagtgctgtcaatctatccattgcagagcagcagcaaaaacaatgaacggagagctgcattagaaatacatagatgtagggaggccggcaccttggaggagctcggtgtggcctgcgggtgaccataaataaagtagctgtatgttttgtatgctaagattttttctgtatccaatctt

SEQ ID NO: 85967 - DNA, 531 bp, Zea mays
  Clone ID: MRT4577_178412C.1
atgacgcctaaggaaattctcggaaaatttgtgagctggcacatgatggtaaaggaagcaaggtatgtggacgatattgcaaatggtcctcttctagtctacgaaccgcagcccgttgccctcaaggcaacaagcagcaaggaggcgctaccgaacaaggtagcacaagtggaggctgccgggctaaatgaggatgaaatggcgcttgtaatcaagcgtttcaagaccgccatgaagggacacaaggagtatcccaacaagaacaagtcaaagggaaagcgctcttgcttcatgtgcaataagtctgggacaagaaaagaaatggaagaggagaaaaagaagaactacaggaaggcaaagggcgagtcgcacgttggcaaagaatgggactccgactgttcttcatccgactccaacgatgaaggactagctgcctccgccttcgacaagtcctccctctttcccaacaaacatcacacgtgcctcatggctatagagaagaagattacagggatctttttaagggattag

SEQ ID NO: 85968 - DNA, 615 bp, Zea mays
  Clone ID: MRT4577_178413C.1
ggaattggaaaatcctccagccaaacaggctctggaccttcaaggaagacgatgctgaactccaaagatctgagctttgtggggtatacgtacaaaaacttcgatgcggtgaaagcaataaaaatttcaggtttgcccccttaatccttaacagcatatgacactgttgccgtattgagaagttgagtgttgaatcctgcaagcagacatttttcagtaaccttaattgttcaattgagttaccagcatttacatgctaagtgtcaaatggcatttaaatgggacattatgttctaatgctacttctggaagactgaaactataaatgcatgcagatctgcaaaggaattcatctctaacaaggccttccattggttcaatattcggtaaaatacttctgccagtgacatgtaacctttattttgatcacatcctgcatctgctcagggctgtttgtttcaaattataatctgtccagattatataatccagcttaaataatctagatggaaaacaaacagacagattattaggtcagattatataacctggaggccagatttatcataatctcataatctgctgaagaagtgcttatttgagattatttttgac

SEQ ID NO: 85969 - DNA, 920 bp, Zea mays
  unsure (1)..(920): unsure at all n locations
  Clone ID: MRT4577_178414C.1
gcaaccatgccatggtttgatattccatacccactgcaatggggtcccccgagtttcagtgcagatcattcattcggcatgatggctgctgtgttggtgtcattggtagagtctaccggagcgtttaaggctgctgcccggttggcaagtgcgacgccgcccccaccatttgtcctaagcaggggaattggcccgcacgtccgcgggctgctattagatggcctatttggtactgccagcggctctactgtctctgtggagaacgtgggtctcctaggatcaaccaggattggtagcagaagagtcattcagatctccgctggtttcatgatcttcttctctatcctagggaaattcggagggctgttcgcctcaattccattcacggtgtttgctgctatatactgtgtattgtttggctacgtcggtgctgtggggctctcctttatgcagttcaccaacatgaactcgatgcgcaacctcttcattatcggcacgtcactgttcctcggtatctccatcccggagtacttcttccactatgatcatggaccgtcacatactagagctggatggttcaatgacctcatcaacaccatcttctcctcacccgcgaccgttggtttcatcatctcggtggtcctagataacacgctggacgttgaggaacagagccaaggaccgtgggatgccttggtgggctaggttcaagacatttcgcggggatagtcggaacgaagaattcttacaatctgcccgttcaactcaaccggtttttccccacatccttaagattttagtgcaaccgtaaaaccaccaaaaccaattatcattgttattatttttggcttccaagggtttgttnatgcttcaatttgttttttgganattantgctgancaatgaagatcaattacttc

SEQ ID NO: 85970 - DNA, 423 bp, Zea mays
  Clone ID: MRT4577_178415C.1
gggggccaaacaaaaaaaattaccttacatttttcaaaccaaaagggttggtccaaaaacaggggaacaacaggtggggctggacacaaccccaggggggggggggagatcacaacccagaacaaaaattcacagcacctggaggggggaaaaaaaaaaaggcttcctcaaaaagggggggggaaaaacccaaggttggaccccgggggcatcccaaaaggaatgccccggttgggcccaaaaacattggggaaaacctgggcaaactttttaaagctcaattgcccttgcatgccggccctttgggactggtggcaaaaaaattggtcctgcgaaaaaagctgggggtttttttccaaaattgccatttgaacaaaaaaagggggggggaccgcaagggacccttcaaaggggtcaccacca

SEQ ID NO: 85971 - DNA, 346 bp, Zea mays
  Clone ID: MRT4577_178416C.1
ggggaagggggcatgatcagcacagccccaaaacaatacttttttttttgggttcgggcataacaaacaaggaccgcttccgggggaaaaataaatgaagcttggaaaggacaaacaaaaaacaaacacttttatttttttttcccagcttttcctttcttccttttgacaacttcatccatgtatttgaaacccttccccttggatggctcagggggcctccacttttttatgggagcagcgaactgaccgatcgcgcttttgtcgtaacccctcacgaagaaccttgggttctttttcaccttgaccgccaggcctttgggaatggccatcccaacaggggggg

SEQ ID NO: 85972 - DNA, 290 bp, Zea mays
  Clone ID: MRT4577_178417C.1
ttccatgcgtccggcgaaacatgcctgcattacagggggttacatagatcgaaggtggaacatacttgggtatgctaactgaggatacatgaggaccctttaagatctaatggaaaagcttaactcaatggttcaaaaggatggggagccttagtctcctgtcgaggagctggcagcggtacatagtgcaaggctactaacacgtagagcagaaaaccatttgggtgacaaacaagctaagggcaatgtttcatttgtagtccaactgcggatactgtgtcctagaaatt

SEQ ID NO: 85973 - DNA, 658 bp, Zea mays
  unsure (1)..(658): unsure at all n locations
  Clone ID: MRT4577_178418C.1
gcctgtctcctctgttctccctacacttcgctcgactagctcttatcattttcaatccgaatcaacgctaaccaagggcatcgaagctcaaaaaatgtcgtcctttaccgaaaaacttaccgctctcgctgaacatgtcgcgtaccccaacaaatctgaaaaccctgggacacctggaacacgatgcgtcccatggggctcgtctagtagaccacgaaccatcaacagggatctgggaccgcctgcacggagagaacaccgctcgtcaaatcaggagtcagggagattgcggagttggaatggaagatggtcttcaacgaaaagcacttcgtcaacaagagcaagtagccgagcgttctcgcctcgctcgtgaaggtcttttctagcctcacatgaaacacgaagagctcaccaacctcacggaggagcaccgagacgtcgcctctggctcaaaggtcttttgaggacccgacgtacaagcccaaattgccgaaaccctcaaagatggaggaatcggtcgtcaagcgttggagaatcaaaagatgaactaagctcatttttcttgaagattgctttcgcatgttttgttcccntccttcttggtttactgttccccttcgtctcttttcatttatacatgcttagcagtccccaacca

SEQ ID NO: 85974 - DNA, 407 bp, Zea mays
  Clone ID: MRT4577_178419C.1
gggacatcatcacacaatgcttgaattaaatagcgaaaagggacatagttacatcaagatgtcagagacatccacatagtctattacataaccatagagtttaacattaacatcaaagggcggggtaatgaaacgtaaaatgtaagcctacacaggcagctgactgggtgtttgccactaaaggaagctaaaacttgtcgtaatcctggaactcctaaaaggcctccatgttaccagcttcacctcctgagcactgaaaacaatgggtacaacctaggggggggtggggttgtaaagcaagggggagtacccttcaacgtacttagcaaatgtcctgtttggctaaaggggactaattgtatgtggagttaagggtaaacaatttcttttagttaggcagggtttat

SEQ ID NO: 85975 - DNA, 882 bp, Zea mays
  Clone ID: MRT4577_17841C.1
gggcgacggtgcgggcgctgcggctggtgcctggtggtggtggggcccacgcgtccggtaaactgaagccaactgccaacccaacgaaggccagaactgcgcgcgcggaacctgttcgacgaattggcgcactggctatggcgctgctacgcgccgcgctagcccagccgttatcgccgcgccccgcgctcccggtccgccaccctccgacctcgctgacaggctccaggtttatcctcgacttctcgcttccgccacatccaggccccggcgcgccccggcgcgagtaccccaggatcgaggcgacggcgaggcgaggcgcgcgaactgagagcgccaaggtcaggaaccgtcggctgcagaagaagttcaacggcacggcgacgaagcccagactctcggtgttctgctccaaccggcagctctacgctgtgctcgccgacgaccacaacaagaagatcctcttctatggcagcacgctgcagaagtccatctgcggcgacccgccctgtggcaccgtggaggctgccaggaaggtcggggaggagctcgtcagggtgtgcaacgagttgggcatctccgaggtctcctacgaccgcaacggctttgctcgaggcgacaagatgatggcgttcgaggttccggtctcacagcacgggttcctgccaagataggctgcaactgtagtgtcgcccccagaaaggaggcaccagggcttgcattgacagttctcaggagacagggaagttggtcacattccatgcggattctgtattctgtattctgtatgatccaacagtccttgatcaacaggcagttcatatttccctaacaaggccagtttctccgtactctatacccgattccagtacctactgctcc

SEQ ID NO: 85976 - DNA, 293 bp, Zea mays
  Clone ID: MRT4577_178420C.1
ccgtggagcattccaggctgccgaagcatcaaggggtcgcggcgcaacactggaatgctccacggattgcccagtgcacgtggttcacgtggtcgacggcggtggacccgtgtttccctcgacgagcacaatgtgcatgcggctgaggcgagagaggagtcgggaggtcgacggagaagtgtagaggggcgcagagggcactaatttatcccccgcggaccctggcacgggatggtggaaaggcgcccacgcccgcgaggatcacagtggctggtacgccatctgcgcaccca

SEQ ID NO: 85977 - DNA, 229 bp, Zea mays
  unsure (1)..(229): unsure at all n locations
  Clone ID: MRT4577_178421C.1
gaccaccaccccnttcgctgaccctgtgccgcgccgtggtcaccggacggacacacagaacgacgattgtcgccccggcgcggcaaccaacagaccaccacctccctcgggcaccacgggggcgcgcgcgcccccaccctcagacggcggggggcgccacaccacgccccgcaccgacaagcagcgcccacacagcatacgacacgccccagaccgcaccaagcaccgc

SEQ ID NO: 85978 - DNA, 378 bp, Zea mays
  unsure (1)..(378): unsure at all n locations
  Clone ID: MRT4577_178422C.1
ctgggaaagttttttaccttttttttttaccgaaaagaaaaataccgtatcacttaagggttgcctagtaccgccataacattgaaccgaccgactatcacgaggtccaaaaaaataaccaccacaaaagtccccaccaaccacaaattatgtttaagcgggcgcaccgcaccaactgacgataactcttttctgtttctgggccaatcagcaactgcagcacactcaagactgacaacaaaccgcttaatccacctcctcaatcttgggaccaagaccgcccctgccggcaggggcgtcctcttncatgccgacagcgccgaccatgtattaacccgcgccctgatacatcttggcgattatggggttgcaaaagct

SEQ ID NO: 85979 - DNA, 760 bp, Zea mays
  unsure (1)..(760): unsure at all n locations
  Clone ID: MRT4577_178423C.1
cgggaaaaccagcggaagcttcggtcgaacagagggagtaagcagttgcgtttcgcattgcgcggcgccgatgggggcgtcggggaagtggatcggacccgtgggggccctgaaggcgcccgagaaggcggcggggcacaagggcggtcgcaaatggcgtctctggcggagctcgtcggccacgtccagggccagcgccggagagggcagtgcgctggcgtccgagtcttcttcggcgtcggccgactcgttcaactcggtcctcgccgccgtggtccgcgcgccgcccagggatttcctgctcatcaggcaggaatgggccgccgtccgcatccagaccgccttccgcggattcttggcgagacgggcgttgaaggcgctgaggggcatcgtccggctgcaggcgctggtgcgcggccggcgcgtgcgcaagcaactggccgtcacgctcaagtgcatgcacgcactgctgcgggtgcaggaacgcgcccgggagcgccgggcgcgctcctccgctgatggccacggctcacagggccaggacgcgctcaacggctgtgccagttctaccaaagacgctatggaacaatggtgtgaccgccacggatctgttgctgaagtaagatcaaatttacacatgaagcatgaaggtgcagcaaagagagaaagggcaattgcctatgctctgtctcaccagcctcggngttcaagacagaaggggacaccaagctctcctgctaactgcgttagaagccatgat

SEQ ID NO: 85980 - DNA, 831 bp, Zea mays
  Clone ID: MRT4577_178424C.1
gaccatgctcccgttgcaaacacccatgcgacaatcacaacaagacacatgaggctccgagtgttttttttttttttgggacacaagtgtgacacccggagttttagggacccgggcgtgaacataatcaccaagtgtgctaggaccaagtcttacacatatgatgactcatggtacataaacgatgtcacaacattaaaatataacggagttctatacaaaatagttaaataattatatcatatgaagacaatggtctagcaatccaaagttgactgggagacgacggtctagaccactcacgaactcatcatagcatcctccatgcgcctcattctggggtacctgttcttgaccttgagcccctgcgcgagcgtgcggtcgttgggaccgtgcgtgttgagccactcctccaccgtgatgtcgttgcccagcttgtccttggcgtaggtcccgccgccgccgttcccggagccggcggggacgaagaaggcgccgtaggggacgaccatgccgacggtgggcagcgatatggcgcccaggaggaggaggttcatcagcttccgcttctccatgtcggggacgcggtcggcggggatgctgctcgccgcctggcacgtgatgctccgctggcttgcgcgctcccgccccatccccaggccaagccccttcactggcttgcccagcgcagcgcgggaccggcagagctgggtggggttggcggcggtcgagagcgccgcggaggtcgccatggccgcagcaggggagaagcgggccaagacggctggtgttcactcacggcgtccacaggcttcccggccggcctcgagg

SEQ ID NO: 85981 - DNA, 1156 bp, Zea mays
  Clone ID: MRT4577_178425C.1
gacccagtaactagaaattgatgtgagcccttttttttaaattttttccggcaaaaaaaaaaaggtctaaattgctctccctgctggtcacttgatcagcagatggcagagaaagtctatatttgattccattagatttcagagtgttcaaaaggttatagtgaagagatgacaaacagctgtgttcttgtttcatgcagtgtgtgtaatatatataatttggaggcaagaggcaagtgaatttgtagcaacaacgccctcggagaaagcctatgagcactgagcactgagccgcttgtgtcggatgatcctcctcatgcactccaccacgggtcctggccggtcctgaagtcggtctccacccacgggacgaagaggaccttgccgtcgtcgacgtcggcgtgaaccagggccagcgacagaggcgccggtccgcggaccaccttgccctggttgttgtactgggatccatggcaggggccagatgaacttgttctcggcgccgttccacggcacgacgcagccgaggtgggtgcacacggcgttgatcccgtaggtggccagcgtcttgtcctgctccaccaccaggtacgtggggtcacccttgagcccctgcgcgagcgtgcggtcgttgggaccgtgcgtgttgagccactcctccaccgtgatgtcgttgcccagcttgtccttggcgtaggtcccgccgccgccgttcccggagccggcggggacgaagaaggcgccgtaggggacgaccatgccgacggtgggcagcgatatggcgcccaggaggaggaggttcatcagcttccgcttctccatgtcggggacgcggtcggcggggatgctgctcgccgcctggcacgtgatgctccgctggcttgcgcgctcccgccccatccccaggccaagccccttcactggcttgcccaacgcagcgcgggaccggcagagctgggtggggttggcggcggtcgagagcgccgcggaggtcgccatggccgcagcagggaaggagcgggccaagacggctggtgttcactcactggcgtccactggcttgccgctcccgcccgcggggcccagcctaactatatctctgcccggtgtggccgggcaggcggccggtgatggttgatcccggccggcctcgagg

SEQ ID NO: 85982 - DNA, 392 bp, Zea mays
  unsure (1)..(392): unsure at all n locations
  Clone ID: MRT4577_178426C.1
ccaggcggggcccagtgcgggcangcgcgagacgccgccttcttcgcgccgccccgcacgagaccgggcgtttctgcgccatctgcgaggtcaacannnacaacccctactgggggcgggggcgagagcattggccccgcgccncggggccnataggccacgggcgcggcccgctgccgaactccgggaacctcaacttccggcccccggggggggccctcggcttcgacgggctccggggccccggcnggggggcgcgggaccccctgggggcgggcaaggcggcgcccccgggctgggtgaacagcgggcaccgggcggggccccccgggggccgcgcccccccccgggcccgcaacggggcccctcgaggcggcgggggacaaaccccc

SEQ ID NO: 85983 - DNA, 2810 bp, Zea mays
  Clone ID: MRT4577_178427C.1
ggccccccctggggggcacttgatcagcaaaggggaaaaaaaggctatatttgattccattaaatttcaaaggggtcaaaagggtatagggaaaaaaagacaaacagctgggttcttccttcctttagggggccgaattttttttttttttttttttaaaaaggttaattttatgtcagtaaatataaacagcctcttcttgttttataacatttttttttttttttttttcacagtgttcaaaaggttatataagaagagatgataaacaggtgttcttgttttatacagtgtgtatatatagagagagacaaagagcaagtgaatttgtaggaacaacgcccacggagaacgaacgcaagcctatttcctcatcacaaggaacggaggcatacataggtctcatgtgtgagcactgagcaccgctggttccggatcatcctcatgccttccaccatgggtcctcgccggtcctgaagtcggtctccacccacgggacgaagaggaccttgccgtcgtcgacgtcggcgtgaaccagggccagcgacagaggcgccggtccacggaccaccttgccctggttgttgtactgggatccgtggcaggggcagatgaacttgttctcagcgccgttccacggcacgacgcagccgaggtgagtgcacacggcgttgatcccgtaggtggccagcgtcttgtcctgctccaccaccaggtacgtggggtcacccttgagcccctgcgcgagcgtgcggtcgttgggaccgtgcgtgttgagccacgcctccaccgtgatgtcgttgcccagcttgtccttcgcgtaggtcccgccgccggcgttcccggagccggcagggacgaagaaggcgccgtaggggacgaccatgccgacggtgggcaacgagatggcgccgagtgaaggaagacggtgcagcagattccgcttcggaatgtagaacgtcccagacggccagtagaagtgatggctttgcttgtgctaaagtgagtgattgggcgcgcactttgaggaagaccagtggtagtgtggccatgagtactcgggctgatttcactgagagtgggaagagcagcatgtgccgtgcgagcaccgccagtgacattagcgatgagagctcctgcagcagcatgagcagtgccaccacgaagccacacaaggggaatgattcaaggtgggaggctatccatgtggtgaagtccagggataaagttcttggactgaatcatttcaggctgcttaagaagttgggctctggtgatataggaagtgtgtacctatctgaattgagtggtacacggagttactttgccatgaaggttacgggtgagacttctttggcaagtcggaagaagctgcttcgagctcagaccgagcgggagatcctgcagtccctggaccatccatttctaccaaccctgtatactcaccttgagtcagataagttaacattgttcaaaactgaaaactgcgccctaggggaccttcagactctccgcgcaaggcaccgtggcaaacatttttgcgggcaagcagcaaagttcaacgtcgctgaggtgcttcttgcattgttctacctccacatgtttttgattatatacctttatctataaccagaaaatgtcaacgttggggaagatggccacattacgctgtcggacttcgatctatctcttcaccgcttagtgggcctaacggtgatcaagtccgcaaatcctggcctagatgcattgcagaggaacaatgcagcgtactgtgcccagcctgcttgcatcgaaccatcctgcattcagccctcctgtgtagctccaaccacttgctttggcccccggttcttctccaaatccaagtccaagtctaagtccaagcccaagaaggagaagtcgaagcctgatggtccaaaccaagagaacctcttcccggagctgattgctgagccaactgatgctcgctcgatgtcctttgttggcactcatgagtacttggccccagaaataataaaaggggagggccatggaagtgctgtggattggtggacctttggcatattcttgtacgagctgttgttcggcaagacccctttcaaaggttccggcaaccgggctacactcttcaacgtcgtgggccagcccttgaggttcccggagtccccgatagtgagcttctctgcgagggacatgataaggggattgctcgtcaaggacccgcagcaccggctcgggtacaagcgtggtgctaccgagataaagcagcaccctttcttcgagggcgtgaactgggctctcataaggtgcgcgagccctccggacataccaaagcccctcgagctcgagtgtcgcccaaagcaagtgccatcagcaaacggaaaggtcgcgccggtcgctaaccaaaagggcccagataattatctagagttcgaattcttctagttttttttttgtttttttgtttttgtgatttctgaactgaaagagtgcgtctgggctgatgctgtgaaagaaagtgaaagatgataacctactctaggcatgcgcttggctggatttttttcttcttctgccattagactgtactacgctcgtttcaggatatccgagttatttttttgtttctctgttgaactgcttaactctaaggtgtactcaatccatcatgtatgttgcaattttcagaacctgcctatggtacttgaaatgtatttcagggctgtgttaaaaatattgtaactttgtaattgatgcctcctacttagaacatgtcttcctctacactccaaacggtgatatctgaacaa

SEQ ID NO: 85984 - DNA, 836 bp, Zea mays
  Clone ID: MRT4577_178428C.1
ttgggaccctcgaggccggccgggaagcctgcggacgcgagtgagtgaacaccagccgtattgtcccgagtcccgaccccgaccgatcctcgcctgctgcagccatggcgacctccgcggcgctctccaccgccgccaatcccacccagctctgccggtcccgcgcttcgctgggcaagccggtgaaggggcttggcttgagcataggccgcgagcgcgcccagcggagcattgcgtgccaggcggcgagcagcatctccgccgaccgcgtccccgacatggagaagcggaagctgatgaacctcctcctcctcggcgccatctcgttgcccaccgtcggcatggtcgtcccctacggcgccttcttcgtccctgccggctccgggaacgccggcggcgggacctacgcgaaggacaagctgggcaacgacatcacggtggaggcgtggctcaacacgcacggtcccaacgaccgcacgctcgcgcaggggctcaagggtgaccccacgtacctggtggtggagcaggacaagacgctggccacctacgggatcaacgccgtgcactcacctcggctgcgtcgtgccgtggaacggcgctgagaacaagttcatctgcccctgccacggatcccagtacaacaaccagggcaaggtggtccgtggaccggcgcctctgtcgctggccctggttcacgccgacgtcgacgacggcaaggtccccttcgtccccgtgggtggagaccgacttcaggaccggcgaggacccatggtggaaggcatgaggatgatccggaacagcggtgctcagtgctcacacatgagacctatgtatgc

SEQ ID NO: 85985 - DNA, 1059 bp, Zea mays
  Clone ID: MRT4577_178429C.1
gcacgagaaccgctgttctctgacgatgttgggatcctcaaggtggttttcgaagcctgtggacgcgagtgagtgaacaccagccgtattgtcccgactcctgacccctaccgatcctcgcctgctgcagccatggcgacctccgcggcgctctccaccgccgccaatcccacccagctctaccggtcccgcgcttcgctgggcaagccggtgaaggggcttggcctgagcatgggccgcgagcgcgcccagcggagcattgtgtgccaggcggcgagcagcatctccgccgaccgcgtccccgacatggagaagcggaagctgatgaacctcctcctcctcggcgccatctcgttgcccaccgtcggcatggtcgtcccctacggcgccttcttcgtccctgccggctccgggaacgccggcggcgggacctacgcgaaggacaagctgggcaacgacatcacggtggaggcgtggctcaacacgcacggtcccaacgaccgcacgctcgcgcaggggctcaagggtgaccccacgtacctggtggtggagcaggacaagacgctggccacctacgggatcaacgccgtgtgcactcacctcggctgcgtcgtgccgtggaacggcgctgagaacaagttcatctgcccctgccacggatcccagtacaacaaccagggcaaggtggtccgtggaccggcgcctctgtcgctggccctggttcacgccgacgtcgacgacggcaaggtcctcttcgtcccgtgggtggagaccgacttcaggaccggcgaggacccatggtggaaggcatgaggatgatccggaaccagcggtgctcagtgctcacacatgagacctatgtatgcctccgttccttgtgatgaggaaataggcttgcgttcgttctccgtgggcgttgttcctacaaattcacttgctctttgtctctctctatatatacacactgtataaaacaagaacacctgtttatcatctcttcttatataaccttttgaacactgtgaaaacagcgagaaaaaaaatcggcaatactcgtgc

SEQ ID NO: 85986 - DNA, 514 bp, Zea mays
  Clone ID: MRT4577_17842C.1
attaataataattatccaaacccgggagggggcataaagaaaaaacattaggggcagaaacagagtttaaccccacacccttggttttttgggaaagaaacaaaaatttggccctttaaaaaaaattcccaaagaagggaaaaaaaacggcccttttggccgggtaaaccaacaaatttttgatggaaaaaaaagggaaaacccccccccccccaaaaagaaagggggggaaaggggggtttagaaccggggttttttggaaagaaaaaaaaattttttggaggttaagggaaaacccaaaaactgggaagcccccagcccccccggggggaccaccccaaggggctggtgggttaaaccccccccccaaagaaaagggggggggggtttaaaaggggacccctaagggctggggggaatccgggaacgggccaaagaacttttggaaaaaaaccccttccgggcccgggaaaaagggcccgaacaaaaaaaccgccccttaagctcttttttt

SEQ ID NO: 85987 - DNA, 308 bp, Zea mays
  Clone ID: MRT4577_178430C.1
attcagtttgctttttttctcgttttgctttctgaatctaaaagggaagtaaagaagcgtaccactattctgcacagggttttgatagcagagaccgtctgtctccttttaagttttaacagcaaattacaaggattggaggtagagctaggaagtgttaactaactccattccccatctcatcggttttggagctcttgtgctgccgtaagttgaccatccatgttaaaaacaaagaggcaaattttctctatgaaagctattgtatcagcaagaaaataatagcagtgtgctacctctcctcgtgc

SEQ ID NO: 85988 - DNA, 2058 bp, Zea mays
  Clone ID: MRT4577_178431C.1
cggccggccgggatcttcgaaccccttcttcctctcttcagcgccgcacccgcgcccgcgccgtcgaaggcggcgcctagtctcgaggcttgcacgctgccgcggaggatcgcctcgctactgcgcgccatcgcctccgatctcctctatctccaatctgctccctcatcgccgtgcagtggaaactaggggaccgattcctcttctcgtttgtcgcatatttctcgctgcgtgccgcgtgctgcggtgagtgattctccaagaattctggggacgctgatctgagtccgcacagaacgcagcggcagcaatgatgatgtcggacgatgacgatgctgagccccagctcaacgcggtggagggctactacttcgttgactccaagaacgagaaggagcctgtctgcttctccaccctgcctttctggttcggggacactgatgatcttcctgacggcaagaagaagctggtgctgcgcgggactggtgacccgggcgtcaaggtgtacgatgaggtggtggcctgcaggctgggtctcgaggggaaacaacccgagtttgcagtgctcacagcaaaaggcagacgttggatacgtctcattaggcccttgaacagctacgaggaaatgatcaggactgtgttgatcacagcgcagatgctgcattttctaaggaggaagcctcatgagccagaaaaaaccttgtggaaccacctttgcaaagtttttaacgagtttgacgttccaccctcagaggacgatttcaggaaccactgctcactgatgaagcagtttgcggcaaaagatcctgtcttagcaaaatcagagattttgcgagtatttattgaaggtgggtccctcgaggccggccgggaagcctgtggacgcgagtgagtgaaaaacagccgtattgtcccgactcccgaccccgaccgatcctcgcctgctgcagccatggcgacctccgcggcgctctccaccgccgccaatcccacccagctctaccggtcccgcgcttcgctgggcaagccggtgaaggggcttggcctgagcatgggccgcgagcgcgcccagcggagcattgcgtgccaggcggcgagcagcatctccgccgaccgcgtccccgacatggagaagcggaagctgatgaacctcctcctcctcggcgccatctcgttgcccaccgtcggcatggtcgtcccctacggcgccttcttcgtccctgccggctccgggaacgccggcggcgggacctacgccaaggacaagctgggcaacgacatcacggtggaggcgtggctcaacacgcacggtcccaacgatcgcacgctcgcgcaggggctcaagggtgaccccacgtacctggtggtggagcaggacaagacgctggccacctacgggatcaacgccgtgtgcactcacctcggctgcgtcgtgccgtggaacggcgccgagaacaagttcatctgcccatgccacggatcccagtacaacaaccagggcaaggtggtccgtggaccggcgcctctgtcgctggccctggttcacgccgacgtcgacgacggcaaggtcctcttcgtcccgtgggtggagaccgacttcaggaccggcgaggacccgtggtggaaggcatgaggatgatccggaaccagcggtgctcagtgctcacacatgagacctatgtatgcctccgttccttgtgatgaggaaataggcttgcgttcgttctccgtgggcgttgttcctacaaattcacttgctctttgtctctctctatatatacacactgtataaaacaagaacagctgtttatcatctcttcttatataaccttttgaacactctgaaaaaaaaaaaaacggaaagactttcaatactagcagggtaggcgagctacgctgcgtcaggttttggtagccaaaaaaaaaaaaagttctcccataatctccttcgatccatatcgaaattagaggggacatcctccaattctcttcaatccacctcgaataacaggcccttacactgctagatacaaaaaaaaaaaaaaaaaatttgcggcc

SEQ ID NO: 85989 - DNA, 1316 bp, Zea mays
  Clone ID: MRT4577_178432C.1
aattcggcacgagggcagatagtttttttgtgcgcctccaattcccattctcctctactccatcgtcgtgcctgccggtgccaggctgccgggtgccacagtgccctgccacccagcatcgctcaatcactcgttcgatccatgctgactcacccgaatggtgtggtccggccgtcgactaaggagccgctcttctccttcggcgtcatcgccgacgtacagtacgccgacatcccggacggccggtccttccttggcgtgccgcgctactaccgtcacagtatcgccgtcctccggcgtgcggtcgagaggtggaacggcgagaggagcgtcaggttctgcatcaacttcggcgacatcgtagacggcttctgccccaaggacaggtcgctggccgccgtgcaggccgtggtgcgcgagttcgacggcttccgcggcgggccgacgtaccacatgctcggcaaccactgcctttacaacctaccccggagcgagctggtctccgtgctgcgcatgccgtcggcgtcgccgggacgcgcttactacgacttctcgccatggcccgggtaccgttttgtggtgctggacgcgtacgatttcagcgccgtggggtggccgcgcggccaccctgtgtccgcggcggcgcggcggtttctggagaagcggaacccgaaccatgacaagaacagcccgagcgggctggaggggacggaccggcggttcgtgatgttcaacggcggcgtgggcgaggcgcagctgcggtggctggacggcgtcctccgccgcgctgagcggcgcggggagaaggccgtcgtgtgcagccacctgcctatgcaccccggtgccgcgtccccgacgggtctcatgtggaactacgaggaggtgatggacgtcgtgcgccgccatggtggctgcgtcgtcgcgtgcctcgccgggcacgtccacaagggcgggtacgccgtggacgacagcggcgtgcaccaccgcacgctggaggccgcgctcgagtgcccgccgggcaccgatgcgtttggacacgtcgaggtgcacccggaccggctgaggctcgttggatcggacagaatggccagcacggagatgctgctcagcccctcgaatgagctagcttctgcgtagaacctgcatttgccgcatctgcttgtaccgacactgttgctctactgctgccatagtcgttggcagttgtttcttgtagttgtagtagttgtagcgaaggctaacgacgaaatcaatggataccaacgaacgtaaccgtcgtccaaaataatttgcctacttttttaaggcagcctatc

SEQ ID NO: 85990 - DNA, 1740 bp, Zea mays
  Clone ID: MRT4577_178433C.1
ggtattagataatcaatgccaaataatttaaagtcgttttaatgaagacagataatagcacaaatctagtttataaataggtcagaaatttcaacattagcaccaaaagcttttcaagttacatgtcattgaatggtatctaaattattgtagaattgtatcaacaaatacatacagcaagaaacttttgaatgggcatagaacagtatccctcggcctcagacaacagcaataaacaggtttatgtcagtacatgaaaatgcatatgcacctgaccatgtgagtacaaacaaaatattccacacaaaaatgatcaaacaaaattgcatggcaaacatgtcgacctgcagataagcatcgcataactcctgataaaaaagctaaccagctaattatgcaatatattgaacttgtcattagcagaagtacatactttgctgcttgctctgagaaaattttccaggttgcctttgacgaagagtatgaaggtcacctccagggcagaattccataactaagcatgaaaacttgtctgtctcaaaatgagtgtacagggcattgaggccggccgggccggccggggcaagcctgtggacgcgagtgagtgaacaccagccgtattgtcccgaccccgaccgatcctcgcctgctgcagccatggcgacctccgcggcgctctctaccgccgccaatcccacccagctctgccggtcccgcgcttcgctgggcaagccggtgaaggggcttggcctgagcatgggccgcgagcgcgcccagcggagcattgtgtgccaggcggcgagcagcatctccgccgaccgcgtccccgacatggagaagcggaagctgatgaacctcctcctcctcggcgccatctcgttgcccaccgtcggcatggtcgtcccctacggcgccttcttcgtccctgccggctccgggaacgccggcggcgggacctacgcgaaggacaagctgggcaacgacatcacggtggaggcgtggctcaacacgcacggtcccaacgaccgcacgctcgcgcaggggctcaagggtgaccccacgtacctggtggtggagcaggacaagacgctggccacctacgggatcaacgccgtgtgcactcacctcggctgcgtcgtgccgtggaacggcgccgagaacaagttcatctgcccatgccacggatcccagtacaacaaccagggcaaggtggtccgtggaccggcgcctctgtcgctggccctggttcacgccgacgtcgacgacggcaaggtcctcttcgtcccgtgggtggagaccgacttcaggaccggcgaggacccgtggtggaaggcatgaggatgatccgaaaccagcggtgctcagtgctcacacatgagacctacgtatgcctccgttccttgtgatgaggaaatatgcttgcgttcgttctccgtgggcgttgttcctacaaattcacttgctttctgtctctctctctatatacacactgtataaaacaagaacagctgtttatcatctcttcttatataaccttttgaacactctgaaaaaaaaaaaaaaaaaagcggccaaaggaaaaaaaaaaaaaaaaaaaaaaaaaaaaaaaaaaaaaaaaaaaaaaaaaaataaaaaaaaaaaaaaaaaaaaaaaaaaaaaaaaaaggggggggcccttttaaaggatccaagtttacttccccttgcttgcaaggatataaattttttttttggggcccca

SEQ ID NO: 85991 - DNA, 184 bp, Zea mays
  Clone ID: MRT4577_178434C.1
acgcgacgcgtccgcatcaaacctttacataagccacctgcgctcatcctgcactttgaccagattagggagaagggtccttgctctcagctccgcattcctacctcaccacaactcccctacagccacacactaccactcgtcaagatcccaaaccctgcaactacagtgctgccaccatatc

SEQ ID NO: 85992 - DNA, 898 bp, Zea mays
  Clone ID: MRT4577_178435C.1
catcgggtcccacgaggccggcccgctcaccccgaatctgaaccgccgtcattgtctccagctcgccatccgccctcatcccctcacgcccaaactaaaccctagtagatcgccgtcgtcccctcccgaatcgccatccgtgtattcctccccaccgcaagaccttcctctccctcccatctaccgatccattcctcccctccgccttccagccacaagagctccacctccacccgggctcgccgccggcggaggaccacatctgggagatgcaaagtggagcacgctgcgccactcaacatcgagatccgcttcttgggtcgacccttcgacagcgcccccctggcagacccgggcaacaacattgtgcttcgtggtgctgcagtggccgctggagacccgtcgacggggagccccccaagaccctctatcagctccaccgatgccatgagagcgcaagaaggctgaccccctatggctgcgaatagggccatggttgctgctggcactcgagcaagccgacgccgactatgaccatgtccccatgagtcaacagactggtgactacgccgctgggagcacctcgccaggaacatgcatacctccctcccgtgtctccttcaacccgccatgaatttcttggtttcactcgctggctgatcgactaacagagaaaaaattgcagcagggcagtggagttgaggctccgtgcctctgccatgcttgtatgtaggtgtagatcctatatctctgataatagcacatattgcaggttagctattcttattgggtcgattcattttgtgtgtgcattgtagctgctgacacgcctctgcatatattccctaatatgcatatatgttcagagtggaggatgcaattgagatcctggagcaca

SEQ ID NO: 85993 - DNA, 648 bp, Zea mays
  Clone ID: MRT4577_178436C.1
acagattggagaagagggctttctcacctagaggcctgccccctctgcgatcaagagcaggaaacagcccaacacatcctaacgagttgtgtttttgcaaggcttttttggcacaacattatggctaccttcggtatgggtcacctcaccccgagtcagaatgaacttatcctttgcagatttgtggcgaaaagtgagcaacaatgtgcataaagagaaagaaaaggaataaacaatgctattatcttggaggcctggtgcatttggcggcaaagaaatcgtacggtttttgaaggagatttgccggctgttagcaaggtgcagcaaagttttctagaagagctaacatgtttggtcttgactggggctcatcaccttagcattttagggataattgatacccttagagcggtcggattgggctctcttgatcatatgtaatttttgtttcagtttcgatgtggtgtgggtgatgatcttgctcagcaagatcctcatcttgtaggattttcttttctctctaatataaaatatgggacgcgttcgagaaaaaaaaaacttcaagagctaaaagaaaggcttctatgtatagttggcgaccctggtgtctgaattataataaatggtgctgcccgccattttttttgg

SEQ ID NO: 85994 - DNA, 498 bp, Zea mays
  Clone ID: MRT4577_178437C.1
gggctgggttctcgtttttccccgaacattgaagacgaagaaaaatctgtggaacccacaataacaaatcccctcggggttattttctaaccaccccactgaaacgggaggatatgcaagtttcaaaaccaaggagaaaagggcagccagggcaaaccaaggttcattcggtttgaaagcagggaacccttttcttggttaccccaatttttttggttttcgggttggccggactgggcttccttcttttgtggcccacccgggcggggcattgttgccagcacccctttaccggggggggaatggggagccccccccgcccgcgaattatggaaaaatgccccaaaggttcgggccccaaaccccttactcatatccggggcaatggacaggcccgcttccgggcccgacttttggggacccagggcggagtctgggacaacggttccagtttcggccctgggggggcctgtcacagttgcaaaaccggaaccaccg

SEQ ID NO: 85995 - DNA, 157 bp, Zea mays
  Clone ID: MRT4577_178438C.1
accaaccaaaaaaacattgttttacctgttaacacctcttacaatttggcaaaaacagcacctgcaccaatggactagacaactgaccaataaagatcgacccaagctcttgggatgcatgactttgcatgcatgatctgtctctctctgtgtgtgt

SEQ ID NO: 85996 - DNA, 418 bp, Zea mays
  Clone ID: MRT4577_178439C.1
agcaagtgaaggccaggttgcgggaggcaggcctggcaccagtgcccatgatcatctttgctaaggatgggcattttgccctggaggagctggcccaagctggctatgaggtggttgggcttgactggacagtggccccaaagaaagcccgggagtgtgtggggaagacggtgacattgcagggcaacctggacccctgtgccttgtatgcatctgaggaggagatcgggcagttggtgaagcagatgctggatgactttggaccacatcgctacattgccaacctgggccatgggctttatcctgacatggacccagaacatgtgggcgcctttgtggatgctgtgcataaacactcacgtctgcttcgacagaactgagtgtatacctttaccctcaagtaccactaacacagatg

SEQ ID NO: 85997 - DNA, 1502 bp, Zea mays
  Clone ID: MRT4577_17843C.1
aggtgataccctcgatctcccgcgcttattttccccgccaccctgctctgctctgctctgcaagcctccctgctaaataatcctaccgctccgcagccgcaggtgcgtgcgtggtggttgacggccgcttacccgcaccggcgccatgcgcgcgcgcggctaggtggtcgaggtcaagccaaacgctgcccaccgcctctgcctctgcctcgcatatatcctcgcgcacgttctttgctcgtctcgcactcgcttccttcgacgactcatcgccgatcacaccaggctagctagcccacccacagtcgtagggccaggaccgatcggaggagctcggtttttcgaccaggaccgccgccgccacacccgaagaagccgacgatgcagacgacgacgtcctcggcggcggcgtcgccgcgcccgcgcgcgcgggcgccgcagtccgtggtggccgagctggagggcgcgctgctccggagcgcggacacgttcccgtacttcatgctcgtggcgttcgaggcgtccgggctgccgcgcttcgcgctgctgctggcgctgtggccgctgctgcggctgctggagctggcgggccggcgcggcctggcgctgcgcgccggcgcgttcgtggccaccgcgggcgtgccgcgcgccgaaagtggggccgtgtcccgcgccgtgctgccccacggccgacgacgtagccaactacccgcggcctgggcggccttcgggtgcgagggcaccaccctcacaaggaaggccaaacgcgccatgctcgcgcgcttcgccggcccccggcgcgcacggcggggtgcgcccgggaagcacccttggcagagccgcgtgaaggctccgctccgcctcctcctccacggagaactacgccaggcccgtgcccggggcgacgaactaccgcctcgtggagcacctctgcccgccgacggagcccgggttgaacgcctacagccccatcttcataaaacatgtagtacggccggtcagcagtgaccagcctttctatcatcttccagtactgtcgacgtgcgcggcggggaagagccccgtggatgtggccaactacgttcagcggatactcgctgccacgctcgggttcgagtgcaccaccctcaccaggaaggacaagtacacggtgctcgcgggaaacgacggcgtcgtcaacgccaagccggcctgctggcagagccgcgtgaaggatgtcctcggcttcctgctccactaaccacattacttgcacggctctggactctgcgctcaaatacttcgctcaccgatttgattgagtttatactttacatttatttatacatgtaagtaagaataaccacacgcaaaagcatgtagtagtaacatacagtagtgtgattattagcctttatttcttcacataataagtactgtatattgtattgttctttgttttacaagtgttttggtgaatttttactgggtgtaatcaaatatattttgtagccatgactaag

SEQ ID NO: 85998 - DNA, 892 bp, Zea mays
  unsure (1)..(892): unsure at all n locations
  Clone ID: MRT4577_178440C.1
cattgggtacctcgaggccggccgggaagccgaccggcattgcaaaccaacaggcaacagacatggccgtcgaagcttcggctgcccgcacgctacccctgccgcaaagctaatcataataagcttcgtggtgccataggcacgtcacgtcacgtcggcatccacctcgctccaccgctccatcgtcggtcgcaagggagcgcgagagagggaggagagaatgagagccctcgccctcacgctgccagctcttgtccttgctgctctcctaagctgcacccccgaggtctctgccgtcagagtcccggcggccactctcgccgaccagacgagcaaccggcggggcgcctcgtcgccaccggcggcagccgagcagccaacaaggaaggcggcgagcgacgatgacgctgccgccgccgccgccgccgcaagcagcgccagggccagcaggctcgccgacgcgtccgccagctggaaggcgcccgcggtggccggcggcgcctcctattcccctcctccgtcggccgtgttcgaccccgacaggatgagcaagcgccgcgtccgcagaggctccgaccccatccacaacaagtgctagctgatcccgagtgtgcgtccgtggcgagttctcgtcaagtgtcgattctctcgctttgtttcctccgcctctccatttctctaatctgctccttcgctttattttttttcttcttcttcttctttcgntaccactttttttttctcttctctttgaggtttgaccgtttgagcgcgcagttctgctgcctaccgtgttgtagggcgcagtcggttctgtgctacagaaatacttgtacagagatgcatgcatgccaatgaaaggcgaatgccggtcgaatggacacgctgccgc

SEQ ID NO: 85999 - DNA, 159 bp, Zea mays
  Clone ID: MRT4577_178441C.1
ctgtggtcgcgtgcctagcggagaggtaatgacctcttccgttgacgctcggctcacgggccatggcagcgcacgctacgcgttgggggaaatgccggactggagagaggtaactgaaagtgtgtgtgcgtggcgtcgagacgcattggctgcgactgg

SEQ ID NO: 86000 - DNA, 1355 bp, Zea mays
  Clone ID: MRT4577_178442C.1
cccacgcgtccgcccacgcgtccgctggggcacgcaggccacgcacccgctgccgcccaagatcgtggcgcagctcctcagggacaacggcatcaagaaggtgaagctgttcgacgccgaccagggcacgctcagcgcgctcgccggcaccggcatcgaggtcatggtcgccatccccaacgtcatgctcgacaccatgacggactacgacaccgccaaggagtgggtgcgccggaacgtgtcccgctacaacttcgacggcggcgtcaccatcaagtacgtggccgtgggcaacgagccgttccttgcggcctacaacggcacgttcgacaaggtgacgttcccggcgctgcagaacatccagaacgcgctgaacgaggccgggctcggcgacaccgtgaaggccaccgtcccgctgaacgccgacgtgtacatgtccccgaaggacaacccggtgccgtcggcggggcggtggcgcgccgacatcgccgacctgatgacgcagatggtgcagttcctgagcaacaacagcgcgcccttcacggtgaacatctacccgttcatcagcctgttcctgaacgacgacttccccgtggacttcgccttcttcgacggcggcgccgcgccgctggtggacccgggcagcggcgtgtcgtacaccaacgtgttcgacgccaacttcgacaccctggtggcggcgctcaagtcggtggggcacggcgacatgcccgtcgtggtgggcgaggtcggctggcccaccgacggcgacaagcacgccaccaacgcgtacgcgcagcggttctacaacggcctgctgaggcggctggcggcgaacgccggcacgcccgcgcggccgaaccagtacattgaggtgtacctgttcgggctcctggacgaggacgtgaagagcgtggcgccgggcaacttcgagcggcactggggcatcctccggtacgacgggcagcccaagtacccgatggacctgagcgggcaggggcagaacgcgatgctggtgccggcgcgcggcgtggagtacctgccccggacgtggtgcgtcgtcaacaccaacgccggcaacatggacaagctcgccgacaacatcaactacgcgtgcacgttcgccgactgcaccgcgctgggctacggctccacgtgcggcggcatggacagcaacggcaacgcgtcctacgcattcaacgccttcttccaggtgcagaaccagaaggaggaggcctgcggcttccagggcctcgccgtgcccacgcagacggacccgtccaccgccgcctgcaacttcaccatacagatcgccaccacctcggcgggtcaccggcggccgccgactagtaagctaa

SEQ ID NO: 86001 - DNA, 462 bp, Zea mays
  Clone ID: MRT4577_178443C.1
aaaagtccccgttcatcaatcttaaattaggccacaaaagggctcatgataaaatgcaatggtagctgtactgtaatttgcaagcatacacacatggaattatggagtccaaactctcactggatttggcatcccttggtctctcgaggcaagagggcgcatgcgactccagcaaggaagagcaccaggtcaaccacgaacacagcttcttttcgacggcagctctctaacaagccaacaataacaagaggtgaaactatgctgccaatccgaccaagggaagaagtgatcccaacaccggtgtttccgagacggtgcagggtagagctcaagtgtataaacatacagaactgcaaagctgcccatgatacaagtccgggcgcagaataaagagtagttactaagcctttccctaattgtagagaaagaagcgccaggaaaacaccgcacatcaaaagcatg

SEQ ID NO: 86002 - DNA, 483 bp, Zea mays
  Clone ID: MRT4577_178444C.1
gtgactgcagctaccatcaaatcagtcctcaccggcggtagcactgcacatgcaagaagaagccgccaggcgactagctctgtggcagctagagtcagcaagccatccacagcctgccctccttctccgccctagccttctccatgaactagcgcccccgagcccgcgctgccgccaccccgcccaccgaaccaccagtcgtgcacgtcccacatgacgtcgaccaccttcccgtcgggcagcacggcggcgcggttgccccggaagccccagcccacccgccgcacctgcgttaccttctcgccgtagatggtgacccgcagctccccctgcccgcccctgcacgcgtgcacgggcacctcgagctcgtccacgccctcgtggaacctgcagcgcgtgacgtgcgccgacggccccgccgccgcgcagcgcatctgctcgcgccagctgacgaggagcgcgggcgcgatgcgagcgcccggg

SEQ ID NO: 86003 - DNA, 234 bp, Zea mays
  Clone ID: MRT4577_178445C.1
accaggcgtgcgttctacccgagccctatgcgtccgtgtcgctcgcgccgagaggaatctgctagtctgctaccgccgcccacagcgacgtcatctttcgagctcttcaaaaggaccttcagcgaggaccaggacccatcaaatagcttgatgctctgcacaccggaataatggaggtattgataagactgagccgcagcaccaaatgcctggggaaggatatgcgccaggggg

SEQ ID NO: 86004 - DNA, 500 bp, Zea mays
  Clone ID: MRT4577_178446C.1
ctccttcgcatcccgagcaagcaagcctccgccgccgacgacctagctccccgatcgcggccatgtcgaggcgcggcgactgggtctacgagaacaacggcgggacgtgcgtggccatcgccggcgcggactactgcgtggtggccgccgatacccgcctttccgtcggatacaacatcctcacgcgcgaccactccaagatctgcgagctagcggacaaatgcgcactagcatcttccggcttccaaggtgatatcaaagctctgcacaagaacttggctgccagagaattgctgtaccagcaccagcacaataaaaggatgagctgccctgccatggcacaactgctctccaacactctgtactacaagcgattcttcccatattatgctttcaatgtacttggggggcttgatagtgaagggaaaggatgtgttttcacctatgatgcagttggggtctatgagaggactggctacagtgcacagggaacaggatct

SEQ ID NO: 86005 - DNA, 129 bp, Zea mays
  Clone ID: MRT4577_178447C.1
tcttacacccacgcgttctcccactcatcctttacgtttccacattgagccattctcatcttcaacttgtcaaactcaatatcccccttaaccttcaagctataataatactcatcattcctctaataa

SEQ ID NO: 86006 - DNA, 402 bp, Zea mays
  unsure (1)..(402): unsure at all n locations
  Clone ID: MRT4577_178448C.1
gatggattgaatagtgttgtgcctcactgagttaataaccttttacaaaataatttagtatagtaattctaaagctaaatgaaatactactattcgttattttaaatcttggatgttctataatagtaagtctgagttcagatgttatgctctagtcaagagagatagggtacttataaatggttcggtatggcttattgttagaattggatccgggtgatttagagtaccatagctatggttcttaatgtgatatnnnnacttcttgttttcgtattaaagttgcgatgtcctgctataagtgtttaatattctttgagtatctttatctatattgtgatatttatacttgcactcatacatgggcatcgtgtttctcatgtggtacgcttgttgaccacg

SEQ ID NO: 86007 - DNA, 200 bp, Zea mays
  Clone ID: MRT4577_178449C.1
atacccggccgcccttattcaatttttgaccactcaacacacatacttttatttacaaagactatcatacatacttcaaagcacttttataaaaaaacagccatacacttcaatacttaatacaccaatctctacaaacacaactaacttaccccatctacaaacattatcaaacttataccaaatctcttaattaaaac

SEQ ID NO: 86008 - DNA, 344 bp, Zea mays
  unsure (1)..(344): unsure at all n locations
  Clone ID: MRT4577_17844C.1
agcagtggtaacaacgcagagtactttttttttttttttttttttttttttgtttttttttttttttttttttttttttttttttttttttttttttttttttttttttttttgntaaaacaaaaccaaaaacccttcctaaaaaaattacaaaaaacaccccccccattacaacactgtcactgggacaaaattattaccccatgcttgcccaacggctaaaccccctgcactggaatacatggacaaaaaaaaaaacggggcgaggctgaaacaaacattttattcattggggaaatccaacaagaaaaaaaaccccccccccctgcgttgttccccctgtt

SEQ ID NO: 86009 - DNA, 644 bp, Zea mays
  Clone ID: MRT4577_178450C.1
tttttttttttttatttccttttttatatatggctcctaaaagcattttgatgcaattgaatttactccccataaagtaaatctaggatttcaatctagcatcctatctgccagcttttctggggaagttcctacaggcactgagaataccactggttctgctccttgcaagtatacggcgaagcacaaacagtatgttcagtccacgaagcaccaccacactgcccatatctcggcacgctaggtccaccggaaatagtcggcttggaagtagttgagagggtcgtactcggcttatacgtggctgtagcggtggcagtaggcttcgttgtcacagcttctccgttagcggcattaacagcagcagcatgctcatacaccaatggctgagcctcgtcgtcctcaagatagatcgtgttgccatcatcgtggttctttccgtaggagaacttgctggtgccgaattgccagtacatgtcgctgacttgaagatcaagagaagccttttgccatttgctcagggtaggaatgcgagtcgacttgtcggtccagccgtattcttcgtgaagaacaggcttcttagctgtggcaccagcggcggcgtggtctttgatccattgaacgacccagtcggttgtcttgct

SEQ ID NO: 86010 - DNA, 475 bp, Zea mays
  unsure (1)..(475): unsure at all n locations
  Clone ID: MRT4577_178451C.1
caaccgaaaccgatggcgtcgggctcccgcggcggcggcgggagcgacttctccgtggtcgtggtgggctccgacgtcgccgaggcgaacgcctgcttctccgacctcgaggagcgccaggtcgtgcgcgtccagggcaccgatcgggcccgccgaaccatcgtccgcgtcgtcggcaagttcttcccggctccagcaattgatggtgaacgtctgaaaaagtatgtgttctacaaactccacaccgaattgcctgtgggtccattctgcatcttgtacatgcacagtactgtgcagtctgatgataacaaccctggagtgtcaatcttgaggacaatttatgaggagctttcacctgagtacaaggaaaggcttcaggttttctacttcttgcatcctgggcttcgctccaggctggccatcgccacacttggcaggctatttntaagtggagggttgtattggaaaatcaagt

SEQ ID NO: 86011 - DNA, 496 bp, Zea mays
  Clone ID: MRT4577_178452C.1
gcaagttcctatttttataaaagagttcaaatggactgcaatgttgcaataaactctattacttgctgtcttatgtactgctctctattctttagttactttgaatatttggatatcgttgacaaggtagaatgctgcaacagtcgttccatctgagctgcagctgccaagaatattattgatccattgaccttttgtttttaatgctggtggctaaatttttattcagttttaaatattaacaaacaacttccttaactctgttaattattctgttacaggttgtattggaaaatcaagtatattagtcgactggagtatctctggggggatataaaaaagagagaggttgaaattccagattttgttattgaacatgataaggttcttgagcaccggccactgactgattatggcatagaaccagatcccctacatcttgctgatgtacctgctgtgggatactcgcttggaagatatgaagataaatggactc

SEQ ID NO: 86012 - DNA, 974 bp, Zea mays
  Clone ID: MRT4577_178453C.1
attgggtacctcgaggccggccggggagggtgccggccgggagtgcttgcccgtgcagccaagcgaaccgaaaccgatggcgtcgggctcccgcggcggcggcgggagcgacttctccgtggtcgtggtgggctccgacgccggcgccggcgcagcgctcctcgttccctccgaccgccactcgtggcacgactgcctcgccgaggcggacgcctgcttctccgacctcgaggagcgccaggtcgtgcgcgtccagggcaccgatcgggcccgccgaaccatcgtccgtgtcgtcggcaagttcttcccggctccagcaattgacggtgaacgtctgaaaaagtatgtgttctacaaactccgcaccgaattgcctgtgggtccattctgcatcttgtacatgcacagtactgtgcagtctgatgataacaaccctggagtgtcaatcttgaggacaatttatgaggagctttcacctgagtacaaggaaaggcttcaggttttctacttcttgcatcctgggcttcgctccaggctggccatcgccacacttggcaggctatttttaagtggagggttgtattggaaaatcaagtacattagtcgactggagtatctctggggcgatataagaaagggagaggttgaaattccagattttgttattgaacatgataaggttcttgagcaccggccactcactgattatggcatagaaccagatcccctacatcttgctgatgtacctgctgaggaagtggggtactcgcttggaagatacgaagataaatggactccagaagatcgatggtattcagggaattacatgtgattttttctgctgtcgctgaagcctaaaagattattattgtatagtaacacgataatatgagatctgtatgtcagattgctgtgaaaacattggcaaactgtgtttccaacttcacaaaaaaaaaaaaaaaaaatttgcggcc

SEQ ID NO: 86013 - DNA, 1384 bp, Zea mays
  Clone ID: MRT4577_178454C.1
gcaagttcctatttttataaaagagttcaaatggactgcaatgttgcaataaactctattacttgctgtcttatgtactgctctctattctttagttactttgaatatttggatatcgttgacaaggtagaatgctgcaacagtcgttccatctgagctgcagctgccaagaatattattgatccattgaccttttgtttttaatgctggtggctaaatttttattcagttttaaatattaacaaacaacttccttaactctgttaattattctggccttacatgtttttttactcccaagtgacatagacggagtgcttgcagcgggcggcaggtaagccaaccgaaaccgatggcgtcgggctccggcggcgggagcgacttctccgtggtcgtggtgggatccgacttcgcggtcgacgccggcgccgcgctcctcgcccccgccgaccacgaggtgtggcacgactgcctccccgtcctcgctgaggcggacgcctgcttctccgacctcgaggagcgccaggtcgtgcgcatccagggcacggatagggcaggccgaaccatcgtccgcgtcgtcggcaagtttttcccgggtgcgcgaatcgaccacctccagtaattgatggtgaacgtctgaagaagtatgtgttctacaaactgcgcaccgaattgcctgtgggtccattctgcattttgtacatccacagcaccgtacagtctgatgataacaaccctgggatgtcgatcttgaggacaatttatgaggagcttccacctgaatacaaggaaaggcttcaagttttctacttcttgcatcctgggcttcgctccagactggccatcgccacacttggcaggctatttttaagtggagggttgtattggaaaatcaagtatattagtcgactggagtatctctggggggatataaaaaagagagaggttgaaattccagattttgttattgaacatgataaggttcttgagcaccggccactgactgattatggcatagaaccagatcccctacatcttgctgatgtacctgctgtgggatactcgcttggaagatatgaagataaatggactccagaagatcgatggtattcaaggaattacatgtgaaattttctgttgtagcttaaaagatgattgtatagtaacacggtactatgagatctgtattagattgctatgaaaaccttgtcaaggtcctgtatttccaactaaatttatacctgtttgaagatttttgagcagacgctatatgctgtctgtggttaacccgccaaaaaaaaaaaaaaataaataaaaaaaagggccggccgttttaaaggatcaaagttaacgtacccttccttccaacgtaatacttttttaa

SEQ ID NO: 86014 - DNA, 2797 bp, Zea mays
  Clone ID: MRT4577_178455C.1
gggattccagcaccagcagctgccaggagtagtggtttctcttgcgtccgcctcagggcttgtgtccccccgatctgtggcgcggaggcggcgagcggctaattggccggccgggagagagtgagatcgagctgcgagggcgacactcggacggaggtcggtcgaggagaggccaacgatccacgagaggagaaggagatcacccagccgcctgcaagaaattcagcagcaggagaggatcgatcgaggaagatgtgcatggacggcgccgtgccggtgaagagggtctggctcggcatcgccgcgcgcctcggcctccgccgaaagaccgggattcaacagcgcaccagtcctgatgggaaatggtgttccggcagcagttcgaggtactggacaggtctacctgaagttaacttcaggaaagacgctcgtgctgaaggacgtactctatgtgccctcgatgagccggaacctcatttcagtgtcgctgttatgtcgacagggtctcaaattagtgtttgagtctaataaagtggtcctgtctaagtttggtacttttgttggaaagtcatatgagtcaggcggtttgttccgtctttctgttttgaacaatcattcttcttaccatgttaatgtggtctgtaataacgattccattaataatatatggcattcccgtttgtgtcatgtgaattttgaggccattaagagattaagtgacatgtctttaattcctgaatataaacatgttaaaggtgtaaaatgtggtatttgtgtgcaagctaagcagcctagaaaaccgtttcatacggttgaaggcagaagtactactcctttagaactaattcactcagatatctgtgagatgaatggtataatcacaaaaggcggtaaaagatactttcttaccttgatagatgatgctaccaggttctgttatatttacttactcagaactaaagatgaggcactagaacactttaagatctataagactaaagttgaaaaccagttagacaagaaaattaaaaggctgcggtctgatagaggaggcgaatacctttccaacctttttgatgagtattgcaaagagtgtggaatcattcatgaaaccaccgctccatattcacctcagtcaaatggggtagctgaaaggaagaaccgaacagtgtgtgacttagcaaatgctttgttgcaaagttcgaggatgcctgatatctggtggggcgaggcagtactcacagtatgctatgtcctgaacagggtgccgcctcgcaaccgtgaggccacaccctatgaaggatttaaaggaaggaagccaaatctttcgcatattcggacttggggttgccttgcaaaggtgaatgtcccgttgccgaagaagagaaagctaggccctaagaccgtagactgtgtcttcctgggttatgcacataacagtgcagcttatagatttctagtggtccgttccgagacgagcgaagtcactataaacataataatggagtctcgggatgtgacattctttgagagcatcttccctatgcgggataaggaagtagtagccccagatggtccatctcggacatattctttgccctcgagtgtccatgaccagactccagatctggagttaaggaggagtaagagacaaaggactgaaaagtctctgggtgatgattatattatctatctagtggatgaagaaccacgctccctcacagaggcatatacatctccggatgcagagtactggagggaggctgtccgtagcgagatggattcaatcatctcgaacggaacttgggagataactgatctcccagctggttgcaagcctgtgggctgcaaatggatctttaggaggaagaggagacccgatggtactattgaaaagtacaaggcccgtcttgtggctaagggttttactcaaaagaaagaggaggattactttgatacttattctctggtggctcgattgcccacaatccgtgcgcttttagcgctggcagctgcttataaacttcttgtccatcaaatggacgtaaagacagcattcctaaatggagagcgggaagaggaaatttatatgcaacaaccagaaggatttgtggttaaaggacaagagagcaaaaccgatttggaggctatcatggagacaaaagtattcctctccaagaactttgatatgaaggacttgggtgaagctgatgttatactgaacatcaagctgataaaggtacttgaaggattcagtgatgcaaactggatctctgactcggatcaaatgaagtctacaagtggctatgtgttcactttagctggtggggccgtgtcatggagatcgtctaaacaatcagtgtcgacacgttccaccaaggaggctgaattagttgcacttgattcagcagcattggaggctgaatggttgagagacctgttgtcagaccttccaatgctagcaaagccgataccggctgtcctagtatactgtgacaacacttctgtgttgctaaaagtgaacagtagaaaggacaaccaaaaatactcgaggcatatcagaagacgacttgattcatgtcggcatgctagagagacaggtgtaataaccgtagattacatcaagtctgaaaggaaccttgctgatcctttcaccaaaggactggctcaaaagccaatccaagcagcgtgcatgggaatgggactcgttgagcgatatgctcttaatgaagtcaatgctataagcagggaaattgtcctacagaatttccttaatgatttcacctatatgagctga

SEQ ID NO: 86015 - DNA, 182 bp, Zea mays
  unsure (1)..(182): unsure at all n locations
  Clone ID: MRT4577_178456C.1
gcatgctttctagcgagcgccctttnctttttttttattttttacttctaactctcatacctatcaatgggggggttttatttacttgaggggagatccaaatcttctgttttgagatcaatccagtgtacacatgggggggggggggttgcctagctcgtgactgtgtttatccttatatc

SEQ ID NO: 86016 - DNA, 317 bp, Zea mays
  Clone ID: MRT4577_178457C.1
ggggattgcgtgggtttttttacggggcgcgaaaaaaaaaaaattcaaaaataacaaagtcccagaattatgtggtgctgggttctcccggcaagggacctatgtaacattaaaatcagtgaaacccatgcctagcgtagctgtggggtagcccctcaaatatttaacataagggcgcggaagcaaacccaaactctatgcgggccggatatttttgggcccgctgggttttactcgggcccactttaacactgccaggggaggaatttctgccttctgctatatttgctctgcccttagcaaccctgggccggatt

SEQ ID NO: 86017 - DNA, 426 bp, Zea mays
  Clone ID: MRT4577_178458C.1
gtgcggcgctcaggcggcgggtccgaaccagagccaccatctaccgttactcacgagcgagacagcacacacgcagctagctaggagcagcagcagcggtgacggcgatggcaccctccatgatctcctcgtcagctctgagcggaggcccctggcccctgccggcttccgccggcacgcgcctcctcctccagcagcacgtgctcaaagagaaataccaggagggagaagccctaccacactgcggcgccaaccaccaccaccaccatggtcaccacggaggccacggcttcgtggagcgcgagaccatggccgaggaggacttcaacacctgcaccgccgacgtcctttagcgtaggaaaagcttcatcggaagggctccactgagcaccccggtcggccgtcatccacgcccgttcctgcctg

SEQ ID NO: 86018 - DNA, 278 bp, Zea mays
  unsure (1)..(278): unsure at all n locations
  Clone ID: MRT4577_178459C.1
ttgggacctcgagccggcggggattgtttgggttcaaccctccatcccactcaatccacatggattgagagctaaccgaataagccctaacatggcagaaacgagatggtgtattacgaggacacgagaatgattctaccggtaattataacagtatgagctattaatctgtgattctctattttttgtttacgggggactataacaagtatgaaccatttttggtggataataattatattgtggtctgaattttattggattatcttgtangcaac

SEQ ID NO: 86019 - DNA, 502 bp, Zea mays
  Clone ID: MRT4577_17845C.1
gcgaacaggcgggccaatgcggtcacgccgcatctgtggctgacccgctcgaccgggtgctagcgctggaggtcgatgctgaggacccaatccgtaggatgcgaagggtcttgtgcagcccaaagaacaaacaactcgtggtgggtccgactccgcaagaccctaggtgccccgccagcagccagcgaggcagacctgcctatgactcaaaggtaaaccagaatatgggaggtgaatatgccgatcctgtggatacaggccaggactcccgggagcacagaagaactgaaatggctgcagatgagaaactgaccagatgaaaaagattgggcatctggattgcaagccagatctagctccacaatactatagagcggaaagccatgaaaaatgcatgtgattatagaaaggtgcctttgttataatatacatgcgaggaggaaaaagaggatcaaaataagcatatcactactggaaagtacaaagactggagatgaaacac

SEQ ID NO: 86020 - DNA, 248 bp, Zea mays
  Clone ID: MRT4577_178460C.1
atacctatcttaaatgaatatcaaaacttgttttgaagcaatattctgtgtgaaatgttatttgaccctttctttgaattgaaattccatcttttggttacaagatataaagactttattttctgctattgatatgcaaatattttttagcattatgctgacactagaaaacacctggaaaaggttaaatgtatatggttgtggaccctttttaattgcacattgttaaaggtcaatacaaccctttt

SEQ ID NO: 86021 - DNA, 420 bp, Zea mays
  unsure (1)..(420): unsure at all n locations
  Clone ID: MRT4577_178461C.1
agcaggggtaacaacgcagagtactttttttttttttttttttttttttttttggctttttttttttttttttttttttttttttttttttttttttttttttttttttttttttttaaacacctggaacaccccggaaccaaaaggaaagggcgttctggcaccacaaccccggatttaaaagcaaacccccccctttaggccctaagagggatcccccccccaaccccaaacgggcggggcccaaccgggatcccagggatattatttttgtccccacccccggggaaaaggggtaagggcttttccgttttttccccccccccccggaaccccccaacccngggaggggggcccggggacgggggaaactcggccaccagggcgggaaaggtactctttgcctcggagaaacccccc

SEQ ID NO: 86022 - DNA, 363 bp, Zea mays
  Clone ID: MRT4577_178462C.1
cttaaccccttccagtcaggcgaattttttttttttttgggtgtgtccctttttttttttttcacccaaaaactaaattctccggaccccatgttgctgaaagtggcaaaaaaattcagcaaccccccaaaagttagccgatagtccaggccctcccccaaacctacacttacggactggctaccggacaaatattgggaggggcccgaatttgttcacacattaacaaacaatctgttccaaagaaaaaaatatttttttcaaaacccaaaaaacgggccccctaaaaaaggcacaaaacatttggtttattggccggggttcccaaaaaaaaaccggcctccccccaaatttcgagcttac

SEQ ID NO: 86023 - DNA, 468 bp, Zea mays
  unsure (1)..(468): unsure at all n locations
  Clone ID: MRT4577_178463C.1
aaaaacaaaatttttctacacaaaanacacacagaccagcaggggggatttttaacaagaggaggccccaagaaacccccacagaacacgaaaaagcacgcgagtgggagtaaaccgggggaaaaaaaaaacccccggggccaatcggggaaaaaaaaagggggcccaactgcccagggaggcgaacaaaagcaagggggcaaaacaaaaaagcccccgggggggaaaaaatggggagaacaacagggggtgaaccacaccggggggggcccagaaaaagaaaccccccccacccaacccaaaagggaaaaaacaaaagcgaggggaagcggggggacgcccagcggccaccaggaaagcagggccgaacaacccgaaaatagaaccgggaacccggagagcgccagaaacaaagtttgtggggcggggattacccacccgggggcctcgagcggcttgtgggccccc

SEQ ID NO: 86024 - DNA, 262 bp, Zea mays
  unsure (1)..(262): unsure at all n locations
  Clone ID: MRT4577_178464C.1
tttttaaaaaaaaatttttttcaacttgaataccacggcttttctttgcttatatcttttcccgtttgcaaggaatctccacacgttggagccttttgccctttcttcatatacacaatgtaaacacaaaagtgggggggggggggggacacacaaatccccancacaccacacccacacaatccaggacttgacctcaaattaaccatananagttcacaccaataccatacctcaaatcactaacactatcaatcaattc

SEQ ID NO: 86025 - DNA, 275 bp, Zea mays
  Clone ID: MRT4577_178465C.1
cttctcactaatattttctatcttaagttcaccttttaatctcatgtacctacgggcgctctagtgctagtatcgaggatatagaacacaatctcaaatttaataaagcgctctataacgccaacattcactcgcatcggcatctacgccgagaacgccatgctcaagcgcaccgagcacattaactacctccgtcttacctctcgcctagacaccctcttaacccgccttttacacgcatgcctagattcacgtcatcgtcaaatccattcaat

SEQ ID NO: 86026 - DNA, 310 bp, Zea mays
  Clone ID: MRT4577_178466C.1
attcggctcgaggcggcaacacgccaagattttatgcacacacccaatcgcttctggttggttgggaagacgcttgccataacatgggactacattcaaccaggcgcggtgcgactacctacgaagaccgcgcttctactttggagactggatgcaactaactgccctgacatgaacttgttggccctcggcaccgccacagactctcactagatagatagccaccttcttcctccttatacttgtacatagtagttgtaggctgctacacaacgtcgacaacatatatatctacatactaggtactact

SEQ ID NO: 86027 - DNA, 313 bp, Zea mays
  unsure (1)..(313): unsure at all n locations
  Clone ID: MRT4577_178467C.1
caccttatcgttccgctctctgncccctcccgcctcactcaccagcatcggctcttcagtcttcaccatggccgccgcccacctcctcgccggtttgtcctccttcaccggcttgggcccttcttttcggcttcggtcttcacagcatccaccacatatccgcttcaactggactgggaggcggccggtcccggggggacgcgcggcggagaccgaccccttattgttttagccaacgccaaggcccccaaaaaggcacccccggcggagggggccagaccccccccccggccccgcaacaagggggccaagc

SEQ ID NO: 86028 - DNA, 263 bp, Zea mays
  Clone ID: MRT4577_178468C.1
acggcgggcgctacgtattccagcgcgcgcacgtacgcaagcgtcccaacgtcgccgttgctggctccgctctctcacgcggctgtcgctgcgagcgcatactacaagcatacaagcggcggctgttgacggctaccaccatctcccgtacatgtaccacgctcggtgcatctgccatctccaattaatgttgctacacaaaagtatttatcacagcatgtccagatggaggctacggaacatctacatacgctcatccatga

SEQ ID NO: 86029 - DNA, 415 bp, Zea mays
  unsure (1)..(415): unsure at all n locations
  Clone ID: MRT4577_178469C.1
ggggggggtttagacatgtttctcttagtggtggatactgtctagctaggaagagagtcttgagggattgatggacgcatgcatcttcaattcctgtgtattgtattactacaggtacaatctgtaatgttacacactgatgatgaattgatgatggctgatgagcaaaaaaaaaaaaaaaaaaaaaaaaaaaaaaaagggggacattcaaaaagcgcgaataaaaaaaccattccccccacgttgggggccttttctagaaattcttgtccctcccccgccctccccttggtggggcgcatccctccccccctgtggcccttccttggggctcccgtttcctcccctcctttgaccctgccgcgtnctttgttttccctggggtccctttgttgcccccctcccctcccccccc

SEQ ID NO: 86030 - DNA, 295 bp, Zea mays
  Clone ID: MRT4577_17846C.1
ctagtcattcgcctccactacaatttttgaacagaagtcaatggtgtcataaatttgtgaacggtttaagatgcttttattcagacttttttttttattccagatgtccctagtaagtacggttacgctaacagactaacagtaggccagatgccctgaacaagcatgcaattgtttgtatagatatggcgctcttccttttttttgtcttatgcaaggtatggaaaattctttgttgttggaggtttaggttcatctgatcaggttcttttgtgtggtatattaaacctttttc

SEQ ID NO: 86031 - DNA, 381 bp, Zea mays
  Clone ID: MRT4577_178470C.1
ggggtgtttttcaaagaggaagaattcgaccatcgaaaaagaggtctttcagcgatagaattgtttgctccacattagagatcctggcatcagaaagtgagaattcaaccagcagacgattgcttcggttgactacaagtggcagtgagatagaatgcataggtgacttaattcacgcgatctatgatgacaaccctcatgttcgtgattggcattaataattgcttcttgttcttgctaccgttggggcgaccacgcttattcccacccaccttcactcgcttcggcttagctggcggaggcactgccggcacctttatgggatcctcgacgtggtctgtaccactggggcactaaccggcgggacgccattttgagcat

SEQ ID NO: 86032 - DNA, 536 bp, Zea mays
  Clone ID: MRT4577_178471C.1
acccagagcacacccattcttgatgaagacagcaaagggcacacaagatgcatataactaattcgggcttcgacaccacttaaaacaaaacgctgatgcatcatgtaaaccataggaactaacctgccatacaccacaagggacttaagccgaggacacctggttcaacttggagagctctagcctgaatgcaccacccatcgtcgatccttgacaacttgaccttgaacctgccaaaggcactgaaccgcacctcctcctattctggacaatcagatccttgacccatgaactgattatccacttgaggttaacatcaacttccttcatagacttgatcagggtagactttttgggaacgagctctatgtcaatcttgatgtctttaactaagagccgtgcgaagttaatctggacacctgaccatattacgggagtacacacgtgccctgttctggtgaaccccgtttacaaagacaactaggcggccatatgctaagccgtagctaagcatggccacgctcactaactaaact

SEQ ID NO: 86033 - DNA, 384 bp, Zea mays
  Clone ID: MRT4577_178472C.1
atcaagaactactacagcccgccggattttcacaagtggatacacgaacgtctccgcgagtctccagcttgtccgctccaccaatcggaaaggcctatcctaccgactaagagtcaaccggtttgcgcacatgagccgataagatgttcgtgcaacccgtctcggcacaacccacaactgctacgtcacgcttaccggcaaccaccgaatgcactccgccgtcgacgccctaccagagactaaagactggatggtggatggcatgctagccctaataaaaaccaggcccactctgcataatactttaccgtaagcactactggcgcacttgaagctgcatttacccaagcaactggcaagcccatatatctttctgtgcaacaa

SEQ ID NO: 86034 - DNA, 450 bp, Zea mays
  Clone ID: MRT4577_178473C.1
caactatcttatttatgacctctgttcttgtattgttgacataaccaaatgtaatgggcataggcaattttcctcgtgccatcacttgctaccctccgaagctacagaggggaaaagttgaatcctgaatcttgtatttcggctcttgatttgcttgaaggccttagcaaatatgatatctgctacactgtctgtgtcaaccaggacattgtgcatgacaaagcctttttatgacacaagagataaccatgggatctctatgtggataatccttgatatgaagattatcttgagaaaaggtgataggaatatgggaccacttggtcctaatgtagagtccttggacatatacatgctacacccttctttgggcctctttattttccttcttggtaataagttcgaagctcgagccccagtgatggggagcacaagcttctccaaggatga

SEQ ID NO: 86035 - DNA, 179 bp, Zea mays
  unsure (1)..(179): unsure at all n locations
  Clone ID: MRT4577_178474C.1
gaaacggaaatatttgggtcatgggttgtttttttaaaacccatctaaaacatgtttnnngttgctgaataagacatttggtttggataggtcgtttttttggaagggtcattaatttatgccggccaaatgacaatggtgccagtattgattacatggtagggttttaggaaatgcct

SEQ ID NO: 86036 - DNA, 718 bp, Zea mays
  Clone ID: MRT4577_178475C.1
gccggccggtccgggatcacccccctaaccctactttcggttattgtcggcgttcgtctcacgctgcgagcgatgcaggcctcgttcaacacagcgagagcgtcggataagatacaaccgagtgaccgcttgatcaggtgggtgactacacattaccttcgacccccaagatttcgtcgcgctggtctcttcctccaactacattctgcatgacatccgcttgatacggccaatgattgggactgctctcggtgtcaccggcacgatcgcacgatgagaatgggcagatccaggactccaacgtcccatccagcgtgactatcgtcctcaaggtgcatcaaagagctcaactataacagcatcatcgtcgatatcatcaaggacattctgctgcatcggccttgaagaccacgtccaaaacctaagcaacgtgattcacatctacatggaccaggacttgaacgttgccactttcgtaattctcggtgccagcgtcaacaacgagagcatcgatatacacgaaggactcccggaactggcaatgcttgagtcccatacttgggagccgtacattacttgcgattttgaaggatggacggctactactgagtgatctactgatgttgaaacctttgtctgactagatattgtcaatgtatcttgcttgatgcggacgtgttctcggatctatattattatgcacggccgtcgtacgcgt

SEQ ID NO: 86037 - DNA, 313 bp, Zea mays
  Clone ID: MRT4577_178476C.1
ttttgtggcggtattattaccatcacgggtagttactacaaattctcaaaaaggtatgtcataacatgtacacgactcttatcgcctgaagatcatgacacctgattgccagcccaaaacctttaccaaaagtgaaaatttagctataaaaggttcgttagctaggtgtaataaaaattaaaagctttggattgaacatttatacgaactcatggatattgcttttaccagcttcgacttgaacctgaggcatttcaatctgtgcctgaacaggctcgatcgcataaatgctcacaccaagtctgaacatgcc

SEQ ID NO: 86038 - DNA, 562 bp, Zea mays
  Clone ID: MRT4577_178477C.1
gccggccgggtcgcgatatgacagcgtagtcgcctgcctatctatctaacaaaagagaatcagcttctataactacttgttatggaccgcatgagtagagaaagaaacttacgttgagtggatactgctgcttctccagctgacgctaagtccatagaacaacaaccaacacgctcctaggcttggaaacctcgacctagtgtaaactgctgatcaacgcaaattcatctgctcacccatccaaatcaatctcctgacgcccgaaacctgagcttgcctacaatgctataacccaaccttgcgttttgaatgcattattcaatgctgcatgatgatgcagctagtatatggccatgtgaatattctatttttagaaacacaaaaacagatggtgtatctcaacttattgcatgaataccgtgatctattatacaactgataacaagaagggatctgtgcgatgtattaatcacgtatctttcctcatctgcaatcagctacttggcattagaactatagattcctcctcgcgtaaaaaaatcaatatcaaacttatctatac

SEQ ID NO: 86039 - DNA, 513 bp, Zea mays
  Clone ID: MRT4577_178478C.1
gaaacaaaaaatacgggtttgttacttatacaccctttttttaagggctggcccaattttttatttccataagagggcggccccaaaacattggtcctaaaaaaaacaaaaaccttaccctgggccccctccataccaaaagggggataaatttttttaaaccccccaatactttccaccaccagtttaaatacacggggggttaaaaaacccccacaaagccggttggttatctactacaaacggggaaatcaaaccctacccccccccccgtttaaaaaacagttacttacttacaattcccattagttttacgtaaatcccccaacaacaaaactcaaatcatccaaattttaaaatcctagggttaacccaaaaaatgacctttgccagttcctgaggcactgtcccctgagctcctcgactaaaaaccacgggacaaaaaaaagcccttgccaaaaccacaaaagccagtcgccccttaaggggccttttaaatttccatggattgga

SEQ ID NO: 86040 - DNA, 267 bp, Zea mays
  Clone ID: MRT4577_178479C.1
ctctatagtgaaacatattaatcgtccgtgtagtgcttgcgctacacaagatacaaggctgaccaacaccaatggcagccgcctactcatctccagttttccagatgctcctgctcgcagccttagctggtattatcacgaacacagcgaccttcatcatcacgaacatctgctggttcaccgtgtggcacctggacacactcggtggtcagcggcacccagctcatgccggtcgggaccttgacggtcaacgtgccggctggcaac

SEQ ID NO: 86041 - DNA, 243 bp, Zea mays
  Clone ID: MRT4577_17847C.1
accgaataatgagttgatatgcacatcgcgtgagactcattattaacattaaaacaagtttgcacttaaaaatgagcgtgaaaatgaaatatgatgaaatggacgtgggtagaagaaagaagacgaagtacaaagaaactcgtatgtttttatattttgataaaaaaatatgcaaatgaaaaaagtggaaaaaaaaaaaaaaagtacctaggaacgtgtcctcgctgagggcgaatttaaggg

SEQ ID NO: 86042 - DNA, 174 bp, Zea mays
  Clone ID: MRT4577_178480C.1
ggccgggggaccgagacccgaggtgcaggcgagccaaggtgacgacgtcgaagaagccgggactgcgtgcgggggaatggacccgcgctcgtacccaggagaacgacggtggccacgggatcacgcccttagacgccatcgcacggaggctacagctccccgacgccgggccac

SEQ ID NO: 86043 - DNA, 276 bp, Zea mays
  Clone ID: MRT4577_178481C.1
tgagtaatggagctcctgcgtggtgttcggcgaatggcggggcgagctgcggaaaagaacaacgggccggattccttcaccatccactgtgccaagccagtggacgacgagatcatggacgtcgcctcgctcgataagaacctgcaggatagcctctggggcgccggcggccaagttgagaaactcggcgactccgtcaccatctctcccgagaagatcaaggtcatcgacacctctgatgcccacttctccaagagggacctgaactacttctac

SEQ ID NO: 86044 - DNA, 586 bp, Zea mays
  Clone ID: MRT4577_178482C.1
actgtcccagcctcgccgtagcacaccatctccgacgccgcccgccgctttcgcgagcttgctagctagctatatcgccgatcccaccgagccggaacgcggagcaagcgcagatggagatcccccgcagcctcggcgcccaggacaacgaggaggaggaggagtacgacagcgtcttctacgaggacatcgaggcgcccaagttcgtcgacctcaccgcgcccgacgccgcctgccccgccgacgacccctcctggttctgcctccgcgtaggctgcgaccagaggcacgagcacgtcgacccggaggcgctgcaccggagcttcgttatgcgggtcatggcggcgaggagccccaacgtgaggctgcagaaggccatcagcaggagaaaccagagctcgacgctgccgaaatgcccccactcggcgccggcgaagccgccgagaacccggatgaccaggctgagcctggcgacgggggcggccgagaaggcggcgagggccgggctgcagggccaccggattcgcagcctgagagattccccggtccggaccaaggcggcgagggtcgacgcgcccagcgcgag

SEQ ID NO: 86045 - DNA, 546 bp, Zea mays
  unsure (1)..(546): unsure at all n locations
  Clone ID: MRT4577_178483C.1
ccccgcccgcttccgctccctcgacttcggcgagcgacacgggtacctcaagggcgtcgtcaaccgacatcatcaacaaccccggccgtggcgcgccgctcgccaaggtccctttccgcccccttcagaaaagaccaaaggctctttccaccaagaattaacaaccgatctctctgcgcccgcccactccctcgcacgactcccctccggtcctgggtgacaatctgcctcggcccctcgtgccgcggctcccggccttgggctcccttggtcgcccnccctgcaccgccctcgggttagctccctctgccccngngttgccccgcgctccggcctgttggcggttgctgtggggccggcctggngccgtgctcnggctggtccgcgtccccccgtccgtgtgnngggcccgctggccccggtgcgtggtgtggccctgncccctgtggngcctccccccggnggnggtncccccccccccctcggtcccgcctccccggtccgccgngccgctccccctggcccgtnggttggtctccttgctgc

SEQ ID NO: 86046 - DNA, 295 bp, Zea mays
  Clone ID: MRT4577_178484C.1
tcgagcggccgcccgggcaggtacaagcttttttttttttttttttttttttttttctttttttttttttttttttttttttttttttttttaattaaaaccaacaccttcattatgaccaggcaaaaataattggtaaaaccaaacaaaaaaatgggggtcgtcccacagaataataacgtaggtggataaagggagatggacaaaggaaattaacaaaatatgaggaaggaatggtagggaaaaatggcaaaggagaccccacgggggtgggaggggaaaaccgaaaactggt

SEQ ID NO: 86047 - DNA, 815 bp, Zea mays
  unsure (1)..(815): unsure at all n locations
  Clone ID: MRT4577_178485C.1
acccctacccacccctcctactaccactaccagtccacctcctcagccccgccgacgcccgcgcgtgaagatcgcccgcctcccgacgtcctccgcgctcctggggctcgccgcccggccgcccggcgtccagagcgggtacagatggacagccataattctgcaccgccccatgttcctgaagtaaccatggacatctcatccgcttctggagcagctgggaacaaagtttgcagaggtgctgcttgcgacttttctgacgccagtaacacctcgaaagattcaaaggagaggtctgcatccatgaagaagctcctaattgctgtgatcctttgtgttatattcatggcggttgaagtggttggaggcatcaaagcaaacagtcttgcaatcttgactgatgctgcccatctcctttcggatgttgcagcctttgccatatctttgttctccctatgggcagctggttgggaagcgacacctcagcagtcatatggatttttccgtatagagattcttggggcattggtttccattcagcttatatggctccttgctggcatacttgtctatgaagctattatgaggctgattaatgaaagtggcgaggtacagggctccctcatgtttgccgtatcagctttttggtttgtttgttaacatcataatggcagtgttgcttggtcatgaccatgggcacggtggacatgggcacagccatggtcatggccatggacattcacatgaccatgatcatgttaactcagaggatgaccattcccatcatggagatcatgangcaggccatgtacatc

SEQ ID NO: 86048 - DNA, 322 bp, Zea mays
  unsure (1)..(322): unsure at all n locations
  Clone ID: MRT4577_178486C.1
cccggtcgccccgcgtccgcatgtacttcgtctaccgcccaaaagccagctgttcacggccaaacatggccctctcatggcgggttttgggtcatcctcctgctcaccctttctttcagggtagaagcgcgtggctgcttgctggtctgcgtcgctttccgcaggcttcgcggccctaactctgggcgcggtccaacaggcgtaggtctgccctttcttcccttcgtccctcgcgcctgtctggttcctctcggcctcctctcngtgccctcgttgcgcttcncgtcttgggttctcttcggtggcctttggtgctctcgtg

SEQ ID NO: 86049 - DNA, 1591 bp, Zea mays
  Clone ID: MRT4577_178487C.1
ctttagaccccgctagccgctactcttttgtcctgagctactaccagcagtggtaacaacgcagagtacgcgggaccatctatttaatgaatagcataagattcattgagttcttgtcgcactcctttgtgaaagagtagaatgagaaagctagtgaatcttaaacccattgataaaagaaaaaaaggataacaactatggttagggaataaaagagggtttggggatagagggacttgaaccctcacgacttataaagtcgacggattttccttttactagaaatttcattgttgtcagtattgacatgtagaatgggactctctctttatcctcgtccgattaatccacttttaaaaattaaaagatctcgaaaacaatgaattgaaggatttgattactcaatatttgattggaatagattcacaataattctaaaaaaaaattatgaattttctatttcataatcattcctaatttcattctaaaaataaaataaagaacctatattataatatgggttctgtgattaatcgttattacttcgattcgttagaacagcttccattgagtctctgcacctatccttttcctttgggttctagtttgagaaccacttgtttttcaaaaaagggatttggctcaggattgcccatttttcattccagggtttctctgaatttggaagttaccacttagcaggtttccataccaaggctcaatacaatcaagtccgtagcgtctaccgatttcgccatatccccattttacttttctttgaaaccaggattccttgtataatttaatccatctcttagttttttttgaatcattgaattcattattcgacgtagtctagcaactcatctctatttgagacaccccgctcgcttattgcaattcagaattgcattgattttatcgttgatatatttgcaattcaatcggaatgaatatatccaaaagtttttctctctcccgcctccctccttccttttttagagtattccaaatcatactataacgcttgatattcattctttttttctaaactgaattagaaatttcatttgctatgattctataaataaaaaaacaaaatatctcaaaaatgtatataatgatcaaatgaaaatgccaatctcttggcattttctctttattatattattcatatatattcttctttttcttcttttctatgtattagattattcctccgagccatatcaaattgaaaatatctgaaatcaaattcaatatagaatttggaatagattctattaaaaaaatccatttgcgaattagagaaataaaaagaaagttcaataaattctataatcctatttaagaatatcatttagttaagcatatcaagctaactttatctttatgaaattctagtattttttttctatctaagtggaacttccaatttagaactagttaataactaaggttaataattaagatctgacattttacagattcccccgcattatttttatttgttacactatttctgttatgtaagcccacttagctcagaggttagagcatcgcatttgtaatgcgaggggcatcggttcaa

SEQ ID NO: 86050 - DNA, 789 bp, Zea mays
  unsure (1)..(789): unsure at all n locations
  Clone ID: MRT4577_178488C.1
ggggtgccccataaaaaaaatttttggtcccaaaaccgggtttggaaaactggattctttaaaaaggcccgcccccatttttttntttttttattttgtttcctttttattttttctncttttttttttttttttttttttttttttttttttttttttttttttttttttttttttttttttttttttttttttttttttttttttcacccaatcacccctctaccatttttagcgatcaaagtttcaaaactgaagacaaccaatactgcgcgctctccaatatctaaaccagccctgcatgtgtatttggataaaacaaaggcagcaggatctctgacaacaaaatgacgagtggccccaaatgggcctagctaacccagagaggattggaatctcctgtaaactgatgcgaagaaactcgacccaaaacatctagacttattcttcataccaaaactcctacaaactgtactccacgaatccagccaaaggatgtcagatgctccatgctttctgtgtatcagaggctccttaccatcgactcaaaactggagaacattggaaggaaaattgctgagacactcagtggccttcctcttgccgcaaaggtggtagctggacaccaccatgatgtaaagttggcacatgtgaccactggcaggtccagggtctcatctctttgcatattcaattgccccctgttacttgccagattatctttcctccttgaaagcaaatttgatgcgcctcctagtacgtggtattcccagccttgaacatcaactt

SEQ ID NO: 86051 - DNA, 416 bp, Zea mays
  Clone ID: MRT4577_178489C.1
tacggaacgctatcccatcttgttacacaaaaatatccgcgcgaccccgaccttcgcctcggactccgggcagcaagcagcagccagcaggcatggggatacctgtggtggttcccgtcgaggcggactactcgtgctactactccctcgacgcgccaccgagggccgccgccgacgcggcgagggcgccgagccgcgcgcacgtcgcggcggccgggatgtcctccacggcgtcctacttcgccgggatgcagctgaagcgacctcgcggaggtggccgcctaagcagccgatcggcccaagagagcggcctccgagtgaggcggcgcgctcttgtgcaagagcctcttacggctcggcgtgccggagctcagagtcatcgccggcgtcgcacgactcgtgttcaggcccaagca

SEQ ID NO: 86052 - DNA, 1043 bp, Zea mays
  Clone ID: MRT4577_17848C.1
gtctgcttctcctctgatggcgatgctcctgctcgcctcaacactggcgccgcgcgttcctgtcacgcgggggagcgggagcggcaccagcgccgcccacccggcgtacgccgatgccacggcctacggtctcgccgcggcctctgccttggaggcggggctggaggagtacggcggcgggcgcatcgtggacatcacgcacgcgtaccggccggagctgccgttccccgggcgggacgggctcggcgcggtcacccgcctcacggagtccatggccaacggctccgtcaacaacgtgtcggagctgcgcatggtggtgcactccggcacccatgtcgacgcgccgggccacatggtccaggagcacttcgtggccggcctcggcgtcgacaagctcgacctcgacgtcctcaatggacctgcgttgctcattgatgttccgagggacacaaatataacagctcaagcaatggagtccctaaatatcacgcaaggaattcgccgagttcttttcagaacactaaacactgacaggaagctaatgtggaccaaggaaattgacacgagttttgttgggttcacagaggatggtgcacaatggttagttgacaacactgacatcaagctagttgggattgactatctatcagttgcggcatttgatcacttgatatcagcccatttggtctttttaaatagacgagacataataccaattgaaggtctcaaactagaccatgtaaagactggagtatatatgttgcactgcttacctctcagacttattggatgtgatggctcaccaattaggtgcatccttatcaagtgatcactagtagctggtactgctgaacatcatataaagctggtactgccgaaggctggctaatgtacttgtgtactttccacctctctatgaaagaaaatgatgtgtgcgatgttgatatgctcaagaacaacatagttcattgatacattatattgtaaagagtattacagctaagtctgtgtttgtaagaaatatatctgcagtaaagagaggt

SEQ ID NO: 86053 - DNA, 505 bp, Zea mays
  Clone ID: MRT4577_178490C.1
attcctctctctcaatttctactctcacggtgtcactccaccactaccggctacactaccctaagatgcagaaagtcattcctcacctccacgcgccgtacgctctctggagctgctgctcccccatgacgaccccactgcatacctccactagatagagcactcacccgcgaccgctgctaccgctgctgactactacccgaactcgaccaagatcccactaggtgtgccgcaggcactctcgccagaacaccgtgaagaagttgccagcgaaacgattctgcacctgctcccagttaccgacctcatgcccacccgttatgaccacgaggccaactcatcggacgtggccactgccgggaaccgaaagaatctccacccaagacgagaacgacaacagaatggcagggccgccaggagcgcctccaagagatcatgaggagcgatgagaacaaatgcgaatttaccgaaatacaactatatataccacccagtctcaaagtga

SEQ ID NO: 86054 - DNA, 228 bp, Zea mays
  Clone ID: MRT4577_178491C.1
tcattcattcattgatagctgactggcgaggggctatatgctaacaacggacggaaaacacaccacaaatgggtggtttttcacgtgcttgtgggacttgacaaatgatatttgcatgcgagcacccacatcaaatctgtagaagagttcagcgtggattaaaatcagactgattgaaaaaactggtgctagggaagagatcgattcaaatgcataagctttgcagta

SEQ ID NO: 86055 - DNA, 3009 bp, Zea mays
  Clone ID: MRT4577_178492C.1
ccggccgggcctcctctccagcgcgtggacgcgcagccggccgccgccctcatctacaccagcgtcgccgctctaccccctccagcggaccagcaccgccgccctgactccctctcctccagcgtgcggcacccacatcctccctccacaatgctctaacagccagggccccaccgcttctcccctgtgtcccactcctcactccaccatgctccagcagccagtgcccatcccagccataggtttccagcaggcagggcccagcccagggtcaggtgataagtgacagtgacgcaccccaagctcaaatgcagacatagtcagaccggccggggttagatgtttgccagtgtcacgtgatctttgtgcatatagtacgcgtgtcttaatttaaaaaaaaaaaaaaaaaaaaaaaaaaaaaaaaaaaaaaaaaaaaaaaaaaaaaaaaaaaaaaaaagaaaaaaaaccgtttctggccgcttccgactacgtctctccctgactcggtttctctttttcggcggcgacggctggtcgagttgcggcgctctgttcagtgttcattgtgcccttcgccacgacgattatcctccagtagtaaggctctcgttgcaaggaaagacaaggaaagaaattggtccagtagccctggaagaaggcttctcctggattgaattcacaaaacaactgtttgttattttcttctcccgttcacttctctttggcccgaaaccgagagctagtgcttgattcggtcgtttttgggcaccgaacacgttcttgggaccgccgccgccgccctacttccagtcccagctgctcaggtctccatcggcctcgagccctttgccggcgacgagcactcacaacaccagggtgtaacaatgtcttcttcaatggaatcgtcataccttcctgctacaactgagtcattagcccaagctcaagaggctaaggatgcttcagagtccatttcaatcctttaccgtgtcattcaggacccatcttcttctgctgatgcactgagaacaaaagaagttgcaattacaaatcttacaaactacctcactaaagaaaacagagctgaggagctgcgtaatcttttgacccagctcagaccattttttgcagttattcctaaggcaaagactgcaaaaattgtccgtggaataattgatgctgtcgccaagatacctggaacatcagatcttcagatttcactctgcaaggaaatggtagaatggacccgtgcagagaagcgtactttcctccggcaacgtgtggaggcaaggttggcagctctcctgttagagaatcaggagtatactgaagcccttaccctgcttactagtcttatcaaggaagtcaggagacttgatgacaagttacttcttgtggacattgaccttttggaaagcaaacttcacttctccctgagaaatctgccaaaggccaaagcctccttaactgctgctagaacagcagcaaatgccatttatgttccacctgctcagcaaggcactattgatctccagagtggaatcctccatgctgaagaaaaggattacaagactgcttacagctacttctttgaagcatttgaagctttcagtgcactggaggacccgaaggccatctttagcctgaagtacatgctcttgtgtaagataatggttaaccaagctgacgatgttgcaggaataatctcgtctaaggctggcctaaaatatctgggtcctgatgttgatgctatgaaggctgttgctgatgcatactctaaaagatctctcaagtattttgaaactgcccttcgtgattataagtcccagctggaggaggaccctattgtccacaggcatctttcttctctgtatgatacactgctggagcagaatctctgcaggttgattgagccctactcaagggtggagattgcacatatagcggagatgattgaattgccgattgaccatgttgagaagaagctgtcgcagatgatccttgacaagaaatttgctgggacactagatcaaggtgctggctgcctcattatctttgaggattctaagacggaggaaatcttccctgccactctcgaaaccatttcgaatgtcgggaaggttgtggacagcctttatgtgaggtcggccaagatcatggcttgaaagcagctagtcttacctgtttgctctgatttcatttccagtctgtcgatgtcctcagacatttattccttcaatattgacagtttattgtgaccgctacaggttcatgtgaccaaaggctagctatttttacgactgaatgagttatgcatgtattggtcttttaatatcagcgtgcagagtcggacggatgttattgtgtgttaattaatctaccatgttatcgaaatgcatgtctttagctccactaaaggcttgtttgtttaccccataaattatataatctggattattttcggaggatttattttgggtttggggggcagactctttttctttagcttctcatgagagttgttacaagcaaatcgttgttgttgttgctaaataccaagagttttaaaagaacattgtgtaagtccgtggacatggaggacgtgcaccaggaggtggacatcctgcgctacatgccggcgcaccccagcatcgttagcctccgtgccgtttatgaggacaccatgcacctgcgccacatgaggacgccgtgcacctcgccatggagttctgtgagggaggggacctcttcgacaggatcgtcgctcggggccactacatcgagcgcgcagtcgtcacgcgcaccatagttgaggtcgtccagttttgtaagaggggatctgtaccagtcaggctgagcagcagcagcagtggtgtgttctggcttgtgtgggacctagaggaagcttacacaacagggaagagtattgtgttaagtgagttagaaagtaatggaatgaatgcagtgactcacctagaggaagattatttatttatttatttacgtatc

SEQ ID NO: 86056 - DNA, 741 bp, Zea mays
  unsure (1)..(741): unsure at all n locations
  Clone ID: MRT4577_178493C.1
atagaaggctggcgcgcgacgtccattctatcagcggagtcgggtagaaggctaacgcgcgacgtccattctatcagcggaggacttccagattttttgtcatcgtgatggaggaaatgaaagccaggacgaccaagttcgcagctatcgttcttgtatttgctgtagtcagccatggcctgatgagccctgccatggggatgctcgagaacaagggtgccggcggagagacgacgacgatggccacggccaggtccgcttataagcccacgcttggtgttggcggtggaaccgccgtggacaaccaccatgccatcccacgagaccagtacagcagtcatggaggagacgacggagggagtggtggtgatacaaacaactagtgcgcaagcatgcagctgctcatgttctctctgtgtggtgccagtttctacatatatgcatgttgctctgtttgcgtggaagacaaaggatatatatgtaattttgccgaaacactagttttcgtgatatatcttgtacatgtatatatatatgtacaaaaccctagtcttgtagcatcacaaaatctaccctctgcttgtacatgtatatactgcaccgcgcgctgattccttaagagcggtatatgtatatgacaatatgataaattaacgatgtttgtgtaataatatatttcagaagatatgtgttttaaccaaaaaantaatnaaagagggcgcgccgctcagaggatcaagc

SEQ ID NO: 86057 - DNA, 2366 bp, Zea mays
  Clone ID: MRT4577_178494C.1
cattgggtacctcgaggccggccggggcaaggaaaaagaataaagaaattggtccagtagccctcggacggggttctcctggattgaattcacaaaacaactgtttgttattttcttctcccgttcacttctctttggcccgaaaccgagagctagtgcttgattcggtcgtttttgggcaccgaacacgttcttgggaccgccgccgccgccctacttccagtcccagctgctcaggtctccatcggcctcgagccctttgccggcgacgagcactcacaacaccagttttgtaagaggggatctgtaccagtcaggctgagcagcagcagcagtggtgtgttctggcttgtgtgggacctagaggaagcttacacaacagggaagagtattgtgttagggtgtaacaatgtcttcttcaatggaatcgtcataccttcctgctacaactgagtcattagcccaagctcaagaggctaaggatgcttcagagtccatttcaatcctttaccgtgtcattcaggacccatcttcttctgctgatgcactgagaacaaaagaagttgcaattacaaatcttacaaactacctcactaaagaaaacagagctgaggagctgcgtaatcttttgacccagctcagaccattttttgcagttattcctaaggcaaagactgcaaaaattgtccgtggaataattgatgctgtcgccaagatacctggaacatcagatcttcagatttcactctgcaaggaaatggtagaatggacccgtgcagagaagcgtactttcctccggcagcgtgtggaggcaaggttggcagctctcctgttagagaatcaggagtatactgaagcccttaccctgcttactagtcttatcaaggaagtcaggagacttgatgacaagttacttcttgtggacattgaccttttggaaagcaaacttcacttctccctgagaaatctgccaaaggccaaagcctccttaactgctgctagaacagcagcaaatgccatttatgttccacctgctcagcaaggcactattgatctccagagtggaatcctccatgctgaagaaaaggattacaagactgcttacagctacttctttgaagcatttgaagctttcagtgcactggaggacccgaaggccatctttagcctgaagtacatgctcttgtgtaagataatggttaaccaagctgacgatgttgcaggaataatctcgtctaaggctggcctaaaatatctgggtcctgatgttgatgctatgaaggctgttgctgatgcatactctaaaagatctctcaagtattttgaaactgcccttcgtgattataagtcccagctggaggaggaccctattgtccacaggcatctttcttctctgtatgatacactgctggagcagaatctctgcaggttgattgagccctactcaagggtggagattgcgcatatagcagagatgattgaattgccgattgaccatgttgagaagaagctgtcgcagatgatccttgacaagaaatttgctgggacactagatcaaggtgctggctgcctcattatctttgaggatcccaagacggaggaaatcttccctgccactctcgaaaccatttcgaatgtcgggaaggttgtggacagcctttacgtgaggtcggccaagatcatggcttgaaagcagctagtcttacctgtttgctctgatttcatttccagtctgtcgatgtcctcagacatttattccttcaatattgacagtttattgtgaccgctacatgttcatgtgaccaaaggctagctatttttacgactgaatgagttatgcatgtattggtcttttaatatcagcgtgcagagtcggacggatgttattgtgtgttaattaatctaccatgttatcgaaaaaaaaaaaaaaaaaaaaaaaaaaaaaaaaaaaaaaaaaaaaaaaaaaaaaaaaaaaaaaaaaaaaaaaaaaaaaaaaaaaaaaaaaaaaaaaaaaaaaaaaaaaaaaaaaaaaaaaaaaaaaaaaaaaaaaagggggggccccttttaaggaaccaaattttcttacccgggtttgggaaggtatatttttttttttggggccccaaaattcatttccctggccggggttttaaaaagtggggatggggaaaacccgggggtcccccaaattaaatgccttggaaaaaaacccctttttcccagggggggaatataaaaaaaggccccccccgatcccccttccaaaacatggcccccccctaatgggaaaagggccccccctttttcacggtcattaagcggggggggggggggggtttccccccaggggccctttcttttggcag

SEQ ID NO: 86058 - DNA, 1228 bp, Zea mays
  unsure (1)..(1228): unsure at all n locations
  Clone ID: MRT4577_178495C.1
ccgaaaccgagatctagtgcttgattcggtcgtttttgggcaccaaacacgttcttgggaccgccgccgccgccctacttccagtcccagctgctcaggtctccatcggcctcgagccctttgccggcgacgagcactcacaacaccagatgcagccccataaaggtccctacccttgtcccccggcgctattggttcccctcgcggacgcggaagaagcacaaaagaagtagagcgcccccgcccttgcccccgtgctcgccgcctgcctcccgcgccctgcttggctcttgtacggcgttgatcctgcggtgaggaagccttcccacttcggtattgatgccaacttcattggtccatgctgcacaccgcccctcatgagtgcacaccaccagctaccttgaatgtactccgacaaccctcgttgactatgttgttttcggtcagccttgccctcctccccatgtccttgttcatccttctcttctttatgttccttaggatttggagaacttttttcacgaaatatttagggagtgtttggtttaaagaatcaatccattctagatgaggtggtgtattatgagtacattccacaaatttggtggaatgaactcattcctcacttattactaattattagcctatgaggaatgaaatagtgatggatcaactcattccattccacaaaccaaacaagaaagtgaggagtgagaaaatgatggactacctcattcctcaaaccaaacacgctattagatttagcttacttctctattcaattcttttctttgttttcctctagggcttggagaaattttcacgagatatttagatcttgtgtacttctctattcaattgttgtcttttattgaatgttgtatgtgccatgccaaaaatatttttcgataaatatttgttgtaaagaatgattagctgggttacgtactggacattttgatccatgtcaccggtgtccctccccctttcatacgtctgatcccaacctttcccaaaccctaacgatttgtgttcagttttgtaagaggggatctgtaccagtcaggctgagcagcagcagcagtggtgtgttctggcttgtgtgggacctagaggaagcttacacaacagggaagagtattgtgttaggtgagttagaaagtaatggaatgcatgcagtgactcacctagaggaagattatttatttatttatttacgtatcanaaa

SEQ ID NO: 86059 - DNA, 236 bp, Zea mays
  Clone ID: MRT4577_178496C.1
cgcaacaagcacgcgtgctttccttgttgtctgccaaacgcggtcccccaaaccaaacaagggcacacaccaacaaagggcgggcccaaatgaggcaaacagctgcatccacttggttacccagcccgcaccccgaagcacaaaaacaacgccgggccccgaacagcccggccctttggacacaaaggaaagaacccaagaccggaaccccaacccaggccccggccccagggggg

SEQ ID NO: 86060 - DNA, 282 bp, Zea mays
  Clone ID: MRT4577_178497C.1
aaggcaaccaatccatctggactcgtggggaagtttcgatctcgcccgggtcgacttacgaaggttctaggaacgttcctccgtccgtccggagaaggagcaagcaggaggcggtgatgatccaggttggtctcaacgaccgactggctataaaagggcagctcaagtgcaacgatgacgacaccatcggagacctcaagaaagctggcgttgtgcatacggtgacgcgccccgagaagatccgcatccagatgtgctacaacatctacacggaccacatta

SEQ ID NO: 86061 - DNA, 605 bp, Zea mays
  unsure (1)..(605): unsure at all n locations
  Clone ID: MRT4577_178498C.1
gncggccgggtcgaatacaggaacagatgatgatgaagtttccttctcatatataaacggccgaaggagctacctaagcgcttcaacaggcgaggcgtccgacggcatgctctgagtctgaggctgtgcagcaggatcacctggtgcggcaggaagcgaagaagtgacacagaagctgacgagggacgcgctgatggagccgatctcggcggcgcccgagaacgcctcatcagcatgcgcaccactgtcgaagaccactagagagaagaagccccccaagtaagtagctagctaggcctctctgaactggagtccgaggtcagccagatgcaagatgagctgaagaaggccaaggagcaacttaggtcagccagctgcaagaatgcctggggtcaaaggacatggagctcaacgagtccaaggttcgcaaggcgtcgctccaactccaggaactagcgcgctcgctgtggaggagcaggtagacaaaactagcaggaagcatgatcgtctttggctggtatatacttgaatggaccttgtgttgaggagcagctgcctattctgtaccttacactaccaaaaaaaaaaaaaaaaaaggcccccta

SEQ ID NO: 86062 - DNA, 471 bp, Zea mays
  Clone ID: MRT4577_178499C.1
ttcagatctcccattcaatgcagcgcacgtgtcaaggaagggggacacgaaggaagatgcggctcacgatcgggaagctcttcagccagctcttcacccagatcgagatgaagatcctcatggtcggcctcaacgccggccgtaaaaccaccatgctatacaagctcatgctcgggcagatcgtcaccaccatccccaccatcagtctcaccgttgaaactgatgagtacactaacattagcttcaccgtctgcgatgctggcggtcaggacaagatcaaacctatgagcaggccttacttgcagaacacccagcgtatcatccattgtgtgaacagcaatgaccgcaaccgtgacggtgaacccagagatgaactccacaagatgctgcacaaggatcagctacatgatgctctgctgcttgctgttcgccaacgagcaagacctccccaatgacctgactgctgccgag

SEQ ID NO: 86063 - DNA, 363 bp, Zea mays
  Clone ID: MRT4577_17849C.1
agtcagttaccaggaaagcatcaaaactacactaccactttcatggaaaaccgggacacttgcgattttttttcaataaatgacatgcaagtcattgggccaaaaaggggctacatgccctggtagttttttacacgcttggcgaaggcagcaacacgcctgcacagagacgtgcaaaaattgtgagcgagaatttatggacggaactggagtttctttgattcaaaacacagggggtagcaactgctctctgggtgggttataataaactcgaggcatgagtatgcatgtgacttctattccgacagattttggggaggggaatacatcttcttccttgagagctcggggatcggaaggcct

SEQ ID NO: 86064 - DNA, 264 bp, Zea mays
  Clone ID: MRT4577_1784C.1
aagctgggatcctttaaagcggccccaccggggccgtttaattcctttttcattatgaggttaccaggcttaagttatcagttgcaaaattcatgacccttgttcaaaatgtataatgcttacccctttatgcccttaaaaatgaatgcatccgaactcatctgtttaaattactcgatgcatatcttcagggggagtacattattatgttgtgattatgaaaaaactatagcttaatcttactaatctcatatcatgctcttg

SEQ ID NO: 86065 - DNA, 374 bp, Zea mays
  unsure (1)..(374): unsure at all n locations
  Clone ID: MRT4577_178500C.1
tccttaccctttttctcataaccccaaccacaaaaaaacaccaaattgtactttttataaggtttttcgttttncacaccccaaaaaaagggagnttttttttaaccaaaacccctcttataaaaaaacaaagtccctccctttcccccggaaacaaaaaacaaccctcccgggcttccccaacccccaattccccccccccccacattcccccgatgcttgaggtccaacaaaacccttttttttttttccccattgccttgcttgaatgcacaaattccaacctcccatccgtgcttttcaaaccaacaatttaaaattccccgtttttaaccccttcaggtttttaaaccccccccttttggcttttttcc

SEQ ID NO: 86066 - DNA, 478 bp, Zea mays
  Clone ID: MRT4577_178501C.1
ataaacaaggctcagatctcagtcgcctgcgccgtcgcttcgttcgtgtgcaggccagaagataggatatggcggtgaccgatgcagtgctcctgaggatggatgaccccctcctccacatctccgccggcgtcgatgacgccttcctgacaaaaaatgacatcaaaatgacacaatgctattctcgctggacagaaaaacttgcctatgaatgaaaagttgactagaaagcaccaatgatgaatatattgcccgagaactcccccataactctattcaggttgcccaatggatgcattcgaactctctggcgcaaccatgtacatgatatgcattgtaaacgacaacatcgtcgagaaaatgaataacaacgctcaagatgtacgagctactgatcattactacaacgatgacactgctcctactgacacatgtgctgtatgtcgttgttgccggtgaaatgtccttgattgccaat

SEQ ID NO: 86067 - DNA, 257 bp, Zea mays
  Clone ID: MRT4577_178502C.1
gaaacgtgaggggatgtctgatattaatgagctgtacagtgagaaggaaaggctgagggatcttcggcactgggtctcatataggggacagacattatcacgtactgtgagaggaatgatgtactattatgaagctctcaagatgctgacctttttggattctgcctctgaacatgatttaaagactggatcaagggagttagctactatgggttcctcaagaattggatcctcaaggcatgacggagttgctggtg

SEQ ID NO: 86068 - DNA, 387 bp, Zea mays
  Clone ID: MRT4577_178503C.1
agtgaaactccttcgcacatcatcttccactgcccgtttgcacgccaattttggagctccatcggattctctgtcgctgatgatctgggcacccaggacctgccaaacatcagtcgccctgatcgccttccgggtgcagaattcaactcctttgtcctcctctgctgctggcaattgtggaaacgcaaaaatggtgtcggattccgtcaggatcatgccactcttgtgaccactttgcattcatgcgcttctgaagcaaaagcttgggcgttcaggcacaacaggaaagaagcacaagtattaggtgcttggctgttggcgttttctaatcctattatgtaatctcatcattgctttcgcccccctgaactatgctagctacaatgc

SEQ ID NO: 86069 - DNA, 346 bp, Zea mays
  Clone ID: MRT4577_178504C.1
gagcaaaaaaaggggcccataatattatgccccccccggtaaactgcggggttttttggcgactgaacaaggcatacccattttatcttttttaaaaaaactaactggaaaaggcccaaggggaatttcaaaattgccgaactaaaaaccctgtgaacaaaattaacccctgttttcggctaaaaggggaacaaggtgtttttcattaaacgccacaccctatttacacacacccgcgtgaattaggttaaaaacgaccaacgatgcttaaaagtagccactttggaaaatcggaccaagggcttttgccgtcagtcttggaaaaaaggaatgaatccgccccctt

SEQ ID NO: 86070 - DNA, 447 bp, Zea mays
  unsure (1)..(447): unsure at all n locations
  Clone ID: MRT4577_178505C.1
aatggtattgtgattatatggcaataaaattttgaactgaatatccacattttttgtataggaaaagaaccattacatcactaggtcaccgtagcagaaggtaataatagtacataatacaaacatgataacatggaatgcaaaaggtacaggatttctacaactaagccatctgtttctaacatgagtagaagaaatgacaggacaggtaaacaaacctctgcagagactgcaactgcatcaaaccagtggtcacatttcaaggcctgcagaagtggccgtagacgggtatcaaaattggagaccactgcagttttaacaccagctttcctcanagctttgaatacattttcagcatcagggtcacaaagcttcgaggcctancangcataataatcttctcgttagtcgagttgaagtcagagacaacgaaagaatgttgttttg

SEQ ID NO: 86071 - DNA, 645 bp, Zea mays
  Clone ID: MRT4577_178506C.1
gtggattcagtcagcatcgacgccatactcgagtaacacctggacgatgttggcgtggccttggccatactcgagtaacacctggacgatgttggcgtggccttggccgacgacgaggtcgagcagcgtgcggtcagactcgtctatggcgtctgcaacacgtcattcgggctctctgtggttgagcacctccttgagctcctcgaccgcgctgtcctcgacaacaagctgcgtggccacagatgctcctacaaagctcgccctgattccattgtccacaaacaacttcttcgtcctcgttgagaaccactccaggttgactgagcccaccgttgtcatgggttccttcgccacgacgccggctgcgaccacgctgtgcagcaaggacacctcctcacctcgatttcctcctcctcgtgacatcatcaccaactactctcccaccatcctttgcatccaacaagaggattgcaatagcctatctcctggctgcagtatgtgaaatctggctcaagggagacgacgatgtagattctgggtatggtttgctgaggagataccgctaccaactgtttgtaggattggtcctctctatagcgtactctattcttctgtatggcatatacgttccagactgtgagtacc

SEQ ID NO: 86072 - DNA, 407 bp, Zea mays
  Clone ID: MRT4577_178507C.1
attcggctcgaggtttactgtgtggtttattcgatgtagaacaaagtttagattggtgatgatgtaaaccgtccaatattgatactgcgttcttacactgctgtagtcaattatatgaataatttcatataagcatgttgccctagtggattttacctaaaaaaaaaaaaaaaaaaaaaaaaaaaaaaaaaaaaaaaaaaaaaaaaaaaaaaaaaaaaaaaaaaagaaaaaaaaagaaaaataaagaacttgaaaaaactcatatgtctgacgctaattgggattaggaaacaaacaagtaatccaggtttgcaaatgactagcttttttgagtacgatacctatttcactgtgacctattacatccccaatgttgaatcatatgaacacccctaagcccgttaagg

SEQ ID NO: 86073 - DNA, 286 bp, Zea mays
  Clone ID: MRT4577_178508C.1
ctggctgctactcatgtaccgattcttgttgagtacagagaggatccgtggtcccacactgaggttcacctaagaaggattcttatgcgacttgtatcccgtcaaggcaccaacactggtcaccgagtacggcgggctatacatgatctgcttatgctgacccacatgtatgatctgctggcactggctatactactgcgcgacaacctggacgtcatgatgagtcacgtaaacaaaccagttaccgcgcaaatggattaccttatgacagagagccactgttaca

SEQ ID NO: 86074 - DNA, 424 bp, Zea mays
  unsure (1)..(424): unsure at all n locations
  Clone ID: MRT4577_178509C.1
ngcctccgatcaaaccctaagcaggaagtcgatttatgcgctgcaggcatgagtaagtcgcactctgagtctgccaaggatgccatctctcagattgtgggggatgccatggagaagaatacgaagttcactgagactgtgcaacttcagatcggactgaacaattattatccacagaaggacatgcgtttcagtggctctgttaagttgccacatatccttcgtcccaagatgaaggtgagcatgctcggtgacgcccagcatgtataggaggccgctaagatgctacttgactacattgatgttgaggctctcaagaaaatgaacaagaacaagaagctagctaagaggcttgccaagatgtaccatgctttcttggcatgaaaggccatcatcaagcagatttcccgtctacttggttctg

SEQ ID NO: 86075 - DNA, 262 bp, Zea mays
  Clone ID: MRT4577_17850C.1
gtcacagtgactactgcctctacacgcgctctgaggatgagctgcggggacaaccagacgtcacctgggaccgcacctccgaccgcgcacaaggagctgcgcaatgtcgccgagcaagctgaccaggagaccaagaaggagctcacggcggattagcagatacctagacatgtgcctcgtacatctcaccatatactgtacgtatgataggctcaagatctagctccatgatcagcgaatcacatctgcaacaaatacaaaa

SEQ ID NO: 86076 - DNA, 464 bp, Zea mays
  Clone ID: MRT4577_178510C.1
caccgtccgggacgcgcggaaaaaaaaaaaaaaaacaaaaaaaaaccaaaatttttttcatacataagcaccaaactctttggggagtgggttaataacgcgacaattttccctaaccactcacaagctcccataccttccattttttccccataccttacatcaattataactccagtatgtgaaaacccatctacttcaaccatatatgctaaaacacgcactttccccaagcaacatacctttatcgacctccgcgtttcaacaattgccagccctatcaaaagggccgccactggtaccaaccataacagcacaacagcttgaacaactaatgctacctgccatcaaccaagtaattaaggcaaacctttctccctactatccgcaacaacaccttcttacattcaaccaaccctatcacactgaaccctgctgtttattcgcagctacaactattacca

SEQ ID NO: 86077 - DNA, 1344 bp, Zea mays
  unsure (1)..(1344): unsure at all n locations
  Clone ID: MRT4577_178511C.1
gttngagnaggcgcttcacagccatcaagcgagtgaaagaaatcttctgggtatactgtttcacaaccacctgaagagcaggaaatattgggctgtcagggtctttagaaaggccaagggatgatcctacttctatcaggtcatcccaaaattatgtgtccaagagcgatcctgaaggcttatcaaacttcggaattgaaggaatgtcgcctgaacttgtcaaaactgccactgatatgattggctcaatgaaaccagaggagcttcagaaaatgttcgaagttgcttcttcattgaatagcactagctccgctggtccaaatctgggacccaatatgccagaaatgtctcctgatatgcttaagatggcatctgacatgattgctagtatgcctcctgatgacgtacagaaaatgatgagttttgcttctcagatgggtgggcctggtggtgcccccaggagttcagagaatattaactttggaccttcagtgagagctacaacgagtaattctgcccgtggatcatcatctcaacctgttttggagaaccctgatgaactatcagatgaccaaaggatgagccagtcatcctctagtcttccaccttctacagctgatatgcaagaaaccatgaggaattctatgaaagaccctgcaatgcggcagatgcttacatccatgatgaagaacatgagccccgagatgatggcaaatatgagcgagcagtttggaatgaaactgtcaaaggaggatgccgcaaaagctcaacaagccatgtcgtcattatctccagaggatttggatagaatgatgagatggatggagcgagcacagaaaggggtagaagtcgcgaagaagacaaagaactggctcttgggccggcaaggcttgatccttgctattgtcatgctgatcctagctttcatccttcatcagtttgggtttatcggcagatgatgggggtgacttgggtggctgcatcagcatggaaatagattattcgatggcgatgcagagttccctcttgctaacaactgcttaaaagcgctttgggggaaggccggattacgagaattctttgtatccgtatcttatgaaagtgtaactctgtccataaagctatttcatcctatttttaccagcaaaggtagtagaaaggaatcgagccgaaactgttgtgataacaagacgacatgtaatatgataatatccttgtggtgctttcagttttaagtagcagttttgtttaataaagcatatgcaaaggtgaagtggaacaaagtacatgcgcacacagaaactaactggaagatagcatcttcaattcttttaaannaaaaat

SEQ ID NO: 86078 - DNA, 182 bp, Zea mays
  Clone ID: MRT4577_178512C.1
ccgaatcttgctcgagagaaacaaactcctattatcactgatccgaaaactactttttctcttagaagttcactagatgatatatattaatattacacacatatttagaaatcgatataaatcctttcgtgatattgttccttgcacggagcgttatcataatatatgcttcacgtgctcac

SEQ ID NO: 86079 - DNA, 326 bp, Zea mays
  Clone ID: MRT4577_178513C.1
cccacgcgtacgggcggcgcctacattctgcgctgcgccatcggcaactcgctgaccgaggagcggcacgtccgggaggcgtggacgtggtgcaagagcacgccaccgctatcctgtctggcgcgaccgagacggcgcgcacgaacgggctgacggttcgccaggcgcactgtgacacggaggccaatagcagcgacgtgcccacgccccaggaatcttttgctctttggtagacgacggacggcctatgaatctgaaataagaccaatacgtggtgtggcaatcaggaatgccatttagatataagcgggcacatccgctcaaac

SEQ ID NO: 86080 - DNA, 212 bp, Zea mays
  unsure (1)..(212): unsure at all n locations
  Clone ID: MRT4577_178514C.1
ggcatttgtgttcatacttcaacggaagttccactagtgtngctttttaaatcgggtcgtggggtttataacccacgatcgatgttgagttccatgtccaggaattcttacgcatgtcggaacccccctattcaaccctcctacatcagtgcttttgcttgcccttggaaaagggggtggcgtcacttatactcgtctgcctcctgttgccc

SEQ ID NO: 86081 - DNA, 1536 bp, Zea mays
  Clone ID: MRT4577_178515C.1
ggatgagaaactgctccatgctaaaatgtttataaagacgctccatgctaaaattcagtatttctacacagttggtgacattgatgcttgatgagaattataactcaaactgaattcagataactgaacttgacaatttagcattacagtgacctcggaactcggatgggaacccgcctggttaccacctgcggagaggatttagttccagagctcaacaaatgatcatctgatgatcttgtggtcaccgagtgtcctctttccattcaataaaatgttgtgtgtaaccttgcagcagaaccactgattcagagttaattgacttcctttcgcttgtcaccggaagcaccaaggaactccttagcctttagtccagcttgaaccatgatgttgagcacatgagaagaacacctcacatggaggtgttcaccactgaaaaacatctggctgcccaaagcatctcgcatatctttcattgctctattgtttacaagtatttgcaaaccgccttctctttcccatctattagctctgaatcaacatgatcccacactttagcccttctttttgttgatctgcttgattggtcagttgagatagcctcgtccatttctggagctgatgataccccctccatggcctaggctgcaaaatcaccaattgaaaccattcaattgattaatttacgcgatgaaatgcatagtactagcactgtttaacgactgattaatttacgggtgtcttttttgtttaatcccttttagtcatctaaaaaggaactatagactaaaacagtttagtactgcaatttataaaataaatgagactaaaatagagcaacttttcgaaccataataacatcgcaaaccaagccatactttaaaaaaggctgctatcatttaatggctatttccctgagatgggtcgtcgttcagggatagtaatagaatgaaaggaggcattcagagcgaactgcatgcgggaatgcctgtggtggtctatggaagctgcatataattagcacaaaaaaatcccaggtggcgctaaagcaccctataattagcacaaaaaaatcccattttgcgagacaattttataagaaaaatgcctttatgtgtgtacagggctactgtaggctacactaatgcatctagaattctagatccacggtgcaactttcctaaacctctttcagttggtgtactcctcctccgaacattctgcagagatactatagcagtacgccgcctttaccttttcatactactacagaatacagtatgcaggtagtaagtagtacggcgctggcgggagtgcggcggccggcaggaagaggaagggcgcggcagtggtccgacctgcgtccgcgaacctcttgagaggcacgaatacgatggggcgctccccggcgccgcgcgccacctagatcagcctgacgccgcccgcggcctcggaggcgggacgcggaggagccgccacgacgcgccggcggatcttagagtaggccagcacgccgccgcggatcttggagtagat

SEQ ID NO: 86082 - DNA, 357 bp, Zea mays
  unsure (1)..(357): unsure at all n locations
  Clone ID: MRT4577_178516C.1
cactcctatagggcgattggngttctcgagggcggcctgattccctgaactgattgaaccagtgaaggtgaagaaaaccgtgtgctagcactgcttctgctgctagtttgctatgtgcgtgtggctgctagtgctactgtgctagttaagaagtaagattatttggtattttggtttaatcaattatttccttggttagtaggttagttgataaaattaaattttatgtttatagagataagatcgatggattccttatcaagaatcagaacgatatgtattgattattgtatttgtagaattcgtatcaatactacatgttttttgagcaaaaaaaaaaaaaaaaaaggggcggcc

SEQ ID NO: 86083 - DNA, 345 bp, Zea mays
  unsure (1)..(345): unsure at all n locations
  Clone ID: MRT4577_178517C.1
ggcgctacacaggcaggaagtgaacaagagggtgacacaaatcacgaaccagattgaggcttctgcaccagatctgtgagagaaaatctcaccgagaggatggctaanctctctggtggtgttgctgtctttctggtngcgcgctctgtcgggggcggggctcttgtttttgaaattgcgggttgggggtgccctgggtgctgcttcggcngctgtcgtggtaggtctcgttgcttgtggtggctgttcccttttgtggcttgcatcngctgttgttgcttttttggagacccttgtggtcgntgttctganggttggtgcttgttttgnngggggttcttgggc

SEQ ID NO: 86084 - DNA, 621 bp, Zea mays
  Clone ID: MRT4577_178518C.1
cgggccgggacatttcacgctattgggtcctcagacacttaggtgaatacacttcagagcgcaacacataactgcccagaaaccataagcggtgtccgttagtcgctgtcactatcctggctgtcgatcagagcagcttgttcaccatacaaacgcgcgctgcgagtgccacgcacctgcttctgctctgccatcgtggcatacgcatcctcacactggcggctgacctgcaatctacgagggatatgccagcggcggatgagctgccggcgactgtcgcacgctgccagcgccgcgccatgtgctgcgcctccgtcatgacgctgcagctgcaggccgctaccatagtgaagcgcctggggctgagcctcatgatcatgcacatgaactacctttacaacaggcggatccaacgccacggcatgtaccggacagactccggggcaggcggactgcccgcatggaacagtgccgtcggttgcatgcgacatggcggcactgcgtggcatgccggctactaggttcaatgaggacgctcactgcggcggcgactctcctgtggagtgcacgcagtgcctgcaccacatgcaggacggggacatcttcggcttggtcctccag

SEQ ID NO: 86085 - DNA, 383 bp, Zea mays
  unsure (1)..(383): unsure at all n locations
  Clone ID: MRT4577_178519C.1
acnaataatagcaaagtggtgattcatcccgtntgaatcaatccttgccaaataaaccctggccttgcccttccgttcctcgtccccaattcccaacaacccccccttcggctccggaaaacaaaaccaattcccaatggaaataaaaaaggtcccctgccccgtcctcgcggcggcggcctcggccaccgtggtcccccgccgccgaggcccggcgcccgccccaacagcgcctcctcggccgcgttccggccgtcgcccgtgctggccctccgtgctctccttcttcgcctactacctgcagtaaaattaaaggaaggtcngacggagatgctgctggctgccattgcctgtattcggttggattccgtttatatatatat

SEQ ID NO: 86086 - DNA, 493 bp, Zea mays
  Clone ID: MRT4577_17851C.1
tttttttggaagggttttttcgtttgtatcctgttgtcacatttgcacgcgcattgcgccttcgcacgccgcgccggtcgtgttcgtccatcgtcgagagaatgcagcagcggttgcgcgtctgcatccgtcgagtgaggacggcatggccgtcacgctgcggtctgcgcgtcgacggtgtcgggtagtcgcagcagagtcgatcgcagacgacgtttaggcatcagcctcctcctcctcgttgttgttggggaagttgaagtagcggaggaagtagccgttcttcgagcgcgcgatgacgcggatgtagtcgcggaggagctgcttcttgagaaacttcttggtgaggtacttgaggtaacgcttcgagatggggatcttcgacgggacggtcagctgcgcggcatcacgggggatcgggatcgagtcaccgaggacacccaccttaccctcgatcttgatgcggtcctgcaggaacttctcgaatgcggcg

SEQ ID NO: 86087 - DNA, 232 bp, Zea mays
  Clone ID: MRT4577_178520C.1
gcacgagatcactggctcccacttcatctccatcctgtagtaactctttgatattaaattcatggtgaagaaattacccttctaggtgaatattgtccgggatgtaaaatgctacttctatatccatgtccacatgcagctgctgaacctcctcctcggaaacatgaccaaagcttccttcttcatcgaagatctaaatatcatcattatcttcaggaaaaggagggttata

SEQ ID NO: 86088 - DNA, 554 bp, Zea mays
  Clone ID: MRT4577_178521C.1
cctttctattttttcacacacacagatgcccctcccgggtggcagggtaaaacagtacttgtcccgccccacgtcgcagcgccgtgtccctctcgccttcttccccaccccacccgggcacccacgcgctcgtcttctcatgcatgggggcggcgtacgggacagccaagagtggcgttggcgtggcgtccatgggtgtcatgcgcccagagctcgtcatgaagtccatcgtgcccgtggtcatggctggtgtgctcggtatctacggcctcatcatcgccgtcatcatcagcactgggatcaaccccaaggccaagccatactacctctttgacggctatgcccacctggcgtctggccttggctggggtcttggtgggcttgctggcaggcatggccattggcatcgttggtgatgctggtggcagggcgaacgctcagcagccaaaggtggttgggggcatgatcctcatccttatttttgctggagcgcttggcctctacggtctcatcggcggcattatcctctcgtcccgtggcgggcagtcccgcgc

SEQ ID NO: 86089 - DNA, 763 bp, Zea mays
  Clone ID: MRT4577_178522C.1
caggccggccgggagcgcttcaagatcagagtcggaaggccaatcccgtgcagtggtgcgaaacctcgagcgctcgcgtaggtgaccataacaaagaggaagccgcggtagcactggtagcggcagcagtaagggggagatgtcgtcggcgttcagcggcgatgagaccgcccctttcttcggcttccttggcgcctccgctgcgctcgtcttctcatgcatgggggcggcgtacgggacagccaagagtggcgtcggcgtggcgtccatgggtgtcatgcgcccagagctcgtcatgaagtccatcgtgcccacctgtcgtctggccttgcctgtggtcttgctgggcttgctgcaggcatggccattggcatcgttggtgatgctggtgtcagggcgaacgctcagcagccgaagttgtttgttggcatgatcctcatccttatttttgctgaagcacttgccctctatggtctcatcgtcggcattatcctctcgtctcgtgccggccagtcccgcgcagattagaggcacgtttcagatgtcaacaccgtgccgccgacagttgcctggtcgtagctgggttatgttctatatccatgagacaagaagctggagcactttgactctttgagaggcttacttttatgctgtctagttttccatcttctgttgagtcgagaaaacaagaaaggctgtgtagccaagggatgacttttacccttgtgccattcttttagaaaaaaaaaaaaaaaaagcgggc

SEQ ID NO: 86090 - DNA, 1167 bp, Zea mays
  Clone ID: MRT4577_178523C.1
atcctttctattttttccacacacagatgcccctcccgggtggcagggtaaaacagtacttgtcccgccccacgtcgcagcgccgtgtccctctcgccttcttccccaccccaccctaccctggcacccacgcgctcttcagatcagatcggcaagtccaatcccgagcagaggtgcgaaacctcgagcgctcgcgccggtgtccatttcaaagaggaagccgcggtagcactggtagcggcagcagtaagggggagatgtcgtcggcgttcagcggcgatgagaccgcccctttcttcggcttccttggcgcctccgctgcgctcgtcttctcatgcatgggggcggcgtacgggacagccaagagtggcgttggcgtggcgtccatgggtgtcatgcgcccagagctcgtcatgaagtccatcgtgcccgtggtcatggctggtgtgctcggtatctacggcctcatcatcgccgtcatcatcagcactgggatcaaccccaaggccaagccatactacctctttgacggctatgcccacctgtcgtctggccttgcctgtggtcttgctgggcttgctgcaggcatggccattggcatcgttggtgatgctggtgtcagggcgaacgctcagcagccgaagttgtttgttggcatgatcctcatccttatttttgctgaagcacttgccctctatggtctcatcgtcggcattatcctctcgtctcgtgccggccagtcccgcgcagattagaggcacgtttcagatgtcaacaccgtgccgccgacagttgcctggtcgtagctgggtcatgttctatatccatgagacaagaagctggagcactttgactctttgagaggcttacttttatgctgtctagttttccatcttctgttgagtcgagaaaacaagaaaggctgtgtagccaagggatgacttttacccttgtgccattcttttccctgtcgtggtggggggtgggttgcggttgatgcttatttatgcacagtttttgcttgggtcggggctggggctgggacgttggtgtaatgtggtgaataagcgagtgcatgcaacgcaattggaacttaagacatttttggtaaaatactctttcgtattctgttctctgttctatgaatattggtaatatgcgtggctc

SEQ ID NO: 86091 - DNA, 1083 bp, Zea mays
  Clone ID: MRT4577_178524C.1
ccggccgggagcgccgtgtccctctcgccttcttccccaccccaccctggcacccacacgctcttcagatcagatcggcaaggccaatcccgagcagtggtgcgaaacctcgagcgctcgcgccggtgaccataacaaagaggaagccgcggtagcactggtagcggcagcagtaagggggagatgtcgtcggcgttcagcggcgatgagaccgcccctttcttcggcttccttggcgcctccgctgcgctcgtcttctcatgcatgggggcggcgtacgggacagccaagagtggcgttggcgtggcgtccatgggtgtcatgcgcccagagctcgtcatgaagtccatcgtgcccgtggtcatggctggtgtgctcggtatctacggcctcatcatcgccgtcatcatcagcactgggatcaaccccaaggccaagccatactacctctttgacggctatgcccacctgtcgtctggccttgcctgtggtcttgctgggcttgctgcaggcatggccattggcatcgttggtgatgctggtgtcagggcgaacgctcagcagccaaagttgtttgtgggcatgatcctcatccttatttttgctgaagcgcttgccctctacggtctcatcgtcggcattatcctctcgtcccgtgccggccagtcccgcgcagattagaggcacgtttcagatgtcaacaccgtgccgccgacagttgcctggtcgtagctgggtcatgttctatatccatgagacaagaagctggagcactttgagaggcttacttttatgctgtctagttttccatcttctgttgagtcgagaaaacaagaaaggctgtgtagccaagggatgacttttacccttgtgccattcttttccctgtcgtggtggggggtgggttgcggttgatgcttatttatgcacagtttttgcttgggtcggggctggggctggggctgggacgttggtgtaatgtggtgaataagcgagtgcatgcaacgcaattggaacttaagacacttttggtaaaacactctttcgtattcaaaaaaaaaaaaaaaaaactcgaggaggggc

SEQ ID NO: 86092 - DNA, 1110 bp, Zea mays
  Clone ID: MRT4577_178525C.1
cactcctaagggcgattgggtatgccggggccggccggaatatactaatccacctctttgtctgatgatgggacgggcacccggcccagcccggcccgcttttttcgctttgctctagtcgtctgctccgcccctgggtgctcgacagtttaacaacctgcatttcttgagttagtatcgcccgccttgcgaagacgcgcagagaatcatgccggcgacggtggccatcacgttggacctgggatgctgccgctgcaaaaccaagatccacaagatcctctgctgcctccaacaacggtgcgggttcgtcttcgacaaggtggtgtacgacaaggacaaggtgctggtttcggggaccttcgacgccatggacctcgtctgcaagctccgctgcaaggccggacatttcgcaaccaaaatcgagattgtgcccccgcccccgccgccgccgcagcagaaaaaggatccaccaccagcacaaacggcgcctgcagctgccgtggggagcccccaacagcccgtagtaacgagcaacaggcccgatccgccaccaacgtgcacaaaagcgctcatcccgtacccatgcccgtacccgtatccgtacccgctcccgtgcccaagtccacagccgcgctcctgccactgccactcctgcaagccgccgccatgcccgacaccaccaccaccaccaccacggccgtgtccgacaccaccaccgccaccactgccatgtccgccacctgtgtccgtgtgcaagtgcccagcatggacaccgtgccagtgccgcggccacccgtgggtcgtctgctgcgaggagaacctacagcccgacggcccctgcgctgtcatgtaactgcaaactgctgctgcagaggcgggcgggcggcgacggcagcgggttgttgcaactgcaacctctcatgtcgaccctgccatttcatatgcatgtgtgctagtgcataaaagatcagtgaaagcgtcccccgagatgcacggctgcttctgcatgcagttgccattcatcagctgcagacctgactcgagtgtgcgtgcatgtgtccttgttgttgttgtacatgaaaaaaaaagaataaatttatacgttttgtc

SEQ ID NO: 86093 - DNA, 406 bp, Zea mays
  Clone ID: MRT4577_178526C.1
ctcgaggccggccgggccgggattcatcatcgtacagataggcttgttcctactcctgtaccatcctggctcaaacctttctcctttctctcaattccttcgcccggtcgtcgctacactcctacgactaaatcatgaggtaccgcatttccatacacatcgcggcacgccggtatactgcccactaaatcgtgctgcgagctgaaccgcctcgagcaggtcatccaatctgaagtccacaggtccggcgacaacaccattgccagagttgatgatgctgagcaacatcttattaagtgatactgatgctcgtcaatacgagcccccgtgctagtctctggtgaccttgatacatactgtccttgaagagacgacaagtagaagctacctacagatcctccacgct

SEQ ID NO: 86094 - DNA, 540 bp, Zea mays
  Clone ID: MRT4577_178527C.1
actctttgttcaccatactcgctagtcgttacggtgatgtctaagatgctccggcgcagcctcgtggtcctcgtcctcctagccgtaggcgtcgcggacactgggtgcgccacgtccctcagcggtagcggagttcgacctgctgcccaagtacggcctcccgaatagggctcatcccggactccgtctcctcctacagcttagacgagggcacgggcgcctgcgagatacacgtcgcgagcaccttacgtccactgtcggataccacctagtacactacgagaggaccttatacggtaagctctacaggggggggatctatgacctctgcggtgccgaggaacaataagatcttcctctgggtctacataaaggagatagtcgagcaccccctacaggggaccatcgagttacaggacggattcgggtctgagtcgctataagcctccatggttgacgaagcgcgcacctgaggatccaggggtggcgcagcaaatgcgaggagcggctggggtcatcagagagattgtgatgctcccc

SEQ ID NO: 86095 - DNA, 1020 bp, Zea mays
  Clone ID: MRT4577_178528C.1
gttgtgggggtggtttttttttttttttttggtttttttttttttttaaaaaaaaaaacatgacagataaaattgaccatccgcttacactagatccttcaccttcaccgtctatgaagagaaactcgcatcaagagcaaacacaccctgtcactagggtacatatgtaaaacctcttcctactgatttgatccattacgcgactcgcactgagagttgatccgagtttcgccaattccaacacacgagctccttccagcaccgtccgggctatgatattgcaatgctgcccagaaatccatatttcgtatcagaagtggcgacttttgaaaagacaaaattgacaagctgtttcaagaggccacgggggtccgccagttacttatgcgcagacagcgtcctgggtggccttagagttcatcagaagagcgacgataagaccgtaaagacccaagacttcggcgaaaataagaatcagaatcattccgacgaaaagacgaggttgttgagcagttcctcggacaccggcatcaccaacgataccaatggcaaatccagcagcaagaccagcgagaccgacagacagaccagcaccgaactggatgaaaccagtgtagagaggaaggtcttgtcgcagaccatcggagatgaggacggagacgaccagaccgtagataccaatgataccagccataatgacgggtacaatgttcttgacgatcagatcaggacggaggacacccatagcagcgataccaacaccagacttggcggtaccgtatgaggcacccagacaggtgaagacgatggcacaggtgcaacccatggcgccaaagaagggcgcgtagacggggcaaagttcggtggccattgtgacgatgggggatgagctaagaagcgatttgttacaaggttcgaaaagaagagtcgcagctgatgctcgtgagaagcttccgaaggcgggtagaggcgcgagggacgacggagtcgatgagttggtctgcaggcgcttgatagctg

SEQ ID NO: 86096 - DNA, 780 bp, Zea mays
  Clone ID: MRT4577_178529C.1
atggcgaatcccttacaaacaggagctcatcgagcgctcgctcgccttcgaaccggacaccgagatccatggcaaactccctcgcgtcctcaacttcctccacatcgacagacacgcgctaagaacgtgtgggtttccttcctgttgccggtctacagcagcaagccatatgcctcgtctccaacaccgtgcacaacaagctccatttcccatgtcgagccacttcctccagaagcagcagcaacctcgacacgtctgtgtcccgtgcgctatcctgatctacgcagcctcgattgcgatggcgtcaaaacacgaaaagaaagtgaagtaaaaagggactcatatgtttcttatgttgttggaattgcggattcaagtgatgaatgcttttggtgtcccaaaaaggttgagactatttttgttagtcttccagtattatgcttagctaaggaacatgttgtgttgctgtctaaaatctgtacgatagatgttgaacatgtggatgtaaaggattttgctttggaactactccctaagatgtggaggacttatcctgaagacgatggagtgatcaagtggatatttgtccagcggatgtcatctaacaaaaacactaacctagtgttggattccaagaaagccctggcatctaattcccatggttctaagagttgtttggaaacaattgctgtatttatccttgattacctttatttatccctatctgttgaggacttgttctcaaatgcttcaagaacaaggcaacatagaaaatgttaa

SEQ ID NO: 86097 - DNA, 182 bp, Zea mays
  Clone ID: MRT4577_17852C.1
tgcagcaggctgcaggcgtgaatcgtggcgctacagctcatgggtgaagaagacaattgacggtgaccttcttcctcctcctccacttagcctccttctcttgcagcttggagtatctgaatcccaatgtacatgtgttcgcaccacatcaaagggacaccaaagaactcgaccgccggcca

SEQ ID NO: 86098 - DNA, 280 bp, Zea mays
  unsure (1)..(280): unsure at all n locations
  Clone ID: MRT4577_178530C.1
cgtccgatgcagatctttgcaaagacactcactgacttgtttatcaccctacaaaaccaatctacgccgtccgtttacaatatcaangccaccatccatcacaaacaatacattccacccaaccaaaaaacgcctcatcttctccctcaatcatctataagatttccgcaccctatcaccttacatcattcacaatgacatcactcttcaccttttgctacatcttattcctaccatgcataattttcctaatacattaactaacaataccatcaccctt

SEQ ID NO: 86099 - DNA, 356 bp, Zea mays
  Clone ID: MRT4577_178531C.1
atctgccttcggcacttccaggggttttttctgcgccttacgctatacccaaattttaaacatcgcatgaaaaatctccaacaaaacttagacactggtaaatcgtattgtacctaccaatgtatataaaatttcacacaaatcgcctaaaacttaaaacatgacatagtttataagacaaactccgactggataactctcatagttacaggtaaacttacaccccaaacccaaataaatatgataaaatttatgccgtgaatggcttcactcgcaatcataacactcacctggacaccaatccttcttaagcaggccgaatacataactcacagtggtaaatttactcttgaaga

SEQ ID NO: 86100 - DNA, 297 bp, Zea mays
  Clone ID: MRT4577_178532C.1
ccgaccaggtacttattcgctattcgcctgtattcagccttgaaccgaggacaccgtccacacgtccgatgcattctgaatcaaccaacatccctaaccgctcacggcgcctcgacaggcgacaggccgcacggcgctctgacctttcaacctgccagttgtcacttaacatagaacttggcccccgctcatgactcctgtccccactacagactacaattcgggcggggaggcctctcaattttgaatgttgcctgctccctcgtcgctcctcgggtcttggtgaatccttgctag

SEQ ID NO: 86101 - DNA, 1913 bp, Zea mays
  Clone ID: MRT4577_178533C.1
cccggggcccccccctcttgtccattgaaatcgatggttttttttttttggatcagaacatctggcgctattgctggaagaccacttggcaaccaaatattccaatccattataatatatacaaataaggggacttgctctcattatcctttttttcctcccccgacccatatatattggctatctacaaatatctatctattgtatagtttcaatgtccgctggcagctatgagccccaccccccacctagattagattacatacaaccctctaatgtacaaaattctcagctgtgaatcgagcgaggaggttcattcatatgatgctcaagacccctcctggaaggtcagtgaccgcgagagcgcagctgggttcccctgcaagaacggcaagccgctgatggctgccgagtgaggagttgccgtccttgccgcctcttcgttctgctcaaaaacccttgcgagcttgcagcctctgccgccatctttgcctgccttgtcgccgccgatcccgattagcgacaggatagagctcctggccacctcgtccacgtcgtcgatccggatcgtcttgggcacccacaccttgccatttcctttggcgcctccttcctcgtcgcggtctctagggtgctttcctggcgtgaagcagatgttggacttggtggatgctgctggagaggcggaggtaatggatgagcccgtctcggactggccggagtgaggcggccatgcgccactccaagctcctggaaccatgcaaccccagtaggcagcagcagcagcagctgccgggtagaacgggattgcgatgctgcctgggccgtaacaggcagaggccggtactggtggcgcgcagctaaatggccacatggccaccccgttcgtcatgcatggatgctgaacaactctcgcggatttatctgctgtaacattctccttccggtccgggtcttctgccttggcagaaggtccttgagtgcgagacccaactgagcgctcgtcccccgctatcgggacgagcttctccttgagctgtttcatctgctccgtgaggtctaagctggacatggcagagccgaagctgagcaccgtgccgttagtcttggctgccgcgcagacgagcgggtcgacgggcagaccggccctgaccctctggaggaagtgggaagtggccgacgcgctcttgctcttgcgccggcctgcgcccacgggcacgttgcgcatggcaccgccggcagtccagtacctctggcagttcttgcagaagtggcgcggctggttgatgttgtagttgttgtagtagcagaacttggtgtccatgctgttgcaccgcgggcacggcaggatcttgtcgggcttcttgagcttctcctttgggttgcccgcctcgccctgctgtttgtctgccgacgagtcttcggtgtccgcgacctcctgctgcggaggcgagcctgtggagtcctgaacgttgttctcttgccctttcggatcagtcgtgccgctgccgctgccgccgctttgttggatgtccttggcagcctcgccgacggcggccgtctccggcacggggatggtcttcccgaacagcttgatgaggccgtctcctgctctgccctcccccatctctagctcccttcctctaggcttcccttctctttggaaactgcttgtcgcctgccgcgtgcgatctcgacctttttttttgttggagcgatggagcagccttcttttaccgcaccatcaccacagctgcgcacacaagaaacaacgcggcggcggcggcgatcggtctgcactccaggtccaggaattagattttatctctctggagtctggatggacggaagcgtgggcgatcgatggatggatcgatcgggatcggccggccccggccggcctcgaggtaccc

SEQ ID NO: 86102 - DNA, 2710 bp, Zea mays
  Clone ID: MRT4577_178534C.1
ccgtccggggaaccgcgaaccagcagcatcctattgcctccaatcctcctacttcactggctcactctcgtctcggtttacaaagcctccgccgccgcaagtccactccacccgttgtccaggttagttggttggtttcaatttcgagttcaccgagcgacagcttgcgcctgccatttctcggctccgcgtgccggagcttgttcatctccagcttctccggccgttactcgctctgaaccgacgacagtatccctccggcgacgatgccttcccgatcggattccgactccctgctggtgcgcgccgagggcatgcgcgacgcggcgctggactaccacggccgccccgccgaccgcggcgccaccggcggctggaggtcggcgctcttcatcatagtggtggagatcgcggaacggttcacgttctacggcgtgtcggcgaacctgatcaactacctgactggcccgctcggggagggcaccgcggcggcggcggcggccatcaacgcctggaacggggtggcgcagctgctgccgctgctgggcggggccctcgcggacaagtggctcggccgctaacgcagcatcggcagcggagccggggggcacacctcatcacattcccatccccgtcatctgccacacaagccgttcatctttctcacgttcgtccgtgttggtgctcttcttctctcgcaaagttttgtgtcctgagccatggctgccaagctgactcgcctccacagcctcagggagcgccttggtgccaccttctcctcccaccccaatgagctcattgcactcttttccaggtatgttcaccagggcaaaggcatgctccagcgccaccagctgctcgctgagtttgacgaactgttcgaatccgacaaggagaagtatgcaccctttgaagacatcctccgtgctgcacaggaagcaattgtgctacccccatgggttgcacttgccatcaggcccaggcctggtgtctgggactacattcgggtgaatgttagtgaactcgctgttgaagagctgactgtttctgagtacttggcattcaaggaacagcttgttgatgagcatgccagcagcaagtttgtgcttgagcttgattttgagcctttcaacgcctccttcccgcgcccttccatgtccaagtccatcggaaacggggtgcagttccttaaccgtcacctgtcttccaagttgttccaggacaaggagagcctctacccactgctcaacttcctgaaagcccataactacaagggcacgacaatgatgttgaacgacagaattcagagccttcgtggcctccagtcagcccttaggaaggcagaagagtatctagttagcattcctgaagacactcccagctctgaattcaaccacaggttccaagagcttggcttggaaaaaggggttggggtgacacccgcaagcgggtacacgacaccatccatttgcttcttgaccttcttgaggcccctgatccggccagcttggagaagttccttggcaccattccgatgatgttcaatgttgtcatcctgtctccacatggatactttgctcaatccaatgtgttgggataccctgataccggtggccaggttgtgtacatcttagatcaagtccgggctttggagaatgagatgcttctgaggattaagcaacaaggccttgacataactcctaagatcctcattgtcaccaggttgttgcctgatgctgttggaactacatgtggccagcgccttgagaaggttattggaaccgagcacactgacattctccgtgttccatttagaactgagaatgggatcctccgtaagtggatctcgcgttttgatgtctggccgtacctggagacatacaccgaggatgttgcaaacgaactcatgagagaaatgcagaccaagcctgatttgatcattggcaactacagtgatggtaaccttgtggccactctacttgcccataaattgggagttacccagtgcaccattgcccatgccttggagaaaaccaagtaccccaactcagacatctacttggacaaattcgacagccagtatcacttttcatgccagttcacagctgacctgattgccatgaaccacactgatttcatcattaccagcacattccaggaaattgctggaagcaaggatagcgtgggccaatatgagtctcacattgctttcacccttcctgatctgtaccgggttgtccatgggattgacgtgtttgatcctaagttcaacatcgtctcccctggagcagacatgactgtctacttcccgtacactgagactgacaagaggctcaccgccttccactctgaaattgaggagctcctgtacagcgatgttgagaacgatgaacacaagtttgtgttgaaggacaggaacaagccaatcatcttttcaatggctcgtcttgaccgtgtgaagaacatgactggcttggttgagatgtacggcaagaatgcacatctgaaggatttggcaaaccttgtgattgttgctggtgaccatggcaaggagtccaaggatagggaggagcaggccgagttcaagaggatgtacagtctcattgaggagtacaagctgaagggccatatccgttggatctccgctcagatgaaccgtgttcgcaatggagagctgtaccgctacatctgtgacaccaagggtgcattt

SEQ ID NO: 86103 - DNA, 314 bp, Zea mays
  Clone ID: MRT4577_178535C.1
ttgtcgaggcaaaagcattgcgaccacagacagcgcgcgcttcaaggcctttttttttgagataacaaggaggagaggaggagatggcggtcacgatcacgtgggtgaaggcgaggcagatcttcgacagccgcggcaaccccaccgtcgaggtggacgtgggccttagcgacagcagttacgcaaggggggctcgtacccagtgggccatgcacttggaatatatgatgccttggagttgagggatgttttacttcttttttgacaactgaattttttagggcgaccgggtttgtttttttattatgtgtgct

SEQ ID NO: 86104 - DNA, 406 bp, Zea mays
  unsure (1)..(406): unsure at all n locations
  Clone ID: MRT4577_178536C.1
gcacacacacactatatccagatctacccccaatatccaccacgttggcaccgtcctgcttcaagatgcatgaatctttgatgaaaaccctngaccggcaagactatcacccntcgaggtggagtcgtctgacaccattgacaacgttaaggccaagatccaggacaaggagggcatccccccagaccagcagcggctcatcttcgctggcaaatagcttgaggacgggcgcacgcttggtgactaaacatcccgcaggagagaatcctgccactcccgctccgcttcagcccaggaacgcagatgtttgctacgccctgaccttctgcattaggcccctggatcagttcttcttcggttgggtgggcgacaagttggggcgctaatacgtgtacggcatgaccct

SEQ ID NO: 86105 - DNA, 323 bp, Zea mays
  Clone ID: MRT4577_178537C.1
acatcgaaacatacctcttctgcttcttccacatcctcctaacacagctaccaccagatccccttcgcctgtgatcatctcctgccggagcgagaagtaccaccgtagggtctaatacgcctgacggaaaatcagaaaaggtacatgtcgcctaagcttccagaccgccgacgacaacaggatcaatatcagggtcctcgccggggccatcatcccacgccaactttccgcagcttcaaagcccgcaccaaaggctacagctcggacttcaacaactggcaatacgagttccacctgagttggaccctaatcagcagctactg

SEQ ID NO: 86106 - DNA, 370 bp, Zea mays
  Clone ID: MRT4577_178538C.1
ctttcttttttttttttttctttttttttctttttttgtggttgggttccatctttatttttctttttttaaaacccaaaaaagcccaaaaccttttggatttgagttgaactctccccccggtcaagagggtttatttaaatattttggggccgtccctcttttcctacaattgataaaaaaaaaggggctaacccccacaggggcctttacctttttgtgaaccataaaaaacacttgggggggggggggtctccctaaaaactaaaacccatctaattgattatacccgtttaacgttactccggtctttaaaaaacttcgtttccccagagctgggattaaaccaagttttgggcattgggggctt

SEQ ID NO: 86107 - DNA, 291 bp, Zea mays
  Clone ID: MRT4577_178539C.1
gatcgaactgatgatccctgttacattgatatattatgatcaccagctatttcccccagcagccaattgctaacacttccagaaactacgtaccccaatgaacgaaaaaggtaaaagtaatcacgatacacttattaattacacatgaaccactaatccatgcatgcatgcagcatgggctcaaaaacgcgatctgccggcccttgccaatcggtcttcttccccggatcacttgtgggcagcagcggctccgccgcggcccatgacggacgtgatcgccgcggccagcgc

SEQ ID NO: 86108 - DNA, 185 bp, Zea mays
  unsure (1)..(185): unsure at all n locations
  Clone ID: MRT4577_17853C.1
nntntnnnnntttttttttttttttttttttggagggggcaaagcattgagggagacaaaacaatnnccaagaacacccagccgcaatacaaaccatatacctctcaatgataaatacagctcacgcctagggaagcacagcaatcttgaactcaaattctgttgatgctatgtgccctctggtg

SEQ ID NO: 86109 - DNA, 323 bp, Zea mays
  Clone ID: MRT4577_178540C.1
ggaactcattgtagccccggcggtccacaactaatcccgctttaatttccatatcaagcatgggcgccagcgaaagggagccaaacacacttgaggggcaggccccatctgaagccgccgattcacacccaaagttgcgcccaaggacactccaatctcctgggaggctctaagctgatagaacagggaagcccagaatgtgacggtggagagagaccactgctgtggacgtcgtggagcataagcaggctaatgaggaggtcgctccataggcggccgttttcgagcccgagcacaaggaggaggacgccctggagaagacc

SEQ ID NO: 86110 - DNA, 247 bp, Zea mays
  unsure (1)..(247): unsure at all n locations
  Clone ID: MRT4577_178541C.1
tttttttttnnnnnnnnnnnnnnnnntaacacttcaataacaatattgagcttaacaagcaatccaatcttgggacaattttttctaaacaaacccttttgagttcaattcagccaggacaactatagtttcggatattataatagtacatacatagtacccaacatgggtaactaatttcgccgttctcttagcacttgatctccttaagaccatgagagaaatagaggaatgtcggattagtggc

SEQ ID NO: 86111 - DNA, 246 bp, Zea mays
  unsure (1)..(246): unsure at all n locations
  Clone ID: MRT4577_178542C.1
ccggttgcatccaccaaatggtggatattggatattgaaaagttggggtcacaatttttgttcccatagtcgtcacgattagccatctgtcaaagtactccctctcttcgttgaataaggtctattgtcatttttatcacacactgcggtatttagatgaataatacacaagcatttgaggattcaaatagaccaatcctgtgcaaatgttcgtactctgagaatatagcaccagagtgntacatc

SEQ ID NO: 86112 - DNA, 111 bp, Zea mays
  Clone ID: MRT4577_178543C.1
gccgttagtggttgtggtgcggggtcatttgcggcgtaggtgcctgttgctgagaacccagccccacagcagtggagtgcgaggactgccgcgttgctgcaaccagcaggg

SEQ ID NO: 86113 - DNA, 487 bp, Zea mays
  Clone ID: MRT4577_178544C.1
tcgccgtcgacgcctccgagcaaggggttgtcagagcgatggccaacgcttcagctgcgcagacggacggcgatacaatgccggacagtcccctgctgagcgacgacgtcagcgttgcgccgcagaaggccggcaaggtgcgcataaagatcctcttgaccgctctcagccacaccgaccagtacacctggagcgacaaggatcccaagggtctagttccttgcattcttgggcacgaaactgccgcaattgtcgaaagtgtcaggtgaaggaataactgatgtgcagtctgacgatcatgtcattgcttgctaccaagcaggacgcacagaatgcatgttttgcagagcggaaagaccaacctctgttgaaggcccgtcttgccacaggcgtaggtggcatgatgaatgatacgaacagcacggtctctgtaaatggaaagcccattcaccatttcatggggacatgaactttcagtcagtacact

SEQ ID NO: 86114 - DNA, 186 bp, Zea mays
  Clone ID: MRT4577_178545C.1
cacgtgccacgttatctctcttatatagtgacctctatatacattacagtgggcgtcgttacacaacgtcgactctgaaaaaactgtggcgtcacaaatcttaatcctcttgcaacacatccctttttcgacatgtggcataatcgcgaagaggcgcacacatatcgcttcttaaaacatgtgcac

SEQ ID NO: 86115 - DNA, 750 bp, Zea mays
  unsure (1)..(750): unsure at all n locations
  Clone ID: MRT4577_178546C.1
gccaaagccagcccatattagtcttagctattaagcatgcatctagatcgacattctctttcgaaacatcaactaaatagagtttgctgtctaatacacccttaaatgctaatgaaccatccctccttctaaagacagatacaccaacatttgtaaataaacaattgtagcccatgtgacacaattgacttacagacagtagattgtacccgagcgactctattaaaaatacatttgatactgagtgctcatttgtgatggctatctttcccaatcctttaaccttgccttggttcccatctccaaatatgatagtgtcctgggaatccatgttcttgacgtaggaggtgaacatcttcttctcctccgtcatgtggtttgtgcatccgctgtcgataatccagcttgagcccccgaatgcataaacctgcaaggtatttaagcttgggtcttaggtaccaaactcttgttgggtcctacaaggttagtcacaaccgtttttgcaacccatatgcaagtcttgtctcccttgcatttggatcccaatttcctagcaaatacttttgcatttttgcataaaagtacaaaggaagcactgcaagcatgatagacagtagtaggaccattgcaagttttcctaggcaccnatgagacacaacatgattacgcctagaccatttctaccatgtgcataagtagttcttgatgcaaacatagcatgtgaatcatgcgaacgctgggtcgaccggg

SEQ ID NO: 86116 - DNA, 306 bp, Zea mays
  Clone ID: MRT4577_178547C.1
ttaagttcggtgaggccatagtggatcaaggtcggctcccagatcttcatcgagggtgaactggactacctcgggaacccgagcctcatacacgcacatagcatcctcatcatatgagcctgccaggtcgtgctcatgggcgccgaacagggctaccgtatgaccagcggcccactcggctaggtaaggacccgctctatcccggaggatgttgaacctgctcgagctgccgactactccgaggcctacgctgagctctaggtgaaggagctcaagaacggccgactagccatgttctacatgttc

SEQ ID NO: 86117 - DNA, 145 bp, Zea mays
  Clone ID: MRT4577_178548C.1
gttcgcccacacgttcgcggacgcgttggttcgagttcatggggcagggggaccattaccgagtagtttaaaaaatgctagttgtattaccattggtagtgacttaattacccttacgcgaagaaccttaactctggtagggctt

SEQ ID NO: 86118 - DNA, 411 bp, Zea mays
  unsure (1)..(411): unsure at all n locations
  Clone ID: MRT4577_178549C.1
acgacttgtcctggcacatcaatntgtgggactatccgcagtctcaagcacttgcaaactcttcgagaggtgaaagccaacaaagatttggctaaaagtctcggttacctgacacaactaagaagcttaggaattactggagtcatacaaagccacaatgcagatctttgggcttctatcaggaagatgactgtccttaacaaactagctgtcgcaactcctggcgagagtaatgaagtgattagttttgaagagctgaggccgctcaagaacctggagaagttctacttgaccggcaagttggcagaagggaagctttttccagtattctaatggttttcagaaacttaaggtcctaacaatgcgctggtctaggctaacacacgaccccctaagttccttatggcaaat

SEQ ID NO: 86119 - DNA, 843 bp, Zea mays
  unsure (1)..(843): unsure at all n locations
  Clone ID: MRT4577_17854C.1
ngatctcgtaaacaacaataaacccatcgccgcacccaacccacccccacctccaccccctcaatcccgaagtggggaaactcggggggacattccggattcgttcccctccccgtagcgtgtggattggagttggagcactccgcccgaatcgccgcacattgcttcaggacggcattcgcaagaacagcgataggcagctgatgccgatctgatccgttggattctaggccatcacactacctgcatttttttcagtgtggtatcatggaagatgattcgtcatgggaagctcttccaattgagcgcatcagaattcccgcattcaactttcgagttatttcagaggctagcaatggagaaaatgaattgccagtttcattggatgccgcagttcctgatgacattctcgagaaaattttcaccttcttgccaatagcaagcatgataaggtcaacagcggtatgcaagagatggcatgatattatctactcaagccggtatctttggacccacatgttgcctcagaggccctggtacttcatgttcacctgtaacgagactgcttctggatatgcttatgaccccatcctccataaatggtatgatttagagcttcaaggcattgataggagcagctgtttcgtctcttcttcttgtgggctagtttgcttcatggataatgacaacagaaacatcatttctgtatctaaccctatttcaaaagattggaagaggctgttggagcccccaggtgcaaagtttccagattatagcactgttgccataaaggtagatcaggtgactcacaattacactggtacattggcaaaatcgaagcag

SEQ ID NO: 86120 - DNA, 162 bp, Zea mays
  Clone ID: MRT4577_178550C.1
acataatcataatccaaaagattaagattgtgatgtggcatggcaccaattctgtcctgaatttgatcatgaatgtgtaagagatgagagtacacctgctgacatatataaaacagaagggtcccgatattgaccatgagtaggcatcatacaaagatgatg

SEQ ID NO: 86121 - DNA, 320 bp, Zea mays
  unsure (1)..(320): unsure at all n locations
  Clone ID: MRT4577_178551C.1
cgtcacacacgcaaaccctgacccaagtcnttggccacgtctctcgctcccatcccagttgggtctcttctcgtggtggaggggagggcgactcggcggcgccccgccgggccagcaagcctcggcggttgcgggggtcgtggggaccgacgtggcagcttctggcacccagggggggggggtggtgccgcggcagcggcaggctgcggtcccgtcggtgttcgaattcgggtccgcggcggggtctggcgccgctgtgacgctcgccggcttctgccccgtttctgttgagcgtcggccgtgccgctgggggcttgtcc

SEQ ID NO: 86122 - DNA, 522 bp, Zea mays
  Clone ID: MRT4577_178552C.1
gggtacctcgaggccggccggggtatgcgctagctgccggcaggaaccttgcgggctctgctgctatctgactgaggagactgaaaacgatgacctgctgctggccaagaccaatcgaccatggctaccctgatgcagtttgcgaaaaatgagattcgttgtattctctctgctgacaagtgcttactgactggcacgcgactggaggggcatagaactgctaccgagcctttgctgttgagcttgcagatgccatccctgggtgcgagacctctatgggagggactacaataataggccgactttgtgctggaaccaagattgcacttgtattgtcagatactacaacacgaacttcagcttcacaatctgctgcactgcttgcctgatcgagtgcagcctgagagcacttgctgataggttatcggcccaatggcaagtgcatatcctgtcctagaccatgttgaacttagccaccctgaacttgccaatgatactgacgatatcgatgcacatgtgctc

SEQ ID NO: 86123 - DNA, 953 bp, Zea mays
  Clone ID: MRT4577_178553C.1
atgatcagcccactgtgagcaggttttccatgcctgttactcgtgcagagaaggaaatttaactcgtggtgattagttatgaactattaccatgatgataataacgttatcgatggagtattagtgtcgctacaatttcgtatcctgccagccgtagtgttgtgaaaaaagatatattttgccggccgggacgcgccggccgcgatcgcccctgcgattcctatcccaatcccgccgtcgctccggcggggacgatgagctactacaatccccacggccatggcggcgcgcccccgtcttcgccgtgcccctccccgtctccgcccccgccgcctccccaagggtacccaatggacccgtacgcggagcgcgggatggagcaccaccaccaccaccagtacgggccgcctccgccgcagccgatgtacgcgtcgccgtacgggcagccgccgccgccgccgccgatgtaccagcagccgtacggacagccggtgtacgcgtcgccgtacggccagccgccgccgccaccggcgatgtacccgccgccgtacgcgcagccgccgcctccgccaccacggaagaccggcgcatcgttcgcggaaggatgctgtgcagggtttgccgcaatctgttgctgctgcctcatggacgcgtgcttctgatcgtgtggtcgaccacaagcccaagaaacgacgtcttcctcctggcctgggtcagggtgcccatcagcgaggagatcaaccaccgcgttgagcagctggtggtagcctggcgccgtttgcatctctgcaccgggaacgaagctggagttgcacgtaaagctgacaaaagaagcaaccatgatcgactaacggctgtttttctacatgaggtggtttatcgttagtatattctataaattttgtgaaatgaacctattcctcatattattatattaataattattagtctat

SEQ ID NO: 86124 - DNA, 683 bp, Zea mays
  Clone ID: MRT4577_178554C.1
gacttcaacaccagacgaattattattaaaaaaatacactagatgaagatacaacttaaagagaaggccagttctgtccagctcgttgaaatttcacatcaaagtgaagaaatggttaaattcccctagaaatcggaaaaccttccaccggagttcgaacaggtgtggatgaatctaggactgtttaactccaaattctaaagtcaatcgttcaactattatactggatcctgactgaaatccacagcgactctttggttaatgctccatttcacatgagaaggcacaggacgggaagggtacgaacaatgaagggttacaggatcacagcactaaaacctacgactaacatattactatccttacctgatttcgcacaactcatggagaatccacgaaggtgagtaaactggtcaccaggatgaaaccagatagttagttctcagccaaccatagcggcgcagctttagtcaaagatctcttcactaggcctcagtctccaagtatcagacaccaaccacagagattccaaagcgaaaatttccagcctgtcttttctgcaaagtttcttctgtcagcaactgctacaaaaggcaatttcagaaagttcaagtcgatttggcaaattgtacacttttagcagattttccacttaaatcaagacaccacacaacttcgctaac

SEQ ID NO: 86125 - DNA, 410 bp, Zea mays
  Clone ID: MRT4577_178555C.1
acgccttccaagggttttggttattttggtttttatcactcaaggtcgtctgatgagggagcctgttgctagcaagaaaaaagggtcttccttactgccacttgcagctgtacaccaccgactgccaagtctttcacgccctaacaaatacactggtgcggggtaaacaatgagaagcttgctccactcatgacaatcatacactctttttcttctttttccaggactccggggccaaaacacacccttacgatgaacactcaaagcccttatgccttctaagaatccgaatttaatacctactctagggacgaacaacccttccacgaatcgatcgactcccaatccctaccctactgaaataacacccccttcccccaaggctgttttactccccattcccgacccta

SEQ ID NO: 86126 - DNA, 318 bp, Zea mays
  Clone ID: MRT4577_178556C.1
gttatatgccaaaatttgttttctgacatcatttaaagacacctgtttaattaatatagtggctggggatctaactccgcggaagagctttttctatacttatggtgtgaagtacactacaattccttatatgtaatcaactatcttccgacccccaagacaaaaaaaatacactgtctgttctaggagggtttttaatgatccatatattttaagtatctcctgctcttttcagccagcgcagcctttgtcttagtacttactaattgtccatacactgtatcatattctaattttagtctatgctttactctttta

SEQ ID NO: 86127 - DNA, 323 bp, Zea mays
  Clone ID: MRT4577_178557C.1
accggccgatccggtcgcccacgctcgtcgagaagactgaggaatactaccctctttaacccataagtcgaataagaagcagttttcatttggaatatatattggcaaggttatttcaatagacattacagatgagccatcacatgccatggggaggtcgaatgagaatctgtaactgataaacttattaaaaatagtaagtatatagtaaaaagttattgtagagaaaatgtaatcgaagtttatgccacttgattgtttaacgtggggaatctttgatgttcggggaggtaccactaagttcattgttgattttcatatat

SEQ ID NO: 86128 - DNA, 539 bp, Zea mays
  Clone ID: MRT4577_178558C.1
catcatcactggagtgatggttctgagcttggaaaagctgcctagaccagacaacaacccgagaagtactatattttggtcgtacaattactaaatcgactctggagacatcacttcgcgctcctgaaagtactagtaatttggtaattccacgcacatcagaggaaatgcttccacatcagagatatggtggctttagtctccttctagggagccttagtttttcttttaccaataatttcagatggcgctcagtgaagagatgtcacacatgagtctcaagacagacaaggatgctgccgacgagatgagctcaacttcgtcgtacggaagagaaatgccctaaatacacgttgggtctttggggttaacaatagcttaactgtttgtgatttcagcgtgtcaccgttggcttgacaccttttcccctttaactccatcaccaatgtcctgtcgatttattgatgatacctctctagaacgtatagtgattgattactttgagctatggaactatcccaaattctgggcttgttgtt

SEQ ID NO: 86129 - DNA, 585 bp, Zea mays
  Clone ID: MRT4577_178559C.1
caggccggccgggccgggtgcaggtgccgcggacgcacacgcacacaaacctgggctctgcctctagctcactccccgcgcgcaatggccaacgcagctccaactcccacgcaaacgaggcatgtctcgcggccgattcctacaggcctcgtgcccgtggccgtgcttgtcgccgccgccgccggcctcctcgcgctgctgccgtcgctggcccaggcggtgtgggaggtgccgcacctcttcctcctaggtgccgtcatctccttcggcgtcttcacccagagccagaggaacaacgacgccgacggcagtggcaatggcaacgccgccagcgccaaggacagcccactggcgtggaacgcgcggtaccaccccgacgacgaccccctcgtcgtggtcgaagatcacgcggtgccgcgcggcgacgacgacgacgacgacgggctggaaggcgcgcgggagaggccgctttccctgccggtgcggaggctgaagctgaagcccgcggctgcgtcgcagtcgcaggagtccgaaaccggcggcgatgccagtgacggtttcggtgaggagacggatagttgtgcg

SEQ ID NO: 86130 - DNA, 202 bp, Zea mays
  Clone ID: MRT4577_178560C.1
gtatgcaagtatcatccacagttgtctctgagttcaagacatactcaccaaccataccgtgtaaggtcaatgacgtactgtaaaaacgcacgcggtggtatttgtacattttatatgcatagggcaggcctcgaccgcaggctcggtgcgcagtaccggcattgcttttacattgcagaatgcgcactttgatactgtgcgc

SEQ ID NO: 86131 - DNA, 397 bp, Zea mays
  Clone ID: MRT4577_178561C.1
attgtgctcacacattcgattcttaggctgtaacaacagccaaactccaggactacatttacaaggatactgtgttttataagcctcatactgccgtatatattacaaacaagaacatactagcctcccgcctgtacataacattagggcaactgggataagtgactggctcaaatccgcctattgctcagggttgccggagaaggccttcatgagtcctgccaggcaacccttgctccgggtgaaggtaattaaccgtatccggtatctgtgcgctttaccgggaggatagctcgctttccataatgccccctttgataacccgggtgccgattgactccatttagtataagccggcgacctataggtcatgatttgacataccaggccttcttgc

SEQ ID NO: 86132 - DNA, 289 bp, Zea mays
  Clone ID: MRT4577_178562C.1
ttattttgagccagaggtgggtaactggccttatttgaggttcacatatatacctagcagaggaggcgagaccggatcggtcactatgtacatcacaaatataacaaccacactggagcacgccatggcgcttgattcagccgacttccagatatggccggcggaagtgacttacacgcttagggcccttattagacacagcggctgacatcattggcttaattcttacagttacattacagaccgtcatgttctttgccccggccccatctgcgcgttttcatactac

SEQ ID NO: 86133 - DNA, 283 bp, Zea mays
  unsure (1)..(283): unsure at all n locations
  Clone ID: MRT4577_178563C.1
gtgctggggcagctggatatggatatggggcctaactcttcaatttgattttgaaaatattgggcttgaaggtattggggttttccttcttgttaatggtgacaataatgaaacccaagttccacttgttcttgttaacaaaggggaccatccagcctaaaataaagaaccttgngccagtaaacctatatctgtatatgaaactgaaggttatgggcacagctctgtatatagctctgaacaactcttttgggggcgggaatgctctctatatacaaacccc

SEQ ID NO: 86134 - DNA, 1183 bp, Zea mays
  unsure (1)..(1183): unsure at all n locations
  Clone ID: MRT4577_178564C.1
ttgggctgccacaacccacaaggaggccagagaccaatcacagtcatcttctcccgttcacgtaacgtgcactagggtttatggtttagggcgaccgccgccgtcctacgtccagcggccaggttttcttctggccctctgcgctgactacaacccaccacctccgggttaggttttggatttggagacatggcggaagtggtggacaagctcaaggactacgatatcaagaaggagggagaagcagagatcctcctgcacaagaagaactccgtcttctttaatcccgtgcaggctttggccgctactgggttgcggtctctccggtatgcccgtgaagttgagggcttaggaaaggtagttgctctggacaatgataaagcttctattgaagattgcaaacgaaacataaagttcaatggtgcttccgctactagtaaggtggaagcttacttggttgatgctcgaattcacatgctgacgcatccaaaagaatttgatgtggttgatcttgacccttatggatcaccatctatatttctcgactcagctgtacaggctgttgctgatggtggtctattgatgtgcactgccactgatttggcagttctttgtggtaccaatggagaagtttgttacgcgaagtatggttcattcccaaccaagggcaagtattgccatgaaatggctttgagaattctccttgccagtattgagagccatgctaatcggtacaagcgatatattgtgcctgttctctctgttttcatggatttttatatccgtgtttttgttcgagtattcacttctgcaagtgaaataaagaatacacctcttaaactttcttacatatatcagtgtgttggctgtgattctttccatcttcaatgtcttgcaaggactgttcagaagaagaataatggtgtgaagcatgcacctgctattggacctgttgttcctcaggagtgcagtgactgtggaaagaaatttaatgtaggtggaccaatatggtcagctcctattcatgaccaagactgggagttacatgacgttccattgtttttcagtctccataacatagcaggcactgttaagtgcacatctccatctttggttacgtttcggtctgcagttctaanatgcagggtatcggatctcaagcacccatgttaacccacttggg

SEQ ID NO: 86135 - DNA, 2163 bp, Zea mays
  Clone ID: MRT4577_178565C.1
atggcggaagtggtggacaagctcaaggactacgatatcaagaaggagggagaagcagagatcctcctgcacaagaagaactccgtcttctttaatcccgtgcaggccaacatttttgcaccatacaacactaacctcagattcttagatcctacacgcaaaacgtctattggtgtcatcaaaagagtcatccgactcaaatgttgtatccctattctgtccattgaacgattggttcacaacagagacatgtccattgctgttttaaggacctttgttgccaagcgtaaggaagaacatgaagcgctggtggacaagaggaatacatcacataaaaaaaataaacaaagtgaaacatccaatcaaaatggagaggatgcgtcaactggccagcaagatgaaatggatgttgtttgtgaaaaggagctgaataaagctgaagatcaaattgatgatctgtcgaaagaagcaacagaaccttcttggaaagtaaccagagagcttaagccaccacttgttcttgaggctttggctgctactgggttgcggtctctccggtatgcccgtgaagttgagggcttaggaaaggtagttgctctggacaatgataaagcttctattgaagattgcaaacgaaacataaagttcaatggtgcttccgctactagtaaggtggaagcttacttggttgatgctcgaattcacatgctgacgcatccaaaagaatttgatgtgggtgtgggggttaccatttatatggtcatgtctttggctactgactctaaatctgaagtttctagtatttattatgcaagggtgaatcttgttcttggtataagtcaatggactgaaaagtcacatgttgatcttgacccttatggatcaccatctatatttctcgactcagctgtacaggctgttgctgatggtggtctattgatgtgcactgccactgatttggcagttctttgtggtaccaatggagaagtttgttacgcgaagtatggttcattcccaaccaagggcaagtattgccatgaaatggctttgagaattctccttgccagtattgagtgtgttggctgtgattctttccatcttcaatgtcttgcaaggactgttcagaagaagaataatggtgtgaagcatgcacctgctattggacctgttgttcctcaggagtgcagtgactgtggaaagaaatttaatgtaggtggaccaatatggtcagctcctattcatgaccaagactgggtactttctactttgacaggtgttaagtcaatgaaggatagataccctgcatatgataaaataacttcagttctaaatactatgtcagaggagttacatgacgttccattgtttttcagtctccataacatagcaggcactgttaagtgcacatctccatctttggttatgtttcggtctgcagttctaaatgcagggtatcggatctcaagcacccatgttaacccacttgggattaaatctgatgccccttgggatgttatttgggacatcatgcggtgctgggtgaagaatcatcctattaaggaacagccacgtgactcacctggcacggtgatcctttcaaaatcgccaaagctagaagcaaatttttcaagagcagttgctgccctcagcaaggctcagacaaataagattaaacgattccttccaaaccccgaacggcactggggtccgaaggtcagagcaggccggaagatcacgagcaaacatgtctctctgttgggccctgacgctatcaagggtgctgtgaacggtggtgactgccagaaagaaggaaacggtgctgagccagatagtacagcctcagaacccgaggggatcaaagacgctgaggatgagccctcaaacaaacgccaaaaaaccagcgacggcgaaccagcaagcgaaccttgatttgtttgtcaatctttcgcgtctccattgtgttgtgcctgtgcttttcttgtttgtaggtggtcgatggttatttataccacctgttggattttgaacgaacaaattgtggcaggtttttattaaacttttgttacaaaaaaaaaaaaaaaaaaggcccctagggccaaagacctattaaagcataatatatagtatagctttctacaaaaaaaaaaaaaaaaatttgcggcc

SEQ ID NO: 86136 - DNA, 1873 bp, Zea mays
  Clone ID: MRT4577_178566C.1
ctttgatacaacattctctccgttatatattgacactctcttggctttcctttttttatgggtgctctgtaagcagaagaataatggtgtgaagcatgcacctgcttttggacctgttgttcctcaagagtgcagtgattgtggaaagaaatttaatgtaggtgggccaatatggtcagctcctattcatgatcaagactgggtagtttctactttgacaggtgttaagtcaatgaaggatagatatcctgcgtatgataaaattacttcagttctaactactgtgtcagaggagctagatgacattccactgtttttcagtctccataacatagcaggcactggcaagtgcacgtctccgtctctggttatgttccggtccgcagttctaaatgcagggtatcggatctcaagcacctcagttaacccacttggggttaaatctgacgccccttgggatgttatttgggacatcatgcgctgctgggtgaagaaccatcctatcaaggaacaggcacgtgactcacctggcacggtgatcctttcaaaatcgccaaagctagaagcagacttttccagagcagttgctgccctcggcaaatctggggcaaagaagacgaaacgattccttccaaacccagagcggcactggggcccgaaggtcagagcaggccggaagatcacgagcaaacacgtctctctgttgggccctgatgccatcaacgctgccgtgaacggcggcggcggcggtgactgccacagagaagggagcggtgccgcgccagatagtagcaatacagccccagaacccgaggagctggaggacgaaccctcgaacaaacgccagaaagccagcggcgacggggaaccagaaggacagaaggccagcgacggggaaccggcaagcgaagcttgatctgtttggtagtcgttgttgtgcatgtcagcctgtgcttttgctcgtttttggaaatggaaacatcgttccgaccttttgcatttacatgcatacagccttacaactcaaaaaaaaaaaaaataaaaaaaaaataactactgtgtcagaggagctagatgacattccactgtttttcagtctccataacatagcaggcactgtcaagtgcacgtctccgtctctggttatgttccggtccgcagttctaaatgcagggtatcggatctcaagcacccatgttaacccacttggggttaaatctgacgccccttgggatgttatttgggacatcatgcgctgctgggtgaagaaccatcctatcaaggaacaggcacgtgactcacctggcacggtgatcctttcaaaatcgccaaagctagaagcagacttttccagagcagttgctgccctcggcaaatctggggcaaagaagacgaaacgattccttccaaacccagagcggcactggggcccgaaggtcagagcaggccggaagatcacgagcaaacacgtctctctgttgggccctgaggccatcaacgctgccgtgaacggcggcggcggcggtgactgccacagagaagggagcggtgccgcgccagatagtagtaatacagccccagaacccgaggggctggaggacgaaccctcgaacaaacgccagaaagccagcggcgacggggaaccagaaggacagaaggccagcgacggggaaccggcaagcgaagcttgatctgtttgggcagtcgttgttgtgcctgtcagcctgtgcttttgctcgttttgtggcccgatgggtattacctgttgaattttgatgcaacgaattttgcttggttttgttttacatgcatacagccttacaactcaattattacatcatcctgcagcaaaaaaaaaaaaaagggcggccgc

SEQ ID NO: 86137 - DNA, 3000 bp, Zea mays
  Clone ID: MRT4577_178567C.1
agaaaggccacattgggtgcacgggaggaggcctggggctgccccggccgggaaagatactgtggggactattccacaacccacaaggaggccagggaccaatcacagtcatcttctcccgttcacgtaacgtgcactagggtttatggtttagggcgaccgccgccgtcctacgtccagcggccaggttttcttctggccctctgcgctgactacaacccaccacctccgggttaggttttggatttggagacatggcggaagtggtggacaagctcaaggactacgatatcaagaaggagggagaagcagagatcctcctgcacaagaagaactccgtcttctttaatcccgtgcaggttcacaacagagacatgtccattgctgttttaaggacctttgttgccaagcgtaaggaagaacatgaagcgctggtggacaagaggaatacatcacataaaaaaaataaacaaagtgaaacatccaatcaaaatggagaggatgcgtcaactggccagcaagatgaaatggatgttgtttgtgaaaaggagctgaataaagctgaagatcaaattgatgatctgtcgaaagaagcaacagaaccttcttggaaagtaaccagagagcttaagccaccacttgttcttgaggctttggctgctactgggttgcggtctctccggtatgcccgtgaagttgagggcttaggaaaggtagttgctctggacaatgataaagcttctattgaagattgcaaacgaaacataaagttcaatggtgcttccgctactagtaaggtggaagcttacttggttgatgctcgaattcacatgctgacgcatccaaaagaatttgatgtggttgatcttgacccttatggatcaccatctatatttctcgactcagctgtacaggctgttgctgatggtggtctattgatgtgcactgccactgatttggcagttctttgtggtaccaatggagaagtttgttacgcgaagtatggttcattcccaaccaagggcaagtattgccatgaaatggctttgagaattctccttgccagtattgagagccatgctaatcggtacaagcgatatattgtgcctgttctctctgttttcatggatttttatatccgtgtttttgttcgagtattcacttctgcaagtgaaataaagaatacacctcttaaactttcttacatatatcagtgtgttggctgtgattctttccatcttcaatgtcttgcaaggactgttcagaagaagaataatggtgtgaagcatgcacctgctattggacctgttgttcctcaggagtgcagtgactgtggaaagaaatttaatgtaggtggaccaatatggtcagctcctattcatgaccaagactgggtactttctactttgacaggtgttaagtcaatgaaggatagataccctgcatatgataaaataacttcagttctaaatactatgtcagaggagttacatgacgttccattgtttttcagtctccataacatagcaggcactgttaagtgcacatctccatctttggttacgtttcggtctgcagttctaaatgcagggtatcggatctcaagcacccatgttaacccacttgggattaaatctgatgccccttgggatgttatttgggacatcatgcggtgctgggtgaagaatcatcctattaaggaacagccacgtgactcacctggcacggtgatcctttcaaaatcgccaaagctagaagcaaatttttcaagagcagttgctgccctcagaacggcggagactgccagaaaaacgattccttccaaaccccgaacggcaatggggtccgaaggtcagagcaggccggaagatcacgagcaaacatgtctctctgttggggcctgacgctatcaagggtgctgtgaacggtggtgactgccagaaagaaggaaacggtgctgagccagatagtacagcctcagaacccgaggggatcaaagacgttgaggatgagccctcaaacaaacgccaaaaaaccagcgacggcgaaccagcaagcgaaccttgatttgtttgtcaatctttcgcgtctccattgtgttgtgcctgtgcttttcttgtttgtaggtggtcgatggttatttataccacctgttggattttgatcgaacaaattgtggcaggtttttattaaacttttgttgcatgtgtgatgctcctcctagtcacagagggaaaagacctattaaagcataatatatagtataactttctgcaaaaaaaaaaaaaaaaaaaaaaaaaaaaacccaccctcctcaaagttatgtgtgttttggatgggggtaaagtgttccatagtagattttgacccgtaatttctcttgcaatttattgtcacttgcgccgggcaatataatcttaaaagcactttgaatacaaatttattggtgcaactttgtatgcactaaacattcatataatttatcgaattgttgttcaaaattaagtttgactttccctactcatgccttgtattgatgcctgagtatcatattgtcattctcatgactgttaaaatcctatcaatttctaatactattttgtatcaccaactccagtttttttatgctttagtagataggctaattaaaagataacgcttggaagatttttaaagaaaggccaatgttttgatgacctattaatcatggtttactgctcaagtcatagaaacaatgtaggggattccaaattatagttcattttagctttgtcttaaccttctaactttgagttttgacccggctgttagagaaatatattaagatctataagttcaaataaataaactatcaaaacgcattccatggagaatttaataaaccaattagacatggtagatattggtgtatctttctataaaattgcttattcgtttcccactcagggcttgttggtttcaccgttgatccatgtggatcaggaggtattgagtctgttt

SEQ ID NO: 86138 - DNA, 632 bp, Zea mays
  unsure (1)..(632): unsure at all n locations
  Clone ID: MRT4577_178568C.1
tatccaccttacccctccccggccgcgccgcctcccgccgcctacccgtcggtgtccgccccggcttccgcgcccccgtactcgtcgtaccccgcggacttcgcccccgcgccttcgtaccccgcgtacccgcccgccgacctcccccactacgcgccgccgccggctgcgcccgcgcccccgcagccgtactacccctacgagccggcgccggcgccaccgcaccgaggccgggctcgggatccgcgctgtttgatgactacgggaggtccattggctcagctgccgataggggtggccgtgggggtagcgcggccagccccaaggtggtgagggccgtgcccaaggcagagacgtcagaggacgtcaggggtggggtgcagaagttcagggtcaagctgctgccggagggcgctgggagccccatggatgtgctctgtcaggttggtctggatggaattcggatgcttgatcccaacactggtaggacactaagaatatatccccttgaaactgtaactagatgcgatgtattagattcctctatttttgccttttggtccaagagttcggtggatgttgnaggaaaaagaataagggctgaaattaaacaggtatacatccaggaccat

SEQ ID NO: 86139 - DNA, 306 bp, Zea mays
  Clone ID: MRT4577_178569C.1
tgtgcggcgctcgaggcggccggtttccctgcagataactctgaagccgtgaatgtaaaagctatgcgtctgacgtgacctagaagccacatccatcaagcaacgattgatgttatctattgtagcttaccagcagtcttgtaacctgtcacctgtgttagaataaccgtagtagtgtatgtagcaacgtgtagcatatatccactaatgtctaattgcaccgtagtagaactgccctggatttaactagaacattgtatatacctggaataattggagcctgagtatcgaaccaggaattatccg

SEQ ID NO: 86140 - DNA, 432 bp, Zea mays
  Clone ID: MRT4577_17856C.1
cccacgcgtccgcccacgcgtccggagttgtttgccgtgggtataaatatcaacggctatatttctagaaaaaaaaaaaaaaaaaaaaaaaaaaaaaaaaaaaaaaaaaaaaaaaaaaaaaaaaaaaaaaaaaaaaaaaaaaaaaaaaaaaaaaaaaaaaaaaaaaaaaaaaaaaaaaaaaaaaaaaaacaaagcaacgcaacaacgaaacaaaaaaaatagcttaaaggcaataaaaaagtccaccgatttcgtcggcgggcacgtgaaggggaaggccgaaacccaccccaattcaattggataaacagccgaatgcctttccctttttgaagaaaaaagaaaaggcccgatcccccttcccaacaaaaaaacaacctaaaccgaaagggaaatggcaaatgaaccgcccctttaaattaaacataaagg

SEQ ID NO: 86141 - DNA, 1934 bp, Zea mays
  Clone ID: MRT4577_178570C.1
gcttcgtcccgtcgggtctccgacggcctcgtctttcccccccagccagcctcgcctcaccgactccccgatccggtccctcccttcgccagctatgcatccctcctccggcgcgggggactacgccccttactacccaccttacccctccccggccgcgccgcctcccgccgcctacccgtcggtgtccgccccggcttccgcgcccccgtactcgtcgtaccccgcggacttcgcccccgcgccttcgtaccccgcgtacccgcccgccgacctcccccactacgcgccgccgccggctgcgcccgcgcccccgcagccgtactacccctacgagccggcgccggcgccaccgctgccgccgtccccgcacaacccggttccctctccgtacccgtcgctggatcgggcggggagctacggctacggatccggccctggctccgggtacggccaggagctgtacccgcccaagccggcgggcgggtggtccgacgacggagcgtacgcttacaacggcggcgacgcgccggagccgtacgggtccaggggcaccgcaccgaggccgggctcgggatccgcgctgtttgatgactacgggaggtccattggctcagctgccgataggggtggccgtgggggtagcgcggccagccccaaggtggtgagggccgtgcccaaggcagagacatcagaggacgtcaggggtggggtgcagaagttcagggtcaagctgctgccggagggcgctgggagccccatggatgtgctctgtcaggttggtctggatggaattcggatgcttgatcccaacactggtaggacactaagaatatatccccttgaaactgtaactagatgcgatgtattagattcctctatttttgccttttggtccaagagttcagtggatgttgaaggaaaaagaataaggctgaaatcaaacagctatacatccaacaccattcttgacactgtcacagctgcgactgtgcagttcaaggagatgggtgaaagcagcatttcaagaagtagagcaattgctgatgcatccaagcccgctgagcagcaaaatgagaggaagaaaaatttccttgattggaggaatttaatgaagcctatgaatgaggagaaagatcactgggtcccagatgaagctgtcagcaagtgcacagcatgcgcagcagatttcagtgctttcaaccgcaggcatcactgtcgaaactgtggtgatattttctgcgataagtgcacccagggaagaactcctctgactacagatgcagatgctcaaccagttcgagtttgtgacagatgcatggctgaagtaacgcaaagacttaacaatgcaagggaagtggctaatcgacctattgttcacagccacgaggatcttgccaaaaaacttcaggaagccatggatataaataaaaggtcgtcttcaggaacaaggtcttcagatgtttctggcaagcggatgcgggaggtcgcatgcccaacctgcacggtccatcttcaggtcgaggttccagcttctggttcggagacgatagagtgcggcgtatgtcagaaccctttcctcgtcagcgcccgttgaaccgagttcagcggcttcaggcaccgtgcggcggagtcttctcggattcgcaagcgaagagtcggtcctgttcaatcgagcctggcgctgaattccggctatccctgtctgtctgtaccctaattctgcacggaagtctgtcactgcaagttgttagtaagttatatggatgagttgagtcgtttgcaagttgttagtacagttgtgagttgctttgagaagcaagcagggtcatgtgtttgtactgccaacaactaactttgctgttgttacatgagaaaaaaaaaaggtgtaaactttgctgttgctcaaaaaaaaaaaaaaaaaatttgcggcc

SEQ ID NO: 86142 - DNA, 428 bp, Zea mays
  Clone ID: MRT4577_178571C.1
gagccggccgggattccagtagctctgcaattgattggaagtagatacaataccgtgagttcagacttcaaacatgattcagatattttgttaactactccggtgtatacatattattatatatatggtgcactgtgatgtttttattaaattttcatagcatcatgtaagcaaaacaacttcatatatcattcaaaaaaaaaaaaaaaaaaaatgaagacccacgacggccagcacaagtgcccgtgatccatccaccgtggttcccagcatcagcagctttgccaaaaagacatgatacctacatatatataagagtacctagctgctgctgctctactaccttgttggttcattatattgtgcgcgtgcatgcatgaataaataaatgaacatattagggcaaaaaaaaaaaaaaaaaagcggcc

SEQ ID NO: 86143 - DNA, 542 bp, Zea mays
  unsure (1)..(542): unsure at all n locations
  Clone ID: MRT4577_178572C.1
tttttcttggaaactgnaccaggctggtcgcgccttgcgcgnagnntgcgttcgagcggcgcccaatgttattattggatttattggtaccaccgcgcccagcaaccagcgagaaaagaaaaggtaatagctctgtcacaccgggnaccccgatcaaccggnacgggacggggggcgcanngtctctgnnctgctcctggcctcnnnctgctatcggnacgtggtcggnnacgtgttggcaccccgcntnngtaccgcncnntcgtgcgngnncaacgacnngtggtcttaattgtctattncnngtgcccgcttgnnctcgcgccccgtcgnnccgtggccccccgtgcccctctcgtccgcttttccccccgtctcgcaccgcccgccggaagnncgggctttcctcgaagnntcctccattcctnngaacgccgnngccgccacggnnncgggtccccgcgcctcaaaggcgcagnnccgcttcttccctttcgcagnaagtccaagtacgngnncgtcgtcgcccccggtggtcgccg

SEQ ID NO: 86144 - DNA, 542 bp, Zea mays
  Clone ID: MRT4577_178573C.1
ctcgctccaagttctccagcactgcacattgcacttcactctctacagcagcgagaaaaaagacacagcaggacacgcagctctcatgctgcacatggtaggcaggggaaaaatcatctccatacgggcagcattcgtcgtctcagccgagcctggctcgatgcaggaaccttggttggccagagcgtctgaagtccagggaccgcgtcccaaagacagcagcgtcgagcagaagagtgacgtacattgataaaagaccggtactgcagtgccggaggatgagacaccgcaactcgtctcccgggggaccgagcggccggacacggcaatcacgcccgtgacgccatcagacggaggatccaactccccgactccgtgccaccgaggaggctgtaggtaccttacaacgccgtcacatggagggacactgcctttcccgtaccacgggggatccggatcccgttcctctccaacgtaaacctccaccggcggcggcccgtactgtgagtgtccgtccacccccggaagaggcgcgtacggag

SEQ ID NO: 86145 - DNA, 217 bp, Zea mays
  Clone ID: MRT4577_178574C.1
agcataatcaattactactgtggccgataataataattgtaataataatagtcaccacgtgacttcatgagtaccaaaagaaacagaaaattaacaaagcagaacctaaaaaaaaaaaaatagagggagggagaaggtttccagcttctacagacgcttgttaaaaagctgaagctccgacggtacattcaccacctccatcttcatcgggaggccc

SEQ ID NO: 86146 - DNA, 145 bp, Zea mays
  Clone ID: MRT4577_178575C.1
gcgcccacgcgtccgccgcaagttcgacaacatgtacatccgcaacctcgagcggggtggaggcctgctcagcacagacaaggcactgtgaacagacatactcactaagccgccggtgctaagctagtcattgaacgccacagtc

SEQ ID NO: 86147 - DNA, 364 bp, Zea mays
  Clone ID: MRT4577_178576C.1
cgccccttgttgatcgagagcggcggagggtggcttcttcttcttcttcttccatgtcaatggaggttcggagcagccgccaccaccaggaggaggcgaccggcaatctaatgaggccgggatcaggttcagactacccgccggtaatgcagcgaggaggggcacctgcggctgcggcgcaccggcggcagttccagcccattccagcgcccttcatgtcattcaggccgccgcttgctgacacgccggcgccccatcaccaggggcaactccggttccacggccacggcggacccaggccgtttcaccggccgccgccgccgccggggagcttcccaggtgccgcggatggcaccgcgtccac

SEQ ID NO: 86148 - DNA, 328 bp, Zea mays
  Clone ID: MRT4577_178577C.1
accttagggtgacagcgagacagaatgaacagtagtgatcttagcaaactttagtaggtggaactaacaccaacaccctttttttataaacgcgttcaaatgatattgtggtgctggccttacgaatacgtttattagggaatcaaagatatttgtgccttcctgcattcaattttcatgtgttctctcttggggaagtaccaccctatgggagacttccacgacactgatgaactaaactagagatacctgcctttttacaaaccttcagggtaactataggtagtgctcggtttctgcctgaaacgggaacacgctaacgattaac

SEQ ID NO: 86149 - DNA, 236 bp, Zea mays
  Clone ID: MRT4577_178578C.1
gcttacgtacactagtaccacacactacgccagaatgggataggtcgaggttccgagggatagagacagagacgaggacagggagggccaggccacggactcctcactccgctcttctccgctgatctgcctgaacgacgcaactgcagctgcacatgcactactcgccattccaaccacctattcactgcgcatatatctcagcacccacaacattgaagcactccctacacgtc

SEQ ID NO: 86150 - DNA, 1059 bp, Zea mays
  Clone ID: MRT4577_178579C.1
ggccgcaaattttttttttttttttttgcttttttttttttttttttttttttttttttttattcttcaaccgacagcatcatccaatttgaagaagtagaatgcagtcctaccgttattgattatgccgcagataaccaaaaccaacatgtaccttaactgagcatggagctaataatacatatttcctatttatcttcgtcccctttttcgggtggtcctgtcaaccatcctttggccacatacagaactcaacataaaattttgtctacaggtgtccacggcatcttgtattatatcttgagaaaaattggagtttccatggaaaatcctcccctttggctttagatcagcttcccagcagatagtttaggtctatctgctggcatctgcctcctccggtatcacagttaatgtcactgtcacattgttcgctcttttaacaagaactttaaatggtatcccgaccttgtcccccatgatatcaattatctgcagccaacactttattatcgtgtttgtgcaactaaaaggaaaaagaatacgatcttcctcttgaattgtgggtttgaaagaaaaggaatattgaaattagaaaaaacaaaaaaggacgagtccactactgcaattggttctaaccagctactttttcatggcgatattcaaatatgatattataacagggaaaagataaggaattctgccggtatagtaataataagtcatatagcacacatcactagtagttgtctttagttacctctttgatgctctcaactggtttgccaccaaattcgacaaccacatccccaggacgaaaccctgcttgttcagctggagatgctggtgtaaccataggaacaagcaccccttttcttacgtctggaaaagtacttgacttttctttgagctgtgcaatgatcatggggttcaggtcaagcatctttaaaccaagccatggccttacaactctcccatttttgttaaagttatctactattttaatgacagagtcaattggtactgcaaagctcagtcgacgcggccgcgaattcggaa

SEQ ID NO: 86151 - DNA, 1190 bp, Zea mays
  Clone ID: MRT4577_17857C.1
gagttagcatgttacaagaatacttagaataggttgccaatatagcaaataaacatcaatgggcaaattgtcccatatacaaaatacagaattagatgagtacaacaacggattgctccttagtataaactattgaaggctatacgatgaccaaaagaactattaaccagagcaaatgcaacattatgcttttcttcacgggagcggacgcagtagaatcagcaacgggtttgctaggagcaacacaatttcaatatatattggcagaatatttgtagaaatcccatgaacccgtgaatcagaagcaatatcaatcagagcagaaactgattaaccacctgataacctgaacttgagctatgatttcaagaacatcatcaacaagaaaaccatcctgaatctttgatagctccataaattttttccatccccaatcatgctccttcttccagaacctatgcaaagtatctgagtacttcatctttttaggatctatattggctacagctatagtgaactgtgcaaaatgactccatcctgggagaagtttgtcatgattagcaacgcaaaggaataatgaaagatgattagagacatcacatccttgagggtatacaagaatataccatttgtaaccaccagcttcaaatggctcacttttcatttctcttttcttctccttcgagaagttttcaatcctccaagtgtaacgtccaaacaattctgaaggcttggggccaggatcatcatcatcaccatcgctatcccagaagggtggggatgttgaaggggtgtcactgtctgcccgctcacaggacctccactcggagaaggactcgccagagagactgcgttcatcatccctcattccagttgtgctagcagctgaatcatctgttactgcagaacctgccatccacaaaatccacgaccgctccagacaaccttattcgcagctggtaggtcctcgtcaccagcgaaggggccgacgaagacctgggcacctggcgtaaggcggcggcggcggcggtcgcccagtcgtccccacgagagggagagagccagagagggcacgcggtgcggggtgagcgcctcgtgccgaattccgaaatagttatgtttaggtaggtaggcggtagctgtagcagtaacacactggttctcttcttgctctctcggaaccggccggc

SEQ ID NO: 86152 - DNA, 641 bp, Zea mays
  Clone ID: MRT4577_178580C.1
ccggccgggatcaccatcgcgacaccaattcacaaagtacttgaaagtctgacacgatgctgcgactactaccaccaagggagggccctgaagtctaactatgacgaggggtattactgcgtcagaggcggtgaggacggtggcgcccgtactcgcttcccgcggcacactacgacaacgcggacgaacgtatgaggaggcccgtgtacggaggtcgacaactgcggatacggcggcagcaacaaccaccagcaccatgaccaccactcccgccacggctcctcggctccagatatcagttccctataaggacatcaacacgtgcagcctgtggaggatcatgagcgtaggtagagtcttcgctcgacagtgctatctgatcacaactgcacaccgcatatccacgcccaatcatgactgcctagagcggttatgtctgacggtggatgtaactcgccttcatagttgtgtagtgaatgtacgcttaccaactcagatactggacgagtcaccatgatataatgcatgacctgaataaaacttcataggaatactactaactacatgactcttccaaattactcgatcactgactctctgcgttcagctgttgttctgtttagagaggtatcatttcactc

SEQ ID NO: 86153 - DNA, 135 bp, Zea mays
  Clone ID: MRT4577_178581C.1
accttagctatctcttacccatcctcatctatattcaaacttcattatgcaaacaatgcagtctacagtacaaaacagtaattttgggtaaatcatggatagactgctgtagacagttttataagaaacaacttt

SEQ ID NO: 86154 - DNA, 813 bp, Zea mays
  unsure (1)..(813): unsure at all n locations
  Clone ID: MRT4577_178583C.1
ngacccaagccatttcatggcaactctcttcccccccccccacacacccactccatgttccacacaagcacacactagcacaaggatcgttcggtcgttcttcgatcgttcgtccctctgttcttagtttgttcgttcgttcgtccgatcgttcatggttcgttcgtccgttcgtccgatcgttcgatcgttcgtccgttcgttcgtccaaataatctttttcatgccgttatgctgccgaaattccgatcattcgttcgtccgatcgtttgatcgttcgtccgatcgttcatggttcgttcgtccgttcatccgatcgttcgatcgttcgtccgttcgttcgtccaaataatctttttcctgccgttatgctgccgaaattccgatcgttcgttcgttcgttcgatcattcgatcgttcatcgttcgttcatagttcatatccatcgttcatcgttcgttcatacgaactattcaccatcactatttaccgttactatttaccgttactatttaccgttacttttatcgttactttttaccgttactttttaccattactattcaccgttactttttaccgttactttttaccgttactatttaccgttactttttaccgttactatttaccgttactttttaccgttactttttaccgttactgtttactgttactttttaccgttactttttaccgttactatttaccgttactttttaccgttactatttaccgttagtattcaccgttactattcatcgatcatccgatcaccccaaatttcaactactcantcatcatgctgtccag

SEQ ID NO: 86155 - DNA, 244 bp, Zea mays
  unsure (1)..(244): unsure at all n locations
  Clone ID: MRT4577_178584C.1
gtaggacgcacatnnnnccaatatgttcctcgtcatccgcgagtcattggtgcgggtaggcctggactaggggggcctctacctccttcactctcccgcttcctgcaactagaacaacaagccctcgctcgtgcgcatggaaggcctctctcacgccatataggagtgtcaccttattttctttgatcagtcctgcggcctaagcaacttctatgcggtcacgatgtccaggctgctcaacttc

SEQ ID NO: 86156 - DNA, 576 bp, Zea mays
  Clone ID: MRT4577_178585C.1
cgggtcgcggggcataaaaaaccatgaaaagtggggtcaaaccttttggcaaagggaaaaccttaaaccttttataattaaaacgggcggccccccttttcaacttttccctttataaaaaaaaaaaaaacttcctttcccccaaacacggggggggggggggaaaggaacccccctggagcccaaaaaaacccttggcccgggaggaccaaaaagggggccctacggcccccccatttttttttcctgaattcccccccccggcctgggggggttaaaaaccccgtttttatcaacaccccaaccctgaccaagggcaaacacctttgaagggccccctcttggggcgcgggtccccacaaaactgaaggttaccaacccaggggggaaaacccaaggcccccccccccactggggactttgggggaggcaacccaatgaaaacgttcccagcccacctttggcttaaaaaaaaatcccttccttcgggcttggcccccccaaaaccccccaaggctttctttaacatttgggggggccccacccggaaaaaacttttcggccattaaggggggg

SEQ ID NO: 86157 - DNA, 701 bp, Zea mays
  Clone ID: MRT4577_178586C.1
agttatgttgacatttaaatttgttcctactatataataatttatcgttggatggtaatggataatcctgtaacgctctgtccccctttctttgatggctgctgcgttccaggtgggctccggatgagaagatcgaattggctttcgatctaaggcttagattttgttcggttattcccaaattcggacttgtttgttctactcgcaatctatatgaattaggtagaattaagtgagtttaaatattaaataagtcaaattattttataactttttttttttggtctcatccaatccacgtgatctcatgtggattggaagagattggaaataattgggaagaattttgatttgattgagatttaatcctaaacaagtcaaattattccataactttttttgatctcatccaatccacgtgacctcacgtggattagaagagattggaaataattgggaagaattttgatttgattgggatttgatccaacacagtccactataatccacacatgatcgggtgcaaggcgaaaaagtcttaggttttgttcggttattcctatctcacatggattggataatattttaaaataaattatgatagattttgacttatctgggatttaatcccactcaattccacctattccacatgaattgacagcaaaacgaacaatgttaccttagatcccgcaaacttc

SEQ ID NO: 86158 - DNA, 761 bp, Zea mays
  unsure (1)..(761): unsure at all n locations
  Clone ID: MRT4577_178587C.1
cgggccgggnaaaaaaaaaaaaaaaaaaaaaaaaaaaaaaaaaaaaaaaaaaaaaaaaaaaaagggggaaaaaaaaaaaaaaaaaaaaaaaaaaaaaaaaaaaaaaaaaaaaaaaggcccaaaaggcccacaccccccgccggaccagggggggggccaagccacaaccgggtggaagccccgcacccaatttaaatcccccccctccggaaacggccaaggggggggggtgcccccacaaaaggcgcccaaattttaagaaaaaaacgctccttaaagccggaaaaaacccccccacaaggggaagccaattcggggcaaacaaggccaaccctcctggggggagctcggccgaaaaggggccaaacaaaaaaacctggggaaaaaggcccgccgaggtcccctggacggaccggaaccggttcccgagcttcggggaaaaaacggcgggcttaaaggaccaagggaccaagctcttggggttcaacgaggcggaaaacccggacaatcggatgggggaagggggccttgggggcaatcaaggccaaagaaaaaaaaaaggcgtggggggaaacctccagaagttccagaacttcaaagagttcggggataaaacaagggaccaccccaagtaagttgcccggggggggttaaataaccggggccagggttcaataaggggccccgggataatataaaaaagggacctaggccttatttaaaaaaaaaaaaaaaaagggcccgaagggccccgaggccca

SEQ ID NO: 86159 - DNA, 372 bp, Zea mays
  Clone ID: MRT4577_178588C.1
gggggcaggctttttttatttttttttttttttttttttttttttttttttttttttttttttttttttttttttttttttttttcaaaaacttttttatgcccccccatattttatgggccaccccacacaaaaaaagggggggggggggggggggttatcccatatatagatagagagagagggatagaggaaattccccaaatatcataaatcaatagtgggggggaagggcagcggaaaccccacaggggtgggggcggaacctgggcacctggtcctggaaaaccccccccagggccgggatgtggggggccatcataagggccaggggggggaaaccctacctgggccggaacccccctaagggga

SEQ ID NO: 86160 - DNA, 422 bp, Zea mays
  Clone ID: MRT4577_178589C.1
cctgtagcttcatccgttgcgctgctccggttccctcgcgaatggagaacttaacatgcccgcgccgatatcgttgctctacgacgtcgacttcacgccggtgctccatccgctggagtgcctggcctcgtagttattgggaggattaggcgtgtctgacctggagatcggcgcatatcttatgaactcaacgacctccgaaatacacctagcttcacgaggcctttccctgagctgtgacagcacagagcacgggctcaatgaacctcaagtgcaaccagcttgaagactactttcgtgatgttgaacagcccctcaaaaaataattcgacgagctaaaagagaagcaccaggagttccaggagactgtcgcaatatcagagcaaattcaggacaatccagaagcgaaatgtatgtgcaaa

SEQ ID NO: 86161 - DNA, 249 bp, Zea mays
  Clone ID: MRT4577_17858C.1
ctctttttttttttttttcgtgtcgaaacaacatgcatatcacacagctgcttcattattcaggtcgaacaaacaggctcagctagcccgggcgttttattgtcactattgctcggtttcgcgcgcgagggggtgcgacgccgagcacaaggcctgaaggccccgccgtcctccgttgccgcctagctcgcctagcttttgtggttgggccccggctcgccgccgtgctgccgcctgtcctgtctgtcg

SEQ ID NO: 86162 - DNA, 1123 bp, Zea mays
  Clone ID: MRT4577_178590C.1
gcgggaggctggccgtggacgttctattgcgccagttctggatgcgcagcgggggcgtgccggacgaccagtcttctaaggaataaacgctagagccggtcgccgccgtctacgcggtcgacggcgccagggtcgtcgcggccgacttcgagctctcgttcaccgacctcctccactcgcccgcgggcgccgtgcgcctctcgctcgccctccgtacgggcctcgtcaacacgtgcgagccgtttgaggccgtcgtcctcgggctcggccccgcgcccatggccgttgaccttgaccactcgaggatcgagttcacggaccttagagttagagtggagcaggagaagtcggcgtcctctgacggtgacggcagcaccagccggaacgctgccgcctcgacggccagcacggtgagcgaggaggacagggcgttctcttcttccgccgaggcggcacagcagccgcccgacgtcgaggaggccaccacggcgtcggcgcccgtgtcccggcgctcgccggacacgccgacttcgcgcggcgggaaggccaaggccaaggccgacgtcgacgtgctcccgtccccggccggggacatcgtcgacgtggaggcggagcagagcgcgatgcagcggcagatcatggagatgtacgtgaagagcatgcagcagttcagcgagtcgctggccaagatgcagctgccggttgcgctcggcggcggcggcggcgtagtagagaaggaagagacgcccgatgacaagaaggtgatcgagcggcagcaggggaagaaggacggggcaagggtgttctacgggagcagagctttcttctgaactggtaaaaaaaagataccagggaaaaatgacataatctcttgcaaacttgttcgagttcggcatagcattcatcccatcccatggtttgttcatcattagtttccgcttgcccattcgtattcgtaacttaattcattcgattaagtagaacaagatcacataatttaggagagagtaacatgtacttacgtgagtttttacggactcgcttcggagacaagcgacggggaaaagcgagattttacccgtgtcactgagaatctgattatcagtacaaatgcggctaacat

SEQ ID NO: 86163 - DNA, 259 bp, Zea mays
  Clone ID: MRT4577_178591C.1
aaataaaatttttattttttttatttttttttattttatattttttatttttttaaattttttattattctttatatatatttatttttaatttttattgttcatactggtaacttcattagtaaaataaaagtaaccagaccttcaaaaaacaaggatattcattatttaacaagatatgaactaatggaaataaaatgattgaaaaaaatataactttttaaatactactgaagcatttgggcttttttcattcaat

SEQ ID NO: 86164 - DNA, 451 bp, Zea mays
  Clone ID: MRT4577_178592C.1
ggggagttagtacatcctatcgcgggaggggaggtttaaaattaaattgatgtacaaaggcatggatttacttatctatctgggactagatctgacttgtcggtcaccatagataatataataagtactcttttaagctttactcagagaggctgatgacccttaccggactgtactgggtatggaagtacttgatcatcctcgacaggctcgagaccctacactacatcgagatggtgtacgctctgaagtaccagatcctggccagccaagattcgctgttcttctattagtacggggcacgaagaagaataataagcccaggccggctaaccaacgcctgcaagtggatctgtttaccgcacttcgcattgttagtcgtgtattggagctatgtgtacttagggtaccatgaacattggagtcttctcggttatttatccttgtctga

SEQ ID NO: 86165 - DNA, 108 bp, Zea mays
  Clone ID: MRT4577_178593C.1
ggttcagggggacagaactgttgcctcggggcaataacccctgtgctactgcaagtaaagagctcctgcgctcctatcatgttaacgcatgtttacgcggcagcccac

SEQ ID NO: 86166 - DNA, 531 bp, Zea mays
  unsure (1)..(531): unsure at all n locations
  Clone ID: MRT4577_178594C.1
gtaccctttcggctcgaggccggccgggaactgtgtcgaagcatctagcctagtggtggcgcgacgcgataatggactctgagagcgaggagcagggctcgtcgccggagacagagtcggatcccccgccgtcgccgtcgcagctgccgctgctgctgaacccggcgtacgcgcggtgcaagtcggtcgtccacgacgagctgcgcagcttccgcgtgttcctgcagtggtgcgcgctggaccacagcacctgcgcggggcgcgccgcgtcgtacgcggtgttcgtggcgctggcgctgctggtgcccgccgcggtgtcgctgtcgctgcgcgccgacacggcgctgtcgcgggcctccgcgtttgtcatcgccctcccccgcgtggcgcnggcccccgccncggggctcgccgtcgtgtccttcgccncgctggccgccttcttccgccgcttcggcggcctgcggcngctgctgttcctcgncggcgcgctccgcgncgcccccgccttcgggcggnccggnttcgcgc

SEQ ID NO: 86167 - DNA, 404 bp, Zea mays
  unsure (1)..(404): unsure at all n locations
  Clone ID: MRT4577_178595C.1
aaaaacacattatcgcacatttaacctcataattctttatacatccaaacaaacaaaggacaccagatgcagtttctgcagtagagtctcttctttgccccaccagcacaaggttcatttcatatgaaaaactgaaagtggcnncnnntaactttcaggcgtgattatagaaaaagttgacggcaacatagatttcaggcatgtaagcttcaaatacccatcccgcccagacattcaagtgctcagcaactgtactttggccattccatcaagaaaggtactgtttgcttgatgcttgtcatcgttaattcataagttgtttgactggaggtggaggggtagttagttattcattgatcattgggagtaacaggggatgagaactngggtgggtgatcttgcta

SEQ ID NO: 86168 - DNA, 1884 bp, Zea mays
  Clone ID: MRT4577_178596C.1
cattggaggcctgggtacctcctcgggtgtggcatataaatcggacgcgccgacgccgcgatcgggggcctccccgagagcccccgtttctgtcacaaatcgccactaaaaccctagccttccgccatggccacctcccctgccgcctcgtcctcctccgctccgaccgcctccgcggtggctgcggctacgatggctgttgaggccaccgacgggccggtgctcagcgtagtatcgaagcgtctccgcgcactgcggaagaagtacaaccgaatcacgcagatggaggagtcgctcgccgccggcaagacgctcaaccgagagcaggaggaggttctccgctccaagcccgtcgtcgccgctctgatcgacgagctcgagcgcctccgccctccgctcgcctccgccctcgcggaggagctctcctcccgccccgcccccgccccctccgccgcttcctcctccgactcagattcgtcagtccaggacttgcttgcgctcgtctacttcggctccctctttgacgtcaagcagcaaagcgacttcgtctctttggtttacacgcgcgaactcgagcggagcagctgcctcacttatgactacgtcggggatgatccggaggacagtctcgcggagaccgatctgaacgcggtttctgcccttgcctccctcgccgcgttgcgccctcctgctgcagccggagtctcgcaccgtgacgcccttcaggcttgtgctcatcacgcccgcctctggctctgccgtgcggatgaacccatccatcctgactccaccatcacatatgctggggtgagggcaaagctggataggatcatggcatcgggctacttcacagcgcagctagaaatgaggacaccattggatctggctgctgcagtggcaagttttggagctggaggtgtgcaggtgcaagagagcatggttgtgtcacctcaggcaccggaagcagtggaggagagccaggctgttgaaggacacaagaatgagaaggaagattctcaggctacagaaatctacaatgatcatcctgttgttgactctgaacatgtggaggatgaagtcctggtgcatccaactgatgaagttcctccagctgagacagagcaggagcaggagacatttgatgctgatgtgaaggatcaggagcaaaaggaccaacaattcatccagcggcggtcttaccagaaccagcgtggtggtggtcgtggtggcagcaggagaggctatcctaatggtcgtggaggacgtggtggccgaggtggcgggtaccagaatggccgtggtggataccagaatggtcgtggcggtgctggcgggtactactacgaatctggatactaccagccgaggaactacaacagaggccggggtggtcgctccggcggtggcaactcttactacaacagccatggtggaggtgcacaggggcatcatcctgggagtgttgagctgggcgcaaacgcctagcttcgctgactgttctgtttgataatgaggagcgagtgagtcgtgccattttgttattatagaactaacttagcctgttattacgtcaccgttggtcccatccgtgagtctttttgctgctcgagtgactgcatatggtcggtcggtattgaggaaatactctgggaaagtagtttcaggtcatattcgttttctaagttacgtttttttttgtgttaatatgcccttatttcttaattattatatactctgctagaggtgtcgatgccgccacaaaaaaaaaaaaaaaagcggccctgctacttactagtatgttctatcggacctttgcagcatttggaggtgattgttgacctgttcgttggcctcgaagtgtttttttttgttgcaacgcctacc

SEQ ID NO: 86169 - DNA, 190 bp, Zea mays
  Clone ID: MRT4577_178597C.1
ggccgtaaggggtgatttgtaagaacacggacttacgtaaactttgtacgttctattgcaaacaacaaaaggagagaggaggtgcaatacaagtcttcttggatatcaaaaccggaatgccgatggggcatggagtacaataatatcatatattgttattagttcaaaaaaaaaaaaaaaggcctgccca

SEQ ID NO: 86170 - DNA, 285 bp, Zea mays
  Clone ID: MRT4577_178598C.1
actcgcaaaatgggacttagggaagtggtctagggagtgcgttcaaaaaaacatagtcacatagagtattgcaggaacgcagaggcgtctgtattcatcaaaggagccgcgctccataggctgcggagatgcagcggtagtacaaactgattggcggactctgccctggcaagaaccccgggagctcggatttgatgaaccatctagtttgcgttgcaccggaacctatgggtaaaaaaaaaaagggacctattgtttctggagcacagtgacacgccgacaccg

SEQ ID NO: 86171 - DNA, 939 bp, Zea mays
  Clone ID: MRT4577_178599C.1
ttacaagagagtttgcaggttcagcgtgggaggcattgaggcatattagacaagctgtcgatttcctggtgatttctcttaaaccaatgaggacattaagagagatacacactgatgtgtgccctgccctcagcatacaacagctagagcgaatagttagtatgtactgggatgatgtgaatggaacaaacactatttcagcagagtttacatcaagcttgaaatctgcggtgcgtgatgaatcgaatatggccacaagtttttctatattgctagatgatgattccagtatacctttttcacttgatgatattacaaagacactgccagtcattgaggtggctgatgacgactttgtgccttttgtccatgaaaacccaagctttgcgtttttattgcaaagaggggagtagtccatttttcctcaccatggtgacttcacccacctgtggataagtcaggattcctgcctaggatgtacagtacgcgtgattctttttgtaccaggtagcaaggcattaaagattagatgctaggtgagcttataggattctggttttattgatttgtgtgttgattgtccatttgtattcaggttttccttgccatttttttctgtttgtagttatttttttgggcttgtatactaggggctaagggcagaaggccctgtcctgtaagcaaagtagcacaaggttttgctgtaggtgggaaagctgtacatgtgttgtaggagggggagtagcggttatcctgctggtgtagtgatgattttgtggttggtgcattgcttacctttgatcatgcattattgatccgtcatatattatttattgtaccgcacaccagtccattgtcgataacttacactcaagatttttttttttctgggataccagtcttaatgagtaatctgttacggtacagaaaaccacaacc

SEQ ID NO: 86172 - DNA, 349 bp, Zea mays
  Clone ID: MRT4577_17859C.1
gggaggaaacgcccaaatggtacaaaaccttctttaaagaaaaagggggcgagtaatctcaattggcgaaaaaaaacctgagggaaattgaataaaaaaacacactttggagaaacaccttgagagccctcgtgcgtgcaacaccgtccccaaatcagaatggaagcttctccctgcttggggcagccccctgcgacagaagggaatgaaagccacaacctccgctaaagcccacaaaaaacaacaccaatcttgttccccgacaaactaagggaggcacccttaggaaggggctcccaaccccaaacaacaaaaaaagcttgcccgcctacaacaggctggggaactt

SEQ ID NO: 86173 - DNA, 296 bp, Zea mays
  Clone ID: MRT4577_1785C.1
gagccacttcggcggccgcagtaagaagctttgggtcactctgacgtgtgtaactcgaagcccgaggactactgaccctgatcctgcgtatgccgtgactgtgctaacacacatggacagatcactatgatcgggctcacgtgctgaaggctgcgctttggtaacaacaccatagacattatcattatcaaaaaccgcttattgcatgtcaacatgctaactgaattcctacttgcagactgcggtgtaaaggctaggggatatacgacatgacagtatgtatgagatctcctgca

SEQ ID NO: 86174 - DNA, 751 bp, Zea mays
  Clone ID: MRT4577_178600C.1
cggggtgcagcaccaggaagcaaacggattcagtggttagagtacagtctccatggccttggcgattcgatcgagctccatgacgatacatgactcctgctttgcgtcggcgtccagtgcgtaccatcgattgctcgcctgggcctggccacggagggttaatcactgcgctacgcttaccggggcgcggtaaagacgagggattccgtgaaaaggcgaaaacaagcgcacaccacatgcgggactcgggagagcagcagggagacgaaccgcgcgcggatctcgacgcccaaacgcggtggctcgtccgtctccgtctccgtgggtcaaacgcagtctcgctttcctctccggtgccaccgcccagcccgcccgtcgtgcactctcgctttccgcacctggcgcggcaatgcggtctcatcccgcagcctctcctcaccgcttgggttgcaactcggaggctccaagtgggcaggacagggattgcagccttcccctgcacgcaaatgcttccaaatgttaccaacatcaagcgcggcatgcatacccgtgctcgatccactcacatgaatacacagcgcagattattttgtgtgcacagacaggcaccagacatcaaagcacaaacatagagcccgtaaacaaatcgttggtaacttggagcggtcgggtcgtcgtcgggagagggtcttaactagacacgcacacgtgaatttgtatcattcaaaatcaatatttagcctgtttgttc

SEQ ID NO: 86175 - DNA, 198 bp, Zea mays
  Clone ID: MRT4577_178601C.1
ccacgcatccggataccctacgtacgtgtaaccgattcaccgaggtcaccgtttgtgtgccgaaacaattggcaaggtactcagtgtgttccgaatcgatcatggcaaagaacaatgctccggacgaccgagcgtgccggcaccaataacgagcggcaccagcacgagcaggaccatgacgatgtgctgcaggagcac

SEQ ID NO: 86176 - DNA, 375 bp, Zea mays
  Clone ID: MRT4577_178602C.1
atttatagtagttacggacatttaaggggcacaagggagcaaccattggcacctaaaatattccacctatttatggtgattggcatatctgaaggtgctggtacggcaaccattattggacaatgctcacaaggtcctatagctacccttattgcatcgaacctatcaccaactgtgtcttcggtatgtgaaaacccaattcttgaaccatacaggattcaacagggaattgaagctggcattttacctttatcactcttgttattgcaacaatgatcagccctattacaggagttacctttggtgcatttattgggacaaaacatcagggcacatcaactacaacaacttgtgctagcaaaccttgctggctac

SEQ ID NO: 86177 - DNA, 154 bp, Zea mays
  Clone ID: MRT4577_178603C.1
tcgttgcaacatagaaaggacaattgtgtttctaccatggccggccaaatattttggttgcctattcttcctgggctttctggaagggcttggtccggaaccatttttccacaatggtcacaagctcctatagcttcctttttttccccatacc

SEQ ID NO: 86178 - DNA, 189 bp, Zea mays
  Clone ID: MRT4577_178604C.1
ggatgacagaacaacccatctggatcgtgtcatcatggctctggtgttcctaatcaggtatgggatcatcaccacaagcagctaagccaccggtgctgactgcagcactctagatgcacttattaccagtgcagttaggtcaaccgggacgtggcatgactgacatggattagctacgccatacgtcac

SEQ ID NO: 86179 - DNA, 312 bp, Zea mays
  Clone ID: MRT4577_178605C.1
ggcatcatatgatatatattttatccatgagaggggaagaggcatatttcaaagcagggaaaataaagtccttgttttaaagaaaaaaaagatggagctattggggctttgatatgggagcaaaaaatagctttgacgattgcccattgcattgagaagcacccccacaatttgggaccgccagggctcagggggacttgtttccagggggggggccaccgggggcaggagcattagcattgacattagcaggagcattattgttaccattgctgttggggcttgggctacgggcagccctaggacttgggc

SEQ ID NO: 86180 - DNA, 358 bp, Zea mays
  Clone ID: MRT4577_178606C.1
ctcacgcgtgcggaagtacataagacatgtcaagagactataccctgagggtggggatcataaatgtatgtgagaggcaatgtgtgtaaagaattgtgtagagacagtctcttgacgaaaagagagcctaactattgtgttattacaatgaaacgctacgagacttaatattgaacgagggtgtacatgtcagagccaagcatgcatacattctattttgtaggggaggaggctgcctacattgtgatgaagcttatcatgtgtcaaggaaaaagtgtagtttttttttttaggaaagggaagataaggggtctggcttgattgggttgacagtggcttcctttaatatatgtggtga

SEQ ID NO: 86181 - DNA, 205 bp, Zea mays
  Clone ID: MRT4577_178607C.1
gcacaagcatagtgcaggggcttgccacctaactaaggcccgcctgaaagcacggcatccaagccgtcctcttcttggtgtctcagcccctgttcttgacggtggccaacggctgcggaaactgcccgaccccaacgcccccagccgagccaccgacgacgcctactgaggttacccggacgcgttcgctcactgggttgtgccc

SEQ ID NO: 86182 - DNA, 340 bp, Zea mays
  Clone ID: MRT4577_178608C.1
gtttcaggttctggtttacgatcaagtacatatggacaatgatggctattatgagcgatatcgaagatcttctaatagcgtggaacctactagatggatcgatggacggttggatcaacaagcgcgcaggacatcaaaattccaacgctcaccggtctgttaggggtgccgactctggatctagatgtgatagccgagatcgtgatggagcaagcggggcatgtgcaagaggcacaggcgcctccatcgtgcaacaggagatgcacacactggacgcggcgcgtggaggatcaagatgctgggtgctcgctatggcagtagcctaactatgaactcgaca

SEQ ID NO: 86183 - DNA, 452 bp, Zea mays
  Clone ID: MRT4577_178609C.1
aatggatgtaggaaaccttggctcaatggggtttcctttaaagaacgatcgtcttgccactgataaaatgtcatttccttgggcaagatgaacaagaatcaaacgaccctacgctccaaagcttaggcatgagcgcctattcatcaaggttgcatacctttgatgacattaatcctgaggccttgacttttgctgatgcttttactttgatagaaatgctggcggctatcgcatatactctttaatacagaccacctcagatcttcatgcatgctggacacttgtatccaaaaattgtgtgatgagctataaagcagaagactatttttatcgacgtggccctctattcatagcaagattacttcatactaggcgaccctaatggtgtcatcacatggatcagtggtgtaaccgcagcttcctacgaattcttaactgatcttagggacgtg

SEQ ID NO: 86184 - DNA, 778 bp, Zea mays
  Clone ID: MRT4577_17860C.1
tgctgccttttcagtattggacaatgctaatggagttacaactccaaggacaggaaggtatagtgcagatggagcaggtggtgatgcttctgtagagcttacacggccgtgcaggcacgcagctgccgcgcttggtgatttgatatttgtgtatgacggtttacgtggaggtcaaggaattccatccttgtgtttgcatggacctagaaaatgcagatttaagaatgatgcgagtgatggaggcctatcaggtcaaggaatttcatcctgatgtttgcaaggacccagaaattgcagatttaagaatgagcgagcgatggaggtctatcagttatgtaggtttaagcaagtcaaggatggactgctttctgcagtttcagaaatgcaatactgcgctagagagatgaggaagattgttgactcgctatggacaatgaatttgaatgaagtgtcgtcgagacttcaagagatggctatgtttctcgaaggtgcagttgatcgtggtcatatggctgctgaggagcttagtcctccccgcctcaatttctaatgatttgtatgcagaaaacactatgtacataggggaactgggaggggtaactgatgccgactgggcacttgacaatggaggatatctgagatggttcaatgtaatctatgccgactgggcacttgacaatggaggatatttgagatggttccaatgtaatctatggtgataatatgaaccatgtgggtggttgtagggtgcttttatctgaaacatctttatgtgatt

SEQ ID NO: 86185 - DNA, 196 bp, Zea mays
  Clone ID: MRT4577_178610C.1
cacacgtgtccgtagctatcgagatcactatcagaaccaagcggcacgcaataagtctcacgacgggagtagatgcatgtgctatagatggaggatccagagagtgcgtcccggatgggagcgatcagcatcggcctccactaagcgataaaggaccagtcatgcctattccgatgtaactacgtgctgcgctgct

SEQ ID NO: 86186 - DNA, 932 bp, Zea mays
  Clone ID: MRT4577_178611C.1
gtacgtaagctcggaattcggctcgagctccaatccagaaaccctagccgccgtagcttgcgcgtcttgctctgtcttccccaatccagaaacgaggaacctagccgccatctctcctcctctcccgagagatctcctctgccgatggatgttcgtccgagccaattggtttgtgatgctgtagaagcggcgcgtgctgctgccgtcgctgcttcggaggcgagatgcgcggcagttattgcagagaaggaggccaaggctgcggtggagttcgccgccgttgccgtcaacaaggtcgaagcagtaaaggtctcctcaaatctggaaaatgtcgatttcaagtatcatgtgaacattaagaattcgttgcgatattccattcaagaaatgaggaggcaatgtacaatgttgcagtctgttaaaaaactatgttccacaatcccagaagttgaaggtggcaaggtaggaaaggtttgcggccatctggaacatgtttgcaagatgctagagaatacttcaattgtctgtgaacaagatttggaaacaaagaatcctacttgggacctttatgacaacccatccgtagatgatgaacatcctttagatgatgatgaaattggtgatggctacagtacagaagatcctgagctatgggaaatggttttcgatgacctgaagtgggaagagaataaagctaatgtttcatttgaagagcactatcgtgtcataaactacaggttcgaagagatcaatgatcgtaacatgtagttgtgagctcgtgtttggtttggatgaaggtattttgtatgtaatgctccaaatgtactatgtagaaccgttgttgtcatgaaacagtagtggagcagtaggcatttgttggatgaaggtattatgtatgctactatgtctgttttatgaagcagttcccattt

SEQ ID NO: 86187 - DNA, 234 bp, Zea mays
  unsure (1)..(234): unsure at all n locations
  Clone ID: MRT4577_178612C.1
nacgcacaattattgagaccactagcaacatagaaagcacaatagtgtaccaacagtggcagacaaaagattttcactacttatgcccttcggactctctgtgagcgctgttacggtgaccataatcccacaatgcttgcaagctcctatagctttccttattccaccgtacctcccaccaacgttgcatagggcacccgaaaacccggggggggacccctactgcatccatcc

SEQ ID NO: 86188 - DNA, 515 bp, Zea mays
  Clone ID: MRT4577_178613C.1
accaagcaaaatttcaggtgtttcattgaattggaattgccaagacttatatacaaaaccaaaactcaaacctcacaaggagtaaagtatgtatatggggtccagtgtgcttcttacacaaccagtaatgcaagttcaaactggcgagtggacagtcaacctgtaccccctacctctgaacgaaaaatactgcatgcaaagatggcgattttgataactaaaaatgctttgatgcccttaggcaaaaatcttattttaccatcatcttggatgagagggtacggcccctttggtttgcatggtctccacactcgtaccagaaagtatattcatcaagcaccatgcccttgctaacaaggattttgctgattccatcacatatctcaaactgtctattctttcttgcaacgtctctgtgctcaatcagctctagcgatttttgttaaggcaacctgcctatctttagtgctcaactctttaatagcttcagtacctttgacaaagatgaatatagc

SEQ ID NO: 86189 - DNA, 310 bp, Zea mays
  Clone ID: MRT4577_178614C.1
gactcaccgatagcaaggtgcgccgccgacgtttggagagcagagcatagcaagctagccaagcgcgcacctgggtgaactagctagctcaggcgactatatggcgtgaggtcaggtaagcaggaatgagctgaaccacaagggccgcgagggcgagaccgtcatccacatccggaccggcggcaagagcatataggcccataagcacatggccgaagggcgcatccgcctatgcctgactcacattgaggagctggtgcatcagtggcacagctagatggggaagaagggcggtctgagcaccacggac

SEQ ID NO: 86190 - DNA, 142 bp, Zea mays
  Clone ID: MRT4577_178615C.1
cggaccataatacaagaccaagaggggatttttaacacacaaagcggaacgttacatctgacgaggacagttctgacctgaaatccttaacacagagcaaatgtcgaccacgctaataacgagttacactaacattggaaat

SEQ ID NO: 86191 - DNA, 292 bp, Zea mays
  Clone ID: MRT4577_178616C.1
ggaaataccaaaacactgtaatttgggggaccacaaagtgcattgttatttgtacattcaccttaccggccaaccctagaaggggggcagagccccataccaagatcttaattttttcttgcgaaactgggttacaaaggcctggtttactcatgacaatgatcgtttttttttttaccagagtattcacttacatggaaccttttgtaccaaacggttgggattttaaatggaacaaccacatttgggatttacccggccatgatgccattaatgggttttttgcagaacc

SEQ ID NO: 86192 - DNA, 577 bp, Zea mays
  Clone ID: MRT4577_178617C.1
cgcatgctcgcgtgggtaagctcggaattcggctcgagttttctcatgcgaacaggtgctccttaggatgcttccagcctactacaaacacgtccgttttttcgaaaacactctgatcactaaattcttcggcctgcactgcgtcaacgtcaagcttacaggagctatccagaaaaaggtccggtttgttataatggggaaccttttctgctccagctacgcgatccacaggcgcttcgacctgaaagggtcctcgcatggtcgcatgactgacaaacccatcgatcagatcagcgagcacacaacgttgaaggatctcgatcttaatttcatcttccggctgccagggacctggtttgaggaattctgcaggcaagtggacaaagactgcgaattactggaggcggagaggatcatggattatagtcttttggtcggtattcacttcaaggacagatgcaaagacagcagcaatggtgacaatgggacgtcacagaatgctgaagattctgaagaaaacagaaaaggaccattgagactagggatctgcatgccctcgagggtggagaacgtagtg

SEQ ID NO: 86193 - DNA, 561 bp, Zea mays
  Clone ID: MRT4577_178618C.1
cctcgaggccggccgggccgggattactacatagaaccctagactatctatctatcgacatacaaatatcaaaccttcctacgtactcatggagcgcggcaccaataaataattaagcagcgtggtgctactgatagtttcttaacgtgttgtcacttccgacaacagctaccccacgcctcctgcaagcataaacttccagcgacgccagccctgcacatattcgcgaggtagttagtgcatactgcagacaggcatcttcctgctgcccgaaagctgagtcttattaccatgctataagaaaggcatggtgtaccaatgctttgcgataatctacatgatgagatatctgaactacatgatagtgggagttggagttgctagaaacacaaggaccgcacagcgtggtgcagattattgtatgcgtatgcggaatgaataaccaaatgataaaaaagaggcatcatgcctcctcgtagtaacaaaaaaatgaaaaaaaacgacgcgatgctgctgcaggtccaccgtatgtgttcctctttacggaggcgtaattgcgct

SEQ ID NO: 86194 - DNA, 406 bp, Zea mays
  Clone ID: MRT4577_178619C.1
tgcctaccatgcgaggccgggcgggaaggacaaatcaatccctagcactagtctgtgtggtcgctcgttgacaataatggcgtctatgctggagtatatgatgatcgttagtatctccgcatgctccaaggaggaggaggacggcgataggcaccaagatgccccacgtttatcagggcttgttcaaggtgagaggcgtggacggactggtcacgctacttactaaggcgttcgcgacgggttaactgacaccacagacggaggaaggtgcatgctacaagggcgagctggagaaagactcgataccctgtactgaagcgcgagggcgccgatcgatgtgcaccaacggaaccgcatgcggggcgtgctactagcctgaaggttaccaaggtcactgtgctggcga

SEQ ID NO: 86195 - DNA, 690 bp, Zea mays
  unsure (1)..(690): unsure at all n locations
  Clone ID: MRT4577_17861C.1
tcccctgaggcgctaacggcgggatgttatgatggagatcgaccgcgtgctacggccgggtggctactgggtgctctccggcccgccgatcaactggaagacgaacccaaggcctgggagcgcacggagggagacctctccgccgagcagcaacggatcgaggagtacgccgccatgctctgctgggagaaggtcaccgagatccgcgagatcggcatctggcggaagcagctcgacccctcggcggcgtgccccgacaggccgccggtccggacgtgcgacgacgccaactccgacgacgtctggtacaagaacatggagacttgcataacgccgccggctgctgccgtggccggcgagctgcagccgttcccggcgcggctaacggccgtacccccgcggatatccgccggtgctgtgccaggcttcacggcagagtcgtacgaggaggagaaccggcggtgggagcggcacgtggcggcctacaagaaggtgaactacaggctgaacagcgagcggtaccggaacatcatggacatgaacgccggcgtgggtgggttcgccgncgncatcttctcgcccaagtcatgggtcatgaacgtcgtgccgacggcggncgagatctccaccctcggcgtggngtacgagagagggctcatnggnatataccacgactggngngaggcattc

SEQ ID NO: 86196 - DNA, 416 bp, Zea mays
  Clone ID: MRT4577_178620C.1
gcggaggacccacaagagcggccgcccccccctaataatcacacccaccggagggaggcacggcgggggcaccaaaaagaggaacgccggcgcccccaccgaacaaagcaagggcagcagcacaagcggcgagcaacccaagaaacagaccaacgaactgaccgcccagaaacacaaagagggaaaaccgggcaagggcgcgcgagacacaaaaacaaaaacgacgcagacagagacaaacactacagaggccggcccggcccgaacaagaaaaaccaagaccagggacaaagggcatacacaaacaactggaccggccgaaaggagcaagccaccccacacaccaaccaaacgaaaagaaacccccacgcagagtccccacacccatgaacacccggaaaacaaccggggcccgg

SEQ ID NO: 86197 - DNA, 1246 bp, Zea mays
  Clone ID: MRT4577_178621C.1
cgctgtcgctttcgctttcgcttccactcgcactccatgggtgcgcgggcgacgatgggatgttcgcccttgctgcccttccaagcgctctggctcacagcggccgttgtcgcggcgctcgcgctcgcggccggcgcgcagccgtcgccgtcgctgtcgccggggttctacgacgcgacgtgcccggggctgcagcccatcgtgcgccgcggcgtggcgcgcgccgtccgggcggagccgcgcatgggggcgtccctcctccgcctcttcttccacgactgcttcgtcaatggctgcgacgcctccgtcttgctggacgacgtgcccggtaacttcaccggggagaagaacgcggggcccaacgccaactcgctgcgcgggtacgaggtcatcgacgccatcaaggcccaggtggaggcgtcctgcaaggccaccgtctcctgcgccgacatcctcgccctcgcagcgcgcgacgccgtcaacctgctgggcgggccgcggtgggcggtgccgctggggcggcgggacgcgcgggacgcgagcgcgggcgcggcgaacgccaacctgccgcctccggacgcgtcgctgccggcgctgctgtccgcgttcggcgccaagggcctggacgcgcgggacctgacggcgctgtcgggcgcgcacacggtggggcgcgcccgctgcgcggtgttccgcgcccacatctacaacgacaccgccaccaccgacgccagcttcgcggcgggcctccggggcgccgtctgcccctacacgggcggcgacgccaacctggcgccgctggagccgcaggcgcccgacgccttcgacaacggctacttccgggacctggtcgcgcgccgcgtgctgcttcgctcggaccaggcgctgtacggcagcggcggagacgggggcaacaccacggacgcgctcgtgcgcgcgtacgccgccaacgggacggccttcgcggccgacttcgccgccgccatggtgaggatggggaacctggggccgcccgcggcgagcgcggccccccccgaggtccggctcaactgccgccgagtgaactgatcgtgcagcctgcccgcgcgcgccgcgccatttgcatcgatcagtggattgggttactttcctggtgtacacttgcttcgattcgattcgcaggagtacgtagtatgattgataagcatggatttgaggttcaaaaaaaaaaaaaaaaaaaaaaaaaaaaaaaaaaaaaaactcgaggggg

SEQ ID NO: 86198 - DNA, 511 bp, Zea mays
  unsure (1)..(511): unsure at all n locations
  Clone ID: MRT4577_178622C.1
cgctttcgctttcgcttccactcgcactccatgggtgcgcgggcgacgatgggatgttcgcccttgctgcccttccaagcgctctggctcacagcggccgttgtcgcggcgctcgcgctcgcggccggcgcgcagccgtcgccgtcgctgtcgccggggttctacgacgcgacgtgcccggngctgcagcccatcgtgcgccgcggcgtggcgcgcgccgtccgggcggagccgcgcatgggggcgtccctcctncgcctcttcttccacgactgcttcgtcaatgtaagacgacgggcgcgagggagtggagcggtcactcacttcgcttcacgcctgtcggtcggtttgtgctggtcctctcctgacgtgtgtccgtgcgtgtggatggatatggatcgcagggctgcgacgcctccgtcttgctggacgacgtgcccggtaacttcaccggngagaagaacgcggngcccaacgccaactcgctgcgcgggtacgaggtcatcgacgc

SEQ ID NO: 86199 - DNA, 219 bp, Zea mays
  Clone ID: MRT4577_178623C.1
gtacgtaggctcggaattcggctcgagccggatcgaaaccaagattttattttcatggacgtttctatatggacgatcgggggcacttcaagcatagctgcggaatgcattgaacaagcggagtcgggtataaaaacgaacaatcagtttgatctttactgaatgaccaaagaaatattttgggtaggatcaggtctctctaataacacccactgttct

SEQ ID NO: 86200 - DNA, 102 bp, Zea mays
  Clone ID: MRT4577_178624C.1
atcgtgtgctcgtacacgcattcatatcttccttgacggtatctgcaggatgtccactcatgcctatagagcatctgataagcgctttgcggaagcattgtc

SEQ ID NO: 86201 - DNA, 327 bp, Zea mays
  Clone ID: MRT4577_178625C.1
ccgaaaaagcgggaaagatgcctggcaccaggcgcactgctcgcacccccgcggagagggaaggatccccggaaacacgttgccgccaggggtgcccgtaagtctgccccgacagactgctgcagggactaacggtcaccggtaccgacctgcaacgggtgccctcagggcgatccccaggtatggcaggagccgtagcctgatgagcaggaagctgcccattcgagaggctcagggagagaaattggcagacgacttcaaaaatggttgcggatttcagagccatgccaggtcttgccctcgagctacggttctgaggcataccat

SEQ ID NO: 86202 - DNA, 1146 bp, Zea mays
  unsure (1)..(1146): unsure at all n locations
  Clone ID: MRT4577_178626C.1
aaaggggatttttttcaaagcnattaaattggggaaccccagggtttttcccctccccccgtttttaaaccccggcccgggaatttaattttggggcccctataaaaaaaattttactttgcaagcccggggaagtaaacttggatctttttaaaacgcgcccccccttttttttttttttttttttttttttttttttttttttttttttttttttttttttttttttttttttttttttttttttttttttttttttttttttttgcgtaaatttgtttgtcatccattcgaaatggacagcggcagtgtttttccattatatatataaatatctgtcatgattacaacattgacaggaatggcacacatttctgacacatatgcaggcctgtgggtgtactgtgtcaaaagcttcagcaaaaaggatctgaaacaggagaagaatcccagcgacccagcctgaactcgagatgtggaaactgatgtatgtaaccggaaagaacaccacttggtgtcttcacggttgcaactcacgagcactagccaaggcttcttgaagactggctgcagccttgtcgtacattagaaaacccatgaaccagaactcatgcccttcaacggaaacgacctgaatgtacttctcagcgggatttactttgcttactgaaggattagctgctcttagctggtgaagaggaatgaccaccttgttgtaacgtgtcgcggcttaagctctagctttgcttggtggtctccccccacgacttcccccgcctcgatagcgtctccctcatcgcctcctccgcgcctttagacgaggaggacgcgggcccgcgggacacgtactggctggactccgccgcagcggcggcgtgcacgtgcgtcggcgactcggacgtgagcttctcgccccaggtgaccgtcttgggtgctggtgcgggcggtcgggggcggcggatcgaccgtctcagcctccgcagccggctggggcggggaaggaccgggtgtggggctggcggcgctggcgttggagtcaccctgcgcggtggaggcggaggtgccgatgctggggtccatctcggtgcgctgcggctgcatgtgagctgtgaggaaaggggcagcggtggaggggtcccccgcccg

SEQ ID NO: 86203 - DNA, 595 bp, Zea mays
  Clone ID: MRT4577_178627C.1
gggcacaaataaaccatgttttcgcaaaaaaaaaatactttggagttaaatttttataaacgattacctccaaattacgtttatcccccgaatgtaaaaaataataattaaaaggggttctaaaaaaagcctcctttgataaactttttgagctgttttactttttggggctggtggcccacaattgttttaacaacatccccgggggatatcattccaactaccttggcgtcaaaaacaggaacatgcctgatacccttggttgtcataacctccattgcacgcaaaatattggtacaaccggaccccgggatcaccttggccttttttggcatgaaatcctttacccttgtttgctgggaaggtccccctggcaagaggatttttttggaaaaattttttttggtcacaattcctgggagctggttcatgtcccccgacttgaaaaccacgaaagctccaacgttgggggccgccttgtgctgcaccgttttgtgcaccaaatggggggggctgcaccagaaaaccgttccggcctcggcctcccctttggccctgagaatttcgttgacggggatgttctcgagccccatgg

SEQ ID NO: 86204 - DNA, 1893 bp, Zea mays
  Clone ID: MRT4577_178628C.1
gtccttttttatgtagtcgcttcaagaccataattttcgctccgtcccgcataacgcggatcgaattgccattctggcatccttgcccgaacccagcagtttcggggtagtttcagggcgggaggtagattcggtgagagtttgacggcaatcttcacatggactaaagtgccgacttccccgagctcactcctcatcgccacaagtgaagtcaccgacgcacgcacggctgcagcgcgctcctactctcccgcgatcgccaccggggaggggcaatagaataaagcgagggcagccaatgcaggccgccgtcaacaccaccactgtcggcgctcacccgcacccaacaaagtcctcgttcctccgtccgtcccctccttgccgcgtctacttccacgcttctccacgcccgaaccttagggcgatcgccatggccagcaagtcgcagctgcaggagcaactgatcatcactcgccccgacgactggcacctccatcttcgcgaaggcggtgtcctcgaggctgtagtgccacacagcgcgaggcattttgggagggccatcatcatgcccaacctgaagccgccggtgaccacaacggcgcgggccgtggagtacagggaggagataatgagggcgctgccgccagggagtagcttcgagccgctcatgacactatacctcacagacaacacaagcccagaggagatcaagctcgcaagaaagagtggtataatttttgctgtgaagttgtatcccgctggagcaactaccaattcccaagatggtgtcactgatatatttgggaagtgcttgccggtcctcgaggagatggtcaggcaggaaatgccgttgcttgttcatggagaagtcacagatccacatgttgacacatttgaccgcgagaaggttttcattgacaaaatattagcaccacttgtacaaaaacttccgcagctgaaaattgtcatggaacatatcacaactatggatgcagtgaacttcatagaatcatgtgaagaaggtcatgttgctgcaacagtgactccccagcatctcctcctcaataggaatgctttatttcagggtggcttgcagccacacaattattgcttgccagtactgaaaagagagactcatagacaagctattgtgtctgctgtaacaaatgggagtagacggtacttccttggtactgacagcgctccccatgataaacggaacaaagagtgttcctgtggatgtgctggaatatatagcgctcctgttgccttgtctctttatgtgaaggtatttgaagaggctggtgcccttgataaactagaagcatttacaagcttcaatggccctgatttttatggcctcccaaggaacacttcaaagattatcttgagaaagaatgcctggaaagttcctgctacttataaacacagttcaggggagattgtgcctatgtttaatggcagcacccttgaatggcttccatctgatcagcctaaagagtaaacagtatacattattggacccagcacttgggggaatcaatagtgcaattctggaagtagctaaaaggccatattgtatgtttatcaaggctagtctactgatctagacaccatagcatctgtggtttctaaggtgacaaggcgaccaggcaagagctgggtgtgtctggacgcctagatggcacaaggtgctacttttccccaaggcgagctgggtatgcttggacacctagcctctgaaacatgctaccacatccataataatgtaatgaataaatatcagcatttcagttacatagccgtataaccttctattccggacataatatttctatgtttttgttactctgtgtctgaataaatagatttctgctttaaaaaaaaaaacat

SEQ ID NO: 86205 - DNA, 394 bp, Zea mays
  Clone ID: MRT4577_178629C.1
cggctagaaatctatttattcaggcacagagtaacaataacatagaaatattgtgtccggactagaaggttataaggctatgtaactgaaatgctgattttattcattacattattatggatgctaccatgtttcaaaggctaggtgtccaagcatacccagctcgccttggggaacagtagcaccttgtgccatctaggcctccagacacacccagctcttgcctggtcgccttgtcaccttagaaaccacggatgctatggtttctagatcagtagactagcaatgcaaatggatataacaactcaacaagcagatcctccgccgttgctttcaacaagcagaatagtttcgcaatgctgattctaacggaaacgggaaaaagaactagaaa

SEQ ID NO: 86206 - DNA, 413 bp, Zea mays
  Clone ID: MRT4577_17862C.1
atcgccggtcccctcctccgcgcgggcagagcgggctgcccctcctcctcaagcgcagatcgtgtgagccacatcacctatgtgcaagaacgcgaagagcagcggcgtccgggctcgctttggcgagcccccgaccatggacgaaattgcgctcaagcgcccacacatccaggcccgggacttagacatcgacccgaccctgactgaagcctcgaccacagacgcgctgccaatatactagaccagactcgacagtgctctgaaggagagcagccgcacgagccgggtgttcagcagctgagttgagaagcacggcgttcaggcggacatcatgctctgcatacgacaacacacctcacacacagcatggggcttacacccggcaaggcggtactcctgaactacggggagag

SEQ ID NO: 86207 - DNA, 1258 bp, Zea mays
  Clone ID: MRT4577_178630C.1
gtaccctccgggtttggccggggcctacttccccgtcctcactcctcaccaccacaagtgaagtcaccgacgcacgcacggctgcagcgcgctcctactctcccgcgatcgccaccggggaggggcaatagaataaagcgagggcagccaatgcaggccgccgtcaacaccaccactgtcggcgctcacccgcacccaacaaagtcctcgttcctccgtccgtcccctccttgccgcgtctacttccacgcttctccacgcccgaaccttagggcgattgccatggccagcaagtcgcagctgcaggagcaactgatcatcactcgccccgacgactggcacctccatcttcgcgaaggcggtgtcctcgaggctgtagtgccacacagcgcgaggcattttgggagggccatcatcatgcccaacctgaagccgccggtgaccacaacggcacgggccgtggagtacagggaggagataatgagggcgctgccggcagggagtagcttcgagccgctcatgacactatacctcacagacaacacaagcccagaggagatcaagctcgcaagaaagagtggtataatttttgctgtgaagttgtatcctgctggagcaactaccaattcccaagatggtgtcactgatatatttgggaagtgcttgccggtcctcgaggagatggtcaggcaggaaatgccgttgcttgttcatggagaagtcacagatccacatgttgacacatttgaccgcgagaaggttttcattgacaaaatattagcaccacttgtacaaaaacttccgcagctgaaaattgtcatggaacatatcacaactatggatgcagtgaacttcatagaatcatgtgaagaaggtcatgttgctgcaacagtgactccccagcatctcctcctcaataggaatgctttatttcagggtggcttgcagccacacaattattgcttgccagtactgaaaagagagactcatagtatgttgcgatggcctcctataagaaatgctaccatttgttataaaaatgcagaatcatattccttttggttcaccaaataactagagtttcttcagaaattatgaaacagcttcttaaacatgatgataatgatgttttgtcttacataacaatttatagtcttacatttgtctgttgcctggttaaatttgggtatcagctatcatttcaattaactgtaatgtaaatttttttccgttacccatttgaaccatcacccaggac

SEQ ID NO: 86208 - DNA, 828 bp, Zea mays
  unsure (1)..(828): unsure at all n locations
  Clone ID: MRT4577_178631C.1
naaacagctattgtgtctgctgtacaaagggagtagacggtacttccttggtactgacagcgctccccatgataaacggaacaaagagtgttcctgtggatgtgctggaatatatagcgctcctgttgccttgtctctttatgtgaaggtatttgaagaggctggtgcccttgataaactagaagcatttacaagcttcaatggccctgatttttatggcctcccaaggaacacttcaaagattatcttgagaaagaatgcctggaaagttcctgctacttataaacacagttcaggggagattgtgcctatgtttaatggcagcacccttgaatggcttccatctgatcagcctaaagagtaaacagtatacattattggacccagcacttgggggaatcaataggtggagttttctagttctttttcccgtttccactagaatcagcatagcgaaactattctgcttgttgaaagcaacggtggaggatctgcttgttgagttgttatatccatttgcattgcagtgcaattctggaagtagctaaaaggccatattgtatgtttatcaaggctagtctactgatctagacaccatagcatctgtggtttctaaggtgacaaggcgaccaggcaagagctgggtgtgtctggacgcctagatggcacaaggtgctactgttccccaaggcgagctgggtatgcttggacacctagcctttgaaacatgctaccacatccataataatgtaatgaataaatatcagcatttcagttacatagccgtataaccttctagtccggaaataatatttctatgtttttgtt

SEQ ID NO: 86209 - DNA, 456 bp, Zea mays
  Clone ID: MRT4577_178632C.1
atgccgtcctcctcttcttccgccgataccacgccgccggcggccgcctcgtctgaggagacgttgagtagcttgatggtggaggagttgcgcgccggcgactctgttgattttggtgtgtcacggatgacgtcagcccacgttgaagatatgcagcggttgggctactttggcggcggagttgctcgtgctccagggacggaggaagtccccgagccggaggtggcagaagaggatgcagacgaaggggcccttcggtgcgccgccggtcagagtagtgggcgtgatttagttgaagagttcgtggcgtacggggtctggcccttggcgcacggctgggcgttgggtgagagagttgatgaggacgtgtgcggccccgggggaaaggatgtcttcgcccgagctccgggagtcttcggctcggatgctaagggttacctggggctgctggcctag

SEQ ID NO: 86210 - DNA, 370 bp, Zea mays
  Clone ID: MRT4577_178633C.1
tctcgtcgatgtatggttgattctttaatttggttccttttgctgtacttttgtgggccatgaaaacgggggaaacttggtaagaaaaaaaaaaaaaaaaaaaaaaaaaaaaaaaaaaaaaaaaaaaaaaaaaaaaaaaaaaaaaaaaaaaaaaaaaaaaaaaaaaaaaaaaaaaaaaaaaaaaaaaaaaaaaaaaaaaaaaaaagggggggccctttaaaagaatcaaatttaactaacccgggcttggaacgaaaaagtttttttatagggcacctaaaatcaaatcaatgggccgatttttaaaaactgttgaattggaaaaacctgggggttcccaaattaaaaggctttgaaaaaaatccccttt

SEQ ID NO: 86211 - DNA, 2079 bp, Zea mays
  Clone ID: MRT4577_178634C.1
gtcggcacaccggcaacgggaaaggaagggataccgacgccgagcacgcgccgagcaacgtctcgaaaaggccatgcaggacagcgtcgaggtgctgttcctagacggcgtcggggaggtcgccgtcaccatcggccgcaacggcctctctgcacgccccctccacccggaactgatctcttcatgttggtcgtccattacactgcagcctaaattagacagcaaaatcaacttttcagatgtttatgccatagagatgcttgataagggtcctatctgtgggccttggaatacaaagactgctattcaaggcaagaaaaatattgagatgcaccggtttgtcgtacatgggattaccagaagaaggaaaaacccttctccgtgggtaccttgtgaatatatttttggtcacaaagacttgaagatctgcaaagattggtttcagcgtctcatttcgtgcataaacaatgaaagtggtagaccaaagaacttaatggtagatatgctgcatttcttttcttctcttgaccaccatagcacttcagcagacatgctatgtatattcggcatttcttcttctagataactcatcaacacactataggtatttgttcatccattgtgtggaaaaggtagaggggtcagtaactgggaaacagtgtctccgttatttgctagagcaaaaataaaaacaaaggtgatagtgacagagagagcagggcatgcatatgacacactatcatcattatcagatatagaactgaaggcatttgatggtgttgttgcagtgattctactgaagaaccatgtattggagatcaggataacccagtttccttcccaaatgactggtttaggcttggcataattccttctggctcaactgatgctattgttctcagcacaactggggagagagatcctgtcacctctgctctgcttattattcttggcagaaaggtgtcacttgatatagctcaagtcgttagatggaaaactagcccagcagctgaggttttgcctactgtacgctatgctgcttcatttgcaggttatggcttttatggagaagttatcagggagagcgaaaagtaccggtggatgggtcctgcacgttatgacttttctggaacaatggtctttctgaagcacaggtgagtaatggttgtactattgtagcatgctgttgacaagttaacaatctctggacattttcaggtcatatggggcaaaggttgcttttctcgatactccatacactcattcgcttacagcatcagcacaggatgatataactggagcacaaccactacaatctcgttggaagaaacctcgcaaaataatctgcagaacaaattgctttgtatgcaaagaggcttcaacatctggacaaaatccagatgatgttgcagacaactccagaacaatatgcgagaaccagaagtgggtctggtccgaaggacatttcctcagcgtcggtgcagctgtcatttcatgtcgtaacgaaagagcccctgatggcctggtagctgacgcacacctttcggatggttttcttcatctcttgctcataagagactgccctcttcccctttacttgtggcatctaacacaatttaccaagaagggttcagatcccctgtccttcaagttcgttgagcatcacaagacacaagcgtttacctttatctcatcacatgacgaaagtgtttggaacttggatggagagatgtttcaggcatgtgaggtatctgtccaagcgtgccgggggcttgtcaacttctttgcttcggggccagagctgtagtaatgatactcgtaagttcctctttgcatgaacgaaggatgccaggagttcatattttttatttagagagtcccttatttcgacatgttgtacactcttatttgtattttagtggagacctagaacactttgttgatagatatactgttaatatttgttgatagctatgtggcatggaaactacaacccatttgtgctatagaatagaggaacaaaaggttttgattgaattaatgaagtaaaagtttattttctgttttgcgagaaaaaat

SEQ ID NO: 86212 - DNA, 3105 bp, Zea mays
  Clone ID: MRT4577_178636C.1
atgccgtcctcttcttcttcctccgacaccacgccgccggccgccgcctcgtctgaggagacgttgagtagcgtgatggtggaggagttgcgcgccggcgactccgttgattttggtgtgtcacggatgacgtcagcccgcgttgaagatatgcagcggttgggctactttggcggcggagttgctcgtgctccggggacggaggaagtccccgagccggagggtgagttggtcattttcgaggcgttcttcgccgccggtctccgcttgcctgcgcaccggtttgtcggcgaagtcctgcgtagattcaatgttcagatacatcagctgacaccgaatgccatggtggcgctggcgaagtatgtctgggcgacgacttcgtacggcgggcagccgtctgttgaagtttttgcgaagaattattgtttgcattggcagaagaggatggttggggacggagttgcccagttcgggtcatgcacattcacgccgaagaccggcaagaccacaatgccagtagtggagttggttccgtgcgcccgcaacaagtggggcaattggaatgaattttggttttacgttgcggagggtactgtcgaaggccataaaggtctccctgtgtctgagatgtgctctcattattactctacgtatccgccttttgaagtggcagaggaagatgcagacgaaggggcccttcggtgcgccgccggtcagagcagtgggcgtgatttagttgaagagtttgtggcgtatggggtgtggcccttggcgcacggttgggtgctgggcgaagtgtgccctcgccagatgccttttcacggaggaagggttgtgcgaagccctgccttcgcactgaatctgcggaaccgcgacccggctgcctttgtgcgcgacgcggaggacggggccgtgcggctcgtggggcgttacgtgccgaggacggaaggccagcgcagctttgatatccgcgggtcaaatgaccgtctgaacagggtcttcgaattaaatcaattgccgtacgatggatatcctggtcaagacgaagccgaccgccgcgggaagaaaccggcggtggagacaggagacgacccagcgccggcggccgcccctccctcgaaaaagagaaaattaggtactgcgatgggagggattggggtgtctgatagttttgctagggatttaatgaggacgtgtgcggccccgggggagaggatgtcttcgcccgagctccgggagtcttcggctcggatgctgagggttatcgggggttgctggcctagaaatgttcctatcccctgcgcggctgaggaggactgttttacatctcgtatggttcatcggtggagagtttttccttacgggcgaaatatcggtgctgttgtgtggacagtgatggacaaggatcgccaaggggcggcgcaaaaacgccaggcgactgtcaggattcacgaagctcggccgaaaaggccgcggggaactgcgaaggctgtggcctccggcggaggtaagccgccgctggcggcgaaggctggcacctctgcacctagcaaggcgccggaggcaacggcgggcgccggaggctccaagtcagcgaaggtggtgcccccggccagcggagtggcggaggcttcgaaggcggcccgagcgctgccgctggcgggcaagcgtgttgccgacttcggcaccgacattactgtggatgactatcttggtgggtcggacgagggccagcttgccatagttgcgcctgccgcggcgatcgcgacggctgcgcaagcgccgaaggcgaggggcgagatccttggcgccagaggcgaggtgccggccctcgcgttggtcagggacgaggcgggcgcggcgacccgccggctgaagggagtgacggaggcgctgagtcaggcgatggaggcgctgagtcaggtggctgatttcaccagccgtactgtgtcaggggcccttacgacggctttgtctgccgaagtcgagagacttcggacgcaacatgctgacgctgtccgtgagaagtcggcctccgacagcaagtgccgcaatctgacagacaaggtggccgccctggagagggagaaagttgacctccggcgccaactggcggcggagaggagggaagccaacgaggccatcgccaaggaacaggctgcgcaggcggatgccaagctggcgcgggcggagggcaatcttgccaaggagctcagccgcgcgaaggaggccgaggccgcgatgcgtgcggaggccgaacggacgcgcacacagcttatggatacatatcgtgagcttggtgcgcggaccggtgacttcgaggtgccggaccgagagcctgggcttcgctgtctgcagtgggcgcaggaggagctgctggaacttccaaccgttgtgggggggttgatgtcgtacgcctccctggtcacctgcgagggggcgatgaacgcgctctcccgcgaagggtgccggcacttcgaggccttcgaccaggtggatgaagactttgagcgagacatctataaggtcgaagaccccgtagtgaaggagtccgccggggccctttacgaccggatgtggggtctgtacggtcgtgaggtggtcagggagcgcgccgaggctgcgagggctcaggttcaagaatttgggcctgcgcacgcaaccgctgctactgagtttttggcggcttcgaccgcggaaggtgggaatgaatatggtgggcctgtatctgagttttttgattttactgactctgggagctcggttgagtggactgaggagtcgtcggaggaggacttggattattttgcggccttggacgtggctgcggcggaggcgtcgccacacaccgcggacgcgtcaaacgtgccaggtcctagcaccggacgccgacgacgaagggcggttgcaaagcgtagggttagcgcggaggaaggggctcggcttcgcgtgagtagggctggtcggcaggagctgctgtcttcgccggccgccgcgggtgtaggggaaggggagctgcgaagtctttttgcgggtgaggagcttaggataatgttatttaattatagggagatgggaattattcctaagattgagccgatgtag

SEQ ID NO: 86213 - DNA, 1365 bp, Zea mays
  Clone ID: MRT4577_178637C.1
atggacaaggatcaccaaggggcggcgcaaaaatgccaggcgactgtcaggattcacgaagctcggccgaaaaggccgcggggaactgcgaaggctgtggcctccggcggagggtcggacgagggccagcttgccatagttgcgcctgccgcggcgatcgcgatggctgcgcaagcgccgaaggcgaggggcgagatccttggcgccggaggcgaggtgccggccctcgcgttggtcagggacgaggcgggcgcgacgacccgccggctgaagggagtgacggaggcgctgagtcaggcgacggaggcgctgagtcaggtggctgatttcaccagccgtactgcgtcgggggcccttacggcggctttgtctgccgaagtcgagagacttcggacgcaacatgctgacgctgtccgtgagaagtcggcctccgacagcaagtgccgcaatctgacagacaaggtggccgccctggagagggagaaagttgacctccggcgccaactggcggcggagaggagggaagccaacgaggccatcgccaaggaacaggctgcgcaggcggatgccaagctggcgcgggcggagggcaatcttgccaaggagctcgtggagcaactgcaagggcggctcaccgccctggagagccgcgcgaaggaggccgaggccgcgatgcgtgcggaggccgaacggacgcgcacacagcttatggatacatatcgtgagcttggtgcgcggaccggtgacttcgaggtgccggaccgagagcccgggcttcgctgtctgcagtgggcgcaggaggagctgctggaacttccaaccgttgtgggggggttgatgtcgtacgcctccctggtcacctgcgagggggcgatgaacgcgctctcccgcgaagggtgccggcacttcgaggccttcgaccaggtggatgaagactttgagcgagacatctataaggtcgaagaccccgtagtgaaggagtccgccggggccctttacgaccggatgtggggtctgtacggtcgtgaggtggtcagggagcgcgccgaggctgcgagggctcaggcggagcgcggcgagcgggtggacgacttcggggctctggacagcgtgctgccagatctggggtcgaccctcgcggaggctgtgactggggtcgacctggggccaaccccggagaccgcagcgatcgcgacggctgcccccccatccgctgcgactggcgaaggcgaccctgatgcccccgcagccgctgtgccgagtgctgaaggttccgcggcggtggcggcggaaactgcggcagaggccgcggcggagccaacggcggaggctcctgcagcgccagggccttcgcaggtggcatag

SEQ ID NO: 86214 - DNA, 181 bp, Zea mays
  unsure (1)..(181): unsure at all n locations
  Clone ID: MRT4577_178638C.1
ttattataaacttgcacgcacacacaaacggaggggnatgatgacataaggggggcgaccaacaagccacgagagagaccagacaaggaacgaaccagcacgaggggcaaaataaactaggaaagaaggcggcggccacacgccgagggacgacaagacaagcacacgacccagccggagg

SEQ ID NO: 86215 - DNA, 1603 bp, Zea mays
  Clone ID: MRT4577_178639C.1
atgccgtcctcttcttcttccgctgccagtacgccgccggccgccgcctcatctgaggagacgttgagtagctcgatggtggaggagttgcgcgccggcgactctgttgattttggtgtgtcgcggatgacgtcagcccgcgttgaagatatgcggcggttgggctactttggcggcggagttgctcgtgctccggggacggaggaagtccccgagccggagggtgagttggtcgttttcgaggcgttcttcgccgccagtctccgcttgcctgcgcaccggtttgttggcgaagtcctgcgtagattcaacgttcaaatacatcagctgacaccgaatgccgtggtggcactgtcgaagtatgtctgggcgacgactttgtacggcggacagccgtcggttgaagttttcgcgaagtattattgtttgcactggcagaagaggatgattggggacgaagttgcccagttcgggtcatgcacattcacgccgaagaccggcaagaccacaatgcaagtagtggagttggttccgtgcgcccgcaacaagtggggcaattggaatgaattttggttttacgttgctgaggctactgtcgaaggccatgaaggactccccgtgtctgagatgtgctctcattattactctgcgtatccgccctttgaagtggcagaggaggatgcagacgaaggggcccttcggtgcgccgccggaagggaggtgcgaagtcctgccttcgcactgaatctgcgaaatcgcgacccggccgcctttgtgcgcgatgcggaggacggggcggtgcggctcgtggggcgttacgtggcgaggacggaaggccagcgcagctttgatatccgcgggtcaaatgaccgtttgaacagggtcttcgaactgaatcaattgccgtacgacggctatcctggtcaagacgaagcggaccgccgtgggaagaaaacggcggtggagactggaggcgaccctgcgctggcggccgccccttcctcaaaaaagagaaaactaggtactgcgatgggagggcttggggtgtctgatcgttttgctagagagttaatgaggacgcgtgcggccccgggggaaaggatgtcttcgcccgagctccgggagtcttcggctcggatgctgagggttaccgggggttgctggcctaggaatgttcctatcccctgcgcggctggcgaggactgttttacatctcgtatggttcgtcagtggagagtttttccttacgggcggaatatcggtgctgttgtgtgggcagtgatggacaaggatcgccaaggtgcggcgcaaaaacgccaggcgactgtcaggctgcatgaagctaggccgaagaggcatcggggggctgcgaaggctgcggcctccggcggaggcaagccgccgctggcggcgaaggcgggcgcctctgcacctagcaaggcgccggaggcaacggcgggcgctggaggctccaagtcaacgaaggtggtgccgccggccatcggagtggcggaggcctcgaaggcggcccgagcgttgccgttgtcgggcaagcgcgttgccgacttcggcaccgatattactgtagacgactatcttggtg

SEQ ID NO: 86216 - DNA, 360 bp, Zea mays
  unsure (1)..(360): unsure at all n locations
  Clone ID: MRT4577_17863C.1
gcccttctcnccaaaactcccaatcaccctcaccatgnatatgccacacacatctacattcccacaaggcagggagccagtactactgctaatccgttgcagaaggatccctcgcgcgggaatagatgctccctgccggaggcaagcacaaaggctagcggccacctcactaagacacgctatatgaggccactgcacctcctgcacgcctttcgcgcggcacagacctactacttacatgcagacttccctgaccattatcctatgacggcacctcaggagcacggttggtcaatgcactgtcgacggagccacacatctactaggacgggcacatctgattagatattttaaatgact

SEQ ID NO: 86217 - DNA, 198 bp, Zea mays
  Clone ID: MRT4577_178640C.1
acattcacgtgcagcttgttggtagcaggcaatggggccggatctaagcgaactcgccgccgccgttgaaggccgcggcgcctacctcgcaggcgacggtggcggggtcctcctccctggctccttcctcccagcagacgagtctgcctgcgtgcgagataactgattgctgacagacataaggcaaatgccgcaaat

SEQ ID NO: 86218 - DNA, 839 bp, Zea mays
  Clone ID: MRT4577_178641C.1
cggccgctcaggcggcgggcgggacgatgcgaaagagcgtttttcgatttcaaatccgcccccctcctccgcttgccccctgcctgcccttttccgcctgctccccgccgcatctagggtttccggccccccgaaatcgccccgcgccccccgccgccggcgagaatgtcggccagcgccgcgcccgagaaggccgccgggttcggcggggagctgctctactgcggcgccaccaacttcgacgccatcaaccgcaagctggccggcgggatgcagggcaacctcgtctccccgacgcggctgcgctcgctcatgggcgtcgacatcgtatccgtcgcctccggctgcaccgcttgccattgtgttgctttgggtgctgatgggcgttgctatacatggggtcgcaatgagaaggggcagttgggacatggggatactcttcaacgtaacctaccgactgttgtttctgaactatcaaaatataaaataattaaagcaagtgttggaaaaaatcatacagtggttgtaactgatgacgggaagtccttcgcatttggccacaacaaatttggacagttggggacaggttccctaaagaatgaaattgaggcatcaccagtgccctgtcttgtgacggaagtgactggtgttgcttgtggtggtgattttactgtctggctgtcgtcagtcgagggctctactatactttcagcaggccttcctcagtatggccaacttggtcatggaaacgacaatgagtacaataccaaagattcgtcagtaaagctatcatatgatcctcagccccgtcctagggccatagctgcattatctgagaa

SEQ ID NO: 86219 - DNA, 861 bp, Zea mays
  Clone ID: MRT4577_178642C.1
gcaggttatggcttttatggagaagttatcagggagagcgaaaagtaccgttggatgggtcctgcacgttatgacttttctggaacaatggtctttctgaagcacaggtcatatggggcaaaggttgcttttctcgatactccatacactcattcgcttacagcatcagcacaggatgatataactggagcacaaccactacaatctcgttggaagaaacctcgcaaaataatctgcagaacaaattgctttgtatgcaaagaggcttcaacatctggacaaaatccagaagatgttgcagacaactccagaacaatatgcgagaaccagaagtgggtctggtccgaaggacatttcctcagcgtcggtgcagctgtcatttcatgtcgtaacgaaagagcccctgatggcctggtagctgacgcacacctttcggatggttttcttcatctcttgctcataagagactgccctcttcccctttacttgtgttctctgtttgcaaattcgttacctaataatgatctaattggccccgtgctaagtaagtccagtagcttttctaggaaaaacaagcagttcactattcttattgtatttgatggaattgttctgcatctaacacaatttaccaagaagggttcagatcccctgtccttcaagttcgttgagcatcacaagctatgtggcatggaaactacaacccatttgtgctatagaatagaggaacaaaaggttttgattgaattaatgaatcctaagaatcaaacacgcttaagtgagacgcacctgacaggggaaccaggcattaccttcaattctgttgcaagtctggaaggccagatatggcggcacatttag

SEQ ID NO: 86220 - DNA, 872 bp, Zea mays
  unsure (1)..(872): unsure at all n locations
  Clone ID: MRT4577_178643C.1
ttgggtacctcgaggccggccgggactctcacccctccttcctcctctccccatcgcctgttgccaccgcgcccgcacgggccctccccaaccaccgggacttgataccctttcaccagactagagcatgcgaattgttgcgacgcgacccacctctactccccctttctcttctcctacaggtcctccttgcatccgcgtccatcgcgatcagaacagccatggacgatcacgtcctcgacggcgtgaagaagaacattgtcgtcaccaacaacgccgaatccgacgggctcgaccgctttgccgtcgacgagtacaagtgtgagctcctcggaacgggacacggaggtcatcaggtccaagttccgcaagcagaccaggaaggggcatcattgcctttgtcacagtcgacgagagccagttcacgctcaccgatgaggtcactggaggacaaagtggagcaatggaagatctttcttggcatgtcaagacttttgagagggagacattgggtggggcgaaggcgaagacgccaccncttcgctcgaaggccttcgccacatcctctgcaacaactgagacaagacgactggcgaattctacccttcgctccacgcaccaggagacgaagccctacggcgaagtcgccttttcccgcgacctcgtccagcacggaggcccacgtgtgatccggcccatcgtattaggccctgcgtggccgctgcgcattacgggcctaagtttgtaaaggtctccctgtaattatagtctgtaatcctgcttatggngaatatttccgggataactaggcgcccgaggcacatgcgtccttaacactggacgctgggcactcagacacctatnaatacccc

SEQ ID NO: 86221 - DNA, 3201 bp, Zea mays
  Clone ID: MRT4577_178644C.1
atgccgtcttcctcttcttccgctgctactacgccgccggccgccgcctcgtctgaggagacgttgagtagcttgatggtggaggagttgcgcgccggcgactctgttgattttggtgtgtcacggatgacgtcagcccgcgttgaagatatgcagcgattgggctactttggcggcggagttgctcgtgctccggggacggaggaagtccccgagccggagggtgaattggtcgttttcgaggcgttcttcgccgccggtctccgcttgcctgcgcaccggtttgttggcgaagtcctgcgtagattcaacgttcaaatacatcagttgacaccgaatgccgtggtggcactggcgaagtatgtctgggcgacgacttcgtacggcggacagccgtcggttgaagtttttgcgaagtattattgtttgcattggcagaagaggatgattggggacgaagtcgcccagttcgggtcatgcacattcacgccgaagaccggcaagaccacaatgcaagtagtggagttggttccgtgcgcccgcaacaagtggggcaattggaatgaattttggttttacgttgctgaggctactgtcgaaggccatgaaggactccctgtgtctgagatgtgctctcattattactctgcgtatccgccctttgaagtggcagaggaagatgcagacgaaggggcccttcggtgcgccgccggtcagagcagtgggcgtgatttagttgaagagttcgtggcgtacggggtgtggcccttggcgcacggctgggcgctgggcgaagtgtgccctcgccagatgccttttcacggaggaagggtggtgcgaagccctgccttcgcactgaatctgcgaaaccgcgacccggccgcgtttgtgcgcgatgcggaggacggggcggtgcggctcgtggggcgttacgtgccgaggacggaaggccagcgcagctttgatatccgcgggtcaaatgaccgtttgaacagggtcttcgaattaaatcaattgtcgtacgacggctatcctggtcaagacgaagcgaaccgccgtggaaagaaaccggcggtggagactggaggcggccgccccttcctcaaaaaagagaaaattagttttgctagagagttaatgaggacgtgtgcggccccgggggaaaggatgtcttcgcccgagctccgggagtcttcggctcggatgctgagggttaccgggggttgctggcctaggaatgttcctatcccctgcgcggctggcgaggactgttttacatctcgtatggttcgtcggtggagagtttttccttacgggcggaatatcggtgctgttgtgtgggcaatgatggacaaggatcgccaaggtgcggcgcaaaaacgccaggcggctgtcaggctgcatgaagctaggccgaagaggcagcggggggctgcgaaggctgcggcctccggcggaggcaagccgccgaaggcgggcgcctctgcacctagcaaggcgccggaggcaacggcgggcgccggaggctccaagacaacgaaggtggtgccgccggccagcggagtggcggaggcttcgaaggcggcccgagcgttgccgttgtcgggcaagcgctttgccgacttcggcaccgatattactgtagacgactatcttggtgggtcggacgagggccagcttgctatggttgcgcctggcgcggagatcgcgacggcggccatagtgccgaaggcgaggggcgaggcccttgacgccggaggcgaggtgtcggccctcgcggtggtcagggacgaggcgggcgcatcgacccgccggctgaagggagtgacggaggcgctgagtcaggcgacggaggcgctgagtcaggtggctgacttcgccagccgtactgcgtcgggggccctcacggcagctgtgtctgccgaagtcgagagacttcggacacaacatgctgacgctgtccgtgagaagtcggcctccgacagcaagtgccggagaaggctgacctccggcgcccaactggcggcggagaggagggaagccaacgaggccgtcgccaaggggcaggctgcgcaggcggaggccaagctggcgcgggcggagggcaatcttgccaaggagctcgccgaacatctgcaagagcggctcaccgccctggagagccgcgcgaaggaggccgaggccgcgatgcatgcggaggccgaaaggacgcgcacgcagcttatggatacatatcgtgagctgggcgcgcggaccggtgacttcgaggtgccggaccgagagcccggccttcgctgtctgcaggaggagctgctggaacttccagccgtcgcgggggggttgatgtcgtacgcctccctggtcacctgcgagggggcgatgaacgcgctctcccgcgaagggtgccgacacttcgaggccttcgaccaggcggatgaagattttgagcgagatatctataaggtcgaagaccccgtagtgaaggaatccgccggggccctttatgaccggatgtggggtctgtacggtcgtgaggtggttagggagcgggccgagactgcgagggctcaggcggagcgcggcgagcgggtggacgacttcggggctctgaacagcgcgctgccggacccggagccgaccctcgcggaggctgtgactggggtcgccctggagccaaccccggagaccgcagcgaccgcgacggctgcccccacatccgctgtggccggcgaagacctgcccccgaaggtggccgaaggcgcccctgatgcccccgcagctgctgtgccgagtgctgaagatcccgcggcggtggcggcggaaacaacggcggaggcagcggcggagccaacggcggaggcacccgcagcgtcagggccttcgcaggttcaagattttgggtctgcgcacgcaaccgctactactgagtttttggcggcttcgaccgcggaaggtgggaatgaatatggtgggtctgtatctgagttttttgattttactgactctgggagctcggttgagtggactgaggagtcgtcggaggaggacttggattattttgcggccttggacgtagctgcggcggcggcttcgccacacgccgcgggcgcgccagacgtgccaggtccttgcaccgggcgccgacgacgaagggcggttgcaaagcgtagggttagtgcggaggaaagggcccggcttcgc

SEQ ID NO: 86222 - DNA, 3868 bp, Zea mays
  Clone ID: MRT4577_178645C.1
atggccggttcaagggatagttctgaagtttctccaagcaacatcatagagccgacttgggaaaccttgccgaccgacgaacagctccagttcgaggagcacaaggagcagatgatccaggaggcgaaagcaaagttcttggccaacttcaaagtcgacaggaacaacaaggtcgtccgacatcgggcgacagatccagcttcactgcaacccacgccagatatccccaatgtaagtaatacaaacgagctgcaatctcttaagaattatgtagatgaacagcgtgaacaaatgcaaaatatcataggggatatgcaaaacgactataggaggtttcccgaagcgccgcgccctgcctataaaagggggcgggggtcggcgctgtttgaactttgccttccacgctccgtaaaaaccctatccgcccgccgtcttgctgttcctcttcttccgctgctccttttgctcgccggagttctggctcgagtgaagcagaccgcccgccgccgccgatggtacgtagcaatgccgtcctcttcttcttccgccgacaccacgccgccggccgccgcctcgtctgaggagacgttgagtagcgtgatggtggaggagttgcgcgccggcgactctgttgattttggtatgtcacggatgacgtcagcccgcgttgaagatatgcagcggttgggctactttggcggcggagttgctcgtgctccggggacggaggaagtccccgagccggagggtgagttggtcgttttcgaggcgttcttcgccgccggtctccgcttgcctgcgcaccagtttgttggcgaagtcctgcgtagattcaacgttcaaatacatcagctgacaccgaatgccatggtggcgctggcgaagtatgtctgggcgacgacttcgtacggcggacagccgtcggttgaaaagaggatggttagggacggagttgcccagttcgggtcatgcacattcacgccgaagaccggcaagaccacaatgccagtagtggagttggttccgtgcgcccgcaacaagtggggcaattggaatgaattttggttttacgttgctgagggtactatcgaagaccatgagggactccccgtgtctgagatgtgctctcattattactctgcgtatccgccttttgaagtggcagaagaggatgcagacgaaggggcccttcggtgcgccgccggtcagagcagtgggcgtgatttagttgaagagttcgtggcgtacggggtctggcccttggcgcacggctgggcgctgggcgaagtgtgccctcgccagatgccttttcacggaggaagggtggtgcaaagtcctgccttcgcactaaatttgcgaaaccgtgacccggccgcctttgtgcgtgatgcggaggacttggcggtacggctcgtgggacgttacgtgccgaggacggaaggccagcgcagctttgatatccgtgggtcaaatgaccgtttgaacagggtcttcgaattaaatcaattgccgtacgacgactaccctggtcaagacgaagcggaccgccgtgggaagaaaccggcggtggagactggaggcgaccctgagctggcggccgccccctcctcaaaaaagagaaaattaggtactgcgatgggaggacttggggtgtttgatagttttgctagagagttaatgaggacgtgtgcggccccgggggaaaggatgtcttcgcccgagctccgggagtcttcggctcggatgctgagggttaccgggggttgttggcctagaaatgttcctatcccctgcgcggctgaggaggactgttttacatctcgtatggttcatcagtggagagtttttccttacgggcgaaatatcggtgctgttgtgtgggcagtgatggacaaggatcgccaaggggcggcgcaaaaacgccaggcgactgtcaggattcacgaagctcggccgaaaaggccgcggggaactgcgaaggctgcggcctccggcggaggcaagccgccgctggcggcgaaggcgggcgcctctgcacctagcaaggcgccggaggcaacggtgggcgccgggggctccaaactgacgaaggtggtgccgccggccagcggagtggcggaggcttcgaaggcggcccgaacgttgccgccatcgggcaaacgcattgccgacttcggcaccgagattaatgtggacgattatcttggggggtcggacgagggccagcttgctatagttgcgcctgccgcggcgatcgcgacggctgcgctagcgccgaaggcgaggggcgagacccttggcgccggaggcgaggtgtcggtcctcgcgatggtctgggacgaggcgggcgtggcgacccgccagctgaagggagtgacggaggcgctgagtcaggcgacggaggcgctgagtcaggtggctgacttcaccagtcgtactgcgtcgggggcccttacggcagctttgtctgccgaagtcgagagacttcggacgcaacatgctgatgccgtccgtgaaaaatcggcctccgacagcaagtgccgtaaattggcggacagggtgctggagaaggagaaggctgacctccggcgccagctggcgggggagaggagggaggctaacgaagccatcgccaaagagcaggctgcgcaggcggaggccaggctggcgcgggcggaaggcaatattgccaaggagcgcgccagacagctgcaggagcggcttacagccctggagagccgcgcgaagggggccgaggccgcgatgcgagcggaggcggaacggacgcgcacgcagcttatggctgcatatcgcgagctgggtgcgcggaccggtgacttcgaggtgccggagcgagaggccgggcttcgctgtctggaatgggtgcaggaggagctgcaggagctccccactgtcttggaggggttaatgtcgttcacctccctggcagatgaagattttgggcgagatatctataaggtcgaagaccccgtggtgaaggaatccgccggggccctctatgaccggatgtggggtctgtacggtcgtgaggtggtcagggagcgggccgaggctgcgagggctcaggcggagcgtggcgagcgggtggacgacttcggggcactaaacagcgcgctgcctgacccggagccgacccccgcggaggccgcgactggagtcgccctggaaccgaccccggagactgcggaagacgcgccaggcgcccccacatctgctgcggccggcgaagacctgcccccaaaggtggccgaaggcgcgcctgatgcccccgcagctgctgcgccgagcgctgaagatcccgcggcggtggtggcggaagcagcggcggagccaacggcggaggctcccacagcggcagggccttcgcaggtggcgttcaagattttgggcctgcgcacgcaacccgtctactactgagtttttggcggcttcgaccgcggaaggtggaaatgaatatggtggatctgtatctgagttttttgattttactgactctgggagctcggttgagtggactgaggagtcgtcggaggaggatttggattattttgcggccttggacgtggctgcggcggaggcttcgccacacgctgcggacgcgccagacgtgccaggtccaagcaccgggcgccgacgacgaagggcggttgcaaagcgtagggttagcgcagaggaaggggctcggcttcgcgtgagtagggctggtcggcaggagctgttgtctttgccggctgctgtgggtacaggggaaggggaactgcgaagtctttttgcgggtgaagaacttaggataatgttatttaattatagggagatgggaattattccaaaggttgagccgatgtag

SEQ ID NO: 86223 - DNA, 217 bp, Zea mays
  unsure (1)..(217): unsure at all n locations
  Clone ID: MRT4577_178646C.1
cgttcggtccnttctaaaatgtacaaagggattagggaccattcaagggcgcttgggggtgtattaaaagaaagtggtaaaagcttggaagaacttaaaagaaaatattgatagggttaaccaaaaggtgaacactattcttaattggggatttcaaaaccgcaaaaaatatttttccaacaagaaggaccggctttcaagttaattgaattggttt

SEQ ID NO: 86224 - DNA, 297 bp, Zea mays
  Clone ID: MRT4577_178647C.1
tttatccggcacgagtgcgcggccgcgggggattattgtagcgcgggggtgacacaccagtccgtgggcgaccgagtgaagctggagccggtcatcagctgctggcgctgccgccactgcaagggcgggcggtacaacctgtgcgaggacatgaaattcttcgtcaccccgccggtgcacagatcgctagccaaccaggaggtgcaccctgccgacctttgcttcaagctcccctacagagtgagcctgcaagagggcgccatgtgctagccgctgagcgtgggctttcacgcgtgc

SEQ ID NO: 86225 - DNA, 1599 bp, Zea mays
  Clone ID: MRT4577_178648C.1
atggacaaggatcgccaaggggcggcacaaaaacgccaggcgactgtcaggctgcatgaagctaggccgaagcggcagcggggggctgcgaaggctgcggcccccggcggaggcaggtcgccgctggcggcgaaggcgggcgcctctgcacctagcaaggcgccggaggcgacggcgggcgccggaggctccaaaccgacgaaggtggtgccaccggccagcggagtggcggaggcttcgaaggcggcccgagcgctgccgttgtcgggcaaacgtgttgccgacttcggcaccgatattactgtggacgactatcttggtgggccggacgagggccagctcgctatagttgcgcctggcgcggcgatcgcgacggccgccatagtgccgaaggcgaggggcgagacgcttggcgccggaggcgaggtgtcggccctcgcgttggtcagggacgaggcgggcgcagcgacccgccggctgaagggagtgacggaggcgctgagtcaggcgacggaggcgctgagtcaggttgctgacttcgccagccgtactgcgtcgggggccctcacggcagttgtgtctgccgaagtcgagagacttcggacacaacatgctgacgctgtccgtgagaaatcggcctccgacagcaagtgccgtaagctgtcggacagggtggccgccctggagaaggaaaaggctgacctccggcgccaactggcggcggagaggagggaggcgaacgaggccatcgccaaggagcaggctgcgcaggcggaggccaaactggcgcgggcggagggcaatcttgccaaggagctcgccgaacatctgcaagagcggcttgccgccctggacagccgcgcgaagggggccgagaccgtgatgcgtgcggaggctgaacggacgcgcgctcagcttaaggatacatatcgcgagctgggcgcgcggaccggcgacttcgaggtgccggaccgagagcccgggctttgttgtctgcaatgggtgcaggaggagctgcaggaactccccgttgttgtggggggctttatgtcgtacgcctccctggtcacctgcgagggggcgatgaacgcactctcccgcgaagggtgccggcacttcgaggtcttcgaccaggcagatgaagactttaagcgagatgtctatacggtcgaagaccccgttgtgaaggaatccgtcggggccctctatgaccggatgtggggtccgcacggccgtgaggtggtcagggagcgggccgagatcgcgagggctcaggcggagcgcggcgagcgggtggacgacttcggggctctgaacagcgcgctgccagacccggagccgacccctgtggaggctgcgaccgggccgccctggagccaaccccggagaccgcagcgattgcgacggctgcccccacatctgctgcggccggcgaagacctgccccccaaaggtgcccgaaggcgcccctgatgcccccgcagcagctgcgccgagcattgaagatcccgcagcggaggcgatggaaccaatggcggaagtggcggcggagccaacggcggaggctcccgcagcgtcagggccttcgcaggtggcgtag

SEQ ID NO: 86226 - DNA, 181 bp, Zea mays
  Clone ID: MRT4577_178649C.1
ggccgcgcgcgccggggcaggcacaggctatatatatttttaatcagtttatatgacgaaagtacaacacttgtcaattacaattacttattctttacataacacagttcgcatacatgcacttagggatgaacgttgaatgacagttgtatcactgacgcgcaggggggggacacctaca

SEQ ID NO: 86227 - DNA, 392 bp, Zea mays
  Clone ID: MRT4577_17864C.1
gtggcggcggcaggagatgactcgcctagcgcgcgagcaggagatcctggcgcaggagcgctctatggcagcctcacgcgacgctgccgtcctctccttcatacagaagatcaccgggcagaccatcccgatgccatccattgccgcgcccaccatcaacgccatgccaccgccgtcgcatccgaagccgccgccgccccctcagccgcaccccacacccattgcctccgtgtcgccagccccgccgccaccgcaaccaccagcttcgcagactccgcccccgcagcagcagaagtcgccaatgccggcgacgccacaaacgccagcaccgcaacggcaaagcacagacattgttatgacaccggccgagacgacgccgcacgccgacaccc

SEQ ID NO: 86228 - DNA, 851 bp, Zea mays
  unsure (1)..(851): unsure at all n locations
  Clone ID: MRT4577_178650C.1
tcgagccggccgggagccgcatcccttctttcattcgccgccgccgcctcctctctgctgccgtcgccatggggagaaggcctgcgagatgctatcgccaaatcaagaacaagccataccccaagtccaggtactgccgtggtgtccctgaccccaagattaggatctacgatgttggcatgaagagaaagggtgttgatgagttcccctactgtgtgcaccttgtctcttgggagaaggagaatgtctccagtgaggctcttgaggctgcccgtattgcctgcaacaagtacatgaccaagtctgcaggaaaggatgccttccaccttcgggtccgggttcaccccttccatgtccttcgtatcaacaagatgctttcgtgtgctggggctgataggctccagactggaatgaggggtgcctttggcaagcctcagggcacctgtgctagggtggacattggtcaggtactcctttctgttcgatgcaaggacaacaatgctgcacatgccagtgaagctctgcgacgcgccaagttcaagttccctggccgccaaaagattattgagagcagaaagtggggcttcaccaagttcagccgtgccgactacctgaagtacaagagtgagggtagaattgttcctgatggtgtcaacgcaaagctgctcggtaaccatggaagacttgagaagcgtgctcctgggaaggctttcctcgaggncgttgcttaagtccaattttagcctatcttattttgctttgtgcaacatgaattttaagtgtatggggtattacagtgccttgtcttgtgtgaacctgcttatctcgtgctgaacatcgttatgcatgga

SEQ ID NO: 86229 - DNA, 1278 bp, Zea mays
  Clone ID: MRT4577_178651C.1
ccggccgggagacgcaccccttcctcgtttcgccgcctccgccgacaccgactgcctacctcagctgccgtcgccatgggcagaaggcctgctagatgctatcgccagatcaagaacaagccgtaccctaagtccaggtactgccgtggtgtccctgaccccaagatcaggatctacgatgtcgggatgaagaggaagggtgttgatgagttcccctactgtgtgcaccttgtctcttgggagaaggagaatgtctccagtgaggcgctcgaggctgctgcaacaagtacatgaccaagtctgcaggaaaggatgccttccaccttagggtccgggttcacccgttccatgtcctccgtatcaacaagatgctttcctgtgccggggctgataggctccagactggaatgaggggtgcctttggcaagcctcagggcacctgtgctagggtggacattggtcaggtcctcctttccgtgcgatgcaaggacaacaatgctgcccatgccagcgaagctctgcgtcgcgctaagttcaagttccctggccgccaaaagatcattgagagcagaaagtggggcttcaccaagttcagccgcgctgactacctgaagtacaagagcgagggcagaattgttcctgatggtgtcaacgcaaagctgctcggcaaccacggcagacttgagaagcgtgctcctgggaaggctttcctcgatgccgttgcttaagtgcggatgcgaatcctgacgttttgctttagcgtatcttactttgcttcgtggaacatgaatttcaagtgttttgagggtattacagtgccttatgtgaacttgcctatcttgtgctgaacatcggaataatacgtatttgtgtgccatcgcctttccggagctcaccaaacagtcgttcctgcagcagcgtgaaactagacttcagagagaatattgggacgagagtgcgcggcggagttgtacaatttttttgtttttcttctaaaataggatttaggattaggtgttttggatttgttggagttgctctcaggtttaattatttttaatccctaaaataccaaacggatgactaaaataggtattctaaataggatatagtgactagggtttagcagggtaactaatgggatgtttggtttgaggaatgacctagtctattatcttctcactcaatatttttgtttggtttgtgaaatagaatgggttgatccatcaccacctcattccgtatagttatttagttagtactaatatgaggaatgag

SEQ ID NO: 86230 - DNA, 1192 bp, Zea mays
  Clone ID: MRT4577_178652C.1
gggaccctcgaggccggccgggagccgcattcccttctttcattcgccgccgccgcctgctctctgctgccgtcgccatggggagaaggcctgcgagatgctatcgccagatcaagaacaagccataccccaagtccaggtactgccgtggtgtccctgaccccaagatcaggatctacgatgttggcatgaagagaaagggtgttgatgagttcccctactgtgtgcaccttgtctcttgggagaaggagaatgtctccagtgaggctcttgaggctgcccgtattgcctgcaacaagtacatgaccaagtctgcaggaaaggatgccttccaccttcgggtccgggttcaccccttccatgtccttcgtatcaacaagatgctttcgtgtgctggggctgataggctccagactggaatgaggggtgcctttggcaagcctcagggcacctgtgctagggtggacattggtcaggtcctcctttctgttcgatgcaaggacaacaatgctgcaagttcagccgtgccgactacctgaagtacaagagtgagggtagaattgttcctgatggtgtcaacgcaaagctgctcggtaaccatggaagacttgagaagcgtgctcctgggaaggctttcctcgaggccgttgcttaagtccaatctacagttggaatgcgaatccagacgttttggtttagcctatcttattttgctttgtgcaacatgaattttaagtgtatggggtattacagtgccttgtgtgaacctgcttatctcgtgctgaacatcgttatgcatggaagtacttatcttttgttctgcttttaaaaaaaaaaaaaaaaaaaaaaaaaaaaaaaaaaaaaaaaaaaaaaaaaaaaaaaaaaaaaaaaaaaaaaaaaaaaaaaaaaaaaaaaaaaaaaaaaaaaaaaaaaaaaaaaaaaaggggggggccgttttaggggatcaaagtttacttacgcgtgcttgcaacgtaatagttttttttttgggtcacctaatttaaattaattggccgtggttttaaaacgtcgtaattggaaaaacctgggggttcccaaattaaatcgctttgaagaaaatccccttttcgccagttggggtaatagcaaaaaggcccgaaccgatcgcctttccaaaaatttgcccaccctaaatggcaaatggaacccc

SEQ ID NO: 86231 - DNA, 394 bp, Zea mays
  Clone ID: MRT4577_178653C.1
cccacgcgtccgctttcattcgccgtcgctttctgttctctgctgccgtcgccatggggagaaggcctgcgagatgctatcgccagatcaagaacaagccataccccaagtccaggtactgccgtggtgtccctgaccccaagatcaggatctacgatgttggcatgaagagaaagggtgttgatgagttcccctactgtgtgcaccttgtctcttgggagaaggagaatgtctccagtgaggctcttgatgcttgtcttattggcttcaacaagtacttttcctattttgcaagaaaggatgcctttcaccttttggtcctggttcacccctttcatgtccttcgtatcaacaagatgctttcgtgtgctggggctgataggcttcatactgg

SEQ ID NO: 86232 - DNA, 1525 bp, Zea mays
  Clone ID: MRT4577_178654C.1
cattgggtacctcgaggccggccgggagacgccttcttcctcgtttcgccgcctccgccgacagcgactgcctccctcagctgccgtcgacatgggcagaaggcctgctatatgctatcgtcagatcaagaacaagtcataccctaagtccaggtactgtcgtggtgtccctgaccccaagatcaggatctacgatgttgggatgaagaggaagggtgttgatgaattcccctactgtgtgcaccttgtctcttgggagaaggacaatggctccagtgaggcgcttgatgctgcccgcattgcctgcaacaagtactatcgacctagtactgcaggaaaggtatgccttccaccttaagatccgggttcacccgttccatgtgctccgaatcaactagatgctttccagtgctggggctgataggttccacactggaatgatgggtgcctttggcaagcctcagggcacatgtgctagggtggacattggtcaggtcctccttttcgtgcgatgcaaggacaactatgctgcacatgctagcgaagttctgcgtcgcgctaagcttaggatccctggccgccaaaagatcattgagagcagaaagtgaggcttacaccaagttcagccgtgccgactacctgaagtacaagagtgagggtagaattgttcctgatggtgtcaacgcaaaggtacagctatcacatatcttgctacatttagatatatctctgaattagttttgggatagtaatgtaatttccattgatacgcatattttgaaatggagctattcttacaatgtttgctccgtcttctcttcggcagtatattaaccagttcataatctaattttaacttctcctgacttattacagctgctcggtaaccatggaagacttgagaagcgtgctcctgggaaggctttcctcgaggccgttgcttaagtccaatctacagttggaatgcgaatccagacgttttgctttagcctatcttattttgctttgtgcaacatgaattttaagtgtatggggtattacagtgccttgtcttgtgtgaacctgcttatctcgtgctgaacatcgttatgcatggaagtacttatcttttgttctgctaaaaattaagtgttctgcgtctaaatatatcttctcaaaaaaaaaaaaaaaaaaaaaaaaaaaaaaaaaaaaaaaaaaaaaaaaaaaaaaaaaaaaaaaaaaaaaaaaaaaaaaagggggcgggccgttttaaaagaacccaagtttacttccccgtgcatgcaacgtaatactttttttatagggccaccaaaattaaattaactggccggggtttaacaacgtcgggactggaaaaaccttggcgtacccaaattaaatcgctttgaagaaaatccccttttcgccagttggcgaaatagcaaaaaggcccgaaccgatcgcctttccaaacatttgcccaccctaaatggcaaatggaaccccccttgaagcggcccattaagcgcggggggtgggggggtta

SEQ ID NO: 86233 - DNA, 611 bp, Zea mays
  Clone ID: MRT4577_178655C.1
ctcggccgggagacgtcatctctatgtctcctctccgttcttacgtgaagcagccgccctctccatcctcctcaccagcgcgcactgctcccctgctcgacccggcatggggctctggtcgccagccgcgacgctcgccgtacctcctctccctgtccagcctctccctcgtcgagtccctctctgctctagtctcgcccagatctgcaccagcagctcgcccagatcgcgcgcgtctctgctcgctccagtcttctccctcttggttctctgctgctcgtgctcctctccatggacgtccaggtctcttccccatgttggccgaccccatttcgaactccgaaggcagacgtctctactcctcttcccatggcgacctcgccttcactgcctctattttttccccaagccgatgccctctccctcttatctttctctctgctgcagcgcccagcgccttcattttcccagccatggacaccagcgtccttctactcctccttccccatggctgtgcacctctctgcagcaacccatccgcaacgccgtcgaccctcggtgaggtcctgttctagctgtcattttagcgttctacgtcgattgctaactct

SEQ ID NO: 86234 - DNA, 1313 bp, Zea mays
  Clone ID: MRT4577_178656C.1
ctagccgcatcccttctttcattcgccgccgccgcctgctctctgctgccgtcgccatggggagaaggcctgcgagatgctatcgccagatcaagaacaagccataccccaagtccaggtactgccgtggcgtccctgaccccaagatcaggatctacgatgttggcatgaagagaaagggtgttgatgagttcccctactgtgtgcaccttgtctcttgggagaaggagaatgtctccagtgaggctcttgaggctgcccgtattgcctgcaacaagtacatgaccaagtctgcaggaaaggatgccttccaccttcgggccctttggcaagcctcagggcacctgtgctagggtggacattggtcaggtcctcctttctgttcgatgcaaggacaacaatgctgcacatgccagtgaagctctgcgtcgcgccaagttcaagttccctggccgccaaaagattattgagagcagaaagtggggcttcaccaagttcagccgtgccgactacctgaagtacaagagtgagggtagaattgttcctgatggtgtcaacgcaaagctgctcggtaaccatggaagacttgagaagcgtgctcctgggaaggctttcctcgaggccgttgcttaagtccaatctatagttggaatgcgaatccagacgttttggtttagcctatcttattttgctttgtgcaacatgaattttaagtgtatggggtattacagtgccttgtgtgaacctgcttatctcgtgctgaacatcgttatgcatggaagtacttatcttttgttctgctaaaaattaaagtgttctgcgactaaaaaaaaaaaaaaaaaaaaaaaaaaccaggtccagacatagcaaggattgacagactgagagctctttcttgattctatgggtggtggtgcatggccgttcttagttggtggagcgatttgtctggttaattccgttaacgaacgagacctcagcctgctaactagctatgcggagccatccctccgtagttagcttcttagagggactatggccgtttaggccacggaagtttgaggcaataacaggtctgtgatgcccttagatgttctgggccgcacgcgcgctgacagatgaggatagatcatatgcaatggaagtctttgaatctgggttcaacagagaagtgtttatgagttcaaaaaaccacaatgttaggttgttttggctcaagagaaaaattaaagcacttgctgctatcgtgtgatgtgaagtgaatgtggttgtgaagagataggcttacagaaaccgaagaaatccaactgcta

SEQ ID NO: 86235 - DNA, 335 bp, Zea mays
  Clone ID: MRT4577_178657C.1
tttttttttttttttttttttttttttttttttttttttttttttttttttttttttttttaaacaaaaaaaggaaacgttgggcaattgaaattttttcatgggggtccctcaaaaacaacctgaaatttgaaaatcgctaataccttatttgccctagctttttgggtcctaaaaaataatagcaaaacatgccgttgttaagggtggggcccatttccaaagcaacttacctggtgctgcctagggctccacattccactgggggcctggtaacccaaaactaatccaaacatgactaaaatgcttgaaccccacagttcaggaaaacgggg

SEQ ID NO: 86236 - DNA, 1217 bp, Zea mays
  Clone ID: MRT4577_178658C.1
gccggcccgggaaaaaaaaaaaaaaaaaaaaaaaaaaaaaaaaaaaaaaaaaaaaaaaaaaaaaaaagactacgtcaacgccgtccgcctcggcagcgtcgcctcggcgtagcttttggattgcatgttcgtttccatgcatgtgtatcattgcatgcaataattggatgaaataaacagcaacaagcttcatcagtaaaaaaaaaaaaaaaaaaaaaaaaaaaaattggctttgctttgcttccaaaaaaaaaaaaaaaaaaaaaaaaaaaaaaaaatagccgcttcccttctttcattcgccgccgccgcctgttctctgttgccgtccccatgggaaaaaggcctgcaaaatgctatccccaaatcaaaaacaagccataccccaagtccaggaactgccggggggtccctgaccccaaaatcaggatctacaatgttggcatgaaaaaaaagggtgttgatgagttcccctactgggggcaccttgtctcttggaaaaaggaaaatgtctccagggaggctcttgaggctgcccgaattgcctgcaacaagaacatgaccaagtctgcaggaaaggatgccttccaccttcgggtccgggttcaccccttccatgtccttcgaatcaacaagatgctttcgtgtgctggggctgataggctccagactggaatgaggggtgcctttggcaagcctcagggcacctgtgctagggtggacattggtcaggtcctcctttctgttcgatgcaaggacaacaatgctgcacatgccagtgaagctctgcgtcgcgccaagttcaagttccctggccgccaaaagattattgagagcagaaagtggggcttcaccaagttcagccgtgccgactacctgaagtacaagagtgagggtagaattgttcctgatggtgtcaacgcaaagctgctcggtaaccatggaagacttgagaagcgtgctcctgggaaggctttcctcgaggccgttgcttaagtccaatctacagttggaatgcgaatccagacgttttggtttagcctatcttattttgctttgtgcaacatgaattttaagtgtatggggtattacagtgccttgtgtgaacctgcttatctcgtgctgaacatcgttatgcatggaagtacttatcttttgttctgccaaaaaaaaaaaaaaaaaaaaaaaaaaaagtactctgcgttgttaccactgct

SEQ ID NO: 86237 - DNA, 1085 bp, Zea mays
  Clone ID: MRT4577_178659C.1
attgggaccctcgaggccggccggggtccgctctctctatataaagtgtccctctcttccctccaagccctagacgcaccccttcctcgtttcgccgcctccgccgacaccgactgcctacctcagctgccgtcgccatgggcagaaggcctgctagatgctatcgccagatcaagaacaagccgtaccctaagtcaaggtactgccgtggtgtccctgaccccaagatcaggatctacgatgtcgggatgaagaggaagggtgttgatgagttcccctactgtgtgcaccttgtctcttgggagaaggagaatgtctccagtgaggcgctcgaggctgcccgcattgcctgcaacaagtacatgaccaagtctgcaggaaaggatgccttccaccttagggtccgggttcacccgttccatgtcctccgtatcaacaagatgctttcgtgtgccggggctgataggctccagactggaatgaggggtgcctttggcaagcctcagggcacctgtgctagggtggacattggtcaggtcctcctttccgtgcgatgcaaggacaacaatgctgcacatgccagcgaagctctgcgtcgtgctaagttcaagttccctggccgccaaaagatcattgagagcagaaagtggggcttcaccaagttcagccgcgctgactacctgaagtacaagagcgagggcagaattgttcctgatggtgtcaacgcaaagctgctcggcaaccacggcagacttgagaagcgtgctcctgggaaggctttcctcgatgccgttgcttaagtccaatctacagttggaatgcgaatcctgacgttttgctttagcgtatcttactttgcttcgtggaacatgaatttcaagtgttttgagggtattacagtgccttgtcttgtgtgaacttgcctatcttgtgctgaacatcgttatgcatggaagtacttatcttttgttctgctaaaaattaaagtgttctgcgactaaaaaaaaaaaaaaaaaaaaaaaaaaaaaaaaaaaaaaaaaaaaaaaaaaaaaaaaaaaaaaaaaaaaaaaaaaaaaaaaaaaaaa

SEQ ID NO: 86238 - DNA, 274 bp, Zea mays
  Clone ID: MRT4577_17865C.1
gcactgtatgccattccttggtgacaaaatgctgtatatttggttttgaaaaaatgaatgtgctgggtatacacagcagaaagggtactgtccactttttgtatatcagtgtggaaaatatttcccctagaagtagaaaaggctcatgtgctgatggataattttgagtcttctccattctctgtgaatgacccccttccccaggcatccccacctcctacctcgttcttagagcaagctaaagccaactgagggtgcacacacagccatgagc

SEQ ID NO: 86239 - DNA, 1053 bp, Zea mays
  Clone ID: MRT4577_178660C.1
ccggccgggctagccgcatcccttctttcattcgccgccgccgcctcctctctgctgccgtcgccatggggagaaggcctgcgagatgctatcgccaaatcaagaacaagccataccccaagtccaggtactgccgtggtgtccctgaccccaagattaggatctacgatgttggcatgaagagaaagggtgttgatgagttcccctactgtgtgcaccttgtctcttgggagaaggagaatgtctccagtgaggctcttgaggctgcccgtattgcctgcaacaagtacatgaccaagtctgcaggaaaggatgccttccaccttcgggtccgggttcaccccttccatgtccttcgtatcaacaagatgctttcgtgtgctggggctgataggctccagactggaatgaggggtgcctttggcaagcctcagggcacctgtgctagggtggacattggtcaggtactcctttctgttcgatgcaaggacaacaatgctgcacatgccagtgaagctctgcgacgcgccaagttcaagttccctggccgccaaaagattattgagagcagaaagtggggcttcaccaagttcagccgtgccgactacctgaagtacaagagtgagggtagaattgttcctgatggtgtcaacgcaaagctgctcggtaaccatggaagacttgagaagcgtgctcctgggaaggctttcctcgaggccgttgcttaagtccaatctacagttggaatgcgaatccagacgttttgctttagcctatcttattttgctttgtgcaacatgaattttaagtgtatggggtattacagtgccttgtcttgtgtgaacctgcttatctcgtgctgaacatcgttatgcatggaagtacttatcttttgttctgctaaaaattaagtgttctgcgtctaaatatatcttctcaatctggcttgtctctttaatgatatatgtccgtgcgttgccacggaatcaatatatccatttacaaatatagttgtttcataaattagaaaaaaaaaaaaaaaaaaggccccta

SEQ ID NO: 86240 - DNA, 402 bp, Zea mays
  Clone ID: MRT4577_178661C.1
ggcagttaatggcccctcctttattcggcattcacgggaaaaaatacaaccagtggggttcgagcttccagctccaaaaaactctggcaaacaggtcgggcagcggaaacaaaacaacgggaattaaacgaaacaggacaaaaaataacaaaaattcccaggaccgagccatcaaagaaaaactggcgcccaccaacaaaaaaaaatgggaccggactacagaaaaatacaggaaaagggccacgaggccaatcgggtcaattaattcaaagcggcactggccaaaaaatgggaacactgatcaacgatcagggattcagggggaagcatcccggctaaagaacggggccaagggcttggcgggaatacggggggaaaagttcccggagggaaaaacccaag

SEQ ID NO: 86241 - DNA, 462 bp, Zea mays
  Clone ID: MRT4577_178662C.1
atggagataattggccataaagtttggctgtcagataatatagaaactgaatatggactatcaaaaaatgcctctgaagatcctcggtcagaacaactgatgaagcttccaatggtacaatgcactgaaatatcccagggttcagtcccccttgccgccgtcaatccgcgcgcccgaattcgtgccgatcgccgtgatttgtgcctggcatgccgtggatattcgcagggagctaagctgcgccaggtcgtcgggaacacccgtgttcatccgttgttcgcgctgtctccgtgggcaggacgatttagagctccgatagtgcaattgatcgaggggaaacgcttcttcggtgttgaattaggagtaaaccaatttagagccctggtcatggcgtattccgaccagagtgagctcgccgtagtgcctgctccgccgctccacgtcgtggaccgagctctgtaa

SEQ ID NO: 86242 - DNA, 277 bp, Zea mays
  Clone ID: MRT4577_178663C.1
cccgaccacaccgttcctccgagcccaagagcagccccgcgccaggaggaagtttgttcttttaacaatatgtcgagggaggagaatgtttacatggccaacttggctgagcaggctgaaaggtatgaggagatggttgagtatatggagaaaggggcttaaactgtagatgtggaaaaacttactggtgaggaaccggaccttctgtctggtgcatacaaaaatgggaatggggcttgccgcgcttcatggggcattggttctttcattgaacaaa

SEQ ID NO: 86243 - DNA, 537 bp, Zea mays
  Clone ID: MRT4577_178664C.1
gatgatcgagctacactaccgctggttgcctccttatcaggtgtctagcaactgcgcgtcgaatgatacaaccctccctctcctgctacatgctgatgatgctccagctccacaggatgtggcgagcgccgatgatatctgaagcctctacaagctgctcacgctgggaacagctggagcctattgagaaccgcaagaaaataaaagtgtgggagctgctaactggataccagacgaggtggagaggctgacgcatcctgccccatccgctatcggactgtctcgcctataactaatatatatatcgcctctggcacttccaactctatgattctgctagcgcagagagtgacgctgccgcctatcaccgaaactacagttcgagactgggtctgtaatcctcctctgactaccgtctgaccgccggactgctgtactgaagcgtgcgcgcatgcacatatatgctcattaattatgaatgcactccccctacactgactatattattatgatgggcctaaaaaggaatgctgatgc

SEQ ID NO: 86244 - DNA, 161 bp, Zea mays
  Clone ID: MRT4577_178665C.1
gcgcgccgcttcgtcggcggcgaggacaacgtccgcatctactgctacgtcgacgaaagggtcatcggcacggtgcgcaacggcgacgtgtgcctcgaggtcaacatgtcgcgcgacgagtaccagcacttgatccaggacatgcgccacagcaacagcgt

SEQ ID NO: 86245 - DNA, 169 bp, Zea mays
  Clone ID: MRT4577_178666C.1
cagaggtgagcatacaagagcagaagaatgcagtgtggctttggggctctcccatcaagaagtggggtccatttcctgatcccggagtctggactcaggagcagcctgtgacttgcactgacatcaatggataatgaaatggatggagacagagttgtgcaaattccag

SEQ ID NO: 86246 - DNA, 289 bp, Zea mays
  Clone ID: MRT4577_178667C.1
agcgaccacagcgggagaagcagcactctagccgcctgtaaaaccaacctgggaggaagatgctaattaaagtgaagacgctgactggaaaggagattgagattgacatcgaacccacagacaaggtggaacgaatcaaggagcgtgtggaagaaaaagaaggaattcccccacaacagcagcggatcatctacagtggcaaacaaatgaatgatgagaagacagcagctgattaccagattctaggtggttccgtctccacctggtgttggctcttagaggaggtggt

SEQ ID NO: 86247 - DNA, 251 bp, Zea mays
  Clone ID: MRT4577_178668C.1
tgtgaattgcatacgccctgcaggtagccataccatacggccagtgcatgccaacaacctctgctctgatcacatcctcaaggctctctctgggtattgccactcagcacatatgcaaaatcctctccgctccagcatggctagagccacccctgcacactagagtccatgaaccttgagtaacactcaatcgcgggcgagtaatacttagacctaacaggcgttgccagcgtacctcgactcggcggccc

SEQ ID NO: 86248 - DNA, 495 bp, Zea mays
  Clone ID: MRT4577_178669C.1
aacaactccgcagctccaatccggagaccgacgacatcatggccagcgcgccagccccgccgccccgccgcgtggtcgtctgcggcggtggcgttgtcggcgcttgcacggcctatttcctctccacccaccccgcctcccccaccgtgccgacccttgtcgaaaagtcctcccccgcttgcgctgcctcaggcaaggcgggcggtttcctcgccctcgactggagcgactccacccccgcactctcggcgctggcgcgcgcatccttcggcctccaccgccgcctcgccgctgccctcgacggcgccaacgcgtacggcttccgccccgtccacaccctctccatctgcctcccctctcagcccgccgagcccctctcaccccacccgctcctcccttcctgggtcgacccctccgcctccgccgcgccgccgcgccagctcggaactccggacaccatcgcgcagggccatccgggtctcttctccaagggcg

SEQ ID NO: 86249 - DNA, 162 bp, Zea mays
  Clone ID: MRT4577_17866C.1
cgggccggagtcgcgctttcaccccttgtctccttcttatccccacctccctcgcggatcactcgccgccgccgccggccgcagccatcgccctgatgctgtccctgtctagggcgatcgggaggccgctcttctcttccgccgagggcgcgtgcacggctg

SEQ ID NO: 86250 - DNA, 463 bp, Zea mays
  Clone ID: MRT4577_178670C.1
tgcaagcttactcgtatcacactcataccccactccaaatatcataaaaaaaactctgaaccattataaggctcaatttgtacaacaataacatttaataaatgaccatattcatctgtctgtatatatatatacgctgcaggagcttatataaactaccaatatcacatctatgagaacaaaacctaaagctacttccggtttcattggctgctttggtctcctttttccctataatcaacagtgaggcaagccagatccttctcattctgtctctctctctctctatgtctatgtgtgtctctctgtaattataaacattaaacattcccgttgtcaaatctcccaccacggttcatatagagcacctagcaagagagtctacacaacgccttggaaatgttaacacctgcgtgggttgtctaaaacacctgcgaggccaacacctggagtctccaatcta

SEQ ID NO: 86251 - DNA, 230 bp, Zea mays
  Clone ID: MRT4577_178671C.1
gaccgcccgaataattcccgggtccacgcagcccactatgcggcgccgcctttttttttttttgggtggcaaacaaaaacctggcgaattcttttttagtccgttctatagggggagcatcctatgcgaacaacaggactccaacagccaatccaagggtagaacgtactctaactccgagaaagaagctaccggcacctcttttgtgacatggataactcaccgggcta

SEQ ID NO: 86252 - DNA, 548 bp, Zea mays
  Clone ID: MRT4577_178672C.1
gtcgaccccgcgttcggtcctggctttttccttgcgcccgtttgcctatttctgtctcgatcgaggccgttggctcccatggccgggcaagtaatccctcggcgtaataagccggcggcggaggagcccgggccgttaagcgaccggcgggagagcccaggcggggaagcggttcctcgctgtcaagtccttcggctggtggggggggggggcaaccttggcaagatagtatgggcaagaagagcgtggtgacgttcaggatctacattttcgaggtgctggatcatgtgctcccggtcatcggtgtttcctccaaggccttgtccattatgaactccttcatcaacgacatcttcgagaagctggccggcgaggccgcctagctcgcgcgctttctcttgaagcccaccatcacttcccgcgagatccagaccttcgtgcgcctcgtgctccccggcgagcttgcccagcacgccgtctctgggtggcccaagggcgtcaccaatttcacttgcttctaggcttgcacgcttgccctttgtaggctt

SEQ ID NO: 86253 - DNA, 354 bp, Zea mays
  unsure (1)..(354): unsure at all n locations
  Clone ID: MRT4577_178673C.1
aaaaaaacacaaggggggcatatttttattcatcatataagaaatatgccataaaaagctcaacgttaggaatgaaaaggggtaaaaaaagatattgcttattacattcacattgggcgattggtgatcccgtttatatatggggatgcaaaaaacaaatagtactcgacgcattcacattggttgggggcatatcgggaagtccctagnagtataggatagtatatatatttatgaagatgcccgagtccgcgggcccgaaaaaatgccccacccctaaattttcactttttccatgggaggaactttcctgagacaaaatcctagggggcccccaacaacttggggggccca

SEQ ID NO: 86254 - DNA, 636 bp, Zea mays
  Clone ID: MRT4577_178674C.1
atggcagaaggcaatacacgggtttggagggggcgggagaggttccttacctcaaggcgggctccggggactcctcggcggcggcaatggcgcgacggtggcccggggcgacggtggcggacctccgcggctgcacggaggacggcgggtgagcgcgggcagagagaaatagggagggggagagggaattggggcgcgtcccgggttgcggacgtcggggcggagctcaccggggcaaagggcgcggcggagctccaacggcgacggggaaccgagctcgggacggcgggggttatggcggcggcgctcgggcgcgcgcgcagcgagggggaggtggaagaggggtctgctggtgcgcaaaagagggagggggagagggcgagtggggctctgggctcaagtggccaggggcggtgcggttgcgagctccacgcgcgacgtgggcgcggggaaggcggccgcgcgcagctcgggcggcagttacgcgaggacgacggggctgacaagccgggcccgcgagcagagagagaggggaaagcgggggcgggcgcgcggaagacggccgcgccgacgggcgggcccgccagggcagagagagcgggggggggggaagaggcgcgcacgggatgggcttag

SEQ ID NO: 86255 - DNA, 195 bp, Zea mays
  Clone ID: MRT4577_178675C.1
catgcacgcacccggaattaactgctcgaccgacgcactccgagcgcggtcatggtgcaccgactatacaacgcgtgttcacaacatcgcgcacgggctttacctccggcgacgttagcatagatccgtgcacatgcgaaaacgctcgagtctaccttatgaacctgggcgtgctagcgcccgtgtaagtgtact

SEQ ID NO: 86256 - DNA, 205 bp, Zea mays
  Clone ID: MRT4577_178676C.1
gtaagctcggaattcggctcgaggactgacccatgcgggggtttaatttcactagcttccgacaatacgcgatggtggtcatatggcatgccatcaagacgttactcatatggagcatggactagccggaggagcctgccaaggcacgccatgcttgttgaaacatgatgcggacatgaccgttgattcaggcttagtggagacc

SEQ ID NO: 86257 - DNA, 926 bp, Zea mays
  unsure (1)..(926): unsure at all n locations
  Clone ID: MRT4577_178677C.1
cgcccgcccgcccgtcgaggtccggcgccctgcacccacgatcggattctcctagaaacaaatatctgccatcagctgtaggatttcttctaccgcctcctccttatccagtatacgtcagctccccggacgctcatctctccccgtgattatctcaagccgccgctggcagcttggaactcctctctgcttccttagctgctcgcctaggtccggcgtgctccagctcctgctcggccgccgtttcccctgctcgccgcggtgctccatttctaccctctgccggcgtccttcctgctcgccccagcacaacggtttcctgttcggcgcccagccatccctctgttttcctccctcgccatgccgcgcagttctccggctcgccggcgttttacccctgcgcgcgcgctcagctcggcgttcccttccccagctccaatcttctctgccgagcccctccgtggtcgcgtcccggccaagctccggctcggatcggtcttcagctctccctgcgcgcgttctccttcgtcctggccccttcctgcgcgcgcaaatatactttccccagccgattctgctgtttgcttccctgcgcgtcgtgcccctctgctctctgtcggcgcgcgttgtgctcgacgtcctcctatggcgctcgatgctcctctgttggccgcgtcgtggagcctgcgcgctcggtcctgcctatttcgtcgtgttctgtttttctccccgtagcgctcaacgccttggaacccgcatagctctgttcgtctcgtcattaccttgctactgcctccggtgtggagcgatttgcgtgtgtcgatgaagcaagcgaagtcccacaacgttcgctaggtgctcgacgaatggctggaacccgnaattcgtcgtcgtttctcatccgcaatctcgtcaacctctgcccg

SEQ ID NO: 86258 - DNA, 424 bp, Zea mays
  Clone ID: MRT4577_178678C.1
ggtacaaagactttttttaggtttttttgtttagttatttagcggtgatgattgattaattttgtgttacgcattaccatgggtggctgtgtcagtgtgagcaatgacctgcttgaacaattgaggggggggggagaaagtattgttccacacgggccccccctcgccgggtgggggggtgagtacccggtcccggcccggtgtttgcaaccgtgggggcgggccctctcccggggcttcccgctgggttccttctcgctgcctccccccccttgccgcctgttggggtctccgtgtggcctcctccgggtcgcctttcccttctgtgggccgcgtttttgggcgttgggtccgcccccttttcggggggttttcccctgggggggctggcgggtctcccccggtgcgcccgttcctttgccgg

SEQ ID NO: 86259 - DNA, 2574 bp, Zea mays
  unsure (1)..(2574): unsure at all n locations
  Clone ID: MRT4577_178679C.1
attgggtacctcgaggccggccggngaaaatgtcggccgggacctcccgtgtgcaagtggcagggccagacacggcgggggccccggcattactcccccgccataaattctccgccgccgcattgggtacctcgaggccggtccgggaagaggcctccccgctccgcgttccccagcgccagcggtaaccccacccaactcctctgagctgtgacacagctgtcctcctccccccactccaggcgctcacacaccctccacttccctccacaggaatccgccgccataatctcctccgctccgctccaccccgcattgcaggattgcgccgagcacgagcaccctcctccccgaaacctcttctttgctctgctttcggtggtatggtgggatgatgagcagggcggcagtgctgctgtgtctcctctgctgcctcgccgccgccggcgaggcggcgtcagtggtgggcgagggcgaggcggcggagctggccgtgtcggtggacccgtcgtggcggttccccagccagcggctgcgggacgcgtacgtcgcgctgcagacctggaagcagcaggccatcttctccgaccccaggggtttcaccgccgactgggtgggcccgggggtatgcaactacaccggggtcttctgcgcgccgctgccgcgcggggtgccgggcgccggggagctcgccgtcgcgggcctcgacctcaaccacggcgacatcgcgggctacctcccgccggagctcggcctcctcgctgacctctcgctgctccacctcaactccaaccgcttctgcggcctcgtccccgccactctgcgccgcctccagcttctcgtcgagctcgacctcagcaacaaccgcctcgtcggggcattcccggccgtcgtgctggagctcccggcgctcaagttcctcgacctccgcttcaacgacttcgagggcgccatcccgccggagctcttcgaccgcccgctcgacgccatcttcctcaaccacaaccgcctccgctccccgctccccgacaacttcggcaactccccggcctccgtcatcgtgctcgccgacaacagcttcggcggatgcctcccggccagcctcggcaacatgtccggcacgctcaacgagatcctcctcatcaacaacggcctcgactcctgcgtcccgccggaggtcggcttgctccgggaggtgaccgtcttcgacgtcagcttcaactcgctcgtcggcccgctgccgcagcaggtggccgggatgcgcaaggtggagcagctggacgtcgcgcacaaccgcctgtccggggccgtcccggaggccatctgcgccctcccgcggctcaagaacctgaccatctcctacaacttcttcaccggcgagccgccgtcctgcgcgcgcgtcgtgccttcggacggtgacaggaggaactgcctgcccaaccgccccacacagcgcacgccgcagcagtgcgccgcgttctactcgcagccgcccgtcgactgcgccgcgttccagtgcaagccgtttgtccctgttccgccgccgccgccatcataccccggcccgttgccaccggtataccctatgccgtacgcatcgcctccgccacctgcgcagtaccgatgattcgtcgaggagggagaagcactatcactttcaccttaattcaccaccaccgctgctgcgctggatgaagacagcaaagttcaccgtcacaattgtacgtggtcagtcattgttgtgcttagattagtagtgttcttgattgatagctaccggcatatagaagattatattattatacggtgcatatatcgctcttgcttttgcatttgtcggtctctgtttttcgcgtcgatccgggttggcgttgtggcgacggtgaaaaggattgaaggtggtggtgatggagggaacagtttgagattgagcttggattgattgttgactgggttgtgaataataaactgcttgagagagagagaaagatgaggatgaggaggattggttggtgacttcacctgggcctgggatgtatagagggaactaagcttcttcagttaagctgctgctttcagttgagagtccagacataagttttcagaccaagtaatgtatcctacttactattctttttttttggtgtcacagctacttactgttaatcgattgttatgatataatctctctacatttttatttaaaaaaaaaaaaaaaaaaaaaaaaaaaaaaaaaaaaaaaaaaaaaaaaaaaaaaaaaaaaaaaaaaaaaaaaaaaaaaaaaaaaaaaaaaaaaaaaaaaaaaaaaaaaaaaaggccccccagccccccttttttttccctttaaggggggattggccctttggggaaaagggcaatcgggggatttttcccccccaaattcccccaaaaaagaaaaccccggggggggggcccccttagaaggtttgggtcgtttgcttgctccgcaatgttgtttagttcacatgtttgtggggcaatattcgtttaagtctaacagtcctcgccctcccttnccgtgcttnggatgtgaacaaaaaaaggggggggggg

SEQ ID NO: 86260 - DNA, 2627 bp, Zea mays
  Clone ID: MRT4577_17867C.1
gttctatggtgatgatgacccaaaagagcggctgcgcattctaagtgaataccttgaccagtttgtagccaaccctgctcctaatgaatcgaaggtttggccacagaggctattcaaggaacctgtgagggtcatagagaagtaccctgctggtcaagaaggtgatttgacgagaaatatatggtgtgcatcaattggcttttgtcagaagtgccattaattgtagaaactgagcttgcacttggtttcctggatcatctattgctggggactccagcttcaccacttagaatggagaatcgttaaaggggcagtggagatggtatagcggcagctagtatggatgctaagttaattgcagctggatggatttcggaacaaatgggtggtgttagttatcttgagtatctgcgggacctggaaactaagattgatcaagattgggacagcatatcatcttcactcgaggaaatgagaaaatcactcttttccaagaatggttgcttgatcaaccttactagtgacgggaaaaatcttgaaaaatcaaggcaacatattgccaaatttcgtgattcactcccaagtagcccattcattagaactgaaatatgaacaaccactgcaacaattgaaagcacgaattgcagatagggatcaaaagcttaattctcaccgctcattgaaaaatttattttgaagaattcacatcgtgtcacagttgaaatgcagcctgatccagagaaagcatcacgtgatgaagcagctgagaaagagatcctaaaacaagtcaaagctagcatgactcaggaggatcttgcagagttggcacgttctacaaaggagctaaaggaaaaacaagaaacaccagatcctccagaagctctcaaggctgtccctagtctgtcattgcaagatatccctaaaaagcctattcatgtaccagttgaggttggagagataaacggtgtcaaggttttgcaacatgatctcttcaccaatgatgtcatctactctgaggtcgtatttgatatgggttcgatgaaaaaagaacatttgcaattgttgccattgttctgccaatccttactggagatgggcacaaaagatatggactttgtgcaacttaatcaattaattggtagaaaaactggaggcatatcagtatacccattcacatcatcagttaggggaaaagaagatcctctcactcgcataatcgttcggggaaaggcaatggcgccacgagtagaagatttgtttaatctgatgtacatcattcttcaagatgttcaattcacagaacagcagagattcaagcagtttgtttctcagagtaaagcaagaatggagaatcgattgaggggcagtggccatggcatagcggcagctagaatggatgctaagttaaatgcagctggatggatttcggaacaaatgggtggtgttagttatcttgagtatctgcgggacctggaaactaagattgatcaagattgggacagcatatcatcttcactcgaggaaatgagaaaatcactcttttccaagaatggttgcttgatcaaccttactagtgacgggaaaaatcttgaaaaatcaaggcaacatattgccaaatttcttgattcactcccaagtagcccatccattggaagtgatccatggctttctcgtctaccttctgtgaatgaagccattgttgtcccaactcaggttaattatgttggaaaagctggaaacctttaccaaagtggataccagctcaatggaagcgcctatgtcatctcaaagcacataagcaatacatggttatgggatcgtgttcgagttagcggtggtgcatatggaggattttgtgattttgacacccattcaggagtgttctcatatttatcatatcgtgatccaaacttactgaaaacactagaggtctatgatgagacagcaagattcctcagagagctagaattggatgatgatgcactcacaaaagctattattggaaccataggcgatgttgacgcctaccagctaccagatgctaaaggttacagcagcctaatgagatatttgctgggcatcacggatgaggaacgccaacaaagacgtgaagagatactagcaacaagcccgaaggatttcaaggagttcgctgatgctgttgaaaccatcaaggacaatggggtcgtggttgccgttgcctcgatagatgatgttgaagctgcgaataaggaaaacccggtattccctgaagtaaagaagtgcctgtgaggtccaccaccacttcttgataaggattctagccgggaggtgtttttttaccagtgaatgcggagtctgacaatgtacgtaacatattgcaagagcaccatctctccgaccacggttatagttagccgaatcttggcttctcttctcccatgcgattttaattttggcagtcaataattagttcagatgtagacatagatgcatgctggtagatggctagcgtcttcccatgttggctcaaacgtcggatgtacacaatgattcataaaaaatagaaacggatggtgagatttctaccaaacaaaaaaaaaaaaaaaaaaaaaaaaaaaaaaaaaaaaaaaaaaaaaaaactcgag

SEQ ID NO: 86261 - DNA, 2166 bp, Zea mays
  unsure (1)..(2166): unsure at all n locations
  Clone ID: MRT4577_178680C.1
attgggtacctcgaggccggccggngaaaatgtcggccgggacctcccgtgtgcaagtggcagggccagacacggcgggggccccggcattactcccccgccataaattctccgccgccgcacaaggcagaacggaagaggtgtccccgctccgcgcccagcggtaaccccacccaacccctgtgagctgtgacacagctgtactcctctccccactccaggcgctcacactcacatccccttccctccacaggaatccgccgccacaatcccctccgctccacattgtgggattgagccgaacacaagcaccctcctccccgaaacctcttctttgccctgctttcggtggtatggtgcgatgatgactagggaggctgtgctgttgtccctcctcttctgcctcgccgctgccggcgaggcagtgtcactggtgagccagggcgaggcggcggagctggcggtgtcggtggacccgtcgtggcgcttccccagccagcggctgcgggacgcgtacttggcgctgcagacgtggaagcagcaggccatcttctccgaccccaggggcttcaccgccgactgggtgggcccgggggtctgcaactacactggggtcttctgcgcgccgctgccgcggggggtgccgggcgccggggagctctccgtcgcgggcgtcgacctcaaccacggcgacatcgcgggctacctcccgacggagctcggcctcctcgccgacctctcgctgctccacctcaactccaaccgtttctgcggcctcgtgcccgccacgctccgccggctccgcctcctcgtcgagctcgacctcagcaacaaccgcctcgtcgggccgttcccggccgtcgttctcgacctcccggcgctcaagttcctcgacctccgcttcaacgaattcgagggcgccatcccgccggagctcttcgaccgcccgctcgacgccatcttcctcaaccacaaccgcctccgctcgccgctccccgacaacttgggcgactcgccggcctccgtcatcgtgctcgccgacaacagctttggcggatgcctcccggccagcatcggcaacatgtccggcacgctcaacgagatcctcctcatcaacgacggtctcgactcctgcgtcccgccagaggtcggcttgctccgggaggtgaccgtcttcgacgttagcttcaactctctcgtcggcccgctgccgcagcaggtggccgggatgcgcaaggtggagcagctggacgtcgcgcacaaccgcctgtcggggtccgtcccggaggccatctgcgaccttccgcgcctcaagaacctcaccatcgcatacaacttcttcaccggcgagccgccgtcctgcgcgcgcgtggtgccacgaggcggcgacacgaagaattgcctacccagccgccccgcgcagcgcacgccgcagcagtgcgccgcgttctactcgcagccgcccgtcgactgcgcctctttccagtgcaagccgtttgtccctgttccgccattgccgccgccgccgccatcgtaccccggccccttgccaccggtataccccatgccgtacgcatcgcctccgccacctgcgcattaccgatgattcgctgcgggagagaagcaatatcactttcaccttaaattcgccaccgccgctgcgctggacaaagttcgccgtcacaattgtacgtggtcagccattgttgtgcttagattagtagtgttcttgattgatagctactggcatatagaagtttattattataaggtgcatatatcgtccttgcttttgcattggtcgttctctgttttttgcgttgatcggggtttgcgtcacggtgatggtgaaatagatggtcagatggaggtgaaaaggattggaaggaacaatttgagtttggattgattgctaattggctgactgcttgagagagagatcaggatgacgaggaggattggttggtgacttggcgccaccttgggcctcggatgtatagggggaattaagcttaagttcttcagttaagctactgctttcagttgggagcccggagataagttttcagaccaaggaatgtaccccacttaactattctttttgcatttttatgtcacagctacttactgataatcgattgttatgatatatctgtttcgattctt

SEQ ID NO: 86262 - DNA, 687 bp, Zea mays
  unsure (1)..(687): unsure at all n locations
  Clone ID: MRT4577_178681C.1
gattctaagaacagagtggcgctgcccgcctctctctgcggtgatggtcaaacagacggcaggagtaagactccatcaccaccatgtgtcccaaggtggggttgtttgttgctatcacgctcttacttctctgccacgcacggcatgcgtcgatcaaccctcattgaatcaccgcccacgactcgaccaacgccgcaccaagcatgcagagcggccgacgacacgtcacatcgggcacggctagctccttactgcgcacagcgtctctgagactacagaggcagacgcgcccagagcaccgtctagtcctcctcgcgcatagggatcgtggctggccgccagactgcgtaccagatggctggctcgcctgcatgtaggtggctggtgctagctctagctgctgctgcgcctgtgcaccaccataaaggataacgcactgcaggatccagctgaacacagtgcctttaactctgcctcattgacgacaactgctcacacattcagtcacaaaagacttacatctgtgccgccactaactgacctgaatatagtgagatgaactctaggatccaaggaactgctcacccttagtgtgacatctcgagatgccgatagggactggaccctcatcgctgtttatctatttttatatnntgcccctcggtgacctacattcacatcttttgt

SEQ ID NO: 86263 - DNA, 670 bp, Zea mays
  Clone ID: MRT4577_178682C.1
gcaaatatccttagacatgcatccctgcataatgtctctgcagaggtcactcgagggtttcgtccacgcgtccgacgcaacgaaaaagcttgccagagatgccttctgttcctgggttcgtgcctacactgctcaccgaggtgaactgaaaaaaattttcatggtgaagaagctccacctgggccatgtagcgaggagcttcgggctaaaggagcagccgtcgctggttggaaggtcacatcaggtgtctcttaaaaagcggaagaaagagcagaagcgcgagcggcctgccaaaaggaggaagctcccctccaagaagtgaatttgcacacccggaatgctgcatcgcttgacttcggatcatgacgcccgccatttttgcgaccgacaaccgtggtggcctatgcctcggtctgtagactattgacatgagctatttttgttcgcgatattacatgtagaaatgtaggaactatagcaacaaatgcacaatcacattgttcgctgcagcagctgtttgttgatgtgagatcatctgttactattattattttagtatccgcttgggtttctcttaaatctcacgcctgcttttgttctactgtactgtataaatattgcagtttacagtgcaaaattaaaattaagttttataaaaaaaaaaaaaaaa

SEQ ID NO: 86264 - DNA, 627 bp, Zea mays
  Clone ID: MRT4577_178683C.1
cctgaaagacgtggcggggcgggcaaggttttcttctcgcatctttgcaccaccgacccgacccttcgcgcgccatcaatgatcgggcctccaagcatccccacgcgagtagggagcttggtcgtcgccgtagacccccaggagccctcgtctatggaagagtggcgtcgtccggacgcttaaagattcctcccccatccaaacaagttaacaagaatcgtagttcgacgtccggcaggtgggtcgccgcgtttcatcggggacatgcaggcacagtaaaatcacaggccgccctcaaacccccgggaacaacgccgtacaactaccagaaaacccggcactacggtcggtattagttgcgccccaaactaggtccgcacgaattccttgaccacgcaaaatagaaccctgcgcagtactcggtaaatagcagcgctgtgtggctgtagaaccctcttgggtacggtgcgtaaccctacctgtaatcacggctctagttacacaactagtagcccgtacgatacctcccgtagtctgcgccctagaaccacgtgtactgggttaggtacccgcgcgctgtccgccctcctgcatcttaagtccttcaccacccgtagtacttaacta

SEQ ID NO: 86265 - DNA, 186 bp, Zea mays
  Clone ID: MRT4577_178684C.1
tcttactccagcactgaacactcgattgatggagtaggtagctaggcagctgaatcacaaatggatcctaccaagttccgtccgtccagcagtcatgacacgacggtgacgacgactaacgcgggcgttcctgtgtggaacgacaactaggcgttgactgtggggcctcttggccccattcagctg

SEQ ID NO: 86266 - DNA, 668 bp, Zea mays
  unsure (1)..(668): unsure at all n locations
  Clone ID: MRT4577_178685C.1
ttgggtacctcgaggccggccgggaaatagtcgacgcttcttgttgcccaagaattctctctcctacccgccgtcgtcggtcgtctccctgataggtgccgtgaccgagatatttgatccgagttctatgtagacaatcggatttgcttgtttcagcccggggtgtgctgcgtcaggggctgtggaaagctagaaattcgggacatctgcttcgtatcaagcgagtacagtgtacgctaaatcgtgcgtttacacacatagcttacgcaatttgaatttgatgtactaatgaagtgtaaggctgcaaaaaactttactatgaggagatccatgatgtatggagctccctcgttggatacctgttgagaaccttcgacctgcgcgttaggcgctgaataagttccaggctgctagctttactccaactgtgaccaagaagacatcttgatatcacttgttggcttgctgcattctaagagtgtatgatttcttttatgacacttggattctggccatgtctctctggcctgctgcttcctgataatcgatcagatccccattgttgctcctgtgcactcctccctccatttccagtattcgtnttggattcacctgctcgaatggctggtcattctgctggtgatgattccccgtgctcatgtattcac

SEQ ID NO: 86267 - DNA, 313 bp, Zea mays
  Clone ID: MRT4577_178686C.1
ccctctcctcctataggggattgggtttctcgagggcgggcgggataagaaatctaccgagtgtttgtgtcctggcctccggagagagtttgtgccttacaggaaagcaaaaagcaagttgccccgccgctgggaggaaaaggagagtagaggaggatggctcgtacgacgcagaccgtcggaaagtccaggggaggcaaggccccccgcgaacacgccgccaccaaagaagcgacgcacccggcgccgacgactggtgacgtgaggacatcccacaggtacaggccccgaaccgtgacgctgcccgagatcc

SEQ ID NO: 86268 - DNA, 323 bp, Zea mays
  Clone ID: MRT4577_178687C.1
ggaccggaacaaacccccaaaaatttttccacgaacaagatttaaaattttttaaacccagacgatcgggcagaaaaaaaatgccactttggtttttggggggggcccttcccaaaagaaaaaaaaacccaaagctgtcagttgggctcacgatgaagtccaaaagggggggttttgggtgggtcaaacaacggggggggaggccgggggcaccagcacttaattgtcacccggggttgcccatgcctgggggaatccctttgatggggataaacaacgcttccgggaccctggggttgttgtttttgggggggaccctgggg

SEQ ID NO: 86269 - DNA, 469 bp, Zea mays
  Clone ID: MRT4577_178688C.1
agctcgtaattcggctcgagggcgatgaatgagtccatcgctttatcagatactgagaagcaactgcgacatgagaagcactatcggtatatctgctcacacgacgttgcctattggtctaagagctatattcaagatttcgagagaagctgtagggaccattttaggagaaaatgttggggtattggactaggatttggatttagagtggttgcacttgaccgcaatttcaaaaagcttaccgtagattctattgttgcggattacaagaagtcaaagagcaggatcatactactagactatgatggaaccctagtaccacaaactacaatagacaagactccaagtgaaactgttgttaacatgatgaataccctgtgttctgataaaaataatgttgtttttattgtaagtggaagagcaagggatagccttgaaaatggttttacccttgccaaagcttggcatt

SEQ ID NO: 86270 - DNA, 646 bp, Zea mays
  Clone ID: MRT4577_178689C.1
cccacgcgtccgcgtagttctcaacactccttcgtggggcgtgctcgctcctagaatcctagggtccgcttctgcgtcaccgatcggtagtaagcacagagtcaccgcaccgccgcgtctaggtcaccgccatggccggggactggcaggagctgggccaagcggcggccatcggccgcctcttcgccttcctggtcgccaagctcatctccaccgtgatcgccttcaaggaggacaacctccgcatcacgcgctcccctccgacctcccccactgccgccgccgcagccgcgcctcccgtcccctcccacgacggctccaccgacggcggcagcggcagcgacagcgacagcgactgggagggcgtggagagcaccgagctcgacgaggagttcagcgccgcctccgccttcatcgcggcctccgccgcctccggcaccagcgtccccgaggaagcgcagctgcgcctctacggcctctacaagatcgccaccgaggggccctgcaccgcgccccagccgtccgcgctcaagctcaaggcccgtgccaaatggaatgcttggcataagctgggtgctatgcctacagaagaagctatgcaagggtacatcacaattgttcaggagctattccctaactgggatgc

SEQ ID NO: 86271 - DNA, 255 bp, Zea mays
  Clone ID: MRT4577_17868C.1
tctcttttttttttttttttttttttttttttttaattttttctgtttatatgaggccacgcattctccaaaaataaatataattttctgggggaaaagcagaaaacacccatttccggggtaaataggtaagacacttcgtgacaactactgccaatcgctggggataccttgatatgggtcccaagaacaaagatggaaacctagccctgggggtaaggggctggggaaaaaacttacacccttatgcaaaac

SEQ ID NO: 86272 - DNA, 1487 bp, Zea mays
  Clone ID: MRT4577_178690C.1
cgtagttctcaacactccttcgtggggcgtgctcgctcctagaatcctagggtccgcttctgcgtcaccgatcggtagtaagcctctcggaactttcctcttttttaccgacgtcaactttctcacctttcttccttcccccagtctcccacaccccaactccaacacagagtcaccgcaccgccgcgtctaggtcaccgccatggccggggactggcaggagctgggccaagcggcggccatcggcctcctcttcgccttcctggtcgccaagctcatctccaccgtgatcgccttcaaggaggacaacctccgcatcacgcgctcccctccgacctcccccactgccgccgccgccagccgcgcctcccgtcccctcccactacggctccaccgacggaggcagcggcagcgacagcgactgggagggcgtggagagcaccgagctcgatgaggagttcagcgccgcctccgccttcatcgcggcctccgccgcctccggcaccagcgtccccgaggaagcgcagctgcgcctctacggcctctacaagatcgccaccgaggggccctgcaccgcgccccagccgtccgcgctcaagctcaaggcccgtgccaaatggaatgcttggcataagctgggtgctatgcctacagaagaagctatgcaagggtacatcacaattgttcaggacctattccctaactgggatgcaggtgcaagtgcgaaaaggaaagatgaagatagcattgcttccgcatcagcttcaaaggggcccatgggacctgtgtttagcagtttaatgtatgaggaagacgaaggaaatgaatcagaacttggtgacatccatgtttcagcaagggaaggggcgactgatgacatagtgaagcttctggcagctggtgttgaggtcaacgtgagagataccgaaggtagaagtccgttgcactgggctgttgatcgtggccatcttagtgctgtcgaggttcttgcaaatgcaaatgcagatctgaatgctaaggacaatgaagggcaaacggcactccactatgctgctgtttgtgaaagagaagacattgcagagttgcttgtcaagcatcatgctgatcttcggatcaaggacgaggacgggaacacggcacatgacttgtgcccttcgagctggtcttttatgaaccaggcaaactgataacacgaatatacggatatgcttgaaggtgtcatctgccaagaaacatgctagctgtatcctaaagcccatacggcacatatggtgtatcttagtgtcatgtgtgacgtgtgggaaatcaggcaggttgtttgcgtacgtggtgccctctctgaaatcagatgagttgttttatcgtcctcatcgaaccagttgtcaaaggatagtattagtgttgggaagatacatgtattgctttaatcaaaagaatcatgctggacaccaatgcaagcccaaatgggaagaaaaggatgtgcggac

SEQ ID NO: 86273 - DNA, 1445 bp, Zea mays
  Clone ID: MRT4577_178691C.1
ggggtactcttgcggccgtccggattacattcattgggtacctcgaggccggccgggccggggacttcgacacgggccctaccagtttcggagtgccccagtctcccacccccagctccaccaagtcaccgcaccgccgcatctaggtcaccgcctcgccggcgtttcgccatggccggggactggcaggacctgggccaagcggcggccataggcctcctcttcgccttcctgctcgccaagctcatctccaccgtgatcgccttcaaggaggacaacctccgcatcacgcgctcccctccgtcctcccccacagccgccgccccagctcccgcgacgtctcccctcccctcccaacacgacgccgcaatcggaagcggcagtgacagcgattgggagggcgtggagagcaccgagctggacgaggagttcagcgccgcctccgccttcgtcgcggcctccgccgcctccggcaccagcgtccccgaggaggcgcagctgcgcctctacggcctctacaagatcgccaccgagggaccatgcaccgggccgcagccgtccgcgctcaagctcaaggcccgtgccaaatggaatgcttggcataagctgggtgctatgcctacggaagaagctatgcaagaatacatcacaattgttcaggagctattccctaactgggatgcaggtacaagtgcgaaaaggaaagatgaagaaagcattacttctgcatcagcttcgaaggggcccatgggacctgtgtttagcagtttgatgtatgaggaagacgaagggaatgattcagaacttgctgacatccatgttttagcgagggaaggagcaactgaggatatagtgaagtttctggcagcgggtgtgggaagtcaacatgagagatactgaaggtagaagtccgttgcactgggctgttgatcgtggccatcttagtgctgtcgaggttcttgcaaatgcaaatgcagatctgaatgctaaggacaatgaagggcaaacggcactccactatgctgctgtttgtgaaagagaagacattgcagagttgcttgtcaagcatcatgctgatcttcggatcacggacgaggacgggaacacggcacatgacttgtgcccttcgagagctggtcttttatgaaccaggcaaactgataacacgaatatacggatatgcttgaaggtgtcatctgccaagaaacatgctagctgtatcctaaagcccatacggcacatatggtgtatcttagtgtcatgtgtgacgtgtgggaaatcaggcaggttgtttgcgtacgtggtgccctctctgaaatcagatgagttgttttatcgtcctcatcgaaccagttgtcaaaggatagtattagtgttgggaagatacatgtattgctttaatcaaaagaatcatgctggacaccaaaaaaaaaaaaaaagcggcc

SEQ ID NO: 86274 - DNA, 300 bp, Zea mays
  Clone ID: MRT4577_178692C.1
aaacggaaacagccaaaattattctaaaaaacccgggggcaaggggggggaaaaaaaaaccctaacaaaaaaaggggggggaaaccacacaatacttcaaaaaaaacacacaaaacacggtggcgggggcaacccacgggaaatcacgggaaaagggcaacacacgggcccgaggcggggaaaaaaaaaaacttttttagaactgggaaccctgggggccatccccgcccttatggaaccaagggccaacctcctcggagtccttctggagcgcccccgggtccccaggggccttaaaaa

SEQ ID NO: 86275 - DNA, 412 bp, Zea mays
  Clone ID: MRT4577_178693C.1
gagggagaaaaacggggcgcttttatttattgggattggggggcccagggggctggaacccccccaaaagaatgaacacctcgcccacccccatggggggcacccatttactccatgaatttaacaaaaatttgggcaaaaaatttgccctgggggagggccttggaggggcccttcgcctccttaaacctggactttcttaaaacggggttccggggggtgaaggggcccttttcccccagttttaatttttggggaagggcctgcctggcccttgcgccgtacaagccgattattttaaccttttcccgggaaaagggggttttgttaacccccccaaacaaattgggggggggggggcccgaaaaaaacggcttgccttcgtggggcacccttttggggccctggaaaa

SEQ ID NO: 86276 - DNA, 845 bp, Zea mays
  unsure (1)..(845): unsure at all n locations
  Clone ID: MRT4577_178694C.1
tttcgactctagtcttttcgacataccgctttctctcctctctcaccgccccctttttttctttctctgtttttctacctgaccggaaaggagaggtggattttggtttaaaaagagtgaggtcgaagaaggttggttgtatcttatcgtgttacgtggagccaacaacgaccgagaaaaaggagagaccaagggaagacagtattcaaggaaaagaagaagggtaaatcgaataagccatcatgtctaatgttcaggataagccgctcaatgagctcctctcgcgctcaatggtagacatctacgtcgggccagagaacacacactggatcctgcacgaaaaactgctatgccaccactcgcccttcttccgcaaaatcttctactccaaatcctcgacctcgtcgcgcacgcaatcctttggcctccccgatgaagaagacctccccttcaagacctttgtcggctggctctactcgtctagcctgcccgtgccccgcgaggaagccgacctcggcacagccttcgatctgtacctgatggctgagaagttcgagatccctgcgctagtcgccgatgtgctgcaggttgtccgcgagtggtacaagtacagcgattcgtaccctggactgcgccgcgtgcagtatatctacgctaacactgaggagtcgagcccaatgcgacatatgctggtccacgccgtcgcgcgcatgatggtagtggcgaacacgggtattccgccgcactgngacaaggcgctgcgcaagaacgggcagttggttgttgacgtcatccgcgcgatccaggactggcggctcgacgaggagacagtgcccgatgcgcgt

SEQ ID NO: 86277 - DNA, 1252 bp, Zea mays
  Clone ID: MRT4577_178695C.1
ggcggcactcctcgcccacgggcgacgctgcgcagaggctggcgcactgcttcgccgacggcctggaggcgcgcctcgccggcacgggcagccgcttgtaccagtcgctcatgctccgccgcacctccgtcgccgacttcctcagggcgtaccgcctctacatgaccacctgctgctgcaagagggtggcgttcgccttcgccaacaagaccatccacgacgctttcgcgctcgccggcaggcgccgccggctgcacatcgtcgactacggcctcggctacggcttccagtggcccgggctgctgcgcggcctcgccgccagggagggcggaccgccggagctggtcaggatcaccggcattgacctgccgcagcctggctttcgccccgcacagcagatcgaggacaccgggcgccgcctcagcgattgcgcacgtcagctgggcgtgccgttcgagttccggggcatcgcggccaagcgagaggcggtgtctccagaggacctgggcatcgacccagctgccgaggtgctcgtcgtgatcagcctctgccatttcaggctgctcacggacgagatcgaggtcgagatcagctcctccgccgccgccgccgggcctagtgggcgtcgtcgtcccaccgccagggaccaggtgctctgcaacatccgccggatgcggcctgacgtgttcatccacggcgtcgtcagtggcggctacggcacgacctacttcccgacaattcggcacgaggcgatgttccactactcggcgcagttcgacctgctggacgccaccgtgcctcgggacagcccggagaggctgctgctggagagggacatcttcggccgcgccgccatgaacgtcatcgcgtgtgagggcgccgaccgagtggagcgccccgagacttaccggcagtggcaggcgcggaaccgtcgggcggggctcaagcagctccagctgcaggctgacgtcgtgaaggtggtgagggacaaggtgaaggacaagtaccatagggacttcggcatcgacgaggaccaggggtggttgctacacacgtggaagggacgtgttctctatggcctatccacatgggttgcacaacatgctgacccatgactaaaggccctctatggtgggcctccaacagctcctagaaaaatctaataacggggaagcttcttgatgggctttttctagaaatggagaggagctcctaaaaaaactaatagaaggggcctaaaatctctgtcacc

SEQ ID NO: 86278 - DNA, 262 bp, Zea mays
  Clone ID: MRT4577_178696C.1
caatcacagtcgtgacgagatcgcgagagctagctaaagggccgagagaatgccgatcaataggatcgcgctagggaaccaacacaaggtgtaccacacggtacgcactcaaggctagcattcactagaatacatctccaccctcatcttcgacttcgccgggcagggctccggcataaccgtcagcaagctgaccggctgctacacgacgactccgacgggcctgatcgcggcggcggtggcgcacgcgttcgcgctgttc

SEQ ID NO: 86279 - DNA, 312 bp, Zea mays
  Clone ID: MRT4577_178697C.1
atggcgtccagcgcggggtttggcgcggctttgtcgcgggatggcgcggcgcgggcgtcgcggtcgggctggcagggcgctcggggtcgggttggcagggcgctcggggtcgcgactcctggcgctgctgcgcaggcgcgggaaggccgggtcgcggggtcgggcggtgtcggtcagggttgccggggcacggttggggctgggtggtcggcgcggtgttacacagccgtactggaactcgcaaggcacgaactagtggatctcggaggaatctcttcacaagtagagaagaacaatgaagaacaagggtag

SEQ ID NO: 86280 - DNA, 194 bp, Zea mays
  Clone ID: MRT4577_178698C.1
aagaggaaaagcccgtctttttttgtccagcaccaaacttcctttggtacaacacgacccggggcggttttacaggataacttttacaccaaactggcgagtagtatttggtccagcttccaaaaaaatgcgctgattgcctacttgttggatacatacagcagagtgttttgaaccaacaaagagatcaaaaa

SEQ ID NO: 86281 - DNA, 174 bp, Zea mays
  Clone ID: MRT4577_178699C.1
cgcccttataatttttttcctaccatgctcattctttgggggggttttttttggcagcggggggaacctccattttttccttaggattaacttaaaacaaaaccctgacaggggtaacagatttcatcgaaccacaaaaccaacgctggtgatgcaagggtccgctggagccct

SEQ ID NO: 86282 - DNA, 229 bp, Zea mays
  unsure (1)..(229): unsure at all n locations
  Clone ID: MRT4577_17869C.1
cgagcccccctctcactcgcctcgacgcgcctctgaaagttcggagccgccggcccgtccgcctgcctctccgcctcccgtccccaaggccaatagttttcaagtggcaatggcggaccaggctaaccaacccactgtcctttataagctcggtgggcagttccacctgcgctcgatcattantgaaggtgaacggggccnnaacatattcccatttgtctnatcttat

SEQ ID NO: 86283 - DNA, 380 bp, Zea mays
  Clone ID: MRT4577_1786C.1
gaacagtgtaaaccaatggattgagttaataccctgcaaaatcatccatgggctagtatgttgaaaaactttgtaaaagggaaagaacaaccaggttacacctggacatctagcgccaaacatcaaacaactaacaaaattgttcaccttgtacaagtacaaacatcaaccttactagaaccgcaacggcagtgaatgccctaataaaccgacattcatctccgggatttcctgtaccgttcttcctcttcatcagaccttctttcgtaacggccaccagaatctctatcgtgcctagaccgcttgctctctgatctttcttctattcccctgtcatcgcctctctgcctatcgcctctagatctctcaggggatttctc

SEQ ID NO: 86284 - DNA, 210 bp, Zea mays
  Clone ID: MRT4577_178700C.1
ggttttggtttttttttattttttttttttatttgggtttttttttttttagttttgaattatggagaatgaagttaaaactggaccatttttacatataacgtgccaaaaaattatttgctaaagaaaaatgttccaacaaaagatggggtggtgggggtaatgactcgttgaaagaaaaaatagggtggccaaccaagtcagccacgt

SEQ ID NO: 86285 - DNA, 444 bp, Zea mays
  Clone ID: MRT4577_178701C.1
gggccccaaaagggaaaccggcccatttaaaaaaaaaaaaaaaaggaagggggaaaaaaaaacgcggggggcgggctttaaaaaaccaaaaattgggggaaaaagcccaaaagggggggaaatgggtaaaaaaaagcccaaaaaccatgggggggggaacccttgggccctttcaaaaagggggggaaaggggtttaaaaaacttggaaaaaaacaagccaaaaaaaacccccccacctttcaaaaatgggaaatccctaaaggcttggggcccaagggaagggaaaattttttccgggggcccatgggaagggccaaaggtttaaaaaaaccctccggaaaatgcctaaggggggccaaggaaaccccctttggcgggaagggaaacaaaaacttttcaagcccaggggaacccaggaaaccggggggggggctttaaaccct

SEQ ID NO: 86286 - DNA, 417 bp, Zea mays
  Clone ID: MRT4577_178702C.1
acccacgcgtccgaagttgtgaaggtttctaaggatgatattaccatgcaaaatcctgccaccggggatatttcagtcccttatgggatggctgtctggtcgactggctaatcgccgtgtcttggctactgatgaatggctaagggtccgtgaatgtgatggtgtctatgcaataggtgactgtgctacaataaaccagaggaaagtaatggaggacatttcagaaatattcagagtcgcagataaagataagtctggaaccttgactgtgaaagaaattcaagatatccttgatgatatctacgtgaggtacccgcaagtacagctctaccttaagagcaagcagatgaacggcatcgctgatctagtgaggagcgccaaaggagacgctgagaaggaatccgtggaactgaacat

SEQ ID NO: 86287 - DNA, 2531 bp, Zea mays
  unsure (1)..(2531): unsure at all n locations
  Clone ID: MRT4577_178703C.1
gcagcgggcgctntacgctccatggcaagccgcgttagatgcctcaggtaccggcgaggaaccgcggtcggcggagctctcgctctcgcttcgttgaaggctcccctcttcctccctccatacaggagcctccttttcctttgccggtgcggtgccgcgtgcctgccattctcctcccgagccttcttccttcacgcctctttgccgcagcgcgggtgggtcgtcgtttgctgtttgttccgagatcaccggagccagccagccagccacagccagccagagtcagagatgaggtggtcggcgttcctgtgggagaccgcgtccggccgccgcccgggggtttccaacctcctcctcgtcgtcgcagccgccagtagcggaggtctcgtcgcgtacgccgactccggatcagatgctgctgtcgagcagccgcagcttcctccgaggaagaaggtcgtggtgcttgggactggttggggcggcacgacgttcctgaggaacctcgatagcagactgtatgatgtgcaggttatatctcctcggaactacttcgcgttcacgccgctgctcccgagtgtcacttctggaacagttgagcctaggagcattgtggagccgatccgtagggttttggagaagaaaggtggagaaatcaaattttgggaagcagagtgtttcaagattgatccacaaagcaagaaaatccattgtcgctcgaatgttgggacaagccttgaggggaatggcgagttcttggttgactatgactatctcgtggtagcagttggggctaggacaaatacattcaatactcctggtgtggtagagaattgccacttcttgaaggaagtagaggatgctcaaaagatcagacggagtgtgatggactgctttgagagagcaagcctcccctttcttaatgaagaagagaggaagaagaatcttcattttgttgttgtgggtggtggacctactggagtggaatttgcagcatctttgcatgattttgttaccgaagatttatccaagctttacccctcgattcagcaccttgtcaagatatcgttgattgaagctgcagatcatatactgaccatgtttgacaagaggataacaaattttgctgaggataagtttggaagggatggtattgatgtgaaaactggatataaagttgtgaaggtttctaaggatgatattaccatgcaaaatcctgccaccggggatatttcagtcccttatgggatggctgtctggtcgactggtattggaactcgtccattcgttgtggaatttatgaaacaaattggccaggccaatcgccgtgtcttggctactgatgaatggctaagggtccgtgaatgtgatggtgtctatgcaataggtgactgtgctacaataaaccagaggaaagtaatggaggacatttcagaaatattcagagtcgcagataaagataagtctggaaccttgactgtgaaagaaattcaagatatccttgatgatatctacgtgaggtacccgcaagtacagctctaccttaagagcaagcagatgaacggcatcgctgatctagtgaggagcgccaaaggagacgctgagaaggaatccgtggaactgaacatcgaggaattcaagaaggctctttcgctcgtggattcacaagtcaaattcttacctgcgaccgctcaggtcgcatcgcagcagggccaatatcttgctaggtgctttaacaagatgaaggatgctgaagaaaaccctgaaggcccaatccgcatcaggggagaaggccgccatcgcttccgccccttcaggtaccggcatctgggccaattcgccccactaggaggggagcaaactgctgcacagcttcccggggactggatctccattggccacagctcccagtggctctggtactccgtgtacgcaaccaaacaaatcagctggcgcacgaggatgctggtggtatcagactggacacgccgattcatcttcggaagagactcgagttgcatatgatcaagagggaaaagattttgctgtgacatatattcagatgaacgaggccagtacagcctcttcccacttttttttagtctgatttcacataaatgttccccttttgttgttagggaagaatctgacttcccctgcactttgtatagtgcaccacgaagaaattcctttgtacctaccttttctttttgagagagttgcactgcacttttgcggtctgagtaagctcagaattcttttaatagctattttttctaccactaatatgtgatatggagaagggtcagtttggacctgattttgttgtgtgaaaaaaaaaaaaaaaaaaaaaaaaggcccctagggccacttgaatccttctctcaaagaactcttagttgatgtggtggccgccaagattgatcccaagttagccaatacttttattaggcagttaagccaggtgtgcccttgggagaatctggaggcatgtaaagcgtgtacgtcgacgtactgaatgtggtgaaaatctg

SEQ ID NO: 86288 - DNA, 517 bp, Zea mays
  unsure (1)..(517): unsure at all n locations
  Clone ID: MRT4577_178704C.1
tcgggagcccatatatgaagtcagagcttcagctatcccctccaaagatcgcgagaggcaggagtcatggacaccgtcagcgccgtcgtggtgaccaccatctgtgtccgcgccgcgatcgccagaatcaatgctctaggcttgtctgtgttgagagagacgattgatagggtgcggtgtatctacgccgaggatgcccataatgcggtcccagtcaccaccaatggtgcaggcgcgtcgctgctcgccgcagcgcccgaggtgaccgcgtcatcganaaccgcggtgtcgctcgtggacgagcgcatgtccacggaggttatcggtatgagcctcctcctcagcaacaacctgcatgcggtgcatcctcactgggagtcttctgactcatctgtcccgtctacaccatctacacctctgagctcgacaaggaccaggagttcgccggctctctcgctcttagatccactctctcctgttaatgatctgaatagtaacatggaggccgcgcatcgat

SEQ ID NO: 86289 - DNA, 382 bp, Zea mays
  Clone ID: MRT4577_178705C.1
ctgaaagagataatgttctcaatcagtttcgaactggcagggcttcagtattagtagccacagatgttgctgctcgtggacttgatatcaaagatattagagtggtaatcaattatgactttccaactgggatagaggactatgtgcatcgcatagggcgtacaggaagagctggcgctactggagtctcgtacacatttttctcagaacaagattggaaatatgcttgtgatttggtgaaactcttgcaaggtgccaaccagcttgtccctccgcagctgcaagacatggctgcacgcagtgcttctggaggtccaagaaaccaggcttctgggatgagtcgctgggatgggcctggtggtcgtggttttgaacctggtgt

SEQ ID NO: 86290 - DNA, 744 bp, Zea mays
  Clone ID: MRT4577_178706C.1
aattcggcacggggccaagatcaaagcactctctcgaccatctcctgaccactccagcatctccggccttcaggcactagcagcagcatggctgacgaccagcaaccgccgacgcagcgcatatggttcccgtactggaccgcgcctgcgcctgctcatggtcctcggccggccgcccgcccgcagctgtcgaggcgggaatctcgcccggcgccgcaggcatcgccgcctcctacaacagcatccacaggcgctggcggtggtgtccctgctccaccggcccagccgacgccgctgtcgagcaggccgtcgccgccgcccgcccgcgctccgccactctcgcccatcggagagcccaatgctagagcgccggagccgtcaccggtgccggttgccaaacagcacaggccgccttctcctcttcgtcctaattatatcgcgcgtgatgttcctaagcagaaagacatcgtcgttccgcaagagaaaactatccaggaaccggcgctcgtagcatccaagacgccagccaaggccccagagaaagagaaagaagacaaggagaaaagggaggaggagaagacgaaggagaaagacaaggggcacaagatgaagaaggagaaggatcacgaagagaagcaggagaaggataaagagaaggaaggcggccagccgcacaaggagctcaaggcgggcgtcgccgacatggtgcgcaagctcggcactccggcaccgtcgtccggcggc

SEQ ID NO: 86291 - DNA, 333 bp, Zea mays
  Clone ID: MRT4577_178707C.1
gcttttacgcatcggcgctgggctttgccgatgaagtggtggaggagcgtgtggcggacgacgagctgctgtacatcaagggctgccgcgccgtcaatgtgcactcactggtgctgcgcggtgccaatatgttcatgctggacgagatggaacgctcgttgcacgacgccatgtgcattgtgaagcgcgttctggagtccggcgaggtagtgcccggcggtggtgccgtcgagacagcgctctctgtgcatctggagaactacgccaccagcgtgggctcacgcgagcagcttgccattgccgagttcgccgacgcactgctggtcatcccga

SEQ ID NO: 86292 - DNA, 156 bp, Zea mays
  Clone ID: MRT4577_178708C.1
agttgtctatgtattagccttcacgctttcgactttgtcctatatttcgtctttttcttgcatctcagtctccaattgagactcaagttgctacacctttgttgaaacagtcccggaagagcttctattgacagaggccagacctacattttgaag

SEQ ID NO: 86293 - DNA, 651 bp, Zea mays
  Clone ID: MRT4577_178709C.1
gaattcggcacgaggtaaatccggctcaaaaaccattgcacagcagaacgacgtggtgaatgatccactggaatccgtgaggagaaaggcagagaaggcgttcaaggtgctctccaggaggaacagccacgcgtctatcaaggcacccagagacagctccggtgccgccacaccgatgtcgcatagtgcttcatcaagtggcatcaagtggtgcgagaacaatgtgatatggagctcactctcctcaagcttggtgcgtcatggaaaggaagcaatgaagcagagagacatggagctgcaagctgtgcttgatggactgctagaagcatctgcctctgagaagttgataaaatgcctgagcaaatactccgaactacattctgacaaggacgacgacccaaaggaggtcatcagcaggttcttgaaattctctcaagaactggatcatgccatcttcattgctcagtcacaggccagactcaggcacccaaaagcatgctgttccaactcaacaccctcagcttcgcctagagctgctacgaaggcagcgttggacaggaagcaatctgccatatcatgggtcagagcggccatcgaagcggacctgtcacccttctccagccacacgacgagaggcgcatctgaatccgg

SEQ ID NO: 86294 - DNA, 143 bp, Zea mays
  unsure (1)..(143): unsure at all n locations
  Clone ID: MRT4577_17870C.1
gaacaaaacatatcatacaaatccacgttttgtgttcgaagncccaaattaccgaatgccattcttttaacccacagcggcaacaatataaacccttattccacgactcatctatcaaaacacggttgcaagcctatccccaa

SEQ ID NO: 86295 - DNA, 268 bp, Zea mays
  Clone ID: MRT4577_178710C.1
catcctatcatttagctcatagtctacaaataggaggactggacaccctgaaagtgctcatcgctgcccttgctctcctggcgatcgctgcgagcaccacctgcagtacaagcggctgctatagatgacagacacaaccaccgcatctaccgtatatgctgtatatgccgtatctgtcctatctgccgccgcagcagcaatcgcaatcatggaattaccccactcaaccaccgcagctcaaccagtgccaatacttcggatcctgcag

SEQ ID NO: 86296 - DNA, 220 bp, Zea mays
  unsure (1)..(220): unsure at all n locations
  Clone ID: MRT4577_178711C.1
gggtggggtgttttttttggaggtggtgtgccttcncttgctgnacaagcnacaaataaaaactgtggtgccatgtttagctcttcccctatacccaatcccctttcaaaatcgctttttatggtaaaaacagttcacaacccgggggggatcatcttggattccggggttaaacttaataaaacatgcgtcgtccgttacaaagggaactcatgttttt

SEQ ID NO: 86297 - DNA, 376 bp, Zea mays
  Clone ID: MRT4577_178712C.1
gccacacctcctgtctcaatctgacaccttacatccgttgctcggtgagtcgtggccaggcgcacacatggcctatgtcgagcttgcctgcacctgctcggctctcattctcagcgaccatggcatcgacatcacggtcggcaagatcggcacgagcgataaggctgtcaacatcaatgtcgagtactactgaccgggactgtttgacaagctactgaataagcgcaacgtcgatgacacaatcctgtccgttggagctgagggctaaactgctacagttgctgatgccgaaactgatagcagtgctgatgctgcagctgatcaagctgtcaagaataaaaaggaatatgtcatcgaagagtcagatgactacatg

SEQ ID NO: 86298 - DNA, 1463 bp, Zea mays
  Clone ID: MRT4577_178713C.1
ccaacctccattccttcctcctttgccaatgcagctctgatctctcctacctgagaatgtcagtgtgagtggccattccatctgcacaacatcctcctccacgcaccgcaaaacatacaaaaaggcagaagcggaggagatgaaggcaatggccgggccaaagctgctcgtcgtccacgcgtcgtcgaacaaggccctgaacgggatggcgcccacgtcgccggcgtcgcccggctggtcgcggtgcctgtggctggtggtgttcctggccttgttcacctgcgtgtccctcctgaccgtgctctccacggcgcgcgcctcggccggggcgccggcgtgccaggcggcgtcgctcacggccagcgctgccggcgccacggaggccggcctgccgcggcacgtgttcgacgcgctggtgcagtacgctgcggcggcagggaacttgtcgtcgagcatgccggagccggacgtgcgcgcgatcgcgtcggtgctccggcggcgcgcgccgtgcaacctgctggtgttcgggctgggcgcggagacgccgctgtggcgcgcgctcaaccacggcgggcgcacggtgttcctggacgagaacccgtactacgtggcccacctggagggcaagcacccggggctggaggcctacgacgtggcctacgccacggcggtgcgcgagctccccgacctcctcgacgccgcccgtgccgcgcgcgccgccgagtgccgccccgtccagaacctgctcttctccgagtgccgcctcgccatcaacgacctccccaaccagctctacgacgtcgcctgggacgtcatcctcgtcgacggcccgcgcgggttcatggagggatcgccggggaggatgtcggcgatctactcggctgcggtgatggcgcggaccaagggcgcggagacggaggtgatggtgcacgactacgagcgggaggtggagcgcgcgtgcggccgggagttcctgtgcgacgagaaccgggtcacggcgaccagcacgccgtcgctcggccacttcctcgtgcacggcggcgccgccgccaaccgggaagccttctgcgggccgcccgccggcgccgcccagaaatcgaaaccgagctaagcgagtcgtagtcgttacttctccttcccgggcaatgttggcgatctctctttgacaggggaaagtaatgaactcgcagaattgactcaagggagcataggtcagtggttcctcgtattcttttcgaacaaatcctgtgggtggtggtggtccaatgatttctcccttcaaacatactgtaatgcctgacgtgccaacacattcgacacgtttaagagaaattttgcatttacaccctttccaagatccattcagctttttatccaaaaagaagaggagggagaaagatccattcttttctcagccccccttcattagctaatgcccttttcaatgcggacggacaggtaca

SEQ ID NO: 86299 - DNA, 308 bp, Zea mays
  Clone ID: MRT4577_178714C.1
tcccaggcgaggcgggccgaggaggaccaacgccgagtaccgggccgaccccgacgcctccaacacctacccgcaccgcgccggacaccatccgcaacaacggccacgtgctcaccaaggaacgtccctgcaacgttgcccaggagtccactgcccgaactggcaaacaggcccatgcctggcgccacgcctggcggcagagacggtatcactggaaagaagcttcaggacagtgttccttcatctcaccgccgggacgtgccccatggtgcccactcagactaccagctgagagacaccacggacag

SEQ ID NO: 86300 - DNA, 2740 bp, Zea mays
  Clone ID: MRT4577_178715C.1
gatcggtcacactcacaccaccacggcaccaccaagcatccaatgcttcccctccccctcccgcctcccttcttaaccccgattcccaccactaaccgctcccgccaccactaaaccccgccggtaaccaccagcctccgggtcttgtcaagagcccagagtgcctgcctgaaggaaaacgaacagcaccagaaccgcgcgcgcgcgcgggcgggcgccgtgatggacctcgcgtcgttcatcacgtccgtgctcacgtcgttcctcatcttcgtggcgctggtgctgctgttcacgtggctgtcgcgccgcccggggaacgcgccggtctactaccccaacctcctcctgcgcgggctcgacccgtgggcgggccgcggccgcggcacgcgcagccccgtgggctggctccgcgacgccatctccgcctcggagccggacgtcgtcgccgccggcggggtcgacgccgccgtctacctcgtcttcctctcctccgtgctgtccatcttggtgtactctgggatcgtgctgcttccggtcctcctcccagttgctgccacgggtggtgccctaagtaccatccctatccctaccaacaaatcagcccaatcggctcagaacttctcgtcaatagaaaggctcggaatgggcaatgttgctgagaaaagtatgaggctgtgggcatttctgttgtcagtctattgggtttccttcgtcacctatttcgtcctatggaaatcctacaagcacgtgtcgaatttgagagctactgcaagatcagcaccagatgttaaaccagaggagtttgcggtgttggtgagagatatccctagaccgtctccagatgaaactataaaggactctgtagactcatattttcgagcccttcacccaaatactttctacagatcaatggttgtgacagatcacacaaaggctgataagatataccaagagatcgaaggtcacaagcagaaaattgctcgcgccgaagtcgtatatgcaaactcgaaaactgaaagtaatactgagggcacaaggcctactcataggactggattccttggtcttattggtacaaaggttgacaccattgaatactgtagtgagcagattaaggaattactgcccaaactggaggctgaacagaagactacccttcatgagaaacagcagcgggctgccattgtcgtcttcaatagtaggtctgccgcagctttcgcatctcagactctccatgctcaagtgtatgataaatggacagttatggaagctcctgaaccacgccagataatatggtccaaccttccaaggaaactatatgataggcaaatcagacaatgtgtggtttatggcattgtctttctcatagttgtgttctatatagttcctctcactgctatcgctgctgttacaaccctggaaaacctggaggcgaagctgcccttcctgaagccagtggtggagcaaccagcaatcaagacggtcttggaggcctaccttccccagattgcactcattgtgttcctcgcgttgctacctactcttcttatgtttctctcgaaacaagaggggatcccttcgcagggccatgcagtcagggcggcatcgggaaaatatttctatttcatcgttttcaacgtcttcctttgctatacgcttggaagcacattgttcaaatctttgacgaccattatcaatcaccctgctgagattgtgaatatgcttgccaagagcctgcctggaagcgcaacgttcttcctcacgtttgttgcgctgaagttcttggttggctatggccttgagctctctcgcctggttcctctcatcattttccacctgaaaaggaagtacctatgcaagacggaggaagaagtgagagcggcatgggctccagtggatctgggatataacaccagggtaccaaatgacatgctcatcgcaacagttgttctgtgctactcagtcattgcgcctttgattattccgttcggtgttgcatactttgccctcggttggcttatagcaagaaatcagatcctgagagtttacgttcctagctacgagagctacggacgaatgtggccacacatgcacacgaggatcatcgcggctctgatggtttaccagaccaccatgatcggcttcatctccctgaagaagttcgcctacgcgtccgttctcgtgcccctgcttccagccagcataatcttcgcctacgtctgccacatgcgcttctacccggcgttcgccaagactcccctggaggtggtggtgcggcacgacctgaaggagactccgaacatggaggccatctacaccgcgtacataccgccgtgcttgaagcctgataagctcgaagatctggacgcgttcgaggacgcccagtcgcgcgccacctccagagtcccgtctatttagctgtgcacatcgtcgacttccgcggaagacttgaagaaattctgttcacttgtcattacattcgtgtgggatttctgatggatttcaatgcttccacgttgaaccctctggacttgtttcaggataggaatctgatgtgaagaatgtacatatgctcgatctgtgtgtctgctgagcgtgtgtggatgtggactgctgtaggtaggtagatgctgtggatattggagggttctaagttgtcttcatttccatccatccatgcgcgtgtgtttactgcagaacaaaaaaaaaaaaaaaaaaaaaaaaagcggacgcgtgg

SEQ ID NO: 86301 - DNA, 1241 bp, Zea mays
  Clone ID: MRT4577_178716C.1
gccggccgggccgggaccttaaccgctcccgccaccactaattcggcaccccgccggtaaccaccagcctccggtcttgtcaagagcccagagtgcctgcccggccgcccgcctgcccgcctgaaaacgaacagcaccagaaccgcgcgcgcgcgcgggcgggcgccgggatggacctcgcgtcgttcatcacgtccgtgctcacgtcgttcctcatcttcgtggcgctggtgctgctgttcacgtggctgtcgcgccgcccggggaacgcgccggtctactaccccaacctcctcctgcgcgggctcgacccgtgggcgggccgcggccgcggcacgcgcagccccgtgggctggctccgcgacgccatctccgcctcggagccggacgtcgtcgccgccggcggggtcgacgccgccgtctacctcgtcttcctctcctctgtgctgtccatcttggtgtactctgggatcgtgctgcttccggtcctcctcccagttgctgcaacgggtggtgccctaagtaccatccctatccctaccaacaaatcagcccaatcggctcagaacttctcgtcaatagaaaggctcggaatgggcaatgttgctgagaaaagtatgaggctgtgggcatttctgttgtcagtctattgggtttccttcgtcacctatttcgtcctatggaaatcctacaagcacgtgtcgaatttgagagctactgcaagatcagcaccagatgttaaaccagaaggagtttgcggtgttggtgagagatatccctagaccgtctccagatgaaactataaaggactctgtagactcatattttcgagcccttcacccaaatactttctacagatcaatggttgtgacagatcacacaaaggtacttctactcttgatttatagagagagggatcgcttctcccttgtccttttgttatgtttttcctgtctgcttgtaagatatgtctaaaaatagccccaaaagaaacagaaacagaaacagaaactttattctattctgatcacattgcattgcaggctgataagatataccgagagatcgaaggtcacaagcggaaaattgctcgcgcggaagtcatatatgcaaactcgaaaacagaaagtaatactgagggcacaaggcctactcataggaccggattccttggtcttattggtacaaaggttgacaccattgaatactgtagtgagcagattaaggaattactgcccaaa

SEQ ID NO: 86302 - DNA, 917 bp, Zea mays
  Clone ID: MRT4577_178717C.1
cattacggtgttgcacactttggtacccagtttgctaatagtatacgtttttatgctattttaggggaattgtttcttctgtagagggtcttgttctgttaattggttgtttggtgaagttggtgaccgatttctccacctttttctcgatgcatatcctgagagtttacgttcctagctacgagagctacggacgaatgtggccacacatgcacacgaggatcatcgcggctctgatggtttaccagaccaccatgattggcttcatctccctgaagaagttcgcctacgcgtccgttctcgtgcccctgcttccagccagcataatcttcgcctacgtctgccacatgcgcttctacccggcgttcgccaagactcctctggaggtggtggtgcggcacgacctgaaggagactccgaacatggaggccatctacaccgcgtacataccgccgtgcttgaagcctgataagctcgaagatctggacgcgttcgaggacgcccagtcgcgcgccacctccagagtcccgtctatttagctgtgcacatcgtcgacttccgcggaagacttgaagaaattctgttcacttgtcattacattcgtgtgggatttctgatggatttcaatgcttccacgttgaaccctctggacttgtttcaggataggaatctgatgtgaagaatgtacatatgctcgatctgtgtgtctgctgagcgtgtgtggatgtggactgctgtaggtaggtagatgctgtggatattggagggttctaagttgtcttcatttccatccatccatgcgcgtgtgtttactgcagactgtcagccgtgttgctgtgttgtcggacggtcgttccagagccaaaccttaaagtcaatcgaaataaatatagtctgatttgaaaaattaatgaacc

SEQ ID NO: 86303 - DNA, 1175 bp, Zea mays
  Clone ID: MRT4577_178718C.1
cacgggaagtcaaacgatctgccaccatatggctgtctcaactcaatcctatcgtcagtcagttgttccatgcatgcagttgggtgcattatgaccttaatatactacacacaaaaaaaaaatgatccactgcgcgcatgtagatcaatctgcgtacctaccagtcacatgatctgttctacgtagtaaagttgtatggactactacgcgccctaagtccacatcctagtccattatgcgtattagctcaagcactgcccgctgcgctgccaacgttcgcggaggccccgctgcatgaggttgagagggcctctgtgctttgacccaccgacggatgggcgtcggcgctcttgttcttggaggcggctaacctgctgttcctgagcctgttgaagggccgccggtgccacctgttctgtgacgacttcatgtgacccatcatcagcttttgctgctctcttctgaaggcccttcgagcgtaccaagcaccgcctcgccagcctaacgcgtacccaacaaccattgtggtcatcgccgtggctacacagcctggagcgctaatattgctggaagtgacgatcttttttatctcttcatgttcaactttgtggttatccttcagagatgattcaattgactcaagcctcctttcaatctttaattgttgcacatggcgaagtgaataaccggcccaagccgtgaggacggaggcgattgaggtgccgacggtgaagacgatgcggtggctctcgaacacttgcttggtagagaagaaggtgtcgcagacggcggcccaggagttggacgcccgcctccggatgttggggagcgtgagcagcgcgcgccccgtgccgcccagccgccgcacaaccatcgctccccagacctcggcacctgtcgccttttctgggtgttgcttgggggtggggattcgggggtattttggtgggaggcgagcggccgagccggcttgaccgcttggctccctcttcctcctccgctttcccctcccaaggcggagggaggccggccaacttgcgggatacgcaacgaacgggcgccgcccggtcccggctcggtcgagcagttgcgggcgcgaagcgcgatggccgatggtgtcaggagcgccgagcggagcctcgtgaaatgggcaaaaaggtaggcggacgcgtggg

SEQ ID NO: 86304 - DNA, 235 bp, Zea mays
  unsure (1)..(235): unsure at all n locations
  Clone ID: MRT4577_178719C.1
cccacgcgtccgcccacgcgtgcgganactcatnnggggacggttggtttttagtggcggcctgaccacccacanaccaataanttcttancttgccaccaaattcttccgggagttcaaaataagcatatatcccgatattcccaaataggtcaacctttttaactgcctgctgaatccatgagcaggctagagacaacctggcgaacttaaacatcttattagccacaggaaa

SEQ ID NO: 86305 - DNA, 302 bp, Zea mays
  Clone ID: MRT4577_17871C.1
gcccgaaactgtcctgcgttgataatagatatccccaagaaatttgtggttaacccgggcaggaccaaaatggggttaaaccccaaacaaggggggggaaacgaacttaccggaccccgggttccaacaaccttttttaccgaaggccaatttctttaacctaaattctttcttaactggaccaaggcaccgggggggaggggaaatggtaaatccttgccggttgttttacatacacccacagcgttatcttcattgaggacccacaaatgaggcgcgtgctgcctcttctcttatcacag

SEQ ID NO: 86306 - DNA, 365 bp, Zea mays
  unsure (1)..(365): unsure at all n locations
  Clone ID: MRT4577_178720C.1
tttttcttctttttttttttttttttttttttttttngggttgggttttttttggaaccaaaaagggtcccatggacacgtacgcacgcacacacgttaaaaaggcaccacctggacctgccggccgggggggccaacgagggtggtgagtctgaacttaacaacggggacggagggaactaacccatgatctgggcgagggcgccggggtttttgagccccagcacaaagcccacccccgggatggggcccacggggcccaaagccaacgtgttggggagggtgaaccccgcggggtcacccggggggggggggggggtgcgccccttcagctttaaccccccccgtgcctttgggggttttgg

SEQ ID NO: 86307 - DNA, 737 bp, Zea mays
  unsure (1)..(737): unsure at all n locations
  Clone ID: MRT4577_178721C.1
ccgccgtgtgctgnactcgctcttagcagtggtacaacgcagagtacgcgggagaattggagaggattgagcggttaaaattcaaaaaaaaaaaataataaaaacacacaaaaaaaaaaactatccataaaattttttctccaacatttcaataccnttggcgtctctttcatttctcctaaaaccaaaaagtcctctgcgttgttcccccctgctttttttttttttctgcccatttccctccccctggcggcccctcggccctccttttttggccccccctccccccttttgtgtttccttttccctttctttgcccccccttttcccccccttttccctcgctacccctgccctttcccctcttnttcccctttctcctctcccccccttttcccttctttttttttttttttccgggccccctctcccccccccttccccctttttccccccttcctccctttttcctcgccccccccccctttttccctcttcctccccccccccctttccccttttttcccctcctctcgtcccctcccccccccccccccccccccgcccccccccccccttgctttcccttcccctctccttttcctccccgttcccccccttccccccccctctccccttcttccgccttccgcctcccctttttctccgccctgccccccccccccttttttttcccttttttcctttccccccccccctcctgtttcttcttcccc

SEQ ID NO: 86308 - DNA, 439 bp, Zea mays
  Clone ID: MRT4577_178722C.1
ctccgtcctcccctcccccgtgcgaatgcgtctcctccctcggccggccgctcgtccgctcgctctcccccgcacgaatctccaggtgatggcggcgcgccgctgccactgacgtcgccagcggtggcggcggcgagcgcgcgatcgcgggcgatggccgccgaggccagcatggagcgcgcgcgcgacggccggcgccacgagcaccagcagaagcagcagcggcgcagccaccggcggtcggcttcggcgtccgtgacctcgtccacgaggcagtgggcatcagggtcggcgtctgcgtcggcgtcagcgtctccgtcccaggcggcggcggcggcggcgcaggagtcggagcggcggctgcggcggtccccgcccgtggaggcgcggcgggagcgcgagcggcgtctggcgcgcgagcagccgcggtgcggggagg

SEQ ID NO: 86309 - DNA, 501 bp, Zea mays
  Clone ID: MRT4577_178723C.1
agtttgtttgctctatcacaatggatacatccttggaggggaattgcctgtttctaactcattgaccaagatctggtatctattgcagtgacacaatttggacagaaaagctatatttttcatcagatgctgcctttctggggtattccctcattttggcgatactgcggactttaaatttaagagacgaagcatctagagttatggttgccgctcctattctagcatttgtgacaacccacattctgtacctgaacttctacgaacttgacaaaggtaatcttgggcatgaccgctgatacttgcactcctgacactataaaaatagcggtattgtttctgcacaatttttttaccagcactaagtatgtaacccagcttatatgatatataaaattccattagtatgctagattggaatcttagtacctgactggttgattactgagttatgggtcataaaaaaccagcctctttgaaatgcgagattttacaaacaca

SEQ ID NO: 86310 - DNA, 568 bp, Zea mays
  unsure (1)..(568): unsure at all n locations
  Clone ID: MRT4577_178724C.1
gtaccctcgggttcggccgggacttacagccatcttagctcaagtccacaactttgacttcggtcgtccactcacttaaacaactaatactctcattaataacacccttccgactttcccaagttcaaataccctaatcagccaaaatgcgttacaccattgccgcctttgcgctcgccgctaccgccgctgccgtcccccagtacggttacggatcccccgcggagtctgtcccagcttaccctgagtacactcccgttcctaccaccacccccgctgccgagtacccgtcctaccccgtcgagaccccctccgcgaaggttcccgtctactctgcttcggtccccgtcgccgtctcctccaagacccccgagtaccccgttgagtcggtcacctccaaggcccctgagtacccggcctaccccgttgagaccccctccgcgaaggttcccgtctactctgcttcggtccccgtcgccggctnctccaagacccctgagtaccccgtcggatcggtctcctccaaggtccccgaggcttccttcaaggttcctgaggtccccgtgtc

SEQ ID NO: 86311 - DNA, 283 bp, Zea mays
  Clone ID: MRT4577_178725C.1
aacctagggtgtagaaacacaccattttaaatctcaacttgctaacctgacttcgaagcattaacgatctattattagcaatgtaaacaggtttaagaatgaaatattgatttttctgaccctgaaaaaaaaaaaaaaaccctagagtgcctgacccaggggattggaaaaaacattttctagggtgcattttccaaatggtaatcacggttttgtttaatttgggtgttccccaatctttgaggcctgttttgcctgaacccttcaacagctgggagattaa

SEQ ID NO: 86312 - DNA, 487 bp, Zea mays
  Clone ID: MRT4577_178726C.1
ggacccgatcattctttttatttctttctttccccataatggccatgtcgctgagccgcttctcccagtggatatggccggggagcagaactagaaatcctagaggccgcgagccaccggcggggagcacggccttgacggaaggcctcttcccggactccccgtcggggttccgggatccagaccctggttctggcgcggcacagcggcgtaagggcaagagccgccgtcgcggtggccgcgtggaggcgaaggtcgatggcgagcacggcatggttatcgtgcagtccgacggtgacggctgcctgtctgactcggactccgacggctccgactggtccatcggctggctcgagccgctcgcgccggacctccagagtgacgttgactccgagggaagcttcgccgtcctcgtgcggtgctatcgccgtggccacgctgaccggcctgaccgttctgatggcaagttccctgctcctggtggtgt

SEQ ID NO: 86313 - DNA, 1092 bp, Zea mays
  Clone ID: MRT4577_178727C.1
agagcgaaatgagctttgtatattccatggggcaagaagccaaacatgtacatgggcagggcatagaagcccttacacacagcgagaaaaataagctaagcaacatatacatctaacaaaaacgtccttgtgatgatgatcttcctcccatcctcgagttttttgtggtccgttttctgttcgtactacaacaaatcaacgagtgatttacagcagatgcccgaagatctagcgacctcctcccttaagaggactgacgtattcgtgtggcaaatatcaatgtatcacccgatagtatcaacatgtttatctgtccctaaccaaggtgaagttggtcacagcaaaaccaagtttcatctggattgcttacttcttggttcctgttttaccatttggagtcttccttccttcacctccgcccttcttgattagcgtcggtgagggtccactcggcttcttctgtaatggcgatgacctgcgtccaggattcactcccctaacgtctgaaccttttgaacccttgacttggatcttttttacagctgtgccccctccatttgataaacctgaagcttttggggcactagatggcctcacgcagtccagctctaacgagcaattagttgcaacctcgaaatcatcggaatcctccgttgcaacagacccagaccagctccattgctgttcggagttgcttctttggtagaaggctagatcttgtgtggcctcaggtcccaactctggtagggaattgctgctcccgaactgtgagtgttcagccaaatctcccaatgctgagtcgttctctatgatcccatcttctattgggtgcctggacgcaggtgatgcattacccgttcccattctatatatgtctgggctcgattgagtgcttcgtatgctctcatgatctccatctttcctagctaatgctgccctgaggcaagcaatctgttctttgagctcgttggcttctcctcctcctcctcctcctccttccttgcttgacttggctgctccaagctcaatagtggaaacacgctaggcgaacttccccggccggcctcgaggaacccaatcgcccataggagt

SEQ ID NO: 86314 - DNA, 473 bp, Zea mays
  Clone ID: MRT4577_178728C.1
attgggtacctcgaggccggccgggaggatattaccgccgcgcaggggacagcctcccccctgatactgtgagtgaccagacgcgaggggttctccctcctctccagccccttctctctcgcaggcccgaacatgactggctagcaaacgacaggagatacctaccacgggaagaacctgatgaaatacgatgatgtactacaagaatggccccaggcggacacacaccatgaatcgtgacggagcccatgaacatcccatcaccacgtgactcgcgccatagaacagcagaacgaggactaccggtcgccgtgggtgacttatctcagcaatgttcaggtgaatggcataacgaagaacaacaagaccgcaaccgtgacagccatcatgatgccgacaacaagaaggggaaccagatgcacggacttttccgaacattgagagaccacatcatcggcggtgtggcaaaagga

SEQ ID NO: 86315 - DNA, 172 bp, Zea mays
  Clone ID: MRT4577_178729C.1
cacgagtgaccccttttgctcggatcgtacggctctccaccgcgaaatccagtatttaagcggtgcggaacagtcgaggagaggagaggacatagcagaggaccaccaccggaccgccctggagcgggaggggtggggacggctgcgcgaccttcatcaagaggaagggcag

SEQ ID NO: 86316 - DNA, 488 bp, Zea mays
  unsure (1)..(488): unsure at all n locations
  Clone ID: MRT4577_17872C.1
gggnggacccactcatacatccactcattcatattttctcaactatacttttctttattcactaactctattattctagggactttctaaaatctgggcgggcacaaaaatttatattatcctatattatcaatctttatcttccaaattctaatattactaacatatagttccatatactatacctttctttatatcttcatctatcattttaactactttctttcctttttctatacaatctataaaaataaaatatattaatttaatttatatttatattaaattaatatcttataatatttcttaacaaataactatttttattttctaataattaataataataactttctcttaaattaattttatttattttttaatttttttatttttattattctttattcaaattattattatattttatttttcattatatatttcctaattatctttcttttataataatatctataataattttt

SEQ ID NO: 86317 - DNA, 278 bp, Zea mays
  Clone ID: MRT4577_178730C.1
ggccgcttttttttttttttttttgtggggggtctctttctttattcaaaaaactttttttttgaattacatctttttttgcaacgaaaaaaagggcaccaacaataatgattatttttaagaaacacattccgttttgagggccccattgtccaaaccctatcatttgtaatctaaaaaatagggcgggggggggtggcttaatctcccgacaaagagggattaactaaagataactggttaagtaggcacaatttgttgtgctagatgaagtaaat

SEQ ID NO: 86318 - DNA, 576 bp, Zea mays
  Clone ID: MRT4577_178731C.1
tttttttttttttttttttttttttttttttttttttttttttttttttttttttttttttttttttttttttttttttttttttttttttttttttttttttttttttttttttttttttttttttttttcgggattcttgccgggggggggggggaaggggcctttggccccccaggggttaaacccgggggaaaacgaaaggtttttcccgaaacattgaaaagggaaccttttttgggcctagggttttcccaaagggaacccaaaaaaaaaaaacccggcccctttggggggggcaacccacttaaagggccaaaaaaaaagcccataatttgggaaaggaaaatttttggggggaaacaaagggcccaaaacccccaaaggttgtttttttctttgaacctccctttccaaaaagggtttttgggaaagggggctaggccattccggggggaaaaaccactgggccctacaggggggaaaggaaacggggcccaacccccccccggggagttttggggggggttttttttaagggcctggagttgccacggttcaccgggtttaaccccg

SEQ ID NO: 86319 - DNA, 123 bp, Zea mays
  Clone ID: MRT4577_178732C.1
attgttcacaagttcagatcttcgccgacgacggccgatgatgctaatcgctagggcactgctcctcctgctattatacgtcaccatcctgctgctacagctccaacgacggtacagccacct

SEQ ID NO: 86320 - DNA, 463 bp, Zea mays
  unsure (1)..(463): unsure at all n locations
  Clone ID: MRT4577_178733C.1
cgggctagcgtggncnnncncncnnnnacntnangntnnnntctaccanctnaannccncnnnncacccggactatccnnanaanccaccatctgtcacattccactcaataatttttttttatgccttaatcacnanacatgggtgggggagggaaggaagtttggtttgctagcgaactggcagcgggactgtacgagggagaacatcctcacccagctcaagaaagagatggctgcctcgccgaatcgaaagttagtgcagcctcccgaaggggcactcttctaacgaaggggtcacttggcccgccctgggatccaacagctgttgaaagtggtatgggctncaaaacagcgtctacatctggtgcccccgcccgtctttggggttttttatgacctttatgttcttggtcgtgcaccgccggaacaacggctggtgcggctccagggtatctttggaa

SEQ ID NO: 86321 - DNA, 116 bp, Zea mays
  Clone ID: MRT4577_178734C.1
ggccggggaagactctcccaaaagagagttggtccgactcttctaccgggtgaccgtttccccgagatcatctcgccatgcgatttctcacagctctcgcgcagagagaggacgca

SEQ ID NO: 86322 - DNA, 774 bp, Zea mays
  Clone ID: MRT4577_178735C.1
cctcgaggccggccgggtcgtctggacgccgacaggtcggcaaatccttcgctcaccatggacggcccaccccttgcctcgctctccctcacccacgtccactacgacccgacatccaaggtttcgcatgcgtgcgcctacctcgctctcgtccctcaggccctatgcatcacctatgccaccctgatctggtcctctcgcgagatggagatcctgctcatgttcgcgggacaaatgggctgtgaagcgctgaactgggtgctcaagcggtatattcgggaggacaggccgacgcaaatgatggggaaaggttatggaatgccgagcagccacgcgcagttcgtggcttacttcgccgtgtaccttgggctatgggtggttgttcgtcacgacccctggaagacaaacgagagcaagacacatgttcccacgccgatgtggcagcgagttgggttggcattggcagcacttggaggtgcggtggccgttgcgcagagtaggatatatctcaactaccatactccgcgtcaagtttatgctggatttgcagttggtacgctttgcggtgttgcgtggttcgtggccacttcgattggcagacattacggtctgctcgatcatctgctcgactttggccccgtcaggtggctcaggatgcgcgatcttcttgtgaacgaaaatttggtcgatgcaggatgggaacgctgggagaacgggaggctacgagtgcgtggactctcagccagaacaataaatacatgtatcaattgctcg

SEQ ID NO: 86323 - DNA, 478 bp, Zea mays
  Clone ID: MRT4577_178736C.1
cgattatgcgcccgccccccagaccttccgcaccaggggctgccgggcggctgcttatttcgggcacccgatctcgtctgatgccacccaacgagacgtataactggctcgtacggaaaaaactgtgggtaccaaagctggtgctatcgtgagtgcaacgcggtgcgttttggaggaggcgaggtctcattaccattgtgcgcacgtctgggttttcgttgatatctatttaatgaacaatccagaaatgtgtgtctaatgcttccatacccatccatgttctacatctatagaaatctctacgatcactgaaatcaaagagcggatcaataaagtgctcttattctttcaggccttcacgctgaggcttcacagagaggactgaattaactctgcaccattgtagtacgtgcttccctgacaagcgttattgttcttggaagtttttaacgccttggttggtggcctttaagttcct

SEQ ID NO: 86324 - DNA, 336 bp, Zea mays
  Clone ID: MRT4577_178737C.1
gccggccgtgcagagacggaacaaactcgataagtatttattgccattttagcctgctatcggcttcctagacgctgacatgcccggtgagttggtaccatgacgcttgacaccttagagcggcagtgtcttcgctccttctgtcagaacatgatacgcgcgctgtgccacactcccacgcctacatctccctgttgcttgctcctctcaccggtagaccatggtatttccgctcatcaccgcatccgtgttgtctctgacccctgctggtaggcaccccgcctctggtgatgattaaatctacctatgaatgctctcgagttgcttgtccacctg

SEQ ID NO: 86325 - DNA, 120 bp, Zea mays
  Clone ID: MRT4577_178738C.1
gcacaggaaagggttcaacacattggttattctctgtgcttccagatccaccaagccacgagaataaccaatgtgttgaaccctttcctgtgcttcgatggcacatgaaagggttcaaca

SEQ ID NO: 86326 - DNA, 225 bp, Zea mays
  unsure (1)..(225): unsure at all n locations
  Clone ID: MRT4577_178739C.1
gccgacccacacgtccgatccactctttccccttctccttccttttcttcccccgagactattcatatanacgcggaggctttctatacctcgtttgctctcnccttcttgtatccaaggttcctactccatccgcccttagtctactctcaaccttccacataaagatccccctcccttcaccttaaataaaccgcatcattctcacctacagcatcttttact

SEQ ID NO: 86327 - DNA, 829 bp, Zea mays
  Clone ID: MRT4577_17873C.1
gagttgccctctactattctaatccatttcctactctctctagaagcgtcctagagctatgctcatcgtcgcctcgcatcgcactcctcttctcgccgtaaaaatgaagatagcaaagcaatagagcatgggatctacctcgaggtgcaagttcgtgatcttggtccacggtgtgactgtcatgaccacatttgtgaaaaggcatcttactggtgtactagaaaacaaatatgaacccaccattgcggttgaactacaacctctggattttaacactaactgcgctgaaactgacttatattgctgggacactgttgggtacagaaaagaacgacgtgcttagggatggctactacattaatgaggctgagcgccatcattatggttgatgtcacttctatcgttgcatcatcatcgagaatgttccaacatgccacagacatctgtatcagacatgtgagataagatcccacattggtctttgaggcaacgaggctgatgaccagaacagggaagacaagggcaagcaagatacattccaccgtaaaaataagttgcaacactatgagatttctgccaagagaaattacaattttgagaaacccttactttacctcgctaggaaactgccatcttcatgagaagcttcactttggttgaagctgctgctctgaagccaccagaagtgcaaattgatatggccctgcagtgagagaatgaagctgatgttgcagctgccgctgcacagcccactcccgatgacgatgatgacctgatcgaatagacatgctatacatggccccttgatgatgactcttgctaaaaatct

SEQ ID NO: 86328 - DNA, 221 bp, Zea mays
  Clone ID: MRT4577_178740C.1
ccccccctcttccaactccacgtagcaacacacgagcccatccctaaccaccataacctgatcatggcccgcctgccaatcatcattaacatgccaccactgctcctcctcctcgcatcacgtcgccctcacctccgcctacctgtcttcctcttcctcgcttctgcactcacctcctgacaaagataatacaatttttttcattgaacaccaatcccctt

SEQ ID NO: 86329 - DNA, 342 bp, Zea mays
  Clone ID: MRT4577_178741C.1
gctccgcccctctccgtccaccacattttctgtgaccataccacaccgtgggggtatactcccctcacacccagcgtatgaatgaccggcgtcctgaaacgcggggcgccgatcacggtcaccggggcctccatccccagcgcactaacgcggcagcgggcccgttcaccattgctgtctgcgcacccaagccgaacctactccagacccccgtgactggcaagactctggaaggcatagactgtctacgggccgtccatcgcctatggctgtctccatgcgttcatacgaggcccatgtgatgggtcatcccaatccttatcccaagagcactggtgacct

SEQ ID NO: 86330 - DNA, 240 bp, Zea mays
  Clone ID: MRT4577_178742C.1
ttctcttcgtacggctccaggtcccagccggtggggactcgggcaaaagccggccatgtccaaatccaagagggtcaactcgcttgtcaaatagactgactccagctcccaccccctagctatccacaccgacatgatgaggggagcgcggatacaggagcactcgtgggtgatcgacacggactgaactgaggataggacgatggcacagaagcgcggcctcttgctagtccggcagac

SEQ ID NO: 86331 - DNA, 505 bp, Zea mays
  Clone ID: MRT4577_178743C.1
ccctagaaaaaaccccagggggggggaaaaaaccaggcccaatttaattagaacccctgcccgggaaaagggcctttggccagaaacccctttccccccaaggaacggaaattaccccttttaaaacatggtaaaacccggccccagttttggttcccctttggccaggcgggaattcccaggtttcccccccctcctggggggtaaaaaacggcagggggggacccaaacacggcccggaaccctaaataactatgggggcctggcaggtccggatctttaaaatttatgaggagggcccaaaaacccccttccttgaggagggaatggccatttggttttggactaatttccccaagaccaaggccctctcccatttgggcccaggatccttccccgtggcccaaaattgttatgttaaactgggggtatcccatcaggctaaaacattgggaaaaacaaagggggggggcaaggatcccctcccggttagggaggcaagggg

SEQ ID NO: 86332 - DNA, 299 bp, Zea mays
  Clone ID: MRT4577_178744C.1
cctttccgtgccactggttaatagggattaatgaatgggaagagttcagtcagaccagtaagcccttctgggtttgagtgtgttcccatgtaggaggtaaaaccaattctggatgcatctaagcttccatgaataactttaattcttagcataatgatggccttggattgtctgacctcagtagctattaaataacatcgagtaacatctgcatcaggccctcatagaacattcagttgagttgggagtaaactgaaaagacaaatgtgttgaaggatatgccagggaatctggctaaa

SEQ ID NO: 86333 - DNA, 330 bp, Zea mays
  Clone ID: MRT4577_178745C.1
acctgtgatttcggggggtacaaaaaaaaatatattacattgtatccaatctattgcgcttttttcctaacgcccaacgcctcatctagcgctctcgctatgggccgtggtgcacacgtgatggattggaacttaacatgaatggaaaatgatcaaatggatttgtctcaaaaggctggacttgatcgaagagatcccattcttcacgcttggactttcttatcgtattcttggtgcctcgtaaggatatgcttataatttgatgaactgcgcatagttttgtcatttttttggcactaattattcttccagtatgtgcacaattaattc

SEQ ID NO: 86334 - DNA, 497 bp, Zea mays
  Clone ID: MRT4577_178746C.1
cggacgcgtgggctcagtaacaacaatggttctgagcttgataatacctgttttaacaatgggcatggtatggccctggactggaccagcagcatcagcgactcttgccccttatttggttggactggttgtacagtttgcatttgaacagtatgcacggcatcggaaatcaccttcttggccagtgattcctattatcttcaagtttgtgatctgatcaatcgtacctgatatttgggagctgggacttgggattggctatcagtgtatcaagtaattctggactctattggaagcattttgaagaatctatgggcgacaactaagactgggaaatgtggaagaaaataatccagtatactgtttctagtaactgaacaggatggtatttttatttctatgaagtagagccaaatggtgttctcttgtttgtcctttggatatgctggggccacaaagattaaaaaaggatgatgcttattgggaagcaatttgat

SEQ ID NO: 86335 - DNA, 955 bp, Zea mays
  Clone ID: MRT4577_178747C.1
gtgtccacacgtctccggcgtcatcgctctcctcaaggcggcgcgccccgagtggagccccgccgcgatgcgctccgcgatcatgaccacggcgcgcacccaggacaacacgggagcgcccatgcgcgaccacgatggcaaggaggccaacgccttcgcctacggcgccggcaacgtgcaccccaaccgcgccgtcgacccgggcctcgtgtacgacgccggccccgacgactacttcacattcctctgcgccatgggcatctccgcggcagacatgaagcggctcagcgccggcaagttcgcgtgcccagctaatagcgctaaggaggcgcccgccatggaggacctcaactacccgtccatcgtggtgccgtcgctgcgcggcacgcagacggtgacgcgacggctgaagaacgtcggccgtccggccaagtacctcgcgtcctggcgcgcgccggttgggatcaccatggaggtgaagccgagggtgcttgagttcagcaaggtcggtgaggaaaaggagttcaaggtgacggtgacgtcgcagcaggacaagctcgggatgggctacgtctttgggaggctcgtctggacagacgggacccactatgtcagaagccccgtcgtcgtcaacgccctcgcatgatctatccagttcgtgctaactagagtacactacctactactactacttgagggccttgtggatttttgtgacatcttagataagtagtaaggctctaaaatatatttttatttcttcttgttattattagtaaagaaatgagataggtttttttttgcttagctaaaagacatatcatctataataaattttggctctttgcatgggaacttgaattaatggtaaaaaactgcatataatataatgaagggaaaagggcacttttagtttcaaaggcatagaggattaagttttttttatgtcaatgta

SEQ ID NO: 86336 - DNA, 129 bp, Zea mays
  Clone ID: MRT4577_178748C.1
tttttttgctcacgcctcaacaagactgacgccttatcattggggctaactaccgatatatggcggcccaacatgcgtgtccacatctcctcattaaaataaataagacaccaatatcagaagcaagct

SEQ ID NO: 86337 - DNA, 326 bp, Zea mays
  Clone ID: MRT4577_178749C.1
gaggcagacctgcatgtgcctattattattggggctgttatataactaggaatacagtaccatgcgaggggtctttgtgaacatgctttctgacattacgttgtgtgagcagcgatctctaggtttaaggctgataaaaatagaaacggctgaaagagctagctagcatatctgagacaagctccatctcaattagtattatccagtttaataataggggcaaaaaaagaagaaaaaaaataagggatgcatgtgctactacactatagcgggtagctaactggcatcaatcgactatactactaaacatgcgggtattggacatg

SEQ ID NO: 86338 - DNA, 300 bp, Zea mays
  unsure (1)..(300): unsure at all n locations
  Clone ID: MRT4577_17874C.1
gcgggtaccctcttgagggggcgccctccttttnctttttattgagaaaaacagtaaagctctggggagtttttaatataattgacgccaagaccgctaaaacagagaggcccccttggaccgtgtccagattacacgagtttgtctttatgatacaaggtccaaacgacacactaaagtggttggggtttggttctggccaccaaagaccctttacaccttgcggcgccagtaataaaggacttacacctggccctgaccaggctggtccgaataagactaattggccacgtgttgcac

SEQ ID NO: 86339 - DNA, 995 bp, Zea mays
  unsure (1)..(995): unsure at all n locations
  Clone ID: MRT4577_178750C.1
aattcggcacgagggtttagagtacggagtgtgtgttgaagctgagttgccagtttgagttctctcctaaccacctagcgtgatctgcttcagaagtgtgtgcatccattcctctgtctggtgaccatgccaccgaatccctaacctcgtcgtgggctcgtggccaaggtccctcggagaaagtctcaactatgttgtgctcgttccataatcccttgagaacacctagaagaagtggtgtctgaagaaggatttcacttcagtgcctgctgatctagtggtggagtttcatctaactgcttaccagagtagaagggttttagatcttctcctccaataagttgtggagtccaaggacagaaggatctcagttgccttagcatttgctggtcatcaagaaggtgaatagagatagatataatgatggtagcattaaacattcactcttgaagcagtcatcattggatctattgacgattgagactcctggtttgaagaaaaatgacaacttttcaagatggatgagtaaataacttngaagaggttgttgatttgggtattaaatccacttttgatgctttctggagtagcattgagacagtgaaggtgcctgatggttctaatgttctgactaatgaacaactggatgcttatgtagtgaacccttcactttctcaagaccaactattcagcattctcgatgtttcaccaagttgtgcatatattggtacaaatacaaaggtgcaggaatagctgaagcagactcttttgcgcctcagtgcagaatatccttagagcctagatcttcctagaattgatcggactgtccgatgctcgcttagattacaaggtgctcatataccaacctttgagcctgttcttgagtcaagtgtctcgataacggcgtatccgtgggcatctggtccaccatatcttttttcatggcttaatcctcaaatatcagctcaggacatgatgcatccggagttgctggc

SEQ ID NO: 86340 - DNA, 354 bp, Zea mays
  Clone ID: MRT4577_178751C.1
ctgcggccacgcatcctctggtgactccaccaccagcaacccgggcggctagcgcactacgaccatggccatgtcgaggcgcggcgactgggtctacgagaacaacggcgggacctgcgtggccaattggcgggccctgatttctttgggcgttgctgaggacacccgcctttctgtaggatacagtatcctcacgcgtgatcactccaagacctgcgaactgtgtgacaaatgtgtactgggatcttttggatcgggggagatattaaggctttgcagaagaacgtactacgcgacagaatcgctgcgccaacaccggcatacctgatggtggagaagacccgccatggcaca

SEQ ID NO: 86341 - DNA, 277 bp, Zea mays
  Clone ID: MRT4577_178752C.1
gagtttatcagtcgggggccgccctttcctatgtgtgggaacctgtgaacaggaacgctcatcacagagaccacaggacatgcggaaaaccatatcttcaggacaacaaggaggcaccttcttaccgctgagatgtacaaagcgcctgcacaccatgacattaaacatgaaagcccacatttcctgagaccatccaagattgacattcacattcctgaggagttgtgaaacagatttacggctgaatgccaccctgagacctggaggccacaacaac

SEQ ID NO: 86342 - DNA, 183 bp, Zea mays
  Clone ID: MRT4577_178753C.1
ccgcccttttttttttttttttttagcagggaaggcacggattcatttatattccaaaacaagggccccagagctaagattcccattacaatcgggcggcgtttatgaatcaagcatgctatctactggcctttgatcaccctacgagaacattaacgatttcacaagacatacatatgcttt

SEQ ID NO: 86343 - DNA, 255 bp, Zea mays
  Clone ID: MRT4577_178754C.1
caacaagcaacataaaacgtccaatttattttcaacaatagaacaacaacggcggccaggatatattaccgcctgagcctccttcctctttccccatgcaacactaacgcgacaattctcactcaatgctaacaatctcctatagctcccattcttcccccataccttccatcaattattgcttcactatatgaaaacccagctctttaaccctatagccttcaacacgcaatttcaccaagcaacataccttta

SEQ ID NO: 86344 - DNA, 281 bp, Zea mays
  unsure (1)..(281): unsure at all n locations
  Clone ID: MRT4577_178755C.1
atttcattccagcatgagaggttaaaagcacatcaaagcgaaccttnaaaagtcacaactcacaatttgatcatcccagtctcctacactgcttgccaagtaactctatcatagttcatcagatctgatcaacttgttgcagtcgcaaaacatgtaacacgtgaatgaactatatcttttgcccatataccctctcaagaacctaagaacaagaggatgagcatagaggaaaactgtgagtacctttgctcgttttaggttcctcatttcttctagcatga

SEQ ID NO: 86345 - DNA, 366 bp, Zea mays
  Clone ID: MRT4577_178756C.1
aaaaggttcaaacctgttttgaaatttttttgtttgcaagggttgttttccgaaccgttttttgtttgaaaaaaatttttgggtacaaaaaacgggttttacacattacgggtggggttaattttgtattaaaccaattagccgggaacaataagtttcggtgtttttaaggacttgtaaaacaattaccacctgggtccgataaattttaattaaaagtggggggtaaaaaatgggggtgtttgttaaaatggaaacaatagccccattggggacgtgtgttccatggcacgttaaaggtttttttgtttgcacctttttaaaggttttttggggaagtttaaatgctccaacgcaggttttttt

SEQ ID NO: 86346 - DNA, 582 bp, Zea mays
  unsure (1)..(582): unsure at all n locations
  Clone ID: MRT4577_178757C.1
nacccaatcttcccccccaagctcgagccgccgccgccgccgatcagtcgaaccagccccctcactaaccaatctcccgagcgcccgctgccccccgacctcaagcccccgttcgtgaatggaccacggcttcgacggcgcgctccagctgcccccggggttcaggttccaccccacggacgaggagctggtgatgtactacctgtgccgcaagtgcggcggcctgcccatcgccgcgccggtgatcgccgaggtcgacctgtacaagttcgagccgtggcggttgccggagaaggcggcgggaggagggccggacgccaaggagtggtacttcttctcgccgcgcgaccgcaagtaccccaacgggtcgcggccgaaccgcgccgccgggactgggtactggaaggccacgggtgccgacaagcccgtggggtcgccccgccccgtggccatcaagaaggccctcgtcttctacgccggcaagccccccaagggcgtcaagaccaactggatcatgcacgagtaccgcctcgccgacgtcgaccgctccgccgccgcccgcaagaagtccaacaacgcgct

SEQ ID NO: 86347 - DNA, 384 bp, Zea mays
  Clone ID: MRT4577_178758C.1
cttcctactccgtgtcattttcttgcccttcaatccttctaaacatcaatttctctggtcagaaatggtttacattcgctcccgtactttctgctgctgcattcccgttcgctttggtgtcttcattttatctttggcgggcgtcattctcagtacgcttatcgctgctgcaggatgggtgcaggtcgctcagataaaaacccacaagccgtcgacctccgacgcgatcgccctttggttacattccggtgtcttcacactgctggccatcctgtcattatttggcttcatcggatcgttagccaggagtcgtaactccgttgcggcttacagctggggtttgatcgtatttctgctgttgagcatctgttccggcgcgtatac

SEQ ID NO: 86348 - DNA, 272 bp, Zea mays
  Clone ID: MRT4577_178759C.1
ctccggcttgcctggttgtttaatatcctacagtaaggaatagcgcggttattggggggaggcacaactagggtgggggggataaataaatcttttatcctagctagcacacaatatattgaaataccatagagctccttcactgtgcataactgcctttatacttactttgacattgaaacttttctaatacggaaccatctgagtttaaccagatcaaaatattctattaagtattattaataactattgttaaatactaattattttaa

SEQ ID NO: 86349 - DNA, 339 bp, Zea mays
  Clone ID: MRT4577_17875C.1
ctatgacaagctgtgccccctgccggaaccgggccagaaggaacgagcgggtcgtccagaacactagtcggcgagcaccctttgtcctggcttctcataactggacgagcatcctgtgcctgctagtgcccaacctgtgcttcctatctaccaacattaggaaggttggcttaatgagctagaccgtcgagagtaaatggtgccgtgcgcgcgcgttactaaaccgacaagggtgattacctcaacatggagctagctctgactgtgccatatccacacatggtacgctcgatctgaacaatcataatgaaaatgctctgcgcacgaaatgggactagc

SEQ ID NO: 86350 - DNA, 227 bp, Zea mays
  Clone ID: MRT4577_178760C.1
cggctcgggcgaaaatgttcgtcgagtccacgaccttgtggggaccattgattcgcggtagacacgctaagcgatccttgccagcgctcatatacaacgctgttacagctacaactcacggagcgactttagataacggtatgagcagctgaagcgctcccgagcgacacgttccttcagagcaagataacactgactggaacagttcgactaggctcagctgaagc

SEQ ID NO: 86351 - DNA, 2107 bp, Zea mays
  unsure (1)..(2107): unsure at all n locations
  Clone ID: MRT4577_178761C.1
cattggcttcctcgaggctggccgggctgctccagcctccagcattcggttccggctcctgcttccctctcccttctccggttctccccctccgccgcggagatggaggccaccgcgctcgcgtcccactcgtccccgttcgccgtccaccgctcgacagggaagccagccttcgcctacccccaccgtggagggccctcgatggtctcctctgtccacctccgcacgtcccggacccccgcccgctctgcggcatggagaaggcggaggagggggaccgggctggttgtgcgcgcggagatgttcggccagctcaccaccggcctcgagtccgcctggaacaagctgcgcggcgttggcgtgctaacaaaggaaaatattgccgaaccaatgcgggacattagacgagcacttctggaagcagatgttagtttgcctgttgtgagacggtttgtttcatctgttagtgataaggctttaggtgcaaatgctatcagaggagtccgaccagaccagcaattagtgaagattgtgcatgacgaactggtacaactgatgggtggagaggtatcggatattgtatttgcaaaaagtggcccgacagttatcttgcttgcaggtctacagggtgttgggaagactactgtctgtgcaaagcttgcgttctatttgaagaaactggggaagagttgtatgctggttgctgcagacatttacaggcctgcagccattgatcaactcactatactgggtaaacaggtgggtgtaccagtttactcagaaggaacagaagccaaacctacacaaataactaagaatgctatggaagaggcaaaaagcaagaatattgatgctattgtagtggatactgctggaaggctgcagattgatagatcaatgatggatgaattgaccgaagtgaagaaggctgttaatcctacagaagttctgcttgtcgttgatgccatgactggccaagaagcagcagcactagtcaccaccttcaatattgagattggtataactggtgcaatactgactaaattggatggtgactccaggggcggagccgcactaagcgttaaagaggtctctgggaggcccataaaatttgttgggcgtggggagcgattagaggaccttgagcttttctaccctgatcgcatggcacagcgagttctgggaatgggagaagtgctttcatttgtcgaaaagacacaagaagtgatgaggcaagaagaagctatagaattacagaagaagatcatgagtgcaaaattcgacttcaacgatttcttaaaacaatctcaaaacgttgcgaaaatgggttccatgagccgcattattggaatgatgccaggcatgaacaagataactcccgcacaaatccgagaagctgagaaaagacttgcattcgtggagtcaatgatcaatgccatgactgctgaggaaagggagaagccagagttactggctgaatcacgtgagaggaggataagagtggctgaggagtctggaaagactgaacaagaggtgagtcaattggttgcccagcttttccaaatgcgtgctcagatgcagaagttgatgggtatggtgcaaggacaagaagctatagctggcatgggagatctcaaggactcgcttaaacctgaagagaaggcacctcctggcaccgcgcggcggaagagaaggaataacacgtctaagcagagggacctggacgcagtgctgagctagtgagtagtggcctagtgtgctgtattatgaaaatgcataggtgggcactgaccctgtgtaattgcggttaattcggcacacatttttttgttgtacataacgtttagtcccatgagggaagatatgttggtcgctcttgaaattggagtaggttgtcatgaggacatatcatgtgcatcaatctttcatgtgcattagatatgttctctgttgtcatacagggcccagaagaactcaggtctgtaccggaggcctggagcccagtatctttcagttgcaacacttgatgtaaaaaataagnaaaaacattttacctttcttaaaaaaaaaaaaaaaaaaaaaaaaaaaaaaaaaaaaaaaaaaaaaa

SEQ ID NO: 86352 - DNA, 807 bp, Zea mays
  Clone ID: MRT4577_178762C.1
cattgggtacctcgaggccggccgtctcgatcccagcatccgagagagctccacaggccaggtccccatcgccgcggcgcttgccccacctctcccccgcccggtagtagcctcgccgccgttgccgagatggggttcgtgtccttcgtcgggagggtgctcttcgtcgccgctttcctcctctccgcctaccaggagtttaatgaattcggtgctgatggtggaccagcagctaaggcccttcggcccaaattcaacgtgtttgtcaaaaatgtatctgctcatctgggagtagctgtgccacacattgagctgctgtaccttgctttgatcactcctatcatccatgacttctacaactacgatatggagaaggcagaatttgcaggcctctttgcgaagttcacccaggatttggcgctgattggagctctgctcttctttctgggcatgaagaactccatcccgaagcggcagggcggcaagaagaaggcccccaaggcgaagacgaactagggctgcttagatagctgcacgcctcaggtggggtgtatcaggagacaggtctatttcgaagcaggctcagcgcgatgcagcgaatgccatcgagctgcgcttttacatgtttatcatcagattccattttgcggcccgaacaaaggtgtgaccggggtgggttaggcgactagattgcacgattatgtacttgagatttgtttgttgaactgggttgccgacggttaatcttctccatttgattaaaaaaaaaaaaaaaaaaaaaaaaaaaaaggggcggccaccactgct

SEQ ID NO: 86353 - DNA, 227 bp, Zea mays
  Clone ID: MRT4577_178763C.1
attatatagggggtggtttttttttgggtgtttttttttaaacaacaattcatttatagcaacttttttctggaaactggagtacacattaaacaaaaattgtctaaccaatgtattcctttttaatccaatacacatgaatacttaaggtatttgtcttttaactttcacctggcacaatttcataactaaaatgtaaaaaagggtaaaaaaataaaaaaggaccc

SEQ ID NO: 86354 - DNA, 1300 bp, Zea mays
  Clone ID: MRT4577_178764C.1
atcgaggccggccgggcccggccgtctcgatcccagcatccgagagagctccacaggccaggtccccatcgccgcggcgcttgccccacctctcccccgcccggtagtagcctcgccgccgttgccgagatggggttcgtgtccttcgtcgggagggtgctcttcgtcgccggtttcctcctctccgcctaccaggagtttaatgaattcggtgctgatggtggaccagcagttaatgcccttcggcccaaattcaacgaaaatgtgtgaggagcatattgctgctacaataagtgaagccttttattgagcagccggtgctatctcctgctgctgtaccttgctttgatcactatcatccatgacttctacaactacgatatggagaaggcagaatttgcaggcctctttgcgaagttcacccaggatttggcgctgatcggagctctgctcttctttctgggcatgaagaactccatcccgaagcggcagggcggcaagaagaaggcccccaaggcgaagacgaactagggctgcttagatagctgcacgcctcaggcggggtgtatcaggagacaggtctatttcgaagcaggcccagcgcgatgcagcgaatgccatcgagctgcgcttttacatgtttatcatcagattccattttgcggcctgaacaaaggtgtgaccggggtgggttaggcgactagattgcacgattatgtacttgcgatttgtttgttgaactgggttgccgacggttaatcttctccatttgattttatcttgttagcagcgcaggaaccgttgctgattcagtggttggtagtttctttcacttcttgagttgtcggtttatgtggtgttttttttgggggtcctgctagttcggcagacgcgcaaaatccaagtcatcaccgtttgtcacaactgtattcgctcctctgactacactcttgccgacatttgagacggaaagtgcgatgactcttcccacagcttcactgtcacccgtgatgacaaggttcttctcgtcaagatctctcagcccgtcagccccaagagcagcaccgttggagagcacttcatccccaactctctgctcttccagtccgaggttcccaacgccgaggtccagatgtacaacggacccaaggacttcgagttcactcagagctcttagattggctcccttttactttctgtgtctttatgcatgcatgtttagacagttttgcttagattagactattcttttgaatatacttacctaaaccccgaaaaaaaaaaaaaaaaaaacccgcgg

SEQ ID NO: 86355 - DNA, 1229 bp, Zea mays
  Clone ID: MRT4577_178765C.1
cattgggtacctcgaggccggccgggcattgggtacctcgagggcggcctcggggcccggccgtctcgatcccagcatccgagagagctccacaggccaggtccccatcgccgcggcgcttgccccacctctcccccgcccggtagtagcctcgccgccgttgccgagatggggttcgtgtccttcgtcgggagggtgctcttcgtcgccgctttcctcctctccgcctaccaggagtttaatgaattcggtgctgatggtggaccagcagctaaggcccttcggcccaaattcaacgtgtttgtcaaaaatgtatctgctcatctgggagtagctgtgccacacattgagttgaagcatgtgattgctgctacaattggtcttaagggtcttggaagcctcctttttattttgagcagctctctcggtgcttatctcctgctgctgtaccttgctttgatcactcctatcatccatgacttctacaactacgatatggagaaggcagaatttgcaggcctctttgcgaagttcacccaggatttggcgctgatcggagctctgctcttctttctgggcatgaagaactccatcccgaagcggcagggcggcaagaagaaggcccccaaggcgaagacgaactagggctgcttagatagctgcacgcctcaggcggggtgtatcaggccacaggtctatttcgaagcaggcccagcgcgatgcagcgaatgccatcgagctgcgcttttacatgtttatcatcagattccattttgcggggcacggcccggacaaaggtgtgaccggggtgggttaggcgactagattgcacgattatgtacttgcgatttgtttgttgaactgggttgccgacagttaatcttcatttgattttatcttgttagcagcgcaggaaccgttgctgattcagtggttggtagtttctttcacttcctgagttgttggtttagggcatgttcgttttgctcttaatccatgtggattgagtgggattggataggtttaatctcaaataagttaaaatctttcataattttttttaaaaaaaaaaaaaaaaaaaaaaaaaaaaaaaaaaaaaaaaaaaaaaaaaaaaaaaaaaaaaaaaaaaaaaaaaaaaaaaaaaaaaaaaaaaaaaaaaaaaaaaaaaaaatgggggggcccccccttttttggccttccccccccgtattttattccgggcccgttcc

SEQ ID NO: 86356 - DNA, 241 bp, Zea mays
  Clone ID: MRT4577_178766C.1
aactacaaagcaattttaatatactgtttttaacacctctccttttccacaaaatgtgacgcacaaatactcccaccacaaatatatacaatacaatcatacaaccaacaatcttaattcctaactcaacaccaacaatacacaacccaaataacacatcctatgccttacccctgccccatgttaaacccctattgccatcatacatactaaatcctgttttaaacttgttatccccaat

SEQ ID NO: 86357 - DNA, 519 bp, Zea mays
  unsure (1)..(519): unsure at all n locations
  Clone ID: MRT4577_178767C.1
cccaatctgtcttgcaccaaaactatatggactgccggacatgtagaaactaacagaggcacacagcccgttacgtctcacattggggcacgcgcaccagacatgccagcgcccacagcaactacacgtcacgactttatatagtacaactgatttacagcggcaccattacgcgtggcgctggatgtcccatccgaaccataactttgccatgaaactagagagcatggcagagtatactccccgtgaaccgcgtcatcactagacctttagcgcagccacctacgcaccaaaaccaactagccaaagctcacgctgttcacacgatatgtagtaaatatagacgaattcgccggatcatcnctgtgactggaacaggcgtacgatnatacctcggctcggacactttcggatgaacagaggactccggggtccggcgctcagggtgatcccggacacctcaccaaagaagtcaatctcctggcgcttcttggaagccacagccacactgtacacatg

SEQ ID NO: 86358 - DNA, 226 bp, Zea mays
  unsure (1)..(226): unsure at all n locations
  Clone ID: MRT4577_178768C.1
ctcatcgtcatagatacgattcatagcttctggcactacttgtgcgcgaagagccaagacatgcgtcaggggatgtgaagggtaagagtgccgatggccggctgccacccggcgccgctgcggccggtggtggttgcactgaaaggccacccagggtatggcaagtccacggcggcgcgcgccactaatancgcgctttgctgtccgatcctggacaaggacgatg

SEQ ID NO: 86359 - DNA, 804 bp, Zea mays
  Clone ID: MRT4577_178769C.1
atcagtggtgggaaggttcagtttttagcatgctatgtatactttcatttccgctggcatggtcgtggcaacagtggcgcatgataaagaaattacaaaaactacgtgaatttgttcgttctgaatatgatcattcatgtttacggtcctgccgttcgcgtgcactttacgaggggctaaaggtagctgctactccagatttaatgctgggttatttagatttcttccttggtggggatgagaaaaggactgatcttcctcctcggcttcatcaaaggtttccaatgtccctgatctttggaggtgatggaagctatatggctccattttcacttcatagcgacagagtggtcacaactcttataagtcaggctgtgccatcatctatatggcatcgtcttgtagctggattgaatgcccagttgcgtttggttcgccgtggaaatctaaacacatcacttctccctgtgctcaaatggctagaaagtcatgcaaatcctgaattgaacacgtaccgtgtgcgtgttgaccttgcatggtttcaaactacagcattaggttaccttcagtttggtcttgtccttcatgctagtcggggagtggtggctgctgaactccaggatggctgtacaagtaaaaccgatcagcatttagttaaccagaatacatgccctgacttttaaatgggccactcaaggaccaaatgatggtctgtgtaaaaggataactggccccattttcaatggtgacaaccttaggatgcttggtggcaggagaaggtttcttttaccttctctctcttaa

SEQ ID NO: 86360 - DNA, 357 bp, Zea mays
  Clone ID: MRT4577_17876C.1
actcactgtcggtacaggtgggacagaactgggtacgactggaagaagatgacccacgacggacgggccgactccagcaaaattagcagcctgatgtccgacatgatgatctgactgaccttcagcgggagttcgctgaccctaaaccggaacaggatcagcgtgacgttgtactgggcaagggccacgaacggtacctacgtcgacggcggcgcgcgcgcacacctgctgctgctgatcctgctattagtgggggacagggagctcatcaagatgccatctgcagatcgaccgtgcagctcgactaggacctctttatcaacattggagacagtcttgagcgacgaggaggagcac

SEQ ID NO: 86361 - DNA, 281 bp, Zea mays
  Clone ID: MRT4577_178770C.1
aaaaaaagtgggggggtttttttttttttttcttattttaaaaattacacattgtgtgaaacgcgatttttttatgataggacgacacaaaaaaagggtgcttacaaaccggacaaagaacacgcatcgggggggccccaacaacgctgatttaaagaaggatgaggggtaaagcccccaagaaaaacagccattgggcaaagttttacaggggagggcgagccttattatataacaaagaagagggggcgctgggaaaaagagtgagggggtccaaaacc

SEQ ID NO: 86362 - DNA, 462 bp, Zea mays
  Clone ID: MRT4577_178771C.1
aaaaaagcgcccgcccgaatttgcattaacagggcccttacatacccgattccccctttggtctccaagaggtttccaggggatacaaaccccttcccaagaacccatggggggggggggccccccagcgggtggccccccgaatcactcgggcgggggggccccaacccccggggtcttggcatcctggggccccttggccccgggggcgggggcgggcgggtgccccccctcgaagaccccgatgaccccgccgggccccggggtgctcttggggccccccaaccggatgttgccggggggggggggggggttcttgggggtccccttggggggccccccctcggaacctttgcccccgggggggagcgccacggggttttcgtacccgggggggcccccccggcccttgggggcgggggagggggggccacgggggctgggcccgagggaagggccccc

SEQ ID NO: 86363 - DNA, 1041 bp, Zea mays
  Clone ID: MRT4577_178772C.1
atggaagatgaaatggaatcaaagaatgctaacaaagtttgggatttagaaataattcctaaaggagccaaaacagtaggctgtaaatgggtctacagaacaaaactcgactccaaagggaatattgaaagacataaagcacggcttgtggcaaaaggttttacacaaagagaagggatcgattacaatgagacattttctccagtctcatgtaaggactccttcagaattataatggcattagtggcacactatgatttagagttacatcagatggatgtaaagatgacattcctcaatggggatttggaagaaattgtttacatggcacaaccgaaaggttttgttgtgaaagaaaaagaaggcatgggatgccgcctaaagaaatccatttatggtttaaaacaagcttcaagacagtggcacttgaagtttgatagaacaataaagaattttgggtttaaagagaatgttgaggataactgtgtatatgcaaagtttaagaatggaaatgcatcacctgcaccaatagtcaagggcgacagatatggggattttcaatgccctaggaaccagtacgagctcgaccaaatgaaagtggttccatatgcttctgctgtcggaagcctgcagtatgctcaagtgtgtggagctatttcatggaaaagctcaaaacaaaccgtcactacatcatccatagtgtatgccaagtttgtagcatgttttgaggcttcggggcagctgaactggttaaaaaagtccatacccggtttaaaggtggtcgacaacatacataaaccactaaagttatactacgataatgctccagcagtacattatgctcacaacaataggtcaagtggtgctgccaaacacattgacataaagtactacgttgtgaaggataaagtccgggatcaaataatatgtcttgagcatataagaactgaaaagatgctcgcgaatccgcttacgaaaggcttaccaccgaaagtgttcaaagaacatgtagccgacatgggtttaagggaaagactatga

SEQ ID NO: 86364 - DNA, 312 bp, Zea mays
  Clone ID: MRT4577_178773C.1
ttctatcccttaaggaaaccctgctctcttcttcccgagggatgttcgtactatctgtccaagaaacttgtaggtgccaagtgtgcgaatgaccaagagtcaatggcgcggaaagactttcgtatagttttctggacctggaaacaaaaatgccttcagggcacttattgctgcacaaaacaaagggaccaagggtgaccttaacatacggattttaagatgtttatctccaaaaggacccctgagtttctaaagacgaaccccctcgggaagtgactcgacccggagactcctgatgctcatgtttttaaa

SEQ ID NO: 86365 - DNA, 597 bp, Zea mays
  Clone ID: MRT4577_178774C.1
agctcgtcatcggggatctcgtcggccgacgttccatccattcttctccgtgcgcgcaggtgtgccagcttgataaggcacgtcaaggccggcggctcgggccgcgcacatggctgccgctgctgcgcgcttgcttgccgtcgcgctctcggccgccatcttcgtggtcgcggtcggcggccgcggcgtcttccgcgtgtccggcgcggagaggccgagcgtggagcgtgacctcgacgccgccagagcagcgatacggcgcgcggcgcggcgccatggcaacaatgccagctccgcgccgggcacgtggttccgcggcgacgacgtggagtacgctctcctctcgagggtctaccgcaacccggcagccttccaccggagctacgtggagatggagaggcggttcaaggtgtacgtgtacgaggagggggagccgccgctcctgcacctggggctctgcaaggacatctacaccatcgagggccgcttcatcgagcagctcgagctcctggtgccgccgttgcccttttcgaccaccaacgacatcctcgtcaagggcttgcctgagttccttttcttatccgaagaggaccagga

SEQ ID NO: 86366 - DNA, 246 bp, Zea mays
  Clone ID: MRT4577_178775C.1
tcatcgagtggctcttcgacggcaagctcttcctgcgggacaggaggtactagggggaggggtggccatataatcctatgtaccttgactccttcgttttggacgccaatcacatcgccgatggggctttgaccggtacgtaccacagcctctacgcgccctacgtctgcagatacaaggacgctagggtgcccactgctgagtatatagtggaagacgccattgatgcgcccgctggtaatactg

SEQ ID NO: 86367 - DNA, 561 bp, Zea mays
  unsure (1)..(561): unsure at all n locations
  Clone ID: MRT4577_178776C.1
aggctgtattacagcggctgngttcgtgctttgtactgagtaccttagatnngggggctggnaaagnaaggaggnnaaaaggtgaactgtaagcttgaacgtnctttgtattttgggggacgagacgagcctcggctcgtntatgaaggacaataagggagactacgctntntgggggctnngaatgcatagccttttacaactgactatgtctgcttcaagggactatggacaagtaagggctgtgacctatttgctctgtattgaacagtntattggggagtntgnncgnagcatgccttgtttacattttgctttgtagagttcaaggtacacggttcaccagggtaggaattcaaggatgctggtggtagtttaacaagacaagcaagggacaggaactgtcgatgaagacgcttgagaactgtacgaaggcagtagaagtttgaagccgtacctgagttatgcttgttcgtgtcttttgtacgtgttcaggaaggaaggaactgatagagtttntgttgttgtggagtttttaagaatgttttgttatgatatatg

SEQ ID NO: 86368 - DNA, 317 bp, Zea mays
  Clone ID: MRT4577_178777C.1
aacgagctccataaaaagcgtttttcagtgccaacaatacagccacaatggagaccatgatattttcccttcttatgctccgtgctttgtctacatgtgttgctaacgcgacaattttaccttaatgctcacaagcttcgatagcttcccttttttccccatacctttcatcaattatagcttaagtgtgtgaaaacccagctctgtatccatataggctttaacaagcaatcttagcgggcaacatacctttatcgcccttgttgtgtcaacaatcgacagccctatctttggtgcatttattggcacaaaccatc

SEQ ID NO: 86369 - DNA, 382 bp, Zea mays
  Clone ID: MRT4577_178778C.1
attcggctcgagggctgatacaggttatatttttacatgcccagggagctcagtcccacggtgtggtatttgcagcactgaatgcgtgggctgagactgagcaagatcaaatgactggacgagaccgggtgataagcagatcgatgttgattctactgcatacggactgagtctgtcagacgccgatgatccatgcatagccaatgaatcatgaactagggtttgaagcagtataacggagccacaagacaatgcagcattttccaaaaagctgatgaaagtgtccctaaaagatcgtacatgaacgtggaaaggaggccacagcgtctatgcgagcggtactgattgcaaatacttgtaccacatatgatgtgacttggca

SEQ ID NO: 86370 - DNA, 232 bp, Zea mays
  Clone ID: MRT4577_178779C.1
atcaaaagcaatcgctatcatctgctaaagcgttcggacggagccgccgcactcatcttacacattatgcgcttacccccctgtgagcatcggaaccttggcgacctccttagacggcctatccaaaaatattttggtgccccggtcggtggctcaaccacgtggcaatggacctgacactggcttatcttttggaggatgggttcattgcaaaaacgactatcggccaagg

SEQ ID NO: 86371 - DNA, 1853 bp, Zea mays
  Clone ID: MRT4577_17877C.1
gttggaagtctcaacacgcacagtcgcggcgaggacagtagcagtagcaagtagcagcatactctcctacgcgaatcgattaacgggcggcactcacccaccgtgtggcctgccaaactgtcccctaggccccggccccgcccgcgcctggccagtggccatccatcccttcccttcgcttcgacgcaccaatcttgtcccggcgcctgccaaatccagcaaggccacacagcccgaggcaggaagggcagcgcaggaacagggagcgagcagcgcacgggcaatggcggcttcttccgggacgcgctccgtgcgcctgctggtgctgctgctctgccttctcgggttctgcgtcgcgctgagccaccaggagtcggcggcggactcgtgcgccagggccaaggtcgcggtcgccagcctcgtgcccttcgactccacgtccttccgctgcaccgccgcctggaagcagcaggacttcgtcctcaggtacaagaacacggggcccagcgagtggagcttcatcctctcggcgccggacaggggctcgtacgtggcggtcggcttctcgggcaagggcgccatggtggggagcagcgccgtcgtcgggtgggcggccaacggcaggggcaccgtcaagcagtactacctcggcgggaagagccccgaggagtgcgcccccaacaggggcctcctcaagctcgtcaggaacaggaccgccgtcgcctcgcgctccggccgcctctacctcgccttccagctcagcaccgactacccgcagccgtacctgatctacgccgtcgggccggacggcagcctgccgcagtccgactcgctgcggctgccggcgcaccagaacatggcctcccgctccttcaactacacctccgggctgtcgtacaacgtcgccgggtccggcgacgccgcgttcccgccggagaggaagcacgggctgctgggcatgatggggtggggcgtgctgatgcccatcggcatgatcaccgcgcgctacttccggcagctggacccgtgctggttctacacccacatggccatccaggtggctggctacgccgtcggcatcgcgggcatcgtcctcggcttccgcctcagcgaggacgggctcaggaacgtggacgtgcacaaggcgctcggcatcgccatcttggccatggcgtctcttcaggtgatggcgatcctggcgcggccggacaagacgtccaaggtgcggcggttctggaactggtaccaccacaacatcgggcgcgcggcgatcctgctggccatcggcaacatcttcctgggcctctccatcgcgcaggagaccagcgcctacatcgtctcctacggcgtgttcgtcgccgtctgggtgctcgccgtcgccgccttcgagatgaagcgctgctacgccgacgacgactgatgagctagcgacacgtaagagtcacagttcggtcccaacagctgacggcgaagtttggtgtcgttaaactgagcgttccacggccagctgggacgtgacagacacacgagcgccgagcgcgcgcgcgcgcacacacacaccattcttgttgttccgtagctcgcagctggacagtgcattattggttcggggagggcgtgctttggttggctaattaaaaaaaaaatgtttttttttttaggtataggatgtgaggaaggggacggtctgctgtttctaggctagctggacgctctgattcataaatttgtacattgattggtacgtggtcgtgttgtgttgtaccctttttggacgatagcatgttcttcgccctttttcttctaaaaaaaaaaaagggcggccgccaccgcgaattttattcgctgattct

SEQ ID NO: 86372 - DNA, 268 bp, Zea mays
  Clone ID: MRT4577_178780C.1
catccatgttatggcaactgagccatccaaagatgcgacacaagcagaagaaccaaagacactgccagatgcctggagaagtggtggaagtggaagacatggtggaagtgtgggacatggtggaagctgtagacactgtttaagcattagacatgttgatatgctggggacatggcatgagtacatggcttatgatgcaaatgctactgtctaaatgacatcaaatgtaacttaaaataataaaacacaaacatgaacttaatacact

SEQ ID NO: 86373 - DNA, 465 bp, Zea mays
  unsure (1)..(465): unsure at all n locations
  Clone ID: MRT4577_178781C.1
gtaagcttggatcctttatcctctgncgctcggtggttttcttgacagtgatgatgtgtaggatgtgaaaccactgaatagatcgcctcctgattaaagacgctgaatctgaagaacaaactgctggtgagtaagctctcgacgcacgcaactaatgagaaaccttctgatggatcaatggtctttggaggcccatggccgctgggcaaagaccgcagcttgattcccctgctaatcactcctggaaacatcgtaatgtcttccaagtatgcagaaagtgatttcattggccacgaccgtgaatacatcccgctcaaggcgtctgacgtgatagctgctctttcctgatcccaatcctacaaccccgttggtgcgatatgaagttttgataataaaggcgaaccttatcttttatttagctcttgtccggaaccggcggaggctttcgaactgcataatttggtg

SEQ ID NO: 86374 - DNA, 189 bp, Zea mays
  Clone ID: MRT4577_178782C.1
aattcccggctagacccacgcgtgcgggccaccaatcgagagtcggctgcagcatgagcgtggtaatcataggctcgagcgtggctgcttcggtcgaaaatcccgaccatcctatctatgacatgttcgcacatccatctctgcatggtacctcttcttcagatactccatactctctcaccacctaat

SEQ ID NO: 86375 - DNA, 412 bp, Zea mays
  Clone ID: MRT4577_178783C.1
accgagtcctctcggggctggcgggctcgactgcgaggacaccgggctcacgctcaccctacgtcctggcgggctccgagccttgcgccgccgccgacggcgagggttccctgtacctctacttctggaagggctgcggcttacgagacccagaccgcaagcgcgcctgctacgacgctggaccccggatcgatcctccccaggtaggcgcgttctacgacgctgaaccggcacccaaggatggcgtggcgggctggccgccggtgaggtcgtaccgtaagaagcgctcgacgacgccgtggacttcaaaaggccgtcaaggtcgccaaggaggccagcgacggcgcgccctacctgcggaaggaggacctgcaagcgtacgccggctacgaccagatgcatagagcgctcc

SEQ ID NO: 86376 - DNA, 653 bp, Zea mays
  Clone ID: MRT4577_178784C.1
tttttttttttttttgctcagactcaataattttatttatacacgaggagcagtcttaagtaggaacaactagagagcccccttacaagatccaagggggcctagacagggaacatagccaagacatgacagttaacaggaacaggcgacaggaaaggaactgggacaggtacggggaacaggaactggaacagggaacagggaacaggatggccactcagccagacaggaacaggaatgtaggccacttggccaacacaggaacaggaacaggaagaccacttggtctaacagggacaggggaacaggaacaggaacaggtaacaggagaaagaggtaggggtagggagatatgagagggaaaggcaggaacggaagaagaaagcatggagcgcactcaggccattattctgacacgcccccacgcgaacaggcggacaacatggttgcttagatgatgctgcatttggactttagtccatcggagtcgtcgttatcaataatcaagtatttggcttgcttggagacttgcgattagattgggaaaatgaacgatgatccaaggatgggatcgatggacgagaccgaggtaaagtgcgtgctcgccgtatgggatcgagatagacaagcgaagggaaagcaacggtggaatc

SEQ ID NO: 86377 - DNA, 604 bp, Zea mays
  Clone ID: MRT4577_178785C.1
cacccaacatcgtcgtccagccccctccccgtcctccatccgcgacctccgcatctccaagaaaggaccgcgacaggccaccgctcgcgatggggtgctcgataccgtgaactccaacttgcagaacaggcaccgccaccaggggcccttcgcggaggcggcaccgctccgtggacgaccttgccgccgccaggctcgccacccgcgtgcacgacgacgtggagcttgcttgcgaccacctgcacactgtcgaggtcctgctggttctggacgaggccagcgacggctcgagccaggagctccccgcctctcacgccgccagcgccggaggaagaggtggagatgcggggcgctggcgccggtacgtcgctgccccatgcgtcgttgttatccctatagattgggtaaggaatctccttctgagggttgttcatgtttctcttcctgttgtgattcatccgttcttcctgttgcactccaaattagcatccatgtttctctcccccgatggtctgtctcctcgccatctcgtcggcatagctcgagtgccggtccacgcccccgcaaatccggccatgacaacgacatgtagatccagtccata

SEQ ID NO: 86378 - DNA, 484 bp, Zea mays
  Clone ID: MRT4577_178786C.1
ggggggaacaaaggttggtttttgggaacaaataacacacttgatgggctttccaaacccaaccgaccgatttgacaattttccccctatttattacccccagctttttttacccatgttgggagtcgggggtctggactagcaagcacccgaaatcgaggcatgaaacaaaaataaattcatcggtttgaaaaaccatggtttgtgcccacccacttttttacccccaccacccatgtccaaagttttgtatcgcccaatcccctccccctgataaaaaacaacaagggcacccccctaaggaaaaaaaacccttccaccaccttaaaaggggccccgaaaattttttttttttgggggggaacagggggaaccttgggcttggggttttcgaaaaacttgacccctccaagggcgttggagtaaaacaaaccttggggaaacggggcaagcaacttgcccaataaccctttaaccatgtcaa

SEQ ID NO: 86379 - DNA, 1094 bp, Zea mays
  Clone ID: MRT4577_178787C.1
cgcaggcagaggcaccataccagtcaaccaccaccgcttcgttctcctcccacaccgctcgccttcgcctccttctggttcccatcttctatcatccccgagctccagttctccacacctcacgtctataaataataaataaggcgcccgcggtgcccatcaattcgtgtcaccgcgtcccgagagcgcaaatcattccgcgcgacgcaaaaaccctagcccagccaccgatccctctcatggcaaccaccaccacccaggcgagcctcctcctccagaagcagctaagagatctcgcgaagcacccggtggatgggttctctgctgggctggtcgacgacagcaatgtcttcgagtggcaggtcaccatcatcggaccgcctgacactctatatgatggaggttacttcaatgcaataatgagcttcccacaaaattacccaaacagcccgccatcagtcagatttacctctgaaatgtggcatccaaatgtctatcctgatgggcgggtttgtatctctattcttcatccacctggtgaagatccaaacggttatgagctcgcaagtgagcgatggacacctgtgcacacagtagaaagcatagttctgagcattatatcaatgctctctagtccaaatgatgagtctccagcaaacattgaggcagctaaggaatggagggaacagagggaggatttcaagaaaaaggttaggcgcatcgtgcggaaatcacaggaaatgttctgaaggaaatgggagtcctggtgaagttaaccatgccatgtcaggctgcaggattttgctgccaatctcaaagtgctcatctgacaccagcgtcttgtgtattttccatttatcatctgttcattggtgacaattgcctccagaaatgcaatgggacgtggtcggcttgaaggttctgcttgtgtcgtgtggcttgcgctctactaatgtttggcaaacctgaagtggtaccggttatcgtaaatttggtggtgaacctggcataagcaggcaccattcatgtcagctagccgttttgaaaacatatcagcccttgttggtttcttatcaaaatcaattggttggagg

SEQ ID NO: 86380 - DNA, 1354 bp, Zea mays
  Clone ID: MRT4577_178788C.1
attcattccgcgcgacgcaaaaaccctagcccagccaccgacccctctcatggcaaccaccaccacccaggcgagcctcctcctccagaagcagctaagagatctcgcgaagcacccggtggatgggttctctgctgggctggtcgacgacagcaatgtcttcgagtggcaggtcaccatcatcggaccgcctgacaccctatagtgagtcagatcctctccatttcaagcgtgcttccatgccttgtcaagatgaattgcttgtttgttgtgtcggtgccacgagcaatggactacgatggtgtttgtgtggagaactggagatctcgtctgtgtgttactgtggaccggaatcagggattgaaaatcttactatatgtgcagtattgatttctggtggaggctggtgcggggcggaattttcttggcttgttgtagtggctaccgtagtacataacttgggcacttggcgacatgtccggtgcccagctccatcacatatcaatctgaaattaaacatgtgtctgagttctgaatggaaaaattcagctaacagctaacactacgcactactaacagacctcaagcataatactgttgatttgatgtccttgtatttatcttgaagcattgcattcatgcagtcatgtaaatagtactttatttatcttctgaccaacacactaataaccaaactttgcagtgatggagggtacttcaatgcaataatgagcttcccacaaaattacccaaacagcccgccgtcagtcagatttacctctgaaatgtggcatccaaatgtctatcctgatgggcgcgtttgtatctctattcttcatccacctggtgaagatccaaacggttatgagctcgcaagtgagcgatggacacctgtgcacacagtagaaagcatagttctgagcattatatcaatgctctctagtccaaatgatgagcctccagcaaacattgaggcagctaaggaatggagggaacagagggaggatttcaagaaaaaggttaggcgcatcgtgcggaaatcacaggaaatgttctgaaggaaatgggagtcctggtgaagttaaccatgccatgtcaggctgcaggattttgctgccaatctcaaagtgctcatctgacaccagcgtcttgtgtattttccatttatcatctgttcattggtgacaattgcctccagaaatgcaatgggacgtggtcggcttgaaggttctgtttgtgtcgtgtggcttgcgctctactaatgtttggcaaaccctgaagcggtaccggttatcgtaaatttggtggtgaacctggcataagcaggtaccattcatatcagctagtcgttttg

SEQ ID NO: 86381 - DNA, 285 bp, Zea mays
  Clone ID: MRT4577_178789C.1
ccaccagcggctcccaagcgtgcggtgagatagactgattagttgcatcaacctatgactaccactaacaaaacacctatatacacattggtccatatgcgaaagcatatgcaaataattatctctgactgtagaaatgaatgaaggcacaggtctgactaatgtgtatactacaattctatgttagaataatgtacttaacaactatattctgctttgcgcattcttatccctgttataacgcttgcatttcttcaatgcttatttttgtaatacatttacaat

SEQ ID NO: 86382 - DNA, 369 bp, Zea mays
  Clone ID: MRT4577_17878C.1
aaaaaaaaaaaaaaaaaaaaaaattaaaaaaaaaaaaaaaaaaaaaaaaaaatagggaaaagaaaaaataaaaaaaaaaaaaaaaaaaaaaaaaaaaaaaaaaaaaaataaaaaaaaaataaaaaaaaaaaaaaaaagtgtgatatctttttagagtttcaatgttttaatgatgttaaatataaactaatcactttttatttgcgtaactaaatttaaattaatttgcggttgtttaaaaaatttgttaattggaaaaactttgagtttacaaaatttaaccgcttttaaaaaattccatttttactgaattgaggtattaagaaaaatgcccaaattgttgacttttacaaaaatttgaccaattta

SEQ ID NO: 86383 - DNA, 1178 bp, Zea mays
  unsure (1)..(1178): unsure at all n locations
  Clone ID: MRT4577_178790C.1
ccggccggagagcaggcaccataccagtcaaccaccgcttcgttctcctcccacaccgctcgccttcgccttcccatcttctatcatccccgagctccagttctccacacctcacgtctataaataataaataaggcgcccgcggtgcccatcaattcgtgtcaccgcgtcccgagagcgcaaatcattccgcgcgacgcaaaaaccctagcccagccaccgacccctctcatggcaaccaccaccacccaggcgagcctcctcctccagaagcagctaagagatctcgcgaagcacccggtggatgggttctctgctgggctggtcgacgacagcaatgtcttcgagtggcaggtcaccatcatcggaccgcctgacaccctatatgatggagggtacttcaatgcaataatgagcttcccacaaaattacccaaacagcccgccatcagtcagatttacctctgaaatgtggcatccaaatgtctatcctgatgggcgggtttgtatctctattcttcatccacctggtgaagatccaaacggttatgagctcgcaagtgagcgatggacacctgtgcacacagtagaaagcatagttctgagcattatatcaatgctctctagtccaaatgatgagtctccagcaaacattgaggcagctaaggaatggagggaacagagggaggatttcaagaaaaaggttaggcgcatcgtgcggaaatcacaggaaatgttctgaaggaaatgggagtcctggcgaagttaaccatgccatctcaggctgcaggattttgctgccaacctcaaagtgctcatctgacaccagcgtcttgtgtattttccatttatcgtctgttcattggtgacaattgcctccagaaatgcattgggacgtggtcggcttgaaggttctgtttgtgtcgtgtggcttgcgctctactaatgtttggcaaacctgaagtggtaccggttatcgtaaatttggtggtgaacctggcataagcaggcaccattcatgtcatctagccgttttgaaaacatatcaggccttgttcgtttcttatcaaaatcaattggttggaggaaaactaaggctttgtttggtttaaaaaaaaaaaaaaaaaaaaaaaaaaaaaaaaaaaaaaaanctcgggactagttctctctctctcgtgc

SEQ ID NO: 86384 - DNA, 266 bp, Zea mays
  Clone ID: MRT4577_178791C.1
cggggcggcgccgggcgtccaaacctctctgtgcttgtcgcgatgtgaccgcttgcgtctttctcagaaaccaaggctggggagagaggtagattttatgcttgcttgcaagccacccacatgttcccttccttttcctgctaacggtttcatctgactactgtttcatgtgcttgcaagacggcgcgtaagatttttttcttatacccgttaagctgtcctacatgaataatctcaattctcacctgctgaaacttaatcattcc

SEQ ID NO: 86385 - DNA, 1166 bp, Zea mays
  Clone ID: MRT4577_178792C.1
ttgggtacctcgaggccggccgggagcagtcggcagagcagagaacgcaggcagaggcaccataccagtcaaccaccgcttcgttctcctcccacaccgctcgccttcgcctccttctggttcccatcttctatcatccccgagctccagttctccacacctcacgtctataaataataaataaggcgcccgcccatcaattcgtgtcaccgcgtcccgagagcgcaaatcattccgcgcgacgcaaaaaccctagcctagccaccgatccctctcatggcaaccaccaccacccaggcgagcctcctcctccagaagcagctaagagatctcgcgaagcaccccgtggatgggttctctgctgggctggtcgacgacagcaatgtcttcgagtggcaggtcaccatcatcggaccgcctgacaccctatatgatggagggtacttcaatgcaataatgagcttcccacaaaattacccaaacagcccgccatcagtcagatttacctctgaaatgtggcatccaaatgtctatcctgatgggcgggtttgtatctctattcttcatccacctggtgaagatccaaacggttatgagctcgcaagtgagcgatggacacctgtgcacacagtagaaagcatagttctgagcattatatcaatgctctctagtccaaatgatgagtctccagcaaacattgaggcagctaaggaatggagggaacagagggaggatttcaagaaaaaggttaggcgcatcgtgcggaaatcacaggaaatgttctgaaggaaatgggagtgctggtgaagttaaccatgccatgtcaggctgcaggattttgctgccaacctcaaagtgctcatctgacaccagcgtcttgtgtattttccatttatcgtctgttcattggtgacaattgcctccagaaatgcattgggacgtggtcggcttgaaggttctgtttgtgtcgtgtggcttgcgctctactaatgtttggcaaacctgaagtggtaccggttatcgtaaatttggtggtgagcctggcataagcaggcaccattcatgtcatctaaccgttttgaaaacatatcaggccttgtttgtttcttaaaaaaaaaaaaaaaaaaaaaaacaaaaaaaaagtactctgcgttgttaccactgct

SEQ ID NO: 86386 - DNA, 516 bp, Zea mays
  Clone ID: MRT4577_178793C.1
aaggagaaggcgccttttacttatttattattaatgcaaatttcacttacacagactttgaacaagcgcaagcgggcttagagcaagacgtgtacatgttgggcctggaacaacatcaaaaacacacggccagagctagctttctaaaggcatagccatgggccgcgcacgcgcatgcaactaccaatttttatttccacctatccctaagaaggagcatttgcatttgggggatggggacactgaaaatggacagtgccacgcccagggacacatacgtacacggtaaactaacactacccttttattactaggtctgagccccaccccatgcacgttggtcatagcaacaccagcttaaggatggcccccgccacccattcccagccacggccgcagtggcacacgcacacgcactgcttgttcttgtcgcagtcgcggtggtgctacttgcacttcttctcgcaccggtcgccggggctggcctcagcgtcagcgtgtgcgcgtgccccctcc

SEQ ID NO: 86387 - DNA, 428 bp, Zea mays
  Clone ID: MRT4577_178794C.1
ggggaaaatccaaacttgggggaaataaaagtgcaggcggggcgcgccagcccctcctccctttcaagtttgcaacatggaatgtaacccccaaggtggttccggttcaggttcactttcacagcctgggacccaagtttatttttttactttgttccgactcccacccctggttctccgagctcgggggctcaagctgagtcctaatgcggaagctccccggccaccttgagctgaccggctcccccatcttttaaagcaccgccggcccccacggggcggggggggagcttttgccggccccggcttggaacctgggggccctgctcgtggggctggggcccccggcaccggcagccttccacgccgaggaggggaactcctggctggggtcgcccttttggatgatcgcacttgccgggctgacc

SEQ ID NO: 86388 - DNA, 330 bp, Zea mays
  Clone ID: MRT4577_178795C.1
ataaagcgttaatgaaaacaaacctagaatcactgaaaggctatcaacagtcgaatacaaaaaatggacggtccactgcatttgaacctgcatcttaagccaagggtactgtaaaagactgcaatggtgttactgtagcaacattggagctcgctgcatgctgatttgaagctcctgacatgcatacaaatgtccccaacagtggttaaaaagttcagggaagggcaaagtacagattgcaacagccagaaagagcagaggcttcgactgtgcttctcgctcctcaggaggcccttggcccaacacagaagggtgacaggccaacctgct

SEQ ID NO: 86389 - DNA, 190 bp, Zea mays
  Clone ID: MRT4577_178796C.1
catcatatttcgttatcttgccacccaactaatcggggcgggaggatccatttcttttattgacaatatatactaaattaatcactgtactagacttacacaagcaacaaaaccatccatacatgcacaaaacattatatctcctaaccattctaacaaacaatactcatcccagggaaagatcctatac

SEQ ID NO: 86390 - DNA, 799 bp, Zea mays
  Clone ID: MRT4577_178797C.1
ttgggtccctcgaggccggccgggccgggacttttcagacctctcgcgtgactctctcacagtctcactcacgcagtcacgcggctcacgccccaccccccaccaggccaccacaccgctctcttcttcaccaccgcgcaagcaagagagagagagacagagagagcaggcagcggcaatggctggcgctggggacgagtactactacggcgggccggggcaggggcaggggccgcgcggggccccacacggcctgctgctggcggtggtggttggcctcgtggtggcgggcccgctgtttctgggcgacggcggcgaggcgctgacggaggccgtggcggagctgctgagcccggtcgggctgcttctcctccccgtgtgcctgctgttcctcatccgcctcctctcctccgaccgcggcgccgcggcgctcgccgacgtcttcgccttcggcgggtcccccgacgccgtccaccgcgtgggagggtcccccgtcggcgtcgcgctcatgctcctcctcatcctcgcgctgctctactaccgctcctcgctcttcggcggcggcggcgacgacgacgagtaggagaccggcggcgcgatctccggccgtggcgtggcgttgtttttgtgtaatgcgaggggcgtgggtgcaaaagtgcgtgtgtaaatcgagtggatcggagtaaataatctaatctactcgtctgtttgtaaatcgatggctcctgaagcttctgtgctgcgtcgatcgggcgggccatgtgcttctaaaaaaagaaaaaaaaaaaaaaaaggccct

SEQ ID NO: 86391 - DNA, 302 bp, Zea mays
  Clone ID: MRT4577_178798C.1
ctcactcttgccgggtccttagtacagatcagcacggcaacaagtcggtagaccgagcgacaagaaagcaatttcctgctcatagcttcctgttcagctcgtagtgcctgaacgatgggaactcagacaagccgtttgagcaggagtcagacgcagtgcatagacgcttgggtcgtgacgactcctacaataaagtggcatgccagagcttcaacatgactaagatcgtgatattgttccgcgaagatcacaacgaagtccacgtagactacgtattgctcgtttacgaaacatgacgttac

SEQ ID NO: 86392 - DNA, 778 bp, Zea mays
  Clone ID: MRT4577_178799C.1
cattgggacctcgaggcggcgggattcccttcttctcgctcaccagtcaccaccactgccgcgaccgagagagtcagagagagcaggcggcggcaatggctggcgctggggacgagtactactacggcgggccgggccagcgcggcgcgccccacggcctgctgctggcggtggtggtgggcctcgtggtggcgggcccgctgttcctgggcggcggcggcgaggcgctgacggaagccgtggcagagctgctgagcccggtggggctcctcctcctccccgtgtgcctgctgttcctcatccgcctcctctcgtccgaccgcggcgccgcggcgctcgccgacgccttcgccttcggcgggtcccccgacgccgtccaccgcgtgggagggtccccggtcggcgtcgcgttcttgctcctcctcatcctcgcgctgctctactaccgatcctcgctcttcggcggcgacggcggcgacgacgagtaggataggagagctggcggttgcgatctctggctgtctgttgggttggtttctgtaatgcgaggtctgcgaggggcgtctgtgcaaaagtgcgtgtgtaaaatcgagcggaggcggttaatctgttgtttacttggtcggtttgtgacgctgaagcttctgtgcgtgtgttgcgtcgggccatgtgcgtgcgctgtgctcttccccagaaccacgtgtacacgctgtactatcaccccactgacccagaacgccaatgcgtgccagtgaattccacgtttaacttttacaat

SEQ ID NO: 86393 - DNA, 207 bp, Zea mays
  Clone ID: MRT4577_17879C.1
tttttgctcggcttatcgaccacctttgccttgcaaattccatttaacaggacaccacagcacgtgcatcacttgtgtctatgaagcgtcagtttcaaaaaaaaaaaaaaaaaaacccccgccttcccggaggagccaccccgggaaaaaaaaaaccaggcccaattaaaaccccccaacttaaaattgcctttttttaccttcccc

SEQ ID NO: 86394 - DNA, 227 bp, Zea mays
  Clone ID: MRT4577_1787C.1
cccacgcgttcgagcgcatgcatgtagctttggcggtggagacgaagaagggcctggtgctgctggacttctgggtgagcccgttcgggcagcgctgccgcatcgagctggcggagattggcattggctactagtactcggagcatgatctgatgggcggcgccaagagcgacatcctacttcgctccaacccggtgctcaagaagatccccgtgcttcttcacgac

SEQ ID NO: 86395 - DNA, 426 bp, Zea mays
  Clone ID: MRT4577_178800C.1
cacgccgcttgcgcacaccttgcagatctgcggttgtcacacatcgcatcgaggttgcgggccgcgcagcagtgttcagcctgttcagattcttgaggaaagcgagacgaaggatggcacgtgtttcagggaggctgtcctatgtcgtgtttctcctcctcagtctcagcagacagtgggaaccgatcgatgccatcaatgggagtagccatgcccatgcatgccttgataatgggtaaagcgacacagcaggaggacggtgaagaatgaggagaggtgcacggataaggaagagagtcaatgcttatcgccgagtctccagttcaagggcttctgctgtaatagcgatagatgcgccgaggtgtgcatgaagtgagagctttcgcggtggcgagtgcaggcgggacgtgggcatgcacaggtgct

SEQ ID NO: 86396 - DNA, 699 bp, Zea mays
  unsure (1)..(699): unsure at all n locations
  Clone ID: MRT4577_178801C.1
cgcactcagttgaagttccttgccaaganngagcagcattgacatantgaatttatgcattgtctcaaatggccgagnngcgctgccgggaatgtcgtcaaacggtgatgcnncatctcaatcccacctttgcgcgatgaatatgctcganntcagcagcggtccttagaatcaacatggagaaactgctgcaagaaaacttcctccaacagtaaggcaccaaccctctnnnttggaagccccgtctggcattggtgactcgtctgtnnacctgcagnnncagtagcaccacgttgcttactgtctgactttcgaatgtgcaacactctgcgccatgcattactgttgcnncacctatgcgttgctgtgtnntccgaaccaaatgnngcgaagccccactttgcttatggtgcattgggcacacttctttctggaagaaccagactttccaatttctgacaaccnacctcaatgngttgggtagccctggtagagaaaatggacacaaccccgatcnccaagctcacannntcccttaaccgctgnnctgttgatgaactggatagctctggtcattccttttgatgtcaaatgtactttgtcataagagggtcctgatcccatgtgtaagggggagttcacttgccactccccgctcatttttttctaaagggagaaatatccatcttcttgctggtt

SEQ ID NO: 86397 - DNA, 653 bp, Zea mays
  unsure (1)..(653): unsure at all n locations
  Clone ID: MRT4577_178802C.1
ttggactctgtgagcganntcctacagcnngagacattcatgcttatcttgtccataagacattatctcggtccacattcggttgggtgtgtttnntctgacagaatgagagcgatacaccaaagaagaatgaaccannagctatcttcggtatcccacgaaccacgaggganncagcgaggaacggtnngcccccttgacttaggacatccatcctttggatatcggtnngctgcttgacactccattctattatggacannaaaacaatcccttgggaccagcacgaacagtacccgatatcttttgctatcagagaatgaggggcattggagggaggcgatgctcgnnctcgcaatatgcagagaaccggcccccttgcaaatgaaaccccgaactgcattcnntatgtagtactcttctgtggtgcctcnttcgttggcactctttgctttggaggggggcatnncttgctgggaatgggcagcgagaacacgctttacgttgtaagcctccgtactgggtcagtattaattcccttagatgcaatcgttcgttgcaagtgcttgctggcttgaccttcttgctccatccagaacaactggtagcaagtctgtatggcgcgcccacgctacagaactctagattatctt

SEQ ID NO: 86398 - DNA, 461 bp, Zea mays
  Clone ID: MRT4577_178803C.1
ggggggtttttttttttttttttttttttttttttttttttttttttttttttttttttttttttttttttttttcctttcttgccgtttaaaaaacacaagggaaggggcccagggccaggcacaagcccgggcgcccaacaaaatgggggggggggggggggagcctctccaaaaaaggggaggggaggccaaaccccaaagagagggcccaaaacaaaaaggggcacccaggccgcggacccggaacagaaacaaggggcgacggcaaaaccaaagggcgaacccgaaacaaaaaagccgcaaagggggagggggggggcaaaggcaggcggctcggagacacccaagaagggagggcgcccgcgggggcccggaccacaagggaaaggcccccctcaagggccgcagggggaaaaaggccgccccggtggggacctcacggggccgccccccgcccg

SEQ ID NO: 86399 - DNA, 228 bp, Zea mays
  Clone ID: MRT4577_178804C.1
attcggctcgagatttcgatgcctccatttattctgccctccaggcacaacaacaacccaccccgtcgtctacacgcgacggggagcacacaacaaagcggcgggccgacacggaacaactacccaaacgcctcagggctgcccagaggacgactttgagcacttcacccaccgcggcgcatgtgacaacaggcacgagccgtcgtgctccacacgagacaccggcca

SEQ ID NO: 86400 - DNA, 352 bp, Zea mays
  unsure (1)..(352): unsure at all n locations
  Clone ID: MRT4577_178805C.1
ttttcgagattatctcatatctaactggacttngtgggcgcgcaacaacttatttagaatattttacaaaacacnctttccnccntcttattgttcatatacaaaatgcaatacttcaaccaaatccagaccatttccctaaatatcaatagcaaccaccagtcattccacactgcttcaccccaaatatcgcttaccatctccatcataccttcaatagtcctcaatcgtcgacaattcattgtgctacaacacatacaactgctgtcacaaacaatagtttcctaaaaaaacaataaccatagcctttcacttttttacaaaatcctccttttacatgaaaaactcatac

SEQ ID NO: 86401 - DNA, 191 bp, Zea mays
  unsure (1)..(191): unsure at all n locations
  Clone ID: MRT4577_178806C.1
aactcnacgggcgaccaaggaaaccaggatagttttgattcttgtagtagccaccttgctcgcttaccactgggaacgatggttgacccggaccaagggtatcgggtgaagctgacccgcagggggctggcgccacctgattctgcgacacctccctagacacctgatgcaagttctgatccaccgcgcgc

SEQ ID NO: 86402 - DNA, 1362 bp, Zea mays
  Clone ID: MRT4577_178807C.1
atggtccagatcgtcgagcaccgtgacttcattcccgaggacttctcgatggaggaagaggctgcgtcttccatgccacgggcctccaaccgccctgcgcttgacatccagggctccgtcaagggctgctcctggggcgctgtctgcatggcctcgccgggggccatgaaacagtggtgtgacgatgtcgaccgtgtgctcggcatggcgcattctggctcagccagacctaggcctcagtcattctggcgtcaacatgaggcatcggcatcagtgcgctcaccttcaatgaaggccgcaccaactgaggacctgcgggtggagctcaaccgttggcatgcgggcgaggatgcctcaatttctccggagagacctgatgacctgcagaaagaactcaatcgcaggcgtgcgggcgaggacgcacgagtctctctggagagcgcgcgtgagcgccgactaaacttcgagggtcgcaacctcgaccaggacttcgctccgcatgcgccacaaactccaaggggtgctcgaacccaaacgggtgtcccattggttggtgtaggctgtaccgcactagcggaccacctccacgcggcgacttggccgcccaagtttcgaccacacctgccagagaagtacgatgtgaactttgccagtgcttatcagcagcatggtgtggaggctcatctccatgttgtaagacaagaacccggggagactctccaggctttcatcgctcgcttcaccaaggcgccggaacgagcgcggcaagcgcccacggccacagggaggcaacaatgggtcatgccctgtgcacctcaacagtcgccacagggcctcggaatgccacgagatcatcaagctcgcgaagtgcgtggcgcctcggaatgccgcgagatcatcaagctcgcgaagcgcgtcagcgagcggcgcgacaggcttccaaagatggctcgccacctcgtcgccgacctggcaaggagaaggtcgatgaagtcacctgagggggtcctcaaggacgtcttcaccgaagattctgactccggtgacaacaacgaccgccgcaagaagctgtatgtgatgtatggcgggagctgggagctcacctcccgtaggaacgtcaagtccctgcgccgagaggtcctttcggcggtcctaggggtcccgaaggctgctccacatcagcggtggaggagcaccacaatctccttcggggcatccgactgccccgacaacatggcaggggccgatatactaccgcttatcaccgcccctgtcattgccaacatgcggctgcaccatgttctgattgacggtggggctgggctcaacgtcatcagccatgctgcattcaagcaattgtag

SEQ ID NO: 86403 - DNA, 828 bp, Zea mays
  Clone ID: MRT4577_178808C.1
cattgggtacctcgaggccggccggggttcgtttccccttccgctgcacatagaaaagcacgagcttagattttttccccccaagtggctggtggctagccaagcgcccaagccatggcgacgagcgtgccagagggattgctcggcgagccttcttccccgtggaaggtgcagcaactgctgccgctgtgcgcggtccttgccgtcgtcgtcgcgtggtgtgccgcgcgcgcggcggagtgggcgtggctgaagccgcggcgcctggaacgggcgctgcgggcgcagggtatccgtggcacggcgtacagcccgctggccggcgacgcgccgctgtccgatcgactcgcccgcgaggccaggtccaggccgcccctaccgccgggctgccacgccatcgtgcccagagccatgccactcgtccaccacgccatgaacgagcacggcaagacctcggtcacctggttcgggccgacgccgagggtgatcataaccgagccggagctggtgcgccaggttctgtccaacaagttcggccacttcgagaaggccggcttcgggcagctgacgcggctgctgcactatggcgtgagcacccacgagggcagcaaatgggccaagcaccgcgggatcatcaaccccgctttccatttcgagaagctcaagcgcatgctgccggcctttgcgtcgtgctgcgccgacctggtgagcacatgggagcgtctggtggtcgcggccgacgaagaccatgcgaggtggacatctggccggagatgcagaggctgacgggggacgtcatctcccgcgtcgcctttggcagcagctacc

SEQ ID NO: 86404 - DNA, 578 bp, Zea mays
  Clone ID: MRT4577_178809C.1
ggattgggttcctcgaggccggccggagtcaccaccccaggccagccgccacgcttagccgggctaatctcacacggcgcgcacaattctggaactctgcctcgcactggctttgtgcaatccaaccgacgtcatatcacttctaaatcctacccctggacactcgcgcttgcacgcaagggcatcgcgatcgaattgagactctgagcggtcgcagtgagctccagtcgctcgtagagacaactacgtcagtgacgttgcactcatcgtaggtcggcgaggaagaggagcggggtgcctatggcctcgcgcggatatgacggcgacagaggtggctgcgctgctggacttgaaaccgcacccgtagggcggcttctacaccgataccttccgcgacgactccataaagctcaccacgtcacagctcccgccccactacttggcaaaacactgctgatagcaccgcaatctatttcctacttccacgaagtagagaataccgtctccaccgcatcccctgtgatgaacactgtcacttctacatggaagagacctccaccctccttcgagcttcacga

SEQ ID NO: 86405 - DNA, 295 bp, Zea mays
  Clone ID: MRT4577_17880C.1
aagagctatgacgtacgctgcacgcatgacgtgagctcggtatcacgtcgtggagcggtcgtccttttttttttttatttgtacactttttttgggtgggggagagcaagcaaaaactaaataacctcactggcaagttaggttacttgctggccggccttaggggaagcgcttacattttattaagaaacagcatgttcagggttgctccgggctgtgcaagtatggagcatgtttgttctttcacacacgagcctagcaacttgagtggaccccccccttccaaattaccttt

SEQ ID NO: 86406 - DNA, 663 bp, Zea mays
  unsure (1)..(663): unsure at all n locations
  Clone ID: MRT4577_178811C.1
aggtgtttaaannnnnnnnnnnnnaaaaaaaaaaaaaaaaaaaaaaaaaaaaaaaaaaaaaaccaaaaaaaaaaaaaaaaaaaaaaaaaaaaaaaaaaaaaaaaaaaaaaaaaagaaaaaaaaaaattcacccacctcgggattcgggacctcctcggtgggccttctcaatccctttcgcctttcctccctcctctctaagtttttctcgggcctccctcgccaaaaaagtaaaagggaaagccgccaagttcgaagccaaaaacgttgaacgccgccgccggcaatgtcggggaaaacggaggggagttccaccgagtcgtccggggcctcggggttcggtaaaaagaaaaccgggttcgccctaaccctttgcctccggggttccaacccgggcggttcctccccgttcgcggggccctccaaggttgggccgtaaccaaaggcgcggttgggggggggccccccggggaggtcaaaccgaaaaaacgggttcgccaattccagaaaggccaaccggtaagccagtttcgggaagggggccgtcaacgggggggcctacctgggaaaggggaacctccaggggaaggggggttacaacaagttcctccgggggttcaagaacaagttcttctcccacttcaccatcaggaatttccccaa

SEQ ID NO: 86407 - DNA, 577 bp, Zea mays
  unsure (1)..(577): unsure at all n locations
  Clone ID: MRT4577_178812C.1
gttggcttcanagttgccctagtctattgatagaagcagtattttgtccaagagtacctctcggtggaggatatagttcatatttatgattggttgagctttgctttggacgaaacgaaacataaggtgaatattcacagttgctgaatgatgcaatcggtctagggcatctttggctcaacagttcaacttcttcgaccagtcctagtggatctttagtagaaagcatttactttggctttcccgtgacagacaaggctggtgatgactgacaagagaacatatataccagggacaagattatgttggcaagcagaattattgaacaaagctggccgggtagtacatgtgcagtttgttatgacagctcgggttatctacttatctatacagctttggctctagacttgcctgcttgggcattcaagtccattgacaaactgcgtaaagcttttcgttggaggggtggaaaggaagcgaaagagcttggcctaaggtggcctgtcctaaggaactagggggcctttgtgtgcttgatctcaagaacatgaactgggctctcagaaatagatggctt

SEQ ID NO: 86408 - DNA, 273 bp, Zea mays
  Clone ID: MRT4577_178813C.1
ccccaaatagtgttttcaggttccggagaccaaaaaatttaaacgaaatttttttacagtgtttttacaaacaacccccccagcccccaaaaatccttaaaaaataggggggggcggggccaccccatcaccaccttgaataattttgggggaagggcgggtttaaaaaaaactgcggggcccctgactgtccttaaaattttcctaagttcctatgttctcggggggccccctggttccctcaactgcgctagggggggctcccagccaaag

SEQ ID NO: 86409 - DNA, 376 bp, Zea mays
  Clone ID: MRT4577_178814C.1
gggggactaaaaggtggcttataaaaaaaaaggttcaagacttcaggaccacacttggcccaaaaaaaaattagacaagaccaattttcagggggagaaacttgcccacaaggccaaaacttaaatcttaaagggggacctgatgctgggtcgcgcggggcccccccaacaaggccacaaaaaagcaaggcaggccccggcaaagaaggccacaacgcgggccaagaacaggtgggggttctcgcactcgggcttcgggaggaaaaaaacgggctcccctccttgggactcgagccacgccacgtccccgggccacgcgctggccgccacggtttcatagtacggccggccccccacggaaaggggggcctttttc

SEQ ID NO: 86410 - DNA, 317 bp, Zea mays
  Clone ID: MRT4577_178815C.1
gatatttaaaatctatactactatattaagatagtagagtcaacgtccacactctggttgccctcgcctgaccccgcaccctcccacgcgcgcacatggaagcagcccaccagcccccaccgtgcccctcccccacgaccgcacaggcaccgtcccccgtcgcccccgccccggatctcgcccccgctgcggatcccgcgctggctctgtgcgggagtgctagcggcgccttcctccggctggacgcccccgaagcgcccaccgccgaaggccacacgccttctaaggctgagagctaggggtccttcacccaggac

SEQ ID NO: 86411 - DNA, 723 bp, Zea mays
  Clone ID: MRT4577_178816C.1
gggtacctcgaggccggccgggctgcgagcacagagagagtgggagagccgccactgctctctcgtctctatccttcagccacaactgggatttttttgccatcttcctgccgagctccctgcgcgtgctgccgcaagaccctctgcccggccaccgtcgagctccctggctcgcctgaccgcgcccctgcttcccctccctagccgtgcgtcttccctgctcgcccagcttggtttgcgcccaacttccagcgccgcagtcgtcctctctgctctccacgcgcggagctctccccccagctcctccctgccgcgttcctgctcggcgcccatctccatgtgctctgtgcgcgcgcgcccatatcccctgctcctccggcgtcgcggcttcccagcttctgccagccggccgagctctctcgccaagaccccatccgaagctccctggcttgactctgcccagttcgtgccctgctcgcctctgcgtcgcgcgctctccctgctatctcccatggcgctctctccccgctcggcctccggctccggcactgtgccgagctccctggccatcgcgcccatgtcggccagagcttgctcggccgcggtctcgtcccggctccctgctgcgcttgtcctggcagccgcgcccagccgaagcccctttcctgcgagctcctccctgctagccgcaagctaccgagctcctatctcccgtgcgcgcgc

SEQ ID NO: 86412 - DNA, 329 bp, Zea mays
  Clone ID: MRT4577_178817C.1
ccaaaaggcaacatagttttttaaacaaacaataaacaatgacgctggggttggaaaacagggccattggccttattcaactacaagcaggcccatcgtttattacaagggtatagcaaaaaaggggccgccgaaaaaaacagggggcccctccagccctggggactaaaatagggggggcaaaaaaaagaatagcgggggggaaaaatctaaaacagggggggaatctacaacttccggaccttaaaaaacatttggcggccattattggtttacccaaaatctacaggggttcaccgggccccattttttaggtgggggaacccagg

SEQ ID NO: 86413 - DNA, 350 bp, Zea mays
  Clone ID: MRT4577_178818C.1
acagttaagtcttttgcattcaagatctttattctataacacatcacgcaatcaaaaatgaatttatgaatgaataactctaattatgaatcttctgattcctctgctttttgaatgaatttttcattctctgccttaaattgaaaataactaaacatttcttcttccaaaggatgcatttctcctggtataacaaaactgtgaagtggaggtccaaagtccacatttcgtaattcagcaaaagtaccggaaacaatcttttgtgtgggttggccaattcttgctaatccaaagcattttgtattctcatcatatactttttcatttcgaagagattcgacttcgagtaa

SEQ ID NO: 86414 - DNA, 669 bp, Zea mays
  Clone ID: MRT4577_178819C.1
catgggtacctcgaggcgggggatggcacgagcccagcccccaaacagcctccaggtctagctagggtttcgtctccgccgcttgctctaatcctctcccggcacgcgacacgcgagggcgcagcgtttatggcggcgacaccggcggacgcgaagaccgaggccgccaagatggacctcctcgaggacgacgacgagttcgaagagttcgagatcgaccaagaatgggatgagaaggaagaaggcaatgaagctgtccagcagtgggaggatgattgggatgacgacgatgtgaacgatgatttctcgctgcagctgaggaaagaactggagggaaacaacgcccagaagagctgaagtactatttctccagtttacaaatgatccttctatgccagctacttccggaaatcggaacctttatgtgatttgtgctgctgggagcaatcgaactctggagtaagaaagtaaccataccagtgatttctaagtatgaacggcagaaagttgatggacatcagtcggcaatttaaaaaatatctcagttgtggttagaatatgccacagttcttatcttatttacaactgtttttcccttctctgccaacctccgtgctcccacggggattgcatgtatcttttttgaaaaaaaaaaaaaaaaaagcggcc

SEQ ID NO: 86415 - DNA, 851 bp, Zea mays
  unsure (1)..(851): unsure at all n locations
  Clone ID: MRT4577_17881C.1
ggccggccggggnttgaaaagccaaacaaaattgcttagccgcgctgcctctgtgtccgcgcgatcgtttaattagggtttccggatctgctctgcgtcgccgccgaccaacctccaccgcgcgacgccatggacttcgacgagtacgagtatctggagaagacggtggaagcgttcgcagcgccggccaacggttcgtcgccgcccgggtcggggtacaaggacaaggagcgcagctcacgccgccgctcaacgggcggtgacgaagagcgcgacaacgtagaacgcagatcgaagcgttctcgccccgaggaaggccgcgaccgcgatagagagcggcacaggtaccgcgacggcgaccggcaccgcagcagtcgggagcggcgggaccgtgaccgtgacgtcaaggagaaagagcagggcagggagaacgacaaggacaggaggagccgcgaccgcgaacgggagaaggaggagagggagaaggataggcagcggaggagtcggagccggtccgagcggcgccgtgatgacgaagagcgtgatcgctaccgtgaacgcgatgtcagacgtaggaaagaggaagttgctgaacctgaagttgatccagaaagagatcagaggactgtgtttgcttaccagttatctttgaaggcagatgaaagagatgtatatgagttcttttctagggctggaaaggtccgggatgttcgcctgattatggatcgaaattcacgacgttctaaaggtgtcgggaatattgaattctatgatgccctgcctggatatctgccgataactaagattggtcagttgatttttggtcaactattgatgtctatgccttcagt

SEQ ID NO: 86416 - DNA, 612 bp, Zea mays
  Clone ID: MRT4577_178820C.1
ccggggcacgagccccagcccccaaacagcctccaggtctagctagggtttcgtctccgccgcttgctctaatcctctcccggcacgcgacacgcgaggtagggcgcagcgtttatggcggcgacaccggcggacgcgaagaccgaggccgccaagatggacctcctcgaggacgacgacgagttcgaagagttcgagatcgaccaagaatgggatgagaaggaagaaggcaatgaagctgtccagcagtgggaggatgattgggatgacgatgatgtgaatgatgatttctcgctgcagctgaggaaagaactggagggaagcaacgcccagaagagctgaagtattatttctccagtttacaaatgatccttctatgccagctacttctggaaatcggaacctttatgtgatttgtgctgctgggagcaatcgaactctggagtaagaaagtaataccagtgatttctaagtatgaacggcagaaagttgatggacatctgtcggcaatttaaaaaatatctcagttgtggttaaaaaaaaaaaaaaaaaaaaaaaaaaaaggggcggcaaaaaaccaaaaaatgagagctttgcgttgttaccactgtt

SEQ ID NO: 86417 - DNA, 273 bp, Zea mays
  Clone ID: MRT4577_178821C.1
gccaaatcatttttttaatttaaccggtgacctttattgacatgtgacattttttttggcaacggctttaaacgtggagtttagcatgaacttaaacgagcagcaagggttttgcaacaaagggaaccagattacctaccacaaacctccaagagaggaggggaagacacacccacacacgagcgaggaggggggtcatattcaaaaaaaaaacccggggcgggcggatacccaaaacgggtcgaacaacaaaaaaacaaagggcggagaccc

SEQ ID NO: 86418 - DNA, 585 bp, Zea mays
  Clone ID: MRT4577_178822C.1
acctcgaggccggccgggaatcctcttctcggacgcgacacgtgagggcgcagcgtttatggcggcgacaccggcggacgcgaagaccgaggccgccaagatggacctcctcgaggacgacgacgagttcgaagagttcgagatcgaccaagaatgggatgagaaggaagaaggcaatgaagctgtccagcagtgggaggatgattgggatgacgacgatgtgaacgatgatttctcgctgcagctgaggaaagaactggagggaaacaacgcccagaagagctgaagtactatttctccagtttacaaatgatccttctatgccagctacttccggaaatcggaacctctatgtgatttgtgcagctgggagcaatcgaactctggagtaagaaagtaaccataccagtgatttctaagtatgaacggcagaaagttgatggacatcagtcggcaatttaaaaaatatctcagttgtggttagaaaaaaaaaaaaaaaaaaaaaaaaaaaaaaaaaaaaaaaaaagcggccaagaaaaaaaaaaaaaaaaaaaaaaaaaggttctttgggttgttaccactgtt

SEQ ID NO: 86419 - DNA, 904 bp, Zea mays
  unsure (1)..(904): unsure at all n locations
  Clone ID: MRT4577_178823C.1
ttgggaccctcgaggccggccggggaagcttacacagttttttttcagtgtcacagtatttttgatttggcttttgtttttggcacgagccccagcccaactccgatcgcacgagccccagcccccaaacagcctccaggtctagctagggtttcgtctccgccgcttgctctaatcctctcccggcacgcgacacgcgagggcgcagcgtttatggcggcgacaccggcggacgcgaagaccgaggccgccaagatggacctcctcgaggacgacgacgagttcgaagagttcgagatcgaccaagaatgggatgagaaggaagaaggcaatgaagctgtccagcagtgggaggatgattgggatgacgatgatgtgaatgatgatttctcgctgcagctgaggaaagaactggagggaagcaacgcccagaagagctgaagtattatttctccagtttacaaatgatccttctatgccagctacttctggaaatcggaacctttatgtgatttgtgctgctgggagcaatcgaactctggagtaagaaagtaaccataccagtgatttctaagtatgaacggcaggaagttgacggacatcagtcggctatttaaaaaatatctcagttgtggttagaatatgccacagttcttatcttaaaaaaaaaaaaaaaaaagcggcagcagacatattcgcagtcagcgcctaacgggcgccatcttctcttgatcttataggtcgtgcttggattagtgtagcgagtcagtataaaggcctagacacgatattatcatcagtccgtacctggcagtagcncggtatgccttagccgaagttatgcttcggtcatgttatttttaaaaaaaatgggaaaagaaaaaaaaaaaaaactcgagggggg

SEQ ID NO: 86420 - DNA, 251 bp, Zea mays
  Clone ID: MRT4577_178824C.1
ggtatgtaatttttttagcattagtacagtacgtagaaccagggaattcctgatcccttgctgggtgattggtgacattccatgcctgaaccttgtgatctaaagagaacatatcagtctaaatcagattggacactagatcctaatctgaagcaaatttgtcgaagcaattactctcaccctagtaacggctgtgaattactcgcacgagttcgtcgaagcaattactctcaccctagtaacggctgtga

SEQ ID NO: 86421 - DNA, 413 bp, Zea mays
  Clone ID: MRT4577_178825C.1
aaagcctgggcccccacccccttttatttttttttggggggcccccccccccccaacaaggggcggggccgcccctcttttttttttttttttaacaaggggcggggcggggctaattgctttaacggacccagggggggcccttgggaccaaaatagccggggaaaacctttaggcctcgggggggggggggggcccaccccccaagcttgccccctttggagggggggggggacaaatcccccccgtccccccactggaaaggggggatgtaaccccttgggcaaacgggaaaatcccaacaacccccccgcctgggggggcaaaccgggggctcgacccggcttaaaaaccaatcccgggaaacaaaaccgtccccggccgggaactccttggacttttggggggggggg

SEQ ID NO: 86422 - DNA, 647 bp, Zea mays
  Clone ID: MRT4577_178826C.1
tcatcggtcaaaagaggaaaggcttgcggtgtatacctaggcacccagagacgaggaagggcgtagcaagcgacgaaatgcttcggggagttgaaagatcgcacgagccccagcccccaaacagcctccaggtctagctagggtttcgtctccgccgcttgctctaatcctctcccggcacgcgacacgtgagggcgcagcgtttatggcggcgacaccggcggacgcgaagaccgaggccgccaagatggacctcctcgaggacgacgacgagttcgaagagttcgagatcgaccaagaatgggatgagaaggaagaaggcaatgaagctgtccagcagtgggaggatgattgggatgacgacgatgtgaacgatgatttctcgctgcagctgaggaaagaactggagggaaacaacgcccagaagagctgaagtactatttctccagtttacaaatgatccttctatgccagctacttctggaaatcggaacctttatgtaagaaagtaaccataccagtgatttctaagtatgaacggcagaaagttgatggacatcagtcggcaatttaaaaaatatctcagttgtggttagaatatgccacagtgcgtatcttatctacaactgttttccccccctagggcc

SEQ ID NO: 86423 - DNA, 361 bp, Zea mays
  Clone ID: MRT4577_178827C.1
gaagataaatttcttttttattattttttttggtcgtttgttttcacttgcaatttttttacactgtgtcaaattttacagcaacgatgcataaatgcagatttctgcacgttaaaaggaaacaggctgtatacccccttggcaagctacatcgaaagaataaacctcataaactcaaagaaggaaaggatttacaggagagaacaaaaaccttctcctctatatgacacccaacctcctcgtgtccctgccaaaagaacgtgggaaaccagtgacaatgcacaggacaaagtacattagatgggtggtgagcaccacaaacatgtctttaaaagcaacactttatggagcttggcctttg

SEQ ID NO: 86424 - DNA, 260 bp, Zea mays
  unsure (1)..(260): unsure at all n locations
  Clone ID: MRT4577_178828C.1
cantgatgctgagcgggcgtgctatcgcgcaaccctggcccggggagctcgacggcgtcgatccgcagcgacctcagccacggctgctgctccgcgctagtgttccgttccgtcccgctctccggaggcttctacgccatcagcgccgcatacgtgcgctctccgcccgcgccagcagtcgcagatatggacccgctcacctcgctctccctctcgctgccggggctggaccagtctccgtcgggcttccaccacgacag

SEQ ID NO: 86425 - DNA, 381 bp, Zea mays
  Clone ID: MRT4577_178829C.1
aaaaaaaaaaaaaaaaaaaaaaaaaaaaaaaaaaaaaaaaaagaaaaaaaaaaaaaaaataagttcttaaatacgaaaccaccctccagggcggagttttttgtgatttccttccctcatgacgggtcggtgggtccttgcgtctatttgggccggccttggccctctttttaggcagtttttctaattggctggtggtcgttttttattcgtcgtgggttgcaaaaaccctcgctggagctacccttaataaatttgctggaaatcccttttttttccgctggttgtgtaattgaggaggccggccccttatcgctcgttccttacaaattgcgcacccttcctggctggatggacgttcccctgtaggtggcgcattaa

SEQ ID NO: 86426 - DNA, 489 bp, Zea mays
  Clone ID: MRT4577_17882C.1
cccacgcgtccgtaatgaactcatgttcgagagtgtgagctgttttgacgaccgactttgcaaaggctcgtggataaatttagtcttttgtttgacgaaagggactctagcggttaaggcttcaccatagaatggataaccttcatagacgaaaatgcattctttttttgaagataagtcatttctacatagccaaagtgaccagcataaggtggtcgcccctagtagaaaaagatctttcaaattaatgtcaaaatcatgtagtcaatccctaaatgtgtgttccacactctttgatttcgttttcctaaagctaaataaataattgtccataacgagtgaaccatgaggcatcaaaaaacaagtggttagttgtctcgtttttatgacagaatgatatgataatacaagtgattaggttggttacccgcaacaagtcatgcacataatgatataaaattgaaagtgattaggttcgttacctgcatg

SEQ ID NO: 86427 - DNA, 116 bp, Zea mays
  Clone ID: MRT4577_178830C.1
taaatttccgggatcgtcccacgacgtatcgttaacttattaatgctacaatatttctaatctactaatggaatctaaaattttttcgctttcttatttaatttggtctttttgca

SEQ ID NO: 86428 - DNA, 825 bp, Zea mays
  unsure (1)..(825): unsure at all n locations
  Clone ID: MRT4577_178831C.1
gcgaacgcgaacttctaggagctgcctatagatgacacccccgcccccgcgtagcttcgccggagggcgccgcccctcccgcctgggtgcgtcgtcgcgctcacgccccacgccgggtagctttaacctccggcgccggctcggtatatcgccgcccatcccccaccctcaccccagacgccggctcggcagatcaccgcccctcccactgggcaagccgttgtgtgcacgccccacccgcgtagcttcacccccggcaccggctcagcagctcaccggccccacccgcatagcttcaccccctgcacgtggctcagcaggtcactgcagtgcccctgagacccggtgccgtcctgttggatcgaagcttctagatgacgccagatggacagcagaagcccaatcccctccatcgcttcatcccgttgagttgcatatgccaccagaagccccatcccctccctcgctcaagtggcatcgcgactctgcggtaagggcggcagctcatccacagcgatgacggtgacgtcggggacgcgggaggtggcatcagggacgtgctgtccgaaaaggtgcagggcgtcattgagcgtatgatcgaagtcatgcgtagggtagggacccaggcgtcaacctctccgcccgcagattgacgtcccgctccggtgttgagatgttgaagtttcaggcctagactgaaatgggagcgccattaaggatctaatgtaccacatgatgattcaatggatttgcgcaatgtaatttggctatctcctttgccatcanatggatctttggacttctgtgtcgtgagctattatccng

SEQ ID NO: 86429 - DNA, 576 bp, Zea mays
  Clone ID: MRT4577_178832C.1
attactccccacattgagaagctcctcctccagatatcacaccacgccggaatctcccactccccaccagacgtcgatcttcaatataatcctggatggaaaaaccatgagcctccaggcagaaagcaggcgacaccatctactatgctcaggacatgatccatcataggaagggatgccacctgaacatgtgctcctgatgtctgccggaaatgatatggaagatggacgcacccttgctgactatctcctccatcaagagtctatcgcttcgcctcgtgcttaggctccgcaccggcatcagttacacctctatgcgtgcgctctctcccaagcacagacacaagactatatgctctgacgctattgctatgcactgactgcaccctaggtgtggctgctgtcgcaagaagaaatgagggcacagaaaccagctgaagctcgaaaaagatgcagaactgaggtgctgctcctagccatgtttcatgcacaatgtggtcgctgcattgctgacgtcggacgaagaacactgccagttcaactatcaaactgcacttatggtatgtatcaccttgg

SEQ ID NO: 86430 - DNA, 179 bp, Zea mays
  Clone ID: MRT4577_178833C.1
cttacgcttacgctgtcgcgcccgccacgacgacatcgatttttcggggtaccagctgatgatgggccatagcgggaggccttccgtcttcaccagtgactaggtcttcattctgccagaccggctccacgctcattcttggagtgtcagcccactgcgcgttggttgatggactgaga

SEQ ID NO: 86431 - DNA, 471 bp, Zea mays
  Clone ID: MRT4577_178834C.1
ccacgccgtcccgaaaaaaaaaaaaaaaaaaaaaaaaaaaaaaaaaaaaaaaaaaaaaaaaaaaaaaaaaaaaaaaaaaaaaaaaaaaaaaaaaaaaaataacaaacacaaaaaataacaaaaaaattaaaatataatataaaaaaaaacggggtgcccttttctggggtcccattttcccctcccctgtcctgggggggggggtggctttttttttttggccccctctattcaatttcccctgcccttcgctttaccaccgtctttgccttgggaaaccccctggcgttcccccctttaaaccctttcgcacccttccttttttctggggctcgctttttagcgaaaagtcccccccctttggtctttcccttcctttccccgccccttttggaattggcacccccctttctcccggtcttttaacccccttggtttggtttgttccccgtaggggcccctttccctttc

SEQ ID NO: 86432 - DNA, 306 bp, Zea mays
  Clone ID: MRT4577_178835C.1
tggccaacagacctttaaaacctatcaaaggcccgcgccgtcgacaacaaccgcgacaaggaaagaagcatgaacgcaacgcccaagtcgaagcgcaaccgcccagagaccttatctaagaccaagaagaagtccgggatttatttttaggggagggtaggggccgagataaaagatgctgactacaaaaacagaaccacctatgtgtggaccggcgataacattaggaaggagaagctctatgacctcaaggagcaaatcaaggtttctaacaggaataaaatagctagaaaaaagagatgcaaa

SEQ ID NO: 86433 - DNA, 207 bp, Zea mays
  Clone ID: MRT4577_178836C.1
cccacgcgtccgccaggatcattgtagcaaggaaggaggaagccatggtgtaaatgggcaagcaaggtatggctatctattgctccctgagtctctagcaggttgttttgttaccagattgtggtctccctgggttgggatgtggttggtacaactcttgcacgcttatttcatgtgtgaactactgcttttcatgttatcatcaag

SEQ ID NO: 86434 - DNA, 270 bp, Zea mays
  Clone ID: MRT4577_178837C.1
atggggatggagtggaagcagaaggtgagcctcttcgacgtgatcgacgagacctccgtccccaccaagcttggccatgccgcctccaacggcgtcgccgccactgcgacttggggcaactcgtatgtcaaccggtggaatgggcgccccacacgaacgacacttcgagatcctcgagaagcatcgtgcgctccctatatggcagcaggaggatctgtttacatgggagttgaattttgcatgaagctctatgcagtgtctattgtttga

SEQ ID NO: 86435 - DNA, 386 bp, Zea mays
  unsure (1)..(386): unsure at all n locations
  Clone ID: MRT4577_178838C.1
cttcatgtgaatatgtagtggacaccgaatcggcacagcagaggttgagtcagctttagtgtcacatccacagtgtgcagaggctgctgttgttggtgttgagcatgaggtcaaaggtcaaggaatttatgcttttgtaactttggtggatggtgttccgtatagtgaggaactacgaaaaagcctcataatgacagtgcgcaaccaggtattttgtttattttgaatgttatgaccgaagaggtcacattntgtacagacaaatggtctgtacccttgtgctgaatattatgttcttggtacttggttggtatgcgatagtcctcataaagttatagattgtgcgttagattctattaagtttcttatgtgcctagaaattttga

SEQ ID NO: 86436 - DNA, 435 bp, Zea mays
  Clone ID: MRT4577_178839C.1
acctaatcggcacagcagaggttgagtcagctttagtgtcacatccacagtgtgcagaggctgctgttgttggtgttgagcatgaggtataggctggggttactttttatctcccttttcaagcctcattatctttggtatcctaccatatatgattcataattattaaattatcttcaggtcaaaggtcaaggaatttatgcttttgtaactttggtggatggtgttccgtatagtgaggaactacgaaaaagccttataatgacagtgcgcaaccaggtattttgtttattttgaatgttatgaccgaagaggtcacattttgtacagacaaatggtctgtaccctgttgctgaatattatgttcttggtacttggttggcatgcgatagtcctatagagttatagattgtgcgtagggttagattcttgaag

SEQ ID NO: 86437 - DNA, 535 bp, Zea mays
  Clone ID: MRT4577_17883C.1
aggcgctcatcgtcatccaccgccgcccgcgaggtccccctccagccttcactgggcgaaggagaaggagaagaggcgagagttcaggtgaaggaggcgacggagcggctcgggggcgagtacagcgggagcttgcaccccaagtgcacgcacctcgtggttcagagctttgccggacgcaagttcgagcatgcactgaagcatggtccgaggaatgggctattcctcgttacgctgggttggtttgtggactgcgtgaggaggaacatgaggttggatgaatccttgtatgccatcaagagcattggggagaatggtgtgccgcccggggagttcagccgccttgttggagttcctgttaacgagaagtcttgccttccaccgttgatatttcaggacaaggcatgctcagatatgacccagaagcattcgctccagactcctgggaacggtggtggtcatgatgggttggtttttatgaatgacacaatctacattgaccctgggatatctgatgagatgaggaaaaagattt

SEQ ID NO: 86438 - DNA, 960 bp, Zea mays
  unsure (1)..(960): unsure at all n locations
  Clone ID: MRT4577_178840C.1
atccccttcaattcggcacgaggggagcaacgaagacgacgacgacgtacgccacccgtaagtgagccgagagccctcgagataccatcagctagctagataaccagccagcgcgagcatggaggcggcggcggcggcggtcctgcaccggacggtggaggcgaacggcatctcgatgcacgtggcggagtccggccccgacggcgacggcgcgcccgcggtggtgttcctgcacggcttcccggagctctggtactcgtggcgccaccagatggcgcacctggccgcgcggggctaccgctgcgtggcgccggacctccgcggctacggcggcaccgccgcgccgcccgacgtcgcgtcctactccgccttccacgtcgtcggcgacgtcgtcgccctgctcgacgcgctcggcatccacaacaaggtgttcgtggtgggtcacgactggggcgccatcatcgcgtggtacctctgcctgttcccggccggaccgggtggcggcgcttgtcaacatcagcgttgccttcatgccccggaggcccagagtcaagcctcttgagtacttccgcgccgcatacggggatgagtactacgtctgccgattccaggaaccaggactcgaagcagaatttgctacgtttgacttgaagagtttcttcacattggcattgactcttcgggcaacaggttcttcagctatggaccttcgaaaaatgcaaacttacagagcaaaggtgcaagttccaaccaagttcatcgttggggacggtgacctggcgtaccatcaccctggagtgaagaggtacatccacaagggcgggttcaagagggacgtgcccatgcttgaggagggtggtggtcatcaagggcgctgggcacttcatccagcaggaaagagcgcaggaaatcagtgagcacatccatgactacatcaagaagntcgaagcttgtggtctg

SEQ ID NO: 86439 - DNA, 356 bp, Zea mays
  Clone ID: MRT4577_178841C.1
attatataaaccatctagctttaatgatagcacaacaggctaccaacaagggggggcaatatatattgcctacttatgctccttgctatttgtgctatgtgctgctactgcgaccatttacccgcaatgctcacaagctactatatcttatatttttccttcgtacctcataccatctatatctgacctttgtaaaaacccaaaacttaaaccttacagcatccaacaggcaacaacagatggcatcatacctttatcacccttgatccttcaacaatcatcagtcctattacatatgttacctttggtgaatgtaacgtaccaaaacatcacgtcacaatcacttacatcaactt

SEQ ID NO: 86440 - DNA, 264 bp, Zea mays
  unsure (1)..(264): unsure at all n locations
  Clone ID: MRT4577_178842C.1
gagagctcgaccgcncgcggacggcgacgnggggggccggcagaggacaggaacaggacgacggccgagggaaagaggcggcgggncgcgacggacggcnccncgaacaggaaccggagcacggaggcgcacncgcagcngggccgcgcggggcncgacgncgaggccaacgggagggggacccacgngaagcnccccggacccncccaccacgagcccaacggccacgacnncggcacccccgacggcgccaccnacgacgac

SEQ ID NO: 86441 - DNA, 1572 bp, Zea mays
  Clone ID: MRT4577_178843C.1
tttttttttgatttgcccacaaaaattccatatgaaacaaattattttttggattgaacatgccctaatgaaccttgggggcttttttttttttttttttttttttttttttttttttatattaaggggggaccagtgccccccacacagcacaacgcaacgtgggtcccttgaatagatcgtcagtacttcataccattcataatatatagatctgcagcactacaaacaactacaatagctcccagaccatttgagttatgtacagaagccatcaggtctctcacagctttgaaactctcagtggcggcagaccacaagcttcgaacttcttgatgtagtcatggatgtgctcactgatttcctgcgctctttcctgctggatgaagtgcccagcgcccttgatgaccaccacctcctcaagcatgggcacgtccctcttgaacccgcccttgtggatgtacctcttcactccagggtgatggtacgccaggtcaccgtccccaacgatgaacttggttggaacttgcacctttgctcctgtccatggcgccatcagttcccagttcaggtccaagcagcgatagtaatttactccaccagcaaatccagtttttgagtacacacttgcaaggtaactgacatcttcctcagatagccaagaaggtagcaccatttgcttactgtaagtttgcatttttcgaaggtccatagctgaagaacctgttgcccgaagagtcaatgccaatgtgaagaaactcttcaagtcaaacgtagcaaattctgcttcgagtcctggttcctggaatcggcagacgtagtactcatccccgtatgcggcgcggaagtactcaagaggcttgacgccgggcctccggggcatgaaggcaacgctgaggttgacgagcgcgcgcacccgatccggccgcagcaggcagaggttccacgacacgatggcgccccagtcgtggccgacaacgaacacctgcgggaggtggagggcgtcgaggagcgcgacgatgtcgccgacgatatggaagacggtgtaggagttcggttccggcggcgcggtggtgccgccgtagcctcggaggtcgggtgccacgcagcggtagccgcgcgcggcgaggtagcccatctggtggcgccacgagtaccagagctccgggaagccgtgcacgaacagcaccgccggcgcggaggcgttcacggggccggcctccgcgacgtgcatcgagatgccgttggcctccagctgccggtgcctcaccgccgccatggcgcgtgtcggcgtcgtgctccgcgccgctgctgttgaccgggagcgaggagggtgatcgatacccacttacgggcggcgtacgtcgtcggtcctgccgcttcgccatgcaatgcaaacatctatccgatccgtgaagaagcgaaatcaaatcaaacaccgatgatgagtgatgagatcaatcgatgcagtactctagtgctgtagtatacttgaaggtgtgtttctgcgagctagctatatatatgctctttcggtcagaaaaaaaaagacacaactaattgtcagttcag

SEQ ID NO: 86442 - DNA, 886 bp, Zea mays
  unsure (1)..(886): unsure at all n locations
  Clone ID: MRT4577_178844C.1
gggccggggaatccaaattccaacccccaaacggccaaaccctctgcagttcgtcgccatggttgtcggcgccttcggcgaggcgacaccgccaccggacctcccaccttcccgcgtgtccgtctcctcgccctcgccccacccccgccgacgctgcgccctcgcaagccgcttccaggagccggcggccccgcggcggcacgcatgggtttccctccagggtcgccttatcggtgccgacgaggcgtcgtgtgccgcttcagctgcaccgggcctcctcccggatgaagcggtagcgtgggagctcttcagcccgctccatcgcgtgcttctcgtcgccaccgtcgccgccgcatcctcccggtcccacgccgcccgccgcatcgaacagctacaacgctcgattcatcttagggatgaggtgctagaaagcatgcagcagaagctggatgatctgctcgtcgaaatgagctccctacaacagcagtacgtcaagtgcgatagttacatttccgaggaaagggaaattaatgagattgaaacaggtagcaaaacgataggatatggagaggaatctagatgttgtgtgtgcacgaagctagaggctgccactcctcagaaggcgaaggatctccgtgggacagatgatgctaggagtgatatgggtgattgttctagtctagttttcatggatcatgaagagcgncgtttgtcagacctctcaacttctggccggagtggtgtgtcatcagttgataccagataaattgggatagtcagctaagttccctggcagcagatcacaatagtacatcttcagaaggatggtgagagaangatgcaccatcaaggactagctgcagcagcacatgcatctagtactctg

SEQ ID NO: 86443 - DNA, 492 bp, Zea mays
  Clone ID: MRT4577_178845C.1
tgcccgggctgcgctcgtcggcggcggccccgcggcgcgcgccaatcgacctggtcaccgtgctggacgtcagccagggcatgatgggcgagaagctgcagatgctgaagcgagggatgcgcctcgtcgtggcctccctcggccccgccgaccgcctctccatcgtcgcgttctccggcgccgccaagcgcctgctgccgctgcgcaggatgaccaggacggggcagcggtccgcgcggcagatcgtcgaccgtcttgtcgtctgcgcggctgccgcaaccacggccacggcaacgcaggggcagcagagtgcgtgcatgggcgacgcgctgcgcaaggccaccaaggtgcttgaggaccggcgggaccgcaacccggtggccaccgtcatgctgctctccgacacccagcagcagcagcagcagtcggcagcgccggaaaactcgtcaaggaagcaggttgggcggtcagcggtggccccagcaacgcgct

SEQ ID NO: 86444 - DNA, 250 bp, Zea mays
  unsure (1)..(250): unsure at all n locations
  Clone ID: MRT4577_178847C.1
cagagcctcattcanctccattcgaaacaccctcggcaacccaacnncnncttccctatcgttccccaaggcctaggnatcccncggcaaacgagtgggctacgcatcgaaaggcangantcgtggcgacggcanannttcccaacggngtcgtgancananaggctccacggaagggaanaggncnntccttgngtcagnancncaaaatgggtcgggancggncgngcnaaatgtttnngggtctccc

SEQ ID NO: 86445 - DNA, 1456 bp, Zea mays
  Clone ID: MRT4577_178848C.1
cattggtacctcgagccggccggggctgccgggaggaccctgcgggcgcgctcccgtaggccgaatacccccgactgggcaatcgccgccgccgttctctccgttgtctgtctctcggcaaggcagcaactgtgctaccgccgccgcggtgcccagttcttcgccgcgccctcggcccttcggcggcagctagcacccagcaggagactggtgcagttcggtttcccaataaaatgtccggttccaagagaagcctccccccttggatgagtttttctaaagatggagaggacgattcacgcaagaagaagcatgcaggcacctcccaaaaggcccagaaagggcccgatttctccaaacttttggacggggtggtgtttgtgctgtcagggttcgtgaacccggagaggagcacgcttcgttcacaagcattggacatgggagccgaatatcgagccgattggacatcagactgcacccttcttgtttgtgcatttgtcaacacccccaagtttcgacaggttcaggcggataatggaaccattatctcaaaggactggatctttgagtctcacaagcaaagaaaacttgtggacattgaacctttccttatgcatgctggaaaaccatggcgaaaaaataaggagcccatcaaaactgatcaagatgagaaggaaacatgcaaagagcatcaaaaacaagttcaacgatctcgtgtcaagccatccacctctgatgccatggaggcaggaaatttagaatcagcaaacaaatgtttttctccctcaaaaataaagcaatgggccatggatgatttggcacagactatgtcatggctggacagccaagaagagaagccagagccaagtgaactgaaggctatagcctctgaaggggtaatcacttgtctgcaagatgccatagaatccctcgagcaaggcaatgatatcaagggagttgcagagcagtggagcttcgtcccccatgttgtcaacgagctgttaaaactagatggaggcggaaaaggtgcggctctgcccaaagagcagctacgtcaactagcaggcaagtgcaagaagatctaccaggccgagtttgctcgcgcggacatgggcgacaagaacaagggtaggcatcaaaatgacccacatgtgaccgagcaccgcaggaagaccaataccaaatcagaggatgaccactacgatagcgatgccacgatagaaatgacggaggaagagattgatttcgcgtgcagacggctccctgggctctatgcggatgatacatgatactatctagttgagatgtcaggtgtgtgaggaaggctctgttaggttgttccggattggggccctggattaattcctagccggattacttctctaatttatatagattttgataagctggaatgaatcatggctcattccggtaccaaaaaaaaaaaaaaaaaaaa

SEQ ID NO: 86446 - DNA, 219 bp, Zea mays
  Clone ID: MRT4577_178849C.1
attcggctcgagggccagtcctccagcactattctgcagacattgtgaagcatcactcattgagtcatgagccctgggaagccgagcctgcggctctgatcgcggacagagatgcacagcagatgacatgcttatgcggtctgcaattgcacaaatcaagagcctctgctagtggctctcttgcgaggcgagcatactacagaagaaactctacacaga

SEQ ID NO: 86447 - DNA, 375 bp, Zea mays
  Clone ID: MRT4577_17884C.1
aataaaaggctaagggggcaaaaacccccccagaaacacaaccttttcccttttaataaaggggggcaacattcctttttgaacaaacgggcatgggggccaaagaaaaaaaaacgaacctacgggatgcccaggccaaaagaaatcgaaacattctgttaaaaagcgaccgcaaaacccggggcagtggcaaaggctaataaaaataaaacaccttttttccaggtaagggaaaaacggacccaggaccattcagggggggggccaagtggccacccagccaggcaatgggcggccctctttttgaaaaaccttttttccttaacccccttaagctgggcctaataactccggtggccggttggctccttccag

SEQ ID NO: 86448 - DNA, 587 bp, Zea mays
  Clone ID: MRT4577_178850C.1
aaccccatcctcattgcttccggggaagaagcagaaggcaaacaagaagaataagaaagaaaaaaacacctacacccaaggcaggcaggcatgcatgcatgtccaagggtcaccacgaactaactgtacactaactagcacgaggcacgaatcatcgagaggtgatgacaaaccccaccgcagcctccaaggtcaaaccggaaggtagcggcctaacactacttcattggctactactgatcaatggcgcggcaggtgcccatgctcgctaacactgcctctagagcggtaggaggcggccagcttcttcttcacccgcaaggggcctgatctattctgcagcaccggtggctgggcatgggagcccgccgacaacgccgcgcgagggtcgcgcggcccttctattcggccggaactgtagtccatggtaacaaacggcagggagttccggtagtccaggcacccagagccagaggccccaaacccccagctcccgctcccgaagaccaggtctccgtcgtagccaccgtcttggtcggatgagttcctcgggctgtaggaatcgtcgcaggcctcgtccggatcac

SEQ ID NO: 86449 - DNA, 288 bp, Zea mays
  unsure (1)..(288): unsure at all n locations
  Clone ID: MRT4577_178851C.1
ctcctctgctcctccctcnccccctctgctcgggcgccgagctccctacgccgggtcccctctncagcgaccgccatggccgagctcagtagcgcgacgcccctgctatctccccccaacaccgatgcctttcctactcatcaatggagatctcgccgacggctgacggcctcgcttcgcggtgcncctcctcaccatcgggtgctcgccgagccgaccccactagccaccatctctagctcgccattccccctgtagcagcgcgatggtttcctctactgccacagg

SEQ ID NO: 86450 - DNA, 226 bp, Zea mays
  Clone ID: MRT4577_178852C.1
gaaattaatcagtccacaaatttgtgaacaatttattcaatcgaaaattcaagtttcgctgctgttcatttgtaattacgtccatcaaacgaaaacaaagtttccaagatccacgccaatgtcactgcttgctttttgggctgcctactgaaatctgggagatcaatgagttgaacccttggtttagcctctgcttcttccctctctttctgggggttgtatcccc

SEQ ID NO: 86451 - DNA, 304 bp, Zea mays
  Clone ID: MRT4577_178853C.1
gtgcgtttttttcttttacacactcaaatccttggagctacctcatccgaccaggccagcactcacctagctactcagtacctactactgactttactaccctcccactcccaacctccgcccttcacacccaccaacgatcgacccacctcgcgatctccgccccccggctgctccgacccgactattatgcggagcgatgactagtaccggtaccagcagcagcacggaccctgtggccgtgcgccccacggactgatcatggctgagagagtcaggctggtggtggccgccccgctgttcc

SEQ ID NO: 86452 - DNA, 389 bp, Zea mays
  unsure (1)..(389): unsure at all n locations
  Clone ID: MRT4577_178854C.1
cctatccatccctngcatnggnatngncatcnggggcagggcaagggaagctanctattggccatttatccagcagccgctctcaccagccccactctctccatctagccccctaactgcaccggncgccacaccaccccgaccggaccctccacaacaatggccaccgtcctgggcagnccccgcgcgccggccttgttgtttgggaagtactccctccgcgccgcgccggcgcctaccgacgtggagctgactgcggccaaggtgggcataatgggaagtagcgaaagaagaaggtgcaggctgagcgcgcaggcgaactacaacgtgaagctgataacgcaagagggggaggtggagctgcaggtgtgagatgaggtgtacatact

SEQ ID NO: 86453 - DNA, 2365 bp, Zea mays
  Clone ID: MRT4577_178855C.1
aattcggcacgaggtgaaatgtaagcaagcggaggggagggacacgccgagctgaagccgcagagaagctgtcgtcaactgaactccgtctcccaacgagagagagagagagagagagaggtagcacagcagcagcagggcgagcggcgccgtgtttcctgcgagcccgtccggccgccatgaagttcatgaagctcgggtccaagccggacgccttccagaccgacggcggcggcggcgacgccagatacgtgctgtcagaccttccgtcagacatcgtcgtccatgtcgacgacgcaaggttctacctgcacaagttcccccttctctccaagagcggtctgttacagaggctgatagtagaggcgagccagaacggcagcgacgaagttgccatacaagacgtccctggcggagcgaagaccttcgagatctgcgcgaagttctgctacggcatggtggtgaccctgaacgcgtacaacgtcgtcgccgcgaggtgcgcggcggagtaccttgggatgaccgaggacgtcgagaagagcaacctggtgttcaagatcgaggtgttcctgagctccggcatcttcaggagctggaaggactcgatcatcgcgctgcagaccaccgacgcgttgctgccgtggtcggaggagctcaagctggtcggcagatgcgtggactctgtcgctgccaaggctaccgtcagcgcgtcgaacgttgtgtggtcgtacacctacaacaggaagtctgcgtcctcggacgagatcgtcgaggctcgcaggagctcccaggcggttcccaaggactggtgggttgaggatctgtgtgagctcgatgtggacctctacaggcgtgtcatggttgcggtcaagtcgagggggaggatcccctccgatgccatcggagaggcgctcaaggcatacgccgctagatggctgcctgagtgctgtgacgcgctggtagacgacgcctactctggagcgtacaagcacctgctcgagaccatcgtctggcttttgccctcggacaaggggtcttcggggatctcctgtcgtttcttcctgaagctgctgaaattcactgtcctcgtcggcgctggggagctcctgaaggaagagctcatggacaggactgtgttgcagctccacaaggcctcggtcagtgatctcctgatcccctccaggcctccggcgcagaccgtctatgatgtccagctggttcagacactcatcggcaggtacatgagccatgccggggtatctcaaggtgggatttttctcaacgaccttgaccaggagatgtttgagacgaacgtggacggtgaatctttgctagcgttgtgcaagctggtcgataggtacttggctgaagttgcctctgatccaaatctctctgtttcgagctttgtggatttggcgacttccatgcctgaaacagccagaccgacacatgatggattgtacactgccattgacgtatatctgaagttgcatcccggcctacccaagatggagaagaggaagatttcgaacctgatggacgtgaggaagctgtccaagggggcgtgcatccacgcggcgcagaacgaccgactcccgctgcgcgtggtggtccaggtcctcttcttcgagcagctgcgcgccgcgggagccgccgccgccgctgggacgcccagcgccagcgtggcgcggtgcatagcgcgcctggcggagcaggaggaagaggaggagcgctggaacgacggccgcgcgctgccggagcccccgacccccggcgcgctgaagaggcagctggggagcctgaagctgcagggcgaccaccaccagggcgcgggcgacgacgggcggcgcctggtggcgcgcagcaacagcgtggccaaccagagcagccggatgtcgctgtcgtcgcggtcgcggaggatctttgacaggctgtgggtcggcggagcgaagctgcccggggaggccgccgccgcgggcaaggggtcgtcggacacgtccgggagctcgcagagcccgcggtcgtcggcgaagccgccggagtccaagtcgtccagctcgtcgtcaaggaaccggcggtactcggtctcgtaggccggggccgggggccggccggtcggcggcggaggctgtacagagaggaaggagagcctggtccaagcctaaacgtagctgctgctaactttcagagttcatgttgatctcgtgctgcctgcagtatgtggcatgcagctagaagaaatctttgttctgtcagtccagttgttctatctaatcttgagataatccctggtttctgtaacagacttggaaactatgattcagtcgaattctccatgaactgggcaatcctttttggcggcccc

SEQ ID NO: 86454 - DNA, 240 bp, Zea mays
  Clone ID: MRT4577_178856C.1
gtcaacactttcttgctcagtccgtgtgctctgatgacacggtctacctaccatgcagtggtgagcttctcgtctccactgcgcttgagcgagagccaatggcaacctccgacctgctgaccggcacattatcgatcctcatccgatccgcctatggaacgtccggaacagatggagcggatgtggacccgatctacaagctacctggacagtctgatctcaatttctgctcgtactggg

SEQ ID NO: 86455 - DNA, 697 bp, Zea mays
  Clone ID: MRT4577_178857C.1
ggggtgtttccacaggcccagacccccccaaatccacgagagaaattatccccaaccaaccattcgacgagatctcggaggcgttttggagctcgaggtgtagctgtgttatgattcgcgtgattccagggggatttggtctagggagattaatctcgaggttgagcctcacaattttatagcctttgactacaacaaggaaagaggagtttctttgcctgataattgctccagcgtttgcattgagggtactctcatccagacaaattccttatctcactgctggaagactaaaggtttgaagagcctcaacaaattggagaaacataaatccagttatggatctatttcgagagactctaaccctgaacaagaagttgaagccagcgatgaggcatctggcccgacctgttgcgtcaggtgcttcaccgatcttccggctgtgttggtctacgaggtccttgcacgcctcgatgcaaaggaccttggaattgtatcttgcgtctccaccctcctgcataccttagccacagatcatcagggatggaagaagttatactgcgaaaggtgggggcttccataccttcccaccaccctgaatgggccctttttgccaggtggtggcgccctagatgggaagtcctggaaaacattttttgtggagcgggaagtttagagtaaatccttcatgggaaga

SEQ ID NO: 86456 - DNA, 252 bp, Zea mays
  Clone ID: MRT4577_178858C.1
cccacgcgtccgctgagctccgcctttgtgtttccagggtccgggtcgccggaccgccgggtcgtggttgccaccgcgaccaccctggacctgctcccggccaagggcgccaagcgcgggttttctgacgaggcgcccccggcatcgactgttgccactgccggaaagggaaagaaggtggcagacgaggagttcgactagaagaaagtggcagcgaccccggaaccgggcgacaaagcacaagtggtggga

SEQ ID NO: 86457 - DNA, 108 bp, Zea mays
  Clone ID: MRT4577_178859C.1
catggatacatataaagtataacaaatagaatgtgcaaatccaaactaggcttacaaattctatttgttatactttatatgtatccatgaatagaaaattacgcctcg

SEQ ID NO: 86458 - DNA, 403 bp, Zea mays
  Clone ID: MRT4577_17885C.1
gcctgctacgcacccacgctaagaagcgcaaggacaaaatgctcgcagagggggctggtggcggttacaggaccaaaaaaaaacagaggccgcctgcttgaggtggccccccgccctcggggaaagcaagagcgcgagcgcgcgcccgaactgggcccagggctgttccagggccccggggtggccgacggacatccggaagagggcccggggagatgcccggtcgtgcgcagacctaaggcggcataaaaatgccggagctggtgccggagcaggacatgagcgcctcggaatagccgagggagaccgccaaaaagcccaactgggccgggttctggagggggaacatgaggcagggggcgcgcccctcgagacacatggcgaggcacagaatgccgaggga

SEQ ID NO: 86459 - DNA, 463 bp, Zea mays
  Clone ID: MRT4577_178860C.1
aaaggtctgttggcaatgcttcatctcatgcattacgactttcggttctaacggcctataccgactcagcggagaggggaacaacgaaaaacaggggcagaacaaagcgatttggaggcaccagaggctgcgtgctcatgatgctgtgctcgtcggcgacactggcgccggccgaggacccggacctgtacttgtagaggaatgcaacgcacagtaccaatacagtgctgggagtgcgcccacaaggtcatgaggatctacggagagttactgggccccaggataaccagactactgcaatacacacaacaggtgtaacgtggataacgagctggaccaatcgctatgcataacctgaagcggcaagcggcacaagacgaactactggatggacgggatgccaatcacgcactgcgcgatcctgcctagcagcaactttgacgacaagcggcggcccaaggac

SEQ ID NO: 86460 - DNA, 385 bp, Zea mays
  Clone ID: MRT4577_178861C.1
tggaagcagtggtaacaacgcagagtacgcgggagcaagtgcaagtacacgtagtcgtcgtggcatgtacagtacgtgtacgacactccgtccgccgttgaaaggtacgtagtgttattacgtgtacttgtacgtgtgtgctgtgcgtcgtcgaccagcatagcgcatgggtgttttctgtggtttggtggggtgaaatgagagtatgagaccaaacctcctagcaaatttatatactatttttgttcttttttaattgtcgcggtttaattgaaaactaaactatcgagaagatttggactctaaaaaaaaaaaaaaaaaaaaaaaaaaaaaaagtactctgcgttgttaccactgcttaagggcgcatgccagcacactggcg

SEQ ID NO: 86461 - DNA, 478 bp, Zea mays
  Clone ID: MRT4577_178862C.1
gggttgtgtggttttattttttttttttttttttttggggttttttttttttttttttttttttttttttttttttttttttttttttttttttttggacatccaaacagaaaccagttgcatgcataaagtctggccaaataaggcttgggaggaggacaaaagtctggctggcttaatacacccatccaaacccacccctgggatttggggaactacaatccacttttacacgacccatgtgggcccaaaggattttggatttgggttcctttctcgcttaatctaaaagggggggcatgcaaactcctccttttaaaatggttggcctttttgggggcagccaccctaaaaattttccggccaaaaccaccttgggcccaaaaaccgccttccccaacattgaggaggcccccccaagcgttgtccccccccccaagtcggggctcaccaaattggccaaaccactttatccaat

SEQ ID NO: 86462 - DNA, 350 bp, Zea mays
  Clone ID: MRT4577_178863C.1
ggggggaacaacccccgacgggggtgggattacatgaatgccccttgtataaagggcggatggcattcaaaccttctcagaccgcaacaaaaatgttcctggccgagcatacatacatcgggactggaggggaaaaaggggagggataattttaaaggggttaaacaaaaaaaaaacccccgctgggcccgctgggggcccatgccaatcaaagcccggcgggggtggcgtcgtcccccacaaccacggggcggaccttggggttgggccaggtcttgacggggtaggacccccccatggggaagccccaggggccctcctttggggccacattgcgccccatgcggatg

SEQ ID NO: 86463 - DNA, 478 bp, Zea mays
  Clone ID: MRT4577_178864C.1
gccgcagtccggtccggattcccgggcgtgcaagcagcgcgctagaacacacccgcgaacacgaacagggacacgaggccgggcggccatggcaagaggcggggcgatcggagtcgggaggtgatcccttctcgcggcggcaccaccgaaaccgactcggacgagtccttccggtggggtgggggcccgggcccggctccactggacccgacctgacacgcctgcgggtcgcggaactcgagcccgtggccgcggccaccgggcccaggggtctgcctcctccgttcgctgggagtccgcgcgggctccctcgtcgcccgtcgtggctacggaaaggttggtatgatgaagggataaaggatctttgctgatgctgctctctgctaagatatttgctgtcttgctgggttaaagttatagcctgtctttgagaaactactggaaaatgatggataatgcagagtcccagctgtgcctg

SEQ ID NO: 86464 - DNA, 234 bp, Zea mays
  Clone ID: MRT4577_178865C.1
ccttttttttttttatttggaacagacaacacacttgagggcaattacacacgcaatggggtcaaaatgacacatattctgctataaaaccagaaacagtatttataggcaccactgatttatgcagtacaaactagcagataaccgcgatgcatgcatgatacaaagacagaatcatcgggtcgcatgaacatggtatgaagccaagcacaccaagatacagatcctatactg

SEQ ID NO: 86465 - DNA, 263 bp, Zea mays
  unsure (1)..(263): unsure at all n locations
  Clone ID: MRT4577_178866C.1
gaggnaggagcgcgtttttcccccggggggaaaatttttcggtgcaccacgggaaacaaaaggaattttggttaatatttgcatgacagggcacaaaaatttgaaagggtttaaggtgtccgcacggccatgggaaggtcactaaacttagggggcacaatgcccgtttcttagagcggttttttttggaccaccaggctaatcggtcttagggcactcggggcttccatttaaaaagcgcctacttggaccgaggccctttt

SEQ ID NO: 86466 - DNA, 309 bp, Zea mays
  Clone ID: MRT4577_178867C.1
ggccgcttttttttttttttttttgattttaaaaattttgcttcgaataacctgtggggccacagcctagggccgggacagatgaaaaacatgtctgccagacaatgttatgaagttaggcggcataagggaccttcctggccagatgcgtgtagacaaagaagtatcaaataaactagcagggcaacaggaacctcctgtataggctgatcacgctctacaggcgctatcagccttcacgaccagcgaacctctgtgtattcgccatgaaccaacatcaacttgccgagatcaaccttgggggccttg

SEQ ID NO: 86467 - DNA, 577 bp, Zea mays
  Clone ID: MRT4577_178868C.1
tatcaacagagcagctatccagttgcagtgctcacttttaccgtaacaaactcaggacatacaggtgctgatgtgactttgctttgtacatgggctaactctgttggtggaaaatctgaactcaccggatatcattccaactccagtatgatagaaaaggatggtgttcatggcatactattacatcacagaacagcagatggtcaaccacatgtaacttttgtgatagcagcacacgagaaagaggatatccttatatctgaatgtccttactttgtgatatctgggagctccgcatctgatgcattcacagctaaagatatgtggaattctgtgaaagagcatggatcttttgatcatcttgatcccatcaagacatcgatgtgctccagaccaggatcatcaataggggcagctatcgctgcttcagttaagctggccccaaggcaacccaggatatttcattttcacttgcatgtgcttgtcctgaagtgaagttctctagtgggagaacctatcataagcgttacaccaaattctatggcacagacggtgatgcagcagcagcccatgctca

SEQ ID NO: 86468 - DNA, 282 bp, Zea mays
  Clone ID: MRT4577_178869C.1
gccggggccgctgcttccctcctcctcgttctcctcctcctcctcctcctcctaataatggggggagaaaggtaggagagtaaagattaataggaagaggtgaattaacggtaaggaacagataatgggtaacatccaaagatacataatgagagacaactacacagtaggaaaaaacgagaaggactgcaaacataagaagaacttcgcaaagataaggagggaggagatgactagaatgaaaaagaacatgaatgaagaaggaatgcaagaaacaagaag

SEQ ID NO: 86469 - DNA, 414 bp, Zea mays
  Clone ID: MRT4577_17886C.1
gaggaaaaaaaaatcggcactatgactctaccaaacaacaggtcaacaaggacaggaactttttttatttcacgggcaaaaacaaagcttaaaaacgaaccccaataaaaagaaaacagggcgattttttgtccccaggccggcggcgccacctttggcgggatgaggggtccaccattcacgcgtaaccataccggcgccaaaaaccccaccagcgcgagcgcaagtagcgcgggcgcggacaccccggccgggggcacgggggggttgggggacttggacggggcccgggacgaggacccccccgcgccgctgtccccccccgcggacgggcccccggcctcgggccccagggcgggcgagggggcctcggccgccgggggggccttgccggggaggaccaacttgctcttg

SEQ ID NO: 86470 - DNA, 538 bp, Zea mays
  Clone ID: MRT4577_178870C.1
agggtcagatcctttattgctaagaaagcgaaaagctcattatgtatcatgaacatagaggaatcaaggcttcaaagcattatatccaagtgggatttagaataaaactagtgccattccacttagcttgagtatgttgaatgaaatcttaagtagttggatgaggtaagatagaaacaaacaaaatagggaaaaaatacaccttaaatgtcattttaaaaataaatagttataaaatatgccataaaacaatctgaatttaaatacatcagtacactgaaaaatatttatccctacaatatactttaaataatacagcaaaattaaaaaaatgtaaattaattagcatctttatatccataagcttattacggtcagactacacacacctttatgataaacttaattcttattgaaataccgcgtaagtttaatgaaatctcctacttgattagcattcacttttgacaaatacataaagcaagtagctaactccttgagtagtaccatgtacctatcacttattactgtattatct

SEQ ID NO: 86471 - DNA, 468 bp, Zea mays
  unsure (1)..(468): unsure at all n locations
  Clone ID: MRT4577_178871C.1
ctcgagaacaaaacttccccctttaacttcgcggacttttaagtagttgcaccacaccgacactatgagggaccgcaagggtctctgcgccgggacacaccancccgggaccacagagcgagagcgccccggcgcccagaaggggcacgacacggaggaacactataagacaaggaagaccaagccaatcaatgcacacacttcccgcattgcgtgctttgcgatgtcgcaagaagggaggctcattgtgactgctaccactaaggggactcttgttagaatcaacaatgccagagaaggcaatctcctacatgaagtaatgagaggtgctgataaagcataaatctatagcttgtctttctcgaatgatttgcaatatttggcttgtctcagtgataaaggaacaattcacgtcttcaacttaaagaaaaatgttggagaaactgcaaatgacaagcctatgccctt

SEQ ID NO: 86472 - DNA, 153 bp, Zea mays
  Clone ID: MRT4577_178872C.1
cttttacagggctgctgttcatggggcattggctgatatattattacgaggcagtaatcttataacagatgttcagggaatggcatcattgaccggtgtgctgcctccagatgttccatttgctcaggcatttgcagctgtacttactgctgt

SEQ ID NO: 86473 - DNA, 1493 bp, Zea mays
  Clone ID: MRT4577_178873C.1
gcaaaggcctatctttccctttacaggattgttgctcgttgagaaaacttgggagttttggcgtatgcttttagtcctccatgatcttatctgtttcatttggaccatccttttgtcttgaacagactttgggaccaagaattgggtatttgcccctcttgatacctgttataagggctcatttcagcaatgcactcccacctggtgttgacactgtttggtttgaatataaagggctgcctttgaaatggtatgtaccaattggtgttctttttgatcttctatgtgcagatccagaaagaccatggaatctaatagtccattttaggggatatccctcagaaatcttgtcaccatgcgagggtgaagatagtgtgaagtggagctacatgaattccctgaaagaggccaccttcatcattactgggaacagtaagagtgtgatgaatatgtcgcatgctgatcaagtcgctctgtgggaatctgtaatgaaaggtaacttagatgggtataaaaatatctccaccaggcttaagcttggaccatttgaagatgatgtgttagtacggacagcctccgtggagcggcaacgtcaacaaaattctgatgaacctgaatctcctggatctagcaaaccgtgtatgctcttttgctctgggacttttatattgtcatccatgttaaaagttcatgtgcttacaagagttcaatacggtaatccgtatttattaagttttcgtagggtcagtgtactttctaagtgatataacattaagtgatgccatgttacgctatacccgcaggccgcagaccttgctggctctgatcaattaatctatggttaggcagggtccctgttcgattatacgtacgcaatgttcaagaagaccttgagtacatagaacatgcagttcctgtcagtgactgggaaaacgtgtcctacataaatcggccatttgagactcgcaaggctgaaggtagaagctacatcaccctggaacatgcgttgcaaacattgcttccggagttcttcagctcaaagcccccaggcagcgctgacggctcccaacacgcaggcgcaatggacgcagccgcagacagttcagatgccaccaactcttcaagtcgttctcaggaggcagagcaagccctggcaagtccagcagaggcgggttctgccaagagagcgaaagtgaagctggtgagggtgcaaggtgttgagctcgacatggacatcccgttcctgtgggtcgccgaccacctcaagaaccccgaatactacgtccacatctgtgtatacgtcggcactagaaaacaatagagataagagtacatggggaaattgttagatactgcgttaggagtgtgtcccagaaatcattttctttgttctttggttattacatgtgctatcctgtgtgcagatacagacgctgaaatttgtaacccttttggatgcacagtcatggaaggatggaattggatggtgaacc

SEQ ID NO: 86474 - DNA, 277 bp, Zea mays
  Clone ID: MRT4577_178874C.1
gtctcgcgagaccatgacaaccgagaatatgtcacggccgccaccatgtaccagagagaatgagggtcgtggcgttttggccgaaagctcgatagtggagacggcggagagtgtccgagagaagctagaagcgaacaacacttccgcgtggagaaggctcgtgcctctctatggagttactcgaccgtggtgcttgaccctcgcgtgggctaccatttgtgtaggggcaccaacgaggattagttggcaccttgcgtggttcgagattcctcagtaa

SEQ ID NO: 86475 - DNA, 1203 bp, Zea mays
  Clone ID: MRT4577_178875C.1
ctcgtttttaactctcaggtatgtaccaattggtgttctttttgatcttctatgtgcagatccagaaagaccatggaatctaatagtccattttaggggatatccctcagaaatcttgtcaccatgcgagggtgaagatagtgtgaagtggagctacatgaattccctgaaagaggtttgttttgagaatcaaaattactaccatgttctatcacaaaggaacctatagcattctctctctctctctctctctattcaggccaccttcatcattactgggaacagtaagagtgtgatgaatatgtcgcatgctgatcaagtcgctctgtgggaatctgtaatgaaaggtaacttagatgggtataaaaatatctccaccaggcttaagcttggaccatttgaagatgatgtgttagtacggacagcctccgtggagcggcaacgtcaacaaaattctgatgaacctgaatctcctggatctagcaaaccgtgcagggtccctgttcgattatacgtacgcaatgttcaagaagaccttgagtacatagaagatgcagttcctgtcagtgactgggaaaacgtgtcctacataaatcggccatttgagactcgcaaggctgaaggtagaagctacatcaccctggaacatgcgttgcaaacattgcttccggagttcttcagctcaaagcccccaggcagcgctgacggctcccaacacgcaggcgcaatggacgcagccgcagacagttcagatgccaccaactcttcaagtcgttctcaggaggcagagcaagccctggcaagtccaccagaggcgggttctgccaagagagcaaaagtgaagctggtgagggtgcaaggtgttgagctcgacatggacatcccgttcctgtgggtcgccgaccacctcaagaaccccgaatactacgtccacatctgtgtatacgtcggcactagaaaacaatagagctaagagtacatggggaaattgttagatactgcgtgtaggagtgtgtcccagaaatcattttctttgttctttggttattacatgtgctatcctgtgtgcagatacagacgctgaaatttgtaacccttttggatgcacagtcatggaaggatggaattggatggtgaaccattttgtgtgtgtgtgtgtatccgatcgacgtattgcaatatatatcctgcctggagcatagc

SEQ ID NO: 86476 - DNA, 604 bp, Zea mays
  Clone ID: MRT4577_178876C.1
gaattcttcctagcgcacagaagcgttctcctggcgtcttcctcctctctgattccacgcaggagcaagggagctcccatggctacctccctggtgccccctcgcccctgcactccccttggccgcgaccctctccgcccaatgcgcagaagcttccagggagcagccgctcaccaccccaactccctgcgcgtcaggtgaacgccggtcgagctcctcccgtggctgcctacctcaccagcagcagggtaggccggtgtcctccccttcttcttccccaaacaagcagccgctcccatatcctagcagctcgaccctgcgagctcccctctctctgcaactagcatctccaagtcggccatgggatcctcatcttcccaagcgcccagcctccccaactcggcaccggtcaggcacatggaaccgtggtgcctctgctctcccatccaggcaccccttccctagcggatccatggttctaggcggatctcctcctcggccggcgctccaacctggcatcttcccccttgtctggccatttcgcacaggagcatgcagcatcagcgcgtcccttcagacatggtcggtgagccccagcgcaccc

SEQ ID NO: 86477 - DNA, 438 bp, Zea mays
  Clone ID: MRT4577_178877C.1
ggtaggaggccaccccacccattattattctgtgcaatggcaggatgtcaaaaacagaaataactggtaagaaattagtacagactgactgtctgattgattgattcctaacatatgcacatcagcagcatgcatgcgtgccatatccaaccggtcttagttcactcttccatttcttgttttaatctagaaccctcagaagtttcatgagggctcgctcagtcagaagaccccagcccaaatctgagggcattacataggagggagcagctggatgcagatctttaaaacgcaccaccacctatggtcacagtacacacctgaacctatgcgagcaagttgaaccgaagcgcatgaacattaccgcagtctgtaagtcggcacaacaggagtgaactcgggattggggatggtcctgaaggggacgacactgtcccc

SEQ ID NO: 86478 - DNA, 336 bp, Zea mays
  Clone ID: MRT4577_178878C.1
ccttttaatactccccctcttttttttcttttttttgggggattttaaagatatttcgcctttatcccccttcttattccccctgctcaagttaaaaactttttttagggaaaaaaacccccccaaaagggaagggggccaaataatcgccgaaaaaggggtttggggcccggggaaaaagggaaccttcccgggggccccttgggaaggaaagggcccttccccaaaaaacgcttacagggccttggccgcggtttcaccccctaaatacaccaaggggcacccgcaacaaacctgaaaaaccctttcggaaaaaaaaccccccccgggtttctt

SEQ ID NO: 86479 - DNA, 798 bp, Zea mays
  Clone ID: MRT4577_178879C.1
gtcatctccttcacttccatctatcctttgaattggacccctaagtactagctagagcaactcttttcatggctacattaatagctgctagctccgccaccatgctatttctaatgctctcgctgctagcagtcctggacatgacaagctcctccacagattatggtgctctgccatcatccttgcaggtgccgtcactgtgtccatgcaactgtcccaaggaaaacgagactcgcttgcacatgtacttgcaccaatacccagcgtggccaaatgtccccaagccaaacgaagtaggtgtgataatatcaagccagcctattgggtttggccagacttatgtcgatgattggttcctgactagtgggccagatccgaatcaaaacattattggacgtgcgcatagctaccatatacaggcgggtcagaccgtcacccgttggcatacttcacacatctttgtctttgagaataatgacgactggtttgcagggtccactcttcaggtgttggggatcgttagcacaaatcccagcggccagtggtccattattggtggtactggagcatttgctaatgcccatggcaccatcaacttctcatgttccctcagtagcactggcactgatgtcatatgcacacttgatattcatgtattctatacccaagagagtaattaatggtacaactggctgtgactattttcatcgcatagttgtctgaactgaacgttgcatccgatgccactactatacaagagttcaataaattccatgaataaaataccatttctacttc

SEQ ID NO: 86480 - DNA, 525 bp, Zea mays
  Clone ID: MRT4577_17887C.1
ctttttccttttttttttttttttttttcttctctctcctggtttggttcctctttctcttctctcttcttcttttctttctttttttctttgtgggaaggccgcccaaaaggccttttaaaaaaaaagaaaagggcgaacacggggccaaaaagaaaaggggaaaacctttggggggaacaaaaaaacttaccccttagaaaaaaaagaaaaagggggtgcccacaaacccggaaaaaaccttgttcatcccaatgaaaaaaccccccccaaagggaaaaaaaacggggggggggggggggaaaaaaggcccccctcgcgtggcaattttggggcccaaaaaaataaaaacacttcccgggcccaaagggggggcccaaacccgtgttccaaccccggggaaaccaacattttatgaaagggttcaacaaccccaaaaaggtatccccaaacaaaaaaccgtgcccctttttgggggggacaaccccctctttctttatgtcttatagaaccagggggggaatt

SEQ ID NO: 86481 - DNA, 1670 bp, Zea mays
  Clone ID: MRT4577_178880C.1
actcgagccggccgggactgtgacatccaaaccgtcccattttttcgagcggcttgagccacaacagccccactctgtctgagtgtctgtgcctgcctgtgcaaagtagggtttccaccgggacacaggccgcctccatcccatggcgcgcgccgccgcctccaggctcgccgccgtggcgaactcttcctctacgcgcgagttgttcgcccgccacctcgccgccgctgccgcctcggcgtggaccgcaccgccgcgtctgcctgaaccagggagggagcggcggagcccgggctggtggtgtccgagcaggtcgtttcatgccacaaggcaggtgtatacaagggattactatgatgtgcttggagtaagcaaggatgcttctgcaccggatataaagaaggcatattatgcgctcgcaaagtcccggtaccctaatcccgagacgacccacgcgtccgaaaaaacatggtttaaagttaaccgtgcctatgaggttttgaaggacaatgacaagcgtgaaatatatgatcagcttggaccagaagcatacgagcgtcaagcgtcaggtggtgaccctggagggccgggttttcctcggggtaacccatttggtgacatctttggtgatatctttgataatgcatacagaggtggccaagatgttaaggtttctgttgaactatcattcatggaagctgtccaaggttgcagaaaaaccattacgtacgaagctgatactttttgtggaacttgcaatggaagtggcgtcccccctggaactgtgcctaaaacatgtaaaacatgtcgaggctctggtgtgatatacatgcagaagggtatatttactgtcgaatgtacttgctccctgtgcaatgggagcgggaaaattgtcaagagtttttgcaagacttgcaaaggagaacaggtagtgaaggggaaaacgtcagtcaagctagacatagccgcaggaagtgacgataatgacatcatgaagatttttggtaagggtggtgcagatgttgaccgaactaagcctggtgacctttatgttactatcaaggtcagagaggaccctacttttcgaagagaaggcatccatgtgcatgttgattctgttttaagcattgctcaggctgtcctaggtggaactgtcacggtaccaaccctcactggaaatgttacagtcaaggttcgtcaaggtacccagcctggagagaaggtggtcctacggggcaaaggaataaaagcgaggaactcgccagtgtttgggaatcagtatgtacacttcaatatcagggttccgacggaggtgacgcaaaggcagagggagctgatagatgagttcgataaagaggagtgcgcagaccgggaaagacctgcggttgcctccggatgaagtttttggttcaaccattaattagttttagcaccacactagtttgatgccctcaatttctccaacccgccataaggtgctgtaggcaccaaaagcttattgtaacatttgatccttatatagcatctacccagtgtgtaacgtatacattacgcgctaaattattgtaccattttcgatttctaaacagcaaagatagcgggggttgtcttcatcttgggaaaaaaaaaaaaaaaaaaaaaaaaataaaagaacaacaaaaacaaatttt

SEQ ID NO: 86482 - DNA, 384 bp, Zea mays
  Clone ID: MRT4577_178881C.1
tcctttttttttttttttgggttttttatgcggtgtttttttggggggggggggaagcaccatttttttctggggaggtagggagaataaatcctgacgggggtaacattattcatcgaacccctatccatgctttttagatgcctgggtctgctgaaaccgagtatgaacacattactaacaactgaaacaaagcgaccttgcaattaaaaacacagatgggcaacaacaaacacgacacgaacgaagataaaccctctggactagggttaacattactgtagcgaacaagataatttggccgcgcgggccccaccgctcaattgctccaggttccgtctgagatgacctaaacccccccacggttgacaccgtcttatcctc

SEQ ID NO: 86483 - DNA, 736 bp, Zea mays
  Clone ID: MRT4577_178882C.1
ccacgcgtccgcaaggcgtccctgctgggcgatgcgataacgtacatcactgacctccagaagaagctgaaggagatggagacagagagggaaaggctcctggagtctggtatggtggacccaagggagcgtgcgcctaggccggaggtggacatacaggtggtgcaggacgaggtccttgtacgagtgatgtctccaatggagaaccatccagtcaagaaggtcttccaagcgttcgaagaggcagaagtccgcctgggcgagtcaaaggtgacgggcaacaacaacaacgggacagtggtgcattctttcatcatcaagtgtcccggcactgagcagcaaacgagggagaaggtgatagcggcgatgtctcgtgcgatgagcagttgagcagagcagcgtaggatcagattgtcgcggtagagatgtggcagttgatcctgtttggttgcgagcgaaaacaagaggcggcggcggacagcagcccttgacatggtcgataggagatctgtaggtggagagaagcaagatgagattcttctgacttttttagcaacgcaacaacaaaagatggggctcgagttaagcagccgttgtactttaggtttcttttggttggtaatagtgttcctagtgtaagcttgatgatgcagcagaacaatgaacagcagtacatgtttttttcccttattttcaaaaaaaaaatggaaattaaatttattgcgatctttctttt

SEQ ID NO: 86484 - DNA, 3081 bp, Zea mays
  Clone ID: MRT4577_178883C.1
atggcagcttcagcgcctccaatctacttctgcgccgcccccgctttctgcccttgccggccccacgccaagcctgacagcaaggatgtcgatgaggcccgcgtgacgatggctcccacaactccaatctgccttcgcgtcgccccagctccccgtccatgtcgagttcgagtaggacgaggacgaggagggcagcgccaacaaagtggaagggacgggctcgacaccttcatgctcttctacaccgtcttctccgtcatcgaccccaagtgcgacgcccgcgactcacacgtcccgatgagcaccaaccaacgataccgtctcttcccacgtcgccaattccacaacacactccacctcctcaacgactcacgcctgctccgcgaccttcggttcagattcttcatcgccaagtgcccgcacccccattggccactgccgctctgccagggacatggaagagaggaaccaatttcttcagcatggtctaaacacaggcaagaccccatacaagagggccagtccatcggcgtcatcgccaacgacgttgacaagaacggcaagccacacaaggtcaggctctactccatcgccagcagcgctaacggcgactttggcaactccagacaggttttgccgtcgctggctggattgcctgatttgctttgcagattttcctgccatttgatttgcttcagtgttcttctagcatttctattggagttgtatgtgttcctgaaactgacacctgtgaaaaggcgtctgttcaaccggggctgcaaagaacaacactgtgaatcgtattcatgtataattgccattgtttctgtagtccatcctgacggctggagaagcaaatggcaaattaagctttgctatgtgcctacgttacctgggtgccatgttttcattagaggaaagggttccatcaaagatccagggaagattcttggttacagtctcaatgaagcacatcagctgctgcaggagtgtaggcagcagcagatgaacctcgacgagctcctagagaagaagtgctccactctggctaacagaggtgatggcggctcagatcagtccggcaccgccccttcgtcccccccacacgtcttcggatctgcaacccccctacgcgcaggtaccagtgggcagtggcacacacatcataaggatgaagatttgaaccaagatgagaagtgggagcagctcgttcatctcttgaaggggattgcggtcgaaacagagaagttccaagcgacaccactatctcaggaagtgctgattgtatggggagaccacgaccaactgttcccggtggagaaggcgtttgcagttcatagttcttttaaagactcctctgagtgttgctgctttccagtgacaaaaaagattccaagaaaccacttcttgtcttcctccactggctgcctgtcatcttgctctaaaacaatcgcagtcttgcaagttgttgttgctgctcctacccctgcctctgcaattgggtttgagggatatgagaagcgcctcgagatcagcttctatgaggcacctatcttcgctgaccccaacggaaggggattgaatcgtttggctggagttgctgctgggcttcctcacgaccttggccttgcatctcaaacaaggcataaggctgaaaggtcacccggtttggcgaagatctttcggaaggatttgaaccttggtcggccttcagtcgggctggtggtcggtgtatctaagtgtggatgagaggacatgggagcagaggagtgctgttggtggaacctcattgctaccgagtgtccagaaaggtttgcagaattttagttggagtcaggctcgtgggctgaattcccatcagcagaagtttggcaatggtgtgttgattgtgagcaataatgaggctgcacaccgcaacaacggagcagtggacagccctagcacagcccagtttcagcttcaaaaggtgcctcagcttcagaaactgcaactccagaaattgccggttgttcagaagacaccgcagctagggaaccagcagcctatgcagacacaggtacctaggcaaattgactttagcgctgggagcagttccaagcctggtgtgttggttacaagggcagctgtcctggatggagagagtgcagaggtggatggcttgtgcaaagaggaaggggcgccgcctgttatagaggaccgacgaccaaggaagaggggaagaaaacctgccaacgggagggaagaaccacttaaccatgtcgaggctgagcggcagaggagggagaagctcaaccagcggttctatgcgcttagagctgttgtgccgaacatatcgaaaatggacaaggcgtccctgctgggcgatgcgataacgtacatcactgacctccagaagaagctcaaagagatggagacggagagggaaaggctcctggagtctggtatggtggacccaagggagcgtgcgcctaggccagaggtggacatacaggtggtgcaggacgaggtccttgtacgagtgatgtctccaatggagaaccatccagtcaagaaggtcttccaagcgttcgaagaggcagaagtccgtgtgggcgagtcaaaggtgacgggcaacaacaacaagggacagtggtgcattctttcatcatcaagtgtcccggcactgagcagcaaacgagggagaaggtgatagcggcaatgtctcgcgcgatgagcagttgagcatagcagctgtaggatcagactggcacggtagaaggtggccggtttatccaggttgcgaacaagaggcggcggcggcggctgaagcagcccgtcgattgttgataggagagttgtaggtggagagaagcaagataagattcttctgacttaagcaatgcagcagcaaccaaaaaaaaagaattggggctctagttaagcagccattctacggtaggtttcttttggttgtggtccgaccccgaccgtttagttctgatgtttttgctttggaaggatggataccgtgttcgttgtgtaagcctgatgatgcagcagaaccataaacagcaatacatgtttttcttattcttcttcttc

SEQ ID NO: 86485 - DNA, 492 bp, Zea mays
  Clone ID: MRT4577_178884C.1
atccgtcctgggtaggcttgtgagccgtagcaaattagttcaacaccaaccagctagccatgggtatgtgttccaacaagaagcgcagcagccctggcgttgctgtgtggtgtgtagtcctgggcttagccctgctcgtcgccgtcgacgcggcgggcaaggaaggtcgtgggcgagccgggcacttggctgaagagcatggggatgcagcctactgctccgccttgtgcaacgggcggtcgcagtcggacttcggagcgtgctacaatgagtgcttgtacgggagggtgacaggacaagaagaagcaagaggaggtggtggagttggagggccagctggtctcctggagatgccgacgaaacgcgttggacgggaggaagaacagaataccaagcaaggggacgccaccgtccgtttgagcgacccagcctgctgctacgacgcttgacgtgaacttcctgaattgtactacaaccaatgctgccccgttt

SEQ ID NO: 86486 - DNA, 322 bp, Zea mays
  Clone ID: MRT4577_178885C.1
ctccgtttttcggcggcatcctcaacgagacatcgtccctctttatccagaggttctcgctgtacaagcagatcgagctgttccagggcacgcaggccttcatgcgcgacaagatcggcaaggcggcggccgacaagttcttcggcgaggggtactacgtggtggccatgggcagatgcgaccacgagcacgactacctgccttccggctactgctactcgtggacctacaacggggacacctttgtcaagtacatggtcagcaccctggaggcgcagctcaggctgttgcacgcgctgggcgcccggcggctgaccttctt

SEQ ID NO: 86487 - DNA, 718 bp, Zea mays
  unsure (1)..(718): unsure at all n locations
  Clone ID: MRT4577_178886C.1
ggaccctcgggccggccgggattacacatcagcctagatttctgaggttatgtgcaagcatcccaagtgagaatgactgttttgggaggcctaggctcttctgaaaattagtttgtctgtacatacattcataacttatgttcagtgaagtatctgcacaatacatataagctataactaaatagatttgaacagcgagctgtcatttctatatattagagtgcggcgcaaaaccgcgttaccagggtgtccacgtcgtcgtctttaatatcagccgtcactgtcagatatgctatcaacggtcatgtgaagctaaagaaagcgctcatgagagtgtccttcgtgttctctatcagccgccagaatcttcgactatcagccaccagaatcttcgagagaaaaataaatatgcatcgagaaattcaccccccacgagatatttccagagagtccagcagacacagaccaaaaagggtattagagatgtggtgttctcttctccgtcaatggcgacgaccttagccatctgcacccgtcgccctacttccctgtgtccctggtcctccncaagccacagtaaccttctattaacaccagaagaatatttaataactatgttgaaccaaaaaactgatcaccatgcattcactgatcaccagaagatgtatctcttttactgggcagtcatttcccgcttacagaaaattaatttctccta

SEQ ID NO: 86488 - DNA, 421 bp, Zea mays
  Clone ID: MRT4577_178887C.1
gtacctcgtagccggccggggcctctctcatcctcccagctgactctgctttgcattgcatgaccagggcgcgcccaccatcagtagcggccgccgccatgcagagactcgtgcgcgtcctcgtgttgctgggcgtggccgctcgcggtgtctgcgcaaggcccgacggcgcgcgccaacgactaccacgcccactatgaggaacccccgcggcgtccgcctccacgaccgcgtccagctacatcacgggtagtgctggtcaaggttcgcgtagctgatctccttcatccgtttgctctagtccacgtccgcgtcgtcgcagatcgacaaccagctcgcccacccgctcgcgaacggccgtcctgttgtttctcgtccacggacaccgcgttccagtcgctgtcctcttgcaccttcacct

SEQ ID NO: 86489 - DNA, 347 bp, Zea mays
  unsure (1)..(347): unsure at all n locations
  Clone ID: MRT4577_178888C.1
attcataagtgctctaaagccagggttgggtcattgatttttgtgtgtgancnncatccngagcaccttcttggcaagcaaggacccaagaccaaaaattgctctcctaaccatagcaccaaagacccaacaaaaccctgtttagctccacctctaaagccaacacttccatgacctccaagcccagccacacaacaatcttgccaatcccagcgagcaacaaattcactcacccaaagtactcaaattcgaacccatttggcttgctcacccccaataataaactcctaaaatgcccttcggatggcagacctcatacaccagagctggataccccctccacccat

SEQ ID NO: 86490 - DNA, 213 bp, Zea mays
  Clone ID: MRT4577_178889C.1
gtccgagacccttggccgtacgctctgcctcactcctccgtctcttgcttcccttgccgccggcggcgcgcggagccgggcgcggatcggcggcgggtgcatggtggaggacaacttagatcaaaggacaaagaacacttcaaaaacatggaattcatgagggaaaaattggaagatgagtatgacttagactgcgtcacccccaacgtcacc

SEQ ID NO: 86491 - DNA, 582 bp, Zea mays
  Clone ID: MRT4577_17888C.1
ggcgattgggtatctcgaggccggccggggccgtcgtggttagcaaacgagggagaaggggttggccgccgcaccttcaattcggctatggcattgttcggcctcaggtggtggcatggcggggcttcgcatgatcgcgaggatcatgcccaaggcctcttcatggggagcatggctcgaggaatggtgaattcctcaccagaggtaggacaccgctgtgaacccatcgttcaccgtggacaacacactgctcggcacaatcaccgggcagccgcaccgttgcgctcgtgttgcgaggaaagggatgaaggtcaatccggtgatctgtcgatgaacggaccggattacaggtcgcgaatatccctttgcaccatagtatcctagccgtcgatcgtgtaccatgtggcggtgatcgtgcgctgggatggatgatctgatctagaccgccagcgtggatccaatgggccgaaatcaccgataccccttcggctcggctaatttgctagagagcccctgtgttttagcagaatcaacctgccgtcctctatagttctaagaatattatatatgctgtcctgtttt

SEQ ID NO: 86492 - DNA, 438 bp, Zea mays
  Clone ID: MRT4577_178890C.1
cgactgagccaagctcagccatcgacttgctgtctgagtcctctatagccgcttcgatggactgcacgatgcaaacagctgggaagtcgaccggcgagaaggcccccagtaagcagatggccactaatgctgcgcgcaagacggccagggccaccggcggggtgaagaagccgaaccgctggcgccccgagaccgtcgggctagcgcgagatgcgcaaggaccagaagagaactagatctgctcatccgcaatctgcccttccagcgcctcgtcgcgcgatatcgcgcaggactgcaagactgatctgaggtcacagtcctccgctcgcaagacgctgcaggaggccgacgaggcgtacctggggtggcttttataggacaccaaccttagggccctccacaccaagcgcgtaactatcatgcccaacgtcatccatc

SEQ ID NO: 86493 - DNA, 586 bp, Zea mays
  Clone ID: MRT4577_178891C.1
aacgggaacatctttttttcattttcagcccattacaaccccgggggtggtatttttgcataaaaacatccatgggggcccaacaaaaaaggggcagaaacccccccaaaaaaaaccagtccccaataaacccccggggggggggcacaaccaataaatttttactggggggaaaattataaagggcccccctttatatacccagaacatggggggcccaagtttttcgggtaagcataaggggaacatggggtttttcctcaactaaggggcaggggggccctctggggggccccctgaaccagaaagagagtttatccccccgttttgggttctcaccggtttttcgggggtttttttggcccaggcccagggggcagggggggggttaaaaatttttagctcgccgggccaaaagtttgtttccttaaaaaccgaccaccctggtttggggttacggacccggggggccaagctttaagggttcccaccgtgcccaatagttatggggccagccccccagggaccagggcgggaattgaaaaccccctccgcccgttaaaaagcagggacatgaccggttttt

SEQ ID NO: 86494 - DNA, 422 bp, Zea mays
  Clone ID: MRT4577_178892C.1
ttggcacataatatttcactcacttggttttttacacttaattatcaaaacattatagaaatgacccaagggcacatttccctatcaatattcccctatttggtgatttatgccgacacatcaaaaagcaatgactatcatgcaacattgattgaacttgaagaccaaagggtttatgactttaagtcggcatatttggatcatactctgccaccacttggtttgcttatgcaaatcaaattcatttacctatatctaagtcaaactcacttgtgtgggcataaagagagatattccaaatgtgaaatagtacaagatccaaaaactcccccttttttccataactgataattctccccacaagagatcaaattttgcaataagagcatgttggcaaaccaaaaattttaactttactattt

SEQ ID NO: 86495 - DNA, 336 bp, Zea mays
  Clone ID: MRT4577_178893C.1
ccccacaaaatccaaccatttgggggcttgggcataattaaatatcatcgacatgtttttaacaaaatcctttccaagatccatcccaagcccgaagcctttatggaaatagcaaaacagagatcccttaaggggtttcaggtccaaaaaattgccacctggatcagaccctttgggggccccccgacttttaaaagcggggtttggaaaaaaaccacctgtttttgccggttttgaacctttcctcgaggccccccttgggggccttgcaggcttcaacctttttgtcccggggggaaagcgcgtcggccccccccgatgcgacttccttaaagt

SEQ ID NO: 86496 - DNA, 554 bp, Zea mays
  Clone ID: MRT4577_178894C.1
aattggcccccgggataaaaattcatgataaaaacaagttacaaaacccccaaccaaagaaaaaaaaaaaaaaacccaaaccccctttgacttttttaaaaaaaaacaaatcgtttttttgggggggggggcaaacaaacaaaaaacggggggggggaccaattccccctacccaacaggggtttggttccaaaaaaaacaattaaaaggggacccccggggaaaaaaaaaaaaaaaaaaagaggggggtttccaaaccacaagtcccatttcaaatccagatagatagaccccccccccaaataaaccccaattttcagccccccaattcgggggggccccttaacagggctgaaggaggcattttttgatttattccgaagctccacctccggggaggcagggacagcttttgcccaaaaagctggggggcccctcccaaagggtttgcggcggggctgcttcctgtccctttgggggagggctccccggacccccaacaaagtactccccggaagtttgcccggcccccggtttctggcccccgggggcgg

SEQ ID NO: 86497 - DNA, 640 bp, Zea mays
  Clone ID: MRT4577_178895C.1
cattgggacctcgagccggccgggataaattccagtccaccaccacttgtctcaccgccgtcatggcgtcctccaccgcggcctcgccgctcacctgccaccacctcggcagcgttggagcccgccctcgcctcccgtgcctctccatctccctcggccgccgctcgtgcactcttcctctaagcccacctccctttcccagtccctcccgtcaaagcacacgttggggacacctccatgacggacaacattgcatatggaggtaacaaccccaagactgattatgagaatgagaggtggaagaacacagagaccaacaaccaggcctggccgcacacggtcgtgacgcaggataggatcgaccgcgtcagaacggataactacatgtgcaagaagaatgacataggagagcgcggaggaagctgcgcagagtgacttggtgccgccaagaaaccagagctacgttcctaaggcctgaagacgaggaaacagaactgaaatgacttacaggaccaactgtgtgatgctatacctgatcggagagagataactggctcgtgcaccgtgacaaccgaagagcacagctcctcgtagaaatctgccaccagtaagtacagaaatggggcggattcaaaaaata

SEQ ID NO: 86498 - DNA, 389 bp, Zea mays
  unsure (1)..(389): unsure at all n locations
  Clone ID: MRT4577_178896C.1
tcttaaacttnnatcctctatatcaccctccctttntttaattttttttaccaaagactccccacacacaggactttctttcaaaataaagagagaccacccacttcttcttatttcaacttattcttttttttacacaaatttcattacttgctttactatgggctttgaccttactattacttattcactttatactacacaccttaaatccttccctttctcattcattcatctatcatctccttcacttctagttctatttaaaataatcttcttcaatccatcttcaaaccaaacatatttttatttttcattactctatcattcctttcatttctccatttccataatcttcacattccaacacttcaatccatccaatccaa

SEQ ID NO: 86499 - DNA, 735 bp, Zea mays
  Clone ID: MRT4577_178897C.1
aattctcacatcctcccttcttgctgagctgagcacgccccttctctctcactttgggctcgaggcaatggcggcgctcgctccgacgaagatgctcggcacccggctcaacttcgccggctcctccaggtacgccacagcggcaccaactgctggcgcacagaagatcgtctccctctttgatcgcttcaagaagaagcctgccccgaagccgaagcccgcccccgtggccacctcgagcgtaggcatcgacgacgagctcgccaagtggtacggccctgacaggaggatctacttgcccaacggactccttgaccggtcggaggtgccggagtacctcaacggagaggttcccggagactacggctatgatccttttggtctgggcaagaagccagaggacttcgccaagtaccaggcctttgagctcatccatgccaggtgggccatgctcggcgccgccggattcatcatccccgaggcgctcaacaagttcggcgcaaactgcggtcccgaggccgtttggttcaagactggcgcccttctccttgacggcaacaccctcaactacttcggcaacagcatccccatcaacctgatcctcgccgtcgtcgccgaggtcgtcctcgtcggaggcgccgagtactacaggatcacccacggactggaatttgatgacaagctccaccccggtggcccattcgacccgctcggcctcggcaccgaccccgacca

SEQ ID NO: 86500 - DNA, 241 bp, Zea mays
  Clone ID: MRT4577_178898C.1
cgttccgccatgcgcgcaccgaggcacggcagcatgcgcgcccacgtcgccctggccttcggggcgctggtgctggccggcgacgccctgcacacggcgctggccggcagatgcagtttcgactacaaggatgccctaagcaagaccatcatattcctggaggcccaacgctccgggaagctgccgtgcagcaatcgcgtcaagtggcccggcaacttagggcttaacaacggcaagctcg

SEQ ID NO: 86501 - DNA, 351 bp, Zea mays
  unsure (1)..(351): unsure at all n locations
  Clone ID: MRT4577_178899C.1
cagttaggatcaagcgctatggacncacggggatggtatcaaataattttgattggttcactaacctagatgcatatgatacaacaacaatgaacatcaaacgggatggaagacgctacatatctacagcgtgtcttctcacacaagactcaccctacaatattaaatgtccaaacagtattgatcttcagaatctgaaatcttaataagtacagatatacaccgagaataccgtgaattcacccgcacaacaaaaaaacaactcgtgacacacttatgtgtacatacctcctcaagacagatagcaaatcttgaagatccctctacaacgctatttacccacatggagag

SEQ ID NO: 86502 - DNA, 312 bp, Zea mays
  Clone ID: MRT4577_17889C.1
ggaacttttagcaaagcattggccattttttgaccgcggaattcaaaacagactgacgagctaacatagcggcaggcacgttctccaggaacatggaccgcacgcagcagatggcagtagtggcgacagccgtggtggccttggtgctgctggcagaggctacatccgaggcggccatcacctgcgggcaggtggcgtacgccatcgcgccctgcatatgctacgcgcgcggccagggctgaagaccatccggcgggtgctgcagcggcgttaagagcctgaacaacgccggccggaccaccgacgaccgac

SEQ ID NO: 86503 - DNA, 313 bp, Zea mays
  Clone ID: MRT4577_1788C.1
atcgagctcggaggggaacggagcgaagcttttgagcggagatgcagatccgagtgcaatgggcgtgcagagagtcatcgtgcccggaatgggccgtagtggagctgcacggcgtggtgcagacgcaggcctccttcgccggcgacattcggggactccacatcggtcgcctctgctcctccccttgcccagcctccgtctcgtccaaggcagggttcaccttcacggtggggtaccacgagctcgtcggcgcaaaagtgacgctcaagaagcctctgctggtgctcaggaagaagaatgttaatgctggtgc

SEQ ID NO: 86504 - DNA, 261 bp, Zea mays
  Clone ID: MRT4577_178900C.1
gagctcactagtcggtggccgccctttcctttttttttttttgtttgggaacctttcttttttatggcgccatcttattgctttttctttttttttacttcctaaaaccggttggggggaaagatttaatttagttaaagggtgcgacgcgcctctcaaggggcctttacatattttttcgcgggggggtgagctttttcatggattcaacaaagacacgggcactgaaccaaaactatataaagggggtcgggatacccc

SEQ ID NO: 86505 - DNA, 510 bp, Zea mays
  unsure (1)..(510): unsure at all n locations
  Clone ID: MRT4577_178901C.1
agcagtggtaacaacgcagagacgcggggtatcagttgaagttatgcgtaaaaaaaaaaaaaaaaaaaaaaaaaaaaaaaaaaaaaaaaaaaaaaaaaaaaaaaaaaaaaaaaaaaaaaaaaaaaaaaaaaaaaaaaaaaaaaaannaaaaaaaaaaaaaaaaaaaaaaaaaaaaaaggggggggggtttttcccactgttaaaggggaaattttgggtatttccttaaaattgggggccgttggggcttgcttttagggggcccatttccccttttgggggggggttttaaatttcattggccggggttttaaaccgtggggctggggaaaacctggggggtcccccttttatttccttgggggtttttccccttttcgccggtggggggtttggggtggggggccgctccggtgggccttttccctctttctctctccctttttggtgttgggccgccccttttttgtgggctttttccctggggggttgtaggggtttccggcccgg

SEQ ID NO: 86506 - DNA, 274 bp, Zea mays
  Clone ID: MRT4577_178902C.1
accctccctacctcgccgtcgccgtcgcatctgccatgggggtgtacaagtacgtctcggcgttatggagaaggcagcaatccgacgtgatgcggttcgttcaacgcgtccgctgttgggagtatcggcagcagccggccatcgtccgcctcacaaggcccacccgccccgacaaggcccgccgcctcggcttcaaggccaagcaggggtatgttccctaccgcgtccgtgtcccgcgtggtcccaggaagaggcctgtgccgaaggtattgtc

SEQ ID NO: 86507 - DNA, 344 bp, Zea mays
  Clone ID: MRT4577_178903C.1
gtttatggctgtgtcctgtggtagcgtactcaggggttcctttaatccgctaaatggacgtttagagggcttactctcgcagctcccgacagtatggacgatgtgctacccaaccaatacaccttggttgtcgacatgataagcagtcattccaacaagtaaggcaaagttcgattacagaaccactcctcggcatgggttaccatgtgacacaaactatggaagccaggatgacttgtcatagaggcaccacactgcaagctatgaggtttgaattaggcttgctcaagacagaattggatacggtgctatggcctccagagacgacctggttttacgaatgg

SEQ ID NO: 86508 - DNA, 309 bp, Zea mays
  unsure (1)..(309): unsure at all n locations
  Clone ID: MRT4577_178904C.1
aaagaaagnggcgacaaaccccccncaacaacaacaaaaggacccccagcngcagaacaacaaagaacccaaaaaaagaacccgcggcggaaaaaaaaccccgccccgcgcaaaaagagccaaagccaagggggggccaaagagggacccaaacaaacaaacanaacaccccaacagggaaaaaaacgcacccccagggacacccaacaacgnggcccngnccaacccagccgcgggaccagccggaaacagcacaacccaagccgcgaaccaggagaccaaggcgncaccgagccaggcaaagaaggg

SEQ ID NO: 86509 - DNA, 340 bp, Zea mays
  Clone ID: MRT4577_178905C.1
aaaaaacgaacgccccattttttatcaacctcaatttttcacaaattttttggccccccccaatttaaaactaaatcggggttttggcttaatcgaacagctgtttgaacagggtcctaactaactgggctaacaaaggcgccacggaattttggtggggggtcacctgacgtttctccatttttttggggggatcaggtacttaacttccttggcatgcatgaaggggaatctcagatcttttcttttttgaagggggcggatcattccccccccatgggcaacctggtccaagggccccccgcaaatgcccccattgggacacaggggaaagtttttt

SEQ ID NO: 86510 - DNA, 283 bp, Zea mays
  Clone ID: MRT4577_178906C.1
ggacaggaaacacatcaaccatggcagaggcagagtgccgcgcctcggatcggccgacgacttcgagttctgcatcctgtcgtccggcggcatcgtcccggccggagagagcgcggggacggacatgtgcgtggccgacgaggtcttctgccagggcaagctcctcccgctccgcgcctcctcggccgcagcctccgacggcgccagcgtcgccacgctgccgaggtcggagtcggtggcctccaccgtgggcctggtgtctcggtccggcaacccccatctc

SEQ ID NO: 86511 - DNA, 315 bp, Zea mays
  Clone ID: MRT4577_178907C.1
ggaaaaggaatgagtgaattcaaccctgaaaacccccaaagggttcttttacccccccttttaaaaaaacactggcacaatgggggcgtgcctttggacccaccagaacttttttacggggttttcccagttttttacaaggatccctaacaaattgattggtcattaaccaaaatcccctcccggttccctttcggtcctggggaaaggtgatttaatcccctcctgaaccccaccaagttagctcccatatgtgaatgggggttaaaaggggaaccttgtcaggaggagaaaataaccctttttacctttttt

SEQ ID NO: 86512 - DNA, 528 bp, Zea mays
  Clone ID: MRT4577_178908C.1
gctctctcctcctgctctggcgccccagccccaatactcctagtctcccctattgctcccactccttaaggcgcactcttactgcgctgctctcaagcgccgtctttgactatattagtcagtggagggaggaacaaggttgaagaaggaagaacctaggggaaggactacgatcgacttaagacttgcgcacttccggaaggacttagtcatgccggaatgaggggagaggactacgtcactttactctgacaatacgctaccacgccatcttaattactataacctatcagacacgacatgattaattatatacttgtgcgacgcactgttgaatatatttaagtcggacgtgcacactgccttgctaacctgatgatagtacttaatatgttctagctatgcgatatgtatatcctacgatgctccatctatgatgcaagcttatacaggggatgctgctgtaatatgatatatggacgagggaagcgtgccacaattgcatacctggacgttggaggagcctga

SEQ ID NO: 86513 - DNA, 240 bp, Zea mays
  Clone ID: MRT4577_178909C.1
ggaacacaacacactagggtacggagagggacaccggcgccatcgcaagtacacactcggattggggagcgacagatgaggcgcatccctgttgcctcgccatctccgtgactctctctctctcctctcccggtgcaagctagcaagcaagctatgcttggacaacgacgacgacgatggcgtgctgttctcgaatctggaccaacgagatggttgacgagtacgataagctagttctca

SEQ ID NO: 86514 - DNA, 797 bp, Zea mays
  Clone ID: MRT4577_17890C.1
caggaaagcaaaatggaggtggaggtggatgtcgacgacgatacaggcggtacaccagcttccattgcgcagcaggagacccatgtcgaagctccaggagggacgagcatcaaggagagcgtgcaggatgtcgtcctcggcggcggccagcatgttgtcaaggatgtcgcgcttacgatctcacaagcgatcgggcccgtggaaaagggcgtcgggaagatccaggagaaattccaccacatctcgctgaagccaggggacaagaaagagcctcaagttgctgtggaggagcacgtaactgagaacgtggtggatggcaaacctgctgttgcggtcaacgcggaggttgaagtccaacagaaggcgcaggatcgtcgtggcgaggaagaaggtgtgcaactcaaaagaacagagaaggaaggacgattgtcacacctgagagtgccatggtggaagatgcaaaggaagcgggagcaggtgcaggagcaagcggagtcgaaggctgaagctgtgcgagggccggacggtgaacaggggtgattgtgttggcctgcatctaaatgggctgtaagaccaactccagcagcctccgtatacggctctccatccccttttttcactgcgcagtacactattcatcagtccagcagactccgtatccctctccctaaaaagcacgctgtgtacttatactcctcttttccacgtcttctctcctctccgtacaagtctgagaaatggtgcaattaaaagccccgatagagtgtaaatacggagtctgttggaatgcaccatgc

SEQ ID NO: 86515 - DNA, 1964 bp, Zea mays
  Clone ID: MRT4577_178910C.1
ccggccggcattgggtacctcggcccgggactgcccaccgaggcagagtagaaaccccatcatgccgcatcacggcatcacgcgcgtgccttcctcgaccctcgctactgctactgtctcgtctcttgctcgcatcgtctggggaccgcggagcggcggcggcgtggcgcagcggcacggcagcctccccctcgctcctcctcctccggctcttcccctctccccctcagccgtacgcccctgcgcggctgcgtgacctgcgtccagccgcagcggctggcgcccatcggcggcaagtagcagagcagcagcagccgccggcggtcctcccctccccctcggcctcgctccggctctcccagtcccagctcgagctccggactgaaggttgaagcaaggacccaaaacagattgccgccatcaaagatggaatctgggagcacgttctatggaggggaaggtctctccatcgaccccaagtggtttatcgacccgaagcttctctttgttgggccacgcatcggcgagggcgctcatgcaaaggtctatgaggggaagtataagaaccaaaatgttgctatcaagattgtgcacaaaggggacacccctgaggagatgaccaagagggaggggagattcttgagagaggtgaccatgctgtcaagggtgcagcacaagaacctcgtcaagtttattggggcctgcctagaacctgtcatggtggtcgtgacagagctactagtggggggttcgttgcgcaagtatttggtcagtctccgacctaggagccttgagcctcgtgtagcagtggggtttgcattggacattgcccgagctatggaatgcttacatgcacatgggatcattcatcgtgatcttaagcctgagaatctgttgctgactgcagaccagagaacagtaaaacttgttgatcttggtttggctagggaagagacactaacggagatgatgactgctgagacaggaacataccgttggatggctccagagttgtacagcacagtaacactgaggcatggagaaaagaagcattacaaccacaaagtagatgtctacagctttgcaattgtgttgtgggaactcctccacaataaactgcccttcgagggaatgtctaaccttcaagctgcctacgctgccgctttcaagaatatcagaccaagtgccgataacttgcccgaggagctgtcagaaatcctaacatcctgctggaaggaagacccaaacgacagaccaaacttcacacagataatacagatgctcctacactacctatccaccctttcgccacaagagaccttggcgggcccccgccgcacgttcagttcggagaacacaatcctgcccccagagtctcccgggacaagctcgctgatggcttcgcggggcgacctcggcgacacgcccaagggcaagaaggaagacaagccgaggggcttcttcttctgtttcagcgagtgctattagcacgagcccccccaaagggggaacactccgataagcttgcaaatactgaacgaacaccgtctccccccagccccgatgccctgcgactcaagccatgtccagccggtcaagtcccaggcatccatagtccgcaccctgaagaacggaagtgtagtcgaacactgttttgttttcttctgctaatcaaggtctcctgcatcgctgacatgctgatgacatataccagcagggtaaaacgacgggtaaaccttttgactccagatagtaatggtgggaatagcttacctcccctgtgttttctggcgcaccatggtgtaacggagttgctagagcgcgactatagattgccttcctgcctgcctgtctcgcccgacatcgtatagaaataaaaccaataattcgcatcaaaaaaaaaaaaaaaaaaaaaaaaacaaaaaaaaaaaaaaagcaaaaaaaaaaaaaaaaaacccgcggcc

SEQ ID NO: 86516 - DNA, 374 bp, Zea mays
  unsure (1)..(374): unsure at all n locations
  Clone ID: MRT4577_178911C.1
cgtcgtaacttggaccttanacggccgccttttttttttttttttttttttttttttttttttttttttttttttttttttttttttttttttttttttttttttttttgggacaaacaagttattccagtttgacgcgccgacgagagttattttttcgagggggctacaaccgggggggctttagtcaagggcctatttgggttacgacaagctagttgtgaaaatgcggacttcttgggtccgggttgccttggagaactttttgacgggtcgtggggttggtcttcttgagggtgtgggggggggttggcggggggattaatttacacctgggcaaagcggggggcaatggggggactttttggtgggcg

SEQ ID NO: 86517 - DNA, 429 bp, Zea mays
  Clone ID: MRT4577_178912C.1
aaaatcgggaaagggaacttcttattttgggggggccccatccattatccaaaaaactttttttttggattccacccaataagccatctaaaagggggcccccccaatgatgtgttgttgggagggggctgctgggtttgtcaaaacaaggtggacaaagggcaacaattgttgtatttgtaaaaggggtggggggttagccccaaactgctggtaaaaaggcaacaactgttgctgtgtcaaaaaagaaacacgggttgctgcaactagctggctaaaagggaaaaaaatttgctggtgcaaataaacagcgagggtcaaggcggccaattggttaaatggaaaaagtttttgttgatgaaagtaggcaatacctacctggccgaatgggaaaagttgttgctgcaaataaacaacagggttcaaggt

SEQ ID NO: 86518 - DNA, 303 bp, Zea mays
  Clone ID: MRT4577_178913C.1
tctttttcgcgtggccacgcccgtggagagtcagcggcacagtatggactcaacaaccatacccaacgagatctatgatcaggactgctataggagatggactgggcgaccaagaagtcgaacaacactgtatcttgcgcgaccactctggatggtatttgttctgacgtttcagtggctatgtcgcgggaaggaagctaaacattctggtgcaggatccgggcctgactataagaccctacatgggtacgcttctgactggtcatataccacgaaattccatctgtagcttactgtatctac

SEQ ID NO: 86519 - DNA, 568 bp, Zea mays
  Clone ID: MRT4577_178914C.1
acgcccacgctgagatcgtatccaacacaacgacggcgctcattagcaatgtcgcattgaatgctgcgggcgcggacgcgctgctgctggtatgagatgtgtctactggatcgcgcgctgcggtgtaggcgacagtgtgaagagcgccagcagaagcgttgggtgccgcaaaccatcagacagcagggcgatacggacgacctaatcgcgtactagaacaactggacctgtatccctaacctcgatcatatgttcatcaccaggaacacgaaggaagcccacgcatcagcggaggagctgatgaataaccatgctccaggacctgtacaagatgacctatcgtcccgtgaagccagctgctgaaggttgctacaaacgtcgagatccgtggaacctcgccacacctcacttagcagctccaccttaacatccaggagcacggcagccttcacggccagcgccacagtgtcgacggcgccggcgaccacctcaacgacgacggcgtcgacctcgacgagttcagctacctgagcagcatgagcagcatcagcagaagtgggtgacgact

SEQ ID NO: 86520 - DNA, 139 bp, Zea mays
  Clone ID: MRT4577_178915C.1
tcgagccggccgggtatataaatacactaccatggcacatctcttcctcaccttcgcatcccacaccccccgagctcagcttagctccactccagctccaatcgcagtcgtgagcagagcgagaggcagctagctagag

SEQ ID NO: 86521 - DNA, 262 bp, Zea mays
  Clone ID: MRT4577_178916C.1
gaacggtcagggatatgtataaatttctctaactttagcatccgcagtgctagggttcgtgtgtggggaatgcgtttgcggcgagacatctatgtactgttaagtgttttaacgacaccaagggctttggtgttatctcctccgaggacggaagcgaagatctctttgtgcaccactcgtgtatcaagtcggagggctttcgttcattcgcggagggctaagacgtgtagttccttgtttcagagggtgacgactgttgcac

SEQ ID NO: 86522 - DNA, 336 bp, Zea mays
  Clone ID: MRT4577_178917C.1
aaaacacaacaacagtttttgaccttaaaaaacgctgcccgccaccatggcatgcacccacgttggccggggggagggcccatttccccaaaagaagaagggggaacgccacaaacgcacgcacaaatacgggtgggtcaatccacccaaaaatcaacaccgaagggggatcgacggcccgatttggacagacacgtgtacaggttttattttttttcacggatttcctcccctccctcctttttttcttggggtttttttacttgatgttgaggggcaggggtttgcccgcccactccttggggcactcgagcatggggtccacgagcttgccct

SEQ ID NO: 86523 - DNA, 342 bp, Zea mays
  Clone ID: MRT4577_178918C.1
acttaaacacaacaacagtttttgaccttaaaaaacgctgcccgccaccatgggatgcacccacgttggccggggggagggcacattttcccaaaaaaagaaggagttacgccacacacgcacgcacacatacgggtcgatcaatacaaccaaaaatcaacaacgaagagggatcgacggcacgatttggacagacacgtgtacaggttttattttttttcacggatttcctcccctccctcctttttttcttgggggttttttacttgatgttgatgggcagaggtttgcccccccacttcttgaggcactcgagcatggggtccacaagcttgccctggt

SEQ ID NO: 86524 - DNA, 142 bp, Zea mays
  unsure (1)..(142): unsure at all n locations
  Clone ID: MRT4577_178919C.1
gtacaacccaacagacnanaanacaagaacatctctatttagccagggggaggacaaccaacttctattctatctcttatgtccttcattcgactcgattgcccgnggccccaaagggaaagtcacgagccaaccaagccat

SEQ ID NO: 86525 - DNA, 2058 bp, Zea mays
  Clone ID: MRT4577_17891C.1
gggtacctcgaggccggccgggaacttgcatgaacggtacggccgcgcgcggggtgctccacgcgtccagcgcgagccaggcgtccttcctttccttctccccgccgtcgtcgtgtcctcatccagccgtgcaggcagtggcggtggaccggagatctccgctccagctccgattgctgtgctacagagcccaagagaagtcgttggtgcagacagccttggattggatgtggaatgaggcgatggcatctgacggatcatcctcctctaccttccgggggttgtacggcagcgtccacggccctgcggtgctcactggcgcggcgttcgcgctcgtggcgctcctcatctcgctctagctcatcctgcagcacctcagatcctacagcgatccagctgaacagaagtggatcatagctgtgctgttcatggtgcctgtttatgcctgcgaatcgataatctcactgtggaactcgaagctctctctggcctgtgatatattacggaattgttacgaagcctttgctctgtacgccttcggacgatacatggcgactacacttgaggcggggaacggcaagtgttccgtctgcttgagagcaggaagagggacgagctgagccaggagttgctagacaaggcacgagctcgtaaccgcggcggagcgtacagtttcttctgtgaccctgacgctctgggagagaacctgtacacgattataaagttcggccttgttcaatacatgattctcaagacactatgcgctctcttggcgttggtcttggagccttttggagcctatggagatggcgaattcaagtggaattacgggtatccttacattgccgctgtcataaacttcagccagacatgggccttgtattgccttgtgaagttttacaacgcgacgcatgaaaagctacaggcgataaggccactagccaagttcataagctttaaggccatcgtgtttgccacttggtggcagggagtcggcattgcgatcatctgccaaactggactcctgcccaaagagggcaaagtgcagaacgcgctacaggacttcctcatctgcatcgagatggctatcgcagcggtagcgcatgcctacgtcttcaccgtggagccgtaccagcacgtccctgctctacctcctgatcacggggaagtcatgtgtcaggaaagcaaaatggaggtggaggtggatgtcgacgacgatacagggggtacaccagctaccattgcgcagcaggagacccatgtcgaagctccaggagggacgagcatcaaggagagcgtgcaggatgtcgtcctcggcggcggccagcatgttgtcaaggatgtcgcgcttacgatctcacaagcgatcgggcccgtggagaagggcgtcgggaagatccaggagaaattccaccacatctcgctgaagccaggggacaagaaagagcctcaagttgctgtggaggagcacgtaactgagaacgtggtggatgccaaacctgctgttgcggtcaacgcggaggttgaagtccaacagaaggcgcaggatcgtcgtggcgaggaagaaggtgtgcaactcaaaagaacagagaaggacgattgtcacacctgagagtgccatggtggaagatgcaaaggaagcgggagcaagcggagtcgaaggctgaagctgtgcgagggccggacggtgaacaggggtgattgtgttggcctgcatctaaatgggctgtaagtggtgtgtggatgaattgtgtagtgtgtcggcccaacagggtcagttctggtgtttaaaggagttgtaacagacttaagggagaaattaagaagaaaatagagaacttactaccaactccagcagcctccgtatacggctctccatccccttttttcactgcgcagtacactattcatcagtccagcagactccgtatccctctccctaaaaagcacgctgtgtacttatactcctcttttccacgtcttctctcctctccgtacaagtctgagaaatggtgcaattaaaagccccgatagagtgtaaaaaaaacaccaacagcc

SEQ ID NO: 86526 - DNA, 293 bp, Zea mays
  Clone ID: MRT4577_178920C.1
ggggttgggtaacttttttttttttttttttttttttttttttttttttttttttttttttttttttttgggcaaaaaagtttctttatgcgggttgctttgacggatcaaacctcaaatttgaaaaacccggccttaaataaaatattttgctcctgaagttcaaaatgaccgggacccaaccaaaaacaggccttatttttaaaaaaggaacccccttaaagcaaactttgaggcaacacgttacaccagtggggggcggggacaaattttcgagggggatccttttcttt

SEQ ID NO: 86527 - DNA, 632 bp, Zea mays
  Clone ID: MRT4577_178921C.1
aacacgcgtccgttattttttttttttttttttttttttttttttttttttttttttttttttttttttttttttttttttttatccttgaaagtaggaaataaattatgtatataattttgttgattacaaactaaactgccactgaaagttgtcatgggcaatctgttgggtacgggcggccggccagggcagcagcagtatataaggtcggatctgatctggcatactgccatctggggccataagcccagcccatgacagaagatataattaaatctcaacacatcagtgtgttcaatttatctccatcagaggataaaatgagatctgtaccacagaatcgatcgcaatggatgctccaccttccatctgctcaatggtgtcaagaagtctctcattgtctaatattgctaggagacctccagcagcacgaacttgaacatcgcttccaagatccatcatggaattaagctgctctgttgccgccctctagattggctcagaatgttgaagatgaagggctcgcagggagatcacgcagggaggattttgtcaacaacatttgcagaaggcctttaggtatcttgccggttccagacaacatcacacaacgacatcagccacctccc

SEQ ID NO: 86528 - DNA, 327 bp, Zea mays
  Clone ID: MRT4577_178922C.1
cccacgcgtccgctcacacgtacccccacccatccttgggttcagactgaacgctctgaagggccggtcccccatgcgtggggggcctctaggggggccatggtgctgaactaccgcgagcgcggcttctttgattgcctacaccgtgagcagaggatacgatgtacatcgctgggagcgtcgaaacgaactgagcactagcggagtcggtgctcggttagaccctgaccattgcgcaccatacgttaacgcgctaaaacgcatcattgacagcacctaccactcagagcactagccgggcaaagcctctggtagcttctccaggag

SEQ ID NO: 86529 - DNA, 401 bp, Zea mays
  Clone ID: MRT4577_178923C.1
aaacatcatgcctaattactttgcttctttgttacaatgacacaatgcttataaacgcggattatttgataactaaccgaaatttgatattccttgatcataatgactatcatcaatctatacggatacctagatccaagaactataaaaccctctccaacatacctcctcatgggtcctttcaactgatgacatacatacttcgctctcaaatcatacctattatctggttctaaacccatattgtaacccagtttattacccgtataaacctcattttaaatgctccgaatcatttcttaaaaagaatcacattacctaatgttaacattgaaatgactgataatttataggcctctatccccaatataagatctttacacatttctgcttcatatgct

SEQ ID NO: 86530 - DNA, 601 bp, Zea mays
  Clone ID: MRT4577_178924C.1
agtcgctgttcctgccgctgcggcgagtccgcgtgctcatcctctccaccacctccatgcgcggcggcgtccccgcgtggttcggcaacatgacgtcgctcaccgacctggagctcagcggcaacttcctcaccggccgcatcccggagtcgctggcgcgcctcacgaacctgcgcttcctggagctctactacaacgagctggagggcggcgtccccgccgagctcgccaacctcacgcagctcactgacatcgacctgtccgagaaccgcctcacgggccccatcccggagtcgctgtgcgcgctgcgcggcttgcgcgtgctccagctctacaccaaccgcctcacgggccccatcccggccgtgctcggcaactccgcgcagctgcgcatcctctccctgtaccgcaaccagctcaccggcgggatccccgccgacctcggccgctactcggacctcaacgtcatcgaggtgtcggagaaccagctgacggggccgctgccgccgtacgcctgcgccaacgggcacctccagtacatcctggtgctcagcaacctgctgaccgggcccatcccgcccggcgtacgccgagtgcacgc

SEQ ID NO: 86531 - DNA, 649 bp, Zea mays
  unsure (1)..(649): unsure at all n locations
  Clone ID: MRT4577_178925C.1
aattcggcacgaggattaaaggtctggaggggttgaaggcttccgctaatgcggtgggtactccaccgactgagcagtgggtgggggatatcgagcggttcttgttcctgcaagaaaagggggccatggcgcgagcgccaagcatgccggcggcgacggcggtagggatcgtggtcgtgatgctgctggccgccggcttccgcggcgcggaaggtaaatcgtgcacgaacgcgttcccgggattgacctcgcacacggagcgcgcggcggcgcagctgcggccagggccgccggcaacggtgctccagcccatcatccaccaccaccgccacggacgcgagcagcacctcaccccgaccgacgagtccacctggatgtcgctcatgccgcgccgggcgctgcggtgcgaggaggcgttcgactggctaatgctctaccgcgagctccgnggcggcggtggctccgcgcggcccggggtcgcggctggggcgttcctctccggaggcgtccctgcacgacgtgcggctggagccgngcagcatgtactggcgagcccagcagaccaacctgnagtacctgctcctccttcgacgtcgaccgncttcgtctggagctttcgcaagcaggccggcctgacggcgccgggaac

SEQ ID NO: 86532 - DNA, 944 bp, Zea mays
  Clone ID: MRT4577_178926C.1
gccggccgggctgcggacgcctacccccgcgcaggccgcagccccaccgccgcgttccctcctccccactcgtgtgggaagctcagcacaaagttcgcgttgcgccgggcggctcgtccttcttggaaatcctcccacgcaatcgcctccccgccccgcacccgcgtgcgtgagacgccgcctcgcactgccacagtgccaccgccgccccccaccccggggcgccgatctcgcgtcgcgtcgccctggcgaggtggtggcgggaggatgggggcgtgcgtgtcgcggcccagcgcgtgcgtgggcaagccccacacgccgcggtccggcgacgccagcggcctgtttcgggcggcgggggcggggcgcggcggaggcgcagccgccgcgtcgggaaggggcggaggacggcgccgtcgcgcgccgcgtcgatggagaccattcaggaggccgaggtgcccggctcgtcgtccgccgccgccgccgatcaccggacgtacagcaaccccgcgttccaagtctcagggacagggagcattgaggaggcctggtacgattccttggcgatgagcgagtcggatgctgaagacgatttccacagcgtgcaagatgatgctttctcattgaatggcttcgagaatgaagctgcattgagcatgagagatggcaacggtgggagcttcaatggagctgctcaatcaggcgagcagcaccataaaaagccaaagtccagcgaactgtcgaaggggagctcggagaatggtgtaaggacgtccattagccatgaagatgcggtgagtgtttctggtgcggataccacgcacggtggaggtaggatactggacgattgcgggcttctgccgaataattgtctgccatgcattgcctctgctgttggggtgaacgagaagaagaaactccctcgagccctactcattcaatga

SEQ ID NO: 86533 - DNA, 172 bp, Zea mays
  unsure (1)..(172): unsure at all n locations
  Clone ID: MRT4577_178927C.1
ncgtcntttgtcttatgagtggacgttgcgtggtgggaattatggacgggtaaggcggaggcattaaacaaagggggggaatgtaagaaacactcacggcgcgagggtgacgacttaccgaaaaacagagaaagcacatatggtagcatacagaaacattaacgctgaaaga

SEQ ID NO: 86534 - DNA, 198 bp, Zea mays
  Clone ID: MRT4577_178928C.1
tcggccccaactggcggaaaattgagaaaggggattggctttattccaatgggtttcgacctggccatgatgtaaccttggttaatgggcccattgataaaaaccttattaaggtagcttcttaaaaaatgcatttcgctttcattggggtccatttgggcgcttaacttaactttcatttttatttgggggaaggga

SEQ ID NO: 86535 - DNA, 276 bp, Zea mays
  Clone ID: MRT4577_178929C.1
ttgctttcacatatatcctcagccaaaggctgctagctcctgtgttggtgtgtgtcctacaccctcatctggatcacatctacacgccgccggcccgacgaccgccgtcacctttagcgattggaaggatcacacgtgatctgcccgtggcggtggaccatcagatttagtctcccgtatggcgccatcactatcacactctcgtaccaagctgcgcggcattgggactcagactatctcttatgtgatgcgagagcgcacccattttacctcttt

SEQ ID NO: 86536 - DNA, 220 bp, Zea mays
  Clone ID: MRT4577_17892C.1
cccgccgcgagacccgccccgaaaacccggggcgacccacgcggttgccagcacgcaacaaagaaagaagaatccgggggcaacaacagagcaacacacggcgaccaacagaaatccccccccgacgcccccggcaccatctacagggggagaaaacgcgacacggtggcaacaacgctcacaagccccgagagcggggccactgcccccaaacacccca

SEQ ID NO: 86537 - DNA, 502 bp, Zea mays
  unsure (1)..(502): unsure at all n locations
  Clone ID: MRT4577_178930C.1
tttttttttttttttttttttttttttttttttttttttttacaccagacatcacagttcattacgatccattaatcggctcacacaattacagcactattcaaagaatccttagctctctaagctagccgctagcacaccaatttacaatgggctaatccccagttcacacgtcccagtaataaatagtcaaaagaagcattaaacctccattagaaatcccaccggagtccggactgtatgataatgtctatttttcttctcaaaaaagacattatcatacagtccggaccccggggggatttcaaatggggggttaatgcctcttttgactatttattactgggacgtgtgaactggggattagcacattggaaattggggtgctagcggctagcttagagagccaaggattctttgaatagggctgtaattgtgtgagccgattaatggatcgtaatgaactgtgatgtcggggtaaaaacagaaaaaaaaaatntat

SEQ ID NO: 86538 - DNA, 385 bp, Zea mays
  Clone ID: MRT4577_178931C.1
aattcttaataagcagtttaagagatgttctaataacttgcctcagactcattcaaacatcttattgttgaaaaatctttggcttcctattatttaaatctttattcacatttctagattttagattccccaataattctccagaaatcataaattgcacttttctcagcaaatacacctaatataataataaataaaatttaataacattatgatgaatctgtgaaaatctaagcctaaacctatcaagaatatttactaaaataattcaaatttccatctccactcaataccctaaaaatccaaagagatatctctaacctaaatttaatcaagttcccataacttgattcctaattcgaaggattaattattatgatttttt

SEQ ID NO: 86539 - DNA, 389 bp, Zea mays
  Clone ID: MRT4577_178932C.1
ggggacaaaaatcggtgtttttatatgcctggggcccaaatcacacaaagggattgccggaggaaaacaccggactctttaaaataccctttttaccaaattaaaagccctacttattggaattttatcacttatttcgcccaattgggatgggcccaccgcgcaactgttcccaggatcaccggggtcccgccctgggggatatgtccatgccgctgatctttggaaaaactcattcagtttcacttcccctttttgggggtatctggggagaaggggcccatctcaagcttataagcctggcccttttggtgaatcaaggcacatttaatttgcgagggcctttggcaaccttttttagggcccggggaaccccttcaaggcaattt

SEQ ID NO: 86540 - DNA, 289 bp, Zea mays
  Clone ID: MRT4577_178933C.1
tgtttttttttcttgccggccgccaaagagatcgccatttggactgagtccttttcgtttttgtcggccgcaagggagctttttcgggccgccgttttactcggttgccagggagaaccagccgttggttgaacctggccattaatttcttagccgggcccaggcaactgaccgtccaaccgtcgttgaatcggccggcagccatactcggttgttaagtctggccggcgaaccggggccctgggggctttcccgtcggggggcgcgtcccttattgcggccccccccc

SEQ ID NO: 86541 - DNA, 153 bp, Zea mays
  Clone ID: MRT4577_178934C.1
tttttgaatgagcgtacacgagcacaggcacgcgggcacagccacccacacggggttaacacgcacgcgctcaaacagttctaagtggcgcttgccgccggcatagtcgaggataacctgctttccggaccactacttacggctattgcggcc

SEQ ID NO: 86542 - DNA, 444 bp, Zea mays
  Clone ID: MRT4577_178935C.1
ccggccgggggatacttcaatgacgtccgataactgctccacctagcaccaattcgatgacgggaatagtctgcgaccacttcggccgagatggctcgccttcttcaccgtggtcgtcggcgatgacctggcatggatcacattccaccgcttggactcagatgtgttcggcggcgcggccgatccactggtgcagcgagaacgcctctttcgtacagatctgtaactaggtagccgccggtagagcatgctcgtctagtaggatgtgtgtccctatcggtcaggaagctgtgcttccataggctctcgccgagtcttgtgcttaggtggagcacaactgaatcgactttccaaagctatgggtggcctgcgctatgggacggtactgaggcatactccgctgggaggggtggggacaccatgctgtggggcttctctggtaag

SEQ ID NO: 86543 - DNA, 345 bp, Zea mays
  Clone ID: MRT4577_178936C.1
tacctttcacccgagaacagcagggaggggggcggagagaaaaaaaggaggctgggggacatccgcgaacacaccaagcaaggcgaggacgagagcaacaaatgcgaagaggggcaaacccacaaaggggacaacgcgagaggccaccacgccgaaacaacagggaagaaggccgcatcccacaacaagcaccacaagcgggcggacggcgccctgaacaaggaaccgccaaaacacgagggcggacccagggcactgggaagagcgggggatgcaatcaccaacaaccgagaacaaaacctcaaggaaaaggttgcagcacgacgaaacaaaagccaacaggca

SEQ ID NO: 86544 - DNA, 334 bp, Zea mays
  Clone ID: MRT4577_178937C.1
atactctctccgggggctcgcaaaaaactagatttttaaaaaaatacttccaaatggttcggcccaaatcaccataacccccggggttgttaagcccacgccctactaaccagtcaaaatttagaaaaattggggcactggggaacatgcccagggggagttattcctgccaatctcggtggcaaacagaaagcctaattggtctccccatcctttccaagttgaccattttccggcacaggggccccatttgttgcactactatcccggacctttttatgccttttgggcccgttttcactttctgaattcgaccccagtgcatgcctcccaa

SEQ ID NO: 86545 - DNA, 704 bp, Zea mays
  Clone ID: MRT4577_178938C.1
ttaattcggcacgaggaaacaccctgtttctccttgtcttggatgtgagcccggtgctctgcattctccttcgtcatttcctccaccgctcacctcttctgctccccaccccaactccgcccccatgaatatgatcatcagatgcggctagcatcatatctcgcctccacttcgtcacctcctcgccattctatcccaccagctgcatatatccctggtgtgtgaggtcagctgttttagctcagcgcgcgcggcgtggcagcaaaggaagcaaggagggagagcagcggcggcggcgtagcatgcggcggtgagagcgagggagctagggaggaggaagggatagccgagagagcgagagccagaggatgatgcagctgccgcagcatcacaagccgtccgcccactcctgctgcccgtcgtggatccggaggtccccgccgtcgccgccgccgccgccgcacaagaagctgggcggcgggaggagccggtatgcttgccgcctcgtgcccctgctcgtgctcaccgtgtacagcgtcgtcaccgtgcttcgcatccccagcgcctccctcgtcgtctccaccgccgattcagagcgtgtggacaggcgggaggacttggaggcgctcaagacccacctgccgtcgaaccagaacagcctcgaggcccgcgaggagacgcggtcggtgggctccctcccctgc

SEQ ID NO: 86546 - DNA, 438 bp, Zea mays
  Clone ID: MRT4577_178939C.1
tttttttttttttttttttttttttttttttttttttttttttttttttttttttttttttttttttttttttttttttttttttttttttatggggggccccaaaaaaaggggttcatgggagaaattaaattccggtaaaaaaagggggaaaacaaggggaaaaggtttgggcccttttcccccccttaaaaaaaaaaaaatgggggttggtaaaaaaaaattttaaagggggtaaaaaacccttttggttaaaagggaacaaggggttcccaacccaacttttttggcttttcgggggaaaaggggccccttttcattggggggggttcccggggaaggtcccccgggttttttaaaaaattggaacaaggcttttaacctggaatttgggggggttccaaaaaacccgggggaaaggctttttttttttttttt

SEQ ID NO: 86547 - DNA, 182 bp, Zea mays
  Clone ID: MRT4577_17893C.1
atgctaaatttctaagagatgcacggggccgtcctcaacaaccttaccttggggtacaggacaagacgcgagaggggactcatctagatcattgtcccacacgttgaggtcaccatattccaatgccagtactacgtcgagcagctccagcttgaacgccggggcagcctgctccgctgcac

SEQ ID NO: 86548 - DNA, 421 bp, Zea mays
  Clone ID: MRT4577_178940C.1
gctggggtggtgtgttttttttttttttttttttttttgttttttctttttttttttcctttttaattttttcctttacctttttgttttccttccggacccggggggcgccccgggaaacccggaccggaccctggaggaaacccacccctgcggggaagagggggggtaaacaatgccacaaaaaaggcaaacgcgaggcccagggggaaagcgtgagccgcccaaaatagcaaacaaaaaaacagccagaggcaaaaagggaaaaccccgggggcccaaagaaaagagcaaacccaaaaaaaatgagtggaccccacagcccccttccaaaggagaaaaccgacagggccacctgcatgaaaaaattggccaacacgcagagagagggggtttgagtattgggccccaggggggcctt

SEQ ID NO: 86549 - DNA, 1585 bp, Zea mays
  Clone ID: MRT4577_178941C.1
ctaaatcccgtcccccaattccattctcggaagagaccatttccttcctcctgatctctcacggagttcctctccatggcgacgccccgctctccgagcccccgcgccgaagcgcccctcgattccgcgccgctgctgggcggtgcctccggcggcgggagccgtcgccgaggcggagcgctccgccgaccctcgctccgcggtgcggcgcggctgctgcgccgcggcgggcggcgagccatgcgggagccctcggtgctggtgcgggaggcagccgcagagcacctggaggaacggcaggcggactgggcctactcccgccccgtcgtggcgctcgacctgctctggaacctcgccttcatcaccgtcgctgcggtcgtgctcgtgctcagccgcgacgaggactcgcccatgccgctccggacctgggtcgccggctacgccctgcagtgcgtcatacacatggtgtgcgtcgcaatcgagtaccggatgcgccatggccagcgcggcggcgccggcgcagcgcccgctgacgaggaaaggggcagcgacggatcgtcgtcgtctagtgatgaggatgacagggagctcgatcgccatggtcgccgcaccgattacgccagtattgcaaaacacttggagtctgctaatacaatgttctccttcatatggtggataatcggattttattggatatctgctgggggtgaagaggttatccgggacgcacctcagctttactggctctgcatagtcttcctggcatttgatgtgttttttgttgtattctgtgttgctctggcttgtatcattggtattgctgtctgttgttgccttccttgtatcatagcaattctctatgcagtatctgatcaggaaggagcatctgaagatgacattcgtcaaatcccaagatacaaatttcggcggaccgatgagcctgaaaagcaagatgttgaccccatgggtccttttggtggaataatgacagagtgtggcaccaatcaacctattgagaaagtgcttgcagctgaagatgcagagtgttgtatttgcctatctgcttatgatgatggtgcagagttgcgggaactcccttgtgggcaccatttccactgcacctgcatcgataagtggcttcacatcaatgcaacatgccccctgtgcaagtacaacattcggaaaagcaacagtagcagtggaagtgaagaagtatgaatgcaaccgcttgacaatgccaatctgtttaaacttcgtgcctgtgtcgttgctaatgtaactccagggcttgagcagtgtaaatttttgtactaaaagaagtgctgatagagtcaattatgtattaaagttactcaaagtgctgtctatatgtcgtataagttaataaatagttgggtgtgcatctgtatttactgtcaggaatgattagttgcactgtaacttgtattctttcgagtgattcgggcgttttcctgctgggctatgatggcagtttgtcttccatggtttctactgacaagaaattttcgactggccattatttacagcagcgacatagctgatgaaagaagccaattggtgatgg

SEQ ID NO: 86550 - DNA, 168 bp, Zea mays
  Clone ID: MRT4577_178942C.1
ccaggaccgtagctgaagcggtcgttacgaccctggatccgtagcaggcaccctcacacgaccagatgtatcactgcatcggatactaattacaaggtggagcaggcatgattcagaagtcaactgcatttagtatcggccttctgataaaactagatatacctatat

SEQ ID NO: 86551 - DNA, 474 bp, Zea mays
  Clone ID: MRT4577_178943C.1
ttttttttttttttttacaatgcaactaataatatattcctgattttttttttttttttacaatgcaactaataatatattcctgagacagcactttgagtaactttgataaataactgactctatcagcacatttttttggatacaaaaatttacactcatcaaggcctggagttacattagcaacggaacagaagttgaaacagattggcattgtcaagcggactgcattcatacggaacagaagttgaaacagattggcattgtcaagcggactgcattcataagggggcatgttgcattgatgtgaagccacttatcgatacaggtgcagtggaaatggtgcccacaggggagttcgcgcaactctgcactgtcatcgtaagccgatacgaaatacaacactctgcatcttcagctgcaagcactttctcaataggttgattggtgccacactctatcattattccacca

SEQ ID NO: 86552 - DNA, 1499 bp, Zea mays
  Clone ID: MRT4577_178944C.1
agccggccgggatatttccattcctacgaagaaagtatttccttcgtcctgaatcctgatctctcacggagttcccctgtatggcgacgcctcgctcaccgagccccagcgccgccgcgcgtctcgattctgcgccgctgctgggcggcgcctccggcggcgggtcccgtcgccgaggtggagcgcttcgccggccctccctccgcggcgcggcgcggctgctgcgtcgcggcgggcggcgggccatgcgggagccctcggtgctggtgcgggaggccgccgcagagcacctcgaggagcggcaggctgactgggcctactcccgccccgtcgtggcgctcgacctgctgtggaacctcgctttcatcaccgtcgctgcggtcgtgctcgtgctcagccgcgacgaggactcgcccatgccgctccggacttgggtcgccggctacgcccttcagtgcgtcgtacacatgatttgcgtcgcaatcgagtacaggatgcgccacggccagcggggcggcgccggcgctggcgcagcgcccgcagacgtggaaaggggcagcgacgcatcgtcctcatccagtgacgaggatgacagggagctcgatctccatggtcgccgcactgattacgccagtattgcgaagcacttggagtctgctaatacaatgttctccttcatatggtggataattggattttattggatatctgctgggggtgaggaggttattcgggatgcacctcaactttactggctttgcatagtctttctggcatttgatgtgttttttgttgtattctgcgttgctctggcttgtattattggtattgctgtctgttgttgccttccttgtatcatagcaattctctatgcagtatctgatcaggaaggagcatctgaagatgacattcgtcaaatcccaagatacaaatttcggcggacggatgagcctgagaagcaagatgttgaccccatgggtccttttggtggaataatgatagagtgtggcaccaatcaacctattgagaaagtgcttgcagctgaagatgcagagtgttgtatttgcctatcggcttacgatgacagtgcagagttgcgcgaactcccctgtgggcaccatttccactgcacctgtatcgataagtggcttcacatcaatgcaacatgccccctgtgcaagtacaacattcggaaaagcagcagtagcagtggaagtgaagaagtatgaatgcagtccgcttgacaatgccaatctgtttcaacttctgttccgttgctaatgtaactccaggccttgatgagtgtaaatttttgtatccaaaaaaatgtgctgatagagtcagttatttatcaaagttactcaaagtgctgtcaatatgtcatataagttaataaacagttgggtatgcttctgtatttactgacaggaatatattattagttgcattgtaacttgtgtccttttgaatgatccgggtgttttcctgcttggttaatg

SEQ ID NO: 86553 - DNA, 284 bp, Zea mays
  Clone ID: MRT4577_178945C.1
gcaaagtcaaggtttcaatctatgctgtccacaaaataagataaaattagatatataattggtcatagttccctcacgaccaactgaagtgccttatctatacccctatatatctcaccacttcaaaaattgcaaaagccaaccaatcaaatgtccaccatagtctacacctcttctaaatgcacccagatcaatcccaccgttataaccaatgaacaagatcaactcaaacctttcatttctcttactcactcaaatccaacgatcaatctttagatcatccc

SEQ ID NO: 86554 - DNA, 198 bp, Zea mays
  Clone ID: MRT4577_178946C.1
acacggtgaatagcgcaagcaattagatgataggagtatgtggattaagctcgtacacataggatcgatgttgtgaggctagccagcacagcatgcactttcagaggctcatttcacgcgtactagacctcattcacacggtagctagcgcagagcccttgacccggagggccccagtcatttcacctctgcgcactc

SEQ ID NO: 86555 - DNA, 601 bp, Zea mays
  unsure (1)..(601): unsure at all n locations
  Clone ID: MRT4577_178947C.1
aaggagctagataatgaaaagaaaacatatttatccatgtaaccagagatggcggtcgacagaagatctcgatatttgacttgttagttggtgatattgtgcatttatcaattggggaccaagtgcctgctgatggactgtttatacatggatactcccttctgattgatgaatccagcttatcaggggagagtgagccagtgtatacttctcaagataaaccattcatattggcaggaactaaagtgcaagatggttctgctaagatgatagtaacagctgtcggtatgcgcactgaatggggaaggctgatgagcactttgagtgagggaggagaggacgagacaccattgcaggttaagctaaatggagttgcgaccatcataggaaagattggcctggtatttgccacattaacatttgtagtcctgatgactagattccttattgacaaaggtttgacagttggtttgtccaactggtattcaactgatgccttgactatagtgaactactttgcaacagcggtcactattattgttgttgctgttcccgaagggttgccgttgnctgttactttgagccttgcgtttgcaatgaa

SEQ ID NO: 86556 - DNA, 299 bp, Zea mays
  Clone ID: MRT4577_178948C.1
gacgagtcaatgttacatgcaataccaagcaaacaaaagggcaaaccttctttttctgtacagactacagagctacgcctgacatgtctgcaaatcaccccattacacaataccgacgaagaagaaaaaataaatatatgaacaactctacttacaaacaacccattaacatgtacagacagccctgtcggcacgtggttcctacaagaacagaacaaggaaactcaaccacatcacattactgcagggcttattagtcagcacaggtgaaagttgggtgtcgggtgacattcaaaatg

SEQ ID NO: 86557 - DNA, 245 bp, Zea mays
  unsure (1)..(245): unsure at all n locations
  Clone ID: MRT4577_178949C.1
cgaatcagtataagtatagcggaagcggctgcacgtagccgtaccggtatctgcacagtgtccgacccacgcgttcgcgtcttactgagctgagctactgtaataccgagagatcgaacaactgtggtccgtggagcgtcaagagagagagcttttgtgcattctgggggnccgggggcaacgagagagagagagagagccatgtcgtgcggaccaggatatcgcagatgcaggaggagatgata

SEQ ID NO: 86558 - DNA, 472 bp, Zea mays
  unsure (1)..(472): unsure at all n locations
  Clone ID: MRT4577_17894C.1
gggggatggnttattggttggtgggggacgctctcgcggtcgggtgggagccgccggactttcccagcatctgcgagtcatgcctcggctacaacccctacctccggatgttaagagcgggggggggcaaataatgcacaatctgtacacgtcctttggctggattgcggcggcgtcctgtgcgagatgcatggttcaacatgactgagatctgccagacatgtcgcacgctaaggaatggctgccaggtctgcctgctggatcttgaatatggtctgtctgctcaggtccgnggttcagcactctctctcagttccaatgttgcacttccaatgagcgacgtcaatcgcgaatttttgccagagagcatgactggagggccatagctggcctcgactatgattcatcctatgggaagggttggccaaatgctacctttctgaacctttaaagacagctcctttttactaga

SEQ ID NO: 86559 - DNA, 469 bp, Zea mays
  unsure (1)..(469): unsure at all n locations
  Clone ID: MRT4577_178950C.1
gtaaatattattaatttattgcaagtttaaagtaaacatgattgaaaaacaatttcaaataacgattggaagaaaaatttacaaattggttaacgttttaataatactttaccatttttaaatcgattgtttatataaaggcaggacaatacgaaaacaaccctaaataagattgtttgtttaaataaacaaaataaattaaactgaaattaaaaattaaattctctttacatgttgaatataattaggattcgacgactgctggtacttgattgatctcatgaatttcggcataatctcttttttctatttcttcagctaggtaagaactgtcttctttttcaatcacttgcgaagtttgattttcttctttagagcgctttttatgttttttgtgttttgattttgtttcgccttcttctgatgtatttttttnctttatggacttttatgcttttttatctttttt

SEQ ID NO: 86560 - DNA, 378 bp, Zea mays
  unsure (1)..(378): unsure at all n locations
  Clone ID: MRT4577_178951C.1
gggcggccagcgacaaagagcggccgngngnattgtcaaggcaaccccaacggcgagcagcacgccgcaaccgccgagaccacgaggcccgaccagacaccgcagggaacaagccgcccagcagccggcgacccgaccgcgaacggccacgcggacacgagcccgcagcgggagacgaacgagcggaccaacgaggacacggaacaccagcagaacgaacgacagacggagggaaaacaacgacaaagaaccacgacagcaaaccacagggcagagacacgaccaaacaacaggacaacggaaagcgcggaccaccaaccaacaaggggcagcaaaaagaggccaaacaacaggaggaggacaaccccggaaaggagc

SEQ ID NO: 86561 - DNA, 347 bp, Zea mays
  Clone ID: MRT4577_178952C.1
ttgcaaccctcggttttttttttttttttttttttttttttttttttttttttttttttatcttatttttctctttttttatttcgttgagataccaaccccaggatatgggctgatgagggctggccctggccacctaaccaaaacgatagtggatcctgttacgggcccctccattggatagaaacaaaaggctgccattgcgaaacatgcttctcgaagggcagccactcttggtcgtgttcccggtaccacaaagggaaagagcctaccaacgtcccgagtggccttccagcgacccccacttgctcagccttcccccaccaaggcaacaggcccgccagatc

SEQ ID NO: 86562 - DNA, 231 bp, Zea mays
  Clone ID: MRT4577_178953C.1
aattcggcacgaggctgagatccagccctgtgtctggttttaggtcgtctgcagaggatttagcacgcacgtccgttgagaatggagctccgagggggcctgccgcggcgcgtcggccgcatggtctgagccattgaggcgggcccttgtatcgagaacgccctaacgtgtatcggcgcgggcgggcagcagaggctgctgtatctggattgtatcctgactaagaggcgg

SEQ ID NO: 86563 - DNA, 608 bp, Zea mays
  Clone ID: MRT4577_178954C.1
aaataccagaaagaaatggaatcacgcaaagctagccagctcacgctctagcttggtccggcacacccacatctttcccacctagctagtgtcccatggcatcatctatctatctatcccatggaatcccaccaccaccaccaccccgcacatcgcttatcacccgacaggcagcgtgaggccaacgccatgtattatagcacaccaatggaatatgatggtcccggccgtcgcccctataaattcctccgtcccgtcgccatgcattgcgcaggtcgatcaggagatcgagcaggtaccggccatggactactaccgcgagacctacggcgggtacgggatggcgacgcccgggtacgcggcgccggtgccgtacggcatgtcgcaggtgaacatcgacggcaactacggcgggaggccgatgccgccgcagcccacggtgaagatctactgccgcgccaaccccaactacgccatgtccgtccgcaacggcaaggtggtgctggcgccggccaaccccaaggacgactaccagcactggatcaaggacatgaggtggagcaccagcatcaaggacgaggagggctaccccgccttcgccatggtga

SEQ ID NO: 86564 - DNA, 737 bp, Zea mays
  unsure (1)..(737): unsure at all n locations
  Clone ID: MRT4577_178955C.1
gnatcacctaacanaccaagtggattcgttttagaggagttaggaggattgaatgaagaagagatggttcttttaaattctaggattggttctcgtaggaaaaagttaggaaaaggaatgcagaagaagatattggagatgatttcctatcagatagtagtgagggagcgggtagcccaacctatgacgagtcaggtgacagtgagtcaaatgatggtgagttcacttttgagttaattatgcactatttgtcatgtcttttttatgattaaaattatcttcaatatcattgtgtaaggtggtggtgatgatgaagatggtgaccctagtggtccaagttctgcagctaggccaccaactcataatggtcctggtcaagatgaacaaccagccgctctccgtccaagatcaaaaaggcagaagaagctctctatcaagggcttgtacatgcttgataagtgatctaatcttcaagcacaagcacaagaatacggcgtatgcatggactcattcaatggcaagattttgaacatgtggctctattgtatcagctttgtttcagtttcagcacaatattgctgctatatttggtttatgtggcctaccaatatttagaactgtgattgatttctatgcattatttgaactatgctaccaaagtactttatttatgtaatatttagtttatttggactgtctcattattctatggtctctatggatatatattcgcagtc

SEQ ID NO: 86565 - DNA, 1413 bp, Zea mays
  Clone ID: MRT4577_178956C.1
ggacctcctcttccgtccgccgccactgctgctgcccagccgctcgtgcaggcttgcaggccgcccagctccggctagccgcacgagcagcaagcaggacgcccagcgccgctttcacgcacatcttcaaaagcttcagctgcaattaatcaatatactttcttcagaaagcaagctgggttatttggaggagaagtggtcttcaaagacccagtcacttaatcggccgcacaagtggaggtgactggttgcagccatctgctgtagaccacccagaaatacaggagtttgcacgtcgtattgtttctcaatgcatgtcctctagtggttgcgaacgtaattggagtaccttcgctttggttcatacaaaattgaggaatcggttgagttatgataagttgcataaactggtttatgttcactacaacttgaagttgcgcattcaacattacgaaactgatatggaaagttttgaacaaatgaaaaactctaaagataggaacatagatccatgtagcatcatgatagatgttgctatgtatgatgaaggcaacccgattatggaatggttgtgcagttctaggagtgaatcagtgccgacacttgatgaaaatgatgagcctgaatcacctaacagaccaagtggattcgttttagaggagttaggaggattgaatgaagaagagatggttcttttaaattctaggattggttctggtaggaaaaatggtaggaaaaggaatgttgtagaagaagatattggagatgatttcttatcagatagtagtgagggaggaggtagcccaacctacaacgaatcaggtgatagtgactctaatgatggtggtggtgatgacgaagatggtgaacctagtggtccatgttttgcagctaggacacaacctaaattagctacagaccaatataatggtcctggtcaagatgaacaagcagcgcctctccgtccaagatcaaaaaggcagaagaagctctccatcaagggcctgtacatgcttcagaaggttaagtacatctaagattatagatgtgttgtctcactgtttcaaaaagttcatttaactaattaatttgttgtcttactgttggaaaatatagtgatctaatcttcaagcacaagcacaagaatatggcgtatacatggactgattcaatggcaagattttgaacatgtggctctattgtatcaattgtgtgctttgtttcagtttcaacacaatattgctgccatatttggttcatgtggcctaacaatatttataactgtgattgatttctatgcattatttgaactatggactaccaaatatttgtgacacaccactagtgttatattcaccggtgcatggatgttgccaaagaactttatttatgtaatatttggtttatttggat

SEQ ID NO: 86566 - DNA, 392 bp, Zea mays
  unsure (1)..(392): unsure at all n locations
  Clone ID: MRT4577_178957C.1
agcctgatgactcctccggctcacccgccgtcntctcccagtcgtccccggacatctggcgcagcgataagctgatccaggtgtacgtcttgctggccaccacggtgggcctgttcctgccgctggcgcacgtgctgggcaggttcacgcgcggcgacatgcagtggtgccgtcggagacgccgcacctgttcctgctgtcatgccaatcctgactgagaacgtggtggggtcgctgggcgccttgtcgccgtctcgcatggcgctggagccgctgctctacaccgtgcgccatgttttcttcatcctcgactgggcctacgacgcgtggtcctacaacgcgcatgactccagctgggtgtggataggcaggtgcctttgcgtcggcaacct

SEQ ID NO: 86567 - DNA, 468 bp, Zea mays
  unsure (1)..(468): unsure at all n locations
  Clone ID: MRT4577_178958C.1
gagtttagaaagcatagttacctgtcgatctatctagacgggagagagagaggaaagctagctagctacgatggagtcgcggcagccagaaggcagcagggggtgcgtcggcgctgactcgcttctccaggtggtgttagctccgacgacggggactgcccgcactcctgcaggtggtagacctgcaccgtgtgtgggctgtacatcatcgcgaggagagtttggtcatacagtgagaggcatcctgctggggagaaacctgtggcttcctaccatgatcataccgtagacactgggtggacagtgcattgcacatgtctgcatgatgtgatatctggactaaagctatttggagtttgagatgaggagaagacactcggacggtgctggggtgatcaacttattgcatgtgtatggcgatctaatacgcaaagtataataaaaaggnagatgctggatgcgtacaaa

SEQ ID NO: 86568 - DNA, 497 bp, Zea mays
  Clone ID: MRT4577_178959C.1
tcaagcgggcggccgggcaggtacaagcttttttttttttttttttttttttttttttgtatttttttttttttttttttttttttttttttttttttttttttttttttttttatttttttttttttttgaaaaaaaaaaattaattccctttttatttggggggggggggggggcattaatacctttttgaaaccttttattaccggtaaaattctacaaaaataaaaaaggagggcccccccggggggggggggcaacaaaaagggggggatatacccaaaatgcttttgacaaaaccgaccaccttattgataccgaaaaaagggaaaaatggcgcccactatattggggaaaaatgataccaaaataatcaagtccaaaaacggatatatgctacccacaacttgtgaaaaaaaaggaaacaaaatttttttttccaaaaaaaaaaaaattttcccacaccttccaaaaaaaagggaaaaactttttttttc

SEQ ID NO: 86569 - DNA, 370 bp, Zea mays
  Clone ID: MRT4577_17895C.1
cacacgcgtccgctaactagaagcaatactgatggcccaaaacatgatgattgtgatggtgctcctgctttccacctttctcgtggtggcaagatccttgtgggttccagacgaacccttaaatgcggatgacataataggtgcttgcattgatgagtgcaccaactaaaataaggcttctggcgactagaagacattcgaagtgttgtgcaccaagctcacaaaaaagcctagcgaagaaggcaatcatgattgacgaagtacaactccgatgatatatacactattggatcactggtcatctttgtagccatgtctactacactatgggcctgattatatcgtcttattgtgtggttttgggtttcca

SEQ ID NO: 86570 - DNA, 322 bp, Zea mays
  unsure (1)..(322): unsure at all n locations
  Clone ID: MRT4577_178960C.1
attcggctcgagggttgaccagctcattctantatcgctgcatccctcggctctcgagcgccgcctcctttccatagtgcaccagcgacatgctacccatggctcccatcgtttcgtctctcgcgccatcagcttccgcaagccagctggtgaccatgaactacgcggacaccattcgcacggtcataggacctatccgcaatggaactgcactcgtgctctaactatccccagggcctacggtgattcgcatctcgaagaaagggtcggacgagcaggactaagcgatgcagcacgtggcgacgctgctggactggatgat

SEQ ID NO: 86571 - DNA, 684 bp, Zea mays
  Clone ID: MRT4577_178961C.1
ggattgggaccctcgaggccggccgggaacgtcatcatccacaacatccacatcaacgacatcgtctcctccaacaaggacggaggctacgtccgcgactcgccggaccacttcggctggcgcaccgtctccgacggcgacgggatcaccgtcttcggctccaccaacgtgtgggtggaccacctctccctctccaactgacaggacggcctcatcgacgtcatcgccaagtccaccggcgtcaccatctccaactgccacctcaccaaccaccaagcaggatgacacggcggagtcggtgtggaagaactgggtgtggcactccgagaacgacctcttcatggaaggcgactacttcaccgtcaccgggggacagatcaacaggcagttcaacaagaaggacctcatcaagcccaggaacgggtcctacgtcaccagggtcacgcgctacgccggctccctcggctgcacgcccggcaagccctgctagatcgagccaccagcgaggacggtcgaagaccagaggcagaccatgcattcgccggctcgccatgtaagaaacaggcgagttgaaagtgcgacacaccagagaacgtggctgtgtatactgcgcaaaggtcctaaaggaaagagaagatgcacatattcaaagcctcggaagaaagaaaaagaaaaaaagcgggc

SEQ ID NO: 86572 - DNA, 322 bp, Zea mays
  Clone ID: MRT4577_178962C.1
cgcgcgtacgtactctcctgccgcacgccttccatctaccactttccagccatggccttatctaacatctgccgttcactggtcgaacatatgcttggacacatgacatagagcgtcgccctctgcactgacacccatctatccgaccgtcatggaactcagctgattgcgtacctgaatgcatggtagctgttaggccccagatagttgtcgcgctcatacagtacctatgacgtgcatctagctcggccctatctcggaaacttgcgccacacccggatggtcatgactggcactagcatcccacacatcaatgccatct

SEQ ID NO: 86573 - DNA, 1896 bp, Zea mays
  Clone ID: MRT4577_178963C.1
actcctatgggcgattgggtccctcgaggccggccggggagcaatggcgctcaccgccgtcctaccttcatatacctagcagtgtctctgcatagaaagataaaaggtaggaggaggcgcagtgcgtggtgggattatttgtgaggagatattggagttattatatatatatatatataggtagacgatagatagacagctagatctatataaccatggtggatgggttccgatggatcagaccgggctctttcgtcctgtacttggtcttcttcttcctgtccgcagccctgtcggaggccaatatcggcgacttcgatgaatactggcagcagcgcaagctcatggccgacgccgcggctgaggccacgtacaagcatgacccggtcgaggtcgccaaccaacttaaccgtgcagtccacagatccgtcgagaaggaggacattggcacgaggcgggagatgatggggacgacgacgaggaagtctaagttcagcgggccgtgcagggcgacgaacccgatcgaccggtgctggcggtgccggcaggactgggcgacggaccggaagcgcctggcgcggtgcgccaaggggttcgggcgcaacaccaccggcgggctggccggcaagttctacgtggtgacggacggcaccgacgacgacgtggtgaacccgcgccccggcacgctccggtggggcgtcatccagatcgagccgctgtggatcaccttcgccaagaccatgatcatcacgctcaaggaggagctcatcatccgcggcgacaagaccattgacggccgcggcgtgcaggtgcgcatcaccaatggcgcgcagctcacgttgcagttcgtcaacaacgtcatcatccacaacatccacatcaacgacatcgtctcctccaacaaggacggcggctacgtccgcgactcgccggaccacttcggctggcgcaccgtctccgacggcgacggcatcaccgtcttcggctccaccaacgtgtggctggaccacctctccctctccaactgccaggacggcctcatcgacgtcatcgccaagtccactggcgtcaccatctccaactgccacctcaccaaccacaacgacgtcatgctcttcagctccagcgacaagcatcccgaggaccagatcatgcagatcaccgtcgccttcaaccacttcggcagaggcctcgtgcagaggatgccaaggtgccgctggggcttcttccacgtggtcaacaacgactacacgcactggctcatgtacgccatcggcggcagcaaggcccccaccatcatcagccagggcaaccgctacatcgcgccgcccaaccttgccgcgaagcaggtcaccaagcagcatgacacgccggagtcggtgtggaagaactgggtgtggcactccgagaacgacctcttcatggaaggcgcctacttcaccgtcaccggcggccagatcaacaggcagttcaacaagaaggacctcatcaagcccaggaacgggtcctacgtcaccaggctcacgcgctacgccggctccctcgcctgcacgcccggcaagccctgctagatcaagccaccagcgaggacggccgacgaccagaggcagacctgcatgcattcgccggctcgccatgtaagaaacaggggagttgaaagtgcgacacaccagagaacgtgtctgtgtatactgtgtaaaggtcctaaaggaaagagaagatgcacatattcaaagcctcggaactaattgctctgttgtccactatgttatccaagtatatatttgttcttcacttgtgttgagcaccgtttgtgtcactggacatggacaaacagtttagcctgcggacagtccgtctttagacacagactgtccacgattagatcataccata

SEQ ID NO: 86574 - DNA, 254 bp, Zea mays
  unsure (1)..(254): unsure at all n locations
  Clone ID: MRT4577_178964C.1
acantatggtccgttttcctagaggtaatgggtaatggaagactcttcaccttgatacggattgctactcatgaaggggtgaanctgttacccacataacccatatactcaacttagtctactatgcatcaaacaatgagcttgtgaggacacaaacccttattaagaagtccatgtgacaagttgatgctgacccattcaagcagtggtacctcactcactatggagttgacattaataggaataataaaacc

SEQ ID NO: 86575 - DNA, 1055 bp, Zea mays
  Clone ID: MRT4577_178965C.1
gatcaccgacatggtgaaggagatggagaccgaacggcctctcgtcgggcaatgcctcccgctctgggaggacctgcgtggcaaggtcaggggctggtgccgcaagttcaacgtggacgaagccatcgccatgagcgtgctggagaggaggttcaggaggagctaccacccggcgtggtcggcggcattcatcctggacccgctgtatcttatcaaggacgtcagcgggcggtacctcccgccattcaagtacctgacgccggagcatgagaaggacttgcggaacgacgacgacagggacgcggagccggcgggggcggacctggcgatgatggagcttatgaagtggcgctcgatgggcgtggacccgctgtacgcgcaggcggtgcaggtccggcagcccgacccgacgacggggaagatgaagatcgccaacaagcagagcagccggctcgtctgggagacgtgcctcagcgagttcaagtcgctaggcaaggtggccgtgcggctcatcttcctccacgcgaccgcaagggggttcaggtgcacgccgacgatggcgcggtggctgaccgcgcccgctcccggatcgcggggcatcgcccgcgcgcaacggctggtgttcgtggtggccaactcgaagctggagcggaaggacttgcggaacgacgacgacagggacgcggagctgctcatggagggagacgacgacatgctgacggatccgaccaccgccattgtggttccctcgtcggtgtaacaaaatgttttaattgttccttccttgcggattaatctccctgcttgcaggcagctgctgctgttagcatttgtagaatctgatgatcctaggtctagattcttttatttgatcttgtttcgtctcctgcccgtgcttgttgcttgctccctcctcttgttttggtggggtggggagtagccaggtaggaagggggcatgagatgatggagatagcagattgcttttcattatcaaagtgtggttaatcagtcaataaacgtaacggtgatcctctcaaaaaaaaaaaaaaaaaa

SEQ ID NO: 86576 - DNA, 753 bp, Zea mays
  Clone ID: MRT4577_178966C.1
cgaggccggccggggctcccctgcccttctgtgtacgaagccgacgagcagccgacgctaaagcttggtccggtgagcttcagagaaggggcgggtacgtcaagatgcagatcttcgtgaagaccctgacgggaaagaccatcaccctcgaggtcgagagcagcgatacaatcgacaatgtcaaggccaagatccaggacaaggaaggtatcccgccggaccagcagcgactaatcttcgcggggaagcagctcgaagacggccgcaccttggccgactacaacatccagaaggagtccacccttcaccttgttcttcgccttcgcggtggcatcattgaaccttccctccaggcgctcgcccgcaagtacaaccaggacaagatgatctgccgcaagtgctatgcacgcctgcaccccagggctgttaactgccgcaagaagaagtgtggccacagcaaccagctgagggcaaagaagaagatcaagaactgaagcttgccaaatcggttccttgcatggtttgcgtcaacaagacgtagaagtttcaaagcttttgtagctgccataggctgctgcaacgtttttaagtcggaactcttgtgttcctgttcagggtcttcagcatgacataaatcgtttcagaagtctagtaatattattattatatggtgtcatgtcgtattgtggctcttcctttttgttgctgttgtgctgcagtagagggaaacattccgtaattttctccaccgcc

SEQ ID NO: 86577 - DNA, 1434 bp, Zea mays
  Clone ID: MRT4577_178967C.1
atggccgacaagaaaagggtagactctgcgctcgcttgtttctatgaagccatggagaggaccaacgttgagaaaatcactaatgaaatgttagctttactatccggggattccagcaacagcgagagttttaatgttgaaagtgagaacgaagatgccaaagattggccgtggagtgcaagccatgttgtcttcgggaaatcaattgttaagcaagggaaaattgaagcgatgaagggcagatatttccatgatatatccatagtgagggctggaggagaaagcactattcctcttcctgaagcagatgaggtggtaatatttaaaagttttatgaaggctagacttcattttcccttgcataaaatgttggtcaaagtgctgaagacatttgagatataccttcatcagcttactcccgaagctttagttaaagttggagtttttatttgggttatgagaagccaaggtctggagccagatgccaagtgcttctgcaacattcatgaattatcctaccagatgaaggcaattgggaaggagcagtatcataacaacttcgggtgttatagccttgtgcaccattctgatgtgaggtatcatgtgccaacattccaaaagaaatggccgggctcttggatgaagcaatggttttatgttaagaatgatctgagtgagagggatgatgtgatgggtataatccagtgccctataccgtcacgcttgggcatcagaaggccatctatcgcgagtgggaataaagtgtggccgcttattaatgaatgggagatgctgaaggagactgatgctggctccagtgaaggtggtctggtttatttaagacacacctatcgctatagaagtcaatttgatgagccgaatgatgactggcttgaggctattgaggctaccagtgacgagctgctaggagcttatacgaaggtgggattacacagatccgaagtgcaagtattggagagaaagctcgatgaattgactgaaaatttaaatgtcgaacaaacaaaatgcgaaatatctgatgctgaacggttaagggttcaaaaacatgtcgaggagcttcgtgaagcaaaagaggaatgctacaatgtcgctatgggctgttgcaacaaattgaaaaatagttttgccaaagttggcgcattttctacggagcagaattttatccgtggtgatcctgacggggttatccggtggattagtggtgaagccgaagctttcaatgaaattcttagtgatagaggagatttttgcgccttcgctggtgcccgaggagccgtctcacttcttgagaaagctggttgcgagcatgcaaaggctgttattcagccagaattctcggtctcagccaataacattaagaacccttcaatcgaagccactgcgctgagcagaaaattctattccgaagtctag

SEQ ID NO: 86578 - DNA, 450 bp, Zea mays
  unsure (1)..(450): unsure at all n locations
  Clone ID: MRT4577_178968C.1
gtctggtccggacgcgcctgccggtggtggtggcggaggaggaaccagtgagccagcagaggccgggccgtcgccgtcgtcgtcctcggccgccgcagcagcctcctcgtcgagccggcagcaggcagagcaggaagcacagcagcaacaaggagcacagcagagggaacagccagcagtaagggcccaggcgcagccgcagccgcagccgctaacgcagcagcctccggcggggctcagccggtacgagtcgcagaagcgccgggactggaacacgttcctgcagtacctgcggaaccacaagccgccgctgacgctggcacgctgcagcggcgcacacgtcatcgagttcctccgctacctggaccagttcggcaagacgaaggtgcacgctgagggctgcgcctacttcgggcagccgaacccgncggcgccctgcacgtgcccgct

SEQ ID NO: 86579 - DNA, 403 bp, Zea mays
  Clone ID: MRT4577_178969C.1
ggccgcttttttttttttttttttaataataatgggacgatgactatactccttgctaaagcatgaaataatacatgtacacaatagtttgaggcactttaaggtgaaactttttcctattttgatgtactcatcaatggagtgaacaactttggttgctccacacacctttggggccaccttctcgggttgccatcttctctcatatgttgtttgcgtcattttctttcttccaattgccctttttttgaccctttattcttataatcttggcttggctttgtttatccatgtgtgatctgtcgtctgattgtgctagattttggtgtagctttgcggtttggtatccggcaatgacagggcaccccggggagggaaaatctctgaaaaggatcccggccgg

SEQ ID NO: 86580 - DNA, 293 bp, Zea mays
  unsure (1)..(293): unsure at all n locations
  Clone ID: MRT4577_17896C.1
tntatantttttttttttttttttttttttttgggtggtttttttttttttatggggggttttttcttccgtaccaaacccaaccaaacccggctttaacggcagaccggttttttactaaaaggggcccccaaataacttttttatggagggaaacaaagaaaaggaccccttcctgtagggaaaaaaccccggaatgaaccccctcaaaaaaagtaaggccccttggtcttagtgacacccaaccaacttgggttgttaaaaacacttttttttttttttcacagggggga

SEQ ID NO: 86581 - DNA, 507 bp, Zea mays
  Clone ID: MRT4577_178970C.1
cgtatgcgttggcttttgcttctgttcactcggtgttctctttaccgcgttaaacgcggacagagatgaaccagcacgacgatctattgggctcccgttgggatataagccgcaagtggtgcatttattatagaccatcctgcgtactatccgtcgaagatgtttggtctctgagcataccaagatgtataggcactagatggagcacgcgaacgaatacataaaacaagggatccatgaggagcacgccggaatgtaattgccggcgttccctgtatacatgaacgcgctcaggtacttgaagacccatcttatgtgcgagaaaaagcctacgaatccctccagagcgacaagaaagctctacaggaggtcgtcatattggtggtcaaattcccacagttgtttatgagcaagatgacgccttggggggcgtctctttggtacggccctgctggaacagaaatgtctcactgggaacatgacgcacctgacgatgctgatacaaca

SEQ ID NO: 86582 - DNA, 978 bp, Zea mays
  Clone ID: MRT4577_178971C.1
ccccgcgtccgggataatctatctgagcagaaagacatgcattgaactctcttaccaattatgggcaaaatgagagaatggttatggagaacttaattaacaagtcatcagagcgtaaggttgatgcagtggctgaagttcactcaaagatcaatgccgatcagacaaaatctatcaaagaaagagctgaggttgttggtccaattgacttgaataatctgggaacgctacacggtgacaaggcaagccgaagcattcacatcacatcatttgaaaatcttggtagcgtgaaggttgttgaagcttcctccagttcagacaagaacatggcctgtgatccttcagggacagcaggaatgcctgttagcgaggtacctgatcctgctttgcaggtgaatgctcggaggcacggaaccagaaacaggcctcccaccgtaaaagctttagaagctgttgcgtttggacttcttggaagcgggaagcgtaagggtgacatgaagaacagggcgacaagccggccttctcagcgagctcgcaaggctgcaaaagactcagttcccgtggcttcttgtggtgatgcgaaggtgagatgagcagatttctgtgcgttgattggcacatgctgacaatcaacggtaccatgacaatgtgcggatgatgaatatcaagcaactgcatgaggcctggagctaagctgtccaaagctggtggttaccttaccattgtctaatgcggtgcctaccattcaggaaatcttccaggtgacgatggttttacagggtgcatggtcaccattcgagccaggaacccatccttagtttttttttttagtcaatagaagccctgtgcctgtcaagccttggctaattcagttttgcgtttataccgggattaatgttttggtacatcgctctatcgacttttgatgggtgcattcgtctctgagcttcttttgcagggaatagagcattcgtcagc

SEQ ID NO: 86583 - DNA, 1881 bp, Zea mays
  Clone ID: MRT4577_178972C.1
tgaggtggttggctaaagttgaagacctatgtgagaaatgcctgggtgaactgtaataatacgtttgtcctgcacgagtttgttaactgcgtccctggttctcctcaaaaaaaaaaaaaaaaaaaaaaaaaaaaaaaaaaaaaaactcaacccaaacaccacaatccccttcaacaaacgcaccgcactccacggcagccagaaaacacaatccacacagtctccgtgaggtctgagcgaggtaggactagctctgagcgagttcttccgtcttccaggtataatccttgcaactctcactatcctcttcgcatcgctcgtctctttttgagactagttggatttctcttctttttccttggatcctactacctactagaacagagctccggagccttttagtttctggtctctgatctactcattttcttttcttccccttttggtgacataggtaggtctagttaagatctgtcgtgcctgttctttgattttagctaagaaccaggcgatttagtcttcttcttccttacaaaaaaaaaatccccagaaaaaaaaagttgtgagtagtatattcttgtaccatttgatggccgctgctataaatctccccgggcccagcgaggatctgatgcgagcgatggagtccttcatgcaagacgacgccccatcccctctggccatgccgccggcgccgtctttcccagcggccgcgagtccgcgacgcggcgcggctcaacttccccgacaacgcggagtccagggcgccgctcgaccccgccgtggacgccaagctgcaggccatctgcgccaccatcgccgccgcgtcgtcgtcatccaagaattccaaggccaagagcaaggcgatgccaatcaacgcgtccgttctggaagcggcagcggcgtctccgagcaacagctcctccgacgaaggttccggctccgggttcgggtcggacgacgagatgtcctcgtcctccccgacgccggtggtggcgccgccggtggcggacatgggacagctggatttcagcgaggttccgtgggacgaggacgagagcttcgtgctccgcaagtacccgtcctacgagatcgactgggacgcgctgctctccaactagtcgcccttcgccgacagatgtgctgttgtagttcagtagtggcagtatctctggccgccgcagatgaggttttaggcaatctgcaggccgccggcccatgtgtattaagtaggttttgctcagttgttggccccggacttcgccggcgtttttgtgaccggcgtccccgagtgcactgcattggtgtactggtctgtctgtaaaaaaaatggatctgtacttctatagtgtgtattcaaccattgttcttagttgtgatgttactcgtgctgaaaaaaagcgagtgcggatttcgtcgcgctgctctccaaatagtcgccctttcccaaaaaatgtgcttttgtagttcagaagtggcagtatttttggcccccccaaataagtttttaggcaattttcaggcccccggcccatgtgtattaagtaggttttgctcagttgttggccctggacttcgccggcgtttttgtgaccggcgtccccgagtgcactgcattggtgtactggtctgtctgtaaaaaaaatggatctgtacttctatagtgtgttccccccaaaaaaaaaaaaaaaaaaaaaaaaaaaaaaaaaaaaaaaaaaaaaaaaaaaaaaaaaaaaaaaaaaaaaaaaaaaaaaaaaaaaaaaaaaccttgggggggggccccggccccaatttcccctttaggggaggggtttaaccccccctcatggcccgttttttaaaaacgtggagggtgggaaaaacctggggtttcccaaatta

SEQ ID NO: 86584 - DNA, 2126 bp, Zea mays
  unsure (1)..(2126): unsure at all n locations
  Clone ID: MRT4577_178973C.1
aacccaaattcggcacgaggcacaatccccttcaacaaacgcaccgcactccacggcagccagaaaacacaatccacagagtctccgtgaggtctgagcgaggtaggactagctctgagcgagttcttccgtcttccaggtataatccttgcaactctcactatcctcttcgcatcgctcgtctctttttgagactagttggatttctcttctttttccttggatcctactacctactagaacagagctccggagccttttagtttctggtctctgatctactcattttcttttcttccccttttggtgacataggtaggtctagttaagatctgtcgtgcctgttctttgattttagctaagaaccaggcgatttagtcttcttcttccttacaaaaaaaaaaaatccccagaaaaaaaaagttgtgagtagtatattcttgtaccatttgatggccgctgctataaatctccccgggcccagcgaggatctgatgcgagcgatggagtccttcatgcaagacgacacgacccatccccttcaacaaacgcaccgcactccacggcagccagaaaacacagcccacggggcccagtacccggcgacccacctgagcccggcgcagatgcagttcatccaggcccagctccacctgcagcggaacccggggctgggcccgcgggcgcagcccatgaagcccgccgtcccagtgccgccggcgccggcgccgcagcggcctgtgaagctgtaccgcggcgtgcggcagcgtcactggggcaagtgggtggccgagatccggctcccccggaaccgcacccgcctgtggctcgggaccttcgacaccgccgagcaggcagcgctggcctacgaccaggcggcgtaccgcctccgcggggacgcggcgcggctcaacttccccgacaacgcggagtccagggcgccgctcgaccccgccgtggacgccaagctgcaggccatctgcgccaccatcgccgccgcgtcgtcgtcatccaagaattccaaggccaagagcaaggcgatgccaatcaacgcgtccgttctggaagcggcagcggcgtctccgagcaacagctcctccgacgaaggttccggctccgggttcgggtcggacgacgagatgtcctcgtcttccccgacgccggtggtggcgccgccggtggcggacatgggacagttggatttcagcgaggttccgtgggacgaggacgagagcttcgtgctccgcaagtacccgtcctacgagatcgactgggacgcgctgctctccaactagtcgcccttcgccgacagatgtgctgttgtagttcagtagtggcagtatctctggccgccgcagatgaggttttaggcaatctgcaggccgccggcccatgtgtattaagtaggttttgctcagttgttggccccggacttcgccggcgtttttgtgaccggcgtccccgagtgcactgcattggtgtactggtctgtctgtaaaaaaaaatggatctgtgtacttctatagtgtgtattcaaccattgttcttagttgtgatgttactcgtgctgcnnaaaaaaaaaaaaaaaaaaaaaaaaaaaaaaaaaaaaaaaaaaaaaaaaaaaaaaaaaaaaaaaaaaaaaaaaaaaaaaaaaaaaaaaaaaaaaaaaaaaaaaaaaaaaaaaaaaaaaaaaaaaaagggggggccgttttaaaggttccaattttacttccccttgcttgcaactttttattttttttttagggccccctaatttaatttaattggccgcttttttaaaacttctttcttggaaaaaccttgggtttccccattttattccttttgcattttttccccttttcccctgtttgggattattagcagaaaagcccccctccgttcgcctttcccaccatttgcccgccttgtttgccaattgggaccccccttttttggcctttttaatcgcgccggttgttgggtttccccccagttttttcgtttcctttgccagccccttaccccccggtcttttggtttttttcctttcttttggcgcccgtttcgccgtttttccccgtctagctttaattgggggcttccttttagggttcccatttagg

SEQ ID NO: 86585 - DNA, 795 bp, Zea mays
  Clone ID: MRT4577_178974C.1
aattcggcacgaggtctaggctagtctacagctagtacacaccccacaacaatataatcgtcgtcgtggcggattggagttgacagttgccataccaccagtactagctcgctcgctcgcttgctctcagaactgatcgctgtgaggagtatgccgtcgctgtggccaacgaggaagaagcgggcgcgaggctcggcggtccggtcgtggtcgcgccgccgcgggagcaagaaatcatcgtcgtcgtcgtcgctgggggcgctgtggcggcggatggtcgggccacgcagggggacccggacccggactcggacccgggcccgggggaagaagccggggctgctctcgcgcgccgcgcgggtgctctcctgcggccgccgctcctactgatcgatgccatccggcgcggaccggccggcgggcatcgaatcgtccgaatcgagatctgccgtgacgtgcgcgcgtgacttgtctctattcccttcgtgcgcgggttgttgccatgcccgcgagcgctgctgtttcccgtgtcgtgttcgtacctgcgtgggagctatagatgcactcgtgttgtgtgtataaatcattctgtatataaacttcacttgtaatgttgatgttgttgtcatggcgtccaaaaaaaaaaaaaaaagtgcagtctcagagtgggtttgttgtataccgttccatcaatattcgatccctgagctacaccaaattaaaaaatgaaaataaaaatggaacacaaaacaacatagctttatattcaaaaaaaaaaaaaaaaaaaagtcgacg

SEQ ID NO: 86586 - DNA, 442 bp, Zea mays
  Clone ID: MRT4577_178975C.1
gcgataacaaaaaaaaaaaaaaaaaaaaaaaaaaaaaaaaaaaaaaaaaaaaaaaaaaaaaaaaaaaaaaaaaaaaaggaaaaaaaaatataaaagaaaccaaagctaacgtacgacataaatgcaacggccttattcttttttttggggcgcccctttttccatttcattggcccggcgattttccatcgtttgggactggggaaacccctggcgttccccccctttttcgccttgcggcgcttccccctttcgccggttggcgtaatcccttacaggcccgccccgttcccctttgccaacgggggcgctccctgaatggggactgggcccccccctgtttcggggctttagccccgccggttggggtggtttccccccccgtgaccgctccatttgccggcgcccttgcgcccgttttttgcgcttttttcctttcctt

SEQ ID NO: 86587 - DNA, 383 bp, Zea mays
  Clone ID: MRT4577_178976C.1
gagcattagcgggaaaataggtcacaagctcctatagcttctcttcttcccccatacctctcaccagcgttgtcttcagtatgtgaaaacccaattcttcaaccctactggatccaactggcgatcacagcagggttgttgccttgatcaccctcgttccgacgacaatgctgagccgtatgtcatcaattacctttggtgcatttattggcacaaaacatcatggcacatcaactacaactactcgtgctagcaaaccttgctggctacgctcagcaacaggtttttcctttggtgcaattgttggcacaaatctatagggcacaacaacttcaacaacttcgtgcttgcaaaacttgctggctactcttaacaacagcagt

SEQ ID NO: 86588 - DNA, 654 bp, Zea mays
  Clone ID: MRT4577_178977C.1
atctgcagcgcgtacgcaacgaggcaagcacaacagaaggaggaaaggggatcagaagatcacttggatggtgtagaggatcacggggagaacgacgacgcctacgtccactacttcaaggaggcctacggtcgcaacgaggccctccgcaagaggaacaacaccaacattcacacagtctgtcacatctcacccgccataaccctcccagaatgacaggcctgcgaaagacccggaaatccgcgctactggaagacactcagcttgatcgcccacctcccttaagtaccccttcaccactcaatgtgcctgacagaagatctgatataaccccactctggcgttaattcgcgtgaccccagctgagatccgaagaggatcaccgctgcaaccaacactacgaaaggcactcgagcgaagacagcctcaccctgttcacggctgatgaggacaaagaatgatgatgtaaaacttacaccccattatgaggtgcctgatgtactcaacacacctgcgatcctacaagacattaaggaaccgcatgccacatccatagcctaccattcctaagcataccaacaaagtgtgctatgggactaggaattctgctggacaatgcgtgttgcatctccgccactaagtatggttctccat

SEQ ID NO: 86589 - DNA, 399 bp, Zea mays
  Clone ID: MRT4577_178978C.1
agctcaccctgagcatgtataaattttatgccattctatttatgcaacgcgtggagatcatggaactatcgagcactcactctcatgacgagggatctgaagaaaacccattgcacgatcacatgcacactgcaaagacattgatatacccactcacattacatatataccaacagatgccaaagtggttactaccaatgcactctgaaagctgtacaaaacagacaatctgaatgctgaactcgcaaacttttgctgactgccatggaacactagttctgtcagggacatatgtgccataggaagtctatgatcctcaatacaaagatagactggaagagaccagtaaacatgatgctacctgggaagcctgtatgctgcaacacccattgagctacc

SEQ ID NO: 86590 - DNA, 438 bp, Zea mays
  Clone ID: MRT4577_178979C.1
aaaaaaaacacaaagtaactttttttttggggaactgaataaagccttataacaacagccctcacgtagcgacttccgaagggggtacttggttttttgcccaaacccccccaagggaaaaccccccttcaggggggggggcggggaaacccaaacaactagggggaaaaccggacctccttttttaaaacaaaactcaaagggaaatgctgtttgaaatccccttgggggggaacccgggggggtccccctttgggtcggaggggttggggtaaaacaccgggtaggggaacccggccggccccttttggtttttgaggggagggcccccgttcatggggacaacccgttttttaattttgggaaacccccccccaaaccgtttgaaccccccctggcccttggggtccaacatccacttcttggggtccccctggc

SEQ ID NO: 86591 - DNA, 1340 bp, Zea mays
  unsure (1)..(1340): unsure at all n locations
  Clone ID: MRT4577_17897C.1
ccggccggtccggggacacgtacgtacgtacgtacatgatccctgtaacccaccacatccagtggcagtgctgccggctcgcttcatcaattttagaatggtaacagagcctatcagctctgttcccccagtagacacctaaactttgccacatagccaataacggatcggatcgccttcgtacttttcctacttgctatctccagcgctaggctatcagctagcactagcagcgccgtcactgttcgaagagatcagcgcagcgaactcgcagccgagagatcgatcgaggccggccggggccgagatgggcagcgtcggcgtcggttgcggctcgccggacgaggagcagcagaccgagggcagtggccctctgccgccgccggctgtctgcgtcacggggtccaccggctacgtcggctcctggctcgtccgcacgctgctgcggcgaggctaccgcgtccacgccaccgccagggacacaggcaaggccttgcaggtgctccgcccgtcgtggaagaagggagggaccggctcagggtgtcagggcccgacatggngcgaggaagggagcttcgacgccgccgtcacgggatgcgtggcgctcttccacgtcgcggcctccatggacctcctcgtatcacccgcccatcaggacaacctcgaggagcacgtgaggtcaagcatgctggagccggccacgaggggaaccatcaacgtgctgcggtcctgcgtccgcgccgggaccgtgcgccgggtcgtcttcacgtcctccgtcagcacgttgacggcggtggacgcggtggggcggcggaaggccgtgctcgacgagtcttgcctcagagccctcgacgacgtgtggcgcaccaagcccgtcggctgggtctacatcctgtccaagcggctgactgaggaggcggcgttcaggttcgcacgggagaacggcgtccacctcgtgtccctcgttctgccaaccgtcgccgggccgttcctcacgacaagcgtccctacgagcatccagctcctgctgtcacccatcacaggtgacccgaagctctactcggtgctggcctcagtgcacgccaggttcgggtgcgtcccgctggcgcacgtccaggacgtgtgtgacgcgcacgtcttactgatggaggcgccgcgcgccgaggggcggtacctgtgcgccgcgggcgggtacgcggcggcgcagctcgcgcggctcctcgcttcgcgctaccttccggccggtgacaggctgagcaaagatttcgacgacgtctcctgctcgccgccggtggtttcgcccaggaggctgttggatctggggttcaggttccggcacg

SEQ ID NO: 86592 - DNA, 147 bp, Zea mays
  Clone ID: MRT4577_178980C.1
gatgcttccaagcacatgtggcctggagacataaacgcacttttggacacactgcataatctaaacagtaactggttccctgaaggcagtaaacctttcatttaccatgaggtaattgatctgggtggtgagccaattaaaacagtg

SEQ ID NO: 86593 - DNA, 1574 bp, Zea mays
  Clone ID: MRT4577_178981C.1
ctacaatttgctagcagactgcaaacatagcgttaagaatatctgatgcatgttaaattggaatctgttgaagtttcttaaatcttaactgctatagtgcaattgggattttggtgaaaaccatttcgctgctcatgcttggatccataattcttgatgcacaaattacatgttaaatatgtccaatggatgaattacacatcgcgttactgtgtgatgtgcttggacagccaaatcacaatcactgccacagttgctaaacctacaattagtagaattacattgagaatagtctgtactattggaggtttatcttgtatttggtacttatcacatttctttgtctgatctgaatataattattatttaggtactagtaagcactactgtcgatggtctgctgctcctaccgcatactagttttattcagatattaattttcatggcctatttggaacggtactggggaacataaactagcatgacagattgactgactgatgcactccccctaggcccctacattgtagctatacagtattttttttgctctcttattgttactgttgcttatcaaaggacaaacattccccattatgccttgtttcttttgagtgttcaaatgcttattgaggttttatgttctataaaatcatttctaactgttagttgtcttcttgtagcaaatttatgatgcatgattggtttggcattgtgttgcagaccaattttttgggttatattctttgttttgttggttctgttaatttacttatggtcattttcggatgcagtatctttgattctggcaacactgattttggtgattccaagatcccaaacactactgagatcaaaaccaagcctgatggttgggaaactacttcaagaggacaggatgggaacatatgggatatctcacagcgagaagatgacattctaatacaggaatttgaaaggcgaattgcttttagtaaacagcagattgctagcttcatcaaaacccacatttttagtcggaggcgtcctatcgatggatggaagtacatgattgaagaaattggccccaacgcaagaaaaggaaaggggagtgtgcaaagattaccaagtgtcagtgatcctgcaacccagccttacagggaagaaactcctgcaattgcttctagttcctccttcagaggcaatcggccatgatggtgttcgataaaccaaatcttttgctggtttcactggcatagtttatacaggcattttccccttccttttggcttcaaatgtatggtggatgactccttgcgaagaacatgacgaactttccttctgcgttgtataattttgtaatgaatgtgacgctttctgatgaaccagcaatggaagcgtttaagttttctaaaaaaaaaaaaaaaaagcggccccctccattccaaattgttccagcttgtaagtcgttggcttttctaaagttactattccctccgttacaattcctttctttcaaattctaggtctagattttcaaattgtaagtcgttttagctttcctttctaattgtaagtccttttgacacttctaa

SEQ ID NO: 86594 - DNA, 326 bp, Zea mays
  Clone ID: MRT4577_178982C.1
gcgtgagctccgcgggggtcgaccatcgcggccgccgaagacggcgctgattccatcgacgcgctctaccgcaaggacgaggccctggctgaactccaggctgaggtgatgcaggcgctgcaggagcaggtgaggtctctcgacgaagacaactgaatgttcgccgcaccgggagcccgcatcaacctcgactccaggcctggtgcttacgtgcccaagcacaacggcaagctctcgcagctggggcaggcatccgggaaaaccaggaacttctagggcgtacatgcttgatgcttgcaagaagactgcgccatgactccatggtg

SEQ ID NO: 86595 - DNA, 249 bp, Zea mays
  Clone ID: MRT4577_178983C.1
tctgtcacacattcgctcagcctccaataggggtttataatgcatggaggggcagaccacgacctatatcatacgatatcatatgggtcccaacgaatgcctctcctcattatgctaacttttaattaataattatctcactatctctatcaatgtgacacacttgattatcgaacaaagctaattaacatgtgtatccattaaattattccttttatctaaaattattttcaatcaaattattttttt

SEQ ID NO: 86596 - DNA, 274 bp, Zea mays
  Clone ID: MRT4577_178984C.1
gtccctgacaccatttagagagacatgcagctgccaattctctctaaatggtgtcagggactactagagctgtgttctttaacatttagagagacatgcagctgccaattctgattgtttgtgttgcactcatatttcctgtaaacaaaagcttagactgatctgtagagaaagcaactggacatcaatttttgcataccgatgaactacagtttaaaacggccggttgaattatcatgtcaggggctataggaaatttgaatgcttctattct

SEQ ID NO: 86597 - DNA, 129 bp, Zea mays
  Clone ID: MRT4577_178985C.1
aaaacattaactttgactcttgtttgatccatgccattgttcaaggttatcgtaaactctgaccaaatttattgttcaacattttaccgataccactggcggctccgaattgacctcaactctgtctcg

SEQ ID NO: 86598 - DNA, 373 bp, Zea mays
  Clone ID: MRT4577_178986C.1
atgatatttttttttttttttttttttttttttgaaccacatgcttttttgctttctgttttaacaccccctggtgctgtggtattagggaaaaaaaaccctcgaggatctcatttaaagggtgcaaaaccgtgactcattgtaacaatagggaaaggaggttgaaacctatcgatcgatgtgtaaatttcggaaaacctatttaatttgggtggataaacaaaccttaccaatttgcactccgaatgtgtaaaacaccctgatgcgtttacaaatactgtttggggccgcactgtaggaaaatactcttagaagtccgagattaaccagggggaccctcaaatgcttgagaaccattcgggggggcttatca

SEQ ID NO: 86599 - DNA, 1402 bp, Zea mays
  Clone ID: MRT4577_178987C.1
cctcgaggccggccgggccgggtgaccgctctggcgctctgtatactctccgtccggatcgcaccgcgaagcgttcagccatgagctccgctgcagccgccgccaatgtcgccgtcatcggaggcggaatatccggctccgtgtgcgcgtcgctcctcgccgcgcggggcgtggccgtgacgctcttcgactccggccgcggcgccggcggccgcatggcgcagcggagggaggtgatggaggatggctcggagctgcggttcgaccacggtgcgccctacttcaccgtcaccaacggcgaggttgcccgggtcgttggtgggtgggaggcgcgggggatcgtcgccgagtggaaggcaacgttcgcgtgcttcgatctggccaccggaaaatttacagacttcgagaaggagggaacagctaaaaagtatgtgggagtgccagccatgaactcgatatgcaaatcactctgtctagaggatggtgtggtggccaaatttggtgtcactgtgggcaagatggattggcttcaagatcggagttcgtggtcactagctagcctggatgggaaagatctaggctattttgattatgttgtagcaacagataagaacatagcgtcaccagcattttctgggttgactggaagaccgccacctcttgatttgtcgtcatttccacgcctgcctacagcacttcaagatatcccagttcgtccatgttttgctcttatggtagcattctcggagccattggctacggtacctgttcatggtttctctttcaacaattccaattctctgagctgggccttctgtaacagcagtaagccagggcgtgcttgcgtgcctcctaacagacaatcttgggtgctgcattcgacaactgagtacgcttccaaggtaataaataatattggtccacgcaaaccttcggcggaggcgcttgctaaggtggcagaggaattgttcagagaattccaggcgactggattaagcattccacaaccaatttttatgaaagctcacagatggggtgctgctttcccagccattgcaattagtggagatgataagtgcgtttgggacaagagcacgaacttggcgatttgtggagatttctgtacaagcccaagtgtcgaaggagcagtccttagtgctacgagaggggtttccaaaatccttgaatgtttaaggtgcccgtcaagtatctaacgttattgttaccatccccagggcccccctctctgtgattggttgtatttatgcctgcattctcttacacaaataaacaattcaagccttatttagaggcacatattgttggtttatgctaaataagaaataaagtaacagcagaagttgccaaaaaaaaagggcggcggctcgcgatctagaactag

SEQ ID NO: 86600 - DNA, 403 bp, Zea mays
  Clone ID: MRT4577_178988C.1
acatgacatttattgtgtgtatattatattttaatgcttcatgcaactttttgtgaatgaagggcccaaaaacaagaacaagggggtgttagcccacagacccccacaccaaagtagcccaggcagaggaaacacaatcaactagagaccacaaccaaggtcaagccaaagagaaagaggggaccgcaaagggcaaaacgccaatgggcgaacaaagggggcccctaactaccaacccagcgcttcttatgggaaggggggccctccggaatctaggggggcacgttctaccaaaaaccccccaagaccagggaagattcagtcatagcccagccccccgaaagcaataaccccgaactcaaaatagtcatacagaactggggcagtttacagagccacaaag

SEQ ID NO: 86601 - DNA, 930 bp, Zea mays
  Clone ID: MRT4577_178989C.1
ctcagtatggagtgcgttgatcctggtgttctgctctgttccatcaaaagtggcagctatccaagtaaggtagcaagagatggacgaaatggatttgttgatatcgctcacttgtatgctgatgaggagaaagacattttgctttcagtgaccattccaaaatcttgtgaacagacttcactgttaagagttgcttgtgcttacaaagatccggtgagcaatgagactatcaagattcaaggtgacgaggtgaagatcaagaggccagcatctactgtatctgtaccagtttctattgaagttgatcgagagaggaaccgtatacgagctaccaattctatggagtctgcatgggctgctgccgagagaggcgctctctcggaggccgtcaccattcttgaggactgccggagggcactatcacagtgtgttgcaagccagaatggggaccgtctatgcatggcccttgtcgcagagctacgagagatgcaggagaggatggcgaaccgccaactttacgaggcttcagggagggcgtatatgctatctggattgagctctcattcatggcagagagcaacagcacgcggagactctacagatagcaccactcttgttcattcatatcaaacgccgtccatggttcagatgctggagcattcccagaattttggctccctgcctcagggccgaaggccacaagtccagggagcgggatcagtcttagagaagcctagtaagggaaggtaactcaccatcatctcgccagtgtcatgtttggatgatggtgaaaggttaatcttagctttcattagtcttagcatgattgctggtggtttagcagtgcctatttattcttttgctgataggtttatttgagtcctagtgaggttagagcaactccaacagatccttaaattataactccca

SEQ ID NO: 86602 - DNA, 438 bp, Zea mays
  Clone ID: MRT4577_17898C.1
accgagggcagtggccctctgccgccgccggctgtctgcgtcacggggtccaccggctacgtcggctcctggctcgtccgcacgctgctgcggcgaggctaccgcgtccacgccaccgccagggacacagctctgatgccggcggcgttgcgcgcgcggtgcaccggtgccggtggtgttgcacgcacgcaggcaaggccttgcaggtgctcgccgtcgtggaagaagggagggaccggctcagggtgttcagggccgacatgggcgaggaagggagcttcgacgccgccgtcacgggatgcgtggcgctcttccacgtcgcggcctccatggacctccacgtatcacccgcccatcaggacaacctcgaggagcacgtgaggtcaagcatgctggagccggccacgaggggaaccatcaacgtgctgcggtcctgcg

SEQ ID NO: 86603 - DNA, 294 bp, Zea mays
  Clone ID: MRT4577_178990C.1
ctatggttatatgctgggggggggtgttatgacattttgtatataaccctttttccttccttcctgttgctgccacttgaagtttgcaacaccgtaagttttccacattattgacccagccaaaacaaaggggctaaaaaaaaatctcaaccccggggtgatacttttataacactactaccgaggggtgtgaacaggggggctatccaatgcatatgggggaaagagcgcgtgaaaaaaaaaaagcccagctcctgtgcagtgttgtgtgggatggggcgacacgctccaacc

SEQ ID NO: 86604 - DNA, 1083 bp, Zea mays
  Clone ID: MRT4577_178991C.1
ccgcccgggacgcttagagctcctccctcctctctcgacccgccagtggcgtgacacacacggctggctcgctgcccgccggcctttaagagcgcgctaggacagtaggacgcgaacgagtctgcggccagccagcaagcagtgcgagtacaggcatgggggctgccggcggacgcgcggttgcggtggcagccatggtggcggtggcggcggcgctgcctctgctcgcgtgtggcggttacgcggagtgctacgactactgcttcaaggactgcatctccaaggacaagtccatgagagactactgcagctacgcctgcgacaagacctgcgcgcccgacgcccggcggcggcgccccgcggtcgtccccatgaactgccagctcgcctgcgtcagggagtcctgccaccgtcgccgcgcggctgatggcgacgacgacacgaagacgaaggcctgctacgggcagtgctacgacgaccgcggctgcgagaccagtgccgccctgccgaggcctctgcgcgcaggcggcggtgctggcgttgtcgggcggccagggccagcggagtcaccggaccacccattccacgagaggcaggacgctcacggaccggcggcggcgtcgcccgaccatccattccacgtgaagcagaagcaggacgctctcggcccggcggcggcggcgtcgcctggccacccgttccacaagatgcacggcgcggtcaagccggcaggggagccggatccaggatacgtcgtgtatccggcatggggccccgccgtccactaatcgtcgttcgacggcgacgacgctccgccgccaacgacggcgagtgccacatgcctatgctctcgtgtgggccccgtacgttattgagcgctactagtactagggaaagtgtacgtgtgatgtgtgtcactcagtgtcgattgatcaatgatgctcattttcgagcagacccaggaatgctgagtgcagagagcagagcgttgttctacaagtgcaccgaggaataaagtggacagaaatgttggctggttcaaaaaaaaaaaaaaaaaaggggcggccaaaaactagtgagctc

SEQ ID NO: 86605 - DNA, 292 bp, Zea mays
  Clone ID: MRT4577_178992C.1
ggggggggggggggggggggggaagaaaagggataaaacaagatagagatatgtggagcgtaattccacattacagtagttatctagaatataagtcgcggaaccttaacatccttaaagaactagcgttcctaaacatgtcacgcaaaatgctcgataaccttgttacacgaaaggtaaagcgaaaaaacaaggcaataggtgatgctaagtatatcgcgctgctgctccggcgataggggatagataggttacagcgactgcgtataacttaagtagggttagctcattc

SEQ ID NO: 86606 - DNA, 733 bp, Zea mays
  Clone ID: MRT4577_178993C.1
cggttgcggtggcagccatggtggcggtggcggcggcgctgcctctgctcgcgtgtggcggttacgcggagtgctacgactactgcttcaaggactgcatctccaaggacaagtccatgagagactactgcagctacgcctgcgacaagacctgcgcgcccgacgcccgaccgcggctgcgagaccagtgccgccctgccgaggcctctgcgcgcaggcggcggtgctggcgttgtcgggcggccagggccagcggagtcaccggaccacccattccacgagaggcaggacgctcacggaccggcggcggcgtcgcccgaccatccattccacgtgaagcagaagcaggacgctctcggcccggcggcggcggcgtcgcctggccacccgttccacaagatgcacggcgcggtcaagccggcaggggagccggatccaggatacgtcgtgtatccggcatggggccccgccgtccactaatcgtcgttcgacggcgacgacgctccgccgccaacgacggcgagtgccacatgcctatgctctcgtgtgggccccgtacgttattgagcgctactagtactagggaaagtgtacgtgtgatgtgtgtcactcagtgtcgattgatcaatgatgctcattttcgagcagacccaggaatgctgagtgcagagagcagagcgttgttctagaaagtgaaccgaggaataaagtggacagaaatgttggctggttc

SEQ ID NO: 86607 - DNA, 430 bp, Zea mays
  Clone ID: MRT4577_178994C.1
atttttttttttttttttttggcaccgaggaaaaaccaccatttatatatgtacatacacagcttttactaaagtgtgacgagaagagatgattaaggattaaaagaaaagaaaagaaaatcgacctactcccataggtacataacatcttcagctttgcgaagctacaagggaaaaaaaaacttttgtcttgtaccgtcagaagggaatgctaagctcaagaagatgcttcgaatggtgtcctgaccaactgattcctacgggcgtttttttgattttgtttttttgcatctgatgactgaccgtgtagctgccgctcgcccctgggcaggaagccaagaaccggggcagcttctcgcgtgtcggtgggccttgctagtccttctcctccttgtcttctttcagggtcgtcatctgtcgtgccgaatcg

SEQ ID NO: 86608 - DNA, 574 bp, Zea mays
  Clone ID: MRT4577_178995C.1
ccttcgccagctcctttcgaagggggggcgagcttgtcacaacctttaagccgggggggtgcaagaaggggctctaacctgagatccatctttggaacgttcgttcttattctccctctgtccctccctttgtccatagcctatctgattggctatggaatggacatcgatggggggggggaattcccttcgttggtaaggaaccctaatttgaacagatgggatttccaacttcaacaaaaccttcgaggaagatcgatctgagttgacaccagggattgcaaaactaatttgcagatttagttaattttgtaggaaaattggtgttacaattgaaactccaatgctcaacgctatggacgaccctggcgacagatgacgaggatcatcacgcagatcttgacccacggctcctcctccagctcctgccgctcgtacacgcagtcagtgcagccggcagcacatgcccgagaggatgagttgccggtggaacctcaactacagcttccagcgctattggccatactatatacaattgataattcaaatgatggcatagagaatatcagcaata

SEQ ID NO: 86609 - DNA, 1050 bp, Zea mays
  Clone ID: MRT4577_178996C.1
actcctatgggcgattgggttcctcgaggccggccggccgcggcgtgacacacacggctggctcgctgcccgccggcttttaagagcgcgctaggacagtaggacgcgaacgagtctgcggcccgcagtgcgagtacaagtgagcggccagcagtgcgaggacaggcatggcggctgccggcggacgcgcggttgcggtggcagccatggtggcggtggcggcggcgctgcctctgctcgcgtgtggcggttacgcggagtgctacgactactgcttcaaggactgcatctccaaggacaagtccatgagagactactgcagctacgcctgcgacaagacctgcgcgcccgacgcccggcgccccgcggtcgtccccatgaactgccagctcgcctgcgtcagggagtcctgccaccgtcgccgcgcggctgatggcgacgacgacacgaagacgaaggcctgctacgggcagtgctacgacgaccgcggctgcgagaccagtgccgccctgccgaggcctctgcgcgcaggcggcgttgctggcgttgtcgggcggccagcggagtcaccggaccacccattccacgagaggcaggacgctcacggaccggcggcggcgtcgcccgaccatccattccacgtgaagcagaagcaggacgctctcggcccggcggcggcggcgtcgcctggccacccgttcccaagatgcacggcgcggtcaagccggcaggggagccggatccaggatacgtcgtgtatccggcatggggccccgccgtccactaatcgtcgcgttcgagggagacgacagctccgccgccacgacggcagcgccgtgccaacatgcctatgctctcgtgtgggccccgtacgttattgagcgctactagtactagggaaagtgtacgtgtgatgtgtgtcactcagtgtcgattgatcaatgatgctcattttcgagcagacccaggaatgctgagtgcagagagcagagcgttgttctacaagtgcaccgaggaatatagtggacagaaatgttggctggttcaaaa

SEQ ID NO: 86610 - DNA, 237 bp, Zea mays
  Clone ID: MRT4577_178997C.1
gtcttaccaacttgggcaattaatcgtgattgggttcaaatcaacttggacgattaatcacaattaatcggacgacttgaaaacagattcttgaatacagaggatagtgtcatctacatactgcaagatggccactccataatcaatatattctggcactaaaccttcaaacaacttttcttccgggctaaacacttggaatagcattgtattttttagctgtttttagtgccttat

SEQ ID NO: 86611 - DNA, 230 bp, Zea mays
  Clone ID: MRT4577_178998C.1
tttttttttttttttttcttttctaagggtgctggggaagaaagcaagttattcataaaccacaattaacttgagcaaatcgcttacaaaagataatcacataagtggagtcaacaagacaaaacggtatctgggaacgtacattaatttaacccagccgacttcaccatatttttttaccaaaagcaaacaactcctttttttcccccctacggtaagcgattaccatt

SEQ ID NO: 86612 - DNA, 903 bp, Zea mays
  Clone ID: MRT4577_178999C.1
tccgggagcccggcctacttcctgcttcctccagaatcggtcagccgcaatccttccaccccgtaccacgcctccccctaaccccaccaccaacaagcatgatttccccacgccccgcgctctcccccagcttcctcgccttccggtccggctccccggccgcgtcgccgccgtcctccccgcgcctccacgcgccgccgcccctctccgcctccttctccaccgtcgccaccgcggcaccgggccacgcagctgccagctccttctacgacgtcctcggcctccgccccggggccagcgcgcgggaaatcaaggccgcgtaccgccgcctggcgctcgccgtccacccggacgccgccccgcaccccacatcgtccgccgaggacttcatccgcgtccacgcggcctactccacgctctccgaccccgacaagcgcgccgactacgaccgccgcctcctcctttccggcgccacagtacggcgcaccgtcgctctaggacgctcgccctcgttcccagcgcaccgttcccgccggacatgggagactgaccagtgctggtgatatgtcagaaagatcttcgacttcgacgtctacgactggtgcggcctccgcagtctccgtcgggccgcagaaccttccaatgaatgggagcgcgaagatccccgcaaacctctggactcacacaaagcgtagcgcagccttgcatgcttcgttgcgggcttgcggcttgtaatgtaagaatgttaaaataaaggatgaattagatctatgtagtgatagatttagggtctaaagtgctaaactttagtattcaataacagtttagctccttaggtgagctaaatttatcctgcaaaagtttagcacatgagattcaaataaaaaaaaaaaaaaaaaaaaa

SEQ ID NO: 86613 - DNA, 420 bp, Zea mays
  Clone ID: MRT4577_17899C.1
gggctcgtgtccctcgttctgccaaccgtcgccgggccgttcctcacgacaagcatccctacgagcatccagctcctgctgtcacccatcacaggtgacccgaagctctactcggtgctggcctcagtgcacgccaggttcgggtgcgtcccgctggcgcacgtccaggacgtgtgtgacgcgcacgtcttactgatggaggcgccgcgcgccgaggggcggtacctgtgcgccgcgggtgggtacgcggtggcgcagctcgcgcggctcctcgcttcgcgctaccttccgttcagggccggtgacaggcacgtcgtctctgccatggctacgagtggtctcttcaggtgcgctttctgatcagctgtcgtgagcgtggtctctctgaccgccggcaatggcaaccctcgttgagcaggc

SEQ ID NO: 86614 - DNA, 258 bp, Zea mays
  Clone ID: MRT4577_1789C.1
cagaaactttttcttgcacatcctcaacgcgactagtgtatatgggacagttggggagcgaaggcttgaacccaaagagttcttaaactagctcttcataggcaaaagccaagaaccattagctcaacggttaactctaaccaaagtctttgagttctgaccaatggcttggggcctcaaccaaaatggaggcattcccaacttactttggtcgcgaagggtgactttggaaggaaagcgttcgttcaattagaccac

SEQ ID NO: 86615 - DNA, 246 bp, Zea mays
  Clone ID: MRT4577_178C.1
ataaaacaggaaagacactgggggtatatttttttttttggggaaaaagattgttacccccacccaacccccctttttgggggagttacatgcttttcacaacaattttcccacacccggaaggggggaaaaagaacctctttcagtttcccccgttttgccccacccacgggggttttatgccgtgtttccaccgtggttgggccaccccctcttggaaccggacatagagaccccaaacccttt

SEQ ID NO: 86616 - DNA, 724 bp, Zea mays
  Clone ID: MRT4577_179000C.1
ctcggcctccgccccggggccagggggggggggggcaggggggcgtaccgccgcctggcgctcgccgtccacccggacgccgccccgcaccccacatcgtccgccgaggacttcatccgcgtccacgcgggctactccacgctctccgatcccgacaagcgcgccgactacgaccgccgcctcctcctttccggcgccacagtacggcgcaccgtcgctctaggacgctcgccctcgttcccagcgcaccgttcccgccggacatgggagactgaccagtgctggtgatatgtgagaaagatcttcgacttcgacgtctacgactggtgcggtctccgcagtctccgtcgggccgcagaaccttccaatgaatgggaacgcgaagatccccgcaaacctctggactcacacaaagcgtagcgcagccttgcatgcttcgttgcgggcttgcggcctgtaatgtaagaatgttaaaatatatgatgatgtgtaacgtcctctgttttgggtcatggatgtgttgtatgtagtgttagatttagggtctaaagtgctaaactttagtattcaataacagtttagctccttaggtgagctaaatttatcctgcaaaagtttagcacatgagattcaaatagatacttgatatagacataattcatactacctctatctcaaactaaaatttccttttttggtaattaatagaatcatataatacttg

SEQ ID NO: 86617 - DNA, 271 bp, Zea mays
  Clone ID: MRT4577_179001C.1
gaaggcgaagacgctacccttcgctccaggccttcatcacctcgctgcaccaacggaggcaagatgactggcgcggctcacccttcgtcctcctcactgcaagacgaaggcctacgacgaagcctctccatcccacgtcctcacccaacctggaggcccacgtgggattcggcccattgtaacagaccccgcacggagaagcgtgttacatacccgatttgtaatagcttttctgtaatgatagtctataaccctcccctgtgggaatatt

SEQ ID NO: 86618 - DNA, 376 bp, Zea mays
  Clone ID: MRT4577_179002C.1
agtttttttttttttttttttttttttttttttcacacaggtatgggaagttcagtcaacagaactagtcgaatagcaagcagtacacatagcaactatggccacactataatggcaatcatacccctgaacaatagcatagctaggagattactggcgattcttctacttttacttctacttccatgtgttggttgttctaggcttctagcactcttcgtatccatcgttgttggcccagggcaccttcttgccgctgctgctccgcatcaccttctcgtcgacggccttcaccccggcctccgcagctgccgccgactcggcctgcacacgcgccatcttcctccctcgttttctcgccgcggccgccttctcc
